United States Patent Application Publication US 2008/0113351 A1 - sequence listing, part 14

SEQ ID NO: 328342 - DNA, 19 bp, Homo sapiens
  siRNA target sequence for SSFA2 (NM_006751.3,2418-2436).
cttccttcacctataagta

SEQ ID NO: 328343 - DNA, 19 bp, Homo sapiens
  siRNA target sequence for SSFA2 (NM_006751.3,2483-2501).
gatggtcagtctttagtta

SEQ ID NO: 328344 - DNA, 19 bp, Homo sapiens
  siRNA target sequence for SSFA2 (NM_006751.3,2486-2504).
ggtcagtctttagttaaat

SEQ ID NO: 328345 - DNA, 19 bp, Homo sapiens
  siRNA target sequence for SSFA2 (NM_006751.3,2489-2507).
cagtctttagttaaatcga

SEQ ID NO: 328346 - DNA, 19 bp, Homo sapiens
  siRNA target sequence for SSFA2 (NM_006751.3,2728-2746).
catatcaggggctacttgt

SEQ ID NO: 328347 - DNA, 19 bp, Homo sapiens
  siRNA target sequence for SSFA2 (NM_006751.3,2768-2786).
gggtgtccttactcacata

SEQ ID NO: 328348 - DNA, 19 bp, Homo sapiens
  siRNA target sequence for SSFA2 (NM_006751.3,2772-2790).
gtccttactcacatagaca

SEQ ID NO: 328349 - DNA, 19 bp, Homo sapiens
  siRNA target sequence for SSFA2 (NM_006751.3,2845-2863).
gcagttgcgaagagtatta

SEQ ID NO: 328350 - DNA, 19 bp, Homo sapiens
  siRNA target sequence for SSFA2 (NM_006751.3,2851-2869).
gcgaagagtattacatgat

SEQ ID NO: 328351 - DNA, 19 bp, Homo sapiens
  siRNA target sequence for SSFA2 (NM_006751.3,2852-2870).
cgaagagtattacatgata

SEQ ID NO: 328352 - DNA, 19 bp, Homo sapiens
  siRNA target sequence for SSFA2 (NM_006751.3,2853-2871).
gaagagtattacatgatat

SEQ ID NO: 328353 - DNA, 19 bp, Homo sapiens
  siRNA target sequence for SSFA2 (NM_006751.3,2927-2945).
gctgctgctccatatagta

SEQ ID NO: 328354 - DNA, 19 bp, Homo sapiens
  siRNA target sequence for SSFA2 (NM_006751.3,2960-2978).
gttctacctctttatgaaa

SEQ ID NO: 328355 - DNA, 19 bp, Homo sapiens
  siRNA target sequence for SSFA2 (NM_006751.3,3006-3024).
ggcggagcctgaatttgtt

SEQ ID NO: 328356 - DNA, 19 bp, Homo sapiens
  siRNA target sequence for SSFA2 (NM_006751.3,3007-3025).
gcggagcctgaatttgttt

SEQ ID NO: 328357 - DNA, 19 bp, Homo sapiens
  siRNA target sequence for SSFA2 (NM_006751.3,3030-3048).
cacaaatgatggatttaga

SEQ ID NO: 328358 - DNA, 19 bp, Homo sapiens
  siRNA target sequence for SSFA2 (NM_006751.3,3062-3080).
cgtcagcaaaccatggttt

SEQ ID NO: 328359 - DNA, 19 bp, Homo sapiens
  siRNA target sequence for SSFA2 (NM_006751.3,3063-3081).
gtcagcaaaccatggttta

SEQ ID NO: 328360 - DNA, 19 bp, Homo sapiens
  siRNA target sequence for SSFA2 (NM_006751.3,3119-3137).
cagctccagggtttgagaa

SEQ ID NO: 328361 - DNA, 19 bp, Homo sapiens
  siRNA target sequence for SSFA2 (NM_006751.3,3141-3159).
cagtccgaatggaacttca

SEQ ID NO: 328362 - DNA, 19 bp, Homo sapiens
  siRNA target sequence for SSFA2 (NM_006751.3,3267-3285).
gcagtagaagcgctgataa

SEQ ID NO: 328363 - DNA, 19 bp, Homo sapiens
  siRNA target sequence for SSFA2 (NM_006751.3,3294-3312).
gcccttctccattgaatgt

SEQ ID NO: 328364 - DNA, 19 bp, Homo sapiens
  siRNA target sequence for SSFA2 (NM_006751.3,3297-3315).
cttctccattgaatgtaat

SEQ ID NO: 328365 - DNA, 19 bp, Homo sapiens
  siRNA target sequence for SSFA2 (NM_006751.3,3465-3483).
ctggtccctctcatgctaa

SEQ ID NO: 328366 - DNA, 19 bp, Homo sapiens
  siRNA target sequence for SSFA2 (NM_006751.3,3801-3819).
ctattagctgtgtaatact

SEQ ID NO: 328367 - DNA, 19 bp, Homo sapiens
  siRNA target sequence for SSFA2 (NM_006751.3,3807-3825).
gctgtgtaatactggaatt

SEQ ID NO: 328368 - DNA, 19 bp, Homo sapiens
  siRNA target sequence for SSFA2 (NM_006751.3,3812-3830).
gtaatactggaattatcaa

SEQ ID NO: 328369 - DNA, 19 bp, Homo sapiens
  siRNA target sequence for SSFA2 (NM_006751.3,3818-3836).
ctggaattatcaatgatat

SEQ ID NO: 328370 - DNA, 19 bp, Homo sapiens
  siRNA target sequence for CACNA2D2 (NM_006030.1,426-444).
cggcgtgatgcggattttt

SEQ ID NO: 328371 - DNA, 19 bp, Homo sapiens
  siRNA target sequence for CACNA2D2 (NM_006030.1,429-447).
cgtgatgcggatttttgga

SEQ ID NO: 328372 - DNA, 19 bp, Homo sapiens
  siRNA target sequence for CACNA2D2 (NM_006030.1,535-553).
gtggcaggggacattgaga

SEQ ID NO: 328373 - DNA, 19 bp, Homo sapiens
  siRNA target sequence for CACNA2D2 (NM_006030.1,774-792).
gaacaaggtcaactattca

SEQ ID NO: 328374 - DNA, 19 bp, Homo sapiens
  siRNA target sequence for CACNA2D2 (NM_006030.1,791-809).
catacgcggctgtacagat

SEQ ID NO: 328375 - DNA, 19 bp, Homo sapiens
  siRNA target sequence for CACNA2D2 (NM_006030.1,810-828).
ccctacggacatctacaaa

SEQ ID NO: 328376 - DNA, 19 bp, Homo sapiens
  siRNA target sequence for CACNA2D2 (NM_006030.1,1009-1027).
cgaaggagaccctggtata

SEQ ID NO: 328377 - DNA, 19 bp, Homo sapiens
  siRNA target sequence for CACNA2D2 (NM_006030.1,1036-1054).
gcctcgtcacccaaagaca

SEQ ID NO: 328378 - DNA, 19 bp, Homo sapiens
  siRNA target sequence for CACNA2D2 (NM_006030.1,1037-1055).
cctcgtcacccaaagacat

SEQ ID NO: 328379 - DNA, 19 bp, Homo sapiens
  siRNA target sequence for CACNA2D2 (NM_006030.1,1139-1157).
cgctgtctgatgatgacta

SEQ ID NO: 328380 - DNA, 19 bp, Homo sapiens
  siRNA target sequence for CACNA2D2 (NM_006030.1,1222-1240).
gccaatgtgcgcaacaaga

SEQ ID NO: 328381 - DNA, 19 bp, Homo sapiens
  siRNA target sequence for CACNA2D2 (NM_006030.1,1223-1241).
ccaatgtgcgcaacaagaa

SEQ ID NO: 328382 - DNA, 19 bp, Homo sapiens
  siRNA target sequence for CACNA2D2 (NM_006030.1,1345-1363).
cgggccaactgcaacaaga

SEQ ID NO: 328383 - DNA, 19 bp, Homo sapiens
  siRNA target sequence for CACNA2D2 (NM_006030.1,1397-1415).
gcgtgcaggacgtctttga

SEQ ID NO: 328384 - DNA, 19 bp, Homo sapiens
  siRNA target sequence for CACNA2D2 (NM_006030.1,1399-1417).
gtgcaggacgtctttgaga

SEQ ID NO: 328385 - DNA, 19 bp, Homo sapiens
  siRNA target sequence for CACNA2D2 (NM_006030.1,1435-1453).
cggacggtgcgcgtgttta

SEQ ID NO: 328386 - DNA, 19 bp, Homo sapiens
  siRNA target sequence for CACNA2D2 (NM_006030.1,1437-1455).
gacggtgcgcgtgtttact

SEQ ID NO: 328387 - DNA, 19 bp, Homo sapiens
  siRNA target sequence for CACNA2D2 (NM_006030.1,1439-1457).
cggtgcgcgtgtttacttt

SEQ ID NO: 328388 - DNA, 19 bp, Homo sapiens
  siRNA target sequence for CACNA2D2 (NM_006030.1,1441-1459).
gtgcgcgtgtttactttct

SEQ ID NO: 328389 - DNA, 19 bp, Homo sapiens
  siRNA target sequence for CACNA2D2 (NM_006030.1,1460-1478).
ccgtggggcagcataacta

SEQ ID NO: 328390 - DNA, 19 bp, Homo sapiens
  siRNA target sequence for CACNA2D2 (NM_006030.1,1461-1479).
cgtggggcagcataactat

SEQ ID NO: 328391 - DNA, 19 bp, Homo sapiens
  siRNA target sequence for CACNA2D2 (NM_006030.1,1510-1528).
gccaacaaaggctactatt

SEQ ID NO: 328392 - DNA, 19 bp, Homo sapiens
  siRNA target sequence for CACNA2D2 (NM_006030.1,1563-1581).
cacacaggaatatctagat

SEQ ID NO: 328393 - DNA, 19 bp, Homo sapiens
  siRNA target sequence for CACNA2D2 (NM_006030.1,1758-1776).
cattgacgtggctctgaat

SEQ ID NO: 328394 - DNA, 19 bp, Homo sapiens
  siRNA target sequence for CACNA2D2 (NM_006030.1,1762-1780).
gacgtggctctgaatgaca

SEQ ID NO: 328395 - DNA, 19 bp, Homo sapiens
  siRNA target sequence for CACNA2D2 (NM_006030.1,1810-1828).
ggagccaacggctatgtgt

SEQ ID NO: 328396 - DNA, 19 bp, Homo sapiens
  siRNA target sequence for CACNA2D2 (NM_006030.1,1953-1971).
gatccgtcggagcatgatt

SEQ ID NO: 328397 - DNA, 19 bp, Homo sapiens
  siRNA target sequence for CACNA2D2 (NM_006030.1,1956-1974).
ccgtcggagcatgattgat

SEQ ID NO: 328398 - DNA, 19 bp, Homo sapiens
  siRNA target sequence for CACNA2D2 (NM_006030.1,2016-2034).
cctggatgagaggtacata

SEQ ID NO: 328399 - DNA, 19 bp, Homo sapiens
  siRNA target sequence for CACNA2D2 (NM_006030.1,2038-2056).
gaggtgacacggaactaca

SEQ ID NO: 328400 - DNA, 19 bp, Homo sapiens
  siRNA target sequence for CACNA2D2 (NM_006030.1,2066-2084).
ctataaggagcactaacta

SEQ ID NO: 328401 - DNA, 19 bp, Homo sapiens
  siRNA target sequence for CACNA2D2 (NM_006030.1,2315-2333).
ccaagcagtgcaacaactt

SEQ ID NO: 328402 - DNA, 19 bp, Homo sapiens
  siRNA target sequence for CACNA2D2 (NM_006030.1,2542-2560).
gataaccacggttatgtct

SEQ ID NO: 328403 - DNA, 19 bp, Homo sapiens
  siRNA target sequence for CACNA2D2 (NM_006030.1,2572-2590).
caccaggatgccctgttaa

SEQ ID NO: 328404 - DNA, 19 bp, Homo sapiens
  siRNA target sequence for CACNA2D2 (NM_006030.1,2796-2814).
ggactgcgaggttaacaat

SEQ ID NO: 328405 - DNA, 19 bp, Homo sapiens
  siRNA target sequence for CACNA2D2 (NM_006030.1,2826-2844).
ctgtgtcctcattgatgat

SEQ ID NO: 328406 - DNA, 19 bp, Homo sapiens
  siRNA target sequence for CACNA2D2 (NM_006030.1,2849-2867).
gattcctggtgctgtcaaa

SEQ ID NO: 328407 - DNA, 19 bp, Homo sapiens
  siRNA target sequence for CACNA2D2 (NM_006030.1,2887-2905).
caggtgggcaggttcttca

SEQ ID NO: 328408 - DNA, 19 bp, Homo sapiens
  siRNA target sequence for CACNA2D2 (NM_006030.1,2925-2943).
gatgctggcactctacaat

SEQ ID NO: 328409 - DNA, 19 bp, Homo sapiens
  siRNA target sequence for CACNA2D2 (NM_006030.1,2959-2977).
cgcaaggagtcctatgact

SEQ ID NO: 328410 - DNA, 19 bp, Homo sapiens
  siRNA target sequence for CACNA2D2 (NM_006030.1,2960-2978).
gcaaggagtcctatgacta

SEQ ID NO: 328411 - DNA, 19 bp, Homo sapiens
  siRNA target sequence for CACNA2D2 (NM_006030.1,2961-2979).
caaggagtcctatgactat

SEQ ID NO: 328412 - DNA, 19 bp, Homo sapiens
  siRNA target sequence for CACNA2D2 (NM_006030.1,3044-3062).
ccaccgttgcagatttcct

SEQ ID NO: 328413 - DNA, 19 bp, Homo sapiens
  siRNA target sequence for CACNA2D2 (NM_006030.1,3465-3483).
ctacaacgcgacagaagat

SEQ ID NO: 328414 - DNA, 19 bp, Homo sapiens
  siRNA target sequence for CACNA2D3 (NM_018398.1,276-294).
gcacacctgaaacatgaat

SEQ ID NO: 328415 - DNA, 19 bp, Homo sapiens
  siRNA target sequence for CACNA2D3 (NM_018398.1,277-295).
cacacctgaaacatgaatt

SEQ ID NO: 328416 - DNA, 19 bp, Homo sapiens
  siRNA target sequence for CACNA2D3 (NM_018398.1,300-318).
gcagacttacagtatgaat

SEQ ID NO: 328417 - DNA, 19 bp, Homo sapiens
  siRNA target sequence for CACNA2D3 (NM_018398.1,301-319).
cagacttacagtatgaata

SEQ ID NO: 328418 - DNA, 19 bp, Homo sapiens
  siRNA target sequence for CACNA2D3 (NM_018398.1,323-341).
caatgctgtgctgataaat

SEQ ID NO: 328419 - DNA, 19 bp, Homo sapiens
  siRNA target sequence for CACNA2D3 (NM_018398.1,347-365).
ggacaaagacgggaatttt

SEQ ID NO: 328420 - DNA, 19 bp, Homo sapiens
  siRNA target sequence for CACNA2D3 (NM_018398.1,374-392).
gggaaaggaattcatctta

SEQ ID NO: 328421 - DNA, 19 bp, Homo sapiens
  siRNA target sequence for CACNA2D3 (NM_018398.1,447-465).
caagtaccaacgaacatgt

SEQ ID NO: 328422 - DNA, 19 bp, Homo sapiens
  siRNA target sequence for CACNA2D3 (NM_018398.1,450-468).
gtaccaacgaacatgtaca

SEQ ID NO: 328423 - DNA, 19 bp, Homo sapiens
  siRNA target sequence for CACNA2D3 (NM_018398.1,454-472).
caacgaacatgtacaacaa

SEQ ID NO: 328424 - DNA, 19 bp, Homo sapiens
  siRNA target sequence for CACNA2D3 (NM_018398.1,486-504).
gtcaatggggtttattggt

SEQ ID NO: 328425 - DNA, 19 bp, Homo sapiens
  siRNA target sequence for CACNA2D3 (NM_018398.1,492-510).
ggggtttattggtctgaat

SEQ ID NO: 328426 - DNA, 19 bp, Homo sapiens
  siRNA target sequence for CACNA2D3 (NM_018398.1,502-520).
ggtctgaatctctaaacaa

SEQ ID NO: 328427 - DNA, 19 bp, Homo sapiens
  siRNA target sequence for CACNA2D3 (NM_018398.1,503-521).
gtctgaatctctaaacaaa

SEQ ID NO: 328428 - DNA, 19 bp, Homo sapiens
  siRNA target sequence for CACNA2D3 (NM_018398.1,542-560).
ccgtgacccatctctcata

SEQ ID NO: 328429 - DNA, 19 bp, Homo sapiens
  siRNA target sequence for CACNA2D3 (NM_018398.1,553-571).
ctctcatatggcagtactt

SEQ ID NO: 328430 - DNA, 19 bp, Homo sapiens
  siRNA target sequence for CACNA2D3 (NM_018398.1,597-615).
cagtatccggggattaaat

SEQ ID NO: 328431 - DNA, 19 bp, Homo sapiens
  siRNA target sequence for CACNA2D3 (NM_018398.1,671-689).
catccaggcagcaacttct

SEQ ID NO: 328432 - DNA, 19 bp, Homo sapiens
  siRNA target sequence for CACNA2D3 (NM_018398.1,691-709).
cgaaagacgtggtcatttt

SEQ ID NO: 328433 - DNA, 19 bp, Homo sapiens
  siRNA target sequence for CACNA2D3 (NM_018398.1,692-710).
gaaagacgtggtcatttta

SEQ ID NO: 328434 - DNA, 19 bp, Homo sapiens
  siRNA target sequence for CACNA2D3 (NM_018398.1,765-783).
gtctcatccattttggata

SEQ ID NO: 328435 - DNA, 19 bp, Homo sapiens
  siRNA target sequence for CACNA2D3 (NM_018398.1,769-787).
catccattttggatacact

SEQ ID NO: 328436 - DNA, 19 bp, Homo sapiens
  siRNA target sequence for CACNA2D3 (NM_018398.1,784-802).
cacttggggatgatgactt

SEQ ID NO: 328437 - DNA, 19 bp, Homo sapiens
  siRNA target sequence for CACNA2D3 (NM_018398.1,847-865).
cttgcctgaatggaacttt

SEQ ID NO: 328438 - DNA, 19 bp, Homo sapiens
  siRNA target sequence for CACNA2D3 (NM_018398.1,941-959).
gttggatatagctctgaat

SEQ ID NO: 328439 - DNA, 19 bp, Homo sapiens
  siRNA target sequence for CACNA2D3 (NM_018398.1,1019-1037).
ggccatcatgctcataact

SEQ ID NO: 328440 - DNA, 19 bp, Homo sapiens
  siRNA target sequence for CACNA2D3 (NM_018398.1,1021-1039).
ccatcatgctcataactga

SEQ ID NO: 328441 - DNA, 19 bp, Homo sapiens
  siRNA target sequence for CACNA2D3 (NM_018398.1,1044-1062).
gcggtggacacctatgata

SEQ ID NO: 328442 - DNA, 19 bp, Homo sapiens
  siRNA target sequence for CACNA2D3 (NM_018398.1,1046-1064).
ggtggacacctatgataca

SEQ ID NO: 328443 - DNA, 19 bp, Homo sapiens
  siRNA target sequence for CACNA2D3 (NM_018398.1,1052-1070).
cacctatgatacaatcttt

SEQ ID NO: 328444 - DNA, 19 bp, Homo sapiens
  siRNA target sequence for CACNA2D3 (NM_018398.1,1092-1110).
cgaaaggttcgcatcttca

SEQ ID NO: 328445 - DNA, 19 bp, Homo sapiens
  siRNA target sequence for CACNA2D3 (NM_018398.1,1132-1150).
ctgcgtttgcagacaatct

SEQ ID NO: 328446 - DNA, 19 bp, Homo sapiens
  siRNA target sequence for CACNA2D3 (NM_018398.1,1134-1152).
gcgtttgcagacaatctaa

SEQ ID NO: 328447 - DNA, 19 bp, Homo sapiens
  siRNA target sequence for CACNA2D3 (NM_018398.1,1135-1153).
cgtttgcagacaatctaaa

SEQ ID NO: 328448 - DNA, 19 bp, Homo sapiens
  siRNA target sequence for CACNA2D3 (NM_018398.1,1217-1235).
gaatgtcatggaatacctt

SEQ ID NO: 328449 - DNA, 19 bp, Homo sapiens
  siRNA target sequence for CACNA2D3 (NM_018398.1,1368-1386).
gccatgcctgtgtttagta

SEQ ID NO: 328450 - DNA, 19 bp, Homo sapiens
  siRNA target sequence for CACNA2D3 (NM_018398.1,1369-1387).
ccatgcctgtgtttagtaa

SEQ ID NO: 328451 - DNA, 19 bp, Homo sapiens
  siRNA target sequence for CACNA2D3 (NM_018398.1,1400-1418).
cagatcgaagggcattctt

SEQ ID NO: 328452 - DNA, 19 bp, Homo sapiens
  siRNA target sequence for CACNA2D3 (NM_018398.1,1491-1509).
cacggttatgcctttgcaa

SEQ ID NO: 328453 - DNA, 19 bp, Homo sapiens
  siRNA target sequence for CACNA2D3 (NM_018398.1,1506-1524).
gcaatcacaaataatggat

SEQ ID NO: 328454 - DNA, 19 bp, Homo sapiens
  siRNA target sequence for CACNA2D3 (NM_018398.1,1575-1593).
cgaaggaaacctaactata

SEQ ID NO: 328455 - DNA, 19 bp, Homo sapiens
  siRNA target sequence for CACNA2D3 (NM_018398.1,1629-1647).
cgagatgacgtgttgagaa

SEQ ID NO: 328456 - DNA, 19 bp, Homo sapiens
  siRNA target sequence for CACNA2D3 (NM_018398.1,1630-1648).
gagatgacgtgttgagaaa

SEQ ID NO: 328457 - DNA, 19 bp, Homo sapiens
  siRNA target sequence for CACNA2D3 (NM_018398.1,1635-1653).
gacgtgttgagaaatgcta

SEQ ID NO: 328458 - DNA, 19 bp, Homo sapiens
  siRNA target sequence for CACNA2D3 (NM_018398.1,1716-1734).
cgggttttggtgatgacaa

SEQ ID NO: 328459 - DNA, 19 bp, Homo sapiens
  siRNA target sequence for CACNA2D3 (NM_018398.1,1727-1745).
gatgacaaatgactactat

SEQ ID NO: 328460 - DNA, 19 bp, Homo sapiens
  siRNA target sequence for CACNA2D3 (NM_018398.1,1730-1748).
gacaaatgactactattat

SEQ ID NO: 328461 - DNA, 19 bp, Homo sapiens
  siRNA target sequence for CACNA2D3 (NM_018398.1,1757-1775).
caagggtactcctttcagt

SEQ ID NO: 328462 - DNA, 19 bp, Homo sapiens
  siRNA target sequence for CACNA2D3 (NM_018398.1,1760-1778).
gggtactcctttcagttta

SEQ ID NO: 328463 - DNA, 19 bp, Homo sapiens
  siRNA target sequence for CACNA2D3 (NM_018398.1,1843-1861).
gcctgcatgacttagaaca

SEQ ID NO: 328464 - DNA, 19 bp, Homo sapiens
  siRNA target sequence for CACNA2D3 (NM_018398.1,1869-1887).
gtgtccttggcagatgaat

SEQ ID NO: 328465 - DNA, 19 bp, Homo sapiens
  siRNA target sequence for CACNA2D3 (NM_018398.1,1922-1940).
ccgccatctgtctcagtta

SEQ ID NO: 328466 - DNA, 19 bp, Homo sapiens
  siRNA target sequence for CACNA2D3 (NM_018398.1,1924-1942).
gccatctgtctcagttaga

SEQ ID NO: 328467 - DNA, 19 bp, Homo sapiens
  siRNA target sequence for CACNA2D3 (NM_018398.1,1925-1943).
ccatctgtctcagttagaa

SEQ ID NO: 328468 - DNA, 19 bp, Homo sapiens
  siRNA target sequence for CACNA2D3 (NM_018398.1,1933-1951).
ctcagttagaagcgattaa

SEQ ID NO: 328469 - DNA, 19 bp, Homo sapiens
  siRNA target sequence for CACNA2D3 (NM_018398.1,1944-1962).
gcgattaagctctacctaa

SEQ ID NO: 328470 - DNA, 19 bp, Homo sapiens
  siRNA target sequence for CACNA2D3 (NM_018398.1,1945-1963).
cgattaagctctacctaaa

SEQ ID NO: 328471 - DNA, 19 bp, Homo sapiens
  siRNA target sequence for CACNA2D3 (NM_018398.1,1946-1964).
gattaagctctacctaaaa

SEQ ID NO: 328472 - DNA, 19 bp, Homo sapiens
  siRNA target sequence for CACNA2D3 (NM_018398.1,2027-2045).
ggtgagtgcccccattgaa

SEQ ID NO: 328473 - DNA, 19 bp, Homo sapiens
  siRNA target sequence for CACNA2D3 (NM_018398.1,2064-2082).
gccctcaacaaatctgaaa

SEQ ID NO: 328474 - DNA, 19 bp, Homo sapiens
  siRNA target sequence for CACNA2D3 (NM_018398.1,2065-2083).
ccctcaacaaatctgaaaa

SEQ ID NO: 328475 - DNA, 19 bp, Homo sapiens
  siRNA target sequence for CACNA2D3 (NM_018398.1,2125-2143).
cgggcctctccagaatcaa

SEQ ID NO: 328476 - DNA, 19 bp, Homo sapiens
  siRNA target sequence for CACNA2D3 (NM_018398.1,2291-2309).
cagcactggaccagtcaat

SEQ ID NO: 328477 - DNA, 19 bp, Homo sapiens
  siRNA target sequence for CACNA2D3 (NM_018398.1,2298-2316).
ggaccagtcaataaaagca

SEQ ID NO: 328478 - DNA, 19 bp, Homo sapiens
  siRNA target sequence for CACNA2D3 (NM_018398.1,2348-2366).
cctggatgaacggaaatct

SEQ ID NO: 328479 - DNA, 19 bp, Homo sapiens
  siRNA target sequence for CACNA2D3 (NM_018398.1,2497-2515).
gttacctcatagacaataa

SEQ ID NO: 328480 - DNA, 19 bp, Homo sapiens
  siRNA target sequence for CACNA2D3 (NM_018398.1,2502-2520).
ctcatagacaataatggat

SEQ ID NO: 328481 - DNA, 19 bp, Homo sapiens
  siRNA target sequence for CACNA2D3 (NM_018398.1,2577-2595).
ggagctgtgatgaacaaat

SEQ ID NO: 328482 - DNA, 19 bp, Homo sapiens
  siRNA target sequence for CACNA2D3 (NM_018398.1,2606-2624).
gggctcctttaaaagaatt

SEQ ID NO: 328483 - DNA, 19 bp, Homo sapiens
  siRNA target sequence for CACNA2D3 (NM_018398.1,2685-2703).
ggcctcctggatccttata

SEQ ID NO: 328484 - DNA, 19 bp, Homo sapiens
  siRNA target sequence for CACNA2D3 (NM_018398.1,2687-2705).
cctcctggatccttataat

SEQ ID NO: 328485 - DNA, 19 bp, Homo sapiens
  siRNA target sequence for CACNA2D3 (NM_018398.1,2718-2736).
gcagtaaaatggatcatga

SEQ ID NO: 328486 - DNA, 19 bp, Homo sapiens
  siRNA target sequence for CACNA2D3 (NM_018398.1,2780-2798).
gtggcactccgatatgaca

SEQ ID NO: 328487 - DNA, 19 bp, Homo sapiens
  siRNA target sequence for CACNA2D3 (NM_018398.1,2786-2804).
ctccgatatgacagctaaa

SEQ ID NO: 328488 - DNA, 19 bp, Homo sapiens
  siRNA target sequence for CACNA2D3 (NM_018398.1,2797-2815).
cagctaaagcccagaaatt

SEQ ID NO: 328489 - DNA, 19 bp, Homo sapiens
  siRNA target sequence for CACNA2D3 (NM_018398.1,2799-2817).
gctaaagcccagaaattga

SEQ ID NO: 328490 - DNA, 19 bp, Homo sapiens
  siRNA target sequence for CACNA2D3 (NM_018398.1,2829-2847).
gagccttgtgatactgaat

SEQ ID NO: 328491 - DNA, 19 bp, Homo sapiens
  siRNA target sequence for CACNA2D3 (NM_018398.1,2831-2849).
gccttgtgatactgaatat

SEQ ID NO: 328492 - DNA, 19 bp, Homo sapiens
  siRNA target sequence for CACNA2D3 (NM_018398.1,2975-2993).
cagctgcctctgtgaatct

SEQ ID NO: 328493 - DNA, 19 bp, Homo sapiens
  siRNA target sequence for CACNA2D3 (NM_018398.1,3007-3025).
ccatggcacccattgaaat

SEQ ID NO: 328494 - DNA, 19 bp, Homo sapiens
  siRNA target sequence for CACNA2D3 (NM_018398.1,3017-3035).
cattgaaatcaggtataat

SEQ ID NO: 328495 - DNA, 19 bp, Homo sapiens
  siRNA target sequence for CACNA2D3 (NM_018398.1,3055-3073).
gtctaaaggcccagaagat

SEQ ID NO: 328496 - DNA, 19 bp, Homo sapiens
  siRNA target sequence for CACNA2D3 (NM_018398.1,3183-3201).
cttttgatgctcttctcaa

SEQ ID NO: 328497 - DNA, 19 bp, Homo sapiens
  siRNA target sequence for CACNA2D4 (NM_172364.2,430-448).
gtggggacaggccaagatt

SEQ ID NO: 328498 - DNA, 19 bp, Homo sapiens
  siRNA target sequence for CACNA2D4 (NM_172364.2,452-470).
ctggaaacagtgaagctat

SEQ ID NO: 328499 - DNA, 19 bp, Homo sapiens
  siRNA target sequence for CACNA2D4 (NM_172364.2,684-702).
ccgacctgaaccacgaatt

SEQ ID NO: 328500 - DNA, 19 bp, Homo sapiens
  siRNA target sequence for CACNA2D4 (NM_172364.2,686-704).
gacctgaaccacgaattca

SEQ ID NO: 328501 - DNA, 19 bp, Homo sapiens
  siRNA target sequence for CACNA2D4 (NM_172364.2,711-729).
ccctggtgttcgactatta

SEQ ID NO: 328502 - DNA, 19 bp, Homo sapiens
  siRNA target sequence for CACNA2D4 (NM_172364.2,713-731).
ctggtgttcgactattaca

SEQ ID NO: 328503 - DNA, 19 bp, Homo sapiens
  siRNA target sequence for CACNA2D4 (NM_172364.2,716-734).
gtgttcgactattacaact

SEQ ID NO: 328504 - DNA, 19 bp, Homo sapiens
  siRNA target sequence for CACNA2D4 (NM_172364.2,860-878).
cccaccaacgtgtacaaca

SEQ ID NO: 328505 - DNA, 19 bp, Homo sapiens
  siRNA target sequence for CACNA2D4 (NM_172364.2,960-978).
cgttgacctggcaatattt

SEQ ID NO: 328506 - DNA, 19 bp, Homo sapiens
  siRNA target sequence for CACNA2D4 (NM_172364.2,961-979).
gttgacctggcaatatttt

SEQ ID NO: 328507 - DNA, 19 bp, Homo sapiens
  siRNA target sequence for CACNA2D4 (NM_172364.2,1000-1018).
caggatctatccaggtata

SEQ ID NO: 328508 - DNA, 19 bp, Homo sapiens
  siRNA target sequence for CACNA2D4 (NM_172364.2,1002-1020).
ggatctatccaggtataaa

SEQ ID NO: 328509 - DNA, 19 bp, Homo sapiens
  siRNA target sequence for CACNA2D4 (NM_172364.2,1003-1021).
gatctatccaggtataaaa

SEQ ID NO: 328510 - DNA, 19 bp, Homo sapiens
  siRNA target sequence for CACNA2D4 (NM_172364.2,1121-1139).
gacgtgagcggcagtatga

SEQ ID NO: 328511 - DNA, 19 bp, Homo sapiens
  siRNA target sequence for CACNA2D4 (NM_172364.2,1246-1264).
catcgagccttgttttaaa

SEQ ID NO: 328512 - DNA, 19 bp, Homo sapiens
  siRNA target sequence for CACNA2D4 (NM_172364.2,1276-1294).
ccaggcggaccgagacaat

SEQ ID NO: 328513 - DNA, 19 bp, Homo sapiens
  siRNA target sequence for CACNA2D4 (NM_172364.2,1287-1305).
gagacaatcgagagcattt

SEQ ID NO: 328514 - DNA, 19 bp, Homo sapiens
  siRNA target sequence for CACNA2D4 (NM_172364.2,1291-1309).
caatcgagagcatttcaaa

SEQ ID NO: 328515 - DNA, 19 bp, Homo sapiens
  siRNA target sequence for CACNA2D4 (NM_172364.2,1553-1571).
cgcatgaagtggattgcat

SEQ ID NO: 328516 - DNA, 19 bp, Homo sapiens
  siRNA target sequence for CACNA2D4 (NM_172364.2,1563-1581).
ggattgcatgcaacaacaa

SEQ ID NO: 328517 - DNA, 19 bp, Homo sapiens
  siRNA target sequence for CACNA2D4 (NM_172364.2,1564-1582).
gattgcatgcaacaacaaa

SEQ ID NO: 328518 - DNA, 19 bp, Homo sapiens
  siRNA target sequence for CACNA2D4 (NM_172364.2,2087-2105).
gtgaaggttccgatggata

SEQ ID NO: 328519 - DNA, 19 bp, Homo sapiens
  siRNA target sequence for CACNA2D4 (NM_172364.2,2089-2107).
gaaggttccgatggataaa

SEQ ID NO: 328520 - DNA, 19 bp, Homo sapiens
  siRNA target sequence for CACNA2D4 (NM_172364.2,2157-2175).
gcgacacccctttcagttt

SEQ ID NO: 328521 - DNA, 19 bp, Homo sapiens
  siRNA target sequence for CACNA2D4 (NM_172364.2,2276-2294).
gccggtgactggatctact

SEQ ID NO: 328522 - DNA, 19 bp, Homo sapiens
  siRNA target sequence for CACNA2D4 (NM_172364.2,2290-2308).
ctactgcatcacagatatt

SEQ ID NO: 328523 - DNA, 19 bp, Homo sapiens
  siRNA target sequence for CACNA2D4 (NM_172364.2,2661-2679).
ctggcagcttcgtcttcaa

SEQ ID NO: 328524 - DNA, 19 bp, Homo sapiens
  siRNA target sequence for CACNA2D4 (NM_172364.2,2901-2919).
gcttcgtcatcgacaacaa

SEQ ID NO: 328525 - DNA, 19 bp, Homo sapiens
  siRNA target sequence for CACNA2D4 (NM_172364.2,2911-2929).
cgacaacaacgggttcatt

SEQ ID NO: 328526 - DNA, 19 bp, Homo sapiens
  siRNA target sequence for CACNA2D4 (NM_172364.2,2946-2964).
cccgagagacgggaagatt

SEQ ID NO: 328527 - DNA, 19 bp, Homo sapiens
  siRNA target sequence for CACNA2D4 (NM_172364.2,2947-2965).
ccgagagacgggaagattt

SEQ ID NO: 328528 - DNA, 19 bp, Homo sapiens
  siRNA target sequence for CACNA2D4 (NM_172364.2,3019-3037).
cagccaagtgactatgtat

SEQ ID NO: 328529 - DNA, 19 bp, Homo sapiens
  siRNA target sequence for CACNA2D4 (NM_172364.2,3021-3039).
gccaagtgactatgtatga

SEQ ID NO: 328530 - DNA, 19 bp, Homo sapiens
  siRNA target sequence for CACNA2D4 (NM_172364.2,3089-3107).
cccctggtcagcccaattt

SEQ ID NO: 328531 - DNA, 19 bp, Homo sapiens
  siRNA target sequence for CACNA2D4 (NM_172364.2,3336-3354).
cctgccagaaggtatttgt

SEQ ID NO: 328532 - DNA, 19 bp, Homo sapiens
  siRNA target sequence for CACNA2D4 (NM_172364.2,3443-3461).
gcgacagaagtcaaatata

SEQ ID NO: 328533 - DNA, 19 bp, Homo sapiens
  siRNA target sequence for CKLFSF1 (NM_052999.2,119-137).
gccaaagtcccgtacaaat

SEQ ID NO: 328534 - DNA, 19 bp, Homo sapiens
  siRNA target sequence for CKLFSF1 (NM_052999.2,120-138).
ccaaagtcccgtacaaatt

SEQ ID NO: 328535 - DNA, 19 bp, Homo sapiens
  siRNA target sequence for CKLFSF1 (NM_052999.2,193-211).
gagactgagtcttatctta

SEQ ID NO: 328536 - DNA, 19 bp, Homo sapiens
  siRNA target sequence for CKLFSF1 (NM_052999.2,212-230).
ggagcattagcttgtttca

SEQ ID NO: 328537 - DNA, 19 bp, Homo sapiens
  siRNA target sequence for CKLFSF1 (NM_052999.2,213-231).
gagcattagcttgtttcat

SEQ ID NO: 328538 - DNA, 19 bp, Homo sapiens
  siRNA target sequence for CKLFSF1 (NM_052999.2,215-233).
gcattagcttgtttcatca

SEQ ID NO: 328539 - DNA, 19 bp, Homo sapiens
  siRNA target sequence for CKLFSF1 (NM_052999.2,238-256).
ccaagccaatgagtcattt

SEQ ID NO: 328540 - DNA, 19 bp, Homo sapiens
  siRNA target sequence for CKLFSF1 (NM_052999.2,239-257).
caagccaatgagtcattta

SEQ ID NO: 328541 - DNA, 19 bp, Homo sapiens
  siRNA target sequence for CKLFSF1 (NM_052999.2,242-260).
gccaatgagtcatttataa

SEQ ID NO: 328542 - DNA, 19 bp, Homo sapiens
  siRNA target sequence for CKLFSF1 (NM_052999.2,261-279).
caatcacaagtctggaaat

SEQ ID NO: 328543 - DNA, 19 bp, Homo sapiens
  siRNA target sequence for CKLFSF1 (NM_052999.2,323-341).
caccacttgctgacctatt

SEQ ID NO: 328544 - DNA, 19 bp, Homo sapiens
  siRNA target sequence for CKLFSF1 (NM_052999.2,325-343).
ccacttgctgacctattta

SEQ ID NO: 328545 - DNA, 19 bp, Homo sapiens
  siRNA target sequence for CKLFSF1 (NM_052999.2,328-346).
cttgctgacctatttacat

SEQ ID NO: 328546 - DNA, 19 bp, Homo sapiens
  siRNA target sequence for CKLFSF1 (NM_052999.2,362-380).
cttaccaacagtatcatta

SEQ ID NO: 328547 - DNA, 19 bp, Homo sapiens
  siRNA target sequence for CKLFSF1 (NM_052999.2,432-450).
gaaggcatttactctatgt

SEQ ID NO: 328548 - DNA, 19 bp, Homo sapiens
  siRNA target sequence for CKLFSF1 (NM_052999.2,465-483).
gtctcacagcggtaatcgt

SEQ ID NO: 328549 - DNA, 19 bp, Homo sapiens
  siRNA target sequence for CKLFSF1 (NM_052999.2,503-521).
gtggtcaccacgaagatga

SEQ ID NO: 328550 - DNA, 19 bp, Homo sapiens
  siRNA target sequence for CKLFSF1 (NM_052999.2,520-538).
gaggaccaacttgaaaaga

SEQ ID NO: 328551 - DNA, 19 bp, Homo sapiens
  siRNA target sequence for CKLFSF1 (NM_052999.2,541-559).
cctgggagtcgaagttgaa

SEQ ID NO: 328552 - DNA, 19 bp, Homo sapiens
  siRNA target sequence for CKLFSF1 (NM_052999.2,546-564).
gagtcgaagttgaaaggaa

SEQ ID NO: 328553 - DNA, 19 bp, Homo sapiens
  siRNA target sequence for CKLFSF1 (NM_181269.1,192-210).
ccgcagccctgagtcttat

SEQ ID NO: 328554 - DNA, 19 bp, Homo sapiens
  siRNA target sequence for CKLFSF1 (NM_181271.1,207-225).
gtagcggcagcgtagatct

SEQ ID NO: 328555 - DNA, 19 bp, Homo sapiens
  siRNA target sequence for CKLFSF1 (NM_181272.1,195-213).
cagccctggatcttaccaa

SEQ ID NO: 328556 - DNA, 19 bp, Homo sapiens
  siRNA target sequence for CKLFSF1 (NM_181285.1,346-364).
cgcaccctcaaggatctta

SEQ ID NO: 328557 - DNA, 19 bp, Homo sapiens
  siRNA target sequence for CKLFSF1 (NM_181285.1,350-368).
ccctcaaggatcttaccaa

SEQ ID NO: 328558 - DNA, 19 bp, Homo sapiens
  siRNA target sequence for CKLFSF1 (NM_181290.1,215-233).
gcaaatatgagcaacttta

SEQ ID NO: 328559 - DNA, 19 bp, Homo sapiens
  siRNA target sequence for CKLFSF1 (NM_181292.1,128-146).
cctgaacacgccaagctaa

SEQ ID NO: 328560 - DNA, 19 bp, Homo sapiens
  siRNA target sequence for CKLFSF2 (NM_144673.2,367-385).
ccgctaccggtgggaatta

SEQ ID NO: 328561 - DNA, 19 bp, Homo sapiens
  siRNA target sequence for CKLFSF2 (NM_144673.2,368-386).
cgctaccggtgggaattaa

SEQ ID NO: 328562 - DNA, 19 bp, Homo sapiens
  siRNA target sequence for CKLFSF2 (NM_144673.2,369-387).
gctaccggtgggaattaaa

SEQ ID NO: 328563 - DNA, 19 bp, Homo sapiens
  siRNA target sequence for CKLFSF2 (NM_144673.2,370-388).
ctaccggtgggaattaaaa

SEQ ID NO: 328564 - DNA, 19 bp, Homo sapiens
  siRNA target sequence for CKLFSF2 (NM_144673.2,417-435).
ggcacgctgagatcaagat

SEQ ID NO: 328565 - DNA, 19 bp, Homo sapiens
  siRNA target sequence for CKLFSF2 (NM_144673.2,418-436).
gcacgctgagatcaagatt

SEQ ID NO: 328566 - DNA, 19 bp, Homo sapiens
  siRNA target sequence for CKLFSF2 (NM_144673.2,439-457).
gagtttgggctgcctaata

SEQ ID NO: 328567 - DNA, 19 bp, Homo sapiens
  siRNA target sequence for CKLFSF2 (NM_144673.2,451-469).
cctaatagctgcaatgata

SEQ ID NO: 328568 - DNA, 19 bp, Homo sapiens
  siRNA target sequence for CKLFSF2 (NM_144673.2,553-571).
gtacagctttgccattcat

SEQ ID NO: 328569 - DNA, 19 bp, Homo sapiens
  siRNA target sequence for CKLFSF2 (NM_144673.2,669-687).
gtcggcgatccatgaatct

SEQ ID NO: 328570 - DNA, 19 bp, Homo sapiens
  siRNA target sequence for CKLFSF2 (NM_144673.2,679-697).
catgaatctccactactta

SEQ ID NO: 328571 - DNA, 19 bp, Homo sapiens
  siRNA target sequence for CKLFSF2 (NM_144673.2,719-737).
gcggctggagtttttgctt

SEQ ID NO: 328572 - DNA, 19 bp, Homo sapiens
  siRNA target sequence for CKLFSF2 (NM_144673.2,742-760).
cgatgtgtgtcttcaaaga

SEQ ID NO: 328573 - DNA, 19 bp, Homo sapiens
  siRNA target sequence for CKLFSF3 (NM_144601.2,649-667).
gccctcatctactttgcta

SEQ ID NO: 328574 - DNA, 19 bp, Homo sapiens
  siRNA target sequence for CKLFSF3 (NM_144601.2,650-668).
ccctcatctactttgctat

SEQ ID NO: 328575 - DNA, 19 bp, Homo sapiens
  siRNA target sequence for CKLFSF3 (NM_144601.2,693-711).
ctcggatggggcttccaaa

SEQ ID NO: 328576 - DNA, 19 bp, Homo sapiens
  siRNA target sequence for CKLFSF3 (NM_144601.2,736-754).
gctaccatcgtgtttgcaa

SEQ ID NO: 328577 - DNA, 19 bp, Homo sapiens
  siRNA target sequence for CKLFSF4 (NM_178818.2,384-402).
gcattcatctgcatagaga

SEQ ID NO: 328578 - DNA, 19 bp, Homo sapiens
  siRNA target sequence for CKLFSF4 (NM_178818.2,421-439).
cgtgtgaaggcctctactt

SEQ ID NO: 328579 - DNA, 19 bp, Homo sapiens
  siRNA target sequence for CKLFSF4 (NM_178818.2,429-447).
ggcctctacttttttgagt

SEQ ID NO: 328580 - DNA, 19 bp, Homo sapiens
  siRNA target sequence for CKLFSF4 (NM_178818.2,478-496).
gcgtcttgctgattatgtt

SEQ ID NO: 328581 - DNA, 19 bp, Homo sapiens
  siRNA target sequence for CKLFSF4 (NM_178818.2,562-580).
gactcagcgctttcctttt

SEQ ID NO: 328582 - DNA, 19 bp, Homo sapiens
  siRNA target sequence for CKLFSF4 (NM_178818.2,568-586).
gcgctttccttttctttat

SEQ ID NO: 328583 - DNA, 19 bp, Homo sapiens
  siRNA target sequence for CKLFSF4 (NM_178818.2,581-599).
ctttattgcttcaatcgta

SEQ ID NO: 328584 - DNA, 19 bp, Homo sapiens
  siRNA target sequence for CKLFSF4 (NM_178818.2,630-648).
gaaattgctgccgtgatat

SEQ ID NO: 328585 - DNA, 19 bp, Homo sapiens
  siRNA target sequence for CKLFSF4 (NM_178818.2,659-677).
ggcgactgcggcatatgca

SEQ ID NO: 328586 - DNA, 19 bp, Homo sapiens
  siRNA target sequence for CKLFSF4 (NM_178818.2,791-809).
ccagcgcctggacactttt

SEQ ID NO: 328587 - DNA, 19 bp, Homo sapiens
  siRNA target sequence for CKLFSF4 (NM_178818.2,792-810).
cagcgcctggacacttttt

SEQ ID NO: 328588 - DNA, 19 bp, Homo sapiens
  siRNA target sequence for CKLFSF4 (NM_178818.2,795-813).
cgcctggacactttttcct

SEQ ID NO: 328589 - DNA, 19 bp, Homo sapiens
  siRNA target sequence for CKLFSF4 (NM_178818.2,796-814).
gcctggacactttttccta

SEQ ID NO: 328590 - DNA, 19 bp, Homo sapiens
  siRNA target sequence for CKLFSF4 (NM_178818.2,815-833).
ctccacaaacgtaacagta

SEQ ID NO: 328591 - DNA, 19 bp, Homo sapiens
  siRNA target sequence for CKLFSF4 (NM_178818.2,824-842).
cgtaacagtaaggaaaaaa

SEQ ID NO: 328592 - DNA, 19 bp, Homo sapiens
  siRNA target sequence for CKLFSF5 (NM_138460.2,631-649).
gcgctactggagttcttca

SEQ ID NO: 328593 - DNA, 19 bp, Homo sapiens
  siRNA target sequence for CKLFSF5 (NM_138460.2,632-650).
cgctactggagttcttcat

SEQ ID NO: 328594 - DNA, 19 bp, Homo sapiens
  siRNA target sequence for CKLFSF5 (NM_138460.2,691-709).
cagcgcttcgaccgaatta

SEQ ID NO: 328595 - DNA, 19 bp, Homo sapiens
  siRNA target sequence for CKLFSF5 (NM_138460.2,694-712).
cgcttcgaccgaattaact

SEQ ID NO: 328596 - DNA, 19 bp, Homo sapiens
  siRNA target sequence for CKLFSF6 (NM_017801.2,335-353).
gaagttgtatcacaatgta

SEQ ID NO: 328597 - DNA, 19 bp, Homo sapiens
  siRNA target sequence for CKLFSF6 (NM_017801.2,338-356).
gttgtatcacaatgtactt

SEQ ID NO: 328598 - DNA, 19 bp, Homo sapiens
  siRNA target sequence for CKLFSF6 (NM_017801.2,411-429).
gtctccttatactgattgt

SEQ ID NO: 328599 - DNA, 19 bp, Homo sapiens
  siRNA target sequence for CKLFSF6 (NM_017801.2,415-433).
ccttatactgattgtgtat

SEQ ID NO: 328600 - DNA, 19 bp, Homo sapiens
  siRNA target sequence for CKLFSF6 (NM_017801.2,416-434).
cttatactgattgtgtatt

SEQ ID NO: 328601 - DNA, 19 bp, Homo sapiens
  siRNA target sequence for CKLFSF6 (NM_017801.2,428-446).
gtgtattgcactccatttt

SEQ ID NO: 328602 - DNA, 19 bp, Homo sapiens
  siRNA target sequence for CKLFSF6 (NM_017801.2,455-473).
gttgataccacaaaagtaa

SEQ ID NO: 328603 - DNA, 19 bp, Homo sapiens
  siRNA target sequence for CKLFSF6 (NM_017801.2,470-488).
gtaaaatcatcggattttt

SEQ ID NO: 328604 - DNA, 19 bp, Homo sapiens
  siRNA target sequence for CKLFSF6 (NM_017801.2,572-590).
gctgcaattgtgtttggat

SEQ ID NO: 328605 - DNA, 19 bp, Homo sapiens
  siRNA target sequence for CKLFSF6 (NM_017801.2,581-599).
gtgtttggatttatagcaa

SEQ ID NO: 328606 - DNA, 19 bp, Homo sapiens
  siRNA target sequence for CKLFSF6 (NM_017801.2,610-628).
cctacttgactttatcact

SEQ ID NO: 328607 - DNA, 19 bp, Homo sapiens
  siRNA target sequence for CKLFSF6 (NM_017801.2,611-629).
ctacttgactttatcacta

SEQ ID NO: 328608 - DNA, 19 bp, Homo sapiens
  siRNA target sequence for CKLFSF6 (NM_017801.2,652-670).
gtcccagctgagaaaacct

SEQ ID NO: 328609 - DNA, 19 bp, Homo sapiens
  siRNA target sequence for CKLFSF6 (NM_017801.2,694-712).
cctcactgagccacttaat

SEQ ID NO: 328610 - DNA, 19 bp, Homo sapiens
  siRNA target sequence for CKLFSF7 (NM_138410.2,449-467).
cagcgcctacagctacttt

SEQ ID NO: 328611 - DNA, 19 bp, Homo sapiens
  siRNA target sequence for CKLFSF7 (NM_138410.2,452-470).
cgcctacagctactttgaa

SEQ ID NO: 328612 - DNA, 19 bp, Homo sapiens
  siRNA target sequence for CKLFSF7 (NM_138410.2,476-494).
caccatttgcgacttgata

SEQ ID NO: 328613 - DNA, 19 bp, Homo sapiens
  siRNA target sequence for CKLFSF7 (NM_138410.2,478-496).
ccatttgcgacttgataat

SEQ ID NO: 328614 - DNA, 19 bp, Homo sapiens
  siRNA target sequence for CKLFSF7 (NM_138410.2,537-555).
cgcgtgctcacctgtatca

SEQ ID NO: 328615 - DNA, 19 bp, Homo sapiens
  siRNA target sequence for CKLFSF7 (NM_138410.2,568-586).
cggaacttctgcactattt

SEQ ID NO: 328616 - DNA, 19 bp, Homo sapiens
  siRNA target sequence for CKLFSF7 (NM_138410.2,569-587).
ggaacttctgcactattta

SEQ ID NO: 328617 - DNA, 19 bp, Homo sapiens
  siRNA target sequence for CKLFSF7 (NM_138410.2,570-588).
gaacttctgcactatttaa

SEQ ID NO: 328618 - DNA, 19 bp, Homo sapiens
  siRNA target sequence for CKLFSF7 (NM_138410.2,656-674).
ggtagccggagcgatcttt

SEQ ID NO: 328619 - DNA, 19 bp, Homo sapiens
  siRNA target sequence for CKLFSF7 (NM_138410.2,660-678).
gccggagcgatctttggtt

SEQ ID NO: 328620 - DNA, 19 bp, Homo sapiens
  siRNA target sequence for CKLFSF7 (NM_138410.2,664-682).
gagcgatctttggtttcat

SEQ ID NO: 328621 - DNA, 19 bp, Homo sapiens
  siRNA target sequence for CKLFSF7 (NM_138410.2,706-724).
gcatatggctgtcctataa

SEQ ID NO: 328622 - DNA, 19 bp, Homo sapiens
  siRNA target sequence for CKLFSF7 (NM_181472.1,561-579).
cccctgtcgatctttggtt

SEQ ID NO: 328623 - DNA, 19 bp, Homo sapiens
  siRNA target sequence for CKLFSF7 (NM_181472.1,562-580).
ccctgtcgatctttggttt

SEQ ID NO: 328624 - DNA, 19 bp, Homo sapiens
  siRNA target sequence for DOCK4 (NM_014705.2,10-28).
cctacggagcacgagaaat

SEQ ID NO: 328625 - DNA, 19 bp, Homo sapiens
  siRNA target sequence for DOCK4 (NM_014705.2,11-29).
ctacggagcacgagaaata

SEQ ID NO: 328626 - DNA, 19 bp, Homo sapiens
  siRNA target sequence for DOCK4 (NM_014705.2,24-42).
gaaatacggcgtggttatt

SEQ ID NO: 328627 - DNA, 19 bp, Homo sapiens
  siRNA target sequence for DOCK4 (NM_014705.2,51-69).
ccgaggaaccgttccatat

SEQ ID NO: 328628 - DNA, 19 bp, Homo sapiens
  siRNA target sequence for DOCK4 (NM_014705.2,151-169).
ccaaatatcaagggtatat

SEQ ID NO: 328629 - DNA, 19 bp, Homo sapiens
  siRNA target sequence for DOCK4 (NM_014705.2,152-170).
caaatatcaagggtatatt

SEQ ID NO: 328630 - DNA, 19 bp, Homo sapiens
  siRNA target sequence for DOCK4 (NM_014705.2,173-191).
cttccagctacgttcactt

SEQ ID NO: 328631 - DNA, 19 bp, Homo sapiens
  siRNA target sequence for DOCK4 (NM_014705.2,179-197).
gctacgttcacttgaaaaa

SEQ ID NO: 328632 - DNA, 19 bp, Homo sapiens
  siRNA target sequence for DOCK4 (NM_014705.2,317-335).
gtaatgaaggcgatctctt

SEQ ID NO: 328633 - DNA, 19 bp, Homo sapiens
  siRNA target sequence for DOCK4 (NM_014705.2,421-439).
gacgtgaagcgccacatta

SEQ ID NO: 328634 - DNA, 19 bp, Homo sapiens
  siRNA target sequence for DOCK4 (NM_014705.2,423-441).
cgtgaagcgccacattact

SEQ ID NO: 328635 - DNA, 19 bp, Homo sapiens
  siRNA target sequence for DOCK4 (NM_014705.2,514-532).
ccggaagacatcagcatta

SEQ ID NO: 328636 - DNA, 19 bp, Homo sapiens
  siRNA target sequence for DOCK4 (NM_014705.2,516-534).
ggaagacatcagcattact

SEQ ID NO: 328637 - DNA, 19 bp, Homo sapiens
  siRNA target sequence for DOCK4 (NM_014705.2,559-577).
cgacatcggaagaaagaca

SEQ ID NO: 328638 - DNA, 19 bp, Homo sapiens
  siRNA target sequence for DOCK4 (NM_014705.2,692-710).
ggccaatcagtgagagatt

SEQ ID NO: 328639 - DNA, 19 bp, Homo sapiens
  siRNA target sequence for DOCK4 (NM_014705.2,694-712).
ccaatcagtgagagatttt

SEQ ID NO: 328640 - DNA, 19 bp, Homo sapiens
  siRNA target sequence for DOCK4 (NM_014705.2,764-782).
gacattgctccctctttgt

SEQ ID NO: 328641 - DNA, 19 bp, Homo sapiens
  siRNA target sequence for DOCK4 (NM_014705.2,802-820).
ctaagaaaggacatttata

SEQ ID NO: 328642 - DNA, 19 bp, Homo sapiens
  siRNA target sequence for DOCK4 (NM_014705.2,998-1016).
ggtaccaaatccatgagaa

SEQ ID NO: 328643 - DNA, 19 bp, Homo sapiens
  siRNA target sequence for DOCK4 (NM_014705.2,1030-1048).
ctgaatgcacgttataact

SEQ ID NO: 328644 - DNA, 19 bp, Homo sapiens
  siRNA target sequence for DOCK4 (NM_014705.2,1056-1074).
ctccaatgcaggtttagca

SEQ ID NO: 328645 - DNA, 19 bp, Homo sapiens
  siRNA target sequence for DOCK4 (NM_014705.2,1064-1082).
caggtttagcagtttcctt

SEQ ID NO: 328646 - DNA, 19 bp, Homo sapiens
  siRNA target sequence for DOCK4 (NM_014705.2,1086-1104).
gctattgcacggagacatt

SEQ ID NO: 328647 - DNA, 19 bp, Homo sapiens
  siRNA target sequence for DOCK4 (NM_014705.2,1113-1131).
cagaagggaatattcatca

SEQ ID NO: 328648 - DNA, 19 bp, Homo sapiens
  siRNA target sequence for DOCK4 (NM_014705.2,1141-1159).
catggagtatccataacaa

SEQ ID NO: 328649 - DNA, 19 bp, Homo sapiens
  siRNA target sequence for DOCK4 (NM_014705.2,1265-1283).
gaaatgtggaagttacgat

SEQ ID NO: 328650 - DNA, 19 bp, Homo sapiens
  siRNA target sequence for DOCK4 (NM_014705.2,1270-1288).
gtggaagttacgatgttca

SEQ ID NO: 328651 - DNA, 19 bp, Homo sapiens
  siRNA target sequence for DOCK4 (NM_014705.2,1420-1438).
cccattcctgtggataaat

SEQ ID NO: 328652 - DNA, 19 bp, Homo sapiens
  siRNA target sequence for DOCK4 (NM_014705.2,1421-1439).
ccattcctgtggataaatt

SEQ ID NO: 328653 - DNA, 19 bp, Homo sapiens
  siRNA target sequence for DOCK4 (NM_014705.2,1572-1590).
gctcatcgtgcataagtgt

SEQ ID NO: 328654 - DNA, 19 bp, Homo sapiens
  siRNA target sequence for DOCK4 (NM_014705.2,1579-1597).
gtgcataagtgtgaagaaa

SEQ ID NO: 328655 - DNA, 19 bp, Homo sapiens
  siRNA target sequence for DOCK4 (NM_014705.2,1616-1634).
ctacccgctacctcaaact

SEQ ID NO: 328656 - DNA, 19 bp, Homo sapiens
  siRNA target sequence for DOCK4 (NM_014705.2,1736-1754).
cacaaaatggtgatatgct

SEQ ID NO: 328657 - DNA, 19 bp, Homo sapiens
  siRNA target sequence for DOCK4 (NM_014705.2,1795-1813).
ggctgtctctctaaattaa

SEQ ID NO: 328658 - DNA, 19 bp, Homo sapiens
  siRNA target sequence for DOCK4 (NM_014705.2,1796-1814).
gctgtctctctaaattaaa

SEQ ID NO: 328659 - DNA, 19 bp, Homo sapiens
  siRNA target sequence for DOCK4 (NM_014705.2,1822-1840).
gatggctcagagatagtaa

SEQ ID NO: 328660 - DNA, 19 bp, Homo sapiens
  siRNA target sequence for DOCK4 (NM_014705.2,1827-1845).
ctcagagatagtaaagttt

SEQ ID NO: 328661 - DNA, 19 bp, Homo sapiens
  siRNA target sequence for DOCK4 (NM_014705.2,1851-1869).
ggatacactggatacctta

SEQ ID NO: 328662 - DNA, 19 bp, Homo sapiens
  siRNA target sequence for DOCK4 (NM_014705.2,1852-1870).
gatacactggataccttat

SEQ ID NO: 328663 - DNA, 19 bp, Homo sapiens
  siRNA target sequence for DOCK4 (NM_014705.2,1893-1911).
ccaaaaatatgggtctaaa

SEQ ID NO: 328664 - DNA, 19 bp, Homo sapiens
  siRNA target sequence for DOCK4 (NM_014705.2,1903-1921).
gggtctaaagtgtttgatt

SEQ ID NO: 328665 - DNA, 19 bp, Homo sapiens
  siRNA target sequence for DOCK4 (NM_014705.2,1905-1923).
gtctaaagtgtttgattct

SEQ ID NO: 328666 - DNA, 19 bp, Homo sapiens
  siRNA target sequence for DOCK4 (NM_014705.2,1947-1965).
gcaagatagcaaatttcat

SEQ ID NO: 328667 - DNA, 19 bp, Homo sapiens
  siRNA target sequence for DOCK4 (NM_014705.2,2075-2093).
cagagcggcaagagcatat

SEQ ID NO: 328668 - DNA, 19 bp, Homo sapiens
  siRNA target sequence for DOCK4 (NM_014705.2,2109-2127).
ggcacaagaatacattttt

SEQ ID NO: 328669 - DNA, 19 bp, Homo sapiens
  siRNA target sequence for DOCK4 (NM_014705.2,2113-2131).
caagaatacatttttaagt

SEQ ID NO: 328670 - DNA, 19 bp, Homo sapiens
  siRNA target sequence for DOCK4 (NM_014705.2,2140-2158).
caatctcgaaggctgtttt

SEQ ID NO: 328671 - DNA, 19 bp, Homo sapiens
  siRNA target sequence for DOCK4 (NM_014705.2,2165-2183).
ccactggtgggcaaaacga

SEQ ID NO: 328672 - DNA, 19 bp, Homo sapiens
  siRNA target sequence for DOCK4 (NM_014705.2,2201-2219).
gcattcaggagcttctcat

SEQ ID NO: 328673 - DNA, 19 bp, Homo sapiens
  siRNA target sequence for DOCK4 (NM_014705.2,2217-2235).
catgtcagtccgtttcttt

SEQ ID NO: 328674 - DNA, 19 bp, Homo sapiens
  siRNA target sequence for DOCK4 (NM_014705.2,2220-2238).
gtcagtccgtttctttctt

SEQ ID NO: 328675 - DNA, 19 bp, Homo sapiens
  siRNA target sequence for DOCK4 (NM_014705.2,2250-2268).
caaagggtctggagcatta

SEQ ID NO: 328676 - DNA, 19 bp, Homo sapiens
  siRNA target sequence for DOCK4 (NM_014705.2,2444-2462).
ccgtggaaagccagcttta

SEQ ID NO: 328677 - DNA, 19 bp, Homo sapiens
  siRNA target sequence for DOCK4 (NM_014705.2,2445-2463).
cgtggaaagccagctttat

SEQ ID NO: 328678 - DNA, 19 bp, Homo sapiens
  siRNA target sequence for DOCK4 (NM_014705.2,2446-2464).
gtggaaagccagctttata

SEQ ID NO: 328679 - DNA, 19 bp, Homo sapiens
  siRNA target sequence for DOCK4 (NM_014705.2,2449-2467).
gaaagccagctttatacca

SEQ ID NO: 328680 - DNA, 19 bp, Homo sapiens
  siRNA target sequence for DOCK4 (NM_014705.2,2469-2487).
cccagattcccgatacatt

SEQ ID NO: 328681 - DNA, 19 bp, Homo sapiens
  siRNA target sequence for DOCK4 (NM_014705.2,2471-2489).
cagattcccgatacattct

SEQ ID NO: 328682 - DNA, 19 bp, Homo sapiens
  siRNA target sequence for DOCK4 (NM_014705.2,2533-2551).
cagaaggacctgatcatgt

SEQ ID NO: 328683 - DNA, 19 bp, Homo sapiens
  siRNA target sequence for DOCK4 (NM_014705.2,2552-2570).
gtgcacgtatccttagcaa

SEQ ID NO: 328684 - DNA, 19 bp, Homo sapiens
  siRNA target sequence for DOCK4 (NM_014705.2,2557-2575).
cgtatccttagcaacgtat

SEQ ID NO: 328685 - DNA, 19 bp, Homo sapiens
  siRNA target sequence for DOCK4 (NM_014705.2,2558-2576).
gtatccttagcaacgtatt

SEQ ID NO: 328686 - DNA, 19 bp, Homo sapiens
  siRNA target sequence for DOCK4 (NM_014705.2,2562-2580).
ccttagcaacgtattttgt

SEQ ID NO: 328687 - DNA, 19 bp, Homo sapiens
  siRNA target sequence for DOCK4 (NM_014705.2,2567-2585).
gcaacgtattttgtcttat

SEQ ID NO: 328688 - DNA, 19 bp, Homo sapiens
  siRNA target sequence for DOCK4 (NM_014705.2,2637-2655).
ggccagcttgctggatatt

SEQ ID NO: 328689 - DNA, 19 bp, Homo sapiens
  siRNA target sequence for DOCK4 (NM_014705.2,2763-2781).
cctattacgacaaatgaca

SEQ ID NO: 328690 - DNA, 19 bp, Homo sapiens
  siRNA target sequence for DOCK4 (NM_014705.2,2773-2791).
caaatgacagatagacatt

SEQ ID NO: 328691 - DNA, 19 bp, Homo sapiens
  siRNA target sequence for DOCK4 (NM_014705.2,2780-2798).
cagatagacattatcaaca

SEQ ID NO: 328692 - DNA, 19 bp, Homo sapiens
  siRNA target sequence for DOCK4 (NM_014705.2,2858-2876).
ctgtgttccgaatattgat

SEQ ID NO: 328693 - DNA, 19 bp, Homo sapiens
  siRNA target sequence for DOCK4 (NM_014705.2,2913-2931).
gcgcttggttgctaacaat

SEQ ID NO: 328694 - DNA, 19 bp, Homo sapiens
  siRNA target sequence for DOCK4 (NM_014705.2,2919-2937).
ggttgctaacaatgttatt

SEQ ID NO: 328695 - DNA, 19 bp, Homo sapiens
  siRNA target sequence for DOCK4 (NM_014705.2,2920-2938).
gttgctaacaatgttatta

SEQ ID NO: 328696 - DNA, 19 bp, Homo sapiens
  siRNA target sequence for DOCK4 (NM_014705.2,2965-2983).
gcacttcgtaagaacttct

SEQ ID NO: 328697 - DNA, 19 bp, Homo sapiens
  siRNA target sequence for DOCK4 (NM_014705.2,2966-2984).
cacttcgtaagaacttctt

SEQ ID NO: 328698 - DNA, 19 bp, Homo sapiens
  siRNA target sequence for DOCK4 (NM_014705.2,3021-3039).
cttttacctcgcagtcatt

SEQ ID NO: 328699 - DNA, 19 bp, Homo sapiens
  siRNA target sequence for DOCK4 (NM_014705.2,3112-3130).
ggtgacatgcgggtaacaa

SEQ ID NO: 328700 - DNA, 19 bp, Homo sapiens
  siRNA target sequence for DOCK4 (NM_014705.2,3113-3131).
gtgacatgcgggtaacaat

SEQ ID NO: 328701 - DNA, 19 bp, Homo sapiens
  siRNA target sequence for DOCK4 (NM_014705.2,3167-3185).
gagagcacaagcttcattt

SEQ ID NO: 328702 - DNA, 19 bp, Homo sapiens
  siRNA target sequence for DOCK4 (NM_014705.2,3246-3264).
gaatgtcatgattccaatt

SEQ ID NO: 328703 - DNA, 19 bp, Homo sapiens
  siRNA target sequence for DOCK4 (NM_014705.2,3291-3309).
gaggcggagtggcaacttt

SEQ ID NO: 328704 - DNA, 19 bp, Homo sapiens
  siRNA target sequence for DOCK4 (NM_014705.2,3294-3312).
gcggagtggcaactttaaa

SEQ ID NO: 328705 - DNA, 19 bp, Homo sapiens
  siRNA target sequence for DOCK4 (NM_014705.2,3315-3333).
ggtggaagccaagctaatt

SEQ ID NO: 328706 - DNA, 19 bp, Homo sapiens
  siRNA target sequence for DOCK4 (NM_014705.2,3377-3395).
cataccgcgagctcttcaa

SEQ ID NO: 328707 - DNA, 19 bp, Homo sapiens
  siRNA target sequence for DOCK4 (NM_014705.2,3382-3400).
cgcgagctcttcaacagta

SEQ ID NO: 328708 - DNA, 19 bp, Homo sapiens
  siRNA target sequence for DOCK4 (NM_014705.2,3383-3401).
gcgagctcttcaacagtat

SEQ ID NO: 328709 - DNA, 19 bp, Homo sapiens
  siRNA target sequence for DOCK4 (NM_014705.2,3384-3402).
cgagctcttcaacagtatt

SEQ ID NO: 328710 - DNA, 19 bp, Homo sapiens
  siRNA target sequence for DOCK4 (NM_014705.2,3435-3453).
ggaaagtggcgtttcatta

SEQ ID NO: 328711 - DNA, 19 bp, Homo sapiens
  siRNA target sequence for DOCK4 (NM_014705.2,3436-3454).
gaaagtggcgtttcattaa

SEQ ID NO: 328712 - DNA, 19 bp, Homo sapiens
  siRNA target sequence for DOCK4 (NM_014705.2,3458-3476).
ctactgtaactcgtctaat

SEQ ID NO: 328713 - DNA, 19 bp, Homo sapiens
  siRNA target sequence for DOCK4 (NM_014705.2,3461-3479).
ctgtaactcgtctaatgga

SEQ ID NO: 328714 - DNA, 19 bp, Homo sapiens
  siRNA target sequence for DOCK4 (NM_014705.2,3515-3533).
gagaggtagatggcaaaaa

SEQ ID NO: 328715 - DNA, 19 bp, Homo sapiens
  siRNA target sequence for DOCK4 (NM_014705.2,3519-3537).
ggtagatggcaaaaagatt

SEQ ID NO: 328716 - DNA, 19 bp, Homo sapiens
  siRNA target sequence for DOCK4 (NM_014705.2,3545-3563).
cagttagccttctgaactt

SEQ ID NO: 328717 - DNA, 19 bp, Homo sapiens
  siRNA target sequence for DOCK4 (NM_014705.2,3547-3565).
gttagccttctgaacttct

SEQ ID NO: 328718 - DNA, 19 bp, Homo sapiens
  siRNA target sequence for DOCK4 (NM_014705.2,3591-3609).
gatgtatatacgctacatt

SEQ ID NO: 328719 - DNA, 19 bp, Homo sapiens
  siRNA target sequence for DOCK4 (NM_014705.2,3601-3619).
cgctacattcacaaactct

SEQ ID NO: 328720 - DNA, 19 bp, Homo sapiens
  siRNA target sequence for DOCK4 (NM_014705.2,3606-3624).
cattcacaaactctatgat

SEQ ID NO: 328721 - DNA, 19 bp, Homo sapiens
  siRNA target sequence for DOCK4 (NM_014705.2,3645-3663).
ctttacagaagctgcatat

SEQ ID NO: 328722 - DNA, 19 bp, Homo sapiens
  siRNA target sequence for DOCK4 (NM_014705.2,3658-3676).
gcatataccctcctcttat

SEQ ID NO: 328723 - DNA, 19 bp, Homo sapiens
  siRNA target sequence for DOCK4 (NM_014705.2,3659-3677).
catataccctcctcttata

SEQ ID NO: 328724 - DNA, 19 bp, Homo sapiens
  siRNA target sequence for DOCK4 (NM_014705.2,3945-3963).
gttcttcagagttggattt

SEQ ID NO: 328725 - DNA, 19 bp, Homo sapiens
  siRNA target sequence for DOCK4 (NM_014705.2,4124-4142).
cagaagctcagtatttgca

SEQ ID NO: 328726 - DNA, 19 bp, Homo sapiens
  siRNA target sequence for DOCK4 (NM_014705.2,4201-4219).
ccggacaacatcaaaagct

SEQ ID NO: 328727 - DNA, 19 bp, Homo sapiens
  siRNA target sequence for DOCK4 (NM_014705.2,4202-4220).
cggacaacatcaaaagctt

SEQ ID NO: 328728 - DNA, 19 bp, Homo sapiens
  siRNA target sequence for DOCK4 (NM_014705.2,4228-4246).
gtgaatcacatctggaaat

SEQ ID NO: 328729 - DNA, 19 bp, Homo sapiens
  siRNA target sequence for DOCK4 (NM_014705.2,4248-4266).
ccgctatgaccgaccattt

SEQ ID NO: 328730 - DNA, 19 bp, Homo sapiens
  siRNA target sequence for DOCK4 (NM_014705.2,4267-4285).
cacaaaggcacaaaagata

SEQ ID NO: 328731 - DNA, 19 bp, Homo sapiens
  siRNA target sequence for DOCK4 (NM_014705.2,4311-4329).
ggtggagagaacgtcatta

SEQ ID NO: 328732 - DNA, 19 bp, Homo sapiens
  siRNA target sequence for DOCK4 (NM_014705.2,4312-4330).
gtggagagaacgtcattat

SEQ ID NO: 328733 - DNA, 19 bp, Homo sapiens
  siRNA target sequence for DOCK4 (NM_014705.2,4315-4333).
gagagaacgtcattatact

SEQ ID NO: 328734 - DNA, 19 bp, Homo sapiens
  siRNA target sequence for DOCK4 (NM_014705.2,4381-4399).
cgtgaagtggtagaaatga

SEQ ID NO: 328735 - DNA, 19 bp, Homo sapiens
  siRNA target sequence for DOCK4 (NM_014705.2,4398-4416).
gagtcctctggaaaatgca

SEQ ID NO: 328736 - DNA, 19 bp, Homo sapiens
  siRNA target sequence for DOCK4 (NM_014705.2,4511-4529).
gcctgaatggagttataga

SEQ ID NO: 328737 - DNA, 19 bp, Homo sapiens
  siRNA target sequence for DOCK4 (NM_014705.2,4512-4530).
cctgaatggagttatagat

SEQ ID NO: 328738 - DNA, 19 bp, Homo sapiens
  siRNA target sequence for DOCK4 (NM_014705.2,4547-4565).
gcgtttccaggtatcaaga

SEQ ID NO: 328739 - DNA, 19 bp, Homo sapiens
  siRNA target sequence for DOCK4 (NM_014705.2,4556-4574).
ggtatcaagaggcattctt

SEQ ID NO: 328740 - DNA, 19 bp, Homo sapiens
  siRNA target sequence for DOCK4 (NM_014705.2,4590-4608).
cttaagtcaccctgaagat

SEQ ID NO: 328741 - DNA, 19 bp, Homo sapiens
  siRNA target sequence for DOCK4 (NM_014705.2,4611-4629).
ggagaaaattgcacgatta

SEQ ID NO: 328742 - DNA, 19 bp, Homo sapiens
  siRNA target sequence for DOCK4 (NM_014705.2,4612-4630).
gagaaaattgcacgattaa

SEQ ID NO: 328743 - DNA, 19 bp, Homo sapiens
  siRNA target sequence for DOCK4 (NM_014705.2,4614-4632).
gaaaattgcacgattaaga

SEQ ID NO: 328744 - DNA, 19 bp, Homo sapiens
  siRNA target sequence for DOCK4 (NM_014705.2,4670-4688).
gtttggccgtgcatgagaa

SEQ ID NO: 328745 - DNA, 19 bp, Homo sapiens
  siRNA target sequence for DOCK4 (NM_014705.2,4677-4695).
cgtgcatgagaagtttgta

SEQ ID NO: 328746 - DNA, 19 bp, Homo sapiens
  siRNA target sequence for DOCK4 (NM_014705.2,4725-4743).
gctggttgaccaattcttt

SEQ ID NO: 328747 - DNA, 19 bp, Homo sapiens
  siRNA target sequence for DOCK4 (NM_014705.2,4729-4747).
gttgaccaattctttgtga

SEQ ID NO: 328748 - DNA, 19 bp, Homo sapiens
  siRNA target sequence for DOCK4 (NM_014705.2,4773-4791).
gttctctgcttgtatgcaa

SEQ ID NO: 328749 - DNA, 19 bp, Homo sapiens
  siRNA target sequence for DOCK4 (NM_014705.2,4820-4838).
gccctcgtgtgtgtagaaa

SEQ ID NO: 328750 - DNA, 19 bp, Homo sapiens
  siRNA target sequence for DOCK4 (NM_014705.2,4822-4840).
cctcgtgtgtgtagaaact

SEQ ID NO: 328751 - DNA, 19 bp, Homo sapiens
  siRNA target sequence for DOCK4 (NM_014705.2,4867-4885).
ggtaccagggtaattccta

SEQ ID NO: 328752 - DNA, 19 bp, Homo sapiens
  siRNA target sequence for DOCK4 (NM_014705.2,4886-4904).
gacgcagcccgttaagtta

SEQ ID NO: 328753 - DNA, 19 bp, Homo sapiens
  siRNA target sequence for DOCK4 (NM_014705.2,4952-4970).
ctgctgaagtaagcaatat

SEQ ID NO: 328754 - DNA, 19 bp, Homo sapiens
  siRNA target sequence for DOCK4 (NM_014705.2,4954-4972).
gctgaagtaagcaatatta

SEQ ID NO: 328755 - DNA, 19 bp, Homo sapiens
  siRNA target sequence for DOCK4 (NM_014705.2,5028-5046).
ctcaagcttgagttctact

SEQ ID NO: 328756 - DNA, 19 bp, Homo sapiens
  siRNA target sequence for DOCK4 (NM_014705.2,5125-5143).
cattcccgagaaaactctt

SEQ ID NO: 328757 - DNA, 19 bp, Homo sapiens
  siRNA target sequence for DOCK4 (NM_014705.2,5201-5219).
cgcagaggatgctgtttaa

SEQ ID NO: 328758 - DNA, 19 bp, Homo sapiens
  siRNA target sequence for DOCK4 (NM_014705.2,5202-5220).
gcagaggatgctgtttaat

SEQ ID NO: 328759 - DNA, 19 bp, Homo sapiens
  siRNA target sequence for DOCK4 (NM_014705.2,5207-5225).
ggatgctgtttaatcatat

SEQ ID NO: 328760 - DNA, 19 bp, Homo sapiens
  siRNA target sequence for DOCK4 (NM_014705.2,5208-5226).
gatgctgtttaatcatatt

SEQ ID NO: 328761 - DNA, 19 bp, Homo sapiens
  siRNA target sequence for DOCK4 (NM_014705.2,5337-5355).
gtcggatagtgggaaactt

SEQ ID NO: 328762 - DNA, 19 bp, Homo sapiens
  siRNA target sequence for DOCK4 (NM_014705.2,5339-5357).
cggatagtgggaaacttat

SEQ ID NO: 328763 - DNA, 19 bp, Homo sapiens
  siRNA target sequence for DOCK4 (NM_014705.2,5880-5898).
ccgcaaggtctctcagtta

SEQ ID NO: 328764 - DNA, 19 bp, Homo sapiens
  siRNA target sequence for FLJ30532 (NM_144724.1,156-174).
gaacccacccaattcttca

SEQ ID NO: 328765 - DNA, 19 bp, Homo sapiens
  siRNA target sequence for FLJ30532 (NM_144724.1,237-255).
cattcggcccagacttcta

SEQ ID NO: 328766 - DNA, 19 bp, Homo sapiens
  siRNA target sequence for FLJ30532 (NM_144724.1,242-260).
ggcccagacttctactcaa

SEQ ID NO: 328767 - DNA, 19 bp, Homo sapiens
  siRNA target sequence for FLJ30532 (NM_144724.1,279-297).
ctatagcgccagatctcaa

SEQ ID NO: 328768 - DNA, 19 bp, Homo sapiens
  siRNA target sequence for FLJ30532 (NM_144724.1,368-386).
gataagccggtgtctgata

SEQ ID NO: 328769 - DNA, 19 bp, Homo sapiens
  siRNA target sequence for FLJ30532 (NM_144724.1,485-503).
gggtcagaaggaaccttta

SEQ ID NO: 328770 - DNA, 19 bp, Homo sapiens
  siRNA target sequence for FLJ30532 (NM_144724.1,559-577).
ccgacacacacaaacagtt

SEQ ID NO: 328771 - DNA, 19 bp, Homo sapiens
  siRNA target sequence for FLJ30532 (NM_144724.1,636-654).
gggcaggcctgctgagaat

SEQ ID NO: 328772 - DNA, 19 bp, Homo sapiens
  siRNA target sequence for FLJ30532 (NM_144724.1,637-655).
ggcaggcctgctgagaata

SEQ ID NO: 328773 - DNA, 19 bp, Homo sapiens
  siRNA target sequence for FLJ30532 (NM_144724.1,699-717).
gtgtcacagcttacattca

SEQ ID NO: 328774 - DNA, 19 bp, Homo sapiens
  siRNA target sequence for FLJ30532 (NM_144724.1,701-719).
gtcacagcttacattcaca

SEQ ID NO: 328775 - DNA, 19 bp, Homo sapiens
  siRNA target sequence for FLJ30532 (NM_144724.1,722-740).
gacagtgagtggtacaact

SEQ ID NO: 328776 - DNA, 19 bp, Homo sapiens
  siRNA target sequence for FLJ30532 (NM_144724.1,726-744).
gtgagtggtacaacttgtt

SEQ ID NO: 328777 - DNA, 19 bp, Homo sapiens
  siRNA target sequence for FLJ30532 (NM_144724.1,733-751).
gtacaacttgtttggatat

SEQ ID NO: 328778 - DNA, 19 bp, Homo sapiens
  siRNA target sequence for FLJ30532 (NM_144724.1,736-754).
caacttgtttggatattca

SEQ ID NO: 328779 - DNA, 19 bp, Homo sapiens
  siRNA target sequence for FLJ30532 (NM_144724.1,792-810).
gtatgtatgggggctatta

SEQ ID NO: 328780 - DNA, 19 bp, Homo sapiens
  siRNA target sequence for FLJ30532 (NM_144724.1,819-837).
gccctaagaccccttttgt

SEQ ID NO: 328781 - DNA, 19 bp, Homo sapiens
  siRNA target sequence for FLJ30532 (NM_144724.1,820-838).
ccctaagaccccttttgta

SEQ ID NO: 328782 - DNA, 19 bp, Homo sapiens
  siRNA target sequence for FLJ30532 (NM_144724.1,822-840).
ctaagaccccttttgtact

SEQ ID NO: 328783 - DNA, 19 bp, Homo sapiens
  siRNA target sequence for FLJ30532 (NM_144724.1,901-919).
gtattaccggaccattctt

SEQ ID NO: 328784 - DNA, 19 bp, Homo sapiens
  siRNA target sequence for FLJ30532 (NM_144724.1,913-931).
cattcttctggactctaat

SEQ ID NO: 328785 - DNA, 19 bp, Homo sapiens
  siRNA target sequence for FLJ30532 (NM_144724.1,917-935).
cttctggactctaattggt

SEQ ID NO: 328786 - DNA, 19 bp, Homo sapiens
  siRNA target sequence for FLJ30532 (NM_144724.1,933-951).
ggtggcccctaactgaatt

SEQ ID NO: 328787 - DNA, 19 bp, Homo sapiens
  siRNA target sequence for FLJ30532 (NM_144724.1,934-952).
gtggcccctaactgaattt

SEQ ID NO: 328788 - DNA, 19 bp, Homo sapiens
  siRNA target sequence for FLJ30532 (NM_144724.1,937-955).
gcccctaactgaatttgga

SEQ ID NO: 328789 - DNA, 19 bp, Homo sapiens
  siRNA target sequence for FLJ30532 (NM_144724.1,938-956).
cccctaactgaatttggaa

SEQ ID NO: 328790 - DNA, 19 bp, Homo sapiens
  siRNA target sequence for FLJ30532 (NM_144724.1,939-957).
ccctaactgaatttggaat

SEQ ID NO: 328791 - DNA, 19 bp, Homo sapiens
  siRNA target sequence for FLJ30532 (NM_144724.1,945-963).
ctgaatttggaattaacgt

SEQ ID NO: 328792 - DNA, 19 bp, Homo sapiens
  siRNA target sequence for FLJ30532 (NM_144724.1,985-1003).
ggccgcagccatagtctat

SEQ ID NO: 328793 - DNA, 19 bp, Homo sapiens
  siRNA target sequence for FLJ30532 (NM_144724.1,987-1005).
ccgcagccatagtctatgt

SEQ ID NO: 328794 - DNA, 19 bp, Homo sapiens
  siRNA target sequence for FLJ30532 (NM_144724.1,993-1011).
ccatagtctatgtgaatga

SEQ ID NO: 328795 - DNA, 19 bp, Homo sapiens
  siRNA target sequence for FLJ30532 (NM_144724.1,1078-1096).
ggtagaaggaggacagata

SEQ ID NO: 328796 - DNA, 19 bp, Homo sapiens
  siRNA target sequence for FLJ30532 (NM_144724.1,1089-1107).
gacagatagctgcaatgat

SEQ ID NO: 328797 - DNA, 19 bp, Homo sapiens
  siRNA target sequence for FLJ30532 (NM_144724.1,1111-1129).
cctgtttgtcaccatgata

SEQ ID NO: 328798 - DNA, 19 bp, Homo sapiens
  siRNA target sequence for FLJ30532 (NM_144724.1,1126-1144).
gatagtttatctcattagt

SEQ ID NO: 328799 - DNA, 19 bp, Homo sapiens
  siRNA target sequence for FLJ30532 (NM_144724.1,1177-1195).
ggcagctcggagacataga

SEQ ID NO: 328800 - DNA, 19 bp, Homo sapiens
  siRNA target sequence for FLJ30532 (NM_144724.1,1181-1199).
gctcggagacatagagaat

SEQ ID NO: 328801 - DNA, 19 bp, Homo sapiens
  siRNA target sequence for FLJ30532 (NM_144724.1,1182-1200).
ctcggagacatagagaata

SEQ ID NO: 328802 - DNA, 19 bp, Homo sapiens
  siRNA target sequence for FLJ30532 (NM_144724.1,1184-1202).
cggagacatagagaatata

SEQ ID NO: 328803 - DNA, 19 bp, Homo sapiens
  siRNA target sequence for FLJ33990 (NM_153226.1,263-281).
ggacttggcttgttttaca

SEQ ID NO: 328804 - DNA, 19 bp, Homo sapiens
  siRNA target sequence for FLJ33990 (NM_153226.1,306-324).
cagtgggctctttatttgt

SEQ ID NO: 328805 - DNA, 19 bp, Homo sapiens
  siRNA target sequence for FLJ33990 (NM_153226.1,341-359).
gtccatgctgtagagatta

SEQ ID NO: 328806 - DNA, 19 bp, Homo sapiens
  siRNA target sequence for FLJ33990 (NM_153226.1,353-371).
gagattagtgcgtttcgat

SEQ ID NO: 328807 - DNA, 19 bp, Homo sapiens
  siRNA target sequence for FLJ33990 (NM_153226.1,376-394).
gttccaaatgctagttgtt

SEQ ID NO: 328808 - DNA, 19 bp, Homo sapiens
  siRNA target sequence for FLJ33990 (NM_153226.1,389-407).
gttgttatcccttgcttaa

SEQ ID NO: 328809 - DNA, 19 bp, Homo sapiens
  siRNA target sequence for FLJ33990 (NM_153226.1,432-450).
gcccaaaaggtcaacgaat

SEQ ID NO: 328810 - DNA, 19 bp, Homo sapiens
  siRNA target sequence for FLJ33990 (NM_153226.1,433-451).
cccaaaaggtcaacgaatt

SEQ ID NO: 328811 - DNA, 19 bp, Homo sapiens
  siRNA target sequence for FLJ33990 (NM_153226.1,434-452).
ccaaaaggtcaacgaattt

SEQ ID NO: 328812 - DNA, 19 bp, Homo sapiens
  siRNA target sequence for FLJ33990 (NM_153226.1,435-453).
caaaaggtcaacgaatttt

SEQ ID NO: 328813 - DNA, 19 bp, Homo sapiens
  siRNA target sequence for FLJ33990 (NM_153226.1,446-464).
cgaattttcctcattctca

SEQ ID NO: 328814 - DNA, 19 bp, Homo sapiens
  siRNA target sequence for FLJ33990 (NM_153226.1,483-501).
ccgccatgatgcttatata

SEQ ID NO: 328815 - DNA, 19 bp, Homo sapiens
  siRNA target sequence for FLJ33990 (NM_153226.1,485-503).
gccatgatgcttatatact

SEQ ID NO: 328816 - DNA, 19 bp, Homo sapiens
  siRNA target sequence for FLJ33990 (NM_153226.1,486-504).
ccatgatgcttatatacta

SEQ ID NO: 328817 - DNA, 19 bp, Homo sapiens
  siRNA target sequence for FLJ33990 (NM_153226.1,487-505).
catgatgcttatatactat

SEQ ID NO: 328818 - DNA, 19 bp, Homo sapiens
  siRNA target sequence for FLJ33990 (NM_153226.1,557-575).
ccagtgtttacgtccatat

SEQ ID NO: 328819 - DNA, 19 bp, Homo sapiens
  siRNA target sequence for FLJ33990 (NM_153226.1,568-586).
gtccatatttgcttggata

SEQ ID NO: 328820 - DNA, 19 bp, Homo sapiens
  siRNA target sequence for FLJ33990 (NM_153226.1,625-643).
caccgtgttcacaatcact

SEQ ID NO: 328821 - DNA, 19 bp, Homo sapiens
  siRNA target sequence for FLJ33990 (NM_153226.1,642-660).
ctggagtgatccttatcgt

SEQ ID NO: 328822 - DNA, 19 bp, Homo sapiens
  siRNA target sequence for FLJ33990 (NM_153226.1,693-711).
cggggatggaagaaagcta

SEQ ID NO: 328823 - DNA, 19 bp, Homo sapiens
  siRNA target sequence for FLJ33990 (NM_153226.1,708-726).
gctattcaggccaccttaa

SEQ ID NO: 328824 - DNA, 19 bp, Homo sapiens
  siRNA target sequence for FLJ33990 (NM_153226.1,717-735).
gccaccttaagggaacatt

SEQ ID NO: 328825 - DNA, 19 bp, Homo sapiens
  siRNA target sequence for FLJ33990 (NM_153226.1,761-779).
gctgcatcgactctagtta

SEQ ID NO: 328826 - DNA, 19 bp, Homo sapiens
  siRNA target sequence for FLJ33990 (NM_153226.1,762-780).
ctgcatcgactctagttat

SEQ ID NO: 328827 - DNA, 19 bp, Homo sapiens
  siRNA target sequence for FLJ33990 (NM_153226.1,765-783).
catcgactctagttatcct

SEQ ID NO: 328828 - DNA, 19 bp, Homo sapiens
  siRNA target sequence for FLJ33990 (NM_153226.1,795-813).
gaaaatctgtggactactt

SEQ ID NO: 328829 - DNA, 19 bp, Homo sapiens
  siRNA target sequence for FLJ33990 (NM_153226.1,806-824).
gactactttctgagcattt

SEQ ID NO: 328830 - DNA, 19 bp, Homo sapiens
  siRNA target sequence for FLJ33990 (NM_153226.1,817-835).
gagcatttggtattatgta

SEQ ID NO: 328831 - DNA, 19 bp, Homo sapiens
  siRNA target sequence for FLJ33990 (NM_153226.1,836-854).
gtacttggcctcgttgaaa

SEQ ID NO: 328832 - DNA, 19 bp, Homo sapiens
  siRNA target sequence for FLJ33990 (NM_153226.1,859-877).
catcatcctctctgtatta

SEQ ID NO: 328833 - DNA, 19 bp, Homo sapiens
  siRNA target sequence for FLJ33990 (NM_153226.1,908-926).
gacaggctatttctcatat

SEQ ID NO: 328834 - DNA, 19 bp, Homo sapiens
  siRNA target sequence for FLJ33990 (NM_153226.1,912-930).
ggctatttctcatattcat

SEQ ID NO: 328835 - DNA, 19 bp, Homo sapiens
  siRNA target sequence for FLJ33990 (NM_153226.1,913-931).
gctatttctcatattcatt

SEQ ID NO: 328836 - DNA, 19 bp, Homo sapiens
  siRNA target sequence for FLJ33990 (NM_153226.1,942-960).
gtttggggggtcagatatt

SEQ ID NO: 328837 - DNA, 19 bp, Homo sapiens
  siRNA target sequence for FLJ33990 (NM_153226.1,964-982).
cacaaaagcacttcaaata

SEQ ID NO: 328838 - DNA, 19 bp, Homo sapiens
  siRNA target sequence for FLJ33990 (NM_153226.1,989-1007).
gcagggccagtagcaataa

SEQ ID NO: 328839 - DNA, 19 bp, Homo sapiens
  siRNA target sequence for FLJ33990 (NM_153226.1,1096-1114).
ctgcgtagtagccagtaat

SEQ ID NO: 328840 - DNA, 19 bp, Homo sapiens
  siRNA target sequence for FLJ33990 (NM_153226.1,1098-1116).
gcgtagtagccagtaatgt

SEQ ID NO: 328841 - DNA, 19 bp, Homo sapiens
  siRNA target sequence for FLJ33990 (NM_153226.1,1099-1117).
cgtagtagccagtaatgtt

SEQ ID NO: 328842 - DNA, 19 bp, Homo sapiens
  siRNA target sequence for FLJ33990 (NM_153226.1,1115-1133).
gttggagcggccattcgta

SEQ ID NO: 328843 - DNA, 19 bp, Homo sapiens
  siRNA target sequence for FLJ33990 (NM_153226.1,1118-1136).
ggagcggccattcgtaaat

SEQ ID NO: 328844 - DNA, 19 bp, Homo sapiens
  siRNA target sequence for FLJ33990 (NM_153226.1,1121-1139).
gcggccattcgtaaatggt

SEQ ID NO: 328845 - DNA, 19 bp, Homo sapiens
  siRNA target sequence for FLJ33990 (NM_153226.1,1122-1140).
cggccattcgtaaatggta

SEQ ID NO: 328846 - DNA, 19 bp, Homo sapiens
  siRNA target sequence for GP2 (NM_001502.1,240-258).
gacccctgtcagaattaca

SEQ ID NO: 328847 - DNA, 19 bp, Homo sapiens
  siRNA target sequence for GP2 (NM_001502.1,304-322).
cccaggggtgcgataaaaa

SEQ ID NO: 328848 - DNA, 19 bp, Homo sapiens
  siRNA target sequence for GP2 (NM_001502.1,306-324).
caggggtgcgataaaaaca

SEQ ID NO: 328849 - DNA, 19 bp, Homo sapiens
  siRNA target sequence for GP2 (NM_001502.1,309-327).
gggtgcgataaaaacatga

SEQ ID NO: 328850 - DNA, 19 bp, Homo sapiens
  siRNA target sequence for GP2 (NM_001502.1,532-550).
caggcgggtaccatgtgta

SEQ ID NO: 328851 - DNA, 19 bp, Homo sapiens
  siRNA target sequence for GP2 (NM_001502.1,689-707).
ggacctcaatagttctgat

SEQ ID NO: 328852 - DNA, 19 bp, Homo sapiens
  siRNA target sequence for GP2 (NM_001502.1,700-718).
gttctgatgtccacagttt

SEQ ID NO: 328853 - DNA, 19 bp, Homo sapiens
  siRNA target sequence for GP2 (NM_001502.1,924-942).
caaacccatgccatctaca

SEQ ID NO: 328854 - DNA, 19 bp, Homo sapiens
  siRNA target sequence for GP2 (NM_001502.1,928-946).
cccatgccatctacaaaaa

SEQ ID NO: 328855 - DNA, 19 bp, Homo sapiens
  siRNA target sequence for GP2 (NM_001502.1,950-968).
cctctccttggtcaatgat

SEQ ID NO: 328856 - DNA, 19 bp, Homo sapiens
  siRNA target sequence for GP2 (NM_001502.1,951-969).
ctctccttggtcaatgatt

SEQ ID NO: 328857 - DNA, 19 bp, Homo sapiens
  siRNA target sequence for GP2 (NM_001502.1,1047-1065).
gccttgcagcccattgtaa

SEQ ID NO: 328858 - DNA, 19 bp, Homo sapiens
  siRNA target sequence for GP2 (NM_001502.1,1049-1067).
cttgcagcccattgtaagt

SEQ ID NO: 328859 - DNA, 19 bp, Homo sapiens
  siRNA target sequence for GP2 (NM_001502.1,1131-1149).
cagaactacacgaatcctt

SEQ ID NO: 328860 - DNA, 19 bp, Homo sapiens
  siRNA target sequence for GP2 (NM_001502.1,1151-1169).
cgaaggggatgcagttgaa

SEQ ID NO: 328861 - DNA, 19 bp, Homo sapiens
  siRNA target sequence for GP2 (NM_001502.1,1216-1234).
gggacacctcccggtttaa

SEQ ID NO: 328862 - DNA, 19 bp, Homo sapiens
  siRNA target sequence for GP2 (NM_001502.1,1277-1295).
ggctgaccttgtgaagtat

SEQ ID NO: 328863 - DNA, 19 bp, Homo sapiens
  siRNA target sequence for GP2 (NM_001502.1,1372-1390).
gccggttctcagttcagat

SEQ ID NO: 328864 - DNA, 19 bp, Homo sapiens
  siRNA target sequence for GP2 (NM_001502.1,1404-1422).
ggacattatgacctagttt

SEQ ID NO: 328865 - DNA, 19 bp, Homo sapiens
  siRNA target sequence for GP2 (NM_001502.1,1405-1423).
gacattatgacctagtttt

SEQ ID NO: 328866 - DNA, 19 bp, Homo sapiens
  siRNA target sequence for GP2 (NM_001502.1,1568-1586).
gtctcccggtgtcatgaat

SEQ ID NO: 328867 - DNA, 19 bp, Homo sapiens
  siRNA target sequence for KIAA0792 (NM_014698.1,329-347).
cccaacgactcctattgct

SEQ ID NO: 328868 - DNA, 19 bp, Homo sapiens
  siRNA target sequence for KIAA0792 (NM_014698.1,523-541).
cagatttcagagattgtca

SEQ ID NO: 328869 - DNA, 19 bp, Homo sapiens
  siRNA target sequence for KIAA0792 (NM_014698.1,763-781).
ggacaaagacccgtatagt

SEQ ID NO: 328870 - DNA, 19 bp, Homo sapiens
  siRNA target sequence for KIAA0792 (NM_014698.1,764-782).
gacaaagacccgtatagtt

SEQ ID NO: 328871 - DNA, 19 bp, Homo sapiens
  siRNA target sequence for KIAA0792 (NM_014698.1,766-784).
caaagacccgtatagtttt

SEQ ID NO: 328872 - DNA, 19 bp, Homo sapiens
  siRNA target sequence for KIAA0792 (NM_014698.1,890-908).
cacactcagtccattaagt

SEQ ID NO: 328873 - DNA, 19 bp, Homo sapiens
  siRNA target sequence for KIAA0792 (NM_014698.1,1011-1029).
cgtgtgaggtggttgatgt

SEQ ID NO: 328874 - DNA, 19 bp, Homo sapiens
  siRNA target sequence for KIAA0792 (NM_014698.1,1095-1113).
gcctgacctattacacaaa

SEQ ID NO: 328875 - DNA, 19 bp, Homo sapiens
  siRNA target sequence for KIAA0792 (NM_014698.1,1202-1220).
gaagacgccatctcttact

SEQ ID NO: 328876 - DNA, 19 bp, Homo sapiens
  siRNA target sequence for KIAA0792 (NM_014698.1,1330-1348).
cacctacatcctgaaagat

SEQ ID NO: 328877 - DNA, 19 bp, Homo sapiens
  siRNA target sequence for KIAA0792 (NM_014698.1,1332-1350).
cctacatcctgaaagattt

SEQ ID NO: 328878 - DNA, 19 bp, Homo sapiens
  siRNA target sequence for KIAA0792 (NM_014698.1,1610-1628).
cccatccatgcgctgaata

SEQ ID NO: 328879 - DNA, 19 bp, Homo sapiens
  siRNA target sequence for KIAA0792 (NM_014698.1,1611-1629).
ccatccatgcgctgaataa

SEQ ID NO: 328880 - DNA, 19 bp, Homo sapiens
  siRNA target sequence for KIAA0792 (NM_014698.1,1622-1640).
ctgaataacccgatcatca

SEQ ID NO: 328881 - DNA, 19 bp, Homo sapiens
  siRNA target sequence for KIAA0792 (NM_014698.1,1756-1774).
gatgaccaaagtctacata

SEQ ID NO: 328882 - DNA, 19 bp, Homo sapiens
  siRNA target sequence for KIAA0792 (NM_014698.1,1810-1828).
gggtctcaccagtctagat

SEQ ID NO: 328883 - DNA, 19 bp, Homo sapiens
  siRNA target sequence for KIAA0792 (NM_014698.1,1811-1829).
ggtctcaccagtctagatt

SEQ ID NO: 328884 - DNA, 19 bp, Homo sapiens
  siRNA target sequence for KIAA0792 (NM_014698.1,1812-1830).
gtctcaccagtctagattt

SEQ ID NO: 328885 - DNA, 19 bp, Homo sapiens
  siRNA target sequence for KIAA0792 (NM_014698.1,1814-1832).
ctcaccagtctagattttt

SEQ ID NO: 328886 - DNA, 19 bp, Homo sapiens
  siRNA target sequence for KIAA0792 (NM_014698.1,1837-1855).
ccggtggctctttgacaaa

SEQ ID NO: 328887 - DNA, 19 bp, Homo sapiens
  siRNA target sequence for KIAA0792 (NM_014698.1,1838-1856).
cggtggctctttgacaaaa

SEQ ID NO: 328888 - DNA, 19 bp, Homo sapiens
  siRNA target sequence for KIAA0792 (NM_014698.1,1980-1998).
gtctcatcctctatacctt

SEQ ID NO: 328889 - DNA, 19 bp, Homo sapiens
  siRNA target sequence for KIAA0792 (NM_014698.1,2065-2083).
cgagtttggagccatgtat

SEQ ID NO: 328890 - DNA, 19 bp, Homo sapiens
  siRNA target sequence for KIAA0792 (NM_014698.1,2148-2166).
catttggcctcatctacat

SEQ ID NO: 328891 - DNA, 19 bp, Homo sapiens
  siRNA target sequence for KIAA0792 (NM_014698.1,2283-2301).
gcctcttctggctctactt

SEQ ID NO: 328892 - DNA, 19 bp, Homo sapiens
  siRNA target sequence for KIAA0792 (NM_014698.1,2387-2405).
gctcacacctgctttggat

SEQ ID NO: 328893 - DNA, 19 bp, Homo sapiens
  siRNA target sequence for KIAA0792 (NM_014698.1,2419-2437).
cagccctctgaactacaaa

SEQ ID NO: 328894 - DNA, 19 bp, Homo sapiens
  siRNA target sequence for KIAA0792 (NM_014698.1,2582-2600).
ggtgccatccacaacatca

SEQ ID NO: 328895 - DNA, 19 bp, Homo sapiens
  siRNA target sequence for LYNX1 (NM_023946.1,784-802).
gcagccgaagccatatggt

SEQ ID NO: 328896 - DNA, 19 bp, Homo sapiens
  siRNA target sequence for LYNX1 (NM_177457.1,794-812).
ccaggatgaaggtcagtaa

SEQ ID NO: 328897 - DNA, 19 bp, Homo sapiens
  siRNA target sequence for LYNX1 (NM_177457.1,828-846).
ctgcttcgagactgtgtat

SEQ ID NO: 328898 - DNA, 19 bp, Homo sapiens
  siRNA target sequence for LYNX1 (NM_177457.1,830-848).
gcttcgagactgtgtatga

SEQ ID NO: 328899 - DNA, 19 bp, Homo sapiens
  siRNA target sequence for LYNX1 (NM_177457.1,831-849).
cttcgagactgtgtatgat

SEQ ID NO: 328900 - DNA, 19 bp, Homo sapiens
  siRNA target sequence for MAMDC2 (NM_153267.3,712-730).
gcctctctgccgtggattt

SEQ ID NO: 328901 - DNA, 19 bp, Homo sapiens
  siRNA target sequence for MAMDC2 (NM_153267.3,714-732).
ctctctgccgtggatttta

SEQ ID NO: 328902 - DNA, 19 bp, Homo sapiens
  siRNA target sequence for MAMDC2 (NM_153267.3,738-756).
ggaaggccattacatttat

SEQ ID NO: 328903 - DNA, 19 bp, Homo sapiens
  siRNA target sequence for MAMDC2 (NM_153267.3,838-856).
cgtttggtctaccagataa

SEQ ID NO: 328904 - DNA, 19 bp, Homo sapiens
  siRNA target sequence for MAMDC2 (NM_153267.3,894-912).
gaacctctacatgagattt

SEQ ID NO: 328905 - DNA, 19 bp, Homo sapiens
  siRNA target sequence for MAMDC2 (NM_153267.3,936-954).
gctttggtcagctaaggaa

SEQ ID NO: 328906 - DNA, 19 bp, Homo sapiens
  siRNA target sequence for MAMDC2 (NM_153267.3,976-994).
gccagcttggatttgcaaa

SEQ ID NO: 328907 - DNA, 19 bp, Homo sapiens
  siRNA target sequence for MAMDC2 (NM_153267.3,977-995).
ccagcttggatttgcaaaa

SEQ ID NO: 328908 - DNA, 19 bp, Homo sapiens
  siRNA target sequence for MAMDC2 (NM_153267.3,1049-1067).
cagccagcatcgcactatt

SEQ ID NO: 328909 - DNA, 19 bp, Homo sapiens
  siRNA target sequence for MAMDC2 (NM_153267.3,1053-1071).
cagcatcgcactatttgaa

SEQ ID NO: 328910 - DNA, 19 bp, Homo sapiens
  siRNA target sequence for MAMDC2 (NM_153267.3,1055-1073).
gcatcgcactatttgaaat

SEQ ID NO: 328911 - DNA, 19 bp, Homo sapiens
  siRNA target sequence for MAMDC2 (NM_153267.3,1061-1079).
cactatttgaaatcaagat

SEQ ID NO: 328912 - DNA, 19 bp, Homo sapiens
  siRNA target sequence for MAMDC2 (NM_153267.3,1082-1100).
caaccggctactgtattga

SEQ ID NO: 328913 - DNA, 19 bp, Homo sapiens
  siRNA target sequence for MAMDC2 (NM_153267.3,1141-1159).
cgctggaatcccaatgtga

SEQ ID NO: 328914 - DNA, 19 bp, Homo sapiens
  siRNA target sequence for MAMDC2 (NM_153267.3,1152-1170).
caatgtgaactggtttgtt

SEQ ID NO: 328915 - DNA, 19 bp, Homo sapiens
  siRNA target sequence for MAMDC2 (NM_153267.3,1248-1266).
gtacgtggactcagtttat

SEQ ID NO: 328916 - DNA, 19 bp, Homo sapiens
  siRNA target sequence for MAMDC2 (NM_153267.3,1331-1349).
gcctgtcattttattacca

SEQ ID NO: 328917 - DNA, 19 bp, Homo sapiens
  siRNA target sequence for MAMDC2 (NM_153267.3,1353-1371).
ccagcaggggaatgacaat

SEQ ID NO: 328918 - DNA, 19 bp, Homo sapiens
  siRNA target sequence for MAMDC2 (NM_153267.3,1359-1377).
ggggaatgacaatgtcttt

SEQ ID NO: 328919 - DNA, 19 bp, Homo sapiens
  siRNA target sequence for MAMDC2 (NM_153267.3,1400-1418).
ctggcctttacgaggaaat

SEQ ID NO: 328920 - DNA, 19 bp, Homo sapiens
  siRNA target sequence for MAMDC2 (NM_153267.3,1402-1420).
ggcctttacgaggaaatct

SEQ ID NO: 328921 - DNA, 19 bp, Homo sapiens
  siRNA target sequence for MAMDC2 (NM_153267.3,1543-1561).
ctggatgatatttcattct

SEQ ID NO: 328922 - DNA, 19 bp, Homo sapiens
  siRNA target sequence for MAMDC2 (NM_153267.3,1619-1637).
gcaattttgagcaagatct

SEQ ID NO: 328923 - DNA, 19 bp, Homo sapiens
  siRNA target sequence for MAMDC2 (NM_153267.3,1640-1658).
gcaacttttaccaagataa

SEQ ID NO: 328924 - DNA, 19 bp, Homo sapiens
  siRNA target sequence for MAMDC2 (NM_153267.3,1641-1659).
caacttttaccaagataaa

SEQ ID NO: 328925 - DNA, 19 bp, Homo sapiens
  siRNA target sequence for MAMDC2 (NM_153267.3,1670-1688).
gttggacccgagtgaaagt

SEQ ID NO: 328926 - DNA, 19 bp, Homo sapiens
  siRNA target sequence for MAMDC2 (NM_153267.3,1673-1691).
ggacccgagtgaaagtaaa

SEQ ID NO: 328927 - DNA, 19 bp, Homo sapiens
  siRNA target sequence for MAMDC2 (NM_153267.3,1674-1692).
gacccgagtgaaagtaaaa

SEQ ID NO: 328928 - DNA, 19 bp, Homo sapiens
  siRNA target sequence for MAMDC2 (NM_153267.3,1747-1765).
gccaacacaaagttcacat

SEQ ID NO: 328929 - DNA, 19 bp, Homo sapiens
  siRNA target sequence for MAMDC2 (NM_153267.3,1811-1829).
gaaacttgcagtattgtct

SEQ ID NO: 328930 - DNA, 19 bp, Homo sapiens
  siRNA target sequence for MAMDC2 (NM_153267.3,1821-1839).
gtattgtctgcgttttcat

SEQ ID NO: 328931 - DNA, 19 bp, Homo sapiens
  siRNA target sequence for MAMDC2 (NM_153267.3,1868-1886).
gtgacaccctagcagttta

SEQ ID NO: 328932 - DNA, 19 bp, Homo sapiens
  siRNA target sequence for MAMDC2 (NM_153267.3,1870-1888).
gacaccctagcagtttaca

SEQ ID NO: 328933 - DNA, 19 bp, Homo sapiens
  siRNA target sequence for MAMDC2 (NM_153267.3,2048-2066).
ccctggatgacattacaat

SEQ ID NO: 328934 - DNA, 19 bp, Homo sapiens
  siRNA target sequence for MAMDC2 (NM_153267.3,2052-2070).
ggatgacattacaatacaa

SEQ ID NO: 328935 - DNA, 19 bp, Homo sapiens
  siRNA target sequence for MAMDC2 (NM_153267.3,2053-2071).
gatgacattacaatacaat

SEQ ID NO: 328936 - DNA, 19 bp, Homo sapiens
  siRNA target sequence for MAMDC2 (NM_153267.3,2079-2097).
ctgctcatcttcagagaaa

SEQ ID NO: 328937 - DNA, 19 bp, Homo sapiens
  siRNA target sequence for MAMDC2 (NM_153267.3,2107-2125).
ccacctggagagtgtactt

SEQ ID NO: 328938 - DNA, 19 bp, Homo sapiens
  siRNA target sequence for MAMDC2 (NM_153267.3,2120-2138).
gtactttcgagcaagatga

SEQ ID NO: 328939 - DNA, 19 bp, Homo sapiens
  siRNA target sequence for MAMDC2 (NM_153267.3,2127-2145).
cgagcaagatgaatgtaca

SEQ ID NO: 328940 - DNA, 19 bp, Homo sapiens
  siRNA target sequence for MAMDC2 (NM_153267.3,2130-2148).
gcaagatgaatgtacattt

SEQ ID NO: 328941 - DNA, 19 bp, Homo sapiens
  siRNA target sequence for MAMDC2 (NM_153267.3,2131-2149).
caagatgaatgtacattta

SEQ ID NO: 328942 - DNA, 19 bp, Homo sapiens
  siRNA target sequence for MAMDC2 (NM_153267.3,2239-2257).
ggggtaggctactacatgt

SEQ ID NO: 328943 - DNA, 19 bp, Homo sapiens
  siRNA target sequence for MAMDC2 (NM_153267.3,2240-2258).
gggtaggctactacatgta

SEQ ID NO: 328944 - DNA, 19 bp, Homo sapiens
  siRNA target sequence for MAMDC2 (NM_153267.3,2380-2398).
ctgctgagtgtttatctga

SEQ ID NO: 328945 - DNA, 19 bp, Homo sapiens
  siRNA target sequence for MAMDC2 (NM_153267.3,2460-2478).
ctggctacgagcactgatt

SEQ ID NO: 328946 - DNA, 19 bp, Homo sapiens
  siRNA target sequence for MAMDC2 (NM_153267.3,2462-2480).
ggctacgagcactgattga

SEQ ID NO: 328947 - DNA, 19 bp, Homo sapiens
  siRNA target sequence for MAMDC2 (NM_153267.3,2463-2481).
gctacgagcactgattgaa

SEQ ID NO: 328948 - DNA, 19 bp, Homo sapiens
  siRNA target sequence for MAMDC2 (NM_153267.3,2464-2482).
ctacgagcactgattgaat

SEQ ID NO: 328949 - DNA, 19 bp, Homo sapiens
  siRNA target sequence for MAMDC2 (NM_153267.3,2467-2485).
cgagcactgattgaataca

SEQ ID NO: 328950 - DNA, 19 bp, Homo sapiens
  siRNA target sequence for MAMDC2 (NM_153267.3,2493-2511).
gaggcaacaccagataatt

SEQ ID NO: 328951 - DNA, 19 bp, Homo sapiens
  siRNA target sequence for MAMDC2 (NM_153267.3,2518-2536).
gccattcgaggagtatcaa

SEQ ID NO: 328952 - DNA, 19 bp, Homo sapiens
  siRNA target sequence for MAMDC2 (NM_153267.3,2519-2537).
ccattcgaggagtatcaat

SEQ ID NO: 328953 - DNA, 19 bp, Homo sapiens
  siRNA target sequence for MAMDC2 (NM_153267.3,2520-2538).
cattcgaggagtatcaata

SEQ ID NO: 328954 - DNA, 19 bp, Homo sapiens
  siRNA target sequence for MAMDC2 (NM_153267.3,2524-2542).
cgaggagtatcaataagaa

SEQ ID NO: 328955 - DNA, 19 bp, Homo sapiens
  siRNA target sequence for MAMDC2 (NM_153267.3,2530-2548).
gtatcaataagaagtgata

SEQ ID NO: 328956 - DNA, 19 bp, Homo sapiens
  siRNA target sequence for MAMDC2 (NM_153267.3,2579-2597).
gaccctgtggagaaatgga

SEQ ID NO: 328957 - DNA, 19 bp, Homo sapiens
  siRNA target sequence for MGC3295 (NM_025246.1,605-623).
gcctggcgatgatggatat

SEQ ID NO: 328958 - DNA, 19 bp, Homo sapiens
  siRNA target sequence for MGC3295 (NM_025246.1,855-873).
ggatgtgtagctcttatca

SEQ ID NO: 328959 - DNA, 19 bp, Homo sapiens
  siRNA target sequence for MGC3295 (NM_025246.1,904-922).
catctctagaactgatttt

SEQ ID NO: 328960 - DNA, 19 bp, Homo sapiens
  siRNA target sequence for MGC3295 (NM_025246.1,953-971).
gttagttgtgtgttactat

SEQ ID NO: 328961 - DNA, 19 bp, Homo sapiens
  siRNA target sequence for MGC3295 (NM_025246.1,1001-1019).
cagattacgactcttcttt

SEQ ID NO: 328962 - DNA, 19 bp, Homo sapiens
  siRNA target sequence for MGC3295 (NM_025246.1,1016-1034).
cttttatggtgtatgcaat

SEQ ID NO: 328963 - DNA, 19 bp, Homo sapiens
  siRNA target sequence for MGC3295 (NM_025246.1,1048-1066).
cttgtgcttatacatcatt

SEQ ID NO: 328964 - DNA, 19 bp, Homo sapiens
  siRNA target sequence for MGC3295 (NM_025246.1,1138-1156).
cttttttactcgtagatga

SEQ ID NO: 328965 - DNA, 19 bp, Homo sapiens
  siRNA target sequence for MGC3295 (NM_025246.1,1193-1211).
cagcatcttaggtgtttgt

SEQ ID NO: 328966 - DNA, 19 bp, Homo sapiens
  siRNA target sequence for MGC3295 (NM_025246.1,1195-1213).
gcatcttaggtgtttgtct

SEQ ID NO: 328967 - DNA, 19 bp, Homo sapiens
  siRNA target sequence for MGC3295 (NM_025246.1,1196-1214).
catcttaggtgtttgtctt

SEQ ID NO: 328968 - DNA, 19 bp, Homo sapiens
  siRNA target sequence for MGC3295 (NM_025246.1,1220-1238).
gatcccaaacattgttgat

SEQ ID NO: 328969 - DNA, 19 bp, Homo sapiens
  siRNA target sequence for MGC3295 (NM_025246.1,1223-1241).
cccaaacattgttgatgaa

SEQ ID NO: 328970 - DNA, 19 bp, Homo sapiens
  siRNA target sequence for MGC3295 (NM_025246.1,1253-1271).
gttaaatgcctggaaagaa

SEQ ID NO: 328971 - DNA, 19 bp, Homo sapiens
  siRNA target sequence for MGC3295 (NM_025246.1,1312-1330).
ctgctctctcaatgatagt

SEQ ID NO: 328972 - DNA, 19 bp, Homo sapiens
  siRNA target sequence for MGC3295 (NM_025246.1,1314-1332).
gctctctcaatgatagtat

SEQ ID NO: 328973 - DNA, 19 bp, Homo sapiens
  siRNA target sequence for MGC3295 (NM_025246.1,1315-1333).
ctctctcaatgatagtata

SEQ ID NO: 328974 - DNA, 19 bp, Homo sapiens
  siRNA target sequence for MGC3295 (NM_025246.1,1317-1335).
ctctcaatgatagtataca

SEQ ID NO: 328975 - DNA, 19 bp, Homo sapiens
  siRNA target sequence for MGC3295 (NM_025246.1,1319-1337).
ctcaatgatagtatacaga

SEQ ID NO: 328976 - DNA, 19 bp, Homo sapiens
  siRNA target sequence for MGC3295 (NM_025246.1,1402-1420).
ggggaatatctactatgtt

SEQ ID NO: 328977 - DNA, 19 bp, Homo sapiens
  siRNA target sequence for MGC3295 (NM_025246.1,1403-1421).
gggaatatctactatgttt

SEQ ID NO: 328978 - DNA, 19 bp, Homo sapiens
  siRNA target sequence for MGC3295 (NM_025246.1,1404-1422).
ggaatatctactatgttta

SEQ ID NO: 328979 - DNA, 19 bp, Homo sapiens
  siRNA target sequence for MGC3295 (NM_025246.1,1463-1481).
gagttatctcattgctata

SEQ ID NO: 328980 - DNA, 19 bp, Homo sapiens
  siRNA target sequence for MGC3295 (NM_025246.1,1476-1494).
gctatatgtgtctgttcta

SEQ ID NO: 328981 - DNA, 19 bp, Homo sapiens
  siRNA target sequence for MGC3295 (NM_025246.1,1500-1518).
gcattcttaggagtttatt

SEQ ID NO: 328982 - DNA, 19 bp, Homo sapiens
  siRNA target sequence for MGC3295 (NM_025246.1,1547-1565).
ggttagcacagtacaacat

SEQ ID NO: 328983 - DNA, 19 bp, Homo sapiens
  siRNA target sequence for MGC3295 (NM_025246.1,1548-1566).
gttagcacagtacaacatt

SEQ ID NO: 328984 - DNA, 19 bp, Homo sapiens
  siRNA target sequence for MGC3295 (NM_025246.1,1596-1614).
cttctcgtgctgcacatat

SEQ ID NO: 328985 - DNA, 19 bp, Homo sapiens
  siRNA target sequence for MGC3295 (NM_025246.1,1601-1619).
cgtgctgcacatatttcct

SEQ ID NO: 328986 - DNA, 19 bp, Homo sapiens
  siRNA target sequence for MGC3295 (NM_025246.1,1602-1620).
gtgctgcacatatttccta

SEQ ID NO: 328987 - DNA, 19 bp, Homo sapiens
  siRNA target sequence for MGC3295 (NM_025246.1,1617-1635).
cctagcatctatgatgttt

SEQ ID NO: 328988 - DNA, 19 bp, Homo sapiens
  siRNA target sequence for MGC3295 (NM_025246.1,1622-1640).
catctatgatgtttttgga

SEQ ID NO: 328989 - DNA, 19 bp, Homo sapiens
  siRNA target sequence for MGC3295 (NM_025246.1,1638-1656).
ggaggggtaatcattatga

SEQ ID NO: 328990 - DNA, 19 bp, Homo sapiens
  siRNA target sequence for MGC3295 (NM_025246.1,1639-1657).
gaggggtaatcattatgat

SEQ ID NO: 328991 - DNA, 19 bp, Homo sapiens
  siRNA target sequence for MGC3295 (NM_025246.1,1643-1661).
ggtaatcattatgattagt

SEQ ID NO: 328992 - DNA, 19 bp, Homo sapiens
  siRNA target sequence for MGC3295 (NM_025246.1,1686-1704).
ctttactggaggaatttaa

SEQ ID NO: 328993 - DNA, 19 bp, Homo sapiens
  siRNA target sequence for MGC3295 (NM_025246.1,1728-1746).
ctagactctcccattaaat

SEQ ID NO: 328994 - DNA, 19 bp, Homo sapiens
  siRNA target sequence for STOML3 (NM_145286.1,173-191).
cgtgggtgtcaacaataaa

SEQ ID NO: 328995 - DNA, 19 bp, Homo sapiens
  siRNA target sequence for STOML3 (NM_145286.1,343-361).
ccaaggggccaggtttgat

SEQ ID NO: 328996 - DNA, 19 bp, Homo sapiens
  siRNA target sequence for STOML3 (NM_145286.1,396-414).
gttgacctccgaacagtta

SEQ ID NO: 328997 - DNA, 19 bp, Homo sapiens
  siRNA target sequence for STOML3 (NM_145286.1,399-417).
gacctccgaacagttactt

SEQ ID NO: 328998 - DNA, 19 bp, Homo sapiens
  siRNA target sequence for STOML3 (NM_145286.1,446-464).
cagagactccgtaactact

SEQ ID NO: 328999 - DNA, 19 bp, Homo sapiens
  siRNA target sequence for STOML3 (NM_145286.1,474-492).
ggagttgtctattacagaa

SEQ ID NO: 329000 - DNA, 19 bp, Homo sapiens
  siRNA target sequence for STOML3 (NM_145286.1,477-495).
gttgtctattacagaatct

SEQ ID NO: 329001 - DNA, 19 bp, Homo sapiens
  siRNA target sequence for STOML3 (NM_145286.1,628-646).
cccatagcatccagacttt

SEQ ID NO: 329002 - DNA, 19 bp, Homo sapiens
  siRNA target sequence for STOML3 (NM_145286.1,629-647).
ccatagcatccagacttta

SEQ ID NO: 329003 - DNA, 19 bp, Homo sapiens
  siRNA target sequence for STOML3 (NM_145286.1,635-653).
catccagactttacttgat

SEQ ID NO: 329004 - DNA, 19 bp, Homo sapiens
  siRNA target sequence for STOML3 (NM_145286.1,685-703).
cccgagtggaaatcaaaga

SEQ ID NO: 329005 - DNA, 19 bp, Homo sapiens
  siRNA target sequence for STOML3 (NM_145286.1,889-907).
cggtagccaccgagaagaa

SEQ ID NO: 329006 - DNA, 19 bp, Homo sapiens
  siRNA target sequence for STOML3 (NM_145286.1,894-912).
gccaccgagaagaattcta

SEQ ID NO: 329007 - DNA, 19 bp, Homo sapiens
  siRNA target sequence for STOML3 (NM_145286.1,899-917).
cgagaagaattctacgatt

SEQ ID NO: 329008 - DNA, 19 bp, Homo sapiens
  siRNA target sequence for STOML3 (NM_145286.1,920-938).
gtttcctctgcccatgaat

SEQ ID NO: 329009 - DNA, 19 bp, Homo sapiens
  siRNA target sequence for STOML3 (NM_145286.1,954-972).
ggtggcgtcagctatgata

SEQ ID NO: 329010 - DNA, 19 bp, Homo sapiens
  siRNA target sequence for STOML3 (NM_145286.1,955-973).
gtggcgtcagctatgataa

SEQ ID NO: 329011 - DNA, 19 bp, Homo sapiens
  siRNA target sequence for STOML3 (NM_145286.1,958-976).
gcgtcagctatgataacca

SEQ ID NO: 329012 - DNA, 19 bp, Homo sapiens
  siRNA target sequence for TDE2L (NM_178865.2,257-275).
ccgtgagccgcctcatctt

SEQ ID NO: 329013 - DNA, 19 bp, Homo sapiens
  siRNA target sequence for TDE2L (NM_178865.2,581-599).
ccgtgggtgccttctacat

SEQ ID NO: 329014 - DNA, 19 bp, Homo sapiens
  siRNA target sequence for TDE2L (NM_178865.2,752-770).
ggtacgcaggcctcttctt

SEQ ID NO: 329015 - DNA, 19 bp, Homo sapiens
  siRNA target sequence for TDE2L (NM_178865.2,974-992).
ccctctacaccatgtttgt

SEQ ID NO: 329016 - DNA, 19 bp, Homo sapiens
  siRNA target sequence for TDE2L (NM_178865.2,1212-1230).
ggagtgcccacctatgcta

SEQ ID NO: 329017 - DNA, 19 bp, Homo sapiens
  siRNA target sequence for TDE2L (NM_178865.2,1390-1408).
ggtgagacccggaagatga

SEQ ID NO: 329018 - DNA, 19 bp, Homo sapiens
  siRNA target sequence for TERE1 (NM_013319.1,351-369).
ctgggggagaagattaaca

SEQ ID NO: 329019 - DNA, 19 bp, Homo sapiens
  siRNA target sequence for TERE1 (NM_013319.1,374-392).
gtcgggagagactgtcaaa

SEQ ID NO: 329020 - DNA, 19 bp, Homo sapiens
  siRNA target sequence for TERE1 (NM_013319.1,420-438).
gactgtcccgagcaagata

SEQ ID NO: 329021 - DNA, 19 bp, Homo sapiens
  siRNA target sequence for TERE1 (NM_013319.1,624-642).
ggtaatttggtcaacactt

SEQ ID NO: 329022 - DNA, 19 bp, Homo sapiens
  siRNA target sequence for TERE1 (NM_013319.1,625-643).
gtaatttggtcaacactta

SEQ ID NO: 329023 - DNA, 19 bp, Homo sapiens
  siRNA target sequence for TERE1 (NM_013319.1,633-651).
gtcaacacttactatgact

SEQ ID NO: 329024 - DNA, 19 bp, Homo sapiens
  siRNA target sequence for TERE1 (NM_013319.1,635-653).
caacacttactatgacttt

SEQ ID NO: 329025 - DNA, 19 bp, Homo sapiens
  siRNA target sequence for TERE1 (NM_013319.1,691-709).
cacttgtggaccgaatctt

SEQ ID NO: 329026 - DNA, 19 bp, Homo sapiens
  siRNA target sequence for TERE1 (NM_013319.1,766-784).
gtgccgcttgcctctacta

SEQ ID NO: 329027 - DNA, 19 bp, Homo sapiens
  siRNA target sequence for TERE1 (NM_013319.1,859-877).
gaggaattggattcaagta

SEQ ID NO: 329028 - DNA, 19 bp, Homo sapiens
  siRNA target sequence for TERE1 (NM_013319.1,1091-1109).
ccccacgttctcctacatt

SEQ ID NO: 329029 - DNA, 19 bp, Homo sapiens
  siRNA target sequence for TERE1 (NM_013319.1,1093-1111).
ccacgttctcctacattct

SEQ ID NO: 329030 - DNA, 19 bp, Homo sapiens
  siRNA target sequence for TERE1 (NM_013319.1,1218-1236).
cttgagagacagtttcgaa

SEQ ID NO: 329031 - DNA, 19 bp, Homo sapiens
  siRNA target sequence for TERE1 (NM_013319.1,1233-1251).
cgaagccaggccttcaaca

SEQ ID NO: 329032 - DNA, 19 bp, Homo sapiens
  siRNA target sequence for CSPG5 (NM_006574.2,403-421).
gtcctcgggcagtcaatca

SEQ ID NO: 329033 - DNA, 19 bp, Homo sapiens
  siRNA target sequence for CSPG5 (NM_006574.2,606-624).
gccccaaccggcatcagat

SEQ ID NO: 329034 - DNA, 19 bp, Homo sapiens
  siRNA target sequence for CSPG5 (NM_006574.2,607-625).
ccccaaccggcatcagata

SEQ ID NO: 329035 - DNA, 19 bp, Homo sapiens
  siRNA target sequence for CSPG5 (NM_006574.2,608-626).
cccaaccggcatcagatat

SEQ ID NO: 329036 - DNA, 19 bp, Homo sapiens
  siRNA target sequence for CSPG5 (NM_006574.2,610-628).
caaccggcatcagatatca

SEQ ID NO: 329037 - DNA, 19 bp, Homo sapiens
  siRNA target sequence for CSPG5 (NM_006574.2,614-632).
cggcatcagatatcattga

SEQ ID NO: 329038 - DNA, 19 bp, Homo sapiens
  siRNA target sequence for CSPG5 (NM_006574.2,617-635).
catcagatatcattgacat

SEQ ID NO: 329039 - DNA, 19 bp, Homo sapiens
  siRNA target sequence for CSPG5 (NM_006574.2,747-765).
ctggagcctgcttgactta

SEQ ID NO: 329040 - DNA, 19 bp, Homo sapiens
  siRNA target sequence for CSPG5 (NM_006574.2,749-767).
ggagcctgcttgacttata

SEQ ID NO: 329041 - DNA, 19 bp, Homo sapiens
  siRNA target sequence for CSPG5 (NM_006574.2,752-770).
gcctgcttgacttatacga

SEQ ID NO: 329042 - DNA, 19 bp, Homo sapiens
  siRNA target sequence for CSPG5 (NM_006574.2,753-771).
cctgcttgacttatacgat

SEQ ID NO: 329043 - DNA, 19 bp, Homo sapiens
  siRNA target sequence for CSPG5 (NM_006574.2,757-775).
cttgacttatacgatgatt

SEQ ID NO: 329044 - DNA, 19 bp, Homo sapiens
  siRNA target sequence for CSPG5 (NM_006574.2,760-778).
gacttatacgatgatttca

SEQ ID NO: 329045 - DNA, 19 bp, Homo sapiens
  siRNA target sequence for CSPG5 (NM_006574.2,777-795).
cacccccttcgatgaatct

SEQ ID NO: 329046 - DNA, 19 bp, Homo sapiens
  siRNA target sequence for CSPG5 (NM_006574.2,779-797).
cccccttcgatgaatctga

SEQ ID NO: 329047 - DNA, 19 bp, Homo sapiens
  siRNA target sequence for CSPG5 (NM_006574.2,780-798).
ccccttcgatgaatctgat

SEQ ID NO: 329048 - DNA, 19 bp, Homo sapiens
  siRNA target sequence for CSPG5 (NM_006574.2,781-799).
cccttcgatgaatctgatt

SEQ ID NO: 329049 - DNA, 19 bp, Homo sapiens
  siRNA target sequence for CSPG5 (NM_006574.2,807-825).
caccacatccttttatgat

SEQ ID NO: 329050 - DNA, 19 bp, Homo sapiens
  siRNA target sequence for CSPG5 (NM_006574.2,1051-1069).
gacttggcctccagtgaaa

SEQ ID NO: 329051 - DNA, 19 bp, Homo sapiens
  siRNA target sequence for CSPG5 (NM_006574.2,1129-1147).
gacctcttcccaagttact

SEQ ID NO: 329052 - DNA, 19 bp, Homo sapiens
  siRNA target sequence for CSPG5 (NM_006574.2,1137-1155).
cccaagttactgtcacaat

SEQ ID NO: 329053 - DNA, 19 bp, Homo sapiens
  siRNA target sequence for CSPG5 (NM_006574.2,1202-1220).
gcaacacgcaggactacat

SEQ ID NO: 329054 - DNA, 19 bp, Homo sapiens
  siRNA target sequence for CSPG5 (NM_006574.2,1351-1369).
ctgctcaagacggagaata

SEQ ID NO: 329055 - DNA, 19 bp, Homo sapiens
  siRNA target sequence for CSPG5 (NM_006574.2,1354-1372).
ctcaagacggagaatacca

SEQ ID NO: 329056 - DNA, 19 bp, Homo sapiens
  siRNA target sequence for CSPG5 (NM_006574.2,1374-1392).
gctgcgtaggaccaacaaa

SEQ ID NO: 329057 - DNA, 19 bp, Homo sapiens
  siRNA target sequence for CSPG5 (NM_006574.2,1406-1424).
ctgagctccacaatgataa

SEQ ID NO: 329058 - DNA, 19 bp, Homo sapiens
  siRNA target sequence for CSPG5 (NM_006574.2,1471-1489).
cctagtgctccccacaaaa

SEQ ID NO: 329059 - DNA, 19 bp, Homo sapiens
  siRNA target sequence for CSPG5 (NM_006574.2,1472-1490).
ctagtgctccccacaaaat

SEQ ID NO: 329060 - DNA, 19 bp, Homo sapiens
  siRNA target sequence for CSPG5 (NM_006574.2,1475-1493).
gtgctccccacaaaatcca

SEQ ID NO: 329061 - DNA, 19 bp, Homo sapiens
  siRNA target sequence for CSPG5 (NM_006574.2,1606-1624).
cttcagaataatttaacct

SEQ ID NO: 329062 - DNA, 19 bp, Homo sapiens
  siRNA target sequence for NESG1 (NM_012337.1,473-491).
cagtgatgacacgaaagaa

SEQ ID NO: 329063 - DNA, 19 bp, Homo sapiens
  siRNA target sequence for NESG1 (NM_012337.1,475-493).
gtgatgacacgaaagaaga

SEQ ID NO: 329064 - DNA, 19 bp, Homo sapiens
  siRNA target sequence for NESG1 (NM_012337.1,753-771).
ggagcggcagaaatccatt

SEQ ID NO: 329065 - DNA, 19 bp, Homo sapiens
  siRNA target sequence for NESG1 (NM_012337.1,955-973).
gaacgaaggcagcaacaaa

SEQ ID NO: 329066 - DNA, 19 bp, Homo sapiens
  siRNA target sequence for NESG1 (NM_012337.1,962-980).
ggcagcaacaaaaactgaa

SEQ ID NO: 329067 - DNA, 19 bp, Homo sapiens
  siRNA target sequence for NESG1 (NM_012337.1,993-1011).
gattaagcgcatcaatgat

SEQ ID NO: 329068 - DNA, 19 bp, Homo sapiens
  siRNA target sequence for NESG1 (NM_012337.1,1063-1081).
cagatggtgatggagttta

SEQ ID NO: 329069 - DNA, 19 bp, Homo sapiens
  siRNA target sequence for NESG1 (NM_012337.1,1273-1291).
gaaaatgcgcggaagaaga

SEQ ID NO: 329070 - DNA, 19 bp, Homo sapiens
  siRNA target sequence for NESG1 (NM_012337.1,1279-1297).
gcgcggaagaagatggaaa

SEQ ID NO: 329071 - DNA, 19 bp, Homo sapiens
  siRNA target sequence for NESG1 (NM_012337.1,1582-1600).
gtgagcgcatcgatgagat

SEQ ID NO: 329072 - DNA, 19 bp, Homo sapiens
  siRNA target sequence for FGL1 (NM_004467.2,639-657).
gaagtccagttccttgata

SEQ ID NO: 329073 - DNA, 19 bp, Homo sapiens
  siRNA target sequence for FGL1 (NM_004467.2,695-713).
gaggcagtatgcagattgt

SEQ ID NO: 329074 - DNA, 19 bp, Homo sapiens
  siRNA target sequence for FGL1 (NM_004467.2,840-858).
cgatctgatggcagtgaaa

SEQ ID NO: 329075 - DNA, 19 bp, Homo sapiens
  siRNA target sequence for FGL1 (NM_004467.2,849-867).
ggcagtgaaaactttaaca

SEQ ID NO: 329076 - DNA, 19 bp, Homo sapiens
  siRNA target sequence for FGL1 (NM_004467.2,868-886).
gaggatggaaagactatga

SEQ ID NO: 329077 - DNA, 19 bp, Homo sapiens
  siRNA target sequence for FGL1 (NM_004467.2,986-1004).
cgaccttgcagattttgaa

SEQ ID NO: 329078 - DNA, 19 bp, Homo sapiens
  siRNA target sequence for FGL1 (NM_004467.2,1012-1030).
gccgttatgcacaatataa

SEQ ID NO: 329079 - DNA, 19 bp, Homo sapiens
  siRNA target sequence for FGL1 (NM_004467.2,1014-1032).
cgttatgcacaatataaga

SEQ ID NO: 329080 - DNA, 19 bp, Homo sapiens
  siRNA target sequence for FGL1 (NM_004467.2,1015-1033).
gttatgcacaatataagaa

SEQ ID NO: 329081 - DNA, 19 bp, Homo sapiens
  siRNA target sequence for FGL1 (NM_004467.2,1055-1073).
gaatttctacgagttgaat

SEQ ID NO: 329082 - DNA, 19 bp, Homo sapiens
  siRNA target sequence for FGL1 (NM_004467.2,1070-1088).
gaatattggggaatattct

SEQ ID NO: 329083 - DNA, 19 bp, Homo sapiens
  siRNA target sequence for FGL1 (NM_004467.2,1106-1124).
ccttgcggggaattttcat

SEQ ID NO: 329084 - DNA, 19 bp, Homo sapiens
  siRNA target sequence for FGL1 (NM_004467.2,1141-1159).
gggctagtcaccaaagaat

SEQ ID NO: 329085 - DNA, 19 bp, Homo sapiens
  siRNA target sequence for FGL1 (NM_004467.2,1174-1192).
gggacagagatcatgacaa

SEQ ID NO: 329086 - DNA, 19 bp, Homo sapiens
  siRNA target sequence for FGL1 (NM_004467.2,1221-1239).
cagtctggctggtggttta

SEQ ID NO: 329087 - DNA, 19 bp, Homo sapiens
  siRNA target sequence for FGL1 (NM_004467.2,1283-1301).
cccctacacggctaaaaca

SEQ ID NO: 329088 - DNA, 19 bp, Homo sapiens
  siRNA target sequence for FGL1 (NM_004467.2,1328-1346).
gcatgggtggtggtattct

SEQ ID NO: 329089 - DNA, 19 bp, Homo sapiens
  siRNA target sequence for FGL1 (NM_004467.2,1339-1357).
ggtattctctgaaatctgt

SEQ ID NO: 329090 - DNA, 19 bp, Homo sapiens
  siRNA target sequence for CHGB (NM_001819.1,151-169).
ggggctggcggctgtcaat

SEQ ID NO: 329091 - DNA, 19 bp, Homo sapiens
  siRNA target sequence for CHGB (NM_001819.1,155-173).
ctggcggctgtcaattcca

SEQ ID NO: 329092 - DNA, 19 bp, Homo sapiens
  siRNA target sequence for CHGB (NM_001819.1,223-241).
cattgaggtcctctcaaat

SEQ ID NO: 329093 - DNA, 19 bp, Homo sapiens
  siRNA target sequence for CHGB (NM_001819.1,881-899).
ccccgaagccaggaagaat

SEQ ID NO: 329094 - DNA, 19 bp, Homo sapiens
  siRNA target sequence for CHGB (NM_001819.1,1281-1299).
ccagcttagagcttgataa

SEQ ID NO: 329095 - DNA, 19 bp, Homo sapiens
  siRNA target sequence for CHGB (NM_001819.1,1300-1318).
gatggcacatggatatggt

SEQ ID NO: 329096 - DNA, 19 bp, Homo sapiens
  siRNA target sequence for CHGB (NM_001819.1,1385-1403).
gagccacgtgcctatttca

SEQ ID NO: 329097 - DNA, 19 bp, Homo sapiens
  siRNA target sequence for CHGB (NM_001819.1,1388-1406).
ccacgtgcctatttcatgt

SEQ ID NO: 329098 - DNA, 19 bp, Homo sapiens
  siRNA target sequence for CHGB (NM_001819.1,1572-1590).
gagacctgcaggacactaa

SEQ ID NO: 329099 - DNA, 19 bp, Homo sapiens
  siRNA target sequence for CHGB (NM_001819.1,1580-1598).
caggacactaaagaaaaca

SEQ ID NO: 329100 - DNA, 19 bp, Homo sapiens
  siRNA target sequence for CHGB (NM_001819.1,1603-1621).
ggaagctaggtttcaagat

SEQ ID NO: 329101 - DNA, 19 bp, Homo sapiens
  siRNA target sequence for CHGB (NM_001819.1,1611-1629).
ggtttcaagataaacaata

SEQ ID NO: 329102 - DNA, 19 bp, Homo sapiens
  siRNA target sequence for CHGB (NM_001819.1,1616-1634).
caagataaacaatatagct

SEQ ID NO: 329103 - DNA, 19 bp, Homo sapiens
  siRNA target sequence for CHGB (NM_001819.1,1662-1680).
gattaggggaactgttcaa

SEQ ID NO: 329104 - DNA, 19 bp, Homo sapiens
  siRNA target sequence for CHGB (NM_001819.1,1777-1795).
gaccttgaacgagaagaat

SEQ ID NO: 329105 - DNA, 19 bp, Homo sapiens
  siRNA target sequence for CHGB (NM_001819.1,1798-1816).
cttcccagaatacaactat

SEQ ID NO: 329106 - DNA, 19 bp, Homo sapiens
  siRNA target sequence for CHGB (NM_001819.1,1897-1915).
ggacctgaaaaggcaatat

SEQ ID NO: 329107 - DNA, 19 bp, Homo sapiens
  siRNA target sequence for CHGB (NM_001819.1,1954-1972).
gaagaagtcagctgagttt

SEQ ID NO: 329108 - DNA, 19 bp, Homo sapiens
  siRNA target sequence for CHGB (NM_001819.1,2094-2112).
caatggatttggaactaca

SEQ ID NO: 329109 - DNA, 19 bp, Homo sapiens
  siRNA target sequence for CRISP2 (NM_003296.1,245-263).
ctttactaccggtgttgtt

SEQ ID NO: 329110 - DNA, 19 bp, Homo sapiens
  siRNA target sequence for CRISP2 (NM_003296.1,432-450).
cagagaggtaacaacgaat

SEQ ID NO: 329111 - DNA, 19 bp, Homo sapiens
  siRNA target sequence for CRISP2 (NM_003296.1,462-480).
ggcaaacaagtgcacttta

SEQ ID NO: 329112 - DNA, 19 bp, Homo sapiens
  siRNA target sequence for CRISP2 (NM_003296.1,464-482).
caaacaagtgcactttaca

SEQ ID NO: 329113 - DNA, 19 bp, Homo sapiens
  siRNA target sequence for CRISP2 (NM_003296.1,468-486).
caagtgcactttacaacat

SEQ ID NO: 329114 - DNA, 19 bp, Homo sapiens
  siRNA target sequence for CRISP2 (NM_003296.1,471-489).
gtgcactttacaacatagt

SEQ ID NO: 329115 - DNA, 19 bp, Homo sapiens
  siRNA target sequence for CRISP2 (NM_003296.1,501-519).
ccgcaaaaccagtacaaga

SEQ ID NO: 329116 - DNA, 19 bp, Homo sapiens
  siRNA target sequence for CRISP2 (NM_003296.1,502-520).
cgcaaaaccagtacaagat

SEQ ID NO: 329117 - DNA, 19 bp, Homo sapiens
  siRNA target sequence for CRISP2 (NM_003296.1,589-607).
gagatcctagattttgtct

SEQ ID NO: 329118 - DNA, 19 bp, Homo sapiens
  siRNA target sequence for CRISP2 (NM_003296.1,591-609).
gatcctagattttgtctat

SEQ ID NO: 329119 - DNA, 19 bp, Homo sapiens
  siRNA target sequence for CRISP2 (NM_003296.1,678-696).
ccaggtaggctgtggaatt

SEQ ID NO: 329120 - DNA, 19 bp, Homo sapiens
  siRNA target sequence for CRISP2 (NM_003296.1,702-720).
ctgtcccaatcaagatagt

SEQ ID NO: 329121 - DNA, 19 bp, Homo sapiens
  siRNA target sequence for CRISP2 (NM_003296.1,704-722).
gtcccaatcaagatagtct

SEQ ID NO: 329122 - DNA, 19 bp, Homo sapiens
  siRNA target sequence for CRISP2 (NM_003296.1,706-724).
cccaatcaagatagtctaa

SEQ ID NO: 329123 - DNA, 19 bp, Homo sapiens
  siRNA target sequence for CRISP2 (NM_003296.1,712-730).
caagatagtctaaaatact

SEQ ID NO: 329124 - DNA, 19 bp, Homo sapiens
  siRNA target sequence for CRISP2 (NM_003296.1,715-733).
gatagtctaaaatactact

SEQ ID NO: 329125 - DNA, 19 bp, Homo sapiens
  siRNA target sequence for CRISP2 (NM_003296.1,751-769).
cctgctggtaataatatga

SEQ ID NO: 329126 - DNA, 19 bp, Homo sapiens
  siRNA target sequence for CRISP2 (NM_003296.1,757-775).
ggtaataatatgaatagaa

SEQ ID NO: 329127 - DNA, 19 bp, Homo sapiens
  siRNA target sequence for CRISP2 (NM_003296.1,845-863).
ccaatagttgccagtatca

SEQ ID NO: 329128 - DNA, 19 bp, Homo sapiens
  siRNA target sequence for CRISP2 (NM_003296.1,851-869).
gttgccagtatcaagatct

SEQ ID NO: 329129 - DNA, 19 bp, Homo sapiens
  siRNA target sequence for CRISP2 (NM_003296.1,862-880).
caagatctcctaagtaact

SEQ ID NO: 329130 - DNA, 19 bp, Homo sapiens
  siRNA target sequence for CRISP2 (NM_003296.1,944-962).
cttgcctatgtgagaacaa

SEQ ID NO: 329131 - DNA, 19 bp, Homo sapiens
  siRNA target sequence for CRISP2 (NM_003296.1,947-965).
gcctatgtgagaacaaaat

SEQ ID NO: 329132 - DNA, 19 bp, Homo sapiens
  siRNA target sequence for FHR-3 (NM_021023.1,341-359).
gggtaactctacagaagtt

SEQ ID NO: 329133 - DNA, 19 bp, Homo sapiens
  siRNA target sequence for HFL3 (NM_005666.1,491-509).
caaatgcaggtccactatt

SEQ ID NO: 329134 - DNA, 19 bp, Homo sapiens
  siRNA target sequence for HFL3 (NM_005666.1,745-763).
ggacaaaccaacaaaagct

SEQ ID NO: 329135 - DNA, 19 bp, Homo sapiens
  siRNA target sequence for HFL3 (NM_005666.1,746-764).
gacaaaccaacaaaagctt

SEQ ID NO: 329136 - DNA, 19 bp, Homo sapiens
  siRNA target sequence for HFL3 (NM_005666.1,769-787).
caagaacaggtgacatagt

SEQ ID NO: 329137 - DNA, 19 bp, Homo sapiens
  siRNA target sequence for HFL3 (NM_005666.1,772-790).
gaacaggtgacatagttga

SEQ ID NO: 329138 - DNA, 19 bp, Homo sapiens
  siRNA target sequence for HFL3 (NM_005666.1,775-793).
caggtgacatagttgaatt

SEQ ID NO: 329139 - DNA, 19 bp, Homo sapiens
  siRNA target sequence for HFL3 (NM_005666.1,778-796).
gtgacatagttgaatttgt

SEQ ID NO: 329140 - DNA, 19 bp, Homo sapiens
  siRNA target sequence for PRH1 (NM_006250.1,126-144).
gatgttcccctcgtaatat

SEQ ID NO: 329141 - DNA, 19 bp, Homo sapiens
  siRNA target sequence for PRH2 (NM_005042.1,126-144).
gacgttcccttggtaatat

SEQ ID NO: 329142 - DNA, 19 bp, Homo sapiens
  siRNA target sequence for PRH2 (NM_005042.1,128-146).
cgttcccttggtaatatca

SEQ ID NO: 329143 - DNA, 19 bp, Homo sapiens
  siRNA target sequence for SCGB1D1 (NM_006552.1,92-110).
ctgctaccgggcaaatgca

SEQ ID NO: 329144 - DNA, 19 bp, Homo sapiens
  siRNA target sequence for SCGB1D1 (NM_006552.1,246-264).
gatacgatggcctatgaga

SEQ ID NO: 329145 - DNA, 19 bp, Homo sapiens
  siRNA target sequence for SCGB1D2 (NM_006551.2,154-172).
ctgttagacttcttcttca

SEQ ID NO: 329146 - DNA, 19 bp, Homo sapiens
  siRNA target sequence for SCGB1D2 (NM_006551.2,156-174).
gttagacttcttcttcatt

SEQ ID NO: 329147 - DNA, 19 bp, Homo sapiens
  siRNA target sequence for SCGB1D2 (NM_006551.2,182-200).
ctctgttcaagttaagtct

SEQ ID NO: 329148 - DNA, 19 bp, Homo sapiens
  siRNA target sequence for SEMG2 (NM_003008.2,123-141).
cggatcttcccaatttcca

SEQ ID NO: 329149 - DNA, 19 bp, Homo sapiens
  siRNA target sequence for SEMG2 (NM_003008.2,224-242).
catatcatgtagacatcaa

SEQ ID NO: 329150 - DNA, 19 bp, Homo sapiens
  siRNA target sequence for SEMG2 (NM_003008.2,393-411).
catgatagttatacatcat

SEQ ID NO: 329151 - DNA, 19 bp, Homo sapiens
  siRNA target sequence for SEMG2 (NM_003008.2,885-903).
cccgtcttcacgtacagaa

SEQ ID NO: 329152 - DNA, 19 bp, Homo sapiens
  siRNA target sequence for SEMG2 (NM_003008.2,1671-1689).
cagtgagtcacataatatt

SEQ ID NO: 329153 - DNA, 19 bp, Homo sapiens
  siRNA target sequence for SEMG2 (NM_003008.2,1707-1725).
ggttgcccaagatgatcat

SEQ ID NO: 329154 - DNA, 19 bp, Homo sapiens
  siRNA target sequence for SEMG2 (NM_003008.2,1744-1762).
gaagacagaaatccaatat

SEQ ID NO: 329155 - DNA, 19 bp, Homo sapiens
  siRNA target sequence for SEMG2 (NM_003008.2,1747-1765).
gacagaaatccaatatcta

SEQ ID NO: 329156 - DNA, 19 bp, Homo sapiens
  siRNA target sequence for ASPN (NM_017680.2,386-404).
ggacaactctctttttcca

SEQ ID NO: 329157 - DNA, 19 bp, Homo sapiens
  siRNA target sequence for ASPN (NM_017680.2,447-465).
ccaatgtgtccatttggat

SEQ ID NO: 329158 - DNA, 19 bp, Homo sapiens
  siRNA target sequence for ASPN (NM_017680.2,470-488).
gtgctattcacgagttgta

SEQ ID NO: 329159 - DNA, 19 bp, Homo sapiens
  siRNA target sequence for ASPN (NM_017680.2,472-490).
gctattcacgagttgtaca

SEQ ID NO: 329160 - DNA, 19 bp, Homo sapiens
  siRNA target sequence for ASPN (NM_017680.2,473-491).
ctattcacgagttgtacat

SEQ ID NO: 329161 - DNA, 19 bp, Homo sapiens
  siRNA target sequence for ASPN (NM_017680.2,512-530).
ctcagtcccaaccaacatt

SEQ ID NO: 329162 - DNA, 19 bp, Homo sapiens
  siRNA target sequence for ASPN (NM_017680.2,516-534).
gtcccaaccaacattccat

SEQ ID NO: 329163 - DNA, 19 bp, Homo sapiens
  siRNA target sequence for ASPN (NM_017680.2,654-672).
cacccaaaagcctttctaa

SEQ ID NO: 329164 - DNA, 19 bp, Homo sapiens
  siRNA target sequence for ASPN (NM_017680.2,701-719).
gtcccacaatcaactaagt

SEQ ID NO: 329165 - DNA, 19 bp, Homo sapiens
  siRNA target sequence for ASPN (NM_017680.2,703-721).
cccacaatcaactaagtga

SEQ ID NO: 329166 - DNA, 19 bp, Homo sapiens
  siRNA target sequence for ASPN (NM_017680.2,705-723).
cacaatcaactaagtgaaa

SEQ ID NO: 329167 - DNA, 19 bp, Homo sapiens
  siRNA target sequence for ASPN (NM_017680.2,718-736).
gtgaaataccacttaatct

SEQ ID NO: 329168 - DNA, 19 bp, Homo sapiens
  siRNA target sequence for ASPN (NM_017680.2,816-834).
gctttacacgttttggaaa

SEQ ID NO: 329169 - DNA, 19 bp, Homo sapiens
  siRNA target sequence for ASPN (NM_017680.2,838-856).
gtgcaaaccctcttgataa

SEQ ID NO: 329170 - DNA, 19 bp, Homo sapiens
  siRNA target sequence for ASPN (NM_017680.2,885-903).
ggggtgacggtgttccata

SEQ ID NO: 329171 - DNA, 19 bp, Homo sapiens
  siRNA target sequence for ASPN (NM_017680.2,886-904).
gggtgacggtgttccatat

SEQ ID NO: 329172 - DNA, 19 bp, Homo sapiens
  siRNA target sequence for ASPN (NM_017680.2,888-906).
gtgacggtgttccatatca

SEQ ID NO: 329173 - DNA, 19 bp, Homo sapiens
  siRNA target sequence for ASPN (NM_017680.2,890-908).
gacggtgttccatatcaga

SEQ ID NO: 329174 - DNA, 19 bp, Homo sapiens
  siRNA target sequence for ASPN (NM_017680.2,892-910).
cggtgttccatatcagaat

SEQ ID NO: 329175 - DNA, 19 bp, Homo sapiens
  siRNA target sequence for ASPN (NM_017680.2,893-911).
ggtgttccatatcagaatt

SEQ ID NO: 329176 - DNA, 19 bp, Homo sapiens
  siRNA target sequence for ASPN (NM_017680.2,907-925).
gaattgcagaagcaaaact

SEQ ID NO: 329177 - DNA, 19 bp, Homo sapiens
  siRNA target sequence for ASPN (NM_017680.2,942-960).
ggcttaccaccaactttat

SEQ ID NO: 329178 - DNA, 19 bp, Homo sapiens
  siRNA target sequence for ASPN (NM_017680.2,962-980).
ggagcttcacttagattat

SEQ ID NO: 329179 - DNA, 19 bp, Homo sapiens
  siRNA target sequence for ASPN (NM_017680.2,994-1012).
cagtggaacttgaggattt

SEQ ID NO: 329180 - DNA, 19 bp, Homo sapiens
  siRNA target sequence for ASPN (NM_017680.2,998-1016).
ggaacttgaggattttaaa

SEQ ID NO: 329181 - DNA, 19 bp, Homo sapiens
  siRNA target sequence for ASPN (NM_017680.2,1002-1020).
cttgaggattttaaacgat

SEQ ID NO: 329182 - DNA, 19 bp, Homo sapiens
  siRNA target sequence for ASPN (NM_017680.2,1055-1073).
caaaatcacagatatcgaa

SEQ ID NO: 329183 - DNA, 19 bp, Homo sapiens
  siRNA target sequence for ASPN (NM_017680.2,1147-1165).
caggattaccagagttgaa

SEQ ID NO: 329184 - DNA, 19 bp, Homo sapiens
  siRNA target sequence for ASPN (NM_017680.2,1149-1167).
ggattaccagagttgaaat

SEQ ID NO: 329185 - DNA, 19 bp, Homo sapiens
  siRNA target sequence for ASPN (NM_017680.2,1150-1168).
gattaccagagttgaaata

SEQ ID NO: 329186 - DNA, 19 bp, Homo sapiens
  siRNA target sequence for ASPN (NM_017680.2,1228-1246).
gtccaacagtgccaaagat

SEQ ID NO: 329187 - DNA, 19 bp, Homo sapiens
  siRNA target sequence for ASPN (NM_017680.2,1307-1325).
gcaacctgcaacatttcgt

SEQ ID NO: 329188 - DNA, 19 bp, Homo sapiens
  siRNA target sequence for ASPN (NM_017680.2,1315-1333).
caacatttcgttgtgtttt

SEQ ID NO: 329189 - DNA, 19 bp, Homo sapiens
  siRNA target sequence for CRTAP (NM_006371.2,157-175).
ggcacgcgctggacaagta

SEQ ID NO: 329190 - DNA, 19 bp, Homo sapiens
  siRNA target sequence for CRTAP (NM_006371.2,159-177).
cacgcgctggacaagtaca

SEQ ID NO: 329191 - DNA, 19 bp, Homo sapiens
  siRNA target sequence for CRTAP (NM_006371.2,471-489).
gcttacttcaaggcaaata

SEQ ID NO: 329192 - DNA, 19 bp, Homo sapiens
  siRNA target sequence for CRTAP (NM_006371.2,534-552).
catcctgatgacgaaatga

SEQ ID NO: 329193 - DNA, 19 bp, Homo sapiens
  siRNA target sequence for CRTAP (NM_006371.2,537-555).
cctgatgacgaaatgatga

SEQ ID NO: 329194 - DNA, 19 bp, Homo sapiens
  siRNA target sequence for CRTAP (NM_006371.2,586-604).
ctggtgccgaggactacat

SEQ ID NO: 329195 - DNA, 19 bp, Homo sapiens
  siRNA target sequence for CRTAP (NM_006371.2,592-610).
ccgaggactacattaaaga

SEQ ID NO: 329196 - DNA, 19 bp, Homo sapiens
  siRNA target sequence for CRTAP (NM_006371.2,625-643).
catatgaaagcctgttcat

SEQ ID NO: 329197 - DNA, 19 bp, Homo sapiens
  siRNA target sequence for CRTAP (NM_006371.2,646-664).
gagcagtgcgggcatacaa

SEQ ID NO: 329198 - DNA, 19 bp, Homo sapiens
  siRNA target sequence for CRTAP (NM_006371.2,707-725).
ccttcccgacttcttcaaa

SEQ ID NO: 329199 - DNA, 19 bp, Homo sapiens
  siRNA target sequence for CRTAP (NM_006371.2,782-800).
ggatttctacctttccata

SEQ ID NO: 329200 - DNA, 19 bp, Homo sapiens
  siRNA target sequence for CRTAP (NM_006371.2,796-814).
ccatagcagatcattatgt

SEQ ID NO: 329201 - DNA, 19 bp, Homo sapiens
  siRNA target sequence for CRTAP (NM_006371.2,797-815).
catagcagatcattatgta

SEQ ID NO: 329202 - DNA, 19 bp, Homo sapiens
  siRNA target sequence for CRTAP (NM_006371.2,802-820).
cagatcattatgtagaagt

SEQ ID NO: 329203 - DNA, 19 bp, Homo sapiens
  siRNA target sequence for CRTAP (NM_006371.2,848-866).
gaacctcaccccagttata

SEQ ID NO: 329204 - DNA, 19 bp, Homo sapiens
  siRNA target sequence for CRTAP (NM_006371.2,851-869).
cctcaccccagttatagga

SEQ ID NO: 329205 - DNA, 19 bp, Homo sapiens
  siRNA target sequence for CRTAP (NM_006371.2,894-912).
gctaccatgtatcattact

SEQ ID NO: 329206 - DNA, 19 bp, Homo sapiens
  siRNA target sequence for CRTAP (NM_006371.2,1119-1137).
gagctgtatgactttgcta

SEQ ID NO: 329207 - DNA, 19 bp, Homo sapiens
  siRNA target sequence for DCN (NM_001920.2,241-259).
ctgggctggaccgtttcaa

SEQ ID NO: 329208 - DNA, 19 bp, Homo sapiens
  siRNA target sequence for DCN (NM_001920.2,243-261).
gggctggaccgtttcaaca

SEQ ID NO: 329209 - DNA, 19 bp, Homo sapiens
  siRNA target sequence for DCN (NM_001920.2,264-282).
gaggcttatttgactttat

SEQ ID NO: 329210 - DNA, 19 bp, Homo sapiens
  siRNA target sequence for DCN (NM_001920.2,514-532).
gaaccttcacgcattgatt

SEQ ID NO: 329211 - DNA, 19 bp, Homo sapiens
  siRNA target sequence for DCN (NM_001920.2,529-547).
gattcttgtcaacaataaa

SEQ ID NO: 329212 - DNA, 19 bp, Homo sapiens
  siRNA target sequence for DCN (NM_001920.2,557-575).
gttagtcctggagcattta

SEQ ID NO: 329213 - DNA, 19 bp, Homo sapiens
  siRNA target sequence for DCN (NM_001920.2,586-604).
gaagttggaacgactttat

SEQ ID NO: 329214 - DNA, 19 bp, Homo sapiens
  siRNA target sequence for DCN (NM_001920.2,661-679).
gctgcgtgcccatgagaat

SEQ ID NO: 329215 - DNA, 19 bp, Homo sapiens
  siRNA target sequence for DCN (NM_001920.2,665-683).
cgtgcccatgagaatgaga

SEQ ID NO: 329216 - DNA, 19 bp, Homo sapiens
  siRNA target sequence for DCN (NM_001920.2,666-684).
gtgcccatgagaatgagat

SEQ ID NO: 329217 - DNA, 19 bp, Homo sapiens
  siRNA target sequence for DCN (NM_001920.2,685-703).
caccaaagtgcgaaaagtt

SEQ ID NO: 329218 - DNA, 19 bp, Homo sapiens
  siRNA target sequence for DCN (NM_001920.2,688-706).
caaagtgcgaaaagttact

SEQ ID NO: 329219 - DNA, 19 bp, Homo sapiens
  siRNA target sequence for DCN (NM_001920.2,694-712).
gcgaaaagttactttcaat

SEQ ID NO: 329220 - DNA, 19 bp, Homo sapiens
  siRNA target sequence for DCN (NM_001920.2,814-832).
ccgcattgctgataccaat

SEQ ID NO: 329221 - DNA, 19 bp, Homo sapiens
  siRNA target sequence for DCN (NM_001920.2,815-833).
cgcattgctgataccaata

SEQ ID NO: 329222 - DNA, 19 bp, Homo sapiens
  siRNA target sequence for DCN (NM_001920.2,861-879).
cttcccttacggaattaca

SEQ ID NO: 329223 - DNA, 19 bp, Homo sapiens
  siRNA target sequence for DCN (NM_001920.2,920-938).
ctgaaaggactgaataatt

SEQ ID NO: 329224 - DNA, 19 bp, Homo sapiens
  siRNA target sequence for DCN (NM_001920.2,942-960).
ctaagttgggattgagttt

SEQ ID NO: 329225 - DNA, 19 bp, Homo sapiens
  siRNA target sequence for DCN (NM_001920.2,966-984).
gcatctctgctgttgacaa

SEQ ID NO: 329226 - DNA, 19 bp, Homo sapiens
  siRNA target sequence for DCN (NM_001920.2,1085-1103).
gttgtctaccttcataaca

SEQ ID NO: 329227 - DNA, 19 bp, Homo sapiens
  siRNA target sequence for DCN (NM_001920.2,1088-1106).
gtctaccttcataacaaca

SEQ ID NO: 329228 - DNA, 19 bp, Homo sapiens
  siRNA target sequence for DCN (NM_001920.2,1111-1129).
ctctgtagttggatcaagt

SEQ ID NO: 329229 - DNA, 19 bp, Homo sapiens
  siRNA target sequence for DCN (NM_001920.2,1243-1261).
cgtgcgctctgccattcaa

SEQ ID NO: 329230 - DNA, 19 bp, Homo sapiens
  siRNA target sequence for DCN (NM_001920.2,1259-1277).
caactcggaaactataagt

SEQ ID NO: 329231 - DNA, 19 bp, Homo sapiens
  siRNA target sequence for GPC2 (NM_152742.1,293-311).
ggggatatagcttaaacct

SEQ ID NO: 329232 - DNA, 19 bp, Homo sapiens
  siRNA target sequence for GPC2 (NM_152742.1,469-487).
gctgccaggcacagaaaat

SEQ ID NO: 329233 - DNA, 19 bp, Homo sapiens
  siRNA target sequence for GPC2 (NM_152742.1,571-589).
gcccagcacgccctcatat

SEQ ID NO: 329234 - DNA, 19 bp, Homo sapiens
  siRNA target sequence for GPC2 (NM_152742.1,572-590).
cccagcacgccctcatatt

SEQ ID NO: 329235 - DNA, 19 bp, Homo sapiens
  siRNA target sequence for GPC2 (NM_152742.1,574-592).
cagcacgccctcatattca

SEQ ID NO: 329236 - DNA, 19 bp, Homo sapiens
  siRNA target sequence for GPC2 (NM_152742.1,576-594).
gcacgccctcatattcaat

SEQ ID NO: 329237 - DNA, 19 bp, Homo sapiens
  siRNA target sequence for GPC2 (NM_152742.1,605-623).
ctcggctgcgagacttcta

SEQ ID NO: 329238 - DNA, 19 bp, Homo sapiens
  siRNA target sequence for GPC2 (NM_152742.1,649-667).
gacaccctggcggatttct

SEQ ID NO: 329239 - DNA, 19 bp, Homo sapiens
  siRNA target sequence for GPC2 (NM_152742.1,1038-1056).
gcctgactggggcaactat

SEQ ID NO: 329240 - DNA, 19 bp, Homo sapiens
  siRNA target sequence for GPC2 (NM_152742.1,1832-1850).
gggcatctattggttttca

SEQ ID NO: 329241 - DNA, 19 bp, Homo sapiens
  siRNA target sequence for GPC2 (NM_152742.1,1853-1871).
cccaaaccatcctcattct

SEQ ID NO: 329242 - DNA, 19 bp, Homo sapiens
  siRNA target sequence for GPC2 (NM_152742.1,1855-1873).
caaaccatcctcattctct

SEQ ID NO: 329243 - DNA, 19 bp, Homo sapiens
  siRNA target sequence for C9orf19 (NM_022343.2,43-61).
gtcagcttccaaacagttt

SEQ ID NO: 329244 - DNA, 19 bp, Homo sapiens
  siRNA target sequence for C9orf19 (NM_022343.2,74-92).
ctgaaggcccacaatgagt

SEQ ID NO: 329245 - DNA, 19 bp, Homo sapiens
  siRNA target sequence for C9orf19 (NM_022343.2,142-160).
ccgggaggctcaacagtat

SEQ ID NO: 329246 - DNA, 19 bp, Homo sapiens
  siRNA target sequence for C9orf19 (NM_022343.2,143-161).
cgggaggctcaacagtatt

SEQ ID NO: 329247 - DNA, 19 bp, Homo sapiens
  siRNA target sequence for C9orf19 (NM_022343.2,145-163).
ggaggctcaacagtattct

SEQ ID NO: 329248 - DNA, 19 bp, Homo sapiens
  siRNA target sequence for C9orf19 (NM_022343.2,237-255).
catgggcatcctatgatca

SEQ ID NO: 329249 - DNA, 19 bp, Homo sapiens
  siRNA target sequence for C9orf19 (NM_022343.2,290-308).
gaaatcaagaactataact

SEQ ID NO: 329250 - DNA, 19 bp, Homo sapiens
  siRNA target sequence for C9orf19 (NM_022343.2,341-359).
cacttcacggccatggtat

SEQ ID NO: 329251 - DNA, 19 bp, Homo sapiens
  siRNA target sequence for C9orf19 (NM_022343.2,438-456).
cagcggggaatgttgtcaa

SEQ ID NO: 329252 - DNA, 19 bp, Homo sapiens
  siRNA target sequence for C9orf19 (NM_022343.2,441-459).
cggggaatgttgtcaatga

SEQ ID NO: 329253 - DNA, 19 bp, Homo sapiens
  siRNA target sequence for C9orf19 (NM_022343.2,462-480).
gcttcttcgaagaaaacgt

SEQ ID NO: 329254 - DNA, 19 bp, Homo sapiens
  siRNA target sequence for DKFZP434B044 (NM_031476.1,281-299).
ccaacgtcactctcttaga

SEQ ID NO: 329255 - DNA, 19 bp, Homo sapiens
  siRNA target sequence for DKFZP434B044 (NM_031476.1,681-699).
cacgcactacacacagata

SEQ ID NO: 329256 - DNA, 19 bp, Homo sapiens
  siRNA target sequence for DKFZP434B044 (NM_031476.1,683-701).
cgcactacacacagatagt

SEQ ID NO: 329257 - DNA, 19 bp, Homo sapiens
  siRNA target sequence for DKFZP434B044 (NM_031476.1,684-702).
gcactacacacagatagtt

SEQ ID NO: 329258 - DNA, 19 bp, Homo sapiens
  siRNA target sequence for DKFZP434B044 (NM_031476.1,773-791).
gggagaacgcggtctactt

SEQ ID NO: 329259 - DNA, 19 bp, Homo sapiens
  siRNA target sequence for DKFZP434B044 (NM_031476.1,786-804).
ctactttgtctgcaattat

SEQ ID NO: 329260 - DNA, 19 bp, Homo sapiens
  siRNA target sequence for DKFZP434B044 (NM_031476.1,789-807).
ctttgtctgcaattattct

SEQ ID NO: 329261 - DNA, 19 bp, Homo sapiens
  siRNA target sequence for DKFZP434B044 (NM_031476.1,827-845).
gagaagccccctacaagaa

SEQ ID NO: 329262 - DNA, 19 bp, Homo sapiens
  siRNA target sequence for DKFZP434B044 (NM_031476.1,900-918).
cttgtgttaccgagaagaa

SEQ ID NO: 329263 - DNA, 19 bp, Homo sapiens
  siRNA target sequence for DKFZP434B044 (NM_031476.1,1037-1055).
cctctgcggtcaactacat

SEQ ID NO: 329264 - DNA, 19 bp, Homo sapiens
  siRNA target sequence for DKFZP434B044 (NM_031476.1,1070-1088).
gatgtgacaccaagatgaa

SEQ ID NO: 329265 - DNA, 19 bp, Homo sapiens
  siRNA target sequence for DKFZP434B044 (NM_031476.1,1146-1164).
ccacaaggcgaagatcttt

SEQ ID NO: 329266 - DNA, 19 bp, Homo sapiens
  siRNA target sequence for DKFZP434B044 (NM_031476.1,1337-1355).
cattcatggtgtcaaaagt

SEQ ID NO: 329267 - DNA, 19 bp, Homo sapiens
  siRNA target sequence for DKFZP434B044 (NM_031476.1,1393-1411).
cagctgtgcccgtttgaaa

SEQ ID NO: 329268 - DNA, 19 bp, Homo sapiens
  siRNA target sequence for DKFZP434B044 (NM_031476.1,1485-1503).
gtttggaaccaacatctat

SEQ ID NO: 329269 - DNA, 19 bp, Homo sapiens
  siRNA target sequence for FGL2 (NM_006682.1,73-91).
cttgccacttacggttttt

SEQ ID NO: 329270 - DNA, 19 bp, Homo sapiens
  siRNA target sequence for FGL2 (NM_006682.1,78-96).
cacttacggttttttggtt

SEQ ID NO: 329271 - DNA, 19 bp, Homo sapiens
  siRNA target sequence for FGL2 (NM_006682.1,285-303).
cctcaaggaaatcgtaaat

SEQ ID NO: 329272 - DNA, 19 bp, Homo sapiens
  siRNA target sequence for FGL2 (NM_006682.1,286-304).
ctcaaggaaatcgtaaata

SEQ ID NO: 329273 - DNA, 19 bp, Homo sapiens
  siRNA target sequence for FGL2 (NM_006682.1,288-306).
caaggaaatcgtaaatagt

SEQ ID NO: 329274 - DNA, 19 bp, Homo sapiens
  siRNA target sequence for FGL2 (NM_006682.1,291-309).
ggaaatcgtaaatagtcta

SEQ ID NO: 329275 - DNA, 19 bp, Homo sapiens
  siRNA target sequence for FGL2 (NM_006682.1,292-310).
gaaatcgtaaatagtctaa

SEQ ID NO: 329276 - DNA, 19 bp, Homo sapiens
  siRNA target sequence for FGL2 (NM_006682.1,297-315).
cgtaaatagtctaaagaaa

SEQ ID NO: 329277 - DNA, 19 bp, Homo sapiens
  siRNA target sequence for FGL2 (NM_006682.1,398-416).
cgggagaggttggtgataa

SEQ ID NO: 329278 - DNA, 19 bp, Homo sapiens
  siRNA target sequence for FGL2 (NM_006682.1,406-424).
gttggtgataacagagtta

SEQ ID NO: 329279 - DNA, 19 bp, Homo sapiens
  siRNA target sequence for FGL2 (NM_006682.1,520-538).
cttgtaaatatgaacaaca

SEQ ID NO: 329280 - DNA, 19 bp, Homo sapiens
  siRNA target sequence for FGL2 (NM_006682.1,555-573).
cagcaaagtggcaaatcta

SEQ ID NO: 329281 - DNA, 19 bp, Homo sapiens
  siRNA target sequence for FGL2 (NM_006682.1,566-584).
caaatctaacatttgttgt

SEQ ID NO: 329282 - DNA, 19 bp, Homo sapiens
  siRNA target sequence for FGL2 (NM_006682.1,571-589).
ctaacatttgttgtcaata

SEQ ID NO: 329283 - DNA, 19 bp, Homo sapiens
  siRNA target sequence for FGL2 (NM_006682.1,595-613).
gatggcaaatgttcaaagt

SEQ ID NO: 329284 - DNA, 19 bp, Homo sapiens
  siRNA target sequence for FGL2 (NM_006682.1,636-654).
gtcacgtccagttcaacat

SEQ ID NO: 329285 - DNA, 19 bp, Homo sapiens
  siRNA target sequence for FGL2 (NM_006682.1,640-658).
cgtccagttcaacatctaa

SEQ ID NO: 329286 - DNA, 19 bp, Homo sapiens
  siRNA target sequence for FGL2 (NM_006682.1,641-659).
gtccagttcaacatctaat

SEQ ID NO: 329287 - DNA, 19 bp, Homo sapiens
  siRNA target sequence for FGL2 (NM_006682.1,681-699).
ctacgcaataggcaaaaga

SEQ ID NO: 329288 - DNA, 19 bp, Homo sapiens
  siRNA target sequence for FGL2 (NM_006682.1,724-742).
cctgatcccaaaaatagta

SEQ ID NO: 329289 - DNA, 19 bp, Homo sapiens
  siRNA target sequence for FGL2 (NM_006682.1,827-845).
ccagaacatggcaagacta

SEQ ID NO: 329290 - DNA, 19 bp, Homo sapiens
  siRNA target sequence for FGL2 (NM_006682.1,881-899).
ggctggggaacgataaaat

SEQ ID NO: 329291 - DNA, 19 bp, Homo sapiens
  siRNA target sequence for FGL2 (NM_006682.1,882-900).
gctggggaacgataaaatt

SEQ ID NO: 329292 - DNA, 19 bp, Homo sapiens
  siRNA target sequence for FGL2 (NM_006682.1,885-903).
ggggaacgataaaattcat

SEQ ID NO: 329293 - DNA, 19 bp, Homo sapiens
  siRNA target sequence for FGL2 (NM_006682.1,887-905).
ggaacgataaaattcatct

SEQ ID NO: 329294 - DNA, 19 bp, Homo sapiens
  siRNA target sequence for FGL2 (NM_006682.1,888-906).
gaacgataaaattcatctt

SEQ ID NO: 329295 - DNA, 19 bp, Homo sapiens
  siRNA target sequence for FGL2 (NM_006682.1,901-919).
catcttctgaccaagagta

SEQ ID NO: 329296 - DNA, 19 bp, Homo sapiens
  siRNA target sequence for FGL2 (NM_006682.1,911-929).
ccaagagtaaggaaatgat

SEQ ID NO: 329297 - DNA, 19 bp, Homo sapiens
  siRNA target sequence for FGL2 (NM_006682.1,912-930).
caagagtaaggaaatgatt

SEQ ID NO: 329298 - DNA, 19 bp, Homo sapiens
  siRNA target sequence for FGL2 (NM_006682.1,927-945).
gattctgagaatagatctt

SEQ ID NO: 329299 - DNA, 19 bp, Homo sapiens
  siRNA target sequence for FGL2 (NM_006682.1,963-981).
cgaactatatgccttgtat

SEQ ID NO: 329300 - DNA, 19 bp, Homo sapiens
  siRNA target sequence for FGL2 (NM_006682.1,996-1014).
ggctaatgagtttctcaaa

SEQ ID NO: 329301 - DNA, 19 bp, Homo sapiens
  siRNA target sequence for FGL2 (NM_006682.1,997-1015).
gctaatgagtttctcaaat

SEQ ID NO: 329302 - DNA, 19 bp, Homo sapiens
  siRNA target sequence for FGL2 (NM_006682.1,1003-1021).
gagtttctcaaatatcgtt

SEQ ID NO: 329303 - DNA, 19 bp, Homo sapiens
  siRNA target sequence for FGL2 (NM_006682.1,1005-1023).
gtttctcaaatatcgttta

SEQ ID NO: 329304 - DNA, 19 bp, Homo sapiens
  siRNA target sequence for FGL2 (NM_006682.1,1019-1037).
gtttacacgttggtaacta

SEQ ID NO: 329305 - DNA, 19 bp, Homo sapiens
  siRNA target sequence for FGL2 (NM_006682.1,1044-1062).
cacagctggagatgcatta

SEQ ID NO: 329306 - DNA, 19 bp, Homo sapiens
  siRNA target sequence for FGL2 (NM_006682.1,1049-1067).
ctggagatgcattacgttt

SEQ ID NO: 329307 - DNA, 19 bp, Homo sapiens
  siRNA target sequence for FGL2 (NM_006682.1,1052-1070).
gagatgcattacgtttcaa

SEQ ID NO: 329308 - DNA, 19 bp, Homo sapiens
  siRNA target sequence for FGL2 (NM_006682.1,1054-1072).
gatgcattacgtttcaaca

SEQ ID NO: 329309 - DNA, 19 bp, Homo sapiens
  siRNA target sequence for FGL2 (NM_006682.1,1084-1102).
cacgatctgaagtttttca

SEQ ID NO: 329310 - DNA, 19 bp, Homo sapiens
  siRNA target sequence for FGL2 (NM_006682.1,1104-1122).
cactccagataaagacaat

SEQ ID NO: 329311 - DNA, 19 bp, Homo sapiens
  siRNA target sequence for FGL2 (NM_006682.1,1117-1135).
gacaatgatcgatatcctt

SEQ ID NO: 329312 - DNA, 19 bp, Homo sapiens
  siRNA target sequence for FGL2 (NM_006682.1,1139-1157).
ggaactgtgggctgtacta

SEQ ID NO: 329313 - DNA, 19 bp, Homo sapiens
  siRNA target sequence for FGL2 (NM_006682.1,1173-1191).
gtttgatgcatgtctttct

SEQ ID NO: 329314 - DNA, 19 bp, Homo sapiens
  siRNA target sequence for FGL2 (NM_006682.1,1232-1250).
gtgtccgtaatgggatttt

SEQ ID NO: 329315 - DNA, 19 bp, Homo sapiens
  siRNA target sequence for FGL2 (NM_006682.1,1234-1252).
gtccgtaatgggattttct

SEQ ID NO: 329316 - DNA, 19 bp, Homo sapiens
  siRNA target sequence for FGL2 (NM_006682.1,1259-1277).
cctggcctggtgtaagtga

SEQ ID NO: 329317 - DNA, 19 bp, Homo sapiens
  siRNA target sequence for FGL2 (NM_006682.1,1282-1300).
caccctggtggctacaagt

SEQ ID NO: 329318 - DNA, 19 bp, Homo sapiens
  siRNA target sequence for LOC57151 (NM_020426.1,155-173).
caaaggcgctactcatcta

SEQ ID NO: 329319 - DNA, 19 bp, Homo sapiens
  siRNA target sequence for LOC57151 (NM_020426.1,161-179).
cgctactcatctatttggt

SEQ ID NO: 329320 - DNA, 19 bp, Homo sapiens
  siRNA target sequence for LOC57151 (NM_020426.1,309-327).
ggaaagcaagttcaacata

SEQ ID NO: 329321 - DNA, 19 bp, Homo sapiens
  siRNA target sequence for LOC57151 (NM_020426.1,347-365).
cagatggaagctttgacta

SEQ ID NO: 329322 - DNA, 19 bp, Homo sapiens
  siRNA target sequence for LOC57151 (NM_020426.1,388-406).
cactactggtgcaacgatt

SEQ ID NO: 329323 - DNA, 19 bp, Homo sapiens
  siRNA target sequence for LOC57151 (NM_020426.1,396-414).
gtgcaacgattataagagt

SEQ ID NO: 329324 - DNA, 19 bp, Homo sapiens
  siRNA target sequence for LOC57151 (NM_020426.1,398-416).
gcaacgattataagagtta

SEQ ID NO: 329325 - DNA, 19 bp, Homo sapiens
  siRNA target sequence for LOC57151 (NM_020426.1,411-429).
gagttactcggaaaacctt

SEQ ID NO: 329326 - DNA, 19 bp, Homo sapiens
  siRNA target sequence for LOC57151 (NM_020426.1,432-450).
ccacgtagactgtcaagat

SEQ ID NO: 329327 - DNA, 19 bp, Homo sapiens
  siRNA target sequence for LOC57151 (NM_020426.1,475-493).
ggcatccactgcgcaaaaa

SEQ ID NO: 329328 - DNA, 19 bp, Homo sapiens
  siRNA target sequence for LOC57151 (NM_020426.1,480-498).
ccactgcgcaaaaaggatt

SEQ ID NO: 329329 - DNA, 19 bp, Homo sapiens
  siRNA target sequence for LOC57151 (NM_020426.1,505-523).
ggagcacgggggatgaaca

SEQ ID NO: 329330 - DNA, 19 bp, Homo sapiens
  siRNA target sequence for LOC83690 (NM_031461.2,450-468).
ggttcccaatgccacttta

SEQ ID NO: 329331 - DNA, 19 bp, Homo sapiens
  siRNA target sequence for LOC83690 (NM_031461.2,455-473).
ccaatgccactttattgga

SEQ ID NO: 329332 - DNA, 19 bp, Homo sapiens
  siRNA target sequence for LOC83690 (NM_031461.2,566-584).
gtattttggaccttcataa

SEQ ID NO: 329333 - DNA, 19 bp, Homo sapiens
  siRNA target sequence for LOC83690 (NM_031461.2,592-610).
cgaagtcaggtgtatccaa

SEQ ID NO: 329334 - DNA, 19 bp, Homo sapiens
  siRNA target sequence for LOC83690 (NM_031461.2,608-626).
caacagcctctaatatgga

SEQ ID NO: 329335 - DNA, 19 bp, Homo sapiens
  siRNA target sequence for LOC83690 (NM_031461.2,613-631).
gcctctaatatggagtata

SEQ ID NO: 329336 - DNA, 19 bp, Homo sapiens
  siRNA target sequence for LOC83690 (NM_031461.2,614-632).
cctctaatatggagtatat

SEQ ID NO: 329337 - DNA, 19 bp, Homo sapiens
  siRNA target sequence for LOC83690 (NM_031461.2,664-682).
gaatcctgggctgaaagtt

SEQ ID NO: 329338 - DNA, 19 bp, Homo sapiens
  siRNA target sequence for LOC83690 (NM_031461.2,704-722).
caagcttgcttccatcaat

SEQ ID NO: 329339 - DNA, 19 bp, Homo sapiens
  siRNA target sequence for LOC83690 (NM_031461.2,708-726).
cttgcttccatcaattgga

SEQ ID NO: 329340 - DNA, 19 bp, Homo sapiens
  siRNA target sequence for LOC83690 (NM_031461.2,739-757).
gcacactggggaagatata

SEQ ID NO: 329341 - DNA, 19 bp, Homo sapiens
  siRNA target sequence for LOC83690 (NM_031461.2,762-780).
cccgacgtttcatgtacaa

SEQ ID NO: 329342 - DNA, 19 bp, Homo sapiens
  siRNA target sequence for LOC83690 (NM_031461.2,763-781).
ccgacgtttcatgtacaat

SEQ ID NO: 329343 - DNA, 19 bp, Homo sapiens
  siRNA target sequence for LOC83690 (NM_031461.2,809-827).
gctacccatatgaacatga

SEQ ID NO: 329344 - DNA, 19 bp, Homo sapiens
  siRNA target sequence for LOC83690 (NM_031461.2,823-841).
catgaatgcaacccatatt

SEQ ID NO: 329345 - DNA, 19 bp, Homo sapiens
  siRNA target sequence for LOC83690 (NM_031461.2,859-877).
ggccctgtatgtacacatt

SEQ ID NO: 329346 - DNA, 19 bp, Homo sapiens
  siRNA target sequence for LOC83690 (NM_031461.2,860-878).
gccctgtatgtacacatta

SEQ ID NO: 329347 - DNA, 19 bp, Homo sapiens
  siRNA target sequence for LOC83690 (NM_031461.2,861-879).
ccctgtatgtacacattat

SEQ ID NO: 329348 - DNA, 19 bp, Homo sapiens
  siRNA target sequence for LOC83690 (NM_031461.2,885-903).
ggtcgtgtgggcaactagt

SEQ ID NO: 329349 - DNA, 19 bp, Homo sapiens
  siRNA target sequence for LOC83690 (NM_031461.2,908-926).
gaatcggttgtgccattaa

SEQ ID NO: 329350 - DNA, 19 bp, Homo sapiens
  siRNA target sequence for LOC83690 (NM_031461.2,919-937).
gccattaatttgtgtcata

SEQ ID NO: 329351 - DNA, 19 bp, Homo sapiens
  siRNA target sequence for LOC83690 (NM_031461.2,1014-1032).
gggccatgccccttacaaa

SEQ ID NO: 329352 - DNA, 19 bp, Homo sapiens
  siRNA target sequence for LOC83690 (NM_031461.2,1016-1034).
gccatgccccttacaaaca

SEQ ID NO: 329353 - DNA, 19 bp, Homo sapiens
  siRNA target sequence for LOC83690 (NM_031461.2,1182-1200).
ccatgtccggacaagatca

SEQ ID NO: 329354 - DNA, 19 bp, Homo sapiens
  siRNA target sequence for LOC83690 (NM_031461.2,1188-1206).
ccggacaagatcagatgat

SEQ ID NO: 329355 - DNA, 19 bp, Homo sapiens
  siRNA target sequence for LOC83690 (NM_031461.2,1189-1207).
cggacaagatcagatgata

SEQ ID NO: 329356 - DNA, 19 bp, Homo sapiens
  siRNA target sequence for LOC83690 (NM_031461.2,1208-1226).
gtagcagaaatgaagtcat

SEQ ID NO: 329357 - DNA, 19 bp, Homo sapiens
  siRNA target sequence for LOC83690 (NM_031461.2,1236-1254).
gcaaatgtcccaaattgtt

SEQ ID NO: 329358 - DNA, 19 bp, Homo sapiens
  siRNA target sequence for LOC83690 (NM_031461.2,1252-1270).
gtttcttgtgaagtaagat

SEQ ID NO: 329359 - DNA, 19 bp, Homo sapiens
  siRNA target sequence for LOC83690 (NM_031461.2,1288-1306).
ggaacaacctgcaataggt

SEQ ID NO: 329360 - DNA, 19 bp, Homo sapiens
  siRNA target sequence for LOC83690 (NM_031461.2,1289-1307).
gaacaacctgcaataggta

SEQ ID NO: 329361 - DNA, 19 bp, Homo sapiens
  siRNA target sequence for LOC83690 (NM_031461.2,1318-1336).
gctggctgtttggatagta

SEQ ID NO: 329362 - DNA, 19 bp, Homo sapiens
  siRNA target sequence for LOC83690 (NM_031461.2,1319-1337).
ctggctgtttggatagtaa

SEQ ID NO: 329363 - DNA, 19 bp, Homo sapiens
  siRNA target sequence for LOC83690 (NM_031461.2,1323-1341).
ctgtttggatagtaaagct

SEQ ID NO: 329364 - DNA, 19 bp, Homo sapiens
  siRNA target sequence for LOC83690 (NM_031461.2,1330-1348).
gatagtaaagctaaagtta

SEQ ID NO: 329365 - DNA, 19 bp, Homo sapiens
  siRNA target sequence for LOC83690 (NM_031461.2,1351-1369).
ggcagtgtacattatgaaa

SEQ ID NO: 329366 - DNA, 19 bp, Homo sapiens
  siRNA target sequence for LOC83690 (NM_031461.2,1357-1375).
gtacattatgaaatgcaat

SEQ ID NO: 329367 - DNA, 19 bp, Homo sapiens
  siRNA target sequence for LOC83690 (NM_031461.2,1380-1398).
catctgtagagctgcaatt

SEQ ID NO: 329368 - DNA, 19 bp, Homo sapiens
  siRNA target sequence for LOC83690 (NM_031461.2,1385-1403).
gtagagctgcaattcatta

SEQ ID NO: 329369 - DNA, 19 bp, Homo sapiens
  siRNA target sequence for LOC83690 (NM_031461.2,1390-1408).
gctgcaattcattatggta

SEQ ID NO: 329370 - DNA, 19 bp, Homo sapiens
  siRNA target sequence for LOC83690 (NM_031461.2,1393-1411).
gcaattcattatggtataa

SEQ ID NO: 329371 - DNA, 19 bp, Homo sapiens
  siRNA target sequence for LOC83690 (NM_031461.2,1394-1412).
caattcattatggtataat

SEQ ID NO: 329372 - DNA, 19 bp, Homo sapiens
  siRNA target sequence for LOC83690 (NM_031461.2,1426-1444).
ggctgggtagatatcacta

SEQ ID NO: 329373 - DNA, 19 bp, Homo sapiens
  siRNA target sequence for LOC83690 (NM_031461.2,1431-1449).
ggtagatatcactagacaa

SEQ ID NO: 329374 - DNA, 19 bp, Homo sapiens
  siRNA target sequence for LOC83690 (NM_031461.2,1467-1485).
catcaagtccaatagaaat

SEQ ID NO: 329375 - DNA, 19 bp, Homo sapiens
  siRNA target sequence for LOC83690 (NM_031461.2,1470-1488).
caagtccaatagaaatggt

SEQ ID NO: 329376 - DNA, 19 bp, Homo sapiens
  siRNA target sequence for LOC83690 (NM_031461.2,1475-1493).
ccaatagaaatggtattca

SEQ ID NO: 329377 - DNA, 19 bp, Homo sapiens
  siRNA target sequence for LOC83690 (NM_031461.2,1481-1499).
gaaatggtattcaaacaat

SEQ ID NO: 329378 - DNA, 19 bp, Homo sapiens
  siRNA target sequence for LOC83690 (NM_031461.2,1523-1541).
ccttcacagtctctaaagt

SEQ ID NO: 329379 - DNA, 19 bp, Homo sapiens
  siRNA target sequence for LOC83690 (NM_031461.2,1527-1545).
cacagtctctaaagtaaca

SEQ ID NO: 329380 - DNA, 19 bp, Homo sapiens
  siRNA target sequence for LOC83690 (NM_031461.2,1529-1547).
cagtctctaaagtaacagt

SEQ ID NO: 329381 - DNA, 19 bp, Homo sapiens
  siRNA target sequence for LOC83690 (NM_031461.2,1551-1569).
ggctgtgacttgtgaaaca

SEQ ID NO: 329382 - DNA, 19 bp, Homo sapiens
  siRNA target sequence for LOC83690 (NM_031461.2,1609-1627).
cattgcccaagagtatact

SEQ ID NO: 329383 - DNA, 19 bp, Homo sapiens
  siRNA target sequence for LOC83690 (NM_031461.2,1634-1652).
gtaactgtatgcaagcaaa

SEQ ID NO: 329384 - DNA, 19 bp, Homo sapiens
  siRNA target sequence for LOC83690 (NM_031461.2,1638-1656).
ctgtatgcaagcaaatcca

SEQ ID NO: 329385 - DNA, 19 bp, Homo sapiens
  siRNA target sequence for LOC83690 (NM_031461.2,1644-1662).
gcaagcaaatccacattat

SEQ ID NO: 329386 - DNA, 19 bp, Homo sapiens
  siRNA target sequence for LOC83690 (NM_031461.2,1676-1694).
gaactcgagtttattctga

SEQ ID NO: 329387 - DNA, 19 bp, Homo sapiens
  siRNA target sequence for LOC83690 (NM_031461.2,1727-1745).
ctggagtggttcgaaatca

SEQ ID NO: 329388 - DNA, 19 bp, Homo sapiens
  siRNA target sequence for LOC83690 (NM_031461.2,1746-1764).
cggtggttatgttgatgta

SEQ ID NO: 329389 - DNA, 19 bp, Homo sapiens
  siRNA target sequence for LOC83690 (NM_031461.2,1776-1794).
caaaagaaagacctacatt

SEQ ID NO: 329390 - DNA, 19 bp, Homo sapiens
  siRNA target sequence for MGC26768 (NM_144634.2,295-313).
ccaagtggtgcttacatct

SEQ ID NO: 329391 - DNA, 19 bp, Homo sapiens
  siRNA target sequence for MGC26768 (NM_144634.2,345-363).
cgatggaggcctggattat

SEQ ID NO: 329392 - DNA, 19 bp, Homo sapiens
  siRNA target sequence for MGC26768 (NM_144634.2,346-364).
gatggaggcctggattatt

SEQ ID NO: 329393 - DNA, 19 bp, Homo sapiens
  siRNA target sequence for MGC26768 (NM_144634.2,516-534).
gaaccgctgccatatgtca

SEQ ID NO: 329394 - DNA, 19 bp, Homo sapiens
  siRNA target sequence for MGC26768 (NM_144634.2,539-557).
ccgctttactgaatcctaa

SEQ ID NO: 329395 - DNA, 19 bp, Homo sapiens
  siRNA target sequence for MGC26768 (NM_144634.2,540-558).
cgctttactgaatcctaat

SEQ ID NO: 329396 - DNA, 19 bp, Homo sapiens
  siRNA target sequence for MGC26768 (NM_144634.2,541-559).
gctttactgaatcctaatt

SEQ ID NO: 329397 - DNA, 19 bp, Homo sapiens
  siRNA target sequence for MGC26768 (NM_144634.2,578-596).
gtgccaagaccattgtaaa

SEQ ID NO: 329398 - DNA, 19 bp, Homo sapiens
  siRNA target sequence for MGC39497 (NM_152436.1,108-126).
ctgctactgggttctagtt

SEQ ID NO: 329399 - DNA, 19 bp, Homo sapiens
  siRNA target sequence for MGC39497 (NM_152436.1,149-167).
cgaggaggacgtagacttt

SEQ ID NO: 329400 - DNA, 19 bp, Homo sapiens
  siRNA target sequence for MGC39497 (NM_152436.1,153-171).
gaggacgtagactttatca

SEQ ID NO: 329401 - DNA, 19 bp, Homo sapiens
  siRNA target sequence for MGC39497 (NM_152436.1,242-260).
gacttgggatgtagcttta

SEQ ID NO: 329402 - DNA, 19 bp, Homo sapiens
  siRNA target sequence for MGC39497 (NM_152436.1,276-294).
gcatggggaaaaaaatgtt

SEQ ID NO: 329403 - DNA, 19 bp, Homo sapiens
  siRNA target sequence for MGC39497 (NM_152436.1,301-319).
cgcataatatttatttaca

SEQ ID NO: 329404 - DNA, 19 bp, Homo sapiens
  siRNA target sequence for MGC39497 (NM_152436.1,332-350).
ggtccatcctaaattttat

SEQ ID NO: 329405 - DNA, 19 bp, Homo sapiens
  siRNA target sequence for MGC39497 (NM_152436.1,335-353).
ccatcctaaattttatggt

SEQ ID NO: 329406 - DNA, 19 bp, Homo sapiens
  siRNA target sequence for MGC39497 (NM_152436.1,368-386).
gtgggtcggccctgaaaat

SEQ ID NO: 329407 - DNA, 19 bp, Homo sapiens
  siRNA target sequence for MGC39497 (NM_152436.1,370-388).
gggtcggccctgaaaatga

SEQ ID NO: 329408 - DNA, 19 bp, Homo sapiens
  siRNA target sequence for MGC39497 (NM_152436.1,371-389).
ggtcggccctgaaaatgaa

SEQ ID NO: 329409 - DNA, 19 bp, Homo sapiens
  siRNA target sequence for MGC39497 (NM_152436.1,466-484).
gagactgttctaattatat

SEQ ID NO: 329410 - DNA, 19 bp, Homo sapiens
  siRNA target sequence for MGC39497 (NM_152436.1,538-556).
caaaaattggacatattat

SEQ ID NO: 329411 - DNA, 19 bp, Homo sapiens
  siRNA target sequence for MGC39497 (NM_152436.1,562-580).
cagcaattttcatatgcaa

SEQ ID NO: 329412 - DNA, 19 bp, Homo sapiens
  siRNA target sequence for MGC39497 (NM_152436.1,645-663).
ggcagacgtgacaaatgca

SEQ ID NO: 329413 - DNA, 19 bp, Homo sapiens
  siRNA target sequence for MGC39497 (NM_152436.1,652-670).
gtgacaaatgcacagattt

SEQ ID NO: 329414 - DNA, 19 bp, Homo sapiens
  siRNA target sequence for MGC39497 (NM_152436.1,737-755).
gcgattgaacactagtttt

SEQ ID NO: 329415 - DNA, 19 bp, Homo sapiens
  siRNA target sequence for MGC39497 (NM_152436.1,738-756).
cgattgaacactagttttt

SEQ ID NO: 329416 - DNA, 19 bp, Homo sapiens
  siRNA target sequence for R3HDML (NM_178491.1,57-75).
ggcagtgaacgccttgata

SEQ ID NO: 329417 - DNA, 19 bp, Homo sapiens
  siRNA target sequence for R3HDML (NM_178491.1,193-211).
gccttactggattatcaca

SEQ ID NO: 329418 - DNA, 19 bp, Homo sapiens
  siRNA target sequence for R3HDML (NM_178491.1,238-256).
cctgccgccaacatggaat

SEQ ID NO: 329419 - DNA, 19 bp, Homo sapiens
  siRNA target sequence for R3HDML (NM_178491.1,239-257).
ctgccgccaacatggaata

SEQ ID NO: 329420 - DNA, 19 bp, Homo sapiens
  siRNA target sequence for R3HDML (NM_178491.1,329-347).
cttcacagctgatgagata

SEQ ID NO: 329421 - DNA, 19 bp, Homo sapiens
  siRNA target sequence for R3HDML (NM_178491.1,386-404).
ggtccgtagtggatctcat

SEQ ID NO: 329422 - DNA, 19 bp, Homo sapiens
  siRNA target sequence for R3HDML (NM_178491.1,389-407).
ccgtagtggatctcatgaa

SEQ ID NO: 329423 - DNA, 19 bp, Homo sapiens
  siRNA target sequence for R3HDML (NM_178491.1,490-508).
cccacctgctcccattata

SEQ ID NO: 329424 - DNA, 19 bp, Homo sapiens
  siRNA target sequence for R3HDML (NM_178491.1,547-565).
gccatccacacctgtagta

SEQ ID NO: 329425 - DNA, 19 bp, Homo sapiens
  siRNA target sequence for R3HDML (NM_178491.1,643-661).
ggcgagtccccgtacaaga

SEQ ID NO: 329426 - DNA, 19 bp, Homo sapiens
  siRNA target sequence for R3HDML (NM_178491.1,644-662).
gcgagtccccgtacaagat

SEQ ID NO: 329427 - DNA, 19 bp, Homo sapiens
  siRNA target sequence for R3HDML (NM_178491.1,678-696).
ctcctgtccccccagttat

SEQ ID NO: 329428 - DNA, 19 bp, Homo sapiens
  siRNA target sequence for R3HDML (NM_178491.1,697-715).
caaggcagctgcaatagca

SEQ ID NO: 329429 - DNA, 19 bp, Homo sapiens
  siRNA target sequence for R3HDML (NM_178491.1,731-749).
ggctgaaatccaacaagtt

SEQ ID NO: 329430 - DNA, 19 bp, Homo sapiens
  siRNA target sequence for SPACA3 (NM_173847.2,115-133).
cactcaagccctgtttctt

SEQ ID NO: 329431 - DNA, 19 bp, Homo sapiens
  siRNA target sequence for SPACA3 (NM_173847.2,117-135).
ctcaagccctgtttcttct

SEQ ID NO: 329432 - DNA, 19 bp, Homo sapiens
  siRNA target sequence for SPACA3 (NM_173847.2,339-357).
gctctacggtcgttgtgaa

SEQ ID NO: 329433 - DNA, 19 bp, Homo sapiens
  siRNA target sequence for SPACA3 (NM_173847.2,362-380).
ccagagtgctacatgactt

SEQ ID NO: 329434 - DNA, 19 bp, Homo sapiens
  siRNA target sequence for SPACA3 (NM_173847.2,562-580).
cggatgtactgctcagatt

SEQ ID NO: 329435 - DNA, 19 bp, Homo sapiens
  siRNA target sequence for SPACA3 (NM_173847.2,563-581).
ggatgtactgctcagattt

SEQ ID NO: 329436 - DNA, 19 bp, Homo sapiens
  siRNA target sequence for SPACA3 (NM_173847.2,595-613).
ctcaaggataccgttatct

SEQ ID NO: 329437 - DNA, 19 bp, Homo sapiens
  siRNA target sequence for SPACA3 (NM_173847.2,597-615).
caaggataccgttatctgt

SEQ ID NO: 329438 - DNA, 19 bp, Homo sapiens
  siRNA target sequence for SPACA3 (NM_173847.2,607-625).
gttatctgtgccatgaaga

SEQ ID NO: 329439 - DNA, 19 bp, Homo sapiens
  siRNA target sequence for C6orf135 (NM_024839.1,106-124).
caggcgctggcgaggtttt

SEQ ID NO: 329440 - DNA, 19 bp, Homo sapiens
  siRNA target sequence for C6orf135 (NM_024839.1,368-386).
ggagccaagcagattccaa

SEQ ID NO: 329441 - DNA, 19 bp, Homo sapiens
  siRNA target sequence for COMP (NM_000095.2,449-467).
cccgagtccgctgtatcaa

SEQ ID NO: 329442 - DNA, 19 bp, Homo sapiens
  siRNA target sequence for COMP (NM_000095.2,451-469).
cgagtccgctgtatcaaca

SEQ ID NO: 329443 - DNA, 19 bp, Homo sapiens
  siRNA target sequence for COMP (NM_000095.2,587-605).
gtgagaccgggcaacataa

SEQ ID NO: 329444 - DNA, 19 bp, Homo sapiens
  siRNA target sequence for COMP (NM_000095.2,589-607).
gagaccgggcaacataact

SEQ ID NO: 329445 - DNA, 19 bp, Homo sapiens
  siRNA target sequence for COMP (NM_000095.2,991-1009).
gacggggtccccaatgaaa

SEQ ID NO: 329446 - DNA, 19 bp, Homo sapiens
  siRNA target sequence for COMP (NM_000095.2,995-1013).
gggtccccaatgaaaagga

SEQ ID NO: 329447 - DNA, 19 bp, Homo sapiens
  siRNA target sequence for COMP (NM_000095.2,1322-1340).
cttgtgacagcgatcaaga

SEQ ID NO: 329448 - DNA, 19 bp, Homo sapiens
  siRNA target sequence for COMP (NM_000095.2,1545-1563).
gtgccaggacgactttgat

SEQ ID NO: 329449 - DNA, 19 bp, Homo sapiens
  siRNA target sequence for COMP (NM_000095.2,1711-1729).
gagatcgtgcagacaatga

SEQ ID NO: 329450 - DNA, 19 bp, Homo sapiens
  siRNA target sequence for COMP (NM_000095.2,1881-1899).
gcagatggagcaaacgtat

SEQ ID NO: 329451 - DNA, 19 bp, Homo sapiens
  siRNA target sequence for COMP (NM_000095.2,1882-1900).
cagatggagcaaacgtatt

SEQ ID NO: 329452 - DNA, 19 bp, Homo sapiens
  siRNA target sequence for COMP (NM_000095.2,2248-2266).
cgttaccgctgcaatgaca

SEQ ID NO: 329453 - DNA, 19 bp, Homo sapiens
  siRNA target sequence for ERCC6 (NM_000124.1,97-115).
cccccactcaagtcaaact

SEQ ID NO: 329454 - DNA, 19 bp, Homo sapiens
  siRNA target sequence for ERCC6 (NM_000124.1,99-117).
cccactcaagtcaaactca

SEQ ID NO: 329455 - DNA, 19 bp, Homo sapiens
  siRNA target sequence for ERCC6 (NM_000124.1,114-132).
ctcaggagcaagactgttt

SEQ ID NO: 329456 - DNA, 19 bp, Homo sapiens
  siRNA target sequence for ERCC6 (NM_000124.1,136-154).
gagtcaacctgtcagtaat

SEQ ID NO: 329457 - DNA, 19 bp, Homo sapiens
  siRNA target sequence for ERCC6 (NM_000124.1,138-156).
gtcaacctgtcagtaataa

SEQ ID NO: 329458 - DNA, 19 bp, Homo sapiens
  siRNA target sequence for ERCC6 (NM_000124.1,491-509).
gatgacctcacgtcatgta

SEQ ID NO: 329459 - DNA, 19 bp, Homo sapiens
  siRNA target sequence for ERCC6 (NM_000124.1,513-531).
catccctaaggcaaatcaa

SEQ ID NO: 329460 - DNA, 19 bp, Homo sapiens
  siRNA target sequence for ERCC6 (NM_000124.1,599-617).
gtaaaacgacagaagtata

SEQ ID NO: 329461 - DNA, 19 bp, Homo sapiens
  siRNA target sequence for ERCC6 (NM_000124.1,606-624).
gacagaagtataataagga

SEQ ID NO: 329462 - DNA, 19 bp, Homo sapiens
  siRNA target sequence for ERCC6 (NM_000124.1,881-899).
gcatcaggcttcgaaaagt

SEQ ID NO: 329463 - DNA, 19 bp, Homo sapiens
  siRNA target sequence for ERCC6 (NM_000124.1,882-900).
catcaggcttcgaaaagta

SEQ ID NO: 329464 - DNA, 19 bp, Homo sapiens
  siRNA target sequence for ERCC6 (NM_000124.1,885-903).
caggcttcgaaaagtattt

SEQ ID NO: 329465 - DNA, 19 bp, Homo sapiens
  siRNA target sequence for ERCC6 (NM_000124.1,1059-1077).
gtttgaaaaagcacatcaa

SEQ ID NO: 329466 - DNA, 19 bp, Homo sapiens
  siRNA target sequence for ERCC6 (NM_000124.1,1183-1201).
gggtgaagagtctgagtat

SEQ ID NO: 329467 - DNA, 19 bp, Homo sapiens
  siRNA target sequence for ERCC6 (NM_000124.1,1184-1202).
ggtgaagagtctgagtatt

SEQ ID NO: 329468 - DNA, 19 bp, Homo sapiens
  siRNA target sequence for ERCC6 (NM_000124.1,1309-1327).
cgggaaacggcagaagaaa

SEQ ID NO: 329469 - DNA, 19 bp, Homo sapiens
  siRNA target sequence for ERCC6 (NM_000124.1,1340-1358).
gagattgatgatgactttt

SEQ ID NO: 329470 - DNA, 19 bp, Homo sapiens
  siRNA target sequence for ERCC6 (NM_000124.1,1468-1486).
gcggttaaggagatggaat

SEQ ID NO: 329471 - DNA, 19 bp, Homo sapiens
  siRNA target sequence for ERCC6 (NM_000124.1,1469-1487).
cggttaaggagatggaata

SEQ ID NO: 329472 - DNA, 19 bp, Homo sapiens
  siRNA target sequence for ERCC6 (NM_000124.1,1470-1488).
ggttaaggagatggaataa

SEQ ID NO: 329473 - DNA, 19 bp, Homo sapiens
  siRNA target sequence for ERCC6 (NM_000124.1,1551-1569).
ctgaatttgacgaaggttt

SEQ ID NO: 329474 - DNA, 19 bp, Homo sapiens
  siRNA target sequence for ERCC6 (NM_000124.1,1688-1706).
ggcaagaccatccagataa

SEQ ID NO: 329475 - DNA, 19 bp, Homo sapiens
  siRNA target sequence for ERCC6 (NM_000124.1,1689-1707).
gcaagaccatccagataat

SEQ ID NO: 329476 - DNA, 19 bp, Homo sapiens
  siRNA target sequence for ERCC6 (NM_000124.1,1743-1761).
ggactcgtggttcaaatta

SEQ ID NO: 329477 - DNA, 19 bp, Homo sapiens
  siRNA target sequence for ERCC6 (NM_000124.1,1771-1789).
ggggttgggtccaactgta

SEQ ID NO: 329478 - DNA, 19 bp, Homo sapiens
  siRNA target sequence for ERCC6 (NM_000124.1,1772-1790).
gggttgggtccaactgtaa

SEQ ID NO: 329479 - DNA, 19 bp, Homo sapiens
  siRNA target sequence for ERCC6 (NM_000124.1,1773-1791).
ggttgggtccaactgtaat

SEQ ID NO: 329480 - DNA, 19 bp, Homo sapiens
  siRNA target sequence for ERCC6 (NM_000124.1,1774-1792).
gttgggtccaactgtaatt

SEQ ID NO: 329481 - DNA, 19 bp, Homo sapiens
  siRNA target sequence for ERCC6 (NM_000124.1,1778-1796).
ggtccaactgtaattgtct

SEQ ID NO: 329482 - DNA, 19 bp, Homo sapiens
  siRNA target sequence for ERCC6 (NM_000124.1,1851-1869).
cgttcagagtggcaattct

SEQ ID NO: 329483 - DNA, 19 bp, Homo sapiens
  siRNA target sequence for ERCC6 (NM_000124.1,1852-1870).
gttcagagtggcaattcta

SEQ ID NO: 329484 - DNA, 19 bp, Homo sapiens
  siRNA target sequence for ERCC6 (NM_000124.1,1857-1875).
gagtggcaattctacatga

SEQ ID NO: 329485 - DNA, 19 bp, Homo sapiens
  siRNA target sequence for ERCC6 (NM_000124.1,1871-1889).
catgaaaccggttcctata

SEQ ID NO: 329486 - DNA, 19 bp, Homo sapiens
  siRNA target sequence for ERCC6 (NM_000124.1,1880-1898).
ggttcctatacccacaaaa

SEQ ID NO: 329487 - DNA, 19 bp, Homo sapiens
  siRNA target sequence for ERCC6 (NM_000124.1,1950-1968).
cttactcctacattcgatt

SEQ ID NO: 329488 - DNA, 19 bp, Homo sapiens
  siRNA target sequence for ERCC6 (NM_000124.1,1965-1983).
gattgatgcaggatgacat

SEQ ID NO: 329489 - DNA, 19 bp, Homo sapiens
  siRNA target sequence for ERCC6 (NM_000124.1,1979-1997).
gacattagcaggtatgact

SEQ ID NO: 329490 - DNA, 19 bp, Homo sapiens
  siRNA target sequence for ERCC6 (NM_000124.1,1989-2007).
ggtatgactggcactatgt

SEQ ID NO: 329491 - DNA, 19 bp, Homo sapiens
  siRNA target sequence for ERCC6 (NM_000124.1,2014-2032).
ggacgaaggacacaaaatt

SEQ ID NO: 329492 - DNA, 19 bp, Homo sapiens
  siRNA target sequence for ERCC6 (NM_000124.1,2017-2035).
cgaaggacacaaaattcga

SEQ ID NO: 329493 - DNA, 19 bp, Homo sapiens
  siRNA target sequence for ERCC6 (NM_000124.1,2018-2036).
gaaggacacaaaattcgaa

SEQ ID NO: 329494 - DNA, 19 bp, Homo sapiens
  siRNA target sequence for ERCC6 (NM_000124.1,2026-2044).
caaaattcgaaatccaaat

SEQ ID NO: 329495 - DNA, 19 bp, Homo sapiens
  siRNA target sequence for ERCC6 (NM_000124.1,2077-2095).
cacccctcatcggatcatt

SEQ ID NO: 329496 - DNA, 19 bp, Homo sapiens
  siRNA target sequence for ERCC6 (NM_000124.1,2079-2097).
cccctcatcggatcattct

SEQ ID NO: 329497 - DNA, 19 bp, Homo sapiens
  siRNA target sequence for ERCC6 (NM_000124.1,2081-2099).
cctcatcggatcattctgt

SEQ ID NO: 329498 - DNA, 19 bp, Homo sapiens
  siRNA target sequence for ERCC6 (NM_000124.1,2106-2124).
caccgatgcaaaataacct

SEQ ID NO: 329499 - DNA, 19 bp, Homo sapiens
  siRNA target sequence for ERCC6 (NM_000124.1,2132-2150).
ctgtggtcgctctttgact

SEQ ID NO: 329500 - DNA, 19 bp, Homo sapiens
  siRNA target sequence for ERCC6 (NM_000124.1,2212-2230).
caccatggggggatattca

SEQ ID NO: 329501 - DNA, 19 bp, Homo sapiens
  siRNA target sequence for ERCC6 (NM_000124.1,2218-2236).
ggggggatattcaaatgct

SEQ ID NO: 329502 - DNA, 19 bp, Homo sapiens
  siRNA target sequence for ERCC6 (NM_000124.1,2278-2296).
cttacgagataccataaat

SEQ ID NO: 329503 - DNA, 19 bp, Homo sapiens
  siRNA target sequence for ERCC6 (NM_000124.1,2282-2300).
cgagataccataaatccat

SEQ ID NO: 329504 - DNA, 19 bp, Homo sapiens
  siRNA target sequence for ERCC6 (NM_000124.1,2385-2403).
cagatgagcagcataaagt

SEQ ID NO: 329505 - DNA, 19 bp, Homo sapiens
  siRNA target sequence for ERCC6 (NM_000124.1,2387-2405).
gatgagcagcataaagtct

SEQ ID NO: 329506 - DNA, 19 bp, Homo sapiens
  siRNA target sequence for ERCC6 (NM_000124.1,2471-2489).
ggacttatagccctaagaa

SEQ ID NO: 329507 - DNA, 19 bp, Homo sapiens
  siRNA target sequence for ERCC6 (NM_000124.1,2472-2490).
gacttatagccctaagaaa

SEQ ID NO: 329508 - DNA, 19 bp, Homo sapiens
  siRNA target sequence for ERCC6 (NM_000124.1,2519-2537).
ggaggtcccaagaatctca

SEQ ID NO: 329509 - DNA, 19 bp, Homo sapiens
  siRNA target sequence for ERCC6 (NM_000124.1,2583-2601).
ggaaacgttctgggaaaat

SEQ ID NO: 329510 - DNA, 19 bp, Homo sapiens
  siRNA target sequence for ERCC6 (NM_000124.1,2589-2607).
gttctgggaaaatgattgt

SEQ ID NO: 329511 - DNA, 19 bp, Homo sapiens
  siRNA target sequence for ERCC6 (NM_000124.1,2645-2663).
cagcgagtattgctgtttt

SEQ ID NO: 329512 - DNA, 19 bp, Homo sapiens
  siRNA target sequence for ERCC6 (NM_000124.1,2647-2665).
gcgagtattgctgttttct

SEQ ID NO: 329513 - DNA, 19 bp, Homo sapiens
  siRNA target sequence for ERCC6 (NM_000124.1,2680-2698).
gctggacatacttgaagta

SEQ ID NO: 329514 - DNA, 19 bp, Homo sapiens
  siRNA target sequence for ERCC6 (NM_000124.1,2681-2699).
ctggacatacttgaagtat

SEQ ID NO: 329515 - DNA, 19 bp, Homo sapiens
  siRNA target sequence for ERCC6 (NM_000124.1,2701-2719).
ccttagagcccaaaagtat

SEQ ID NO: 329516 - DNA, 19 bp, Homo sapiens
  siRNA target sequence for ERCC6 (NM_000124.1,2706-2724).
gagcccaaaagtataccta

SEQ ID NO: 329517 - DNA, 19 bp, Homo sapiens
  siRNA target sequence for ERCC6 (NM_000124.1,2734-2752).
ggatggtaccactacaata

SEQ ID NO: 329518 - DNA, 19 bp, Homo sapiens
  siRNA target sequence for ERCC6 (NM_000124.1,2738-2756).
ggtaccactacaatagctt

SEQ ID NO: 329519 - DNA, 19 bp, Homo sapiens
  siRNA target sequence for ERCC6 (NM_000124.1,2765-2783).
ccactgattacgagataca

SEQ ID NO: 329520 - DNA, 19 bp, Homo sapiens
  siRNA target sequence for ERCC6 (NM_000124.1,2766-2784).
cactgattacgagatacaa

SEQ ID NO: 329521 - DNA, 19 bp, Homo sapiens
  siRNA target sequence for ERCC6 (NM_000124.1,2856-2874).
caaacagagttgtcatcta

SEQ ID NO: 329522 - DNA, 19 bp, Homo sapiens
  siRNA target sequence for ERCC6 (NM_000124.1,2968-2986).
gactgcgggcaccattgaa

SEQ ID NO: 329523 - DNA, 19 bp, Homo sapiens
  siRNA target sequence for ERCC6 (NM_000124.1,3025-3043).
gacaaatagagtgctaaaa

SEQ ID NO: 329524 - DNA, 19 bp, Homo sapiens
  siRNA target sequence for ERCC6 (NM_000124.1,3057-3075).
ggcggtttttcaaatccaa

SEQ ID NO: 329525 - DNA, 19 bp, Homo sapiens
  siRNA target sequence for ERCC6 (NM_000124.1,3058-3076).
gcggtttttcaaatccaat

SEQ ID NO: 329526 - DNA, 19 bp, Homo sapiens
  siRNA target sequence for ERCC6 (NM_000124.1,3266-3284).
gtaaatgatgccacatcat

SEQ ID NO: 329527 - DNA, 19 bp, Homo sapiens
  siRNA target sequence for ERCC6 (NM_000124.1,3292-3310).
gaaatctgaggctaaagga

SEQ ID NO: 329528 - DNA, 19 bp, Homo sapiens
  siRNA target sequence for ERCC6 (NM_000124.1,3356-3374).
gatgaccctcacatgagta

SEQ ID NO: 329529 - DNA, 19 bp, Homo sapiens
  siRNA target sequence for ERCC6 (NM_000124.1,3359-3377).
gaccctcacatgagtagta

SEQ ID NO: 329530 - DNA, 19 bp, Homo sapiens
  siRNA target sequence for ERCC6 (NM_000124.1,3361-3379).
ccctcacatgagtagtaat

SEQ ID NO: 329531 - DNA, 19 bp, Homo sapiens
  siRNA target sequence for ERCC6 (NM_000124.1,3534-3552).
gtctttcttacaaaagaga

SEQ ID NO: 329532 - DNA, 19 bp, Homo sapiens
  siRNA target sequence for ERCC6 (NM_000124.1,3689-3707).
caaaagcctaagaactcta

SEQ ID NO: 329533 - DNA, 19 bp, Homo sapiens
  siRNA target sequence for ERCC6 (NM_000124.1,3695-3713).
cctaagaactctaagcatt

SEQ ID NO: 329534 - DNA, 19 bp, Homo sapiens
  siRNA target sequence for ERCC6 (NM_000124.1,3714-3732).
gcagagacgccaagtttga

SEQ ID NO: 329535 - DNA, 19 bp, Homo sapiens
  siRNA target sequence for ERCC6 (NM_000124.1,3727-3745).
gtttgaaggaactcgaatt

SEQ ID NO: 329536 - DNA, 19 bp, Homo sapiens
  siRNA target sequence for ERCC6 (NM_000124.1,3779-3797).
caagacagtgaaaacaaga

SEQ ID NO: 329537 - DNA, 19 bp, Homo sapiens
  siRNA target sequence for ERCC6 (NM_000124.1,3814-3832).
gagcaatgacgattatgtt

SEQ ID NO: 329538 - DNA, 19 bp, Homo sapiens
  siRNA target sequence for ERCC6 (NM_000124.1,3821-3839).
gacgattatgttttggaaa

SEQ ID NO: 329539 - DNA, 19 bp, Homo sapiens
  siRNA target sequence for ERCC6 (NM_000124.1,4052-4070).
gcaggaaaaaagagtagat

SEQ ID NO: 329540 - DNA, 19 bp, Homo sapiens
  siRNA target sequence for ERCC6 (NM_000124.1,4063-4081).
gagtagatttggtaagaaa

SEQ ID NO: 329541 - DNA, 19 bp, Homo sapiens
  siRNA target sequence for ERCC6 (NM_000124.1,4263-4281).
ctagaaaccacctgattct

SEQ ID NO: 329542 - DNA, 19 bp, Homo sapiens
  siRNA target sequence for ERCC6 (NM_000124.1,4280-4298).
ctgccagagcgtttagaaa

SEQ ID NO: 329543 - DNA, 19 bp, Homo sapiens
  siRNA target sequence for ERCC6 (NM_000124.1,4284-4302).
cagagcgtttagaaagtga

SEQ ID NO: 329544 - DNA, 19 bp, Homo sapiens
  siRNA target sequence for ERCC6 (NM_000124.1,4470-4488).
gtgtcttccgagaactatt

SEQ ID NO: 329545 - DNA, 19 bp, Homo sapiens
  siRNA target sequence for ERCC6 (NM_000124.1,4472-4490).
gtcttccgagaactattga

SEQ ID NO: 329546 - DNA, 19 bp, Homo sapiens
  siRNA target sequence for ERCC6 (NM_000124.1,4474-4492).
cttccgagaactattgaga

SEQ ID NO: 329547 - DNA, 19 bp, Homo sapiens
  siRNA target sequence for ERCC6 (NM_000124.1,4496-4514).
ctgtgcactttccatagaa

SEQ ID NO: 329548 - DNA, 19 bp, Homo sapiens
  siRNA target sequence for ERCC6 (NM_000124.1,4498-4516).
gtgcactttccatagaact

SEQ ID NO: 329549 - DNA, 19 bp, Homo sapiens
  siRNA target sequence for ERCC6 (NM_000124.1,4515-4533).
cttctggtggtgaaggaat

SEQ ID NO: 329550 - DNA, 19 bp, Homo sapiens
  siRNA target sequence for ERCC2 (NM_000400.2,202-220).
ggcataccagagagcatat

SEQ ID NO: 329551 - DNA, 19 bp, Homo sapiens
  siRNA target sequence for ERCC2 (NM_000400.2,224-242).
ctggaggtgaccaaactca

SEQ ID NO: 329552 - DNA, 19 bp, Homo sapiens
  siRNA target sequence for ERCC2 (NM_000400.2,255-273).
gaactgtgccagagattga

SEQ ID NO: 329553 - DNA, 19 bp, Homo sapiens
  siRNA target sequence for ERCC2 (NM_000400.2,293-311).
cgaaagttgctcaacttct

SEQ ID NO: 329554 - DNA, 19 bp, Homo sapiens
  siRNA target sequence for ERCC2 (NM_000400.2,356-374).
ctgagctcccgcaaaaact

SEQ ID NO: 329555 - DNA, 19 bp, Homo sapiens
  siRNA target sequence for ERCC2 (NM_000400.2,364-382).
ccgcaaaaacttgtgtatt

SEQ ID NO: 329556 - DNA, 19 bp, Homo sapiens
  siRNA target sequence for ERCC2 (NM_000400.2,487-505).
gccccactgccgattctat

SEQ ID NO: 329557 - DNA, 19 bp, Homo sapiens
  siRNA target sequence for ERCC2 (NM_000400.2,489-507).
cccactgccgattctatga

SEQ ID NO: 329558 - DNA, 19 bp, Homo sapiens
  siRNA target sequence for ERCC2 (NM_000400.2,495-513).
gccgattctatgaggaatt

SEQ ID NO: 329559 - DNA, 19 bp, Homo sapiens
  siRNA target sequence for ERCC2 (NM_000400.2,635-653).
gccaatgtggtggtttata

SEQ ID NO: 329560 - DNA, 19 bp, Homo sapiens
  siRNA target sequence for ERCC2 (NM_000400.2,835-853).
gacggtgctcaggatcaaa

SEQ ID NO: 329561 - DNA, 19 bp, Homo sapiens
  siRNA target sequence for ERCC2 (NM_000400.2,1002-1020).
gcacggccgagcatttcct

SEQ ID NO: 329562 - DNA, 19 bp, Homo sapiens
  siRNA target sequence for ERCC2 (NM_000400.2,1136-1154).
cgcaagcccctcagattct

SEQ ID NO: 329563 - DNA, 19 bp, Homo sapiens
  siRNA target sequence for ERCC2 (NM_000400.2,1357-1375).
ggccatcaaacccgtattt

SEQ ID NO: 329564 - DNA, 19 bp, Homo sapiens
  siRNA target sequence for ERCC2 (NM_000400.2,1359-1377).
ccatcaaacccgtatttga

SEQ ID NO: 329565 - DNA, 19 bp, Homo sapiens
  siRNA target sequence for ERCC2 (NM_000400.2,1385-1403).
cagtctgtcatcatcacat

SEQ ID NO: 329566 - DNA, 19 bp, Homo sapiens
  siRNA target sequence for ERCC2 (NM_000400.2,1535-1553).
gtggccatcagctccaaat

SEQ ID NO: 329567 - DNA, 19 bp, Homo sapiens
  siRNA target sequence for ERCC2 (NM_000400.2,1764-1782).
gtgtcgccctggagaagta

SEQ ID NO: 329568 - DNA, 19 bp, Homo sapiens
  siRNA target sequence for ERCC2 (NM_000400.2,1845-1863).
ccgagggaatcgactttgt

SEQ ID NO: 329569 - DNA, 19 bp, Homo sapiens
  siRNA target sequence for ERCC2 (NM_000400.2,1960-1978).
gttccagattcgtgagaat

SEQ ID NO: 329570 - DNA, 19 bp, Homo sapiens
  siRNA target sequence for GUCA1A (NM_000409.2,624-642).
cgtgatggagggaaagtca

SEQ ID NO: 329571 - DNA, 19 bp, Homo sapiens
  siRNA target sequence for GUCA1A (NM_000409.2,710-728).
gccaactcaccctctatga

SEQ ID NO: 329572 - DNA, 19 bp, Homo sapiens
  siRNA target sequence for GUCA1A (NM_000409.2,777-795).
gtacgtggaacagatgttt

SEQ ID NO: 329573 - DNA, 19 bp, Homo sapiens
  siRNA target sequence for GUCA1A (NM_000409.2,813-831).
caaggacggctacattgat

SEQ ID NO: 329574 - DNA, 19 bp, Homo sapiens
  siRNA target sequence for KRT10 (NM_000421.2,98-116).
ggagtgtcatccctaagaa

SEQ ID NO: 329575 - DNA, 19 bp, Homo sapiens
  siRNA target sequence for KRT10 (NM_000421.2,99-117).
gagtgtcatccctaagaat

SEQ ID NO: 329576 - DNA, 19 bp, Homo sapiens
  siRNA target sequence for KRT10 (NM_000421.2,101-119).
gtgtcatccctaagaattt

SEQ ID NO: 329577 - DNA, 19 bp, Homo sapiens
  siRNA target sequence for KRT10 (NM_000421.2,137-155).
cttggtggaggatttagct

SEQ ID NO: 329578 - DNA, 19 bp, Homo sapiens
  siRNA target sequence for KRT10 (NM_000421.2,163-181).
gttcagtggtggctctttt

SEQ ID NO: 329579 - DNA, 19 bp, Homo sapiens
  siRNA target sequence for KRT10 (NM_000421.2,635-653).
cagattctcaacctaacaa

SEQ ID NO: 329580 - DNA, 19 bp, Homo sapiens
  siRNA target sequence for KRT10 (NM_000421.2,643-661).
caacctaacaactgataat

SEQ ID NO: 329581 - DNA, 19 bp, Homo sapiens
  siRNA target sequence for KRT10 (NM_000421.2,901-919).
gtccactggtgatgtgaat

SEQ ID NO: 329582 - DNA, 19 bp, Homo sapiens
  siRNA target sequence for KRT10 (NM_000421.2,1049-1067).
ctgactacagaaattgata

SEQ ID NO: 329583 - DNA, 19 bp, Homo sapiens
  siRNA target sequence for KRT10 (NM_000421.2,1076-1094).
gaacagatatccagctata

SEQ ID NO: 329584 - DNA, 19 bp, Homo sapiens
  siRNA target sequence for KRT10 (NM_000421.2,1079-1097).
cagatatccagctataaat

SEQ ID NO: 329585 - DNA, 19 bp, Homo sapiens
  siRNA target sequence for KRT10 (NM_000421.2,1081-1099).
gatatccagctataaatct

SEQ ID NO: 329586 - DNA, 19 bp, Homo sapiens
  siRNA target sequence for KRT10 (NM_000421.2,1107-1125).
ctgaattgagacgtaatgt

SEQ ID NO: 329587 - DNA, 19 bp, Homo sapiens
  siRNA target sequence for KRT10 (NM_000421.2,1152-1170).
cccaactggccttgaaaca

SEQ ID NO: 329588 - DNA, 19 bp, Homo sapiens
  siRNA target sequence for KRT10 (NM_000421.2,1183-1201).
ctccttggcagaaacagaa

SEQ ID NO: 329589 - DNA, 19 bp, Homo sapiens
  siRNA target sequence for KRT10 (NM_000421.2,1284-1302).
ccgagtgccagaatactga

SEQ ID NO: 329590 - DNA, 19 bp, Homo sapiens
  siRNA target sequence for KRT10 (NM_000421.2,1286-1304).
gagtgccagaatactgaat

SEQ ID NO: 329591 - DNA, 19 bp, Homo sapiens
  siRNA target sequence for KRT10 (NM_000421.2,1310-1328).
caactcctggatattaaga

SEQ ID NO: 329592 - DNA, 19 bp, Homo sapiens
  siRNA target sequence for KRT10 (NM_000421.2,1729-1747).
cgtgggcgagtcttcatct

SEQ ID NO: 329593 - DNA, 19 bp, Homo sapiens
  siRNA target sequence for PHEX (NM_000444.2,721-739).
gtgagtcaaggtctcttaa

SEQ ID NO: 329594 - DNA, 19 bp, Homo sapiens
  siRNA target sequence for PHEX (NM_000444.2,723-741).
gagtcaaggtctcttaagt

SEQ ID NO: 329595 - DNA, 19 bp, Homo sapiens
  siRNA target sequence for PHEX (NM_000444.2,787-805).
gcggctgctgccatcttaa

SEQ ID NO: 329596 - DNA, 19 bp, Homo sapiens
  siRNA target sequence for PHEX (NM_000444.2,790-808).
gctgctgccatcttaagta

SEQ ID NO: 329597 - DNA, 19 bp, Homo sapiens
  siRNA target sequence for PHEX (NM_000444.2,791-809).
ctgctgccatcttaagtaa

SEQ ID NO: 329598 - DNA, 19 bp, Homo sapiens
  siRNA target sequence for PHEX (NM_000444.2,798-816).
catcttaagtaaagtaaat

SEQ ID NO: 329599 - DNA, 19 bp, Homo sapiens
  siRNA target sequence for PHEX (NM_000444.2,843-861).
cttccggttcgcttgtgat

SEQ ID NO: 329600 - DNA, 19 bp, Homo sapiens
  siRNA target sequence for PHEX (NM_000444.2,857-875).
gtgatggctggataagcaa

SEQ ID NO: 329601 - DNA, 19 bp, Homo sapiens
  siRNA target sequence for PHEX (NM_000444.2,859-877).
gatggctggataagcaata

SEQ ID NO: 329602 - DNA, 19 bp, Homo sapiens
  siRNA target sequence for PHEX (NM_000444.2,864-882).
ctggataagcaataatcca

SEQ ID NO: 329603 - DNA, 19 bp, Homo sapiens
  siRNA target sequence for PHEX (NM_000444.2,866-884).
ggataagcaataatccaat

SEQ ID NO: 329604 - DNA, 19 bp, Homo sapiens
  siRNA target sequence for PHEX (NM_000444.2,867-885).
gataagcaataatccaatt

SEQ ID NO: 329605 - DNA, 19 bp, Homo sapiens
  siRNA target sequence for PHEX (NM_000444.2,888-906).
cgaagatatgccaagctat

SEQ ID NO: 329606 - DNA, 19 bp, Homo sapiens
  siRNA target sequence for PHEX (NM_000444.2,897-915).
gccaagctatggggtttat

SEQ ID NO: 329607 - DNA, 19 bp, Homo sapiens
  siRNA target sequence for PHEX (NM_000444.2,917-935).
cttggctgagacataatgt

SEQ ID NO: 329608 - DNA, 19 bp, Homo sapiens
  siRNA target sequence for PHEX (NM_000444.2,985-1003).
gacaccgaagccatacaga

SEQ ID NO: 329609 - DNA, 19 bp, Homo sapiens
  siRNA target sequence for PHEX (NM_000444.2,987-1005).
caccgaagccatacagaaa

SEQ ID NO: 329610 - DNA, 19 bp, Homo sapiens
  siRNA target sequence for PHEX (NM_000444.2,1061-1079).
ccaagccactgctacacat

SEQ ID NO: 329611 - DNA, 19 bp, Homo sapiens
  siRNA target sequence for PHEX (NM_000444.2,1099-1117).
cgctggcccgtgcttgaat

SEQ ID NO: 329612 - DNA, 19 bp, Homo sapiens
  siRNA target sequence for PHEX (NM_000444.2,1101-1119).
ctggcccgtgcttgaatct

SEQ ID NO: 329613 - DNA, 19 bp, Homo sapiens
  siRNA target sequence for PHEX (NM_000444.2,1103-1121).
ggcccgtgcttgaatctaa

SEQ ID NO: 329614 - DNA, 19 bp, Homo sapiens
  siRNA target sequence for PHEX (NM_000444.2,1104-1122).
gcccgtgcttgaatctaat

SEQ ID NO: 329615 - DNA, 19 bp, Homo sapiens
  siRNA target sequence for PHEX (NM_000444.2,1167-1185).
gcagacacttgcaacgttt

SEQ ID NO: 329616 - DNA, 19 bp, Homo sapiens
  siRNA target sequence for PHEX (NM_000444.2,1190-1208).
gtcaatacagcaattctgt

SEQ ID NO: 329617 - DNA, 19 bp, Homo sapiens
  siRNA target sequence for PHEX (NM_000444.2,1243-1261).
gcatccaatgaacatatct

SEQ ID NO: 329618 - DNA, 19 bp, Homo sapiens
  siRNA target sequence for PHEX (NM_000444.2,1247-1265).
ccaatgaacatatcttgaa

SEQ ID NO: 329619 - DNA, 19 bp, Homo sapiens
  siRNA target sequence for PHEX (NM_000444.2,1298-1316).
gggaagactaccttgataa

SEQ ID NO: 329620 - DNA, 19 bp, Homo sapiens
  siRNA target sequence for PHEX (NM_000444.2,1303-1321).
gactaccttgataacagta

SEQ ID NO: 329621 - DNA, 19 bp, Homo sapiens
  siRNA target sequence for PHEX (NM_000444.2,1319-1337).
gtacagaagccaagtctta

SEQ ID NO: 329622 - DNA, 19 bp, Homo sapiens
  siRNA target sequence for PHEX (NM_000444.2,1365-1383).
ggatactgccgtgctttta

SEQ ID NO: 329623 - DNA, 19 bp, Homo sapiens
  siRNA target sequence for PHEX (NM_000444.2,1377-1395).
gcttttaggagctaacagt

SEQ ID NO: 329624 - DNA, 19 bp, Homo sapiens
  siRNA target sequence for PHEX (NM_000444.2,1378-1396).
cttttaggagctaacagtt

SEQ ID NO: 329625 - DNA, 19 bp, Homo sapiens
  siRNA target sequence for PHEX (NM_000444.2,1426-1444).
ctcagattggaaattaaga

SEQ ID NO: 329626 - DNA, 19 bp, Homo sapiens
  siRNA target sequence for PHEX (NM_000444.2,1428-1446).
cagattggaaattaagata

SEQ ID NO: 329627 - DNA, 19 bp, Homo sapiens
  siRNA target sequence for PHEX (NM_000444.2,1452-1470).
gataatgattccacatgaa

SEQ ID NO: 329628 - DNA, 19 bp, Homo sapiens
  siRNA target sequence for PHEX (NM_000444.2,1491-1509).
gtacaacaaaatgaacatt

SEQ ID NO: 329629 - DNA, 19 bp, Homo sapiens
  siRNA target sequence for PHEX (NM_000444.2,1626-1644).
ccgcgtcccgcagtacttt

SEQ ID NO: 329630 - DNA, 19 bp, Homo sapiens
  siRNA target sequence for PHEX (NM_000444.2,1627-1645).
cgcgtcccgcagtacttta

SEQ ID NO: 329631 - DNA, 19 bp, Homo sapiens
  siRNA target sequence for PHEX (NM_000444.2,1629-1647).
cgtcccgcagtactttaaa

SEQ ID NO: 329632 - DNA, 19 bp, Homo sapiens
  siRNA target sequence for PHEX (NM_000444.2,1632-1650).
cccgcagtactttaaagat

SEQ ID NO: 329633 - DNA, 19 bp, Homo sapiens
  siRNA target sequence for PHEX (NM_000444.2,1633-1651).
ccgcagtactttaaagatt

SEQ ID NO: 329634 - DNA, 19 bp, Homo sapiens
  siRNA target sequence for PHEX (NM_000444.2,1634-1652).
cgcagtactttaaagattt

SEQ ID NO: 329635 - DNA, 19 bp, Homo sapiens
  siRNA target sequence for PHEX (NM_000444.2,1701-1719).
ggtgtggagaatggtttat

SEQ ID NO: 329636 - DNA, 19 bp, Homo sapiens
  siRNA target sequence for PHEX (NM_000444.2,1702-1720).
gtgtggagaatggtttatt

SEQ ID NO: 329637 - DNA, 19 bp, Homo sapiens
  siRNA target sequence for PHEX (NM_000444.2,1735-1753).
cttagcaggcgctttcagt

SEQ ID NO: 329638 - DNA, 19 bp, Homo sapiens
  siRNA target sequence for PHEX (NM_000444.2,1740-1758).
caggcgctttcagtataga

SEQ ID NO: 329639 - DNA, 19 bp, Homo sapiens
  siRNA target sequence for PHEX (NM_000444.2,1847-1865).
cttatgttgttggaaagat

SEQ ID NO: 329640 - DNA, 19 bp, Homo sapiens
  siRNA target sequence for PHEX (NM_000444.2,1925-1943).
gcgttcgctgggcctttat

SEQ ID NO: 329641 - DNA, 19 bp, Homo sapiens
  siRNA target sequence for PHEX (NM_000444.2,1926-1944).
cgttcgctgggcctttatt

SEQ ID NO: 329642 - DNA, 19 bp, Homo sapiens
  siRNA target sequence for PHEX (NM_000444.2,1930-1948).
cgctgggcctttattgaca

SEQ ID NO: 329643 - DNA, 19 bp, Homo sapiens
  siRNA target sequence for PHEX (NM_000444.2,2039-2057).
cagagtttataatgaatga

SEQ ID NO: 329644 - DNA, 19 bp, Homo sapiens
  siRNA target sequence for PHEX (NM_000444.2,2121-2139).
cctacaaactcgcaagtat

SEQ ID NO: 329645 - DNA, 19 bp, Homo sapiens
  siRNA target sequence for PHEX (NM_000444.2,2179-2197).
ccaaaaacagagtggttta

SEQ ID NO: 329646 - DNA, 19 bp, Homo sapiens
  siRNA target sequence for PHEX (NM_000444.2,2238-2256).
caaccagatccgatttcca

SEQ ID NO: 329647 - DNA, 19 bp, Homo sapiens
  siRNA target sequence for PHEX (NM_000444.2,2310-2328).
gagttatggtgctatagga

SEQ ID NO: 329648 - DNA, 19 bp, Homo sapiens
  siRNA target sequence for PHEX (NM_000444.2,2329-2347).
gtaattgtcggacatgaat

SEQ ID NO: 329649 - DNA, 19 bp, Homo sapiens
  siRNA target sequence for PHEX (NM_000444.2,2337-2355).
cggacatgaatttacacat

SEQ ID NO: 329650 - DNA, 19 bp, Homo sapiens
  siRNA target sequence for PHEX (NM_000444.2,2464-2482).
cagtatagcaactattatt

SEQ ID NO: 329651 - DNA, 19 bp, Homo sapiens
  siRNA target sequence for PHEX (NM_000444.2,2567-2585).
gggcttacaggaaatggat

SEQ ID NO: 329652 - DNA, 19 bp, Homo sapiens
  siRNA target sequence for PHEX (NM_000444.2,2617-2635).
cttctaccaggcatcacat

SEQ ID NO: 329653 - DNA, 19 bp, Homo sapiens
  siRNA target sequence for PHEX (NM_000444.2,2671-2689).
catgtgaggtgcaattcct

SEQ ID NO: 329654 - DNA, 19 bp, Homo sapiens
  siRNA target sequence for PHEX (NM_000444.2,2752-2770).
gtcaatggtgcaattagta

SEQ ID NO: 329655 - DNA, 19 bp, Homo sapiens
  siRNA target sequence for UGT1A1 (NM_000463.1,95-113).
ctgggaagatactgttgat

SEQ ID NO: 329656 - DNA, 19 bp, Homo sapiens
  siRNA target sequence for UGT1A1 (NM_000463.1,171-189).
gaggggacatgaaatagtt

SEQ ID NO: 329657 - DNA, 19 bp, Homo sapiens
  siRNA target sequence for UGT1A1 (NM_000463.1,173-191).
ggggacatgaaatagttgt

SEQ ID NO: 329658 - DNA, 19 bp, Homo sapiens
  siRNA target sequence for UGT1A1 (NM_000463.1,200-218).
ctgacgcctcgttgtacat

SEQ ID NO: 329659 - DNA, 19 bp, Homo sapiens
  siRNA target sequence for UGT1A1 (NM_000463.1,202-220).
gacgcctcgttgtacatca

SEQ ID NO: 329660 - DNA, 19 bp, Homo sapiens
  siRNA target sequence for UGT1A1 (NM_000463.1,216-234).
catcagagacggagcattt

SEQ ID NO: 329661 - DNA, 19 bp, Homo sapiens
  siRNA target sequence for UGT1A1 (NM_000463.1,296-314).
gtctcgggcataatgtttt

SEQ ID NO: 329662 - DNA, 19 bp, Homo sapiens
  siRNA target sequence for UGT1A1 (NM_000463.1,330-348).
cctgcagcgtgtgatcaaa

SEQ ID NO: 329663 - DNA, 19 bp, Homo sapiens
  siRNA target sequence for UGT1A1 (NM_000463.1,333-351).
gcagcgtgtgatcaaaaca

SEQ ID NO: 329664 - DNA, 19 bp, Homo sapiens
  siRNA target sequence for UGT1A1 (NM_000463.1,334-352).
cagcgtgtgatcaaaacat

SEQ ID NO: 329665 - DNA, 19 bp, Homo sapiens
  siRNA target sequence for UGT1A1 (NM_000463.1,337-355).
cgtgtgatcaaaacataca

SEQ ID NO: 329666 - DNA, 19 bp, Homo sapiens
  siRNA target sequence for UGT1A1 (NM_000463.1,389-407).
ctggctgttcccacttact

SEQ ID NO: 329667 - DNA, 19 bp, Homo sapiens
  siRNA target sequence for UGT1A1 (NM_000463.1,398-416).
cccacttactgcacaacaa

SEQ ID NO: 329668 - DNA, 19 bp, Homo sapiens
  siRNA target sequence for UGT1A1 (NM_000463.1,509-527).
ctctgcccactgtattctt

SEQ ID NO: 329669 - DNA, 19 bp, Homo sapiens
  siRNA target sequence for UGT1A1 (NM_000463.1,511-529).
ctgcccactgtattcttct

SEQ ID NO: 329670 - DNA, 19 bp, Homo sapiens
  siRNA target sequence for UGT1A1 (NM_000463.1,679-697).
ctgtgcgacgtggtttatt

SEQ ID NO: 329671 - DNA, 19 bp, Homo sapiens
  siRNA target sequence for UGT1A1 (NM_000463.1,691-709).
gtttattccccgtatgcaa

SEQ ID NO: 329672 - DNA, 19 bp, Homo sapiens
  siRNA target sequence for UGT1A1 (NM_000463.1,707-725).
caacccttgcctcagaatt

SEQ ID NO: 329673 - DNA, 19 bp, Homo sapiens
  siRNA target sequence for UGT1A1 (NM_000463.1,777-795).
gctgtttagaagtgacttt

SEQ ID NO: 329674 - DNA, 19 bp, Homo sapiens
  siRNA target sequence for UGT1A1 (NM_000463.1,816-834).
catcatgcccaatatggtt

SEQ ID NO: 329675 - DNA, 19 bp, Homo sapiens
  siRNA target sequence for UGT1A1 (NM_000463.1,819-837).
catgcccaatatggttttt

SEQ ID NO: 329676 - DNA, 19 bp, Homo sapiens
  siRNA target sequence for UGT1A1 (NM_000463.1,880-898).
gaatttgaagcctacatta

SEQ ID NO: 329677 - DNA, 19 bp, Homo sapiens
  siRNA target sequence for UGT1A1 (NM_000463.1,886-904).
gaagcctacattaatgctt

SEQ ID NO: 329678 - DNA, 19 bp, Homo sapiens
  siRNA target sequence for UGT1A1 (NM_000463.1,1052-1070).
cgaacaacacgatacttgt

SEQ ID NO: 329679 - DNA, 19 bp, Homo sapiens
  siRNA target sequence for UGT1A1 (NM_000463.1,1053-1071).
gaacaacacgatacttgtt

SEQ ID NO: 329680 - DNA, 19 bp, Homo sapiens
  siRNA target sequence for UGT1A1 (NM_000463.1,1074-1092).
gtggctaccccaaaacgat

SEQ ID NO: 329681 - DNA, 19 bp, Homo sapiens
  siRNA target sequence for UGT1A1 (NM_000463.1,1106-1124).
cgatgacccgtgcctttat

SEQ ID NO: 329682 - DNA, 19 bp, Homo sapiens
  siRNA target sequence for UGT1A1 (NM_000463.1,1133-1151).
ctggttcccatggtgttta

SEQ ID NO: 329683 - DNA, 19 bp, Homo sapiens
  siRNA target sequence for UGT1A1 (NM_000463.1,1169-1187).
gcgttcccatggtgatgat

SEQ ID NO: 329684 - DNA, 19 bp, Homo sapiens
  siRNA target sequence for UGT1A1 (NM_000463.1,1217-1235).
caaagcgcatggagactaa

SEQ ID NO: 329685 - DNA, 19 bp, Homo sapiens
  siRNA target sequence for UGT1A1 (NM_000463.1,1300-1318).
gcagtcatcaatgacaaaa

SEQ ID NO: 329686 - DNA, 19 bp, Homo sapiens
  siRNA target sequence for UGT1A1 (NM_000463.1,1463-1481).
ggtaccagtaccattcctt

SEQ ID NO: 329687 - DNA, 19 bp, Homo sapiens
  siRNA target sequence for UGT1A1 (NM_000463.1,1478-1496).
ccttggacgtgattggttt

SEQ ID NO: 329688 - DNA, 19 bp, Homo sapiens
  siRNA target sequence for UGT1A1 (NM_000463.1,1521-1539).
ggccttcatcacctttaaa

SEQ ID NO: 329689 - DNA, 19 bp, Homo sapiens
  siRNA target sequence for HOXA13 (NM_000522.2,36-54).
cgagcccaccgtcatgttt

SEQ ID NO: 329690 - DNA, 19 bp, Homo sapiens
  siRNA target sequence for HOXA13 (NM_000522.2,85-103).
gacgagctcaacaagaaca

SEQ ID NO: 329691 - DNA, 19 bp, Homo sapiens
  siRNA target sequence for HOXA13 (NM_000522.2,559-577).
caccccaacgccatcaagt

SEQ ID NO: 329692 - DNA, 19 bp, Homo sapiens
  siRNA target sequence for HOXA13 (NM_000522.2,614-632).
ccttcgcggacaagtacat

SEQ ID NO: 329693 - DNA, 19 bp, Homo sapiens
  siRNA target sequence for HOXA13 (NM_000522.2,619-637).
gcggacaagtacatggata

SEQ ID NO: 329694 - DNA, 19 bp, Homo sapiens
  siRNA target sequence for HOXA13 (NM_000522.2,851-869).
gctggaacggccaaatgta

SEQ ID NO: 329695 - DNA, 19 bp, Homo sapiens
  siRNA target sequence for HOXA13 (NM_000522.2,1015-1033).
cgggaatacgccacgaata

SEQ ID NO: 329696 - DNA, 19 bp, Homo sapiens
  siRNA target sequence for HOXA13 (NM_000522.2,1016-1034).
gggaatacgccacgaataa

SEQ ID NO: 329697 - DNA, 19 bp, Homo sapiens
  siRNA target sequence for HOXA13 (NM_000522.2,1023-1041).
cgccacgaataaattcatt

SEQ ID NO: 329698 - DNA, 19 bp, Homo sapiens
  siRNA target sequence for HOXA13 (NM_000522.2,1024-1042).
gccacgaataaattcatta

SEQ ID NO: 329699 - DNA, 19 bp, Homo sapiens
  siRNA target sequence for HOXA13 (NM_000522.2,1028-1046).
cgaataaattcattactaa

SEQ ID NO: 329700 - DNA, 19 bp, Homo sapiens
  siRNA target sequence for HOXA13 (NM_000522.2,1050-1068).
caaacggaggcggatatca

SEQ ID NO: 329701 - DNA, 19 bp, Homo sapiens
  siRNA target sequence for HTR1A (NM_000524.1,204-222).
gaacgtggccaattatctt

SEQ ID NO: 329702 - DNA, 19 bp, Homo sapiens
  siRNA target sequence for HTR1A (NM_000524.1,207-225).
cgtggccaattatcttatt

SEQ ID NO: 329703 - DNA, 19 bp, Homo sapiens
  siRNA target sequence for HTR1A (NM_000524.1,422-440).
ccatcgactacgtgaacaa

SEQ ID NO: 329704 - DNA, 19 bp, Homo sapiens
  siRNA target sequence for HTR1A (NM_000524.1,468-486).
ctcgctcacttggcttatt

SEQ ID NO: 329705 - DNA, 19 bp, Homo sapiens
  siRNA target sequence for HTR1A (NM_000524.1,547-565).
cccgacgcatgcaccatta

SEQ ID NO: 329706 - DNA, 19 bp, Homo sapiens
  siRNA target sequence for HTR1A (NM_000524.1,550-568).
gacgcatgcaccattagca

SEQ ID NO: 329707 - DNA, 19 bp, Homo sapiens
  siRNA target sequence for HTR1A (NM_000524.1,571-589).
gatcatggctacactatct

SEQ ID NO: 329708 - DNA, 19 bp, Homo sapiens
  siRNA target sequence for HTR1A (NM_000524.1,574-592).
catggctacactatctatt

SEQ ID NO: 329709 - DNA, 19 bp, Homo sapiens
  siRNA target sequence for HTR1A (NM_000524.1,577-595).
ggctacactatctattcca

SEQ ID NO: 329710 - DNA, 19 bp, Homo sapiens
  siRNA target sequence for HTR1A (NM_000524.1,677-695).
gcaagacggtcaaaaaggt

SEQ ID NO: 329711 - DNA, 19 bp, Homo sapiens
  siRNA target sequence for HTR1A (NM_000524.1,954-972).
ctctttcgagaggaaaaat

SEQ ID NO: 329712 - DNA, 19 bp, Homo sapiens
  siRNA target sequence for HTR1A (NM_000524.1,956-974).
ctttcgagaggaaaaatga

SEQ ID NO: 329713 - DNA, 19 bp, Homo sapiens
  siRNA target sequence for HTR1A (NM_000524.1,1187-1205).
ccgtcatttacgcatactt

SEQ ID NO: 329714 - DNA, 19 bp, Homo sapiens
  siRNA target sequence for HTR1A (NM_000524.1,1189-1207).
gtcatttacgcatacttca

SEQ ID NO: 329715 - DNA, 19 bp, Homo sapiens
  siRNA target sequence for HTR1A (NM_000524.1,1203-1221).
cttcaacaaggactttcaa

SEQ ID NO: 329716 - DNA, 19 bp, Homo sapiens
  siRNA target sequence for KCNJ11 (NM_000525.2,731-749).
cacacattgctcatcttca

SEQ ID NO: 329717 - DNA, 19 bp, Homo sapiens
  siRNA target sequence for KCNJ11 (NM_000525.2,1136-1154).
ctccgcaagagcatgatca

SEQ ID NO: 329718 - DNA, 19 bp, Homo sapiens
  siRNA target sequence for KCNJ11 (NM_000525.2,1139-1157).
cgcaagagcatgatcatca

SEQ ID NO: 329719 - DNA, 19 bp, Homo sapiens
  siRNA target sequence for KCNJ11 (NM_000525.2,1288-1306).
gatcatctaccatgtcatt

SEQ ID NO: 329720 - DNA, 19 bp, Homo sapiens
  siRNA target sequence for KCNJ11 (NM_000525.2,1462-1480).
gcgctttgtgcccattgta

SEQ ID NO: 329721 - DNA, 19 bp, Homo sapiens
  siRNA target sequence for KCNJ11 (NM_000525.2,1486-1504).
ggaggacggacgttactct

SEQ ID NO: 329722 - DNA, 19 bp, Homo sapiens
  siRNA target sequence for SMPD1 (NM_000543.2,369-387).
caatctgcaaaggtctatt

SEQ ID NO: 329723 - DNA, 19 bp, Homo sapiens
  siRNA target sequence for SMPD1 (NM_000543.2,457-475).
gtgcaatctgctgaagata

SEQ ID NO: 329724 - DNA, 19 bp, Homo sapiens
  siRNA target sequence for SMPD1 (NM_000543.2,824-842).
ggatactggggcgaataca

SEQ ID NO: 329725 - DNA, 19 bp, Homo sapiens
  siRNA target sequence for SMPD1 (NM_000543.2,1171-1189).
cctgcgcaccctcagaatt

SEQ ID NO: 329726 - DNA, 19 bp, Homo sapiens
  siRNA target sequence for SMPD1 (NM_000543.2,1225-1243).
ccgcctcatctctctcaat

SEQ ID NO: 329727 - DNA, 19 bp, Homo sapiens
  siRNA target sequence for SMPD1 (NM_000543.2,1226-1244).
cgcctcatctctctcaata

SEQ ID NO: 329728 - DNA, 19 bp, Homo sapiens
  siRNA target sequence for SMPD1 (NM_000543.2,1350-1368).
gagacaaagtgcatataat

SEQ ID NO: 329729 - DNA, 19 bp, Homo sapiens
  siRNA target sequence for SMPD1 (NM_000543.2,1410-1428).
ggaattattaccgaattgt

SEQ ID NO: 329730 - DNA, 19 bp, Homo sapiens
  siRNA target sequence for SMPD1 (NM_000543.2,1411-1429).
gaattattaccgaattgta

SEQ ID NO: 329731 - DNA, 19 bp, Homo sapiens
  siRNA target sequence for SMPD1 (NM_000543.2,1469-1487).
cacactcatgtggatgaat

SEQ ID NO: 329732 - DNA, 19 bp, Homo sapiens
  siRNA target sequence for SMPD1 (NM_000543.2,1561-1579).
ctacatcggccttaatcct

SEQ ID NO: 329733 - DNA, 19 bp, Homo sapiens
  siRNA target sequence for SMPD1 (NM_000543.2,1580-1598).
ggttaccgtgtgtaccaaa

SEQ ID NO: 329734 - DNA, 19 bp, Homo sapiens
  siRNA target sequence for SMPD1 (NM_000543.2,1581-1599).
gttaccgtgtgtaccaaat

SEQ ID NO: 329735 - DNA, 19 bp, Homo sapiens
  siRNA target sequence for SMPD1 (NM_000543.2,1585-1603).
ccgtgtgtaccaaatagat

SEQ ID NO: 329736 - DNA, 19 bp, Homo sapiens
  siRNA target sequence for SMPD1 (NM_000543.2,1692-1710).
cgcactggcagcttctcta

SEQ ID NO: 329737 - DNA, 19 bp, Homo sapiens
  siRNA target sequence for SMPD1 (NM_000543.2,1755-1773).
cctggcacaacctggtata

SEQ ID NO: 329738 - DNA, 19 bp, Homo sapiens
  siRNA target sequence for SMPD1 (NM_000543.2,1785-1803).
gcgacatgcaacttttcca

SEQ ID NO: 329739 - DNA, 19 bp, Homo sapiens
  siRNA target sequence for SMPD1 (NM_000543.2,1861-1879).
ctgccgtctggctactctt

SEQ ID NO: 329740 - DNA, 19 bp, Homo sapiens
  siRNA target sequence for SMPD1 (NM_000543.2,1864-1882).
ccgtctggctactctttgt

SEQ ID NO: 329741 - DNA, 19 bp, Homo sapiens
  siRNA target sequence for SLC11A1 (NM_000578.2,285-303).
cctacctgagtgagaagat

SEQ ID NO: 329742 - DNA, 19 bp, Homo sapiens
  siRNA target sequence for SLC11A1 (NM_000578.2,304-322).
ccccatcccagacacaaaa

SEQ ID NO: 329743 - DNA, 19 bp, Homo sapiens
  siRNA target sequence for SLC11A1 (NM_000578.2,432-450).
ccgtggcgggattcaaact

SEQ ID NO: 329744 - DNA, 19 bp, Homo sapiens
  siRNA target sequence for SLC11A1 (NM_000578.2,433-451).
cgtggcgggattcaaactt

SEQ ID NO: 329745 - DNA, 19 bp, Homo sapiens
  siRNA target sequence for SLC11A1 (NM_000578.2,540-558).
gcgaggtctgccatctcta

SEQ ID NO: 329746 - DNA, 19 bp, Homo sapiens
  siRNA target sequence for SLC11A1 (NM_000578.2,639-657).
gcacggccattgcattcaa

SEQ ID NO: 329747 - DNA, 19 bp, Homo sapiens
  siRNA target sequence for SLC11A1 (NM_000578.2,640-658).
cacggccattgcattcaat

SEQ ID NO: 329748 - DNA, 19 bp, Homo sapiens
  siRNA target sequence for SLC11A1 (NM_000578.2,642-660).
cggccattgcattcaatct

SEQ ID NO: 329749 - DNA, 19 bp, Homo sapiens
  siRNA target sequence for SLC11A1 (NM_000578.2,773-791).
ggactccttataaccatta

SEQ ID NO: 329750 - DNA, 19 bp, Homo sapiens
  siRNA target sequence for SLC11A1 (NM_000578.2,774-792).
gactccttataaccattat

SEQ ID NO: 329751 - DNA, 19 bp, Homo sapiens
  siRNA target sequence for SLC11A1 (NM_000578.2,964-982).
ggtcaagtctcgagagata

SEQ ID NO: 329752 - DNA, 19 bp, Homo sapiens
  siRNA target sequence for SLC11A1 (NM_000578.2,1046-1064).
gccctgtccgtctccttta

SEQ ID NO: 329753 - DNA, 19 bp, Homo sapiens
  siRNA target sequence for SLC11A1 (NM_000578.2,1047-1065).
ccctgtccgtctcctttat

SEQ ID NO: 329754 - DNA, 19 bp, Homo sapiens
  siRNA target sequence for SLC11A1 (NM_000578.2,1049-1067).
ctgtccgtctcctttatca

SEQ ID NO: 329755 - DNA, 19 bp, Homo sapiens
  siRNA target sequence for SLC11A1 (NM_000578.2,1053-1071).
ccgtctcctttatcatcaa

SEQ ID NO: 329756 - DNA, 19 bp, Homo sapiens
  siRNA target sequence for SLC11A1 (NM_000578.2,1157-1175).
cacgactacgccaagatct

SEQ ID NO: 329757 - DNA, 19 bp, Homo sapiens
  siRNA target sequence for SLC11A1 (NM_000578.2,1194-1212).
ccgtggccgtggacattta

SEQ ID NO: 329758 - DNA, 19 bp, Homo sapiens
  siRNA target sequence for C4B (NM_000592.3,192-210).
ccgaggacaggtagtgaaa

SEQ ID NO: 329759 - DNA, 19 bp, Homo sapiens
  siRNA target sequence for C4B (NM_000592.3,196-214).
ggacaggtagtgaaaggat

SEQ ID NO: 329760 - DNA, 19 bp, Homo sapiens
  siRNA target sequence for C4B (NM_000592.3,225-243).
gagaaacccatctcgtaat

SEQ ID NO: 329761 - DNA, 19 bp, Homo sapiens
  siRNA target sequence for C4B (NM_000592.3,273-291).
cacccttagctcagaaaga

SEQ ID NO: 329762 - DNA, 19 bp, Homo sapiens
  siRNA target sequence for C4B (NM_000592.3,485-503).
cggaccagcccatttacaa

SEQ ID NO: 329763 - DNA, 19 bp, Homo sapiens
  siRNA target sequence for C4B (NM_000592.3,639-657).
catcttccaggatgacttt

SEQ ID NO: 329764 - DNA, 19 bp, Homo sapiens
  siRNA target sequence for C4B (NM_000592.3,710-728).
cagatggcctggaatccaa

SEQ ID NO: 329765 - DNA, 19 bp, Homo sapiens
  siRNA target sequence for C4B (NM_000592.3,741-759).
gtttgaggtgaagaaatat

SEQ ID NO: 329766 - DNA, 19 bp, Homo sapiens
  siRNA target sequence for C4B (NM_000592.3,829-847).
gatgaaatgcagttagaca

SEQ ID NO: 329767 - DNA, 19 bp, Homo sapiens
  siRNA target sequence for C4B (NM_000592.3,1251-1269).
cattcctgtcaaagtttct

SEQ ID NO: 329768 - DNA, 19 bp, Homo sapiens
  siRNA target sequence for C4B (NM_000592.3,1546-1564).
ggggccaccttttctcatt

SEQ ID NO: 329769 - DNA, 19 bp, Homo sapiens
  siRNA target sequence for C4B (NM_000592.3,1547-1565).
gggccaccttttctcatta

SEQ ID NO: 329770 - DNA, 19 bp, Homo sapiens
  siRNA target sequence for C4B (NM_000592.3,1631-1649).
cctcggtctcggtgtttgt

SEQ ID NO: 329771 - DNA, 19 bp, Homo sapiens
  siRNA target sequence for C4B (NM_000592.3,1660-1678).
ctggcaccctccttctact

SEQ ID NO: 329772 - DNA, 19 bp, Homo sapiens
  siRNA target sequence for C4B (NM_000592.3,1662-1680).
ggcaccctccttctacttt

SEQ ID NO: 329773 - DNA, 19 bp, Homo sapiens
  siRNA target sequence for C4B (NM_000592.3,1809-1827).
cgtgaagctccacttagaa

SEQ ID NO: 329774 - DNA, 19 bp, Homo sapiens
  siRNA target sequence for C4B (NM_000592.3,1810-1828).
gtgaagctccacttagaaa

SEQ ID NO: 329775 - DNA, 19 bp, Homo sapiens
  siRNA target sequence for C4B (NM_000592.3,1921-1939).
gtctttgaagctatgaaca

SEQ ID NO: 329776 - DNA, 19 bp, Homo sapiens
  siRNA target sequence for C4B (NM_000592.3,2020-2038).
ggagaccagtggaccttat

SEQ ID NO: 329777 - DNA, 19 bp, Homo sapiens
  siRNA target sequence for C4B (NM_000592.3,2031-2049).
gaccttatccagaaagaga

SEQ ID NO: 329778 - DNA, 19 bp, Homo sapiens
  siRNA target sequence for C4B (NM_000592.3,2087-2105).
gaaacgtgaacttccaaaa

SEQ ID NO: 329779 - DNA, 19 bp, Homo sapiens
  siRNA target sequence for C4B (NM_000592.3,2097-2115).
cttccaaaaggcgattaat

SEQ ID NO: 329780 - DNA, 19 bp, Homo sapiens
  siRNA target sequence for C4B (NM_000592.3,2101-2119).
caaaaggcgattaatgaga

SEQ ID NO: 329781 - DNA, 19 bp, Homo sapiens
  siRNA target sequence for C4B (NM_000592.3,2414-2432).
cagtggaccgctttcaaat

SEQ ID NO: 329782 - DNA, 19 bp, Homo sapiens
  siRNA target sequence for C4B (NM_000592.3,2416-2434).
gtggaccgctttcaaatat

SEQ ID NO: 329783 - DNA, 19 bp, Homo sapiens
  siRNA target sequence for C4B (NM_000592.3,2419-2437).
gaccgctttcaaatattga

SEQ ID NO: 329784 - DNA, 19 bp, Homo sapiens
  siRNA target sequence for C4B (NM_000592.3,2421-2439).
ccgctttcaaatattgaca

SEQ ID NO: 329785 - DNA, 19 bp, Homo sapiens
  siRNA target sequence for C4B (NM_000592.3,2602-2620).
ctgcggcctgtcctctata

SEQ ID NO: 329786 - DNA, 19 bp, Homo sapiens
  siRNA target sequence for C4B (NM_000592.3,2606-2624).
ggcctgtcctctataacta

SEQ ID NO: 329787 - DNA, 19 bp, Homo sapiens
  siRNA target sequence for C4B (NM_000592.3,2794-2812).
gctcgagggtccttcgaat

SEQ ID NO: 329788 - DNA, 19 bp, Homo sapiens
  siRNA target sequence for C4B (NM_000592.3,2795-2813).
ctcgagggtccttcgaatt

SEQ ID NO: 329789 - DNA, 19 bp, Homo sapiens
  siRNA target sequence for C4B (NM_000592.3,2911-2929).
cgaggccggaccttggaaa

SEQ ID NO: 329790 - DNA, 19 bp, Homo sapiens
  siRNA target sequence for C4B (NM_000592.3,2916-2934).
ccggaccttggaaatacct

SEQ ID NO: 329791 - DNA, 19 bp, Homo sapiens
  siRNA target sequence for C4B (NM_000592.3,2936-2954).
gcaactctgatcccaatat

SEQ ID NO: 329792 - DNA, 19 bp, Homo sapiens
  siRNA target sequence for C4B (NM_000592.3,2959-2977).
cctgatggggactttaaca

SEQ ID NO: 329793 - DNA, 19 bp, Homo sapiens
  siRNA target sequence for C4B (NM_000592.3,2999-3017).
cagatccattggacacttt

SEQ ID NO: 329794 - DNA, 19 bp, Homo sapiens
  siRNA target sequence for C4B (NM_000592.3,3082-3100).
ggggagcaaaccatgatct

SEQ ID NO: 329795 - DNA, 19 bp, Homo sapiens
  siRNA target sequence for C4B (NM_000592.3,3085-3103).
gagcaaaccatgatctact

SEQ ID NO: 329796 - DNA, 19 bp, Homo sapiens
  siRNA target sequence for C4B (NM_000592.3,3231-3249).
gaaggcggatggttcctat

SEQ ID NO: 329797 - DNA, 19 bp, Homo sapiens
  siRNA target sequence for C4B (NM_000592.3,3443-3461).
gtttggtgggcaatgatga

SEQ ID NO: 329798 - DNA, 19 bp, Homo sapiens
  siRNA target sequence for C4B (NM_000592.3,3486-3504).
gaccatcgcccttcatcat

SEQ ID NO: 329799 - DNA, 19 bp, Homo sapiens
  siRNA target sequence for C4B (NM_000592.3,3680-3698).
ggggtgttgcccacaacaa

SEQ ID NO: 329800 - DNA, 19 bp, Homo sapiens
  siRNA target sequence for C4B (NM_000592.3,4054-4072).
ggccggaatgggttcaagt

SEQ ID NO: 329801 - DNA, 19 bp, Homo sapiens
  siRNA target sequence for C4B (NM_000592.3,4188-4206).
ggtccttcgtacctacaat

SEQ ID NO: 329802 - DNA, 19 bp, Homo sapiens
  siRNA target sequence for C4B (NM_000592.3,4207-4225).
gtcctggacatgaagaaca

SEQ ID NO: 329803 - DNA, 19 bp, Homo sapiens
  siRNA target sequence for C4B (NM_000592.3,4230-4248).
ctgccaggacctacagata

SEQ ID NO: 329804 - DNA, 19 bp, Homo sapiens
  siRNA target sequence for C4B (NM_000592.3,4578-4596).
ccgttacgtgagtcacttt

SEQ ID NO: 329805 - DNA, 19 bp, Homo sapiens
  siRNA target sequence for C4B (NM_000592.3,4712-4730).
caaccctgtacgactacta

SEQ ID NO: 329806 - DNA, 19 bp, Homo sapiens
  siRNA target sequence for C4B (NM_000592.3,4740-4758).
gcgcagatgttctgtgttt

SEQ ID NO: 329807 - DNA, 19 bp, Homo sapiens
  siRNA target sequence for C4B (NM_000592.3,4879-4897).
gatggctacaggatgaagt

SEQ ID NO: 329808 - DNA, 19 bp, Homo sapiens
  siRNA target sequence for C4B (NM_000592.3,4926-4944).
cggcttccaggttaaggtt

SEQ ID NO: 329809 - DNA, 19 bp, Homo sapiens
  siRNA target sequence for C4B (NM_000592.3,5155-5173).
ctgctggactcgaatagct

SEQ ID NO: 329810 - DNA, 19 bp, Homo sapiens
  siRNA target sequence for NOS3 (NM_000603.2,589-607).
cctgggctccctggtattt

SEQ ID NO: 329811 - DNA, 19 bp, Homo sapiens
  siRNA target sequence for NOS3 (NM_000603.2,601-619).
ggtatttccacggaaacta

SEQ ID NO: 329812 - DNA, 19 bp, Homo sapiens
  siRNA target sequence for NOS3 (NM_000603.2,689-707).
cagtactacagctccatta

SEQ ID NO: 329813 - DNA, 19 bp, Homo sapiens
  siRNA target sequence for NOS3 (NM_000603.2,925-943).
ctgcaaccacatcaagtat

SEQ ID NO: 329814 - DNA, 19 bp, Homo sapiens
  siRNA target sequence for NOS3 (NM_000603.2,1303-1321).
caacatgctgctggaaatt

SEQ ID NO: 329815 - DNA, 19 bp, Homo sapiens
  siRNA target sequence for NOS3 (NM_000603.2,1397-1415).
gaccctcaccgctacaaca

SEQ ID NO: 329816 - DNA, 19 bp, Homo sapiens
  siRNA target sequence for NOS3 (NM_000603.2,1464-1482).
cgtccctgtggaaagacaa

SEQ ID NO: 329817 - DNA, 19 bp, Homo sapiens
  siRNA target sequence for NOS3 (NM_000603.2,1676-1694).
caggagatggtcaactatt

SEQ ID NO: 329818 - DNA, 19 bp, Homo sapiens
  siRNA target sequence for NOS3 (NM_000603.2,1790-1808).
gccaacgccgtgaagatct

SEQ ID NO: 329819 - DNA, 19 bp, Homo sapiens
  siRNA target sequence for NOS3 (NM_000603.2,1942-1960).
cctgtgtatggatgagtat

SEQ ID NO: 329820 - DNA, 19 bp, Homo sapiens
  siRNA target sequence for NOS3 (NM_000603.2,1996-2014).
ggtggtaaccagcacattt

SEQ ID NO: 329821 - DNA, 19 bp, Homo sapiens
  siRNA target sequence for NOS3 (NM_000603.2,2099-2117).
ccggaacagcacaagagtt

SEQ ID NO: 329822 - DNA, 19 bp, Homo sapiens
  siRNA target sequence for NOS3 (NM_000603.2,2100-2118).
cggaacagcacaagagtta

SEQ ID NO: 329823 - DNA, 19 bp, Homo sapiens
  siRNA target sequence for NOS3 (NM_000603.2,2102-2120).
gaacagcacaagagttata

SEQ ID NO: 329824 - DNA, 19 bp, Homo sapiens
  siRNA target sequence for NOS3 (NM_000603.2,2105-2123).
cagcacaagagttataaga

SEQ ID NO: 329825 - DNA, 19 bp, Homo sapiens
  siRNA target sequence for NOS3 (NM_000603.2,2182-2200).
gaaggagtccagtaacaca

SEQ ID NO: 329826 - DNA, 19 bp, Homo sapiens
  siRNA target sequence for NOS3 (NM_000603.2,3435-3453).
gccgatgctcccaacttga

SEQ ID NO: 329827 - DNA, 19 bp, Homo sapiens
  siRNA target sequence for NOS3 (NM_000603.2,3444-3462).
cccaacttgaccatctcta

SEQ ID NO: 329828 - DNA, 19 bp, Homo sapiens
  siRNA target sequence for ORM2 (NM_000608.2,465-483).
gctcacctgctgttcctta

SEQ ID NO: 329829 - DNA, 19 bp, Homo sapiens
  siRNA target sequence for ORM2 (NM_000608.2,486-504).
gacaccaagaccttgatgt

SEQ ID NO: 329830 - DNA, 19 bp, Homo sapiens
  siRNA target sequence for CNTF (NM_000614.2,127-145).
ctctgtagccgctctatct

SEQ ID NO: 329831 - DNA, 19 bp, Homo sapiens
  siRNA target sequence for CNTF (NM_000614.2,148-166).
ctagcaaggaagattcgtt

SEQ ID NO: 329832 - DNA, 19 bp, Homo sapiens
  siRNA target sequence for CNTF (NM_000614.2,176-194).
ctgctcttacggaatccta

SEQ ID NO: 329833 - DNA, 19 bp, Homo sapiens
  siRNA target sequence for CNTF (NM_000614.2,181-199).
cttacggaatcctatgtga

SEQ ID NO: 329834 - DNA, 19 bp, Homo sapiens
  siRNA target sequence for CNTF (NM_000614.2,306-324).
gaaccttcaagcttatcgt

SEQ ID NO: 329835 - DNA, 19 bp, Homo sapiens
  siRNA target sequence for CNTF (NM_000614.2,322-340).
cgtaccttccatgttttgt

SEQ ID NO: 329836 - DNA, 19 bp, Homo sapiens
  siRNA target sequence for CNTF (NM_000614.2,424-442).
caagtcgctgcctttgcat

SEQ ID NO: 329837 - DNA, 19 bp, Homo sapiens
  siRNA target sequence for CNTF (NM_000614.2,445-463).
cagatagaggagttaatga

SEQ ID NO: 329838 - DNA, 19 bp, Homo sapiens
  siRNA target sequence for CNTF (NM_000614.2,496-514).
gctgatgggatgcctatta

SEQ ID NO: 329839 - DNA, 19 bp, Homo sapiens
  siRNA target sequence for CNTF (NM_000614.2,497-515).
ctgatgggatgcctattaa

SEQ ID NO: 329840 - DNA, 19 bp, Homo sapiens
  siRNA target sequence for CNTF (NM_000614.2,600-618).
ccatgaccttcgtttcatt

SEQ ID NO: 329841 - DNA, 19 bp, Homo sapiens
  siRNA target sequence for CNTF (NM_000614.2,601-619).
catgaccttcgtttcattt

SEQ ID NO: 329842 - DNA, 19 bp, Homo sapiens
  siRNA target sequence for CNTF (NM_000614.2,604-622).
gaccttcgtttcatttctt

SEQ ID NO: 329843 - DNA, 19 bp, Homo sapiens
  siRNA target sequence for CNTF (NM_000614.2,643-661).
gcacgtgggagccattata

SEQ ID NO: 329844 - DNA, 19 bp, Homo sapiens
  siRNA target sequence for CNTF (NM_000614.2,644-662).
cacgtgggagccattatat

SEQ ID NO: 329845 - DNA, 19 bp, Homo sapiens
  siRNA target sequence for CNTF (NM_000614.2,649-667).
gggagccattatattgcta

SEQ ID NO: 329846 - DNA, 19 bp, Homo sapiens
  siRNA target sequence for CNTF (NM_000614.2,650-668).
ggagccattatattgctaa

SEQ ID NO: 329847 - DNA, 19 bp, Homo sapiens
  siRNA target sequence for CNTF (NM_000614.2,653-671).
gccattatattgctaacaa

SEQ ID NO: 329848 - DNA, 19 bp, Homo sapiens
  siRNA target sequence for SERPINA5 (NM_000624.3,630-648).
gggccatgaagcagatcaa

SEQ ID NO: 329849 - DNA, 19 bp, Homo sapiens
  siRNA target sequence for SERPINA5 (NM_000624.3,634-652).
catgaagcagatcaatgat

SEQ ID NO: 329850 - DNA, 19 bp, Homo sapiens
  siRNA target sequence for SERPINA5 (NM_000624.3,664-682).
gcaaacgaagggcaagatt

SEQ ID NO: 329851 - DNA, 19 bp, Homo sapiens
  siRNA target sequence for SERPINA5 (NM_000624.3,716-734).
gtcgtgatcatggtgaatt

SEQ ID NO: 329852 - DNA, 19 bp, Homo sapiens
  siRNA target sequence for SERPINA5 (NM_000624.3,840-858).
gccgcgaggatcagtatca

SEQ ID NO: 329853 - DNA, 19 bp, Homo sapiens
  siRNA target sequence for SERPINA5 (NM_000624.3,842-860).
cgcgaggatcagtatcact

SEQ ID NO: 329854 - DNA, 19 bp, Homo sapiens
  siRNA target sequence for SERPINA5 (NM_000624.3,843-861).
gcgaggatcagtatcacta

SEQ ID NO: 329855 - DNA, 19 bp, Homo sapiens
  siRNA target sequence for SERPINA5 (NM_000624.3,912-930).
gcaatgccacggctttgtt

SEQ ID NO: 329856 - DNA, 19 bp, Homo sapiens
  siRNA target sequence for SERPINA5 (NM_000624.3,918-936).
ccacggctttgttcattct

SEQ ID NO: 329857 - DNA, 19 bp, Homo sapiens
  siRNA target sequence for SERPINA5 (NM_000624.3,1020-1038).
ggcagctcgagctttacct

SEQ ID NO: 329858 - DNA, 19 bp, Homo sapiens
  siRNA target sequence for SERPINA5 (NM_000624.3,1021-1039).
gcagctcgagctttacctt

SEQ ID NO: 329859 - DNA, 19 bp, Homo sapiens
  siRNA target sequence for SERPINA5 (NM_000624.3,1086-1104).
ccagtctggggatcagtaa

SEQ ID NO: 329860 - DNA, 19 bp, Homo sapiens
  siRNA target sequence for SERPINA5 (NM_000624.3,1266-1284).
ctcagaggctagtgttcaa

SEQ ID NO: 329861 - DNA, 19 bp, Homo sapiens
  siRNA target sequence for CACNB3 (NM_000725.2,388-406).
gcggtgaggaccaatgtca

SEQ ID NO: 329862 - DNA, 19 bp, Homo sapiens
  siRNA target sequence for CACNB3 (NM_000725.2,751-769).
ggaccctctctgaaaggtt

SEQ ID NO: 329863 - DNA, 19 bp, Homo sapiens
  siRNA target sequence for CACNB3 (NM_000725.2,752-770).
gaccctctctgaaaggtta

SEQ ID NO: 329864 - DNA, 19 bp, Homo sapiens
  siRNA target sequence for CACNB3 (NM_000725.2,876-894).
gcgatctgtgctcaacaat

SEQ ID NO: 329865 - DNA, 19 bp, Homo sapiens
  siRNA target sequence for CACNB3 (NM_000725.2,1182-1200).
gtgcccaccggagtcattt

SEQ ID NO: 329866 - DNA, 19 bp, Homo sapiens
  siRNA target sequence for CACNB3 (NM_000725.2,1185-1203).
cccaccggagtcatttgat

SEQ ID NO: 329867 - DNA, 19 bp, Homo sapiens
  siRNA target sequence for CACNB3 (NM_000725.2,1187-1205).
caccggagtcatttgatgt

SEQ ID NO: 329868 - DNA, 19 bp, Homo sapiens
  siRNA target sequence for CACNB3 (NM_000725.2,1191-1209).
ggagtcatttgatgtgatt

SEQ ID NO: 329869 - DNA, 19 bp, Homo sapiens
  siRNA target sequence for CACNB3 (NM_000725.2,1630-1648).
cggccttggcccaaggata

SEQ ID NO: 329870 - DNA, 19 bp, Homo sapiens
  siRNA target sequence for CACNB3 (NM_000725.2,1634-1652).
cttggcccaaggatagcta

SEQ ID NO: 329871 - DNA, 19 bp, Homo sapiens
  siRNA target sequence for CHRM4 (NM_000741.1,25-43).
ggcagctcgggcaatcagt

SEQ ID NO: 329872 - DNA, 19 bp, Homo sapiens
  siRNA target sequence for CHRM4 (NM_000741.1,77-95).
gctatgagacggtggaaat

SEQ ID NO: 329873 - DNA, 19 bp, Homo sapiens
  siRNA target sequence for CHRM4 (NM_000741.1,1360-1378).
ctgtgcaacgccaccttta

SEQ ID NO: 329874 - DNA, 19 bp, Homo sapiens
  siRNA target sequence for CHRM4 (NM_000741.1,1364-1382).
gcaacgccacctttaaaaa

SEQ ID NO: 329875 - DNA, 19 bp, Homo sapiens
  siRNA target sequence for HTR2B (NM_000867.2,571-589).
gcacctttgttcacgttat

SEQ ID NO: 329876 - DNA, 19 bp, Homo sapiens
  siRNA target sequence for HTR2B (NM_000867.2,595-613).
ctaactggtctggattaca

SEQ ID NO: 329877 - DNA, 19 bp, Homo sapiens
  siRNA target sequence for HTR2B (NM_000867.2,674-692).
ctgggcagctcttctgata

SEQ ID NO: 329878 - DNA, 19 bp, Homo sapiens
  siRNA target sequence for HTR2B (NM_000867.2,701-719).
gataatacccacaattggt

SEQ ID NO: 329879 - DNA, 19 bp, Homo sapiens
  siRNA target sequence for HTR2B (NM_000867.2,708-726).
cccacaattggtggaaata

SEQ ID NO: 329880 - DNA, 19 bp, Homo sapiens
  siRNA target sequence for HTR2B (NM_000867.2,717-735).
ggtggaaatacccttgtta

SEQ ID NO: 329881 - DNA, 19 bp, Homo sapiens
  siRNA target sequence for HTR2B (NM_000867.2,718-736).
gtggaaatacccttgttat

SEQ ID NO: 329882 - DNA, 19 bp, Homo sapiens
  siRNA target sequence for HTR2B (NM_000867.2,721-739).
gaaatacccttgttattct

SEQ ID NO: 329883 - DNA, 19 bp, Homo sapiens
  siRNA target sequence for HTR2B (NM_000867.2,761-779).
gctgcagtatgctactaat

SEQ ID NO: 329884 - DNA, 19 bp, Homo sapiens
  siRNA target sequence for HTR2B (NM_000867.2,762-780).
ctgcagtatgctactaatt

SEQ ID NO: 329885 - DNA, 19 bp, Homo sapiens
  siRNA target sequence for HTR2B (NM_000867.2,765-783).
cagtatgctactaattact

SEQ ID NO: 329886 - DNA, 19 bp, Homo sapiens
  siRNA target sequence for HTR2B (NM_000867.2,767-785).
gtatgctactaattacttt

SEQ ID NO: 329887 - DNA, 19 bp, Homo sapiens
  siRNA target sequence for HTR2B (NM_000867.2,771-789).
gctactaattactttctaa

SEQ ID NO: 329888 - DNA, 19 bp, Homo sapiens
  siRNA target sequence for HTR2B (NM_000867.2,793-811).
ccttggcggtggctgattt

SEQ ID NO: 329889 - DNA, 19 bp, Homo sapiens
  siRNA target sequence for HTR2B (NM_000867.2,813-831).
ctggttggattgtttgtga

SEQ ID NO: 329890 - DNA, 19 bp, Homo sapiens
  siRNA target sequence for HTR2B (NM_000867.2,840-858).
gccctcttgacaataatgt

SEQ ID NO: 329891 - DNA, 19 bp, Homo sapiens
  siRNA target sequence for HTR2B (NM_000867.2,842-860).
cctcttgacaataatgttt

SEQ ID NO: 329892 - DNA, 19 bp, Homo sapiens
  siRNA target sequence for HTR2B (NM_000867.2,869-887).
gtggcccctcccacttgtt

SEQ ID NO: 329893 - DNA, 19 bp, Homo sapiens
  siRNA target sequence for HTR2B (NM_000867.2,871-889).
ggcccctcccacttgttct

SEQ ID NO: 329894 - DNA, 19 bp, Homo sapiens
  siRNA target sequence for HTR2B (NM_000867.2,872-890).
gcccctcccacttgttcta

SEQ ID NO: 329895 - DNA, 19 bp, Homo sapiens
  siRNA target sequence for HTR2B (NM_000867.2,895-913).
ctgcctggttatttcttga

SEQ ID NO: 329896 - DNA, 19 bp, Homo sapiens
  siRNA target sequence for HTR2B (NM_000867.2,909-927).
cttgacgttctcttttcaa

SEQ ID NO: 329897 - DNA, 19 bp, Homo sapiens
  siRNA target sequence for HTR2B (NM_000867.2,952-970).
ccatttcagtggatcgtta

SEQ ID NO: 329898 - DNA, 19 bp, Homo sapiens
  siRNA target sequence for HTR2B (NM_000867.2,986-1004).
gccaatccaggccaatcaa

SEQ ID NO: 329899 - DNA, 19 bp, Homo sapiens
  siRNA target sequence for HTR2B (NM_000867.2,995-1013).
ggccaatcaatataactca

SEQ ID NO: 329900 - DNA, 19 bp, Homo sapiens
  siRNA target sequence for HTR2B (NM_000867.2,1012-1030).
cacgggctacagcattcat

SEQ ID NO: 329901 - DNA, 19 bp, Homo sapiens
  siRNA target sequence for HTR2B (NM_000867.2,1014-1032).
cgggctacagcattcatca

SEQ ID NO: 329902 - DNA, 19 bp, Homo sapiens
  siRNA target sequence for HTR2B (NM_000867.2,1015-1033).
gggctacagcattcatcaa

SEQ ID NO: 329903 - DNA, 19 bp, Homo sapiens
  siRNA target sequence for HTR2B (NM_000867.2,1143-1161).
gaacgttttggcgatttca

SEQ ID NO: 329904 - DNA, 19 bp, Homo sapiens
  siRNA target sequence for HTR2B (NM_000867.2,1272-1290).
ccacctcaacgcctaacat

SEQ ID NO: 329905 - DNA, 19 bp, Homo sapiens
  siRNA target sequence for HTR2B (NM_000867.2,1396-1414).
caggtgatgaaacacttat

SEQ ID NO: 329906 - DNA, 19 bp, Homo sapiens
  siRNA target sequence for HTR2B (NM_000867.2,1415-1433).
gcgaagaacatccacaatt

SEQ ID NO: 329907 - DNA, 19 bp, Homo sapiens
  siRNA target sequence for HTR2B (NM_000867.2,1427-1445).
cacaattgggaaaaagtca

SEQ ID NO: 329908 - DNA, 19 bp, Homo sapiens
  siRNA target sequence for HTR2B (NM_000867.2,1482-1500).
gtcctagggattgtgtttt

SEQ ID NO: 329909 - DNA, 19 bp, Homo sapiens
  siRNA target sequence for HTR2B (NM_000867.2,1517-1535).
gtggtgtcccttctttatt

SEQ ID NO: 329910 - DNA, 19 bp, Homo sapiens
  siRNA target sequence for HTR2B (NM_000867.2,1560-1578).
gattcctgtaaccaaacta

SEQ ID NO: 329911 - DNA, 19 bp, Homo sapiens
  siRNA target sequence for HTR2B (NM_000867.2,1584-1602).
caaatgctcctggagatat

SEQ ID NO: 329912 - DNA, 19 bp, Homo sapiens
  siRNA target sequence for HTR2B (NM_000867.2,1674-1692).
gatgcatttggccgatata

SEQ ID NO: 329913 - DNA, 19 bp, Homo sapiens
  siRNA target sequence for HTR2B (NM_000867.2,1677-1695).
gcatttggccgatatatca

SEQ ID NO: 329914 - DNA, 19 bp, Homo sapiens
  siRNA target sequence for HTR2B (NM_000867.2,1686-1704).
cgatatatcacctgcaatt

SEQ ID NO: 329915 - DNA, 19 bp, Homo sapiens
  siRNA target sequence for HTR2B (NM_000867.2,1709-1727).
ggccacaaagtcagtaaaa

SEQ ID NO: 329916 - DNA, 19 bp, Homo sapiens
  siRNA target sequence for HTR2B (NM_000867.2,1710-1728).
gccacaaagtcagtaaaaa

SEQ ID NO: 329917 - DNA, 19 bp, Homo sapiens
  siRNA target sequence for HTR2B (NM_000867.2,1712-1730).
cacaaagtcagtaaaaact

SEQ ID NO: 329918 - DNA, 19 bp, Homo sapiens
  siRNA target sequence for HTR2B (NM_000867.2,1740-1758).
cgctccagtaagatctact

SEQ ID NO: 329919 - DNA, 19 bp, Homo sapiens
  siRNA target sequence for HTR2B (NM_000867.2,1767-1785).
ccaatggcagagaactcta

SEQ ID NO: 329920 - DNA, 19 bp, Homo sapiens
  siRNA target sequence for HTR2B (NM_000867.2,1768-1786).
caatggcagagaactctaa

SEQ ID NO: 329921 - DNA, 19 bp, Homo sapiens
  siRNA target sequence for HTR2B (NM_000867.2,1773-1791).
gcagagaactctaagtttt

SEQ ID NO: 329922 - DNA, 19 bp, Homo sapiens
  siRNA target sequence for HTR2B (NM_000867.2,1793-1811).
caagaaacatggaattcga

SEQ ID NO: 329923 - DNA, 19 bp, Homo sapiens
  siRNA target sequence for HTR2B (NM_000867.2,1804-1822).
gaattcgaaatgggattaa

SEQ ID NO: 329924 - DNA, 19 bp, Homo sapiens
  siRNA target sequence for HTR2B (NM_000867.2,1850-1868).
gctccgaagttcaaccatt

SEQ ID NO: 329925 - DNA, 19 bp, Homo sapiens
  siRNA target sequence for HTR2B (NM_000867.2,1854-1872).
cgaagttcaaccattcagt

SEQ ID NO: 329926 - DNA, 19 bp, Homo sapiens
  siRNA target sequence for HTR2B (NM_000867.2,1864-1882).
ccattcagtcttcatcaat

SEQ ID NO: 329927 - DNA, 19 bp, Homo sapiens
  siRNA target sequence for HTR2B (NM_000867.2,1871-1889).
gtcttcatcaatcattcta

SEQ ID NO: 329928 - DNA, 19 bp, Homo sapiens
  siRNA target sequence for NPR1 (NM_000906.2,1089-1107).
gtccgcgaccgcctcaata

SEQ ID NO: 329929 - DNA, 19 bp, Homo sapiens
  siRNA target sequence for NPR1 (NM_000906.2,1091-1109).
ccgcgaccgcctcaatatt

SEQ ID NO: 329930 - DNA, 19 bp, Homo sapiens
  siRNA target sequence for NPR1 (NM_000906.2,1092-1110).
cgcgaccgcctcaatatta

SEQ ID NO: 329931 - DNA, 19 bp, Homo sapiens
  siRNA target sequence for NPR1 (NM_000906.2,1179-1197).
cgcaaaggccgagttatct

SEQ ID NO: 329932 - DNA, 19 bp, Homo sapiens
  siRNA target sequence for NPR1 (NM_000906.2,1180-1198).
gcaaaggccgagttatcta

SEQ ID NO: 329933 - DNA, 19 bp, Homo sapiens
  siRNA target sequence for NPR1 (NM_000906.2,1185-1203).
ggccgagttatctacatct

SEQ ID NO: 329934 - DNA, 19 bp, Homo sapiens
  siRNA target sequence for NPR1 (NM_000906.2,1264-1282).
gggaggactacgttttctt

SEQ ID NO: 329935 - DNA, 19 bp, Homo sapiens
  siRNA target sequence for NPR1 (NM_000906.2,1393-1411).
ctgccaaaatcattacata

SEQ ID NO: 329936 - DNA, 19 bp, Homo sapiens
  siRNA target sequence for NPR1 (NM_000906.2,1420-1438).
cagataatcccgagtactt

SEQ ID NO: 329937 - DNA, 19 bp, Homo sapiens
  siRNA target sequence for NPR1 (NM_000906.2,1533-1551).
gacgggctcctgctctata

SEQ ID NO: 329938 - DNA, 19 bp, Homo sapiens
  siRNA target sequence for NPR1 (NM_000906.2,1622-1640).
gtggaaccgaagctttcaa

SEQ ID NO: 329939 - DNA, 19 bp, Homo sapiens
  siRNA target sequence for NPR1 (NM_000906.2,1648-1666).
caggatacctgaaaattga

SEQ ID NO: 329940 - DNA, 19 bp, Homo sapiens
  siRNA target sequence for NPR1 (NM_000906.2,1672-1690).
gtggcgatcgggaaacaga

SEQ ID NO: 329941 - DNA, 19 bp, Homo sapiens
  siRNA target sequence for NPR1 (NM_000906.2,1726-1744).
ccttcagggttgtactgaa

SEQ ID NO: 329942 - DNA, 19 bp, Homo sapiens
  siRNA target sequence for NPR1 (NM_000906.2,1733-1751).
ggttgtactgaactacaat

SEQ ID NO: 329943 - DNA, 19 bp, Homo sapiens
  siRNA target sequence for NPR1 (NM_000906.2,1916-1934).
cttgctcggcattctgatt

SEQ ID NO: 329944 - DNA, 19 bp, Homo sapiens
  siRNA target sequence for NPR1 (NM_000906.2,1920-1938).
ctcggcattctgattgtct

SEQ ID NO: 329945 - DNA, 19 bp, Homo sapiens
  siRNA target sequence for NPR1 (NM_000906.2,2071-2089).
gcgggagaggctccaatta

SEQ ID NO: 329946 - DNA, 19 bp, Homo sapiens
  siRNA target sequence for NPR1 (NM_000906.2,2126-2144).
ctttgccaagacagcatat

SEQ ID NO: 329947 - DNA, 19 bp, Homo sapiens
  siRNA target sequence for NPR1 (NM_000906.2,2189-2207).
cattgagctgacacgaaaa

SEQ ID NO: 329948 - DNA, 19 bp, Homo sapiens
  siRNA target sequence for NPR1 (NM_000906.2,2200-2218).
cacgaaaagtcctgtttga

SEQ ID NO: 329949 - DNA, 19 bp, Homo sapiens
  siRNA target sequence for NPR1 (NM_000906.2,2203-2221).
gaaaagtcctgtttgaact

SEQ ID NO: 329950 - DNA, 19 bp, Homo sapiens
  siRNA target sequence for NPR1 (NM_000906.2,2231-2249).
gcgggatgtgcagaatgaa

SEQ ID NO: 329951 - DNA, 19 bp, Homo sapiens
  siRNA target sequence for NPR1 (NM_000906.2,2402-2420).
caagggcatgctgtttcta

SEQ ID NO: 329952 - DNA, 19 bp, Homo sapiens
  siRNA target sequence for NPR1 (NM_000906.2,2407-2425).
gcatgctgtttctacacaa

SEQ ID NO: 329953 - DNA, 19 bp, Homo sapiens
  siRNA target sequence for NPR1 (NM_000906.2,2421-2439).
cacaatggggctatctgtt

SEQ ID NO: 329954 - DNA, 19 bp, Homo sapiens
  siRNA target sequence for NPR1 (NM_000906.2,2479-2497).
ggcgctttgtgctcaagat

SEQ ID NO: 329955 - DNA, 19 bp, Homo sapiens
  siRNA target sequence for NPR1 (NM_000906.2,2540-2558).
gcaaggacacaccgtttat

SEQ ID NO: 329956 - DNA, 19 bp, Homo sapiens
  siRNA target sequence for NPR1 (NM_000906.2,2551-2569).
ccgtttatgccaaaaagct

SEQ ID NO: 329957 - DNA, 19 bp, Homo sapiens
  siRNA target sequence for NPR1 (NM_000906.2,2863-2881).
gcctgacgttgcgcaaatt

SEQ ID NO: 329958 - DNA, 19 bp, Homo sapiens
  siRNA target sequence for NPR1 (NM_000906.2,2864-2882).
cctgacgttgcgcaaattt

SEQ ID NO: 329959 - DNA, 19 bp, Homo sapiens
  siRNA target sequence for NPR1 (NM_000906.2,2865-2883).
ctgacgttgcgcaaattta

SEQ ID NO: 329960 - DNA, 19 bp, Homo sapiens
  siRNA target sequence for NPR1 (NM_000906.2,2930-2948).
ggagcagtacgcgaacaat

SEQ ID NO: 329961 - DNA, 19 bp, Homo sapiens
  siRNA target sequence for NPR1 (NM_000906.2,3199-3217).
ctgtcatagacaactttga

SEQ ID NO: 329962 - DNA, 19 bp, Homo sapiens
  siRNA target sequence for NPR1 (NM_000906.2,3448-3466).
gtctctttggggatacagt

SEQ ID NO: 329963 - DNA, 19 bp, Homo sapiens
  siRNA target sequence for NPR1 (NM_000906.2,3504-3522).
ctgaagatccacttgtctt

SEQ ID NO: 329964 - DNA, 19 bp, Homo sapiens
  siRNA target sequence for PDE3B (NM_000922.2,773-791).
gttacctgggggacttctt

SEQ ID NO: 329965 - DNA, 19 bp, Homo sapiens
  siRNA target sequence for PDE3B (NM_000922.2,1077-1095).
gttggatcacttctttcaa

SEQ ID NO: 329966 - DNA, 19 bp, Homo sapiens
  siRNA target sequence for PDE3B (NM_000922.2,1182-1200).
cgtgtcgttaggagaaact

SEQ ID NO: 329967 - DNA, 19 bp, Homo sapiens
  siRNA target sequence for PDE3B (NM_000922.2,1238-1256).
gaccgtcgttgccttgtat

SEQ ID NO: 329968 - DNA, 19 bp, Homo sapiens
  siRNA target sequence for PDE3B (NM_000922.2,1240-1258).
ccgtcgttgccttgtattt

SEQ ID NO: 329969 - DNA, 19 bp, Homo sapiens
  siRNA target sequence for PDE3B (NM_000922.2,1259-1277).
ccagagaacagatgattct

SEQ ID NO: 329970 - DNA, 19 bp, Homo sapiens
  siRNA target sequence for PDE3B (NM_000922.2,1280-1298).
gggattgggacttaaaaca

SEQ ID NO: 329971 - DNA, 19 bp, Homo sapiens
  siRNA target sequence for PDE3B (NM_000922.2,1281-1299).
ggattgggacttaaaacaa

SEQ ID NO: 329972 - DNA, 19 bp, Homo sapiens
  siRNA target sequence for PDE3B (NM_000922.2,1301-1319).
ggtataagcctcattatca

SEQ ID NO: 329973 - DNA, 19 bp, Homo sapiens
  siRNA target sequence for PDE3B (NM_000922.2,1302-1320).
gtataagcctcattatcaa

SEQ ID NO: 329974 - DNA, 19 bp, Homo sapiens
  siRNA target sequence for PDE3B (NM_000922.2,1308-1326).
gcctcattatcaaaattct

SEQ ID NO: 329975 - DNA, 19 bp, Homo sapiens
  siRNA target sequence for PDE3B (NM_000922.2,1405-1423).
cttccaccacaagtcattt

SEQ ID NO: 329976 - DNA, 19 bp, Homo sapiens
  siRNA target sequence for PDE3B (NM_000922.2,1425-1443).
ctctctacggagtattagt

SEQ ID NO: 329977 - DNA, 19 bp, Homo sapiens
  siRNA target sequence for PDE3B (NM_000922.2,1432-1450).
cggagtattagtagcttaa

SEQ ID NO: 329978 - DNA, 19 bp, Homo sapiens
  siRNA target sequence for PDE3B (NM_000922.2,1466-1484).
gttcctgtaggccaaagat

SEQ ID NO: 329979 - DNA, 19 bp, Homo sapiens
  siRNA target sequence for PDE3B (NM_000922.2,1469-1487).
cctgtaggccaaagattaa

SEQ ID NO: 329980 - DNA, 19 bp, Homo sapiens
  siRNA target sequence for PDE3B (NM_000922.2,1550-1568).
gggatagaaaacttaacaa

SEQ ID NO: 329981 - DNA, 19 bp, Homo sapiens
  siRNA target sequence for PDE3B (NM_000922.2,1561-1579).
cttaacaagggactaaata

SEQ ID NO: 329982 - DNA, 19 bp, Homo sapiens
  siRNA target sequence for PDE3B (NM_000922.2,1649-1667).
cttcaaggtgggatcgtaa

SEQ ID NO: 329983 - DNA, 19 bp, Homo sapiens
  siRNA target sequence for PDE3B (NM_000922.2,1652-1670).
caaggtgggatcgtaataa

SEQ ID NO: 329984 - DNA, 19 bp, Homo sapiens
  siRNA target sequence for PDE3B (NM_000922.2,1720-1738).
ctaaatgggccttttaatt

SEQ ID NO: 329985 - DNA, 19 bp, Homo sapiens
  siRNA target sequence for PDE3B (NM_000922.2,1727-1745).
ggccttttaattcaaatct

SEQ ID NO: 329986 - DNA, 19 bp, Homo sapiens
  siRNA target sequence for PDE3B (NM_000922.2,1766-1784).
ggtcatcttctgtatcact

SEQ ID NO: 329987 - DNA, 19 bp, Homo sapiens
  siRNA target sequence for PDE3B (NM_000922.2,1861-1879).
gtgtctactggctctctaa

SEQ ID NO: 329988 - DNA, 19 bp, Homo sapiens
  siRNA target sequence for PDE3B (NM_000922.2,1865-1883).
ctactggctctctaactaa

SEQ ID NO: 329989 - DNA, 19 bp, Homo sapiens
  siRNA target sequence for PDE3B (NM_000922.2,1870-1888).
ggctctctaactaatcgat

SEQ ID NO: 329990 - DNA, 19 bp, Homo sapiens
  siRNA target sequence for PDE3B (NM_000922.2,1954-1972).
ctgggcaatgcacctaata

SEQ ID NO: 329991 - DNA, 19 bp, Homo sapiens
  siRNA target sequence for PDE3B (NM_000922.2,1964-1982).
cacctaatactccagattt

SEQ ID NO: 329992 - DNA, 19 bp, Homo sapiens
  siRNA target sequence for PDE3B (NM_000922.2,1966-1984).
cctaatactccagattttt

SEQ ID NO: 329993 - DNA, 19 bp, Homo sapiens
  siRNA target sequence for PDE3B (NM_000922.2,1967-1985).
ctaatactccagattttta

SEQ ID NO: 329994 - DNA, 19 bp, Homo sapiens
  siRNA target sequence for PDE3B (NM_000922.2,1989-2007).
gcaacttagaaattctgat

SEQ ID NO: 329995 - DNA, 19 bp, Homo sapiens
  siRNA target sequence for PDE3B (NM_000922.2,2005-2023).
gatagcaatctgtgtaaca

SEQ ID NO: 329996 - DNA, 19 bp, Homo sapiens
  siRNA target sequence for PDE3B (NM_000922.2,2024-2042).
gctgtggacatcaaatgct

SEQ ID NO: 329997 - DNA, 19 bp, Homo sapiens
  siRNA target sequence for PDE3B (NM_000922.2,2029-2047).
ggacatcaaatgctgaaat

SEQ ID NO: 329998 - DNA, 19 bp, Homo sapiens
  siRNA target sequence for PDE3B (NM_000922.2,2030-2048).
gacatcaaatgctgaaata

SEQ ID NO: 329999 - DNA, 19 bp, Homo sapiens
  siRNA target sequence for PDE3B (NM_000922.2,2062-2080).
gaatcagatggtacagatt

SEQ ID NO: 330000 - DNA, 19 bp, Homo sapiens
  siRNA target sequence for PDE3B (NM_000922.2,2120-2138).
cgaaagaatcattcaaact

SEQ ID NO: 330001 - DNA, 19 bp, Homo sapiens
  siRNA target sequence for PDE3B (NM_000922.2,2121-2139).
gaaagaatcattcaaactt

SEQ ID NO: 330002 - DNA, 19 bp, Homo sapiens
  siRNA target sequence for PDE3B (NM_000922.2,2231-2249).
gtgaacagcaaacaaatat

SEQ ID NO: 330003 - DNA, 19 bp, Homo sapiens
  siRNA target sequence for PDE3B (NM_000922.2,2260-2278).
gtatcactggacctgattt

SEQ ID NO: 330004 - DNA, 19 bp, Homo sapiens
  siRNA target sequence for PDE3B (NM_000922.2,2268-2286).
ggacctgattttagtagaa

SEQ ID NO: 330005 - DNA, 19 bp, Homo sapiens
  siRNA target sequence for PDE3B (NM_000922.2,2284-2302).
gaagagtatgactcattaa

SEQ ID NO: 330006 - DNA, 19 bp, Homo sapiens
  siRNA target sequence for PDE3B (NM_000922.2,2289-2307).
gtatgactcattaatagaa

SEQ ID NO: 330007 - DNA, 19 bp, Homo sapiens
  siRNA target sequence for PDE3B (NM_000922.2,2310-2328).
gatgagcaactggaatttt

SEQ ID NO: 330008 - DNA, 19 bp, Homo sapiens
  siRNA target sequence for PDE3B (NM_000922.2,2377-2395).
ctcagtcaggttatgtata

SEQ ID NO: 330009 - DNA, 19 bp, Homo sapiens
  siRNA target sequence for PDE3B (NM_000922.2,2437-2455).
cccactcaacaatttatga

SEQ ID NO: 330010 - DNA, 19 bp, Homo sapiens
  siRNA target sequence for PDE3B (NM_000922.2,2438-2456).
ccactcaacaatttatgaa

SEQ ID NO: 330011 - DNA, 19 bp, Homo sapiens
  siRNA target sequence for PDE3B (NM_000922.2,2457-2475).
ctattttcgtgcattagaa

SEQ ID NO: 330012 - DNA, 19 bp, Homo sapiens
  siRNA target sequence for PDE3B (NM_000922.2,2479-2497).
ggctatcgagacattcctt

SEQ ID NO: 330013 - DNA, 19 bp, Homo sapiens
  siRNA target sequence for PDE3B (NM_000922.2,2480-2498).
gctatcgagacattcctta

SEQ ID NO: 330014 - DNA, 19 bp, Homo sapiens
  siRNA target sequence for PDE3B (NM_000922.2,2481-2499).
ctatcgagacattccttat

SEQ ID NO: 330015 - DNA, 19 bp, Homo sapiens
  siRNA target sequence for PDE3B (NM_000922.2,2485-2503).
cgagacattccttatcaca

SEQ ID NO: 330016 - DNA, 19 bp, Homo sapiens
  siRNA target sequence for PDE3B (NM_000922.2,2486-2504).
gagacattccttatcacaa

SEQ ID NO: 330017 - DNA, 19 bp, Homo sapiens
  siRNA target sequence for PDE3B (NM_000922.2,2495-2513).
cttatcacaatcgtataca

SEQ ID NO: 330018 - DNA, 19 bp, Homo sapiens
  siRNA target sequence for PDE3B (NM_000922.2,2526-2544).
gctacatgcagtttggtat

SEQ ID NO: 330019 - DNA, 19 bp, Homo sapiens
  siRNA target sequence for PDE3B (NM_000922.2,2632-2650).
catgggcgaattgcttata

SEQ ID NO: 330020 - DNA, 19 bp, Homo sapiens
  siRNA target sequence for PDE3B (NM_000922.2,2635-2653).
gggcgaattgcttatattt

SEQ ID NO: 330021 - DNA, 19 bp, Homo sapiens
  siRNA target sequence for PDE3B (NM_000922.2,2637-2655).
gcgaattgcttatatttct

SEQ ID NO: 330022 - DNA, 19 bp, Homo sapiens
  siRNA target sequence for PDE3B (NM_000922.2,2638-2656).
cgaattgcttatatttctt

SEQ ID NO: 330023 - DNA, 19 bp, Homo sapiens
  siRNA target sequence for PDE3B (NM_000922.2,2658-2676).
gaagagctgctctaatcct

SEQ ID NO: 330024 - DNA, 19 bp, Homo sapiens
  siRNA target sequence for PDE3B (NM_000922.2,2669-2687).
ctaatcctgatgagagtta

SEQ ID NO: 330025 - DNA, 19 bp, Homo sapiens
  siRNA target sequence for PDE3B (NM_000922.2,2767-2785).
ccagggaggacaaatgcat

SEQ ID NO: 330026 - DNA, 19 bp, Homo sapiens
  siRNA target sequence for PDE3B (NM_000922.2,2772-2790).
gaggacaaatgcatttcta

SEQ ID NO: 330027 - DNA, 19 bp, Homo sapiens
  siRNA target sequence for PDE3B (NM_000922.2,2804-2822).
cccctcaggcagttttata

SEQ ID NO: 330028 - DNA, 19 bp, Homo sapiens
  siRNA target sequence for PDE3B (NM_000922.2,2806-2824).
cctcaggcagttttataca

SEQ ID NO: 330029 - DNA, 19 bp, Homo sapiens
  siRNA target sequence for PDE3B (NM_000922.2,2857-2875).
gcgtcagcttggaatctat

SEQ ID NO: 330030 - DNA, 19 bp, Homo sapiens
  siRNA target sequence for PDE3B (NM_000922.2,2858-2876).
cgtcagcttggaatctata

SEQ ID NO: 330031 - DNA, 19 bp, Homo sapiens
  siRNA target sequence for PDE3B (NM_000922.2,2878-2896).
ctttctcgcccagaataca

SEQ ID NO: 330032 - DNA, 19 bp, Homo sapiens
  siRNA target sequence for PDE3B (NM_000922.2,2923-2941).
gaattcaagcgctttcgtt

SEQ ID NO: 330033 - DNA, 19 bp, Homo sapiens
  siRNA target sequence for PDE3B (NM_000922.2,2932-2950).
cgctttcgttttttagtca

SEQ ID NO: 330034 - DNA, 19 bp, Homo sapiens
  siRNA target sequence for PDE3B (NM_000922.2,2961-2979).
ccttgctacggatcttaaa

SEQ ID NO: 330035 - DNA, 19 bp, Homo sapiens
  siRNA target sequence for PDE3B (NM_000922.2,2962-2980).
cttgctacggatcttaaaa

SEQ ID NO: 330036 - DNA, 19 bp, Homo sapiens
  siRNA target sequence for PDE3B (NM_000922.2,2966-2984).
ctacggatcttaaaaagca

SEQ ID NO: 330037 - DNA, 19 bp, Homo sapiens
  siRNA target sequence for PDE3B (NM_000922.2,3077-3095).
gccaggtgtgcatcaaact

SEQ ID NO: 330038 - DNA, 19 bp, Homo sapiens
  siRNA target sequence for PDE3B (NM_000922.2,3086-3104).
gcatcaaactggcagatat

SEQ ID NO: 330039 - DNA, 19 bp, Homo sapiens
  siRNA target sequence for PDE3B (NM_000922.2,3087-3105).
catcaaactggcagatata

SEQ ID NO: 330040 - DNA, 19 bp, Homo sapiens
  siRNA target sequence for PDE3B (NM_000922.2,3124-3142).
cgagacttgcatttgaaat

SEQ ID NO: 330041 - DNA, 19 bp, Homo sapiens
  siRNA target sequence for PDE3B (NM_000922.2,3376-3394).
gacggtgaagaattagata

SEQ ID NO: 330042 - DNA, 19 bp, Homo sapiens
  siRNA target sequence for PDE3B (NM_000922.2,3378-3396).
cggtgaagaattagataca

SEQ ID NO: 330043 - DNA, 19 bp, Homo sapiens
  siRNA target sequence for PDE3B (NM_000922.2,3380-3398).
gtgaagaattagatacaga

SEQ ID NO: 330044 - DNA, 19 bp, Homo sapiens
  siRNA target sequence for PDE3B (NM_000922.2,3450-3468).
cagacggcgaatattttgt

SEQ ID NO: 330045 - DNA, 19 bp, Homo sapiens
  siRNA target sequence for PDE3B (NM_000922.2,3452-3470).
gacggcgaatattttgtca

SEQ ID NO: 330046 - DNA, 19 bp, Homo sapiens
  siRNA target sequence for PDE3B (NM_000922.2,3587-3605).
cagatgagattcaggtaat

SEQ ID NO: 330047 - DNA, 19 bp, Homo sapiens
  siRNA target sequence for PRL (NM_000948.2,531-549).
caaaggatcgccatggaaa

SEQ ID NO: 330048 - DNA, 19 bp, Homo sapiens
  siRNA target sequence for PRL (NM_000948.2,647-665).
cccttcgagacctgtttga

SEQ ID NO: 330049 - DNA, 19 bp, Homo sapiens
  siRNA target sequence for PRL (NM_000948.2,694-712).
cataacctctcctcagaaa

SEQ ID NO: 330050 - DNA, 19 bp, Homo sapiens
  siRNA target sequence for PRL (NM_000948.2,828-846).
gatgaatcaaaaagacttt

SEQ ID NO: 330051 - DNA, 19 bp, Homo sapiens
  siRNA target sequence for PRL (NM_000948.2,851-869).
gcctgatagtcagcatatt

SEQ ID NO: 330052 - DNA, 19 bp, Homo sapiens
  siRNA target sequence for PRL (NM_000948.2,878-896).
ggaatgagcctctgtatca

SEQ ID NO: 330053 - DNA, 19 bp, Homo sapiens
  siRNA target sequence for PRL (NM_000948.2,906-924).
ggaagtacgtggtatgcaa

SEQ ID NO: 330054 - DNA, 19 bp, Homo sapiens
  siRNA target sequence for PRL (NM_000948.2,932-950).
cggaggctatcctatccaa

SEQ ID NO: 330055 - DNA, 19 bp, Homo sapiens
  siRNA target sequence for PRL (NM_000948.2,933-951).
ggaggctatcctatccaaa

SEQ ID NO: 330056 - DNA, 19 bp, Homo sapiens
  siRNA target sequence for PRL (NM_000948.2,1127-1145).
gcctacgcagggattcaca

SEQ ID NO: 330057 - DNA, 19 bp, Homo sapiens
  siRNA target sequence for PRL (NM_000948.2,1129-1147).
ctacgcagggattcacata

SEQ ID NO: 330058 - DNA, 19 bp, Homo sapiens
  siRNA target sequence for PRL (NM_000948.2,1132-1150).
cgcagggattcacataaaa

SEQ ID NO: 330059 - DNA, 19 bp, Homo sapiens
  siRNA target sequence for PRL (NM_000948.2,1136-1154).
gggattcacataaaatcga

SEQ ID NO: 330060 - DNA, 19 bp, Homo sapiens
  siRNA target sequence for PRL (NM_000948.2,1142-1160).
cacataaaatcgacaatta

SEQ ID NO: 330061 - DNA, 19 bp, Homo sapiens
  siRNA target sequence for PRL (NM_000948.2,1178-1196).
gccgaatcatccacaacaa

SEQ ID NO: 330062 - DNA, 19 bp, Homo sapiens
  siRNA target sequence for PRL (NM_000948.2,1180-1198).
cgaatcatccacaacaaca

SEQ ID NO: 330063 - DNA, 19 bp, Homo sapiens
  siRNA target sequence for PRL (NM_000948.2,1181-1199).
gaatcatccacaacaacaa

SEQ ID NO: 330064 - DNA, 19 bp, Homo sapiens
  siRNA target sequence for PRLR (NM_000949.2,329-347).
gcatctgcaaccgttttca

SEQ ID NO: 330065 - DNA, 19 bp, Homo sapiens
  siRNA target sequence for PRLR (NM_000949.2,420-438).
gtcgttctcccaataagga

SEQ ID NO: 330066 - DNA, 19 bp, Homo sapiens
  siRNA target sequence for PRLR (NM_000949.2,422-440).
cgttctcccaataaggaaa

SEQ ID NO: 330067 - DNA, 19 bp, Homo sapiens
  siRNA target sequence for PRLR (NM_000949.2,474-492).
gaggacttcctaccaatta

SEQ ID NO: 330068 - DNA, 19 bp, Homo sapiens
  siRNA target sequence for PRLR (NM_000949.2,476-494).
ggacttcctaccaattatt

SEQ ID NO: 330069 - DNA, 19 bp, Homo sapiens
  siRNA target sequence for PRLR (NM_000949.2,533-551).
gaatgtccagactacataa

SEQ ID NO: 330070 - DNA, 19 bp, Homo sapiens
  siRNA target sequence for PRLR (NM_000949.2,594-612).
ccatgtggaggacatacat

SEQ ID NO: 330071 - DNA, 19 bp, Homo sapiens
  siRNA target sequence for PRLR (NM_000949.2,645-663).
gcagtttctcggatgaact

SEQ ID NO: 330072 - DNA, 19 bp, Homo sapiens
  siRNA target sequence for PRLR (NM_000949.2,646-664).
cagtttctcggatgaactt

SEQ ID NO: 330073 - DNA, 19 bp, Homo sapiens
  siRNA target sequence for PRLR (NM_000949.2,648-666).
gtttctcggatgaacttta

SEQ ID NO: 330074 - DNA, 19 bp, Homo sapiens
  siRNA target sequence for PRLR (NM_000949.2,670-688).
ggacgtgacttacatagtt

SEQ ID NO: 330075 - DNA, 19 bp, Homo sapiens
  siRNA target sequence for PRLR (NM_000949.2,746-764).
ccctacctgtggattaaat

SEQ ID NO: 330076 - DNA, 19 bp, Homo sapiens
  siRNA target sequence for PRLR (NM_000949.2,768-786).
ctccacctaccctgattga

SEQ ID NO: 330077 - DNA, 19 bp, Homo sapiens
  siRNA target sequence for PRLR (NM_000949.2,770-788).
ccacctaccctgattgact

SEQ ID NO: 330078 - DNA, 19 bp, Homo sapiens
  siRNA target sequence for PRLR (NM_000949.2,771-789).
cacctaccctgattgactt

SEQ ID NO: 330079 - DNA, 19 bp, Homo sapiens
  siRNA target sequence for PRLR (NM_000949.2,801-819).
ggttcacgctcctgtatga

SEQ ID NO: 330080 - DNA, 19 bp, Homo sapiens
  siRNA target sequence for PRLR (NM_000949.2,802-820).
gttcacgctcctgtatgaa

SEQ ID NO: 330081 - DNA, 19 bp, Homo sapiens
  siRNA target sequence for PRLR (NM_000949.2,805-823).
cacgctcctgtatgaaatt

SEQ ID NO: 330082 - DNA, 19 bp, Homo sapiens
  siRNA target sequence for PRLR (NM_000949.2,811-829).
cctgtatgaaattcgatta

SEQ ID NO: 330083 - DNA, 19 bp, Homo sapiens
  siRNA target sequence for PRLR (NM_000949.2,812-830).
ctgtatgaaattcgattaa

SEQ ID NO: 330084 - DNA, 19 bp, Homo sapiens
  siRNA target sequence for PRLR (NM_000949.2,850-868).
gtgggagatccattttgct

SEQ ID NO: 330085 - DNA, 19 bp, Homo sapiens
  siRNA target sequence for PRLR (NM_000949.2,872-890).
cagcaaacagagtttaaga

SEQ ID NO: 330086 - DNA, 19 bp, Homo sapiens
  siRNA target sequence for PRLR (NM_000949.2,874-892).
gcaaacagagtttaagatt

SEQ ID NO: 330087 - DNA, 19 bp, Homo sapiens
  siRNA target sequence for PRLR (NM_000949.2,936-954).
gcaaaccagaccatggata

SEQ ID NO: 330088 - DNA, 19 bp, Homo sapiens
  siRNA target sequence for PRLR (NM_000949.2,972-990).
cagcgaccttcattcagat

SEQ ID NO: 330089 - DNA, 19 bp, Homo sapiens
  siRNA target sequence for PRLR (NM_000949.2,1000-1018).
cttcaccatgaatgataca

SEQ ID NO: 330090 - DNA, 19 bp, Homo sapiens
  siRNA target sequence for PRLR (NM_000949.2,1082-1100).
gctttgaagggctatagca

SEQ ID NO: 330091 - DNA, 19 bp, Homo sapiens
  siRNA target sequence for PRLR (NM_000949.2,1083-1101).
ctttgaagggctatagcat

SEQ ID NO: 330092 - DNA, 19 bp, Homo sapiens
  siRNA target sequence for PRLR (NM_000949.2,1538-1556).
ggtggatccaaatgttcaa

SEQ ID NO: 330093 - DNA, 19 bp, Homo sapiens
  siRNA target sequence for PRLR (NM_000949.2,1541-1559).
ggatccaaatgttcaacat

SEQ ID NO: 330094 - DNA, 19 bp, Homo sapiens
  siRNA target sequence for PRLR (NM_000949.2,1593-1611).
gatcctcttaccacaatat

SEQ ID NO: 330095 - DNA, 19 bp, Homo sapiens
  siRNA target sequence for PRLR (NM_000949.2,1597-1615).
ctcttaccacaatattact

SEQ ID NO: 330096 - DNA, 19 bp, Homo sapiens
  siRNA target sequence for PRLR (NM_000949.2,1650-1668).
caccggccactctgttgaa

SEQ ID NO: 330097 - DNA, 19 bp, Homo sapiens
  siRNA target sequence for PRLR (NM_000949.2,1653-1671).
cggccactctgttgaatga

SEQ ID NO: 330098 - DNA, 19 bp, Homo sapiens
  siRNA target sequence for PRLR (NM_000949.2,1654-1672).
ggccactctgttgaatgaa

SEQ ID NO: 330099 - DNA, 19 bp, Homo sapiens
  siRNA target sequence for PRLR (NM_000949.2,1674-1692).
caggtaaagatgctttaaa

SEQ ID NO: 330100 - DNA, 19 bp, Homo sapiens
  siRNA target sequence for PRLR (NM_000949.2,1696-1714).
ctctcaaaccattaagtct

SEQ ID NO: 330101 - DNA, 19 bp, Homo sapiens
  siRNA target sequence for PRLR (NM_000949.2,1821-1839).
ccgctaaacccttggatta

SEQ ID NO: 330102 - DNA, 19 bp, Homo sapiens
  siRNA target sequence for PRLR (NM_000949.2,1822-1840).
cgctaaacccttggattat

SEQ ID NO: 330103 - DNA, 19 bp, Homo sapiens
  siRNA target sequence for PRLR (NM_000949.2,1924-1942).
cgggactcctgagaacaat

SEQ ID NO: 330104 - DNA, 19 bp, Homo sapiens
  siRNA target sequence for PRLR (NM_000949.2,1926-1944).
ggactcctgagaacaataa

SEQ ID NO: 330105 - DNA, 19 bp, Homo sapiens
  siRNA target sequence for PRLR (NM_000949.2,1958-1976).
gtgtccggggtcatggata

SEQ ID NO: 330106 - DNA, 19 bp, Homo sapiens
  siRNA target sequence for PRLR (NM_000949.2,1962-1980).
ccggggtcatggataacaa

SEQ ID NO: 330107 - DNA, 19 bp, Homo sapiens
  siRNA target sequence for PRLR (NM_000949.2,1964-1982).
ggggtcatggataacaaca

SEQ ID NO: 330108 - DNA, 19 bp, Homo sapiens
  siRNA target sequence for PRLR (NM_000949.2,1965-1983).
gggtcatggataacaacat

SEQ ID NO: 330109 - DNA, 19 bp, Homo sapiens
  siRNA target sequence for PRLR (NM_000949.2,2047-2065).
ggccccaccatcacttgaa

SEQ ID NO: 330110 - DNA, 19 bp, Homo sapiens
  siRNA target sequence for PRLR (NM_000949.2,2126-2144).
cagctgggtggtttggatt

SEQ ID NO: 330111 - DNA, 19 bp, Homo sapiens
  siRNA target sequence for PRLR (NM_000949.2,2147-2165).
ctggatcccgcatgtttta

SEQ ID NO: 330112 - DNA, 19 bp, Homo sapiens
  siRNA target sequence for PRLR (NM_000949.2,2149-2167).
ggatcccgcatgttttaca

SEQ ID NO: 330113 - DNA, 19 bp, Homo sapiens
  siRNA target sequence for SCNN1A (NM_001038.3,146-164).
ccactccagggctcatgaa

SEQ ID NO: 330114 - DNA, 19 bp, Homo sapiens
  siRNA target sequence for SCNN1A (NM_001038.3,377-395).
gcacctttggcatgatgta

SEQ ID NO: 330115 - DNA, 19 bp, Homo sapiens
  siRNA target sequence for SCNN1A (NM_001038.3,398-416).
ggcaattcggcctgctttt

SEQ ID NO: 330116 - DNA, 19 bp, Homo sapiens
  siRNA target sequence for SCNN1A (NM_001038.3,412-430).
cttttcggagagtacttca

SEQ ID NO: 330117 - DNA, 19 bp, Homo sapiens
  siRNA target sequence for SCNN1A (NM_001038.3,510-528).
ctacaggtacccggaaatt

SEQ ID NO: 330118 - DNA, 19 bp, Homo sapiens
  siRNA target sequence for SCNN1A (NM_001038.3,513-531).
caggtacccggaaattaaa

SEQ ID NO: 330119 - DNA, 19 bp, Homo sapiens
  siRNA target sequence for SCNN1A (NM_001038.3,722-740).
ccagcttgcgggacaacaa

SEQ ID NO: 330120 - DNA, 19 bp, Homo sapiens
  siRNA target sequence for SCNN1A (NM_001038.3,781-799).
ctgtgcaaccagaacaaat

SEQ ID NO: 330121 - DNA, 19 bp, Homo sapiens
  siRNA target sequence for SCNN1A (NM_001038.3,851-869).
ggtaccgcttccactacat

SEQ ID NO: 330122 - DNA, 19 bp, Homo sapiens
  siRNA target sequence for SCNN1A (NM_001038.3,856-874).
cgcttccactacatcaaca

SEQ ID NO: 330123 - DNA, 19 bp, Homo sapiens
  siRNA target sequence for SCNN1A (NM_001038.3,920-938).
cgctgggcaacttcatctt

SEQ ID NO: 330124 - DNA, 19 bp, Homo sapiens
  siRNA target sequence for SCNN1A (NM_001038.3,962-980).
cctgcaaccaggcgaatta

SEQ ID NO: 330125 - DNA, 19 bp, Homo sapiens
  siRNA target sequence for SCNN1A (NM_001038.3,966-984).
caaccaggcgaattactct

SEQ ID NO: 330126 - DNA, 19 bp, Homo sapiens
  siRNA target sequence for SCNN1A (NM_001038.3,1013-1031).
gctatactttcaatgacaa

SEQ ID NO: 330127 - DNA, 19 bp, Homo sapiens
  siRNA target sequence for SCNN1A (NM_001038.3,1096-1114).
cgcgcagagcagaatgact

SEQ ID NO: 330128 - DNA, 19 bp, Homo sapiens
  siRNA target sequence for SCNN1A (NM_001038.3,1295-1313).
gtgatgttcctgttgagaa

SEQ ID NO: 330129 - DNA, 19 bp, Homo sapiens
  siRNA target sequence for SCNN1A (NM_001038.3,1300-1318).
gttcctgttgagaaccttt

SEQ ID NO: 330130 - DNA, 19 bp, Homo sapiens
  siRNA target sequence for SCNN1A (NM_001038.3,1388-1406).
gctgtgcctacatcttcta

SEQ ID NO: 330131 - DNA, 19 bp, Homo sapiens
  siRNA target sequence for SCNN1A (NM_001038.3,1457-1475).
gggggtactgctactataa

SEQ ID NO: 330132 - DNA, 19 bp, Homo sapiens
  siRNA target sequence for SCNN1A (NM_001038.3,1460-1478).
ggtactgctactataagct

SEQ ID NO: 330133 - DNA, 19 bp, Homo sapiens
  siRNA target sequence for SCNN1A (NM_001038.3,1614-1632).
gctatcgcgacagaacaat

SEQ ID NO: 330134 - DNA, 19 bp, Homo sapiens
  siRNA target sequence for SCNN1A (NM_001038.3,1615-1633).
ctatcgcgacagaacaatt

SEQ ID NO: 330135 - DNA, 19 bp, Homo sapiens
  siRNA target sequence for SCNN1A (NM_001038.3,1637-1655).
ccgtcaacaacaagagaaa

SEQ ID NO: 330136 - DNA, 19 bp, Homo sapiens
  siRNA target sequence for SCNN1A (NM_001038.3,1638-1656).
cgtcaacaacaagagaaat

SEQ ID NO: 330137 - DNA, 19 bp, Homo sapiens
  siRNA target sequence for SST (NM_001048.2,111-129).
ccccagactccgtcagttt

SEQ ID NO: 330138 - DNA, 19 bp, Homo sapiens
  siRNA target sequence for SSTR4 (NM_001052.1,373-391).
gtcgacggcctcaacatgt

SEQ ID NO: 330139 - DNA, 19 bp, Homo sapiens
  siRNA target sequence for SSTR4 (NM_001052.1,752-770).
ggcgctcggagaagaaaat

SEQ ID NO: 330140 - DNA, 19 bp, Homo sapiens
  siRNA target sequence for SSTR4 (NM_001052.1,1023-1041).
ggagcccctggactactat

SEQ ID NO: 330141 - DNA, 19 bp, Homo sapiens
  siRNA target sequence for UGT1A6 (NM_001072.1,122-140).
ctgcaggggttttcttctt

SEQ ID NO: 330142 - DNA, 19 bp, Homo sapiens
  siRNA target sequence for UGT1A6 (NM_001072.1,193-211).
ggaagccactggcttagta

SEQ ID NO: 330143 - DNA, 19 bp, Homo sapiens
  siRNA target sequence for UGT1A6 (NM_001072.1,194-212).
gaagccactggcttagtat

SEQ ID NO: 330144 - DNA, 19 bp, Homo sapiens
  siRNA target sequence for UGT1A6 (NM_001072.1,203-221).
ggcttagtatgaaggatat

SEQ ID NO: 330145 - DNA, 19 bp, Homo sapiens
  siRNA target sequence for UGT1A6 (NM_001072.1,204-222).
gcttagtatgaaggatata

SEQ ID NO: 330146 - DNA, 19 bp, Homo sapiens
  siRNA target sequence for UGT1A6 (NM_001072.1,209-227).
gtatgaaggatatagttga

SEQ ID NO: 330147 - DNA, 19 bp, Homo sapiens
  siRNA target sequence for UGT1A6 (NM_001072.1,236-254).
gtgaccggggtcatgagat

SEQ ID NO: 330148 - DNA, 19 bp, Homo sapiens
  siRNA target sequence for UGT1A6 (NM_001072.1,240-258).
ccggggtcatgagattgta

SEQ ID NO: 330149 - DNA, 19 bp, Homo sapiens
  siRNA target sequence for UGT1A6 (NM_001072.1,242-260).
ggggtcatgagattgtagt

SEQ ID NO: 330150 - DNA, 19 bp, Homo sapiens
  siRNA target sequence for UGT1A6 (NM_001072.1,261-279).
ggtggtgcctgaagttaat

SEQ ID NO: 330151 - DNA, 19 bp, Homo sapiens
  siRNA target sequence for UGT1A6 (NM_001072.1,262-280).
gtggtgcctgaagttaatt

SEQ ID NO: 330152 - DNA, 19 bp, Homo sapiens
  siRNA target sequence for UGT1A6 (NM_001072.1,346-364).
ctgaagaaccgttaccaat

SEQ ID NO: 330153 - DNA, 19 bp, Homo sapiens
  siRNA target sequence for UGT1A6 (NM_001072.1,351-369).
gaaccgttaccaatcattt

SEQ ID NO: 330154 - DNA, 19 bp, Homo sapiens
  siRNA target sequence for UGT1A6 (NM_001072.1,354-372).
ccgttaccaatcatttgga

SEQ ID NO: 330155 - DNA, 19 bp, Homo sapiens
  siRNA target sequence for UGT1A6 (NM_001072.1,355-373).
cgttaccaatcatttggaa

SEQ ID NO: 330156 - DNA, 19 bp, Homo sapiens
  siRNA target sequence for UGT1A6 (NM_001072.1,385-403).
gctgagcgatcattcctaa

SEQ ID NO: 330157 - DNA, 19 bp, Homo sapiens
  siRNA target sequence for UGT1A6 (NM_001072.1,412-430).
cagacagagtacaggaata

SEQ ID NO: 330158 - DNA, 19 bp, Homo sapiens
  siRNA target sequence for UGT1A6 (NM_001072.1,423-441).
caggaataacatgattgtt

SEQ ID NO: 330159 - DNA, 19 bp, Homo sapiens
  siRNA target sequence for UGT1A6 (NM_001072.1,486-504).
ggacaccctgaacttcttt

SEQ ID NO: 330160 - DNA, 19 bp, Homo sapiens
  siRNA target sequence for UGT1A6 (NM_001072.1,487-505).
gacaccctgaacttcttta

SEQ ID NO: 330161 - DNA, 19 bp, Homo sapiens
  siRNA target sequence for UGT1A6 (NM_001072.1,556-574).
gtgatcctggctgagtatt

SEQ ID NO: 330162 - DNA, 19 bp, Homo sapiens
  siRNA target sequence for UGT1A6 (NM_001072.1,665-683).
ccaggtgctacacaaagtt

SEQ ID NO: 330163 - DNA, 19 bp, Homo sapiens
  siRNA target sequence for UGT1A6 (NM_001072.1,666-684).
caggtgctacacaaagttt

SEQ ID NO: 330164 - DNA, 19 bp, Homo sapiens
  siRNA target sequence for UGT1A6 (NM_001072.1,714-732).
ggccaacttccttgttaat

SEQ ID NO: 330165 - DNA, 19 bp, Homo sapiens
  siRNA target sequence for UGT1A6 (NM_001072.1,715-733).
gccaacttccttgttaatt

SEQ ID NO: 330166 - DNA, 19 bp, Homo sapiens
  siRNA target sequence for UGT1A6 (NM_001072.1,716-734).
ccaacttccttgttaattt

SEQ ID NO: 330167 - DNA, 19 bp, Homo sapiens
  siRNA target sequence for UGT1A6 (NM_001072.1,735-753).
gttggagccctatctattt

SEQ ID NO: 330168 - DNA, 19 bp, Homo sapiens
  siRNA target sequence for UGT1A6 (NM_001072.1,738-756).
ggagccctatctattttat

SEQ ID NO: 330169 - DNA, 19 bp, Homo sapiens
  siRNA target sequence for UGT1A6 (NM_001072.1,739-757).
gagccctatctattttatt

SEQ ID NO: 330170 - DNA, 19 bp, Homo sapiens
  siRNA target sequence for UGT1A6 (NM_001072.1,808-826).
gtggatataatcaccttat

SEQ ID NO: 330171 - DNA, 19 bp, Homo sapiens
  siRNA target sequence for UGT1A6 (NM_001072.1,832-850).
gtctctgtttggctgttaa

SEQ ID NO: 330172 - DNA, 19 bp, Homo sapiens
  siRNA target sequence for UGT1A6 (NM_001072.1,907-925).
ggaggtatcaactgtaaga

SEQ ID NO: 330173 - DNA, 19 bp, Homo sapiens
  siRNA target sequence for UGT1A6 (NM_001072.1,908-926).
gaggtatcaactgtaagaa

SEQ ID NO: 330174 - DNA, 19 bp, Homo sapiens
  siRNA target sequence for ANG (NM_001145.1,122-140).
ggcctgggcgttttgttgt

SEQ ID NO: 330175 - DNA, 19 bp, Homo sapiens
  siRNA target sequence for ANG (NM_001145.1,291-309).
cctcaccctgcaaagacat

SEQ ID NO: 330176 - DNA, 19 bp, Homo sapiens
  siRNA target sequence for ANG (NM_001145.1,349-367).
catctgtgaaaacaagaat

SEQ ID NO: 330177 - DNA, 19 bp, Homo sapiens
  siRNA target sequence for ANG (NM_001145.1,470-488).
gccacagcggggttcagaa

SEQ ID NO: 330178 - DNA, 19 bp, Homo sapiens
  siRNA target sequence for ANG (NM_001145.1,481-499).
gttcagaaacgttgttgtt

SEQ ID NO: 330179 - DNA, 19 bp, Homo sapiens
  siRNA target sequence for ANG (NM_001145.1,490-508).
cgttgttgttgcttgtgaa

SEQ ID NO: 330180 - DNA, 19 bp, Homo sapiens
  siRNA target sequence for C16orf3 (NM_001214.2,869-887).
ggacaacgcagtgttcaat

SEQ ID NO: 330181 - DNA, 19 bp, Homo sapiens
  siRNA target sequence for C16orf3 (NM_001214.2,913-931).
catctttccagaacacaaa

SEQ ID NO: 330182 - DNA, 19 bp, Homo sapiens
  siRNA target sequence for DPH2L1 (NM_001383.1,499-517).
gggtgctgtacgtctttgt

SEQ ID NO: 330183 - DNA, 19 bp, Homo sapiens
  siRNA target sequence for DPH2L1 (NM_001383.1,591-609).
ctggtcagcaccattcagt

SEQ ID NO: 330184 - DNA, 19 bp, Homo sapiens
  siRNA target sequence for DPH2L1 (NM_001383.1,593-611).
ggtcagcaccattcagttt

SEQ ID NO: 330185 - DNA, 19 bp, Homo sapiens
  siRNA target sequence for DPH2L1 (NM_001383.1,734-752).
ggtggaggccgttgtgtat

SEQ ID NO: 330186 - DNA, 19 bp, Homo sapiens
  siRNA target sequence for DPH2L1 (NM_001383.1,816-834).
cggtatgacccatatagca

SEQ ID NO: 330187 - DNA, 19 bp, Homo sapiens
  siRNA target sequence for DPH2L1 (NM_001383.1,817-835).
ggtatgacccatatagcaa

SEQ ID NO: 330188 - DNA, 19 bp, Homo sapiens
  siRNA target sequence for DPH2L1 (NM_001383.1,994-1012).
gagccttgggcctttcctt

SEQ ID NO: 330189 - DNA, 19 bp, Homo sapiens
  siRNA target sequence for DPH2L1 (NM_001383.1,1095-1113).
ccacgtctctccattgact

SEQ ID NO: 330190 - DNA, 19 bp, Homo sapiens
  siRNA target sequence for DPH2L1 (NM_001383.1,1192-1210).
cctacccgatggacttcta

SEQ ID NO: 330191 - DNA, 19 bp, Homo sapiens
  siRNA target sequence for DPH2L2 (NM_001384.2,277-295).
ggagcgagtcgctggattt

SEQ ID NO: 330192 - DNA, 19 bp, Homo sapiens
  siRNA target sequence for DPH2L2 (NM_001384.2,387-405).
cgacagggtcaaagatgtt

SEQ ID NO: 330193 - DNA, 19 bp, Homo sapiens
  siRNA target sequence for DPH2L2 (NM_001384.2,468-486).
gagctcaggctctcataca

SEQ ID NO: 330194 - DNA, 19 bp, Homo sapiens
  siRNA target sequence for DPH2L2 (NM_001384.2,470-488).
gctcaggctctcatacatt

SEQ ID NO: 330195 - DNA, 19 bp, Homo sapiens
  siRNA target sequence for DPH2L2 (NM_001384.2,795-813).
ggaggcgtctagaagagta

SEQ ID NO: 330196 - DNA, 19 bp, Homo sapiens
  siRNA target sequence for DPH2L2 (NM_001384.2,796-814).
gaggcgtctagaagagtat

SEQ ID NO: 330197 - DNA, 19 bp, Homo sapiens
  siRNA target sequence for DPH2L2 (NM_001384.2,811-829).
gtatggtgccttctatgta

SEQ ID NO: 330198 - DNA, 19 bp, Homo sapiens
  siRNA target sequence for DPH2L2 (NM_001384.2,1103-1121).
ggcaagcgtagctatgtgt

SEQ ID NO: 330199 - DNA, 19 bp, Homo sapiens
  siRNA target sequence for DPH2L2 (NM_001384.2,1104-1122).
gcaagcgtagctatgtgtt

SEQ ID NO: 330200 - DNA, 19 bp, Homo sapiens
  siRNA target sequence for DPH2L2 (NM_001384.2,1171-1189).
ggatgtctttgtgctatta

SEQ ID NO: 330201 - DNA, 19 bp, Homo sapiens
  siRNA target sequence for DPH2L2 (NM_001384.2,1304-1322).
gctccccacctcacacatt

SEQ ID NO: 330202 - DNA, 19 bp, Homo sapiens
  siRNA target sequence for DPH2L2 (NM_001384.2,1317-1335).
cacattatgcggacttatt

SEQ ID NO: 330203 - DNA, 19 bp, Homo sapiens
  siRNA target sequence for DPH2L2 (NM_001384.2,1393-1411).
cccagacgtgtcactcatt

SEQ ID NO: 330204 - DNA, 19 bp, Homo sapiens
  siRNA target sequence for DPH2L2 (NM_001384.2,1438-1456).
ctggaagtcatcaaatgat

SEQ ID NO: 330205 - DNA, 19 bp, Homo sapiens
  siRNA target sequence for EPAS1 (NM_001430.2,530-548).
cagtttgctctgaaaacga

SEQ ID NO: 330206 - DNA, 19 bp, Homo sapiens
  siRNA target sequence for EPAS1 (NM_001430.2,631-649).
ggcgacatgatctttctgt

SEQ ID NO: 330207 - DNA, 19 bp, Homo sapiens
  siRNA target sequence for EPAS1 (NM_001430.2,687-705).
ggagctaacaggacatagt

SEQ ID NO: 330208 - DNA, 19 bp, Homo sapiens
  siRNA target sequence for EPAS1 (NM_001430.2,695-713).
caggacatagtatctttga

SEQ ID NO: 330209 - DNA, 19 bp, Homo sapiens
  siRNA target sequence for EPAS1 (NM_001430.2,698-716).
gacatagtatctttgactt

SEQ ID NO: 330210 - DNA, 19 bp, Homo sapiens
  siRNA target sequence for EPAS1 (NM_001430.2,750-768).
gaacctgagtctcaaaaat

SEQ ID NO: 330211 - DNA, 19 bp, Homo sapiens
  siRNA target sequence for EPAS1 (NM_001430.2,806-824).
cagagcgggacttcttcat

SEQ ID NO: 330212 - DNA, 19 bp, Homo sapiens
  siRNA target sequence for EPAS1 (NM_001430.2,899-917).
gcacgggccaggtgaaagt

SEQ ID NO: 330213 - DNA, 19 bp, Homo sapiens
  siRNA target sequence for EPAS1 (NM_001430.2,902-920).
cgggccaggtgaaagtcta

SEQ ID NO: 330214 - DNA, 19 bp, Homo sapiens
  siRNA target sequence for EPAS1 (NM_001430.2,905-923).
gccaggtgaaagtctacaa

SEQ ID NO: 330215 - DNA, 19 bp, Homo sapiens
  siRNA target sequence for EPAS1 (NM_001430.2,907-925).
caggtgaaagtctacaaca

SEQ ID NO: 330216 - DNA, 19 bp, Homo sapiens
  siRNA target sequence for EPAS1 (NM_001430.2,1083-1101).
ctgtgatgacagaatcaca

SEQ ID NO: 330217 - DNA, 19 bp, Homo sapiens
  siRNA target sequence for EPAS1 (NM_001430.2,1135-1153).
ggccgctcagcctatgaat

SEQ ID NO: 330218 - DNA, 19 bp, Homo sapiens
  siRNA target sequence for EPAS1 (NM_001430.2,1136-1154).
gccgctcagcctatgaatt

SEQ ID NO: 330219 - DNA, 19 bp, Homo sapiens
  siRNA target sequence for EPAS1 (NM_001430.2,1163-1181).
cgctagactccgagaacat

SEQ ID NO: 330220 - DNA, 19 bp, Homo sapiens
  siRNA target sequence for EPAS1 (NM_001430.2,1165-1183).
ctagactccgagaacatga

SEQ ID NO: 330221 - DNA, 19 bp, Homo sapiens
  siRNA target sequence for EPAS1 (NM_001430.2,1312-1330).
cagccccagtgcatcatgt

SEQ ID NO: 330222 - DNA, 19 bp, Homo sapiens
  siRNA target sequence for EPAS1 (NM_001430.2,1338-1356).
ctacgtcctgagtgagatt

SEQ ID NO: 330223 - DNA, 19 bp, Homo sapiens
  siRNA target sequence for EPAS1 (NM_001430.2,1421-1439).
ccatgaacagcatctttga

SEQ ID NO: 330224 - DNA, 19 bp, Homo sapiens
  siRNA target sequence for EPAS1 (NM_001430.2,1456-1474).
gctgtgtctgagaagagta

SEQ ID NO: 330225 - DNA, 19 bp, Homo sapiens
  siRNA target sequence for EPAS1 (NM_001430.2,1465-1483).
gagaagagtaacttcctat

SEQ ID NO: 330226 - DNA, 19 bp, Homo sapiens
  siRNA target sequence for EPAS1 (NM_001430.2,1555-1573).
ctggatttcgggaatcaga

SEQ ID NO: 330227 - DNA, 19 bp, Homo sapiens
  siRNA target sequence for EPAS1 (NM_001430.2,1862-1880).
gtacccagacggatttcaa

SEQ ID NO: 330228 - DNA, 19 bp, Homo sapiens
  siRNA target sequence for EPAS1 (NM_001430.2,1916-1934).
ccatggacggggaagactt

SEQ ID NO: 330229 - DNA, 19 bp, Homo sapiens
  siRNA target sequence for EPAS1 (NM_001430.2,2003-2021).
gcttcagtgccatgacaaa

SEQ ID NO: 330230 - DNA, 19 bp, Homo sapiens
  siRNA target sequence for EPAS1 (NM_001430.2,2143-2161).
gatgccggaagcaaagcat

SEQ ID NO: 330231 - DNA, 19 bp, Homo sapiens
  siRNA target sequence for EPAS1 (NM_001430.2,2237-2255).
cagatccaccattacattt

SEQ ID NO: 330232 - DNA, 19 bp, Homo sapiens
  siRNA target sequence for EPAS1 (NM_001430.2,2251-2269).
cattttgggcccacaaagt

SEQ ID NO: 330233 - DNA, 19 bp, Homo sapiens
  siRNA target sequence for EPAS1 (NM_001430.2,2501-2519).
gtggcagcacctcacattt

SEQ ID NO: 330234 - DNA, 19 bp, Homo sapiens
  siRNA target sequence for EPAS1 (NM_001430.2,2577-2595).
gccactgagcgcaaatgta

SEQ ID NO: 330235 - DNA, 19 bp, Homo sapiens
  siRNA target sequence for EPAS1 (NM_001430.2,2586-2604).
cgcaaatgtacccaatgat

SEQ ID NO: 330236 - DNA, 19 bp, Homo sapiens
  siRNA target sequence for EPAS1 (NM_001430.2,2587-2605).
gcaaatgtacccaatgata

SEQ ID NO: 330237 - DNA, 19 bp, Homo sapiens
  siRNA target sequence for EPAS1 (NM_001430.2,2593-2611).
gtacccaatgataagttca

SEQ ID NO: 330238 - DNA, 19 bp, Homo sapiens
  siRNA target sequence for EPAS1 (NM_001430.2,2823-2841).
gcccgaactgaccagatat

SEQ ID NO: 330239 - DNA, 19 bp, Homo sapiens
  siRNA target sequence for FAAH (NM_001441.1,279-297).
ctggtgcagaagttacaca

SEQ ID NO: 330240 - DNA, 19 bp, Homo sapiens
  siRNA target sequence for FAAH (NM_001441.1,594-612).
gttccacagtccatgttca

SEQ ID NO: 330241 - DNA, 19 bp, Homo sapiens
  siRNA target sequence for FAAH (NM_001441.1,1007-1025).
cctgcgtgtggggtactat

SEQ ID NO: 330242 - DNA, 19 bp, Homo sapiens
  siRNA target sequence for FAAH (NM_001441.1,1022-1040).
ctatgagactgacaactat

SEQ ID NO: 330243 - DNA, 19 bp, Homo sapiens
  siRNA target sequence for FAAH (NM_001441.1,1240-1258).
gggacctggtctcaattct

SEQ ID NO: 330244 - DNA, 19 bp, Homo sapiens
  siRNA target sequence for FAAH (NM_001441.1,1262-1280).
gcttccccaatggcttaaa

SEQ ID NO: 330245 - DNA, 19 bp, Homo sapiens
  siRNA target sequence for FAAH (NM_001441.1,1346-1364).
gtctcgttcggctggaaaa

SEQ ID NO: 330246 - DNA, 19 bp, Homo sapiens
  siRNA target sequence for FAAH (NM_001441.1,1348-1366).
ctcgttcggctggaaaact

SEQ ID NO: 330247 - DNA, 19 bp, Homo sapiens
  siRNA target sequence for FAAH (NM_001441.1,1350-1368).
cgttcggctggaaaactct

SEQ ID NO: 330248 - DNA, 19 bp, Homo sapiens
  siRNA target sequence for FAAH (NM_001441.1,1510-1528).
gctacactatgctgtacaa

SEQ ID NO: 330249 - DNA, 19 bp, Homo sapiens
  siRNA target sequence for FLNC (NM_001458.1,785-803).
gatgagcattctgttatga

SEQ ID NO: 330250 - DNA, 19 bp, Homo sapiens
  siRNA target sequence for FLNC (NM_001458.1,1025-1043).
gtggttcccaacaatgaca

SEQ ID NO: 330251 - DNA, 19 bp, Homo sapiens
  siRNA target sequence for FLNC (NM_001458.1,1213-1231).
gggcaatgtggccaacaaa

SEQ ID NO: 330252 - DNA, 19 bp, Homo sapiens
  siRNA target sequence for FLNC (NM_001458.1,1354-1372).
gttccgctgcacatacaga

SEQ ID NO: 330253 - DNA, 19 bp, Homo sapiens
  siRNA target sequence for FLNC (NM_001458.1,1807-1825).
gggcaagtcagccgatttt

SEQ ID NO: 330254 - DNA, 19 bp, Homo sapiens
  siRNA target sequence for FLNC (NM_001458.1,2110-2128).
cgctgagttcaccattgat

SEQ ID NO: 330255 - DNA, 19 bp, Homo sapiens
  siRNA target sequence for FLNC (NM_001458.1,2181-2199).
gctgtcccatcgacatcaa

SEQ ID NO: 330256 - DNA, 19 bp, Homo sapiens
  siRNA target sequence for FLNC (NM_001458.1,2277-2295).
cctggggaggcgtaaacgt

SEQ ID NO: 330257 - DNA, 19 bp, Homo sapiens
  siRNA target sequence for FLNC (NM_001458.1,2501-2519).
gacttcgacatcatcaaga

SEQ ID NO: 330258 - DNA, 19 bp, Homo sapiens
  siRNA target sequence for FLNC (NM_001458.1,2789-2807).
gttgtgcgggactttgaga

SEQ ID NO: 330259 - DNA, 19 bp, Homo sapiens
  siRNA target sequence for FLNC (NM_001458.1,2798-2816).
gactttgagatcatagaca

SEQ ID NO: 330260 - DNA, 19 bp, Homo sapiens
  siRNA target sequence for FLNC (NM_001458.1,2960-2978).
gttcagggccttaatagca

SEQ ID NO: 330261 - DNA, 19 bp, Homo sapiens
  siRNA target sequence for FLNC (NM_001458.1,3152-3170).
ccctacaaggtggatatca

SEQ ID NO: 330262 - DNA, 19 bp, Homo sapiens
  siRNA target sequence for FLNC (NM_001458.1,3469-3487).
ccctggctcgcccttcaaa

SEQ ID NO: 330263 - DNA, 19 bp, Homo sapiens
  siRNA target sequence for FLNC (NM_001458.1,3490-3508).
caccattcggcctgtgttt

SEQ ID NO: 330264 - DNA, 19 bp, Homo sapiens
  siRNA target sequence for FLNC (NM_001458.1,3492-3510).
ccattcggcctgtgtttga

SEQ ID NO: 330265 - DNA, 19 bp, Homo sapiens
  siRNA target sequence for FLNC (NM_001458.1,3713-3731).
ggcacctacaccattacca

SEQ ID NO: 330266 - DNA, 19 bp, Homo sapiens
  siRNA target sequence for FLNC (NM_001458.1,4293-4311).
gagactatgacgtcaacat

SEQ ID NO: 330267 - DNA, 19 bp, Homo sapiens
  siRNA target sequence for FLNC (NM_001458.1,4588-4606).
cacggtagccgtcaagtat

SEQ ID NO: 330268 - DNA, 19 bp, Homo sapiens
  siRNA target sequence for FLNC (NM_001458.1,4622-4640).
ccacgcagccccttcaaga

SEQ ID NO: 330269 - DNA, 19 bp, Homo sapiens
  siRNA target sequence for FLNC (NM_001458.1,4623-4641).
cacgcagccccttcaagat

SEQ ID NO: 330270 - DNA, 19 bp, Homo sapiens
  siRNA target sequence for FLNC (NM_001458.1,4645-4663).
ggtcctcccagctcatgat

SEQ ID NO: 330271 - DNA, 19 bp, Homo sapiens
  siRNA target sequence for FLNC (NM_001458.1,5137-5155).
gaaccatgacggtaccttt

SEQ ID NO: 330272 - DNA, 19 bp, Homo sapiens
  siRNA target sequence for FLNC (NM_001458.1,5141-5159).
catgacggtacctttgaca

SEQ ID NO: 330273 - DNA, 19 bp, Homo sapiens
  siRNA target sequence for FLNC (NM_001458.1,5147-5165).
ggtacctttgacatctact

SEQ ID NO: 330274 - DNA, 19 bp, Homo sapiens
  siRNA target sequence for FLNC (NM_001458.1,5524-5542).
gtatgcacccactgagaaa

SEQ ID NO: 330275 - DNA, 19 bp, Homo sapiens
  siRNA target sequence for FLNC (NM_001458.1,5551-5569).
ccagatggggatcaagtat

SEQ ID NO: 330276 - DNA, 19 bp, Homo sapiens
  siRNA target sequence for FLNC (NM_001458.1,5677-5695).
gccagccaccttcactatt

SEQ ID NO: 330277 - DNA, 19 bp, Homo sapiens
  siRNA target sequence for FLNC (NM_001458.1,5689-5707).
cactattgtcaccaaagat

SEQ ID NO: 330278 - DNA, 19 bp, Homo sapiens
  siRNA target sequence for FLNC (NM_001458.1,5939-5957).
gacgtgtcactgaagatca

SEQ ID NO: 330279 - DNA, 19 bp, Homo sapiens
  siRNA target sequence for FLNC (NM_001458.1,6268-6286).
cttggggctgagtattgaa

SEQ ID NO: 330280 - DNA, 19 bp, Homo sapiens
  siRNA target sequence for FLNC (NM_001458.1,6326-6344).
gacgggacatgcaaagtca

SEQ ID NO: 330281 - DNA, 19 bp, Homo sapiens
  siRNA target sequence for FLNC (NM_001458.1,7113-7131).
gcaaagcggagattgcatt

SEQ ID NO: 330282 - DNA, 19 bp, Homo sapiens
  siRNA target sequence for FLNC (NM_001458.1,7721-7739).
ggccatgtggtcacttata

SEQ ID NO: 330283 - DNA, 19 bp, Homo sapiens
  siRNA target sequence for GBAS (NM_001483.1,135-153).
gacagctggctaaaatcct

SEQ ID NO: 330284 - DNA, 19 bp, Homo sapiens
  siRNA target sequence for GBAS (NM_001483.1,137-155).
cagctggctaaaatcctta

SEQ ID NO: 330285 - DNA, 19 bp, Homo sapiens
  siRNA target sequence for GBAS (NM_001483.1,139-157).
gctggctaaaatccttatt

SEQ ID NO: 330286 - DNA, 19 bp, Homo sapiens
  siRNA target sequence for GBAS (NM_001483.1,142-160).
ggctaaaatccttatttgt

SEQ ID NO: 330287 - DNA, 19 bp, Homo sapiens
  siRNA target sequence for GBAS (NM_001483.1,152-170).
cttatttgtccggaaagtt

SEQ ID NO: 330288 - DNA, 19 bp, Homo sapiens
  siRNA target sequence for GBAS (NM_001483.1,198-216).
ctcctagccaaaaaggaaa

SEQ ID NO: 330289 - DNA, 19 bp, Homo sapiens
  siRNA target sequence for GBAS (NM_001483.1,220-238).
gcaatctatacaaattaca

SEQ ID NO: 330290 - DNA, 19 bp, Homo sapiens
  siRNA target sequence for GBAS (NM_001483.1,256-274).
cggaatgcctagaagcata

SEQ ID NO: 330291 - DNA, 19 bp, Homo sapiens
  siRNA target sequence for GBAS (NM_001483.1,300-318).
ccaaagattcacgaagata

SEQ ID NO: 330292 - DNA, 19 bp, Homo sapiens
  siRNA target sequence for GBAS (NM_001483.1,412-430).
cagccctcacagaagtcat

SEQ ID NO: 330293 - DNA, 19 bp, Homo sapiens
  siRNA target sequence for GBAS (NM_001483.1,415-433).
ccctcacagaagtcatgaa

SEQ ID NO: 330294 - DNA, 19 bp, Homo sapiens
  siRNA target sequence for GBAS (NM_001483.1,545-563).
gccaagatccggacctaat

SEQ ID NO: 330295 - DNA, 19 bp, Homo sapiens
  siRNA target sequence for GBAS (NM_001483.1,546-564).
ccaagatccggacctaata

SEQ ID NO: 330296 - DNA, 19 bp, Homo sapiens
  siRNA target sequence for GBAS (NM_001483.1,547-565).
caagatccggacctaatat

SEQ ID NO: 330297 - DNA, 19 bp, Homo sapiens
  siRNA target sequence for GBAS (NM_001483.1,550-568).
gatccggacctaatatata

SEQ ID NO: 330298 - DNA, 19 bp, Homo sapiens
  siRNA target sequence for GBAS (NM_001483.1,556-574).
gacctaatatatatgaact

SEQ ID NO: 330299 - DNA, 19 bp, Homo sapiens
  siRNA target sequence for GBAS (NM_001483.1,590-608).
ccgaccaggaaccatgatt

SEQ ID NO: 330300 - DNA, 19 bp, Homo sapiens
  siRNA target sequence for GBAS (NM_001483.1,640-658).
gcttcagacaggatggtaa

SEQ ID NO: 330301 - DNA, 19 bp, Homo sapiens
  siRNA target sequence for GBAS (NM_001483.1,644-662).
cagacaggatggtaacgaa

SEQ ID NO: 330302 - DNA, 19 bp, Homo sapiens
  siRNA target sequence for GBAS (NM_001483.1,785-803).
ggaattggtatattacaca

SEQ ID NO: 330303 - DNA, 19 bp, Homo sapiens
  siRNA target sequence for GBX2 (NM_001485.1,857-875).
gcgaggtgcaggtgaaaat

SEQ ID NO: 330304 - DNA, 19 bp, Homo sapiens
  siRNA target sequence for GBX2 (NM_001485.1,947-965).
cctcccggaaccctaagat

SEQ ID NO: 330305 - DNA, 19 bp, Homo sapiens
  siRNA target sequence for GBX2 (NM_001485.1,990-1008).
cagcaggttcgctatcaga

SEQ ID NO: 330306 - DNA, 19 bp, Homo sapiens
  siRNA target sequence for HSF4 (NM_001538.1,62-80).
gccttcctcggcaagctat

SEQ ID NO: 330307 - DNA, 19 bp, Homo sapiens
  siRNA target sequence for HSF4 (NM_001538.1,176-194).
gaagtgctgccccagtatt

SEQ ID NO: 330308 - DNA, 19 bp, Homo sapiens
  siRNA target sequence for HSF4 (NM_001538.1,185-203).
ccccagtatttcaagcata

SEQ ID NO: 330309 - DNA, 19 bp, Homo sapiens
  siRNA target sequence for HSF4 (NM_001538.1,568-586).
gctgatccagtgtctcttt

SEQ ID NO: 330310 - DNA, 19 bp, Homo sapiens
  siRNA target sequence for HSF4 (NM_001538.1,665-683).
ccaacacctgccaagttca

SEQ ID NO: 330311 - DNA, 19 bp, Homo sapiens
  siRNA target sequence for HSF4 (NM_001538.1,731-749).
cagtcgccttctacttaca

SEQ ID NO: 330312 - DNA, 19 bp, Homo sapiens
  siRNA target sequence for HSF4 (NM_001538.1,1089-1107).
ctgcagggcctctagatgt

SEQ ID NO: 330313 - DNA, 19 bp, Homo sapiens
  siRNA target sequence for HSF4 (NM_001538.1,1315-1333).
gcctggggctttaaccatt

SEQ ID NO: 330314 - DNA, 19 bp, Homo sapiens
  siRNA target sequence for HSF4 (NM_001538.1,1317-1335).
ctggggctttaaccattta

SEQ ID NO: 330315 - DNA, 19 bp, Homo sapiens
  siRNA target sequence for HSF4 (NM_001538.1,1319-1337).
ggggctttaaccatttata

SEQ ID NO: 330316 - DNA, 19 bp, Homo sapiens
  siRNA target sequence for HSF4 (NM_001538.1,1322-1340).
gctttaaccatttatagca

SEQ ID NO: 330317 - DNA, 19 bp, Homo sapiens
  siRNA target sequence for IGSF3 (NM_001542.1,2861-2879).
gcgtgtaccgtctcttcat

SEQ ID NO: 330318 - DNA, 19 bp, Homo sapiens
  siRNA target sequence for IGSF3 (NM_001542.1,3135-3153).
gtattccctgaggactaaa

SEQ ID NO: 330319 - DNA, 19 bp, Homo sapiens
  siRNA target sequence for IGSF3 (NM_001542.1,3373-3391).
caggcaagcccccaagata

SEQ ID NO: 330320 - DNA, 19 bp, Homo sapiens
  siRNA target sequence for IGSF3 (NM_001542.1,3375-3393).
ggcaagcccccaagataca

SEQ ID NO: 330321 - DNA, 19 bp, Homo sapiens
  siRNA target sequence for IGSF3 (NM_001542.1,3383-3401).
cccaagatacaggcaatta

SEQ ID NO: 330322 - DNA, 19 bp, Homo sapiens
  siRNA target sequence for IGSF3 (NM_001542.1,3480-3498).
cggcatccgtgttctagat

SEQ ID NO: 330323 - DNA, 19 bp, Homo sapiens
  siRNA target sequence for IGSF3 (NM_001542.1,3481-3499).
ggcatccgtgttctagata

SEQ ID NO: 330324 - DNA, 19 bp, Homo sapiens
  siRNA target sequence for IGSF3 (NM_001542.1,3486-3504).
ccgtgttctagatacaagt

SEQ ID NO: 330325 - DNA, 19 bp, Homo sapiens
  siRNA target sequence for IGSF3 (NM_001542.1,3530-3548).
ccaacgacgcactcttcta

SEQ ID NO: 330326 - DNA, 19 bp, Homo sapiens
  siRNA target sequence for IGSF3 (NM_001542.1,3679-3697).
gagccacacctcaactact

SEQ ID NO: 330327 - DNA, 19 bp, Homo sapiens
  siRNA target sequence for IGSF3 (NM_001542.1,3733-3751).
catccaggggccatagact

SEQ ID NO: 330328 - DNA, 19 bp, Homo sapiens
  siRNA target sequence for NDST1 (NM_001543.2,263-281).
cgcaggctgtccttttcct

SEQ ID NO: 330329 - DNA, 19 bp, Homo sapiens
  siRNA target sequence for NDST1 (NM_001543.2,464-482).
cgttggtgctggtctttgt

SEQ ID NO: 330330 - DNA, 19 bp, Homo sapiens
  siRNA target sequence for NDST1 (NM_001543.2,528-546).
ggagtccagccgcttcaaa

SEQ ID NO: 330331 - DNA, 19 bp, Homo sapiens
  siRNA target sequence for NDST1 (NM_001543.2,610-628).
cgcttcgccctcatcatct

SEQ ID NO: 330332 - DNA, 19 bp, Homo sapiens
  siRNA target sequence for NDST1 (NM_001543.2,611-629).
gcttcgccctcatcatcta

SEQ ID NO: 330333 - DNA, 19 bp, Homo sapiens
  siRNA target sequence for NDST1 (NM_001543.2,612-630).
cttcgccctcatcatctat

SEQ ID NO: 330334 - DNA, 19 bp, Homo sapiens
  siRNA target sequence for NDST1 (NM_001543.2,890-908).
ggacggttttccagtcaaa

SEQ ID NO: 330335 - DNA, 19 bp, Homo sapiens
  siRNA target sequence for NDST1 (NM_001543.2,891-909).
gacggttttccagtcaaat

SEQ ID NO: 330336 - DNA, 19 bp, Homo sapiens
  siRNA target sequence for NDST1 (NM_001543.2,893-911).
cggttttccagtcaaatca

SEQ ID NO: 330337 - DNA, 19 bp, Homo sapiens
  siRNA target sequence for NDST1 (NM_001543.2,1285-1303).
ggctactcagggaaattct

SEQ ID NO: 330338 - DNA, 19 bp, Homo sapiens
  siRNA target sequence for NDST1 (NM_001543.2,1766-1784).
ccgtgctcctcaatcctat

SEQ ID NO: 330339 - DNA, 19 bp, Homo sapiens
  siRNA target sequence for NDST1 (NM_001543.2,1797-1815).
gacgcacctgtccaactat

SEQ ID NO: 330340 - DNA, 19 bp, Homo sapiens
  siRNA target sequence for NDST1 (NM_001543.2,1974-1992).
cgaggacaaacgtcacaaa

SEQ ID NO: 330341 - DNA, 19 bp, Homo sapiens
  siRNA target sequence for NDST1 (NM_001543.2,2137-2155).
gaggagatccagtttttta

SEQ ID NO: 330342 - DNA, 19 bp, Homo sapiens
  siRNA target sequence for NDST1 (NM_001543.2,2239-2257).
gagaaaagcgccaactact

SEQ ID NO: 330343 - DNA, 19 bp, Homo sapiens
  siRNA target sequence for NDST1 (NM_001543.2,2247-2265).
cgccaactactttgattca

SEQ ID NO: 330344 - DNA, 19 bp, Homo sapiens
  siRNA target sequence for NDST1 (NM_001543.2,2249-2267).
ccaactactttgattcaga

SEQ ID NO: 330345 - DNA, 19 bp, Homo sapiens
  siRNA target sequence for NDST1 (NM_001543.2,2383-2401).
ccagtggccctaaagtaca

SEQ ID NO: 330346 - DNA, 19 bp, Homo sapiens
  siRNA target sequence for NDST1 (NM_001543.2,2631-2649).
caaaaccttggcgtttgat

SEQ ID NO: 330347 - DNA, 19 bp, Homo sapiens
  siRNA target sequence for IFIT2 (NM_001547.3,85-103).
gagaacaataagaattcct

SEQ ID NO: 330348 - DNA, 19 bp, Homo sapiens
  siRNA target sequence for IFIT2 (NM_001547.3,110-128).
gcagcctacggcaactaaa

SEQ ID NO: 330349 - DNA, 19 bp, Homo sapiens
  siRNA target sequence for IFIT2 (NM_001547.3,240-258).
caacctactggcctatcta

SEQ ID NO: 330350 - DNA, 19 bp, Homo sapiens
  siRNA target sequence for IFIT2 (NM_001547.3,456-474).
gttttccagtccctataga

SEQ ID NO: 330351 - DNA, 19 bp, Homo sapiens
  siRNA target sequence for IFIT2 (NM_001547.3,505-523).
gggtggacacggttaaagt

SEQ ID NO: 330352 - DNA, 19 bp, Homo sapiens
  siRNA target sequence for IFIT2 (NM_001547.3,507-525).
gtggacacggttaaagtgt

SEQ ID NO: 330353 - DNA, 19 bp, Homo sapiens
  siRNA target sequence for IFIT2 (NM_001547.3,694-712).
cctgacaaccagtacctta

SEQ ID NO: 330354 - DNA, 19 bp, Homo sapiens
  siRNA target sequence for IFIT2 (NM_001547.3,695-713).
ctgacaaccagtaccttaa

SEQ ID NO: 330355 - DNA, 19 bp, Homo sapiens
  siRNA target sequence for IFIT2 (NM_001547.3,864-882).
gccagacaaagcgattgaa

SEQ ID NO: 330356 - DNA, 19 bp, Homo sapiens
  siRNA target sequence for IFIT2 (NM_001547.3,874-892).
gcgattgaactgcttaaaa

SEQ ID NO: 330357 - DNA, 19 bp, Homo sapiens
  siRNA target sequence for IFIT2 (NM_001547.3,895-913).
gctttagaatacataccaa

SEQ ID NO: 330358 - DNA, 19 bp, Homo sapiens
  siRNA target sequence for IFIT2 (NM_001547.3,896-914).
ctttagaatacataccaaa

SEQ ID NO: 330359 - DNA, 19 bp, Homo sapiens
  siRNA target sequence for IFIT2 (NM_001547.3,947-965).
gctatagggcaaaagtctt

SEQ ID NO: 330360 - DNA, 19 bp, Homo sapiens
  siRNA target sequence for IFIT2 (NM_001547.3,955-973).
gcaaaagtcttccaagtaa

SEQ ID NO: 330361 - DNA, 19 bp, Homo sapiens
  siRNA target sequence for IFIT2 (NM_001547.3,956-974).
caaaagtcttccaagtaat

SEQ ID NO: 330362 - DNA, 19 bp, Homo sapiens
  siRNA target sequence for IFIT2 (NM_001547.3,963-981).
cttccaagtaatgaatcta

SEQ ID NO: 330363 - DNA, 19 bp, Homo sapiens
  siRNA target sequence for IFIT2 (NM_001547.3,1034-1052).
ctgtggctcatctgaagaa

SEQ ID NO: 330364 - DNA, 19 bp, Homo sapiens
  siRNA target sequence for IFIT2 (NM_001547.3,1060-1078).
gaggccaatgataatctct

SEQ ID NO: 330365 - DNA, 19 bp, Homo sapiens
  siRNA target sequence for IFIT2 (NM_001547.3,1080-1098).
ccgtgtctgttccattctt

SEQ ID NO: 330366 - DNA, 19 bp, Homo sapiens
  siRNA target sequence for IFIT2 (NM_001547.3,1112-1130).
ctctagcagatcagtatga

SEQ ID NO: 330367 - DNA, 19 bp, Homo sapiens
  siRNA target sequence for IFIT2 (NM_001547.3,1175-1193).
ctcctgtagcgaaacaact

SEQ ID NO: 330368 - DNA, 19 bp, Homo sapiens
  siRNA target sequence for IFIT2 (NM_001547.3,1248-1266).
ggccatccaccactttata

SEQ ID NO: 330369 - DNA, 19 bp, Homo sapiens
  siRNA target sequence for IFIT2 (NM_001547.3,1260-1278).
ctttatagagggtgtaaaa

SEQ ID NO: 330370 - DNA, 19 bp, Homo sapiens
  siRNA target sequence for IFIT2 (NM_001547.3,1333-1351).
gccaaaatgcgactttcta

SEQ ID NO: 330371 - DNA, 19 bp, Homo sapiens
  siRNA target sequence for IFIT2 (NM_001547.3,1341-1359).
gcgactttctaaaaatgga

SEQ ID NO: 330372 - DNA, 19 bp, Homo sapiens
  siRNA target sequence for IFIT2 (NM_001547.3,1377-1395).
gcatgtcttggcattcctt

SEQ ID NO: 330373 - DNA, 19 bp, Homo sapiens
  siRNA target sequence for ARL2 (NM_001667.1,100-118).
caaccatcctgaagaagtt

SEQ ID NO: 330374 - DNA, 19 bp, Homo sapiens
  siRNA target sequence for ARL2 (NM_001667.1,147-165).
ccaacgctgggcttcaaca

SEQ ID NO: 330375 - DNA, 19 bp, Homo sapiens
  siRNA target sequence for ARL2 (NM_001667.1,361-379).
gagcaaccctcctcatctt

SEQ ID NO: 330376 - DNA, 19 bp, Homo sapiens
  siRNA target sequence for ATP1B2 (NM_001678.2,477-495).
ccgaggacgcaccagttta

SEQ ID NO: 330377 - DNA, 19 bp, Homo sapiens
  siRNA target sequence for ATP1B2 (NM_001678.2,478-496).
cgaggacgcaccagtttat

SEQ ID NO: 330378 - DNA, 19 bp, Homo sapiens
  siRNA target sequence for ATP1B2 (NM_001678.2,508-526).
ggaccagctgggcctttat

SEQ ID NO: 330379 - DNA, 19 bp, Homo sapiens
  siRNA target sequence for ATP1B2 (NM_001678.2,639-657).
gccacaccgggcttgatga

SEQ ID NO: 330380 - DNA, 19 bp, Homo sapiens
  siRNA target sequence for ATP1B2 (NM_001678.2,641-659).
cacaccgggcttgatgatt

SEQ ID NO: 330381 - DNA, 19 bp, Homo sapiens
  siRNA target sequence for ATP1B2 (NM_001678.2,670-688).
ctgagaaccttgatgtcat

SEQ ID NO: 330382 - DNA, 19 bp, Homo sapiens
  siRNA target sequence for ATP1B2 (NM_001678.2,812-830).
cgaacagccagataatgga

SEQ ID NO: 330383 - DNA, 19 bp, Homo sapiens
  siRNA target sequence for ATP1B2 (NM_001678.2,900-918).
gactccacccactatggtt

SEQ ID NO: 330384 - DNA, 19 bp, Homo sapiens
  siRNA target sequence for ATP1B2 (NM_001678.2,930-948).
cagccctgtgtcttcatca

SEQ ID NO: 330385 - DNA, 19 bp, Homo sapiens
  siRNA target sequence for ATP1B2 (NM_001678.2,1069-1087).
gcaacatcgacctcatgta

SEQ ID NO: 330386 - DNA, 19 bp, Homo sapiens
  siRNA target sequence for ATP2B4 (NM_001684.2,1185-1203).
gactttggctgcacagtaa

SEQ ID NO: 330387 - DNA, 19 bp, Homo sapiens
  siRNA target sequence for ATP2B4 (NM_001684.2,1243-1261).
cactgacccagattaatgt

SEQ ID NO: 330388 - DNA, 19 bp, Homo sapiens
  siRNA target sequence for ATP2B4 (NM_001684.2,1284-1302).
ctctgcagtagactgaaaa

SEQ ID NO: 330389 - DNA, 19 bp, Homo sapiens
  siRNA target sequence for ATP2B4 (NM_001684.2,1335-1353).
gcagatctggagaaacgta

SEQ ID NO: 330390 - DNA, 19 bp, Homo sapiens
  siRNA target sequence for ATP2B4 (NM_001684.2,1529-1547).
cgcaactaccccagaagat

SEQ ID NO: 330391 - DNA, 19 bp, Homo sapiens
  siRNA target sequence for ATP2B4 (NM_001684.2,1575-1593).
gagggggcagccatccttt

SEQ ID NO: 330392 - DNA, 19 bp, Homo sapiens
  siRNA target sequence for ATP2B4 (NM_001684.2,1580-1598).
ggcagccatccttttctca

SEQ ID NO: 330393 - DNA, 19 bp, Homo sapiens
  siRNA target sequence for ATP2B4 (NM_001684.2,1613-1631).
gttagtgactgcctttaat

SEQ ID NO: 330394 - DNA, 19 bp, Homo sapiens
  siRNA target sequence for ATP2B4 (NM_001684.2,1617-1635).
gtgactgcctttaatgatt

SEQ ID NO: 330395 - DNA, 19 bp, Homo sapiens
  siRNA target sequence for ATP2B4 (NM_001684.2,1750-1768).
gtgatattgcccaagtcaa

SEQ ID NO: 330396 - DNA, 19 bp, Homo sapiens
  siRNA target sequence for ATP2B4 (NM_001684.2,1799-1817).
cctgatccaagggaatgat

SEQ ID NO: 330397 - DNA, 19 bp, Homo sapiens
  siRNA target sequence for ATP2B4 (NM_001684.2,1810-1828).
ggaatgatctgaagattga

SEQ ID NO: 330398 - DNA, 19 bp, Homo sapiens
  siRNA target sequence for ATP2B4 (NM_001684.2,1811-1829).
gaatgatctgaagattgat

SEQ ID NO: 330399 - DNA, 19 bp, Homo sapiens
  siRNA target sequence for ATP2B4 (NM_001684.2,1846-1864).
gggaatctgaccatgtcaa

SEQ ID NO: 330400 - DNA, 19 bp, Homo sapiens
  siRNA target sequence for ATP2B4 (NM_001684.2,1978-1996).
ctctcttgggggtcaatga

SEQ ID NO: 330401 - DNA, 19 bp, Homo sapiens
  siRNA target sequence for ATP2B4 (NM_001684.2,2194-2212).
ctcgcctggctgttcagat

SEQ ID NO: 330402 - DNA, 19 bp, Homo sapiens
  siRNA target sequence for ATP2B4 (NM_001684.2,2271-2289).
gtgattgacaactttgtga

SEQ ID NO: 330403 - DNA, 19 bp, Homo sapiens
  siRNA target sequence for ATP2B4 (NM_001684.2,2313-2331).
gagtgtactcccatctaca

SEQ ID NO: 330404 - DNA, 19 bp, Homo sapiens
  siRNA target sequence for ATP2B4 (NM_001684.2,2549-2567).
gactgtggtacaagcttat

SEQ ID NO: 330405 - DNA, 19 bp, Homo sapiens
  siRNA target sequence for ATP2B4 (NM_001684.2,2575-2593).
gcatccattaccgtcaaat

SEQ ID NO: 330406 - DNA, 19 bp, Homo sapiens
  siRNA target sequence for ATP2B4 (NM_001684.2,2637-2655).
gtcaatggcatttctatca

SEQ ID NO: 330407 - DNA, 19 bp, Homo sapiens
  siRNA target sequence for ATP2B4 (NM_001684.2,2662-2680).
cttatacctccaagattct

SEQ ID NO: 330408 - DNA, 19 bp, Homo sapiens
  siRNA target sequence for ATP2B4 (NM_001684.2,2746-2764).
gctttgtcacagatctgaa

SEQ ID NO: 330409 - DNA, 19 bp, Homo sapiens
  siRNA target sequence for ATP2B4 (NM_001684.2,2874-2892).
ggtggcttccgtatgtaca

SEQ ID NO: 330410 - DNA, 19 bp, Homo sapiens
  siRNA target sequence for ATP2B4 (NM_001684.2,2912-2930).
catcttgcgcaagtgtaat

SEQ ID NO: 330411 - DNA, 19 bp, Homo sapiens
  siRNA target sequence for ATP2B4 (NM_001684.2,2915-2933).
cttgcgcaagtgtaatcga

SEQ ID NO: 330412 - DNA, 19 bp, Homo sapiens
  siRNA target sequence for ATP2B4 (NM_001684.2,3030-3048).
cggactatctgcatagctt

SEQ ID NO: 330413 - DNA, 19 bp, Homo sapiens
  siRNA target sequence for ATP2B4 (NM_001684.2,3031-3049).
ggactatctgcatagctta

SEQ ID NO: 330414 - DNA, 19 bp, Homo sapiens
  siRNA target sequence for ATP2B4 (NM_001684.2,3179-3197).
caaacaagctggcattact

SEQ ID NO: 330415 - DNA, 19 bp, Homo sapiens
  siRNA target sequence for ATP2B4 (NM_001684.2,3330-3348).
ggcgaggtagagcaagaaa

SEQ ID NO: 330416 - DNA, 19 bp, Homo sapiens
  siRNA target sequence for ATP2B4 (NM_001684.2,3331-3349).
gcgaggtagagcaagaaaa

SEQ ID NO: 330417 - DNA, 19 bp, Homo sapiens
  siRNA target sequence for ATP2B4 (NM_001684.2,3413-3431).
cctggtgaaaggcataatt

SEQ ID NO: 330418 - DNA, 19 bp, Homo sapiens
  siRNA target sequence for ATP2B4 (NM_001684.2,3808-3826).
ctacggaatctctgttgaa

SEQ ID NO: 330419 - DNA, 19 bp, Homo sapiens
  siRNA target sequence for ATP2B4 (NM_001684.2,3855-3873).
ctgatctcacgcactatga

SEQ ID NO: 330420 - DNA, 19 bp, Homo sapiens
  siRNA target sequence for ATP2B4 (NM_001684.2,3927-3945).
gtctttgcgggtgagaaat

SEQ ID NO: 330421 - DNA, 19 bp, Homo sapiens
  siRNA target sequence for ATP2B4 (NM_001684.2,3968-3986).
gaaggcacctctacattca

SEQ ID NO: 330422 - DNA, 19 bp, Homo sapiens
  siRNA target sequence for ATP2B4 (NM_001684.2,3991-4009).
ccagccagcactataccat

SEQ ID NO: 330423 - DNA, 19 bp, Homo sapiens
  siRNA target sequence for ATP2B4 (NM_001684.2,3995-4013).
ccagcactataccattgtt

SEQ ID NO: 330424 - DNA, 19 bp, Homo sapiens
  siRNA target sequence for ATP2B4 (NM_001684.2,3996-4014).
cagcactataccattgttt

SEQ ID NO: 330425 - DNA, 19 bp, Homo sapiens
  siRNA target sequence for ATP2B4 (NM_001684.2,3998-4016).
gcactataccattgttttt

SEQ ID NO: 330426 - DNA, 19 bp, Homo sapiens
  siRNA target sequence for ATP2B4 (NM_001684.2,4071-4089).
ggagagaagaacgtctttt

SEQ ID NO: 330427 - DNA, 19 bp, Homo sapiens
  siRNA target sequence for ATP2B4 (NM_001684.2,4135-4153).
cattcatctgccagatttt

SEQ ID NO: 330428 - DNA, 19 bp, Homo sapiens
  siRNA target sequence for ATP2B4 (NM_001684.2,4167-4185).
gggggtaaacccttcagtt

SEQ ID NO: 330429 - DNA, 19 bp, Homo sapiens
  siRNA target sequence for ATP2B4 (NM_001684.2,4210-4228).
ggctgtggtgtctcttcat

SEQ ID NO: 330430 - DNA, 19 bp, Homo sapiens
  siRNA target sequence for ATP2B4 (NM_001684.2,4256-4274).
gttcatctccgcaatacct

SEQ ID NO: 330431 - DNA, 19 bp, Homo sapiens
  siRNA target sequence for ATP2B4 (NM_001684.2,4273-4291).
ctacccgatccctgaagtt

SEQ ID NO: 330432 - DNA, 19 bp, Homo sapiens
  siRNA target sequence for ATP2B4 (NM_001684.2,4342-4360).
ccgagggactggatgagat

SEQ ID NO: 330433 - DNA, 19 bp, Homo sapiens
  siRNA target sequence for ATP2B4 (NM_001684.2,4420-4438).
gtatccagactcagatcaa

SEQ ID NO: 330434 - DNA, 19 bp, Homo sapiens
  siRNA target sequence for ATP2B4 (NM_001684.2,4443-4461).
gtcaaagcgttccatagtt

SEQ ID NO: 330435 - DNA, 19 bp, Homo sapiens
  siRNA target sequence for ATP2B4 (NM_001684.2,4459-4477).
gttccctccacgaaagcat

SEQ ID NO: 330436 - DNA, 19 bp, Homo sapiens
  siRNA target sequence for ATP2B4 (NM_001684.2,4643-4661).
cactccatatgccaataca

SEQ ID NO: 330437 - DNA, 19 bp, Homo sapiens
  siRNA target sequence for ATP2B4 (NM_001684.2,4645-4663).
ctccatatgccaatacaaa

SEQ ID NO: 330438 - DNA, 19 bp, Homo sapiens
  siRNA target sequence for ATP2B4 (NM_001684.2,4721-4739).
gagcctagagacatcagtt

SEQ ID NO: 330439 - DNA, 19 bp, Homo sapiens
  siRNA target sequence for CHML (NM_001821.1,188-206).
gtttgatgtggttataata

SEQ ID NO: 330440 - DNA, 19 bp, Homo sapiens
  siRNA target sequence for CHML (NM_001821.1,334-352).
cctggttgaaggagtatca

SEQ ID NO: 330441 - DNA, 19 bp, Homo sapiens
  siRNA target sequence for CHML (NM_001821.1,429-447).
cttcgcaagaaggatgaaa

SEQ ID NO: 330442 - DNA, 19 bp, Homo sapiens
  siRNA target sequence for CHML (NM_001821.1,432-450).
cgcaagaaggatgaaacta

SEQ ID NO: 330443 - DNA, 19 bp, Homo sapiens
  siRNA target sequence for CHML (NM_001821.1,433-451).
gcaagaaggatgaaactat

SEQ ID NO: 330444 - DNA, 19 bp, Homo sapiens
  siRNA target sequence for CHML (NM_001821.1,614-632).
cgacgaaatgcctgcaaaa

SEQ ID NO: 330445 - DNA, 19 bp, Homo sapiens
  siRNA target sequence for CHML (NM_001821.1,633-651).
cacactcagaaaagtgata

SEQ ID NO: 330446 - DNA, 19 bp, Homo sapiens
  siRNA target sequence for CHML (NM_001821.1,635-653).
cactcagaaaagtgataca

SEQ ID NO: 330447 - DNA, 19 bp, Homo sapiens
  siRNA target sequence for CHML (NM_001821.1,646-664).
gtgatacagagatttcact

SEQ ID NO: 330448 - DNA, 19 bp, Homo sapiens
  siRNA target sequence for CHML (NM_001821.1,652-670).
cagagatttcactagaagt

SEQ ID NO: 330449 - DNA, 19 bp, Homo sapiens
  siRNA target sequence for CHML (NM_001821.1,654-672).
gagatttcactagaagtaa

SEQ ID NO: 330450 - DNA, 19 bp, Homo sapiens
  siRNA target sequence for CHML (NM_001821.1,656-674).
gatttcactagaagtaact

SEQ ID NO: 330451 - DNA, 19 bp, Homo sapiens
  siRNA target sequence for CHML (NM_001821.1,766-784).
gcaaatctacagtagaaga

SEQ ID NO: 330452 - DNA, 19 bp, Homo sapiens
  siRNA target sequence for CHML (NM_001821.1,788-806).
ggccgatgaaccaattaga

SEQ ID NO: 330453 - DNA, 19 bp, Homo sapiens
  siRNA target sequence for CHML (NM_001821.1,789-807).
gccgatgaaccaattagaa

SEQ ID NO: 330454 - DNA, 19 bp, Homo sapiens
  siRNA target sequence for CHML (NM_001821.1,795-813).
gaaccaattagaaatagga

SEQ ID NO: 330455 - DNA, 19 bp, Homo sapiens
  siRNA target sequence for CHML (NM_001821.1,812-830).
gattacttactctcaaata

SEQ ID NO: 330456 - DNA, 19 bp, Homo sapiens
  siRNA target sequence for CHML (NM_001821.1,916-934).
cagatgttagtcgttatgt

SEQ ID NO: 330457 - DNA, 19 bp, Homo sapiens
  siRNA target sequence for CHML (NM_001821.1,921-939).
gttagtcgttatgtagaat

SEQ ID NO: 330458 - DNA, 19 bp, Homo sapiens
  siRNA target sequence for CHML (NM_001821.1,1026-1044).
gaactcaccatggttgaaa

SEQ ID NO: 330459 - DNA, 19 bp, Homo sapiens
  siRNA target sequence for CHML (NM_001821.1,1038-1056).
gttgaaaagaggatgctaa

SEQ ID NO: 330460 - DNA, 19 bp, Homo sapiens
  siRNA target sequence for CHML (NM_001821.1,1075-1093).
gtttagagtatgaacaaca

SEQ ID NO: 330461 - DNA, 19 bp, Homo sapiens
  siRNA target sequence for CHML (NM_001821.1,1096-1114).
ctgatgaataccaagcttt

SEQ ID NO: 330462 - DNA, 19 bp, Homo sapiens
  siRNA target sequence for CHML (NM_001821.1,1110-1128).
gctttcaggcagtgttcat

SEQ ID NO: 330463 - DNA, 19 bp, Homo sapiens
  siRNA target sequence for CHML (NM_001821.1,1162-1180).
ccaaccttcaacattttgt

SEQ ID NO: 330464 - DNA, 19 bp, Homo sapiens
  siRNA target sequence for CHML (NM_001821.1,1179-1197).
gtactgcactcaattgcaa

SEQ ID NO: 330465 - DNA, 19 bp, Homo sapiens
  siRNA target sequence for CHML (NM_001821.1,1210-1228).
catcttgcactacaataga

SEQ ID NO: 330466 - DNA, 19 bp, Homo sapiens
  siRNA target sequence for CHML (NM_001821.1,1219-1237).
ctacaatagatggtcttaa

SEQ ID NO: 330467 - DNA, 19 bp, Homo sapiens
  siRNA target sequence for CHML (NM_001821.1,1230-1248).
ggtcttaacgcaactaaaa

SEQ ID NO: 330468 - DNA, 19 bp, Homo sapiens
  siRNA target sequence for CHML (NM_001821.1,1231-1249).
gtcttaacgcaactaaaaa

SEQ ID NO: 330469 - DNA, 19 bp, Homo sapiens
  siRNA target sequence for CHML (NM_001821.1,1233-1251).
cttaacgcaactaaaaact

SEQ ID NO: 330470 - DNA, 19 bp, Homo sapiens
  siRNA target sequence for CHML (NM_001821.1,1275-1293).
ggcaacaccccctttttat

SEQ ID NO: 330471 - DNA, 19 bp, Homo sapiens
  siRNA target sequence for CHML (NM_001821.1,1301-1319).
gtatggccaaggagaaatt

SEQ ID NO: 330472 - DNA, 19 bp, Homo sapiens
  siRNA target sequence for CHML (NM_001821.1,1366-1384).
gtcttcgtcataaagtaca

SEQ ID NO: 330473 - DNA, 19 bp, Homo sapiens
  siRNA target sequence for CHML (NM_001821.1,1368-1386).
cttcgtcataaagtacaat

SEQ ID NO: 330474 - DNA, 19 bp, Homo sapiens
  siRNA target sequence for CHML (NM_001821.1,1410-1428).
ggacgatgtaaagcaatta

SEQ ID NO: 330475 - DNA, 19 bp, Homo sapiens
  siRNA target sequence for CHML (NM_001821.1,1440-1458).
ggtcaaagaataaatgcta

SEQ ID NO: 330476 - DNA, 19 bp, Homo sapiens
  siRNA target sequence for CHML (NM_001821.1,1470-1488).
gtggaagacagttaccttt

SEQ ID NO: 330477 - DNA, 19 bp, Homo sapiens
  siRNA target sequence for CHML (NM_001821.1,1501-1519).
gctcaaatgtgcagtataa

SEQ ID NO: 330478 - DNA, 19 bp, Homo sapiens
  siRNA target sequence for CHML (NM_001821.1,1526-1544).
ctctagggcagtactcatt

SEQ ID NO: 330479 - DNA, 19 bp, Homo sapiens
  siRNA target sequence for CHML (NM_001821.1,1548-1566).
gatcagtctatactaaaga

SEQ ID NO: 330480 - DNA, 19 bp, Homo sapiens
  siRNA target sequence for CHML (NM_001821.1,1578-1596).
cagcagacttccattctga

SEQ ID NO: 330481 - DNA, 19 bp, Homo sapiens
  siRNA target sequence for CHML (NM_001821.1,1627-1645).
ctgtacgggtcacagaatt

SEQ ID NO: 330482 - DNA, 19 bp, Homo sapiens
  siRNA target sequence for CHML (NM_001821.1,1629-1647).
gtacgggtcacagaattat

SEQ ID NO: 330483 - DNA, 19 bp, Homo sapiens
  siRNA target sequence for CHML (NM_001821.1,1632-1650).
cgggtcacagaattatgtt

SEQ ID NO: 330484 - DNA, 19 bp, Homo sapiens
  siRNA target sequence for CHML (NM_001821.1,1634-1652).
ggtcacagaattatgttct

SEQ ID NO: 330485 - DNA, 19 bp, Homo sapiens
  siRNA target sequence for CHML (NM_001821.1,1674-1692).
gacacctatctggtacatt

SEQ ID NO: 330486 - DNA, 19 bp, Homo sapiens
  siRNA target sequence for CHML (NM_001821.1,1685-1703).
ggtacatttgacatgttca

SEQ ID NO: 330487 - DNA, 19 bp, Homo sapiens
  siRNA target sequence for CHML (NM_001821.1,1686-1704).
gtacatttgacatgttcat

SEQ ID NO: 330488 - DNA, 19 bp, Homo sapiens
  siRNA target sequence for CHML (NM_001821.1,1754-1772).
cactccgtatactgaaaca

SEQ ID NO: 330489 - DNA, 19 bp, Homo sapiens
  siRNA target sequence for CHML (NM_001821.1,1756-1774).
ctccgtatactgaaacaga

SEQ ID NO: 330490 - DNA, 19 bp, Homo sapiens
  siRNA target sequence for CHML (NM_001821.1,1760-1778).
gtatactgaaacagaaata

SEQ ID NO: 330491 - DNA, 19 bp, Homo sapiens
  siRNA target sequence for CHML (NM_001821.1,1850-1868).
cagcagaagctcgtataat

SEQ ID NO: 330492 - DNA, 19 bp, Homo sapiens
  siRNA target sequence for CHML (NM_001821.1,1869-1887).
ggcttgccttccaatgttt

SEQ ID NO: 330493 - DNA, 19 bp, Homo sapiens
  siRNA target sequence for CHML (NM_001821.1,1958-1976).
ggagatctttccaactgaa

SEQ ID NO: 330494 - DNA, 19 bp, Homo sapiens
  siRNA target sequence for SLC31A1 (NM_001859.2,255-273).
gcctatgaccttctacttt

SEQ ID NO: 330495 - DNA, 19 bp, Homo sapiens
  siRNA target sequence for SLC31A1 (NM_001859.2,282-300).
gaatgtggaactactgttt

SEQ ID NO: 330496 - DNA, 19 bp, Homo sapiens
  siRNA target sequence for SLC31A1 (NM_001859.2,303-321).
cggtttggtgatcaataca

SEQ ID NO: 330497 - DNA, 19 bp, Homo sapiens
  siRNA target sequence for SLC31A1 (NM_001859.2,350-368).
cagtgtttttactagcaat

SEQ ID NO: 330498 - DNA, 19 bp, Homo sapiens
  siRNA target sequence for SLC31A1 (NM_001859.2,372-390).
ctatgaaggactcaagata

SEQ ID NO: 330499 - DNA, 19 bp, Homo sapiens
  siRNA target sequence for SLC31A1 (NM_001859.2,399-417).
gagcctgctgcgtaagtca

SEQ ID NO: 330500 - DNA, 19 bp, Homo sapiens
  siRNA target sequence for SLC31A1 (NM_001859.2,458-476).
caaatggaaccatccttat

SEQ ID NO: 330501 - DNA, 19 bp, Homo sapiens
  siRNA target sequence for CRTL1 (NM_001884.2,166-184).
catctttcagacaactata

SEQ ID NO: 330502 - DNA, 19 bp, Homo sapiens
  siRNA target sequence for CRTL1 (NM_001884.2,250-268).
gagcaagccaaggtgtttt

SEQ ID NO: 330503 - DNA, 19 bp, Homo sapiens
  siRNA target sequence for CRTL1 (NM_001884.2,286-304).
gttacactgccatgtaaat

SEQ ID NO: 330504 - DNA, 19 bp, Homo sapiens
  siRNA target sequence for CRTL1 (NM_001884.2,340-358).
cataaaatccgaattaagt

SEQ ID NO: 330505 - DNA, 19 bp, Homo sapiens
  siRNA target sequence for CRTL1 (NM_001884.2,413-431).
gataccacaaaaaaaccta

SEQ ID NO: 330506 - DNA, 19 bp, Homo sapiens
  siRNA target sequence for CRTL1 (NM_001884.2,438-456).
ctaccagggtagagtgttt

SEQ ID NO: 330507 - DNA, 19 bp, Homo sapiens
  siRNA target sequence for CRTL1 (NM_001884.2,499-517).
gacctcactctggaagatt

SEQ ID NO: 330508 - DNA, 19 bp, Homo sapiens
  siRNA target sequence for CRTL1 (NM_001884.2,590-608).
gtgtggtattcccttactt

SEQ ID NO: 330509 - DNA, 19 bp, Homo sapiens
  siRNA target sequence for CRTL1 (NM_001884.2,621-639).
gcgctacaatctcaatttt

SEQ ID NO: 330510 - DNA, 19 bp, Homo sapiens
  siRNA target sequence for CRTL1 (NM_001884.2,760-778).
gtgcaatatcccatcacaa

SEQ ID NO: 330511 - DNA, 19 bp, Homo sapiens
  siRNA target sequence for CRTL1 (NM_001884.2,828-846).
ctacggattttgggataaa

SEQ ID NO: 330512 - DNA, 19 bp, Homo sapiens
  siRNA target sequence for CRTL1 (NM_001884.2,888-906).
caatggccgtttttactat

SEQ ID NO: 330513 - DNA, 19 bp, Homo sapiens
  siRNA target sequence for CRTL1 (NM_001884.2,892-910).
ggccgtttttactatctga

SEQ ID NO: 330514 - DNA, 19 bp, Homo sapiens
  siRNA target sequence for CRTL1 (NM_001884.2,893-911).
gccgtttttactatctgat

SEQ ID NO: 330515 - DNA, 19 bp, Homo sapiens
  siRNA target sequence for CRTL1 (NM_001884.2,918-936).
caccaaactgacctatgat

SEQ ID NO: 330516 - DNA, 19 bp, Homo sapiens
  siRNA target sequence for CRTL1 (NM_001884.2,920-938).
ccaaactgacctatgatga

SEQ ID NO: 330517 - DNA, 19 bp, Homo sapiens
  siRNA target sequence for CRTL1 (NM_001884.2,945-963).
gcaagcttgtctcaatgat

SEQ ID NO: 330518 - DNA, 19 bp, Homo sapiens
  siRNA target sequence for CRTL1 (NM_001884.2,1119-1137).
cgtgggtttcccagataaa

SEQ ID NO: 330519 - DNA, 19 bp, Homo sapiens
  siRNA target sequence for CTNNB1 (NM_001904.2,386-404).
cctcccaagtcctgtatga

SEQ ID NO: 330520 - DNA, 19 bp, Homo sapiens
  siRNA target sequence for CTNNB1 (NM_001904.2,405-423).
gtgggaacagggattttct

SEQ ID NO: 330521 - DNA, 19 bp, Homo sapiens
  siRNA target sequence for CTNNB1 (NM_001904.2,407-425).
gggaacagggattttctca

SEQ ID NO: 330522 - DNA, 19 bp, Homo sapiens
  siRNA target sequence for CTNNB1 (NM_001904.2,428-446).
ccttcactcaagaacaagt

SEQ ID NO: 330523 - DNA, 19 bp, Homo sapiens
  siRNA target sequence for CTNNB1 (NM_001904.2,488-506).
gggtacgagctgctatgtt

SEQ ID NO: 330524 - DNA, 19 bp, Homo sapiens
  siRNA target sequence for CTNNB1 (NM_001904.2,504-522).
gttccctgagacattagat

SEQ ID NO: 330525 - DNA, 19 bp, Homo sapiens
  siRNA target sequence for CTNNB1 (NM_001904.2,537-555).
cccatctacacagtttgat

SEQ ID NO: 330526 - DNA, 19 bp, Homo sapiens
  siRNA target sequence for CTNNB1 (NM_001904.2,603-621).
gctgaaacatgcagttgta

SEQ ID NO: 330527 - DNA, 19 bp, Homo sapiens
  siRNA target sequence for CTNNB1 (NM_001904.2,610-628).
catgcagttgtaaacttga

SEQ ID NO: 330528 - DNA, 19 bp, Homo sapiens
  siRNA target sequence for CTNNB1 (NM_001904.2,616-634).
gttgtaaacttgattaact

SEQ ID NO: 330529 - DNA, 19 bp, Homo sapiens
  siRNA target sequence for CTNNB1 (NM_001904.2,624-642).
cttgattaactatcaagat

SEQ ID NO: 330530 - DNA, 19 bp, Homo sapiens
  siRNA target sequence for CTNNB1 (NM_001904.2,627-645).
gattaactatcaagatgat

SEQ ID NO: 330531 - DNA, 19 bp, Homo sapiens
  siRNA target sequence for CTNNB1 (NM_001904.2,789-807).
gatggtgtctgctattgta

SEQ ID NO: 330532 - DNA, 19 bp, Homo sapiens
  siRNA target sequence for CTNNB1 (NM_001904.2,819-837).
gaatacaaatgatgtagaa

SEQ ID NO: 330533 - DNA, 19 bp, Homo sapiens
  siRNA target sequence for CTNNB1 (NM_001904.2,944-962).
gttcaccagtggattctgt

SEQ ID NO: 330534 - DNA, 19 bp, Homo sapiens
  siRNA target sequence for CTNNB1 (NM_001904.2,966-984).
gttttatgccattacaact

SEQ ID NO: 330535 - DNA, 19 bp, Homo sapiens
  siRNA target sequence for CTNNB1 (NM_001904.2,1100-1118).
cgacagactgccttcaaat

SEQ ID NO: 330536 - DNA, 19 bp, Homo sapiens
  siRNA target sequence for CTNNB1 (NM_001904.2,1101-1119).
gacagactgccttcaaatt

SEQ ID NO: 330537 - DNA, 19 bp, Homo sapiens
  siRNA target sequence for CTNNB1 (NM_001904.2,1163-1181).
gtggtggaccccaagcttt

SEQ ID NO: 330538 - DNA, 19 bp, Homo sapiens
  siRNA target sequence for CTNNB1 (NM_001904.2,1168-1186).
ggaccccaagctttagtaa

SEQ ID NO: 330539 - DNA, 19 bp, Homo sapiens
  siRNA target sequence for CTNNB1 (NM_001904.2,1171-1189).
ccccaagctttagtaaata

SEQ ID NO: 330540 - DNA, 19 bp, Homo sapiens
  siRNA target sequence for CTNNB1 (NM_001904.2,1172-1190).
cccaagctttagtaaatat

SEQ ID NO: 330541 - DNA, 19 bp, Homo sapiens
  siRNA target sequence for CTNNB1 (NM_001904.2,1194-1212).
gaggacctatacttacgaa

SEQ ID NO: 330542 - DNA, 19 bp, Homo sapiens
  siRNA target sequence for CTNNB1 (NM_001904.2,1199-1217).
cctatacttacgaaaaact

SEQ ID NO: 330543 - DNA, 19 bp, Homo sapiens
  siRNA target sequence for CTNNB1 (NM_001904.2,1249-1267).
ctatctgtctgctctagta

SEQ ID NO: 330544 - DNA, 19 bp, Homo sapiens
  siRNA target sequence for CTNNB1 (NM_001904.2,1265-1283).
gtaataagccggctattgt

SEQ ID NO: 330545 - DNA, 19 bp, Homo sapiens
  siRNA target sequence for CTNNB1 (NM_001904.2,1328-1346).
caagtcaacgtcttgttca

SEQ ID NO: 330546 - DNA, 19 bp, Homo sapiens
  siRNA target sequence for CTNNB1 (NM_001904.2,1376-1394).
cagatgctgcaactaaaca

SEQ ID NO: 330547 - DNA, 19 bp, Homo sapiens
  siRNA target sequence for CTNNB1 (NM_001904.2,1468-1486).
gcagctggaattctttcta

SEQ ID NO: 330548 - DNA, 19 bp, Homo sapiens
  siRNA target sequence for CTNNB1 (NM_001904.2,1488-1506).
cctcacttgcaataattat

SEQ ID NO: 330549 - DNA, 19 bp, Homo sapiens
  siRNA target sequence for CTNNB1 (NM_001904.2,1489-1507).
ctcacttgcaataattata

SEQ ID NO: 330550 - DNA, 19 bp, Homo sapiens
  siRNA target sequence for CTNNB1 (NM_001904.2,1526-1544).
gccaagtgggtggtataga

SEQ ID NO: 330551 - DNA, 19 bp, Homo sapiens
  siRNA target sequence for CTNNB1 (NM_001904.2,1734-1752).
ggctactgttggattgatt

SEQ ID NO: 330552 - DNA, 19 bp, Homo sapiens
  siRNA target sequence for CTNNB1 (NM_001904.2,1763-1781).
ccctttgtcccgcaaatca

SEQ ID NO: 330553 - DNA, 19 bp, Homo sapiens
  siRNA target sequence for CTNNB1 (NM_001904.2,1764-1782).
cctttgtcccgcaaatcat

SEQ ID NO: 330554 - DNA, 19 bp, Homo sapiens
  siRNA target sequence for CTNNB1 (NM_001904.2,1871-1889).
gtgggacacagcagcaatt

SEQ ID NO: 330555 - DNA, 19 bp, Homo sapiens
  siRNA target sequence for CTNNB1 (NM_001904.2,1874-1892).
ggacacagcagcaatttgt

SEQ ID NO: 330556 - DNA, 19 bp, Homo sapiens
  siRNA target sequence for CTNNB1 (NM_001904.2,1904-1922).
gcatggaagaaatagttga

SEQ ID NO: 330557 - DNA, 19 bp, Homo sapiens
  siRNA target sequence for CTNNB1 (NM_001904.2,1928-1946).
gtaccggagcccttcacat

SEQ ID NO: 330558 - DNA, 19 bp, Homo sapiens
  siRNA target sequence for CTNNB1 (NM_001904.2,1960-1978).
gttcacaaccgaattgtta

SEQ ID NO: 330559 - DNA, 19 bp, Homo sapiens
  siRNA target sequence for CTNNB1 (NM_001904.2,1963-1981).
cacaaccgaattgttatca

SEQ ID NO: 330560 - DNA, 19 bp, Homo sapiens
  siRNA target sequence for CTNNB1 (NM_001904.2,1975-1993).
gttatcagaggactaaata

SEQ ID NO: 330561 - DNA, 19 bp, Homo sapiens
  siRNA target sequence for CTNNB1 (NM_001904.2,1980-1998).
cagaggactaaataccatt

SEQ ID NO: 330562 - DNA, 19 bp, Homo sapiens
  siRNA target sequence for CTNNB1 (NM_001904.2,1984-2002).
ggactaaataccattccat

SEQ ID NO: 330563 - DNA, 19 bp, Homo sapiens
  siRNA target sequence for CTNNB1 (NM_001904.2,1985-2003).
gactaaataccattccatt

SEQ ID NO: 330564 - DNA, 19 bp, Homo sapiens
  siRNA target sequence for CTNNB1 (NM_001904.2,2123-2141).
ctcctctgacagagttact

SEQ ID NO: 330565 - DNA, 19 bp, Homo sapiens
  siRNA target sequence for CTNNB1 (NM_001904.2,2136-2154).
gttacttcactctaggaat

SEQ ID NO: 330566 - DNA, 19 bp, Homo sapiens
  siRNA target sequence for CTNNB1 (NM_001904.2,2269-2287).
ccaatggcttggaatgaga

SEQ ID NO: 330567 - DNA, 19 bp, Homo sapiens
  siRNA target sequence for CTNNB1 (NM_001904.2,2280-2298).
gaatgagactgctgatctt

SEQ ID NO: 330568 - DNA, 19 bp, Homo sapiens
  siRNA target sequence for CTNNB1 (NM_001904.2,2291-2309).
ctgatcttggacttgatat

SEQ ID NO: 330569 - DNA, 19 bp, Homo sapiens
  siRNA target sequence for CTNNB1 (NM_001904.2,2340-2358).
ccaggatgatcctagctat

SEQ ID NO: 330570 - DNA, 19 bp, Homo sapiens
  siRNA target sequence for FAU (NM_001997.2,312-330).
ccgcatgcttggaggtaaa

SEQ ID NO: 330571 - DNA, 19 bp, Homo sapiens
  siRNA target sequence for FAU (NM_001997.2,342-360).
cctggcccgtgctggaaaa

SEQ ID NO: 330572 - DNA, 19 bp, Homo sapiens
  siRNA target sequence for GLRA2 (NM_002063.2,537-555).
cggcagctagtgaacattt

SEQ ID NO: 330573 - DNA, 19 bp, Homo sapiens
  siRNA target sequence for GLRA2 (NM_002063.2,650-668).
gaccctatctccttcagat

SEQ ID NO: 330574 - DNA, 19 bp, Homo sapiens
  siRNA target sequence for GLRA2 (NM_002063.2,652-670).
ccctatctccttcagattt

SEQ ID NO: 330575 - DNA, 19 bp, Homo sapiens
  siRNA target sequence for GLRA2 (NM_002063.2,732-750).
ggtcctccagtaaacgtta

SEQ ID NO: 330576 - DNA, 19 bp, Homo sapiens
  siRNA target sequence for GLRA2 (NM_002063.2,741-759).
gtaaacgttacttgcaata

SEQ ID NO: 330577 - DNA, 19 bp, Homo sapiens
  siRNA target sequence for GLRA2 (NM_002063.2,800-818).
ggactaccgagtgaatatt

SEQ ID NO: 330578 - DNA, 19 bp, Homo sapiens
  siRNA target sequence for GLRA2 (NM_002063.2,801-819).
gactaccgagtgaatattt

SEQ ID NO: 330579 - DNA, 19 bp, Homo sapiens
  siRNA target sequence for GLRA2 (NM_002063.2,803-821).
ctaccgagtgaatattttt

SEQ ID NO: 330580 - DNA, 19 bp, Homo sapiens
  siRNA target sequence for GLRA2 (NM_002063.2,983-1001).
gctacggatttcgaaaaat

SEQ ID NO: 330581 - DNA, 19 bp, Homo sapiens
  siRNA target sequence for GLRA2 (NM_002063.2,1002-1020).
ggcaaagtgctctacagta

SEQ ID NO: 330582 - DNA, 19 bp, Homo sapiens
  siRNA target sequence for GLRA2 (NM_002063.2,1074-1092).
gatgtccagacctgtacaa

SEQ ID NO: 330583 - DNA, 19 bp, Homo sapiens
  siRNA target sequence for GLRA2 (NM_002063.2,1255-1273).
cctgcattgaggtcaagtt

SEQ ID NO: 330584 - DNA, 19 bp, Homo sapiens
  siRNA target sequence for GLRA2 (NM_002063.2,1258-1276).
gcattgaggtcaagtttca

SEQ ID NO: 330585 - DNA, 19 bp, Homo sapiens
  siRNA target sequence for GLRA2 (NM_002063.2,1281-1299).
gaacgccaaatgggatatt

SEQ ID NO: 330586 - DNA, 19 bp, Homo sapiens
  siRNA target sequence for GLRA2 (NM_002063.2,1284-1302).
cgccaaatgggatattatt

SEQ ID NO: 330587 - DNA, 19 bp, Homo sapiens
  siRNA target sequence for GLRA2 (NM_002063.2,1316-1334).
catcccaagcctgcttata

SEQ ID NO: 330588 - DNA, 19 bp, Homo sapiens
  siRNA target sequence for GLRA2 (NM_002063.2,1319-1337).
cccaagcctgcttatagta

SEQ ID NO: 330589 - DNA, 19 bp, Homo sapiens
  siRNA target sequence for GLRA2 (NM_002063.2,1326-1344).
ctgcttatagtaattttgt

SEQ ID NO: 330590 - DNA, 19 bp, Homo sapiens
  siRNA target sequence for GLRA2 (NM_002063.2,1398-1416).
ggcatcaccacagtcttaa

SEQ ID NO: 330591 - DNA, 19 bp, Homo sapiens
  siRNA target sequence for GLRA2 (NM_002063.2,1454-1472).
gccaaaggtctcctatgta

SEQ ID NO: 330592 - DNA, 19 bp, Homo sapiens
  siRNA target sequence for GLRA2 (NM_002063.2,1456-1474).
caaaggtctcctatgtaaa

SEQ ID NO: 330593 - DNA, 19 bp, Homo sapiens
  siRNA target sequence for GLRA2 (NM_002063.2,1495-1513).
cggtgtgccttctgtttgt

SEQ ID NO: 330594 - DNA, 19 bp, Homo sapiens
  siRNA target sequence for GLRA2 (NM_002063.2,1624-1642).
ctcgtgaaagtcgttttaa

SEQ ID NO: 330595 - DNA, 19 bp, Homo sapiens
  siRNA target sequence for GLRA2 (NM_002063.2,1626-1644).
cgtgaaagtcgttttaatt

SEQ ID NO: 330596 - DNA, 19 bp, Homo sapiens
  siRNA target sequence for GLRA2 (NM_002063.2,1766-1784).
ggaccgggcaaaaaggatt

SEQ ID NO: 330597 - DNA, 19 bp, Homo sapiens
  siRNA target sequence for GLRA2 (NM_002063.2,1856-1874).
gatcattcggcatgaagat

SEQ ID NO: 330598 - DNA, 19 bp, Homo sapiens
  siRNA target sequence for GNAQ (NM_002072.2,188-206).
gagtggcaagagtacgttt

SEQ ID NO: 330599 - DNA, 19 bp, Homo sapiens
  siRNA target sequence for GNAQ (NM_002072.2,190-208).
gtggcaagagtacgtttat

SEQ ID NO: 330600 - DNA, 19 bp, Homo sapiens
  siRNA target sequence for GNAQ (NM_002072.2,192-210).
ggcaagagtacgtttatca

SEQ ID NO: 330601 - DNA, 19 bp, Homo sapiens
  siRNA target sequence for GNAQ (NM_002072.2,193-211).
gcaagagtacgtttatcaa

SEQ ID NO: 330602 - DNA, 19 bp, Homo sapiens
  siRNA target sequence for GNAQ (NM_002072.2,227-245).
ccatgggtcaggatactct

SEQ ID NO: 330603 - DNA, 19 bp, Homo sapiens
  siRNA target sequence for GNAQ (NM_002072.2,237-255).
ggatactctgatgaagata

SEQ ID NO: 330604 - DNA, 19 bp, Homo sapiens
  siRNA target sequence for GNAQ (NM_002072.2,332-350).
caagatcccatacaagtat

SEQ ID NO: 330605 - DNA, 19 bp, Homo sapiens
  siRNA target sequence for GNAQ (NM_002072.2,362-380).
ggctcatgcacaattagtt

SEQ ID NO: 330606 - DNA, 19 bp, Homo sapiens
  siRNA target sequence for GNAQ (NM_002072.2,420-438).
ccatatgtagatgcaataa

SEQ ID NO: 330607 - DNA, 19 bp, Homo sapiens
  siRNA target sequence for GNAQ (NM_002072.2,432-450).
gcaataaagagtttatgga

SEQ ID NO: 330608 - DNA, 19 bp, Homo sapiens
  siRNA target sequence for GNAQ (NM_002072.2,433-451).
caataaagagtttatggaa

SEQ ID NO: 330609 - DNA, 19 bp, Homo sapiens
  siRNA target sequence for GNAQ (NM_002072.2,464-482).
ccaggaatgctatgataga

SEQ ID NO: 330610 - DNA, 19 bp, Homo sapiens
  siRNA target sequence for GNAQ (NM_002072.2,481-499).
gacgacgagaatatcaatt

SEQ ID NO: 330611 - DNA, 19 bp, Homo sapiens
  siRNA target sequence for GNAQ (NM_002072.2,483-501).
cgacgagaatatcaattat

SEQ ID NO: 330612 - DNA, 19 bp, Homo sapiens
  siRNA target sequence for GNAQ (NM_002072.2,487-505).
gagaatatcaattatctga

SEQ ID NO: 330613 - DNA, 19 bp, Homo sapiens
  siRNA target sequence for GNAQ (NM_002072.2,619-637).
cctttgacttacaaagtgt

SEQ ID NO: 330614 - DNA, 19 bp, Homo sapiens
  siRNA target sequence for GNAQ (NM_002072.2,713-731).
ctctatcatgtttctagta

SEQ ID NO: 330615 - DNA, 19 bp, Homo sapiens
  siRNA target sequence for GNAQ (NM_002072.2,733-751).
cgcttagtgaatatgatca

SEQ ID NO: 330616 - DNA, 19 bp, Homo sapiens
  siRNA target sequence for GNAQ (NM_002072.2,794-812).
caaggctctctttagaaca

SEQ ID NO: 330617 - DNA, 19 bp, Homo sapiens
  siRNA target sequence for GNAQ (NM_002072.2,797-815).
ggctctctttagaacaatt

SEQ ID NO: 330618 - DNA, 19 bp, Homo sapiens
  siRNA target sequence for GNAQ (NM_002072.2,841-859).
cctcggttattctgttctt

SEQ ID NO: 330619 - DNA, 19 bp, Homo sapiens
  siRNA target sequence for GNAQ (NM_002072.2,844-862).
cggttattctgttcttaaa

SEQ ID NO: 330620 - DNA, 19 bp, Homo sapiens
  siRNA target sequence for GNAQ (NM_002072.2,898-916).
cccatctagtcgactactt

SEQ ID NO: 330621 - DNA, 19 bp, Homo sapiens
  siRNA target sequence for GNAQ (NM_002072.2,946-964).
cccaggcagcccgagaatt

SEQ ID NO: 330622 - DNA, 19 bp, Homo sapiens
  siRNA target sequence for GNAQ (NM_002072.2,948-966).
caggcagcccgagaattca

SEQ ID NO: 330623 - DNA, 19 bp, Homo sapiens
  siRNA target sequence for GNAQ (NM_002072.2,950-968).
ggcagcccgagaattcatt

SEQ ID NO: 330624 - DNA, 19 bp, Homo sapiens
  siRNA target sequence for GNAQ (NM_002072.2,996-1014).
gacagtgacaaaattatct

SEQ ID NO: 330625 - DNA, 19 bp, Homo sapiens
  siRNA target sequence for HLA-DRB5 (NM_002125.3,113-131).
cttgcagcaggataagtat

SEQ ID NO: 330626 - DNA, 19 bp, Homo sapiens
  siRNA target sequence for HLA-DRB5 (NM_002125.3,117-135).
cagcaggataagtatgagt

SEQ ID NO: 330627 - DNA, 19 bp, Homo sapiens
  siRNA target sequence for HLA-DRB5 (NM_002125.3,123-141).
gataagtatgagtgtcatt

SEQ ID NO: 330628 - DNA, 19 bp, Homo sapiens
  siRNA target sequence for HLA-DRB5 (NM_002125.3,171-189).
ctgcacagagacatctata

SEQ ID NO: 330629 - DNA, 19 bp, Homo sapiens
  siRNA target sequence for ITGAV (NM_002210.2,415-433).
gcttcgccgtggatttctt

SEQ ID NO: 330630 - DNA, 19 bp, Homo sapiens
  siRNA target sequence for ITGAV (NM_002210.2,443-461).
cgcgtcttcccggatgttt

SEQ ID NO: 330631 - DNA, 19 bp, Homo sapiens
  siRNA target sequence for ITGAV (NM_002210.2,445-463).
cgtcttcccggatgtttct

SEQ ID NO: 330632 - DNA, 19 bp, Homo sapiens
  siRNA target sequence for ITGAV (NM_002210.2,517-535).
ggcaggtcctcaaatgtga

SEQ ID NO: 330633 - DNA, 19 bp, Homo sapiens
  siRNA target sequence for ITGAV (NM_002210.2,551-569).
ccggtgccagccaattgaa

SEQ ID NO: 330634 - DNA, 19 bp, Homo sapiens
  siRNA target sequence for ITGAV (NM_002210.2,552-570).
cggtgccagccaattgaat

SEQ ID NO: 330635 - DNA, 19 bp, Homo sapiens
  siRNA target sequence for ITGAV (NM_002210.2,553-571).
ggtgccagccaattgaatt

SEQ ID NO: 330636 - DNA, 19 bp, Homo sapiens
  siRNA target sequence for ITGAV (NM_002210.2,554-572).
gtgccagccaattgaattt

SEQ ID NO: 330637 - DNA, 19 bp, Homo sapiens
  siRNA target sequence for ITGAV (NM_002210.2,557-575).
ccagccaattgaatttgat

SEQ ID NO: 330638 - DNA, 19 bp, Homo sapiens
  siRNA target sequence for ITGAV (NM_002210.2,599-617).
caaggatgatccattggaa

SEQ ID NO: 330639 - DNA, 19 bp, Homo sapiens
  siRNA target sequence for ITGAV (NM_002210.2,650-668).
gaggtcgaaacaggataaa

SEQ ID NO: 330640 - DNA, 19 bp, Homo sapiens
  siRNA target sequence for ITGAV (NM_002210.2,652-670).
ggtcgaaacaggataaaat

SEQ ID NO: 330641 - DNA, 19 bp, Homo sapiens
  siRNA target sequence for ITGAV (NM_002210.2,653-671).
gtcgaaacaggataaaatt

SEQ ID NO: 330642 - DNA, 19 bp, Homo sapiens
  siRNA target sequence for ITGAV (NM_002210.2,697-715).
ggagaactgagatgaaaca

SEQ ID NO: 330643 - DNA, 19 bp, Homo sapiens
  siRNA target sequence for ITGAV (NM_002210.2,725-743).
gcctgttggaacatgcttt

SEQ ID NO: 330644 - DNA, 19 bp, Homo sapiens
  siRNA target sequence for ITGAV (NM_002210.2,768-786).
gagtatgctccatgtagat

SEQ ID NO: 330645 - DNA, 19 bp, Homo sapiens
  siRNA target sequence for ITGAV (NM_002210.2,770-788).
gtatgctccatgtagatca

SEQ ID NO: 330646 - DNA, 19 bp, Homo sapiens
  siRNA target sequence for ITGAV (NM_002210.2,777-795).
ccatgtagatcacaagata

SEQ ID NO: 330647 - DNA, 19 bp, Homo sapiens
  siRNA target sequence for ITGAV (NM_002210.2,801-819).
gctgatggacagggatttt

SEQ ID NO: 330648 - DNA, 19 bp, Homo sapiens
  siRNA target sequence for ITGAV (NM_002210.2,910-928).
cggatcaagtggcagaaat

SEQ ID NO: 330649 - DNA, 19 bp, Homo sapiens
  siRNA target sequence for ITGAV (NM_002210.2,915-933).
caagtggcagaaatcgtat

SEQ ID NO: 330650 - DNA, 19 bp, Homo sapiens
  siRNA target sequence for ITGAV (NM_002210.2,918-936).
gtggcagaaatcgtatcta

SEQ ID NO: 330651 - DNA, 19 bp, Homo sapiens
  siRNA target sequence for ITGAV (NM_002210.2,920-938).
ggcagaaatcgtatctaaa

SEQ ID NO: 330652 - DNA, 19 bp, Homo sapiens
  siRNA target sequence for ITGAV (NM_002210.2,922-940).
cagaaatcgtatctaaata

SEQ ID NO: 330653 - DNA, 19 bp, Homo sapiens
  siRNA target sequence for ITGAV (NM_002210.2,965-983).
gtataataaccaattagca

SEQ ID NO: 330654 - DNA, 19 bp, Homo sapiens
  siRNA target sequence for ITGAV (NM_002210.2,985-1003).
ctcggactgcacaagctat

SEQ ID NO: 330655 - DNA, 19 bp, Homo sapiens
  siRNA target sequence for ITGAV (NM_002210.2,987-1005).
cggactgcacaagctattt

SEQ ID NO: 330656 - DNA, 19 bp, Homo sapiens
  siRNA target sequence for ITGAV (NM_002210.2,1011-1029).
gacagctatttgggttatt

SEQ ID NO: 330657 - DNA, 19 bp, Homo sapiens
  siRNA target sequence for ITGAV (NM_002210.2,1013-1031).
cagctatttgggttattct

SEQ ID NO: 330658 - DNA, 19 bp, Homo sapiens
  siRNA target sequence for ITGAV (NM_002210.2,1015-1033).
gctatttgggttattctgt

SEQ ID NO: 330659 - DNA, 19 bp, Homo sapiens
  siRNA target sequence for ITGAV (NM_002210.2,1030-1048).
ctgtggctgtcggagattt

SEQ ID NO: 330660 - DNA, 19 bp, Homo sapiens
  siRNA target sequence for ITGAV (NM_002210.2,1032-1050).
gtggctgtcggagatttca

SEQ ID NO: 330661 - DNA, 19 bp, Homo sapiens
  siRNA target sequence for ITGAV (NM_002210.2,1034-1052).
ggctgtcggagatttcaat

SEQ ID NO: 330662 - DNA, 19 bp, Homo sapiens
  siRNA target sequence for ITGAV (NM_002210.2,1049-1067).
caatggtgatggcatagat

SEQ ID NO: 330663 - DNA, 19 bp, Homo sapiens
  siRNA target sequence for ITGAV (NM_002210.2,1059-1077).
ggcatagatgactttgttt

SEQ ID NO: 330664 - DNA, 19 bp, Homo sapiens
  siRNA target sequence for ITGAV (NM_002210.2,1099-1117).
ggactttgggaatggttta

SEQ ID NO: 330665 - DNA, 19 bp, Homo sapiens
  siRNA target sequence for ITGAV (NM_002210.2,1100-1118).
gactttgggaatggtttat

SEQ ID NO: 330666 - DNA, 19 bp, Homo sapiens
  siRNA target sequence for ITGAV (NM_002210.2,1139-1157).
gtcctccttatacaatttt

SEQ ID NO: 330667 - DNA, 19 bp, Homo sapiens
  siRNA target sequence for ITGAV (NM_002210.2,1142-1160).
ctccttatacaattttact

SEQ ID NO: 330668 - DNA, 19 bp, Homo sapiens
  siRNA target sequence for ITGAV (NM_002210.2,1173-1191).
gctgcatatttcggatttt

SEQ ID NO: 330669 - DNA, 19 bp, Homo sapiens
  siRNA target sequence for ITGAV (NM_002210.2,1206-1224).
gacattaatggagatgatt

SEQ ID NO: 330670 - DNA, 19 bp, Homo sapiens
  siRNA target sequence for ITGAV (NM_002210.2,1221-1239).
gattatgcagatgtgttta

SEQ ID NO: 330671 - DNA, 19 bp, Homo sapiens
  siRNA target sequence for ITGAV (NM_002210.2,1339-1357).
cgacaaagctgaatggatt

SEQ ID NO: 330672 - DNA, 19 bp, Homo sapiens
  siRNA target sequence for ITGAV (NM_002210.2,1410-1428).
caggatggtttcaatgata

SEQ ID NO: 330673 - DNA, 19 bp, Homo sapiens
  siRNA target sequence for ITGAV (NM_002210.2,1416-1434).
ggtttcaatgatattgcaa

SEQ ID NO: 330674 - DNA, 19 bp, Homo sapiens
  siRNA target sequence for ITGAV (NM_002210.2,1443-1461).
ccatatgggggtgaagata

SEQ ID NO: 330675 - DNA, 19 bp, Homo sapiens
  siRNA target sequence for ITGAV (NM_002210.2,1481-1499).
cttcaatggaagatcaaca

SEQ ID NO: 330676 - DNA, 19 bp, Homo sapiens
  siRNA target sequence for ITGAV (NM_002210.2,1510-1528).
cagtcccatctcaaatcct

SEQ ID NO: 330677 - DNA, 19 bp, Homo sapiens
  siRNA target sequence for ITGAV (NM_002210.2,1560-1578).
ccaagctttggctattcaa

SEQ ID NO: 330678 - DNA, 19 bp, Homo sapiens
  siRNA target sequence for ITGAV (NM_002210.2,1561-1579).
caagctttggctattcaat

SEQ ID NO: 330679 - DNA, 19 bp, Homo sapiens
  siRNA target sequence for ITGAV (NM_002210.2,1564-1582).
gctttggctattcaatgaa

SEQ ID NO: 330680 - DNA, 19 bp, Homo sapiens
  siRNA target sequence for ITGAV (NM_002210.2,1585-1603).
gagccacagatatagacaa

SEQ ID NO: 330681 - DNA, 19 bp, Homo sapiens
  siRNA target sequence for ITGAV (NM_002210.2,1619-1637).
cttaattgtaggagctttt

SEQ ID NO: 330682 - DNA, 19 bp, Homo sapiens
  siRNA target sequence for ITGAV (NM_002210.2,1639-1657).
gtgtagatcgagctatctt

SEQ ID NO: 330683 - DNA, 19 bp, Homo sapiens
  siRNA target sequence for ITGAV (NM_002210.2,1641-1659).
gtagatcgagctatcttat

SEQ ID NO: 330684 - DNA, 19 bp, Homo sapiens
  siRNA target sequence for ITGAV (NM_002210.2,1644-1662).
gatcgagctatcttataca

SEQ ID NO: 330685 - DNA, 19 bp, Homo sapiens
  siRNA target sequence for ITGAV (NM_002210.2,1664-1682).
ggccagaccagttatcact

SEQ ID NO: 330686 - DNA, 19 bp, Homo sapiens
  siRNA target sequence for ITGAV (NM_002210.2,1669-1687).
gaccagttatcactgtaaa

SEQ ID NO: 330687 - DNA, 19 bp, Homo sapiens
  siRNA target sequence for ITGAV (NM_002210.2,1698-1716).
gaagtgtaccctagcattt

SEQ ID NO: 330688 - DNA, 19 bp, Homo sapiens
  siRNA target sequence for ITGAV (NM_002210.2,1706-1724).
ccctagcattttaaatcaa

SEQ ID NO: 330689 - DNA, 19 bp, Homo sapiens
  siRNA target sequence for ITGAV (NM_002210.2,1881-1899).
cgacgagcactgtttctct

SEQ ID NO: 330690 - DNA, 19 bp, Homo sapiens
  siRNA target sequence for ITGAV (NM_002210.2,1882-1900).
gacgagcactgtttctcta

SEQ ID NO: 330691 - DNA, 19 bp, Homo sapiens
  siRNA target sequence for ITGAV (NM_002210.2,1917-1935).
cactccaagaacatgacta

SEQ ID NO: 330692 - DNA, 19 bp, Homo sapiens
  siRNA target sequence for ITGAV (NM_002210.2,1974-1992).
gcgtatctgcgggatgaat

SEQ ID NO: 330693 - DNA, 19 bp, Homo sapiens
  siRNA target sequence for ITGAV (NM_002210.2,1976-1994).
gtatctgcgggatgaatct

SEQ ID NO: 330694 - DNA, 19 bp, Homo sapiens
  siRNA target sequence for ITGAV (NM_002210.2,2004-2022).
gacaaactcactccaatta

SEQ ID NO: 330695 - DNA, 19 bp, Homo sapiens
  siRNA target sequence for ITGAV (NM_002210.2,2012-2030).
cactccaattactattttt

SEQ ID NO: 330696 - DNA, 19 bp, Homo sapiens
  siRNA target sequence for ITGAV (NM_002210.2,2014-2032).
ctccaattactatttttat

SEQ ID NO: 330697 - DNA, 19 bp, Homo sapiens
  siRNA target sequence for ITGAV (NM_002210.2,2033-2051).
ggaatatcggttggattat

SEQ ID NO: 330698 - DNA, 19 bp, Homo sapiens
  siRNA target sequence for ITGAV (NM_002210.2,2074-2092).
gcttgcaacccattcttaa

SEQ ID NO: 330699 - DNA, 19 bp, Homo sapiens
  siRNA target sequence for ITGAV (NM_002210.2,2096-2114).
gttcacgcctgctaacatt

SEQ ID NO: 330700 - DNA, 19 bp, Homo sapiens
  siRNA target sequence for ITGAV (NM_002210.2,2099-2117).
cacgcctgctaacattagt

SEQ ID NO: 330701 - DNA, 19 bp, Homo sapiens
  siRNA target sequence for ITGAV (NM_002210.2,2119-2137).
gacaggctcacattctact

SEQ ID NO: 330702 - DNA, 19 bp, Homo sapiens
  siRNA target sequence for ITGAV (NM_002210.2,2182-2200).
ctgtagatagtgatcaaaa

SEQ ID NO: 330703 - DNA, 19 bp, Homo sapiens
  siRNA target sequence for ITGAV (NM_002210.2,2184-2202).
gtagatagtgatcaaaaga

SEQ ID NO: 330704 - DNA, 19 bp, Homo sapiens
  siRNA target sequence for ITGAV (NM_002210.2,2191-2209).
gtgatcaaaagaagatcta

SEQ ID NO: 330705 - DNA, 19 bp, Homo sapiens
  siRNA target sequence for ITGAV (NM_002210.2,2222-2240).
caaccctctgacattgatt

SEQ ID NO: 330706 - DNA, 19 bp, Homo sapiens
  siRNA target sequence for ITGAV (NM_002210.2,2225-2243).
ccctctgacattgattgtt

SEQ ID NO: 330707 - DNA, 19 bp, Homo sapiens
  siRNA target sequence for ITGAV (NM_002210.2,2226-2244).
cctctgacattgattgtta

SEQ ID NO: 330708 - DNA, 19 bp, Homo sapiens
  siRNA target sequence for ITGAV (NM_002210.2,2227-2245).
ctctgacattgattgttaa

SEQ ID NO: 330709 - DNA, 19 bp, Homo sapiens
  siRNA target sequence for ITGAV (NM_002210.2,2274-2292).
gaagctgagctcatcgttt

SEQ ID NO: 330710 - DNA, 19 bp, Homo sapiens
  siRNA target sequence for ITGAV (NM_002210.2,2318-2336).
cggggttgtccgaaacaat

SEQ ID NO: 330711 - DNA, 19 bp, Homo sapiens
  siRNA target sequence for ITGAV (NM_002210.2,2320-2338).
gggttgtccgaaacaatga

SEQ ID NO: 330712 - DNA, 19 bp, Homo sapiens
  siRNA target sequence for ITGAV (NM_002210.2,2321-2339).
ggttgtccgaaacaatgaa

SEQ ID NO: 330713 - DNA, 19 bp, Homo sapiens
  siRNA target sequence for ITGAV (NM_002210.2,2383-2401).
ctcgccaggtggtatgtga

SEQ ID NO: 330714 - DNA, 19 bp, Homo sapiens
  siRNA target sequence for ITGAV (NM_002210.2,2512-2530).
gctcaaatctatttgacaa

SEQ ID NO: 330715 - DNA, 19 bp, Homo sapiens
  siRNA target sequence for ITGAV (NM_002210.2,2513-2531).
ctcaaatctatttgacaaa

SEQ ID NO: 330716 - DNA, 19 bp, Homo sapiens
  siRNA target sequence for ITGAV (NM_002210.2,2528-2546).
caaagtaagcccagttgta

SEQ ID NO: 330717 - DNA, 19 bp, Homo sapiens
  siRNA target sequence for ITGAV (NM_002210.2,2693-2711).
ctatgagctgagaaacaat

SEQ ID NO: 330718 - DNA, 19 bp, Homo sapiens
  siRNA target sequence for ITGAV (NM_002210.2,2748-2766).
cagtggccttacaaatata

SEQ ID NO: 330719 - DNA, 19 bp, Homo sapiens
  siRNA target sequence for ITGAV (NM_002210.2,2783-2801).
gtatatccttcattatgat

SEQ ID NO: 330720 - DNA, 19 bp, Homo sapiens
  siRNA target sequence for ITGAV (NM_002210.2,2851-2869).
gaattaagatctcatcttt

SEQ ID NO: 330721 - DNA, 19 bp, Homo sapiens
  siRNA target sequence for ITGAV (NM_002210.2,2908-2926).
gtgagcgggaccatctcat

SEQ ID NO: 330722 - DNA, 19 bp, Homo sapiens
  siRNA target sequence for ITGAV (NM_002210.2,2913-2931).
cgggaccatctcatcacta

SEQ ID NO: 330723 - DNA, 19 bp, Homo sapiens
  siRNA target sequence for ITGAV (NM_002210.2,2944-2962).
ccctcagtgaaggagatat

SEQ ID NO: 330724 - DNA, 19 bp, Homo sapiens
  siRNA target sequence for ITGAV (NM_002210.2,2986-3004).
ctcagtgcttgaagattgt

SEQ ID NO: 330725 - DNA, 19 bp, Homo sapiens
  siRNA target sequence for ITGAV (NM_002210.2,3007-3025).
gccaagttgggagattaga

SEQ ID NO: 330726 - DNA, 19 bp, Homo sapiens
  siRNA target sequence for ITGAV (NM_002210.2,3009-3027).
caagttgggagattagaca

SEQ ID NO: 330727 - DNA, 19 bp, Homo sapiens
  siRNA target sequence for ITGAV (NM_002210.2,3028-3046).
gaggaaagagtgcaatctt

SEQ ID NO: 330728 - DNA, 19 bp, Homo sapiens
  siRNA target sequence for ITGAV (NM_002210.2,3030-3048).
ggaaagagtgcaatcttgt

SEQ ID NO: 330729 - DNA, 19 bp, Homo sapiens
  siRNA target sequence for ITGAV (NM_002210.2,3031-3049).
gaaagagtgcaatcttgta

SEQ ID NO: 330730 - DNA, 19 bp, Homo sapiens
  siRNA target sequence for ITGAV (NM_002210.2,3037-3055).
gtgcaatcttgtacgtaaa

SEQ ID NO: 330731 - DNA, 19 bp, Homo sapiens
  siRNA target sequence for ITGAV (NM_002210.2,3044-3062).
cttgtacgtaaagtcatta

SEQ ID NO: 330732 - DNA, 19 bp, Homo sapiens
  siRNA target sequence for ITGAV (NM_002210.2,3119-3137).
gtcgtctgcttcatttaat

SEQ ID NO: 330733 - DNA, 19 bp, Homo sapiens
  siRNA target sequence for ITGAV (NM_002210.2,3121-3139).
cgtctgcttcatttaatgt

SEQ ID NO: 330734 - DNA, 19 bp, Homo sapiens
  siRNA target sequence for ITGAV (NM_002210.2,3162-3180).
cttccaattgaggatatca

SEQ ID NO: 330735 - DNA, 19 bp, Homo sapiens
  siRNA target sequence for ITGAV (NM_002210.2,3179-3197).
caccaactccacattggtt

SEQ ID NO: 330736 - DNA, 19 bp, Homo sapiens
  siRNA target sequence for ITGAV (NM_002210.2,3190-3208).
cattggttaccactaatgt

SEQ ID NO: 330737 - DNA, 19 bp, Homo sapiens
  siRNA target sequence for ITGAV (NM_002210.2,3244-3262).
ctgtgtgggtgatcatttt

SEQ ID NO: 330738 - DNA, 19 bp, Homo sapiens
  siRNA target sequence for ITGAV (NM_002210.2,3254-3272).
gatcattttagcagttcta

SEQ ID NO: 330739 - DNA, 19 bp, Homo sapiens
  siRNA target sequence for ITGAV (NM_002210.2,3265-3283).
cagttctagcaggattgtt

SEQ ID NO: 330740 - DNA, 19 bp, Homo sapiens
  siRNA target sequence for ITGAV (NM_002210.2,3284-3302).
gctactggctgttttggta

SEQ ID NO: 330741 - DNA, 19 bp, Homo sapiens
  siRNA target sequence for ITGAV (NM_002210.2,3311-3329).
gtacaggatgggctttttt

SEQ ID NO: 330742 - DNA, 19 bp, Homo sapiens
  siRNA target sequence for ITGAV (NM_002210.2,3335-3353).
ggtccggccacctcaagaa

SEQ ID NO: 330743 - DNA, 19 bp, Homo sapiens
  siRNA target sequence for ITGAV (NM_002210.2,3371-3389).
gcttcaacctcatgaaaat

SEQ ID NO: 330744 - DNA, 19 bp, Homo sapiens
  siRNA target sequence for KRT19 (NM_002276.3,368-386).
gcaacgagaagctaaccat

SEQ ID NO: 330745 - DNA, 19 bp, Homo sapiens
  siRNA target sequence for KRT19 (NM_002276.3,953-971).
gccggactgaagaattgaa

SEQ ID NO: 330746 - DNA, 19 bp, Homo sapiens
  siRNA target sequence for LAIR1 (NM_002287.2,244-262).
gagagtagatccacataca

SEQ ID NO: 330747 - DNA, 19 bp, Homo sapiens
  siRNA target sequence for LAIR1 (NM_002287.2,615-633).
ccatcgccagaatcagata

SEQ ID NO: 330748 - DNA, 19 bp, Homo sapiens
  siRNA target sequence for LAIR1 (NM_002287.2,616-634).
catcgccagaatcagataa

SEQ ID NO: 330749 - DNA, 19 bp, Homo sapiens
  siRNA target sequence for LAIR1 (NM_002287.2,620-638).
gccagaatcagataaagca

SEQ ID NO: 330750 - DNA, 19 bp, Homo sapiens
  siRNA target sequence for LAIR1 (NM_002287.2,690-708).
cctggctgttgatgttcta

SEQ ID NO: 330751 - DNA, 19 bp, Homo sapiens
  siRNA target sequence for LEPR (NM_002303.2,165-183).
ggaatttatttatgtgata

SEQ ID NO: 330752 - DNA, 19 bp, Homo sapiens
  siRNA target sequence for LEPR (NM_002303.2,178-196).
gtgataactgcgtttaact

SEQ ID NO: 330753 - DNA, 19 bp, Homo sapiens
  siRNA target sequence for LEPR (NM_002303.2,185-203).
ctgcgtttaacttgtcata

SEQ ID NO: 330754 - DNA, 19 bp, Homo sapiens
  siRNA target sequence for LEPR (NM_002303.2,189-207).
gtttaacttgtcatatcca

SEQ ID NO: 330755 - DNA, 19 bp, Homo sapiens
  siRNA target sequence for LEPR (NM_002303.2,212-230).
ctccttggagatttaagtt

SEQ ID NO: 330756 - DNA, 19 bp, Homo sapiens
  siRNA target sequence for LEPR (NM_002303.2,231-249).
gtcttgcatgccaccaaat

SEQ ID NO: 330757 - DNA, 19 bp, Homo sapiens
  siRNA target sequence for LEPR (NM_002303.2,254-272).
cctatgactacttcctttt

SEQ ID NO: 330758 - DNA, 19 bp, Homo sapiens
  siRNA target sequence for LEPR (NM_002303.2,274-292).
cctgctggactctcaaaga

SEQ ID NO: 330759 - DNA, 19 bp, Homo sapiens
  siRNA target sequence for LEPR (NM_002303.2,291-309).
gaatacttcaaattcgaat

SEQ ID NO: 330760 - DNA, 19 bp, Homo sapiens
  siRNA target sequence for LEPR (NM_002303.2,323-341).
cagctgttgaacctaagtt

SEQ ID NO: 330761 - DNA, 19 bp, Homo sapiens
  siRNA target sequence for LEPR (NM_002303.2,325-343).
gctgttgaacctaagttta

SEQ ID NO: 330762 - DNA, 19 bp, Homo sapiens
  siRNA target sequence for LEPR (NM_002303.2,331-349).
gaacctaagtttaattcaa

SEQ ID NO: 330763 - DNA, 19 bp, Homo sapiens
  siRNA target sequence for LEPR (NM_002303.2,350-368).
gtggtactcacttttctaa

SEQ ID NO: 330764 - DNA, 19 bp, Homo sapiens
  siRNA target sequence for LEPR (NM_002303.2,352-370).
ggtactcacttttctaact

SEQ ID NO: 330765 - DNA, 19 bp, Homo sapiens
  siRNA target sequence for LEPR (NM_002303.2,358-376).
cacttttctaacttatcca

SEQ ID NO: 330766 - DNA, 19 bp, Homo sapiens
  siRNA target sequence for LEPR (NM_002303.2,412-430).
gatagaaactgctccttat

SEQ ID NO: 330767 - DNA, 19 bp, Homo sapiens
  siRNA target sequence for LEPR (NM_002303.2,425-443).
ccttatgtgcagacaacat

SEQ ID NO: 330768 - DNA, 19 bp, Homo sapiens
  siRNA target sequence for LEPR (NM_002303.2,499-517).
gcaaactggaacatacagt

SEQ ID NO: 330769 - DNA, 19 bp, Homo sapiens
  siRNA target sequence for LEPR (NM_002303.2,549-567).
ctgttatgtggagtcatta

SEQ ID NO: 330770 - DNA, 19 bp, Homo sapiens
  siRNA target sequence for LEPR (NM_002303.2,551-569).
gttatgtggagtcattatt

SEQ ID NO: 330771 - DNA, 19 bp, Homo sapiens
  siRNA target sequence for LEPR (NM_002303.2,556-574).
gtggagtcattatttaaga

SEQ ID NO: 330772 - DNA, 19 bp, Homo sapiens
  siRNA target sequence for LEPR (NM_002303.2,584-602).
ggaattataactataaggt

SEQ ID NO: 330773 - DNA, 19 bp, Homo sapiens
  siRNA target sequence for LEPR (NM_002303.2,600-618).
ggtccatcttttatatgtt

SEQ ID NO: 330774 - DNA, 19 bp, Homo sapiens
  siRNA target sequence for LEPR (NM_002303.2,683-701).
gcaattgcagtgttcatga

SEQ ID NO: 330775 - DNA, 19 bp, Homo sapiens
  siRNA target sequence for LEPR (NM_002303.2,724-742).
gtgccaacagccaaactca

SEQ ID NO: 330776 - DNA, 19 bp, Homo sapiens
  siRNA target sequence for LEPR (NM_002303.2,771-789).
cacatctggtggagtaatt

SEQ ID NO: 330777 - DNA, 19 bp, Homo sapiens
  siRNA target sequence for LEPR (NM_002303.2,773-791).
catctggtggagtaatttt

SEQ ID NO: 330778 - DNA, 19 bp, Homo sapiens
  siRNA target sequence for LEPR (NM_002303.2,776-794).
ctggtggagtaattttcca

SEQ ID NO: 330779 - DNA, 19 bp, Homo sapiens
  siRNA target sequence for LEPR (NM_002303.2,807-825).
gtcagttcagcccataaat

SEQ ID NO: 330780 - DNA, 19 bp, Homo sapiens
  siRNA target sequence for LEPR (NM_002303.2,831-849).
gaagcctgatccaccatta

SEQ ID NO: 330781 - DNA, 19 bp, Homo sapiens
  siRNA target sequence for LEPR (NM_002303.2,834-852).
gcctgatccaccattaggt

SEQ ID NO: 330782 - DNA, 19 bp, Homo sapiens
  siRNA target sequence for LEPR (NM_002303.2,835-853).
cctgatccaccattaggtt

SEQ ID NO: 330783 - DNA, 19 bp, Homo sapiens
  siRNA target sequence for LEPR (NM_002303.2,836-854).
ctgatccaccattaggttt

SEQ ID NO: 330784 - DNA, 19 bp, Homo sapiens
  siRNA target sequence for LEPR (NM_002303.2,841-859).
ccaccattaggtttgcata

SEQ ID NO: 330785 - DNA, 19 bp, Homo sapiens
  siRNA target sequence for LEPR (NM_002303.2,869-887).
cagatgatggtaatttaaa

SEQ ID NO: 330786 - DNA, 19 bp, Homo sapiens
  siRNA target sequence for LEPR (NM_002303.2,897-915).
gtccagcccaccattggta

SEQ ID NO: 330787 - DNA, 19 bp, Homo sapiens
  siRNA target sequence for LEPR (NM_002303.2,949-967).
gagaattctacaacagtta

SEQ ID NO: 330788 - DNA, 19 bp, Homo sapiens
  siRNA target sequence for LEPR (NM_002303.2,995-1013).
ctacatccctgctagtaga

SEQ ID NO: 330789 - DNA, 19 bp, Homo sapiens
  siRNA target sequence for LEPR (NM_002303.2,1001-1019).
ccctgctagtagacagtat

SEQ ID NO: 330790 - DNA, 19 bp, Homo sapiens
  siRNA target sequence for LEPR (NM_002303.2,1092-1110).
gagtactcctcgtgtcttt

SEQ ID NO: 330791 - DNA, 19 bp, Homo sapiens
  siRNA target sequence for LEPR (NM_002303.2,1115-1133).
cacaagatgtcatatactt

SEQ ID NO: 330792 - DNA, 19 bp, Homo sapiens
  siRNA target sequence for LEPR (NM_002303.2,1149-1167).
gacaagtgttgggtctaat

SEQ ID NO: 330793 - DNA, 19 bp, Homo sapiens
  siRNA target sequence for LEPR (NM_002303.2,1200-1218).
caagattgttccctcaaaa

SEQ ID NO: 330794 - DNA, 19 bp, Homo sapiens
  siRNA target sequence for LEPR (NM_002303.2,1233-1251).
gatgaatttagctgagaaa

SEQ ID NO: 330795 - DNA, 19 bp, Homo sapiens
  siRNA target sequence for LEPR (NM_002303.2,1256-1274).
ctcaaagccagtatgatgt

SEQ ID NO: 330796 - DNA, 19 bp, Homo sapiens
  siRNA target sequence for LEPR (NM_002303.2,1282-1300).
gatcatgttagcaaagtta

SEQ ID NO: 330797 - DNA, 19 bp, Homo sapiens
  siRNA target sequence for LEPR (NM_002303.2,1322-1340).
ccaaacctcgaggaaagtt

SEQ ID NO: 330798 - DNA, 19 bp, Homo sapiens
  siRNA target sequence for LEPR (NM_002303.2,1323-1341).
caaacctcgaggaaagttt

SEQ ID NO: 330799 - DNA, 19 bp, Homo sapiens
  siRNA target sequence for LEPR (NM_002303.2,1327-1345).
cctcgaggaaagtttacct

SEQ ID NO: 330800 - DNA, 19 bp, Homo sapiens
  siRNA target sequence for LEPR (NM_002303.2,1405-1423).
gtgattgatgtcaatatca

SEQ ID NO: 330801 - DNA, 19 bp, Homo sapiens
  siRNA target sequence for LEPR (NM_002303.2,1544-1562).
gttctgatattccatctat

SEQ ID NO: 330802 - DNA, 19 bp, Homo sapiens
  siRNA target sequence for LEPR (NM_002303.2,1569-1587).
catatctgagcccaaagat

SEQ ID NO: 330803 - DNA, 19 bp, Homo sapiens
  siRNA target sequence for LEPR (NM_002303.2,1574-1592).
ctgagcccaaagattgcta

SEQ ID NO: 330804 - DNA, 19 bp, Homo sapiens
  siRNA target sequence for LEPR (NM_002303.2,1576-1594).
gagcccaaagattgctatt

SEQ ID NO: 330805 - DNA, 19 bp, Homo sapiens
  siRNA target sequence for LEPR (NM_002303.2,1580-1598).
ccaaagattgctatttgca

SEQ ID NO: 330806 - DNA, 19 bp, Homo sapiens
  siRNA target sequence for LEPR (NM_002303.2,1626-1644).
ccagccaatcttcctatta

SEQ ID NO: 330807 - DNA, 19 bp, Homo sapiens
  siRNA target sequence for LEPR (NM_002303.2,1629-1647).
gccaatcttcctattatct

SEQ ID NO: 330808 - DNA, 19 bp, Homo sapiens
  siRNA target sequence for LEPR (NM_002303.2,1639-1657).
ctattatctggctacacaa

SEQ ID NO: 330809 - DNA, 19 bp, Homo sapiens
  siRNA target sequence for LEPR (NM_002303.2,1740-1758).
gcctccatccagtgtgaaa

SEQ ID NO: 330810 - DNA, 19 bp, Homo sapiens
  siRNA target sequence for LEPR (NM_002303.2,1808-1826).
cagtctttccagagaataa

SEQ ID NO: 330811 - DNA, 19 bp, Homo sapiens
  siRNA target sequence for LEPR (NM_002303.2,1836-1854).
ccagattcgctatggttta

SEQ ID NO: 330812 - DNA, 19 bp, Homo sapiens
  siRNA target sequence for LEPR (NM_002303.2,1837-1855).
cagattcgctatggtttaa

SEQ ID NO: 330813 - DNA, 19 bp, Homo sapiens
  siRNA target sequence for LEPR (NM_002303.2,1839-1857).
gattcgctatggtttaagt

SEQ ID NO: 330814 - DNA, 19 bp, Homo sapiens
  siRNA target sequence for LEPR (NM_002303.2,1859-1877).
gaaaagaagtacaatggaa

SEQ ID NO: 330815 - DNA, 19 bp, Homo sapiens
  siRNA target sequence for LEPR (NM_002303.2,1874-1892).
ggaagatgtatgaggttta

SEQ ID NO: 330816 - DNA, 19 bp, Homo sapiens
  siRNA target sequence for LEPR (NM_002303.2,1951-1969).
gttcaggtgcgctgtaaga

SEQ ID NO: 330817 - DNA, 19 bp, Homo sapiens
  siRNA target sequence for LEPR (NM_002303.2,1972-1990).
ctagatggactgggatatt

SEQ ID NO: 330818 - DNA, 19 bp, Homo sapiens
  siRNA target sequence for LEPR (NM_002303.2,1975-1993).
gatggactgggatattgga

SEQ ID NO: 330819 - DNA, 19 bp, Homo sapiens
  siRNA target sequence for LEPR (NM_002303.2,1984-2002).
ggatattggagtaattgga

SEQ ID NO: 330820 - DNA, 19 bp, Homo sapiens
  siRNA target sequence for LEPR (NM_002303.2,2018-2036).
cagttgtcatggatataaa

SEQ ID NO: 330821 - DNA, 19 bp, Homo sapiens
  siRNA target sequence for LEPR (NM_002303.2,2145-2163).
gtgcagtgttcagagatat

SEQ ID NO: 330822 - DNA, 19 bp, Homo sapiens
  siRNA target sequence for LEPR (NM_002303.2,2164-2182).
gtgataaaccatcatactt

SEQ ID NO: 330823 - DNA, 19 bp, Homo sapiens
  siRNA target sequence for LEPR (NM_002303.2,2245-2263).
gagcaagcacatactgtta

SEQ ID NO: 330824 - DNA, 19 bp, Homo sapiens
  siRNA target sequence for LEPR (NM_002303.2,2266-2284).
gttctggccatcaattcaa

SEQ ID NO: 330825 - DNA, 19 bp, Homo sapiens
  siRNA target sequence for LEPR (NM_002303.2,2287-2305).
ggtgcttctgttgcaaatt

SEQ ID NO: 330826 - DNA, 19 bp, Homo sapiens
  siRNA target sequence for LEPR (NM_002303.2,2324-2342).
ggcctatgagcaaagtaaa

SEQ ID NO: 330827 - DNA, 19 bp, Homo sapiens
  siRNA target sequence for LEPR (NM_002303.2,2352-2370).
gtcactcagtgcttatcct

SEQ ID NO: 330828 - DNA, 19 bp, Homo sapiens
  siRNA target sequence for LEPR (NM_002303.2,2354-2372).
cactcagtgcttatccttt

SEQ ID NO: 330829 - DNA, 19 bp, Homo sapiens
  siRNA target sequence for LEPR (NM_002303.2,2388-2406).
gattgtttcctggatacta

SEQ ID NO: 330830 - DNA, 19 bp, Homo sapiens
  siRNA target sequence for LEPR (NM_002303.2,2410-2428).
cccagtgattacaagctaa

SEQ ID NO: 330831 - DNA, 19 bp, Homo sapiens
  siRNA target sequence for LEPR (NM_002303.2,2411-2429).
ccagtgattacaagctaat

SEQ ID NO: 330832 - DNA, 19 bp, Homo sapiens
  siRNA target sequence for LEPR (NM_002303.2,2414-2432).
gtgattacaagctaatgta

SEQ ID NO: 330833 - DNA, 19 bp, Homo sapiens
  siRNA target sequence for LEPR (NM_002303.2,2416-2434).
gattacaagctaatgtatt

SEQ ID NO: 330834 - DNA, 19 bp, Homo sapiens
  siRNA target sequence for LEPR (NM_002303.2,2495-2513).
catctgttaagaagtatta

SEQ ID NO: 330835 - DNA, 19 bp, Homo sapiens
  siRNA target sequence for LEPR (NM_002303.2,2553-2571).
cagtctttacccaatattt

SEQ ID NO: 330836 - DNA, 19 bp, Homo sapiens
  siRNA target sequence for LEPR (NM_002303.2,2575-2593).
gaaggagtgggaaaaccaa

SEQ ID NO: 330837 - DNA, 19 bp, Homo sapiens
  siRNA target sequence for LEPR (NM_002303.2,2637-2655).
gagtgatgcaggtttatat

SEQ ID NO: 330838 - DNA, 19 bp, Homo sapiens
  siRNA target sequence for LEPR (NM_002303.2,2645-2663).
caggtttatatgtaattgt

SEQ ID NO: 330839 - DNA, 19 bp, Homo sapiens
  siRNA target sequence for LEPR (NM_002303.2,2678-2696).
cctcttccatcttattgct

SEQ ID NO: 330840 - DNA, 19 bp, Homo sapiens
  siRNA target sequence for LEPR (NM_002303.2,2774-2792).
gggcacaaggacttaattt

SEQ ID NO: 330841 - DNA, 19 bp, Homo sapiens
  siRNA target sequence for LEPR (NM_002303.2,2777-2795).
cacaaggacttaattttca

SEQ ID NO: 330842 - DNA, 19 bp, Homo sapiens
  siRNA target sequence for LEPR (NM_002303.2,2807-2825).
cgtttgagcatctttttat

SEQ ID NO: 330843 - DNA, 19 bp, Homo sapiens
  siRNA target sequence for LEPR (NM_002303.2,2849-2867).
gtggtcctcttcttttgga

SEQ ID NO: 330844 - DNA, 19 bp, Homo sapiens
  siRNA target sequence for LEPR (NM_002303.2,2896-2914).
gttgatacatcatggaaaa

SEQ ID NO: 330845 - DNA, 19 bp, Homo sapiens
  siRNA target sequence for LEPR (NM_002303.2,2946-2964).
ctctctactttcaacaaca

SEQ ID NO: 330846 - DNA, 19 bp, Homo sapiens
  siRNA target sequence for LEPR (NM_002303.2,2995-3013).
gaccagttcaacagtgtta

SEQ ID NO: 330847 - DNA, 19 bp, Homo sapiens
  siRNA target sequence for LEPR (NM_002303.2,3030-3048).
gggtactgaggtaacctat

SEQ ID NO: 330848 - DNA, 19 bp, Homo sapiens
  siRNA target sequence for LEPR (NM_002303.2,3060-3078).
ccagagacaaccctttgtt

SEQ ID NO: 330849 - DNA, 19 bp, Homo sapiens
  siRNA target sequence for LEPR (NM_002303.2,3093-3111).
gatcagcaactctaaacca

SEQ ID NO: 330850 - DNA, 19 bp, Homo sapiens
  siRNA target sequence for LEPR (NM_002303.2,3159-3177).
gtgcttctctagcaaaaat

SEQ ID NO: 330851 - DNA, 19 bp, Homo sapiens
  siRNA target sequence for LEPR (NM_002303.2,3162-3180).
cttctctagcaaaaattct

SEQ ID NO: 330852 - DNA, 19 bp, Homo sapiens
  siRNA target sequence for LEPR (NM_002303.2,3179-3197).
ctccgttgaaggattcttt

SEQ ID NO: 330853 - DNA, 19 bp, Homo sapiens
  siRNA target sequence for LEPR (NM_002303.2,3292-3310).
ggattggatgaacttttga

SEQ ID NO: 330854 - DNA, 19 bp, Homo sapiens
  siRNA target sequence for LEPR (NM_002303.2,3293-3311).
gattggatgaacttttgaa

SEQ ID NO: 330855 - DNA, 19 bp, Homo sapiens
  siRNA target sequence for LEPR (NM_002303.2,3343-3361).
gataaaaagtctatctatt

SEQ ID NO: 330856 - DNA, 19 bp, Homo sapiens
  siRNA target sequence for LEPR (NM_002303.2,3370-3388).
gtcacctcaatcaaaaaga

SEQ ID NO: 330857 - DNA, 19 bp, Homo sapiens
  siRNA target sequence for LEPR (NM_002303.2,3439-3457).
ccagccccctgtttattca

SEQ ID NO: 330858 - DNA, 19 bp, Homo sapiens
  siRNA target sequence for LEPR (NM_002303.2,3477-3495).
ggacagttgctcacacttt

SEQ ID NO: 330859 - DNA, 19 bp, Homo sapiens
  siRNA target sequence for LEPR (NM_002303.2,3485-3503).
gctcacactttgtagaaaa

SEQ ID NO: 330860 - DNA, 19 bp, Homo sapiens
  siRNA target sequence for LEPR (NM_002303.2,3510-3528).
caacttaggaacttctagt

SEQ ID NO: 330861 - DNA, 19 bp, Homo sapiens
  siRNA target sequence for LEPR (NM_002303.2,3542-3560).
catcttacatgcctcaatt

SEQ ID NO: 330862 - DNA, 19 bp, Homo sapiens
  siRNA target sequence for LEPR (NM_002303.2,3545-3563).
cttacatgcctcaattcca

SEQ ID NO: 330863 - DNA, 19 bp, Homo sapiens
  siRNA target sequence for LRRN4 (NM_002319.2,197-215).
ggaccctgaacctgtctaa

SEQ ID NO: 330864 - DNA, 19 bp, Homo sapiens
  siRNA target sequence for LRRN4 (NM_002319.2,385-403).
ccagccttggggaatctca

SEQ ID NO: 330865 - DNA, 19 bp, Homo sapiens
  siRNA target sequence for LRRN4 (NM_002319.2,812-830).
ggaaacttcacatcttcaa

SEQ ID NO: 330866 - DNA, 19 bp, Homo sapiens
  siRNA target sequence for LRRN4 (NM_002319.2,817-835).
cttcacatcttcaagtatt

SEQ ID NO: 330867 - DNA, 19 bp, Homo sapiens
  siRNA target sequence for LRRN4 (NM_002319.2,911-929).
gccctgcagaggatctatt

SEQ ID NO: 330868 - DNA, 19 bp, Homo sapiens
  siRNA target sequence for LRRN4 (NM_002319.2,1182-1200).
gcagcgaccacccgaatta

SEQ ID NO: 330869 - DNA, 19 bp, Homo sapiens
  siRNA target sequence for LRRN4 (NM_002319.2,1183-1201).
cagcgaccacccgaattaa

SEQ ID NO: 330870 - DNA, 19 bp, Homo sapiens
  siRNA target sequence for LRRN4 (NM_002319.2,1349-1367).
ggaaggatagcctcttgaa

SEQ ID NO: 330871 - DNA, 19 bp, Homo sapiens
  siRNA target sequence for LRRN4 (NM_002319.2,1552-1570).
ccacttggctccattcaga

SEQ ID NO: 330872 - DNA, 19 bp, Homo sapiens
  siRNA target sequence for LRRN4 (NM_002319.2,1854-1872).
cctcaaggctcggaagaat

SEQ ID NO: 330873 - DNA, 19 bp, Homo sapiens
  siRNA target sequence for LRRN4 (NM_002319.2,1885-1903).
ctagaagcctgtcgaaaaa

SEQ ID NO: 330874 - DNA, 19 bp, Homo sapiens
  siRNA target sequence for MAGEB1 (NM_002363.3,658-676).
gaatgctgatgcacttcat

SEQ ID NO: 330875 - DNA, 19 bp, Homo sapiens
  siRNA target sequence for MAGEB1 (NM_002363.3,671-689).
cttcattctacgtaagtat

SEQ ID NO: 330876 - DNA, 19 bp, Homo sapiens
  siRNA target sequence for MAGEB1 (NM_002363.3,795-813).
ctcgtctttggccttgatt

SEQ ID NO: 330877 - DNA, 19 bp, Homo sapiens
  siRNA target sequence for MAGEB1 (NM_002363.3,847-865).
ccctcgtcagtaagctaaa

SEQ ID NO: 330878 - DNA, 19 bp, Homo sapiens
  siRNA target sequence for MAGEB1 (NM_002363.3,860-878).
gctaaacctcaccaatgat

SEQ ID NO: 330879 - DNA, 19 bp, Homo sapiens
  siRNA target sequence for MAGEB1 (NM_002363.3,1015-1033).
gagaggagcacttaatcta

SEQ ID NO: 330880 - DNA, 19 bp, Homo sapiens
  siRNA target sequence for MAGEB1 (NM_002363.3,1266-1284).
caagtccgatccagtgtta

SEQ ID NO: 330881 - DNA, 19 bp, Homo sapiens
  siRNA target sequence for MAGEB2 (NM_002364.3,312-330).
gcggctgcgggtgtttcat

SEQ ID NO: 330882 - DNA, 19 bp, Homo sapiens
  siRNA target sequence for MAGEB2 (NM_002364.3,356-374).
gagccaccaaggtgagaaa

SEQ ID NO: 330883 - DNA, 19 bp, Homo sapiens
  siRNA target sequence for MAGEB2 (NM_002364.3,592-610).
gccttgagctgaataaagt

SEQ ID NO: 330884 - DNA, 19 bp, Homo sapiens
  siRNA target sequence for MAGEB2 (NM_002364.3,615-633).
cccaacggccacacttaca

SEQ ID NO: 330885 - DNA, 19 bp, Homo sapiens
  siRNA target sequence for MAGEB2 (NM_002364.3,1003-1021).
ccttcccaacccattacga

SEQ ID NO: 330886 - DNA, 19 bp, Homo sapiens
  siRNA target sequence for MAGEB3 (NM_002365.2,200-218).
ggggctactatccagaaaa

SEQ ID NO: 330887 - DNA, 19 bp, Homo sapiens
  siRNA target sequence for MAGEB3 (NM_002365.2,263-281).
gcactatccaccactacat

SEQ ID NO: 330888 - DNA, 19 bp, Homo sapiens
  siRNA target sequence for MAGEB3 (NM_002365.2,273-291).
ccactacatctgtagatgt

SEQ ID NO: 330889 - DNA, 19 bp, Homo sapiens
  siRNA target sequence for MAGEB3 (NM_002365.2,287-305).
gatgtttcttacaaaaagt

SEQ ID NO: 330890 - DNA, 19 bp, Homo sapiens
  siRNA target sequence for MAGEB3 (NM_002365.2,317-335).
gccaacagcaaaattgaga

SEQ ID NO: 330891 - DNA, 19 bp, Homo sapiens
  siRNA target sequence for MAGEB3 (NM_002365.2,384-402).
cagaccctctaatcatgaa

SEQ ID NO: 330892 - DNA, 19 bp, Homo sapiens
  siRNA target sequence for MAGEB3 (NM_002365.2,538-556).
catggaggtggtatttggt

SEQ ID NO: 330893 - DNA, 19 bp, Homo sapiens
  siRNA target sequence for MAGEB3 (NM_002365.2,547-565).
ggtatttggtgttgattta

SEQ ID NO: 330894 - DNA, 19 bp, Homo sapiens
  siRNA target sequence for MAGEB3 (NM_002365.2,809-827).
caagatttggtgaagctta

SEQ ID NO: 330895 - DNA, 19 bp, Homo sapiens
  siRNA target sequence for MAGEB3 (NM_002365.2,812-830).
gatttggtgaagcttaaat

SEQ ID NO: 330896 - DNA, 19 bp, Homo sapiens
  siRNA target sequence for MAGEB3 (NM_002365.2,842-860).
cgacaagtgcccaacagta

SEQ ID NO: 330897 - DNA, 19 bp, Homo sapiens
  siRNA target sequence for MAGEB3 (NM_002365.2,937-955).
ggccaaggtcaataaaact

SEQ ID NO: 330898 - DNA, 19 bp, Homo sapiens
  siRNA target sequence for MAGEB4 (NM_002367.2,309-327).
gtcatgcactggatctgat

SEQ ID NO: 330899 - DNA, 19 bp, Homo sapiens
  siRNA target sequence for MAGEB4 (NM_002367.2,332-350).
gcgacgagagccaagatga

SEQ ID NO: 330900 - DNA, 19 bp, Homo sapiens
  siRNA target sequence for MAGEB4 (NM_002367.2,392-410).
gatcactcaaagattctct

SEQ ID NO: 330901 - DNA, 19 bp, Homo sapiens
  siRNA target sequence for MAGEB4 (NM_002367.2,727-745).
gcccgtgaagaggaaatct

SEQ ID NO: 330902 - DNA, 19 bp, Homo sapiens
  siRNA target sequence for MAGEB4 (NM_002367.2,756-774).
gaatatgctggggatctat

SEQ ID NO: 330903 - DNA, 19 bp, Homo sapiens
  siRNA target sequence for MAGEB4 (NM_002367.2,778-796).
ggaaagaggcaccttatct

SEQ ID NO: 330904 - DNA, 19 bp, Homo sapiens
  siRNA target sequence for CEACAM6 (NM_002483.3,774-792).
ccccctcaaaggccaatta

SEQ ID NO: 330905 - DNA, 19 bp, Homo sapiens
  siRNA target sequence for NCBP1 (NM_002486.2,297-315).
cggtgggcagcctcacaaa

SEQ ID NO: 330906 - DNA, 19 bp, Homo sapiens
  siRNA target sequence for NCBP1 (NM_002486.2,298-316).
ggtgggcagcctcacaaaa

SEQ ID NO: 330907 - DNA, 19 bp, Homo sapiens
  siRNA target sequence for NCBP1 (NM_002486.2,324-342).
gacctctgatgcaaatgaa

SEQ ID NO: 330908 - DNA, 19 bp, Homo sapiens
  siRNA target sequence for NCBP1 (NM_002486.2,442-460).
gatcttcctaactacaaga

SEQ ID NO: 330909 - DNA, 19 bp, Homo sapiens
  siRNA target sequence for NCBP1 (NM_002486.2,453-471).
ctacaagagcaagatctta

SEQ ID NO: 330910 - DNA, 19 bp, Homo sapiens
  siRNA target sequence for NCBP1 (NM_002486.2,510-528).
gctgacaatttatacaaca

SEQ ID NO: 330911 - DNA, 19 bp, Homo sapiens
  siRNA target sequence for NCBP1 (NM_002486.2,583-601).
gccatgattcgtcaactta

SEQ ID NO: 330912 - DNA, 19 bp, Homo sapiens
  siRNA target sequence for NCBP1 (NM_002486.2,584-602).
ccatgattcgtcaacttaa

SEQ ID NO: 330913 - DNA, 19 bp, Homo sapiens
  siRNA target sequence for NCBP1 (NM_002486.2,585-603).
catgattcgtcaacttaaa

SEQ ID NO: 330914 - DNA, 19 bp, Homo sapiens
  siRNA target sequence for NCBP1 (NM_002486.2,588-606).
gattcgtcaacttaaagaa

SEQ ID NO: 330915 - DNA, 19 bp, Homo sapiens
  siRNA target sequence for NCBP1 (NM_002486.2,592-610).
cgtcaacttaaagaatcat

SEQ ID NO: 330916 - DNA, 19 bp, Homo sapiens
  siRNA target sequence for NCBP1 (NM_002486.2,645-663).
ggtccgttttttatctgat

SEQ ID NO: 330917 - DNA, 19 bp, Homo sapiens
  siRNA target sequence for NCBP1 (NM_002486.2,689-707).
ccccatcaatggttgctat

SEQ ID NO: 330918 - DNA, 19 bp, Homo sapiens
  siRNA target sequence for NCBP1 (NM_002486.2,695-713).
caatggttgctatgtttga

SEQ ID NO: 330919 - DNA, 19 bp, Homo sapiens
  siRNA target sequence for NCBP1 (NM_002486.2,725-743).
gcgtaactcaggaagaaga

SEQ ID NO: 330920 - DNA, 19 bp, Homo sapiens
  siRNA target sequence for NCBP1 (NM_002486.2,753-771).
ggtgcgacgagattggtat

SEQ ID NO: 330921 - DNA, 19 bp, Homo sapiens
  siRNA target sequence for NCBP1 (NM_002486.2,806-824).
gaaaggagttgtacgaaaa

SEQ ID NO: 330922 - DNA, 19 bp, Homo sapiens
  siRNA target sequence for NCBP1 (NM_002486.2,888-906).
gactcatgtacccatgtta

SEQ ID NO: 330923 - DNA, 19 bp, Homo sapiens
  siRNA target sequence for NCBP1 (NM_002486.2,890-908).
ctcatgtacccatgttaca

SEQ ID NO: 330924 - DNA, 19 bp, Homo sapiens
  siRNA target sequence for NCBP1 (NM_002486.2,909-927).
ggtatggactgctgataaa

SEQ ID NO: 330925 - DNA, 19 bp, Homo sapiens
  siRNA target sequence for NCBP1 (NM_002486.2,931-949).
catccacaagaagagtatt

SEQ ID NO: 330926 - DNA, 19 bp, Homo sapiens
  siRNA target sequence for NCBP1 (NM_002486.2,997-1015).
caggaacggcacatcctaa

SEQ ID NO: 330927 - DNA, 19 bp, Homo sapiens
  siRNA target sequence for NCBP1 (NM_002486.2,1005-1023).
gcacatcctaagaccttat

SEQ ID NO: 330928 - DNA, 19 bp, Homo sapiens
  siRNA target sequence for NCBP1 (NM_002486.2,1018-1036).
ccttatcttgcctttgaca

SEQ ID NO: 330929 - DNA, 19 bp, Homo sapiens
  siRNA target sequence for NCBP1 (NM_002486.2,1084-1102).
cctcctcacactgaagatt

SEQ ID NO: 330930 - DNA, 19 bp, Homo sapiens
  siRNA target sequence for NCBP1 (NM_002486.2,1088-1106).
ctcacactgaagattcagt

SEQ ID NO: 330931 - DNA, 19 bp, Homo sapiens
  siRNA target sequence for NCBP1 (NM_002486.2,1112-1130).
caatgccaagggtcatctt

SEQ ID NO: 330932 - DNA, 19 bp, Homo sapiens
  siRNA target sequence for NCBP1 (NM_002486.2,1168-1186).
gtcatgccagggagtcatt

SEQ ID NO: 330933 - DNA, 19 bp, Homo sapiens
  siRNA target sequence for NCBP1 (NM_002486.2,1187-1205).
cagtggaaagatttgtaat

SEQ ID NO: 330934 - DNA, 19 bp, Homo sapiens
  siRNA target sequence for NCBP1 (NM_002486.2,1256-1274).
cttgtgctgcacagttagt

SEQ ID NO: 330935 - DNA, 19 bp, Homo sapiens
  siRNA target sequence for NCBP1 (NM_002486.2,1301-1319).
ccttgaactaccacatagt

SEQ ID NO: 330936 - DNA, 19 bp, Homo sapiens
  siRNA target sequence for NCBP1 (NM_002486.2,1302-1320).
cttgaactaccacatagtt

SEQ ID NO: 330937 - DNA, 19 bp, Homo sapiens
  siRNA target sequence for NCBP1 (NM_002486.2,1314-1332).
catagttgaggtgatcttt

SEQ ID NO: 330938 - DNA, 19 bp, Homo sapiens
  siRNA target sequence for NCBP1 (NM_002486.2,1329-1347).
ctttgcagagctgtttcaa

SEQ ID NO: 330939 - DNA, 19 bp, Homo sapiens
  siRNA target sequence for NCBP1 (NM_002486.2,1352-1370).
cagcaccccctcacattga

SEQ ID NO: 330940 - DNA, 19 bp, Homo sapiens
  siRNA target sequence for NCBP1 (NM_002486.2,1358-1376).
cccctcacattgatgtgat

SEQ ID NO: 330941 - DNA, 19 bp, Homo sapiens
  siRNA target sequence for NCBP1 (NM_002486.2,1361-1379).
ctcacattgatgtgatgta

SEQ ID NO: 330942 - DNA, 19 bp, Homo sapiens
  siRNA target sequence for NCBP1 (NM_002486.2,1382-1400).
caacactcctcattgaact

SEQ ID NO: 330943 - DNA, 19 bp, Homo sapiens
  siRNA target sequence for NCBP1 (NM_002486.2,1465-1483).
cgtttggacacaatgaaca

SEQ ID NO: 330944 - DNA, 19 bp, Homo sapiens
  siRNA target sequence for NCBP1 (NM_002486.2,1495-1513).
gacaggtttattaattggt

SEQ ID NO: 330945 - DNA, 19 bp, Homo sapiens
  siRNA target sequence for NCBP1 (NM_002486.2,1497-1515).
caggtttattaattggttt

SEQ ID NO: 330946 - DNA, 19 bp, Homo sapiens
  siRNA target sequence for NCBP1 (NM_002486.2,1543-1561).
cgttggagctgggaagatt

SEQ ID NO: 330947 - DNA, 19 bp, Homo sapiens
  siRNA target sequence for NCBP1 (NM_002486.2,1554-1572).
ggaagattggtcagattgt

SEQ ID NO: 330948 - DNA, 19 bp, Homo sapiens
  siRNA target sequence for NCBP1 (NM_002486.2,1562-1580).
ggtcagattgtcttagtca

SEQ ID NO: 330949 - DNA, 19 bp, Homo sapiens
  siRNA target sequence for NCBP1 (NM_002486.2,1592-1610).
gtcccaaaccgaagtttgt

SEQ ID NO: 330950 - DNA, 19 bp, Homo sapiens
  siRNA target sequence for NCBP1 (NM_002486.2,1594-1612).
cccaaaccgaagtttgtaa

SEQ ID NO: 330951 - DNA, 19 bp, Homo sapiens
  siRNA target sequence for NCBP1 (NM_002486.2,1605-1623).
gtttgtaagagaagttcta

SEQ ID NO: 330952 - DNA, 19 bp, Homo sapiens
  siRNA target sequence for NCBP1 (NM_002486.2,1643-1661).
cttaccatcagcgtatatt

SEQ ID NO: 330953 - DNA, 19 bp, Homo sapiens
  siRNA target sequence for NCBP1 (NM_002486.2,1647-1665).
ccatcagcgtatattagat

SEQ ID NO: 330954 - DNA, 19 bp, Homo sapiens
  siRNA target sequence for NCBP1 (NM_002486.2,1653-1671).
gcgtatattagatattgtt

SEQ ID NO: 330955 - DNA, 19 bp, Homo sapiens
  siRNA target sequence for NCBP1 (NM_002486.2,1705-1723).
ccaacctgcatttacaagt

SEQ ID NO: 330956 - DNA, 19 bp, Homo sapiens
  siRNA target sequence for NCBP1 (NM_002486.2,1726-1744).
ggagatgaaagtagcaatt

SEQ ID NO: 330957 - DNA, 19 bp, Homo sapiens
  siRNA target sequence for NCBP1 (NM_002486.2,1793-1811).
gtaaggcaaccaatgatga

SEQ ID NO: 330958 - DNA, 19 bp, Homo sapiens
  siRNA target sequence for NCBP1 (NM_002486.2,1799-1817).
caaccaatgatgaaatctt

SEQ ID NO: 330959 - DNA, 19 bp, Homo sapiens
  siRNA target sequence for NCBP1 (NM_002486.2,1860-1878).
cgacgatgaaggattcagt

SEQ ID NO: 330960 - DNA, 19 bp, Homo sapiens
  siRNA target sequence for NCBP1 (NM_002486.2,1861-1879).
gacgatgaaggattcagtt

SEQ ID NO: 330961 - DNA, 19 bp, Homo sapiens
  siRNA target sequence for NCBP1 (NM_002486.2,1921-1939).
cacttggcagccaaatcat

SEQ ID NO: 330962 - DNA, 19 bp, Homo sapiens
  siRNA target sequence for NCBP1 (NM_002486.2,1983-2001).
caaaaccctagctgaaagt

SEQ ID NO: 330963 - DNA, 19 bp, Homo sapiens
  siRNA target sequence for NCBP1 (NM_002486.2,2048-2066).
ggaaccatccacagatgat

SEQ ID NO: 330964 - DNA, 19 bp, Homo sapiens
  siRNA target sequence for NCBP1 (NM_002486.2,2049-2067).
gaaccatccacagatgatt

SEQ ID NO: 330965 - DNA, 19 bp, Homo sapiens
  siRNA target sequence for NCBP1 (NM_002486.2,2071-2089).
gtactagtggataagatga

SEQ ID NO: 330966 - DNA, 19 bp, Homo sapiens
  siRNA target sequence for NCBP1 (NM_002486.2,2077-2095).
gtggataagatgattcgta

SEQ ID NO: 330967 - DNA, 19 bp, Homo sapiens
  siRNA target sequence for NCBP1 (NM_002486.2,2088-2106).
gattcgtacacaaatagtt

SEQ ID NO: 330968 - DNA, 19 bp, Homo sapiens
  siRNA target sequence for NCBP1 (NM_002486.2,2092-2110).
cgtacacaaatagttgatt

SEQ ID NO: 330969 - DNA, 19 bp, Homo sapiens
  siRNA target sequence for NCBP1 (NM_002486.2,2113-2131).
gctgccgtagcaaattgga

SEQ ID NO: 330970 - DNA, 19 bp, Homo sapiens
  siRNA target sequence for NCBP1 (NM_002486.2,2114-2132).
ctgccgtagcaaattggat

SEQ ID NO: 330971 - DNA, 19 bp, Homo sapiens
  siRNA target sequence for NCBP1 (NM_002486.2,2119-2137).
gtagcaaattggatcttct

SEQ ID NO: 330972 - DNA, 19 bp, Homo sapiens
  siRNA target sequence for NCBP1 (NM_002486.2,2130-2148).
gatcttctcttcagaacta

SEQ ID NO: 330973 - DNA, 19 bp, Homo sapiens
  siRNA target sequence for NCBP1 (NM_002486.2,2143-2161).
gaactatctcgtgacttta

SEQ ID NO: 330974 - DNA, 19 bp, Homo sapiens
  siRNA target sequence for NCBP1 (NM_002486.2,2146-2164).
ctatctcgtgactttacca

SEQ ID NO: 330975 - DNA, 19 bp, Homo sapiens
  siRNA target sequence for NCBP1 (NM_002486.2,2179-2197).
gaaattttgcactctacaa

SEQ ID NO: 330976 - DNA, 19 bp, Homo sapiens
  siRNA target sequence for NCBP1 (NM_002486.2,2274-2292).
caaacggcgaagtgatgat

SEQ ID NO: 330977 - DNA, 19 bp, Homo sapiens
  siRNA target sequence for NCBP1 (NM_002486.2,2320-2338).
ggggttcttgaggaacaaa

SEQ ID NO: 330978 - DNA, 19 bp, Homo sapiens
  siRNA target sequence for NCBP1 (NM_002486.2,2321-2339).
gggttcttgaggaacaaat

SEQ ID NO: 330979 - DNA, 19 bp, Homo sapiens
  siRNA target sequence for NCBP1 (NM_002486.2,2410-2428).
cggtttatcatgatcttga

SEQ ID NO: 330980 - DNA, 19 bp, Homo sapiens
  siRNA target sequence for NCBP1 (NM_002486.2,2453-2471).
ctgatgggaccagtgtatt

SEQ ID NO: 330981 - DNA, 19 bp, Homo sapiens
  siRNA target sequence for NCBP1 (NM_002486.2,2455-2473).
gatgggaccagtgtattaa

SEQ ID NO: 330982 - DNA, 19 bp, Homo sapiens
  siRNA target sequence for NCBP1 (NM_002486.2,2467-2485).
gtattaacaccatggtata

SEQ ID NO: 330983 - DNA, 19 bp, Homo sapiens
  siRNA target sequence for NCBP1 (NM_002486.2,2480-2498).
ggtataagaactgtataga

SEQ ID NO: 330984 - DNA, 19 bp, Homo sapiens
  siRNA target sequence for NCBP1 (NM_002486.2,2581-2599).
gaattagaccctcatatct

SEQ ID NO: 330985 - DNA, 19 bp, Homo sapiens
  siRNA target sequence for NFKBIB (NM_002503.2,46-64).
cgcgtgcttgggaaaagct

SEQ ID NO: 330986 - DNA, 19 bp, Homo sapiens
  siRNA target sequence for NFKBIB (NM_002503.2,220-238).
gcacttggctgtgattcat

SEQ ID NO: 330987 - DNA, 19 bp, Homo sapiens
  siRNA target sequence for NFKBIB (NM_002503.2,673-691).
ggccgttatccacaaagat

SEQ ID NO: 330988 - DNA, 19 bp, Homo sapiens
  siRNA target sequence for NFKBIB (NM_002503.2,675-693).
ccgttatccacaaagatgt

SEQ ID NO: 330989 - DNA, 19 bp, Homo sapiens
  siRNA target sequence for NFKBIB (NM_002503.2,992-1010).
ggagacgagggcgatgaat

SEQ ID NO: 330990 - DNA, 19 bp, Homo sapiens
  siRNA target sequence for NFKBIB (NM_002503.2,993-1011).
gagacgagggcgatgaata

SEQ ID NO: 330991 - DNA, 19 bp, Homo sapiens
  siRNA target sequence for PGD (NM_002631.2,126-144).
cgtcatgggccagaactta

SEQ ID NO: 330992 - DNA, 19 bp, Homo sapiens
  siRNA target sequence for PGD (NM_002631.2,127-145).
gtcatgggccagaacttaa

SEQ ID NO: 330993 - DNA, 19 bp, Homo sapiens
  siRNA target sequence for PGD (NM_002631.2,129-147).
catgggccagaacttaatt

SEQ ID NO: 330994 - DNA, 19 bp, Homo sapiens
  siRNA target sequence for PGD (NM_002631.2,175-193).
gtctgtgcttttaatagga

SEQ ID NO: 330995 - DNA, 19 bp, Homo sapiens
  siRNA target sequence for PGD (NM_002631.2,196-214).
gtctccaaagttgatgatt

SEQ ID NO: 330996 - DNA, 19 bp, Homo sapiens
  siRNA target sequence for PGD (NM_002631.2,251-269).
gtgcccagtccctgaaaga

SEQ ID NO: 330997 - DNA, 19 bp, Homo sapiens
  siRNA target sequence for PGD (NM_002631.2,334-352).
gatgatttcatcgagaaat

SEQ ID NO: 330998 - DNA, 19 bp, Homo sapiens
  siRNA target sequence for PGD (NM_002631.2,371-389).
ctggtgacatcatcattga

SEQ ID NO: 330999 - DNA, 19 bp, Homo sapiens
  siRNA target sequence for PGD (NM_002631.2,381-399).
catcattgacggaggaaat

SEQ ID NO: 331000 - DNA, 19 bp, Homo sapiens
  siRNA target sequence for PGD (NM_002631.2,384-402).
cattgacggaggaaattct

SEQ ID NO: 331001 - DNA, 19 bp, Homo sapiens
  siRNA target sequence for PGD (NM_002631.2,438-456).
caaggccaagggaatttta

SEQ ID NO: 331002 - DNA, 19 bp, Homo sapiens
  siRNA target sequence for PGD (NM_002631.2,535-553).
gcgtggccccacatcaaga

SEQ ID NO: 331003 - DNA, 19 bp, Homo sapiens
  siRNA target sequence for PGD (NM_002631.2,626-644).
caggccacttcgtgaagat

SEQ ID NO: 331004 - DNA, 19 bp, Homo sapiens
  siRNA target sequence for PGD (NM_002631.2,646-664).
gtgcacaacgggatagagt

SEQ ID NO: 331005 - DNA, 19 bp, Homo sapiens
  siRNA target sequence for PGD (NM_002631.2,690-708).
ggcataccacctgatgaaa

SEQ ID NO: 331006 - DNA, 19 bp, Homo sapiens
  siRNA target sequence for PGD (NM_002631.2,797-815).
cagccaatattctcaagtt

SEQ ID NO: 331007 - DNA, 19 bp, Homo sapiens
  siRNA target sequence for PGD (NM_002631.2,893-911).
ccatctccgccctggaata

SEQ ID NO: 331008 - DNA, 19 bp, Homo sapiens
  siRNA target sequence for PGD (NM_002631.2,943-961).
gtctttgctcggtgcttat

SEQ ID NO: 331009 - DNA, 19 bp, Homo sapiens
  siRNA target sequence for PGD (NM_002631.2,1091-1109).
cttacgctcaaggctttat

SEQ ID NO: 331010 - DNA, 19 bp, Homo sapiens
  siRNA target sequence for PGD (NM_002631.2,1134-1152).
gtttggctggactctcaat

SEQ ID NO: 331011 - DNA, 19 bp, Homo sapiens
  siRNA target sequence for PGD (NM_002631.2,1140-1158).
ctggactctcaattatggt

SEQ ID NO: 331012 - DNA, 19 bp, Homo sapiens
  siRNA target sequence for PGD (NM_002631.2,1180-1198).
gggggctgcatcattagaa

SEQ ID NO: 331013 - DNA, 19 bp, Homo sapiens
  siRNA target sequence for PGD (NM_002631.2,1182-1200).
gggctgcatcattagaagt

SEQ ID NO: 331014 - DNA, 19 bp, Homo sapiens
  siRNA target sequence for PGD (NM_002631.2,1187-1205).
gcatcattagaagtgtatt

SEQ ID NO: 331015 - DNA, 19 bp, Homo sapiens
  siRNA target sequence for PGD (NM_002631.2,1257-1275).
cctactggacgacttcttt

SEQ ID NO: 331016 - DNA, 19 bp, Homo sapiens
  siRNA target sequence for PGD (NM_002631.2,1258-1276).
ctactggacgacttcttta

SEQ ID NO: 331017 - DNA, 19 bp, Homo sapiens
  siRNA target sequence for PGD (NM_002631.2,1261-1279).
ctggacgacttctttaagt

SEQ ID NO: 331018 - DNA, 19 bp, Homo sapiens
  siRNA target sequence for PGD (NM_002631.2,1263-1281).
ggacgacttctttaagtca

SEQ ID NO: 331019 - DNA, 19 bp, Homo sapiens
  siRNA target sequence for PGD (NM_002631.2,1420-1438).
caggctcagcgggattact

SEQ ID NO: 331020 - DNA, 19 bp, Homo sapiens
  siRNA target sequence for PGD (NM_002631.2,1442-1460).
gggctcacacctatgaact

SEQ ID NO: 331021 - DNA, 19 bp, Homo sapiens
  siRNA target sequence for PGD (NM_002631.2,1465-1483).
gccaaaccagggcagttta

SEQ ID NO: 331022 - DNA, 19 bp, Homo sapiens
  siRNA target sequence for PGD (NM_002631.2,1516-1534).
gtgtcatcctcgtcataca

SEQ ID NO: 331023 - DNA, 19 bp, Homo sapiens
  siRNA target sequence for PGD (NM_002631.2,1518-1536).
gtcatcctcgtcatacaat

SEQ ID NO: 331024 - DNA, 19 bp, Homo sapiens
  siRNA target sequence for PRG1 (NM_002727.1,93-111).
ctcagttcaaggttatcct

SEQ ID NO: 331025 - DNA, 19 bp, Homo sapiens
  siRNA target sequence for PRG1 (NM_002727.1,141-159).
ctgcaatccagacagtaat

SEQ ID NO: 331026 - DNA, 19 bp, Homo sapiens
  siRNA target sequence for PRG1 (NM_002727.1,185-203).
gaccaatgttcgaactact

SEQ ID NO: 331027 - DNA, 19 bp, Homo sapiens
  siRNA target sequence for PRG1 (NM_002727.1,206-224).
caggtgaatccaacaagat

SEQ ID NO: 331028 - DNA, 19 bp, Homo sapiens
  siRNA target sequence for PRG1 (NM_002727.1,234-252).
gaggactgacctttttcca

SEQ ID NO: 331029 - DNA, 19 bp, Homo sapiens
  siRNA target sequence for PRG1 (NM_002727.1,236-254).
ggactgacctttttccaaa

SEQ ID NO: 331030 - DNA, 19 bp, Homo sapiens
  siRNA target sequence for PRG1 (NM_002727.1,257-275).
cgagaatccaggacttgaa

SEQ ID NO: 331031 - DNA, 19 bp, Homo sapiens
  siRNA target sequence for PRG1 (NM_002727.1,356-374).
gcttcctaacggaaatgga

SEQ ID NO: 331032 - DNA, 19 bp, Homo sapiens
  siRNA target sequence for PRG1 (NM_002727.1,357-375).
cttcctaacggaaatggaa

SEQ ID NO: 331033 - DNA, 19 bp, Homo sapiens
  siRNA target sequence for PRG1 (NM_002727.1,365-383).
cggaaatggaacaggatta

SEQ ID NO: 331034 - DNA, 19 bp, Homo sapiens
  siRNA target sequence for PRG1 (NM_002727.1,396-414).
cgaaagtgatgctttccat

SEQ ID NO: 331035 - DNA, 19 bp, Homo sapiens
  siRNA target sequence for PRG1 (NM_002727.1,462-480).
cttgggtcaacatggatta

SEQ ID NO: 331036 - DNA, 19 bp, Homo sapiens
  siRNA target sequence for PRKAR1B (NM_002735.1,583-601).
cgctggggagactgttata

SEQ ID NO: 331037 - DNA, 19 bp, Homo sapiens
  siRNA target sequence for PRKAR1B (NM_002735.1,919-937).
ggagcccgtccagtttgaa

SEQ ID NO: 331038 - DNA, 19 bp, Homo sapiens
  siRNA target sequence for PRKAR1B (NM_002735.1,922-940).
gcccgtccagtttgaagat

SEQ ID NO: 331039 - DNA, 19 bp, Homo sapiens
  siRNA target sequence for PRKAR1B (NM_002735.1,971-989).
ggggacgacttttacatca

SEQ ID NO: 331040 - DNA, 19 bp, Homo sapiens
  siRNA target sequence for PRKAR1B (NM_002735.1,1209-1227).
ggaacattcagcgttacaa

SEQ ID NO: 331041 - DNA, 19 bp, Homo sapiens
  siRNA target sequence for PRKAR1B (NM_002735.1,1220-1238).
cgttacaacagcttcatct

SEQ ID NO: 331042 - DNA, 19 bp, Homo sapiens
  siRNA target sequence for PRKCZ (NM_002744.2,317-335).
catgtccgggagaagacaa

SEQ ID NO: 331043 - DNA, 19 bp, Homo sapiens
  siRNA target sequence for PRKCZ (NM_002744.2,578-596).
ctccagtagacgacaagaa

SEQ ID NO: 331044 - DNA, 19 bp, Homo sapiens
  siRNA target sequence for PRKCZ (NM_002744.2,618-636).
cgaggagacagatggaatt

SEQ ID NO: 331045 - DNA, 19 bp, Homo sapiens
  siRNA target sequence for PRKCZ (NM_002744.2,626-644).
cagatggaattgcttacat

SEQ ID NO: 331046 - DNA, 19 bp, Homo sapiens
  siRNA target sequence for PRKCZ (NM_002744.2,656-674).
ggaagcatgacagcattaa

SEQ ID NO: 331047 - DNA, 19 bp, Homo sapiens
  siRNA target sequence for PRKCZ (NM_002744.2,657-675).
gaagcatgacagcattaaa

SEQ ID NO: 331048 - DNA, 19 bp, Homo sapiens
  siRNA target sequence for PRKCZ (NM_002744.2,690-708).
ccttaagccagttatcgat

SEQ ID NO: 331049 - DNA, 19 bp, Homo sapiens
  siRNA target sequence for PRKCZ (NM_002744.2,799-817).
ctcctggtgcggttgaaga

SEQ ID NO: 331050 - DNA, 19 bp, Homo sapiens
  siRNA target sequence for PRKCZ (NM_002744.2,804-822).
ggtgcggttgaagaagaat

SEQ ID NO: 331051 - DNA, 19 bp, Homo sapiens
  siRNA target sequence for PRKCZ (NM_002744.2,825-843).
ccaaatttacgccatgaaa

SEQ ID NO: 331052 - DNA, 19 bp, Homo sapiens
  siRNA target sequence for PRKCZ (NM_002744.2,932-950).
ccttcctggtcggattaca

SEQ ID NO: 331053 - DNA, 19 bp, Homo sapiens
  siRNA target sequence for PRKCZ (NM_002744.2,974-992).
ggttgttcctggtcattga

SEQ ID NO: 331054 - DNA, 19 bp, Homo sapiens
  siRNA target sequence for PRKCZ (NM_002744.2,1102-1120).
cacgagagggggatcatct

SEQ ID NO: 331055 - DNA, 19 bp, Homo sapiens
  siRNA target sequence for PRKCZ (NM_002744.2,1235-1253).
gcggaaccccgaattacat

SEQ ID NO: 331056 - DNA, 19 bp, Homo sapiens
  siRNA target sequence for PRKCZ (NM_002744.2,1308-1326).
gctgggagtcctcatgttt

SEQ ID NO: 331057 - DNA, 19 bp, Homo sapiens
  siRNA target sequence for PRKCZ (NM_002744.2,1364-1382).
ccgacaacccggacatgaa

SEQ ID NO: 331058 - DNA, 19 bp, Homo sapiens
  siRNA target sequence for PRKCZ (NM_002744.2,1366-1384).
gacaacccggacatgaaca

SEQ ID NO: 331059 - DNA, 19 bp, Homo sapiens
  siRNA target sequence for PRKCZ (NM_002744.2,1447-1465).
gtcaaagcctcccatgttt

SEQ ID NO: 331060 - DNA, 19 bp, Homo sapiens
  siRNA target sequence for PRKCZ (NM_002744.2,1626-1644).
ctacggtctggacaacttt

SEQ ID NO: 331061 - DNA, 19 bp, Homo sapiens
  siRNA target sequence for PRSS1 (NM_002769.2,347-365).
cctcacgtgcagtaatcaa

SEQ ID NO: 331062 - DNA, 19 bp, Homo sapiens
  siRNA target sequence for PSD (NM_002779.2,423-441).
gccaaatgggaattcttct

SEQ ID NO: 331063 - DNA, 19 bp, Homo sapiens
  siRNA target sequence for PSD (NM_002779.2,424-442).
ccaaatgggaattcttcta

SEQ ID NO: 331064 - DNA, 19 bp, Homo sapiens
  siRNA target sequence for PSD (NM_002779.2,425-443).
caaatgggaattcttctat

SEQ ID NO: 331065 - DNA, 19 bp, Homo sapiens
  siRNA target sequence for PSD (NM_002779.2,642-660).
gccgactcggccatcgaaa

SEQ ID NO: 331066 - DNA, 19 bp, Homo sapiens
  siRNA target sequence for PSD (NM_002779.2,900-918).
gatgggcctgactctttca

SEQ ID NO: 331067 - DNA, 19 bp, Homo sapiens
  siRNA target sequence for PSD (NM_002779.2,1088-1106).
cccacttgcccctcttgaa

SEQ ID NO: 331068 - DNA, 19 bp, Homo sapiens
  siRNA target sequence for PSD (NM_002779.2,1400-1418).
gaggctgtaccgactagat

SEQ ID NO: 331069 - DNA, 19 bp, Homo sapiens
  siRNA target sequence for PSD (NM_002779.2,1483-1501).
ctggggagtacctcaagtt

SEQ ID NO: 331070 - DNA, 19 bp, Homo sapiens
  siRNA target sequence for PSD (NM_002779.2,2290-2308).
ggatcactcgcatcaatgt

SEQ ID NO: 331071 - DNA, 19 bp, Homo sapiens
  siRNA target sequence for PSD (NM_002779.2,2294-2312).
cactcgcatcaatgtagta

SEQ ID NO: 331072 - DNA, 19 bp, Homo sapiens
  siRNA target sequence for PSD (NM_002779.2,2307-2325).
gtagtagccgctatgttct

SEQ ID NO: 331073 - DNA, 19 bp, Homo sapiens
  siRNA target sequence for PSD (NM_002779.2,2346-2364).
gctgttagctcccaaaaga

SEQ ID NO: 331074 - DNA, 19 bp, Homo sapiens
  siRNA target sequence for PSD (NM_002779.2,2347-2365).
ctgttagctcccaaaagaa

SEQ ID NO: 331075 - DNA, 19 bp, Homo sapiens
  siRNA target sequence for PSG11 (NM_002785.1,473-491).
ccttcagtcacctcttact

SEQ ID NO: 331076 - DNA, 19 bp, Homo sapiens
  siRNA target sequence for PSG11 (NM_002785.1,676-694).
cacatccttgacaatcaga

SEQ ID NO: 331077 - DNA, 19 bp, Homo sapiens
  siRNA target sequence for PTK9 (NM_002822.3,188-206).
gccagaaatggaaagtaca

SEQ ID NO: 331078 - DNA, 19 bp, Homo sapiens
  siRNA target sequence for PTK9 (NM_002822.3,239-257).
cttgtgattggatcatata

SEQ ID NO: 331079 - DNA, 19 bp, Homo sapiens
  siRNA target sequence for PTK9 (NM_002822.3,269-287).
gattcctgggataaggatt

SEQ ID NO: 331080 - DNA, 19 bp, Homo sapiens
  siRNA target sequence for PTK9 (NM_002822.3,306-324).
ccctgttggaggacaaaca

SEQ ID NO: 331081 - DNA, 19 bp, Homo sapiens
  siRNA target sequence for PTK9 (NM_002822.3,307-325).
cctgttggaggacaaacaa

SEQ ID NO: 331082 - DNA, 19 bp, Homo sapiens
  siRNA target sequence for PTK9 (NM_002822.3,319-337).
caaacaaccatgctatata

SEQ ID NO: 331083 - DNA, 19 bp, Homo sapiens
  siRNA target sequence for PTK9 (NM_002822.3,368-386).
ggatatgaatggatattca

SEQ ID NO: 331084 - DNA, 19 bp, Homo sapiens
  siRNA target sequence for PTK9 (NM_002822.3,389-407).
gcatggtctccagatcatt

SEQ ID NO: 331085 - DNA, 19 bp, Homo sapiens
  siRNA target sequence for PTK9 (NM_002822.3,393-411).
ggtctccagatcattctca

SEQ ID NO: 331086 - DNA, 19 bp, Homo sapiens
  siRNA target sequence for PTK9 (NM_002822.3,394-412).
gtctccagatcattctcat

SEQ ID NO: 331087 - DNA, 19 bp, Homo sapiens
  siRNA target sequence for PTK9 (NM_002822.3,413-431).
gttcgtcaaaaaatgttgt

SEQ ID NO: 331088 - DNA, 19 bp, Homo sapiens
  siRNA target sequence for PTK9 (NM_002822.3,427-445).
gttgtatgcagcaacaaga

SEQ ID NO: 331089 - DNA, 19 bp, Homo sapiens
  siRNA target sequence for PTK9 (NM_002822.3,441-459).
caagagcaactctgaagaa

SEQ ID NO: 331090 - DNA, 19 bp, Homo sapiens
  siRNA target sequence for PTK9 (NM_002822.3,960-978).
gccgtctgctagaaattgt

SEQ ID NO: 331091 - DNA, 19 bp, Homo sapiens
  siRNA target sequence for PTK9 (NM_002822.3,961-979).
ccgtctgctagaaattgta

SEQ ID NO: 331092 - DNA, 19 bp, Homo sapiens
  siRNA target sequence for PTK9 (NM_002822.3,963-981).
gtctgctagaaattgtaga

SEQ ID NO: 331093 - DNA, 19 bp, Homo sapiens
  siRNA target sequence for PTK9 (NM_002822.3,1085-1103).
cacaagcaaagttttgcaa

SEQ ID NO: 331094 - DNA, 19 bp, Homo sapiens
  siRNA target sequence for PTK9 (NM_002822.3,1128-1146).
gaggaattcgaagactaat

SEQ ID NO: 331095 - DNA, 19 bp, Homo sapiens
  siRNA target sequence for PTK9 (NM_002822.3,1130-1148).
ggaattcgaagactaatta

SEQ ID NO: 331096 - DNA, 19 bp, Homo sapiens
  siRNA target sequence for PXN (NM_002859.1,153-171).
gaggagaccccctactcat

SEQ ID NO: 331097 - DNA, 19 bp, Homo sapiens
  siRNA target sequence for PXN (NM_002859.1,175-193).
caactggaaaccacacata

SEQ ID NO: 331098 - DNA, 19 bp, Homo sapiens
  siRNA target sequence for PXN (NM_002859.1,459-477).
ccttcacccaccgtaatga

SEQ ID NO: 331099 - DNA, 19 bp, Homo sapiens
  siRNA target sequence for PXN (NM_002859.1,564-582).
gcagatgaggccaactcaa

SEQ ID NO: 331100 - DNA, 19 bp, Homo sapiens
  siRNA target sequence for PXN (NM_002859.1,885-903).
gcttcgctgtcggatttca

SEQ ID NO: 331101 - DNA, 19 bp, Homo sapiens
  siRNA target sequence for PXN (NM_002859.1,889-907).
cgctgtcggatttcaagtt

SEQ ID NO: 331102 - DNA, 19 bp, Homo sapiens
  siRNA target sequence for PXN (NM_002859.1,891-909).
ctgtcggatttcaagttca

SEQ ID NO: 331103 - DNA, 19 bp, Homo sapiens
  siRNA target sequence for PXN (NM_002859.1,1421-1439).
cctggagaactatatctca

SEQ ID NO: 331104 - DNA, 19 bp, Homo sapiens
  siRNA target sequence for PXN (NM_002859.1,1700-1718).
gaacgacaagccttactgt

SEQ ID NO: 331105 - DNA, 19 bp, Homo sapiens
  siRNA target sequence for RARS (NM_002887.3,114-132).
gaaattgaccggttgaaaa

SEQ ID NO: 331106 - DNA, 19 bp, Homo sapiens
  siRNA target sequence for RARS (NM_002887.3,157-175).
caaatttggagcagttaca

SEQ ID NO: 331107 - DNA, 19 bp, Homo sapiens
  siRNA target sequence for RARS (NM_002887.3,206-224).
gaatattcttcgaaagagt

SEQ ID NO: 331108 - DNA, 19 bp, Homo sapiens
  siRNA target sequence for RARS (NM_002887.3,247-265).
caactaaaaatatgattaa

SEQ ID NO: 331109 - DNA, 19 bp, Homo sapiens
  siRNA target sequence for RARS (NM_002887.3,372-390).
ggggactatcagtgtaata

SEQ ID NO: 331110 - DNA, 19 bp, Homo sapiens
  siRNA target sequence for RARS (NM_002887.3,391-409).
gtgctatgggtatttctca

SEQ ID NO: 331111 - DNA, 19 bp, Homo sapiens
  siRNA target sequence for RARS (NM_002887.3,640-658).
cccctaatatagctaaaga

SEQ ID NO: 331112 - DNA, 19 bp, Homo sapiens
  siRNA target sequence for RARS (NM_002887.3,642-660).
cctaatatagctaaagaga

SEQ ID NO: 331113 - DNA, 19 bp, Homo sapiens
  siRNA target sequence for RARS (NM_002887.3,669-687).
ggccacctgaggtcaacta

SEQ ID NO: 331114 - DNA, 19 bp, Homo sapiens
  siRNA target sequence for RARS (NM_002887.3,670-688).
gccacctgaggtcaactat

SEQ ID NO: 331115 - DNA, 19 bp, Homo sapiens
  siRNA target sequence for RARS (NM_002887.3,672-690).
cacctgaggtcaactatca

SEQ ID NO: 331116 - DNA, 19 bp, Homo sapiens
  siRNA target sequence for RARS (NM_002887.3,674-692).
cctgaggtcaactatcata

SEQ ID NO: 331117 - DNA, 19 bp, Homo sapiens
  siRNA target sequence for RARS (NM_002887.3,685-703).
ctatcataggagagagtat

SEQ ID NO: 331118 - DNA, 19 bp, Homo sapiens
  siRNA target sequence for RARS (NM_002887.3,734-752).
cgtgctcaggttaaatcat

SEQ ID NO: 331119 - DNA, 19 bp, Homo sapiens
  siRNA target sequence for RARS (NM_002887.3,810-828).
ccagattatctaacagttt

SEQ ID NO: 331120 - DNA, 19 bp, Homo sapiens
  siRNA target sequence for RARS (NM_002887.3,841-859).
gggatcttcaggtctttta

SEQ ID NO: 331121 - DNA, 19 bp, Homo sapiens
  siRNA target sequence for RARS (NM_002887.3,849-867).
caggtcttttataaggaat

SEQ ID NO: 331122 - DNA, 19 bp, Homo sapiens
  siRNA target sequence for RARS (NM_002887.3,910-928).
catatcagtgtgtagttct

SEQ ID NO: 331123 - DNA, 19 bp, Homo sapiens
  siRNA target sequence for RARS (NM_002887.3,981-999).
gtctcccgccaagagttaa

SEQ ID NO: 331124 - DNA, 19 bp, Homo sapiens
  siRNA target sequence for RARS (NM_002887.3,983-1001).
ctcccgccaagagttaaat

SEQ ID NO: 331125 - DNA, 19 bp, Homo sapiens
  siRNA target sequence for RARS (NM_002887.3,987-1005).
cgccaagagttaaataaaa

SEQ ID NO: 331126 - DNA, 19 bp, Homo sapiens
  siRNA target sequence for RARS (NM_002887.3,1020-1038).
gacgtctctttaatagaga

SEQ ID NO: 331127 - DNA, 19 bp, Homo sapiens
  siRNA target sequence for RARS (NM_002887.3,1039-1057).
gaggggaatccttctatca

SEQ ID NO: 331128 - DNA, 19 bp, Homo sapiens
  siRNA target sequence for RARS (NM_002887.3,1042-1060).
gggaatccttctatcaaga

SEQ ID NO: 331129 - DNA, 19 bp, Homo sapiens
  siRNA target sequence for RARS (NM_002887.3,1043-1061).
ggaatccttctatcaagat

SEQ ID NO: 331130 - DNA, 19 bp, Homo sapiens
  siRNA target sequence for RARS (NM_002887.3,1044-1062).
gaatccttctatcaagata

SEQ ID NO: 331131 - DNA, 19 bp, Homo sapiens
  siRNA target sequence for RARS (NM_002887.3,1048-1066).
ccttctatcaagataggat

SEQ ID NO: 331132 - DNA, 19 bp, Homo sapiens
  siRNA target sequence for RARS (NM_002887.3,1052-1070).
ctatcaagataggatgaat

SEQ ID NO: 331133 - DNA, 19 bp, Homo sapiens
  siRNA target sequence for RARS (NM_002887.3,1140-1158).
ccagggtgttccataccat

SEQ ID NO: 331134 - DNA, 19 bp, Homo sapiens
  siRNA target sequence for RARS (NM_002887.3,1141-1159).
cagggtgttccataccatt

SEQ ID NO: 331135 - DNA, 19 bp, Homo sapiens
  siRNA target sequence for RARS (NM_002887.3,1147-1165).
gttccataccattaaccat

SEQ ID NO: 331136 - DNA, 19 bp, Homo sapiens
  siRNA target sequence for RARS (NM_002887.3,1179-1197).
ggaggttatacctatgata

SEQ ID NO: 331137 - DNA, 19 bp, Homo sapiens
  siRNA target sequence for RARS (NM_002887.3,1201-1219).
ctgacctggctgctattaa

SEQ ID NO: 331138 - DNA, 19 bp, Homo sapiens
  siRNA target sequence for RARS (NM_002887.3,1206-1224).
ctggctgctattaaacaaa

SEQ ID NO: 331139 - DNA, 19 bp, Homo sapiens
  siRNA target sequence for RARS (NM_002887.3,1210-1228).
ctgctattaaacaaagact

SEQ ID NO: 331140 - DNA, 19 bp, Homo sapiens
  siRNA target sequence for RARS (NM_002887.3,1281-1299).
gtgcacttccagacaatat

SEQ ID NO: 331141 - DNA, 19 bp, Homo sapiens
  siRNA target sequence for RARS (NM_002887.3,1283-1301).
gcacttccagacaatattt

SEQ ID NO: 331142 - DNA, 19 bp, Homo sapiens
  siRNA target sequence for RARS (NM_002887.3,1305-1323).
gctgctcaaatgattggtt

SEQ ID NO: 331143 - DNA, 19 bp, Homo sapiens
  siRNA target sequence for RARS (NM_002887.3,1402-1420).
cacgttcgggtgaaacagt

SEQ ID NO: 331144 - DNA, 19 bp, Homo sapiens
  siRNA target sequence for RARS (NM_002887.3,1439-1457).
gggagaaggactaaaacga

SEQ ID NO: 331145 - DNA, 19 bp, Homo sapiens
  siRNA target sequence for RARS (NM_002887.3,1536-1554).
gcgtatggctgcatcaaat

SEQ ID NO: 331146 - DNA, 19 bp, Homo sapiens
  siRNA target sequence for RARS (NM_002887.3,1537-1555).
cgtatggctgcatcaaata

SEQ ID NO: 331147 - DNA, 19 bp, Homo sapiens
  siRNA target sequence for RARS (NM_002887.3,1567-1585).
cccataaccggttgaatga

SEQ ID NO: 331148 - DNA, 19 bp, Homo sapiens
  siRNA target sequence for RARS (NM_002887.3,1610-1628).
gctagatgacagaggaaat

SEQ ID NO: 331149 - DNA, 19 bp, Homo sapiens
  siRNA target sequence for RARS (NM_002887.3,1611-1629).
ctagatgacagaggaaata

SEQ ID NO: 331150 - DNA, 19 bp, Homo sapiens
  siRNA target sequence for RARS (NM_002887.3,1630-1648).
cagctgcttacttgttgta

SEQ ID NO: 331151 - DNA, 19 bp, Homo sapiens
  siRNA target sequence for RARS (NM_002887.3,1678-1696).
gtctggccaatattgatga

SEQ ID NO: 331152 - DNA, 19 bp, Homo sapiens
  siRNA target sequence for RARS (NM_002887.3,1821-1839).
ctccacactctctgtgatt

SEQ ID NO: 331153 - DNA, 19 bp, Homo sapiens
  siRNA target sequence for RARS (NM_002887.3,1823-1841).
ccacactctctgtgattat

SEQ ID NO: 331154 - DNA, 19 bp, Homo sapiens
  siRNA target sequence for RARS (NM_002887.3,1824-1842).
cacactctctgtgattata

SEQ ID NO: 331155 - DNA, 19 bp, Homo sapiens
  siRNA target sequence for RARS (NM_002887.3,1826-1844).
cactctctgtgattatata

SEQ ID NO: 331156 - DNA, 19 bp, Homo sapiens
  siRNA target sequence for RARS (NM_002887.3,1850-1868).
gctggcaactgctttcaca

SEQ ID NO: 331157 - DNA, 19 bp, Homo sapiens
  siRNA target sequence for RARS (NM_002887.3,1939-1957).
ggcgtatgctgctatgtga

SEQ ID NO: 331158 - DNA, 19 bp, Homo sapiens
  siRNA target sequence for RARS (NM_002887.3,1940-1958).
gcgtatgctgctatgtgaa

SEQ ID NO: 331159 - DNA, 19 bp, Homo sapiens
  siRNA target sequence for RARS (NM_002887.3,1978-1996).
ccaaggggtttgatatcct

SEQ ID NO: 331160 - DNA, 19 bp, Homo sapiens
  siRNA target sequence for SIAH1 (NM_003031.2,1205-1223).
gttaccgcccattcttcaa

SEQ ID NO: 331161 - DNA, 19 bp, Homo sapiens
  siRNA target sequence for SIAH1 (NM_003031.2,1210-1228).
cgcccattcttcaatgtca

SEQ ID NO: 331162 - DNA, 19 bp, Homo sapiens
  siRNA target sequence for SIAH1 (NM_003031.2,1369-1387).
ctggatgtgaaataactct

SEQ ID NO: 331163 - DNA, 19 bp, Homo sapiens
  siRNA target sequence for SIAH1 (NM_003031.2,1489-1507).
ctgtaatgccccatctgat

SEQ ID NO: 331164 - DNA, 19 bp, Homo sapiens
  siRNA target sequence for SIAH1 (NM_003031.2,1509-1527).
catcagcataagtccatta

SEQ ID NO: 331165 - DNA, 19 bp, Homo sapiens
  siRNA target sequence for SIAH1 (NM_003031.2,1532-1550).
cctacagggagaggatata

SEQ ID NO: 331166 - DNA, 19 bp, Homo sapiens
  siRNA target sequence for SIAH1 (NM_003031.2,1749-1767).
cataggcgacgattgactt

SEQ ID NO: 331167 - DNA, 19 bp, Homo sapiens
  siRNA target sequence for SIAH1 (NM_003031.2,1798-1816).
gaattgcaacagccattat

SEQ ID NO: 331168 - DNA, 19 bp, Homo sapiens
  siRNA target sequence for SIAH1 (NM_003031.2,1822-1840).
gcgactgtctagtctttga

SEQ ID NO: 331169 - DNA, 19 bp, Homo sapiens
  siRNA target sequence for SIAH1 (NM_003031.2,1844-1862).
cagcattgcacagcttttt

SEQ ID NO: 331170 - DNA, 19 bp, Homo sapiens
  siRNA target sequence for SIAH1 (NM_003031.2,1873-1891).
gcaatttaggcatcaatgt

SEQ ID NO: 331171 - DNA, 19 bp, Homo sapiens
  siRNA target sequence for SLC6A1 (NM_003042.2,591-609).
cctatctctgcgggaaaaa

SEQ ID NO: 331172 - DNA, 19 bp, Homo sapiens
  siRNA target sequence for SLC6A1 (NM_003042.2,592-610).
ctatctctgcgggaaaaat

SEQ ID NO: 331173 - DNA, 19 bp, Homo sapiens
  siRNA target sequence for SLC6A1 (NM_003042.2,761-779).
gcggctgctgtgctatcat

SEQ ID NO: 331174 - DNA, 19 bp, Homo sapiens
  siRNA target sequence for SLC6A1 (NM_003042.2,762-780).
cggctgctgtgctatcatt

SEQ ID NO: 331175 - DNA, 19 bp, Homo sapiens
  siRNA target sequence for SLC6A1 (NM_003042.2,777-795).
cattctggctgaacatcta

SEQ ID NO: 331176 - DNA, 19 bp, Homo sapiens
  siRNA target sequence for SLC6A1 (NM_003042.2,1088-1106).
ggaaaggtggtctactttt

SEQ ID NO: 331177 - DNA, 19 bp, Homo sapiens
  siRNA target sequence for SLC6A1 (NM_003042.2,1292-1310).
gctctcgggagctacaact

SEQ ID NO: 331178 - DNA, 19 bp, Homo sapiens
  siRNA target sequence for SLC6A1 (NM_003042.2,1295-1313).
ctcgggagctacaactctt

SEQ ID NO: 331179 - DNA, 19 bp, Homo sapiens
  siRNA target sequence for SLC6A1 (NM_003042.2,1346-1364).
gtctgctgcatcaattcgt

SEQ ID NO: 331180 - DNA, 19 bp, Homo sapiens
  siRNA target sequence for SLC6A1 (NM_003042.2,1676-1694).
ctgatcggtctctctaaca

SEQ ID NO: 331181 - DNA, 19 bp, Homo sapiens
  siRNA target sequence for SLC6A1 (NM_003042.2,1696-1714).
cactcaggggggtatttat

SEQ ID NO: 331182 - DNA, 19 bp, Homo sapiens
  siRNA target sequence for SLC6A1 (NM_003042.2,1704-1722).
ggggtatttatgtcttcaa

SEQ ID NO: 331183 - DNA, 19 bp, Homo sapiens
  siRNA target sequence for SLC6A1 (NM_003042.2,1705-1723).
gggtatttatgtcttcaaa

SEQ ID NO: 331184 - DNA, 19 bp, Homo sapiens
  siRNA target sequence for SLC6A1 (NM_003042.2,1762-1780).
gttcctcgtgttctttgaa

SEQ ID NO: 331185 - DNA, 19 bp, Homo sapiens
  siRNA target sequence for SLC6A1 (NM_003042.2,1810-1828).
caaccgattctatgacaat

SEQ ID NO: 331186 - DNA, 19 bp, Homo sapiens
  siRNA target sequence for SLC6A1 (NM_003042.2,1815-1833).
gattctatgacaatatcca

SEQ ID NO: 331187 - DNA, 19 bp, Homo sapiens
  siRNA target sequence for SLC6A1 (NM_003042.2,1871-1889).
ctctgctggtctttcttca

SEQ ID NO: 331188 - DNA, 19 bp, Homo sapiens
  siRNA target sequence for SLC6A1 (NM_003042.2,2027-2045).
gggtacatggcctacatgt

SEQ ID NO: 331189 - DNA, 19 bp, Homo sapiens
  siRNA target sequence for SLC6A1 (NM_003042.2,2107-2125).
catcgttcgcccagagaat

SEQ ID NO: 331190 - DNA, 19 bp, Homo sapiens
  siRNA target sequence for SLC7A1 (NM_003045.2,192-210).
gcaaagtcctgctcaacat

SEQ ID NO: 331191 - DNA, 19 bp, Homo sapiens
  siRNA target sequence for SLC7A1 (NM_003045.2,193-211).
caaagtcctgctcaacatt

SEQ ID NO: 331192 - DNA, 19 bp, Homo sapiens
  siRNA target sequence for SLC7A1 (NM_003045.2,270-288).
ctcgctgcctgaacacttt

SEQ ID NO: 331193 - DNA, 19 bp, Homo sapiens
  siRNA target sequence for SLC7A1 (NM_003045.2,369-387).
caggccctgccattgtcat

SEQ ID NO: 331194 - DNA, 19 bp, Homo sapiens
  siRNA target sequence for SLC7A1 (NM_003045.2,517-535).
catcaccggctggaactta

SEQ ID NO: 331195 - DNA, 19 bp, Homo sapiens
  siRNA target sequence for SLC7A1 (NM_003045.2,544-562).
ctacatcatcggtacttca

SEQ ID NO: 331196 - DNA, 19 bp, Homo sapiens
  siRNA target sequence for SLC7A1 (NM_003045.2,665-683).
gctgaaaaccccgacatat

SEQ ID NO: 331197 - DNA, 19 bp, Homo sapiens
  siRNA target sequence for SLC7A1 (NM_003045.2,666-684).
ctgaaaaccccgacatatt

SEQ ID NO: 331198 - DNA, 19 bp, Homo sapiens
  siRNA target sequence for SLC7A1 (NM_003045.2,739-757).
gtcggccatggtcaacaaa

SEQ ID NO: 331199 - DNA, 19 bp, Homo sapiens
  siRNA target sequence for SLC7A1 (NM_003045.2,741-759).
cggccatggtcaacaaaat

SEQ ID NO: 331200 - DNA, 19 bp, Homo sapiens
  siRNA target sequence for SLC7A1 (NM_003045.2,748-766).
ggtcaacaaaatattcact

SEQ ID NO: 331201 - DNA, 19 bp, Homo sapiens
  siRNA target sequence for SLC7A1 (NM_003045.2,799-817).
ggtgtcaggatttgtgaaa

SEQ ID NO: 331202 - DNA, 19 bp, Homo sapiens
  siRNA target sequence for SLC7A1 (NM_003045.2,812-830).
gtgaaaggatcggttaaaa

SEQ ID NO: 331203 - DNA, 19 bp, Homo sapiens
  siRNA target sequence for SLC7A1 (NM_003045.2,848-866).
gaggattttgggaacacat

SEQ ID NO: 331204 - DNA, 19 bp, Homo sapiens
  siRNA target sequence for SLC7A1 (NM_003045.2,864-882).
catcaggccgtctctgttt

SEQ ID NO: 331205 - DNA, 19 bp, Homo sapiens
  siRNA target sequence for SLC7A1 (NM_003045.2,870-888).
gccgtctctgtttgaacaa

SEQ ID NO: 331206 - DNA, 19 bp, Homo sapiens
  siRNA target sequence for SLC7A1 (NM_003045.2,871-889).
ccgtctctgtttgaacaat

SEQ ID NO: 331207 - DNA, 19 bp, Homo sapiens
  siRNA target sequence for SLC7A1 (NM_003045.2,1101-1119).
ctgccctcacgctcatgat

SEQ ID NO: 331208 - DNA, 19 bp, Homo sapiens
  siRNA target sequence for SLC7A1 (NM_003045.2,1149-1167).
ccctgcccgacgcctttaa

SEQ ID NO: 331209 - DNA, 19 bp, Homo sapiens
  siRNA target sequence for SLC7A1 (NM_003045.2,1306-1324).
cttagccaacgtcaatgat

SEQ ID NO: 331210 - DNA, 19 bp, Homo sapiens
  siRNA target sequence for SLC7A1 (NM_003045.2,1326-1344).
ggaccaaaacaccaataat

SEQ ID NO: 331211 - DNA, 19 bp, Homo sapiens
  siRNA target sequence for SLC7A1 (NM_003045.2,1518-1536).
gtacttccgacgagttaga

SEQ ID NO: 331212 - DNA, 19 bp, Homo sapiens
  siRNA target sequence for SLC7A1 (NM_003045.2,1538-1556).
ccagcagaccaaaatgaat

SEQ ID NO: 331213 - DNA, 19 bp, Homo sapiens
  siRNA target sequence for SLC7A1 (NM_003045.2,1606-1624).
gttctctttgaaaaccata

SEQ ID NO: 331214 - DNA, 19 bp, Homo sapiens
  siRNA target sequence for SLC7A1 (NM_003045.2,1642-1660).
ggagccttccaaaatctct

SEQ ID NO: 331215 - DNA, 19 bp, Homo sapiens
  siRNA target sequence for SLC7A1 (NM_003045.2,1659-1677).
ctgggctaattgtgaacat

SEQ ID NO: 331216 - DNA, 19 bp, Homo sapiens
  siRNA target sequence for SLC7A1 (NM_003045.2,1661-1679).
gggctaattgtgaacattt

SEQ ID NO: 331217 - DNA, 19 bp, Homo sapiens
  siRNA target sequence for SLC7A1 (NM_003045.2,1839-1857).
gcaagaccaagctctcatt

SEQ ID NO: 331218 - DNA, 19 bp, Homo sapiens
  siRNA target sequence for SLC18A3 (NM_003055.1,606-624).
ccatagtgcccgactacat

SEQ ID NO: 331219 - DNA, 19 bp, Homo sapiens
  siRNA target sequence for SLC18A3 (NM_003055.1,1034-1052).
gccatgatcgccgataagt

SEQ ID NO: 331220 - DNA, 19 bp, Homo sapiens
  siRNA target sequence for SLC18A3 (NM_003055.1,1035-1053).
ccatgatcgccgataagta

SEQ ID NO: 331221 - DNA, 19 bp, Homo sapiens
  siRNA target sequence for SLC18A3 (NM_003055.1,1087-1105).
cgtggcgctggccttcatt

SEQ ID NO: 331222 - DNA, 19 bp, Homo sapiens
  siRNA target sequence for SLC18A3 (NM_003055.1,1092-1110).
cgctggccttcattagctt

SEQ ID NO: 331223 - DNA, 19 bp, Homo sapiens
  siRNA target sequence for SLC18A3 (NM_003055.1,1188-1206).
ctgccgtgtcgctctttga

SEQ ID NO: 331224 - DNA, 19 bp, Homo sapiens
  siRNA target sequence for SLC18A3 (NM_003055.1,1383-1401).
cgtggatgaagcatacgat

SEQ ID NO: 331225 - DNA, 19 bp, Homo sapiens
  siRNA target sequence for SLC18A3 (NM_003055.1,1586-1604).
ccgctagtggtctcactat

SEQ ID NO: 331226 - DNA, 19 bp, Homo sapiens
  siRNA target sequence for SLC18A3 (NM_003055.1,1675-1693).
gcgccatgtctcagtctat

SEQ ID NO: 331227 - DNA, 19 bp, Homo sapiens
  siRNA target sequence for SPN (NM_003123.2,211-229).
ccctgagctcaaagatgta

SEQ ID NO: 331228 - DNA, 19 bp, Homo sapiens
  siRNA target sequence for SPN (NM_003123.2,320-338).
ccctctttggacttccatt

SEQ ID NO: 331229 - DNA, 19 bp, Homo sapiens
  siRNA target sequence for SPN (NM_003123.2,381-399).
caggaagtttccatcaaga

SEQ ID NO: 331230 - DNA, 19 bp, Homo sapiens
  siRNA target sequence for SPN (NM_003123.2,482-500).
cgtgacaggtggaaccata

SEQ ID NO: 331231 - DNA, 19 bp, Homo sapiens
  siRNA target sequence for SPN (NM_003123.2,483-501).
gtgacaggtggaaccataa

SEQ ID NO: 331232 - DNA, 19 bp, Homo sapiens
  siRNA target sequence for SPN (NM_003123.2,485-503).
gacaggtggaaccataaca

SEQ ID NO: 331233 - DNA, 19 bp, Homo sapiens
  siRNA target sequence for SPN (NM_003123.2,761-779).
ggtctctagcgtaaaacta

SEQ ID NO: 331234 - DNA, 19 bp, Homo sapiens
  siRNA target sequence for SPN (NM_003123.2,762-780).
gtctctagcgtaaaactat

SEQ ID NO: 331235 - DNA, 19 bp, Homo sapiens
  siRNA target sequence for SPN (NM_003123.2,764-782).
ctctagcgtaaaactatct

SEQ ID NO: 331236 - DNA, 19 bp, Homo sapiens
  siRNA target sequence for SPN (NM_003123.2,769-787).
gcgtaaaactatctacaat

SEQ ID NO: 331237 - DNA, 19 bp, Homo sapiens
  siRNA target sequence for SYT5 (NM_003180.1,734-752).
gggctgggccagagttaca

SEQ ID NO: 331238 - DNA, 19 bp, Homo sapiens
  siRNA target sequence for SYT5 (NM_003180.1,735-753).
ggctgggccagagttacat

SEQ ID NO: 331239 - DNA, 19 bp, Homo sapiens
  siRNA target sequence for SYT5 (NM_003180.1,736-754).
gctgggccagagttacata

SEQ ID NO: 331240 - DNA, 19 bp, Homo sapiens
  siRNA target sequence for SYT5 (NM_003180.1,741-759).
gccagagttacatagacaa

SEQ ID NO: 331241 - DNA, 19 bp, Homo sapiens
  siRNA target sequence for SYT5 (NM_003180.1,1009-1027).
gacgctgaaccctcacttt

SEQ ID NO: 331242 - DNA, 19 bp, Homo sapiens
  siRNA target sequence for SYT5 (NM_003180.1,1323-1341).
gaggactgtcagatccata

SEQ ID NO: 331243 - DNA, 19 bp, Homo sapiens
  siRNA target sequence for SYT5 (NM_003180.1,1410-1428).
ctctgaacccctattacaa

SEQ ID NO: 331244 - DNA, 19 bp, Homo sapiens
  siRNA target sequence for SYT5 (NM_003180.1,1419-1437).
cctattacaacgaagcttt

SEQ ID NO: 331245 - DNA, 19 bp, Homo sapiens
  siRNA target sequence for C2orf3 (NM_003203.2,427-445).
ctagctctcttggagaaaa

SEQ ID NO: 331246 - DNA, 19 bp, Homo sapiens
  siRNA target sequence for C2orf3 (NM_003203.2,447-465).
gaactttcatcaacagtta

SEQ ID NO: 331247 - DNA, 19 bp, Homo sapiens
  siRNA target sequence for C2orf3 (NM_003203.2,491-509).
ggcagcccgcagaaaacgt

SEQ ID NO: 331248 - DNA, 19 bp, Homo sapiens
  siRNA target sequence for C2orf3 (NM_003203.2,496-514).
cccgcagaaaacgtgaatt

SEQ ID NO: 331249 - DNA, 19 bp, Homo sapiens
  siRNA target sequence for C2orf3 (NM_003203.2,517-535).
ccagggcccaagatgacta

SEQ ID NO: 331250 - DNA, 19 bp, Homo sapiens
  siRNA target sequence for C2orf3 (NM_003203.2,518-536).
cagggcccaagatgactat

SEQ ID NO: 331251 - DNA, 19 bp, Homo sapiens
  siRNA target sequence for C2orf3 (NM_003203.2,520-538).
gggcccaagatgactatat

SEQ ID NO: 331252 - DNA, 19 bp, Homo sapiens
  siRNA target sequence for C2orf3 (NM_003203.2,562-580).
cctccatctctggtatgaa

SEQ ID NO: 331253 - DNA, 19 bp, Homo sapiens
  siRNA target sequence for C2orf3 (NM_003203.2,609-627).
gagcctgatgaccatgaaa

SEQ ID NO: 331254 - DNA, 19 bp, Homo sapiens
  siRNA target sequence for C2orf3 (NM_003203.2,675-693).
gctgaggaatcaataagca

SEQ ID NO: 331255 - DNA, 19 bp, Homo sapiens
  siRNA target sequence for C2orf3 (NM_003203.2,785-803).
ggaaagagacatagatctt

SEQ ID NO: 331256 - DNA, 19 bp, Homo sapiens
  siRNA target sequence for C2orf3 (NM_003203.2,858-876).
ccgccagtaaatttagaaa

SEQ ID NO: 331257 - DNA, 19 bp, Homo sapiens
  siRNA target sequence for C2orf3 (NM_003203.2,859-877).
cgccagtaaatttagaaat

SEQ ID NO: 331258 - DNA, 19 bp, Homo sapiens
  siRNA target sequence for C2orf3 (NM_003203.2,860-878).
gccagtaaatttagaaatt

SEQ ID NO: 331259 - DNA, 19 bp, Homo sapiens
  siRNA target sequence for C2orf3 (NM_003203.2,888-906).
caattaaatactagattaa

SEQ ID NO: 331260 - DNA, 19 bp, Homo sapiens
  siRNA target sequence for C2orf3 (NM_003203.2,898-916).
ctagattaacattactaca

SEQ ID NO: 331261 - DNA, 19 bp, Homo sapiens
  siRNA target sequence for C2orf3 (NM_003203.2,933-951).
cacctgagggagtatgaaa

SEQ ID NO: 331262 - DNA, 19 bp, Homo sapiens
  siRNA target sequence for C2orf3 (NM_003203.2,935-953).
cctgagggagtatgaaaaa

SEQ ID NO: 331263 - DNA, 19 bp, Homo sapiens
  siRNA target sequence for C2orf3 (NM_003203.2,940-958).
gggagtatgaaaaatacgt

SEQ ID NO: 331264 - DNA, 19 bp, Homo sapiens
  siRNA target sequence for C2orf3 (NM_003203.2,941-959).
ggagtatgaaaaatacgta

SEQ ID NO: 331265 - DNA, 19 bp, Homo sapiens
  siRNA target sequence for C2orf3 (NM_003203.2,1075-1093).
gccttaatgaaaagattat

SEQ ID NO: 331266 - DNA, 19 bp, Homo sapiens
  siRNA target sequence for C2orf3 (NM_003203.2,1121-1139).
gcatgcactccttttaaaa

SEQ ID NO: 331267 - DNA, 19 bp, Homo sapiens
  siRNA target sequence for C2orf3 (NM_003203.2,1161-1179).
cgcaggcaagatgaattaa

SEQ ID NO: 331268 - DNA, 19 bp, Homo sapiens
  siRNA target sequence for C2orf3 (NM_003203.2,1162-1180).
gcaggcaagatgaattaaa

SEQ ID NO: 331269 - DNA, 19 bp, Homo sapiens
  siRNA target sequence for C2orf3 (NM_003203.2,1265-1283).
gtggattttagaagagatt

SEQ ID NO: 331270 - DNA, 19 bp, Homo sapiens
  siRNA target sequence for C2orf3 (NM_003203.2,1267-1285).
ggattttagaagagattga

SEQ ID NO: 331271 - DNA, 19 bp, Homo sapiens
  siRNA target sequence for C2orf3 (NM_003203.2,1338-1356).
catcaggaaggaacatcta

SEQ ID NO: 331272 - DNA, 19 bp, Homo sapiens
  siRNA target sequence for C2orf3 (NM_003203.2,1370-1388).
gccttcagcagagatgatt

SEQ ID NO: 331273 - DNA, 19 bp, Homo sapiens
  siRNA target sequence for C2orf3 (NM_003203.2,1567-1585).
ccctaatacgagttcagtt

SEQ ID NO: 331274 - DNA, 19 bp, Homo sapiens
  siRNA target sequence for C2orf3 (NM_003203.2,1575-1593).
cgagttcagttgattgatt

SEQ ID NO: 331275 - DNA, 19 bp, Homo sapiens
  siRNA target sequence for C2orf3 (NM_003203.2,1615-1633).
ccacaggtttaaaagagat

SEQ ID NO: 331276 - DNA, 19 bp, Homo sapiens
  siRNA target sequence for C2orf3 (NM_003203.2,1629-1647).
gagatgccatggttcaaat

SEQ ID NO: 331277 - DNA, 19 bp, Homo sapiens
  siRNA target sequence for C2orf3 (NM_003203.2,1643-1661).
caaatctgtagaagaattt

SEQ ID NO: 331278 - DNA, 19 bp, Homo sapiens
  siRNA target sequence for C2orf3 (NM_003203.2,1691-1709).
ggaaagtagttcagataaa

SEQ ID NO: 331279 - DNA, 19 bp, Homo sapiens
  siRNA target sequence for C2orf3 (NM_003203.2,1713-1731).
gtcttgtctgcaatcatca

SEQ ID NO: 331280 - DNA, 19 bp, Homo sapiens
  siRNA target sequence for C2orf3 (NM_003203.2,1718-1736).
gtctgcaatcatcaacaaa

SEQ ID NO: 331281 - DNA, 19 bp, Homo sapiens
  siRNA target sequence for C2orf3 (NM_003203.2,1747-1765).
cccgacttacagactttgt

SEQ ID NO: 331282 - DNA, 19 bp, Homo sapiens
  siRNA target sequence for C2orf3 (NM_003203.2,1748-1766).
ccgacttacagactttgta

SEQ ID NO: 331283 - DNA, 19 bp, Homo sapiens
  siRNA target sequence for C2orf3 (NM_003203.2,1750-1768).
gacttacagactttgtaga

SEQ ID NO: 331284 - DNA, 19 bp, Homo sapiens
  siRNA target sequence for C2orf3 (NM_003203.2,1772-1790).
cctttgggatcctttgtca

SEQ ID NO: 331285 - DNA, 19 bp, Homo sapiens
  siRNA target sequence for C2orf3 (NM_003203.2,1795-1813).
cacagacaacaagtttaat

SEQ ID NO: 331286 - DNA, 19 bp, Homo sapiens
  siRNA target sequence for C2orf3 (NM_003203.2,1823-1841).
cagagtgattcttgaagaa

SEQ ID NO: 331287 - DNA, 19 bp, Homo sapiens
  siRNA target sequence for C2orf3 (NM_003203.2,1951-1969).
caaagagtgctgtagaaaa

SEQ ID NO: 331288 - DNA, 19 bp, Homo sapiens
  siRNA target sequence for C2orf3 (NM_003203.2,1975-1993).
catcacctcattcaaagtt

SEQ ID NO: 331289 - DNA, 19 bp, Homo sapiens
  siRNA target sequence for C2orf3 (NM_003203.2,2024-2042).
gctcttccgcaatattctt

SEQ ID NO: 331290 - DNA, 19 bp, Homo sapiens
  siRNA target sequence for C2orf3 (NM_003203.2,2027-2045).
cttccgcaatattcttctt

SEQ ID NO: 331291 - DNA, 19 bp, Homo sapiens
  siRNA target sequence for C2orf3 (NM_003203.2,2091-2109).
gggaagctgctaaatcgtt

SEQ ID NO: 331292 - DNA, 19 bp, Homo sapiens
  siRNA target sequence for C2orf3 (NM_003203.2,2096-2114).
gctgctaaatcgttacctt

SEQ ID NO: 331293 - DNA, 19 bp, Homo sapiens
  siRNA target sequence for C2orf3 (NM_003203.2,2097-2115).
ctgctaaatcgttacctta

SEQ ID NO: 331294 - DNA, 19 bp, Homo sapiens
  siRNA target sequence for C2orf3 (NM_003203.2,2099-2117).
gctaaatcgttaccttatt

SEQ ID NO: 331295 - DNA, 19 bp, Homo sapiens
  siRNA target sequence for C2orf3 (NM_003203.2,2209-2227).
ctgccatgaggacatctat

SEQ ID NO: 331296 - DNA, 19 bp, Homo sapiens
  siRNA target sequence for C2orf3 (NM_003203.2,2213-2231).
catgaggacatctattcca

SEQ ID NO: 331297 - DNA, 19 bp, Homo sapiens
  siRNA target sequence for C2orf3 (NM_003203.2,2224-2242).
ctattccacagctagaaaa

SEQ ID NO: 331298 - DNA, 19 bp, Homo sapiens
  siRNA target sequence for C2orf3 (NM_003203.2,2261-2279).
gcagtctgcacataaatta

SEQ ID NO: 331299 - DNA, 19 bp, Homo sapiens
  siRNA target sequence for C2orf3 (NM_003203.2,2264-2282).
gtctgcacataaattatct

SEQ ID NO: 331300 - DNA, 19 bp, Homo sapiens
  siRNA target sequence for C2orf3 (NM_003203.2,2306-2324).
cgaagaaataattcttatt

SEQ ID NO: 331301 - DNA, 19 bp, Homo sapiens
  siRNA target sequence for TJP1 (NM_003257.2,524-542).
gctatatgggaacaacata

SEQ ID NO: 331302 - DNA, 19 bp, Homo sapiens
  siRNA target sequence for TJP1 (NM_003257.2,556-574).
cagggctcctggatttgga

SEQ ID NO: 331303 - DNA, 19 bp, Homo sapiens
  siRNA target sequence for TJP1 (NM_003257.2,558-576).
gggctcctggatttggatt

SEQ ID NO: 331304 - DNA, 19 bp, Homo sapiens
  siRNA target sequence for TJP1 (NM_003257.2,597-615).
gacgagataatcctcattt

SEQ ID NO: 331305 - DNA, 19 bp, Homo sapiens
  siRNA target sequence for TJP1 (NM_003257.2,600-618).
gagataatcctcattttca

SEQ ID NO: 331306 - DNA, 19 bp, Homo sapiens
  siRNA target sequence for TJP1 (NM_003257.2,619-637).
gagtggggaaacgtcaata

SEQ ID NO: 331307 - DNA, 19 bp, Homo sapiens
  siRNA target sequence for TJP1 (NM_003257.2,621-639).
gtggggaaacgtcaatagt

SEQ ID NO: 331308 - DNA, 19 bp, Homo sapiens
  siRNA target sequence for TJP1 (NM_003257.2,624-642).
gggaaacgtcaatagtgat

SEQ ID NO: 331309 - DNA, 19 bp, Homo sapiens
  siRNA target sequence for TJP1 (NM_003257.2,625-643).
ggaaacgtcaatagtgatt

SEQ ID NO: 331310 - DNA, 19 bp, Homo sapiens
  siRNA target sequence for TJP1 (NM_003257.2,692-710).
gaccgagttgcaatggtta

SEQ ID NO: 331311 - DNA, 19 bp, Homo sapiens
  siRNA target sequence for TJP1 (NM_003257.2,712-730).
cggagtttcaatggataat

SEQ ID NO: 331312 - DNA, 19 bp, Homo sapiens
  siRNA target sequence for TJP1 (NM_003257.2,837-855).
ctgaaccagtatctgataa

SEQ ID NO: 331313 - DNA, 19 bp, Homo sapiens
  siRNA target sequence for TJP1 (NM_003257.2,900-918).
gccggagtggtgtggttaa

SEQ ID NO: 331314 - DNA, 19 bp, Homo sapiens
  siRNA target sequence for TJP1 (NM_003257.2,902-920).
cggagtggtgtggttaaca

SEQ ID NO: 331315 - DNA, 19 bp, Homo sapiens
  siRNA target sequence for TJP1 (NM_003257.2,1015-1033).
gcctgctaaacctactaaa

SEQ ID NO: 331316 - DNA, 19 bp, Homo sapiens
  siRNA target sequence for TJP1 (NM_003257.2,1017-1035).
ctgctaaacctactaaagt

SEQ ID NO: 331317 - DNA, 19 bp, Homo sapiens
  siRNA target sequence for TJP1 (NM_003257.2,1019-1037).
gctaaacctactaaagtca

SEQ ID NO: 331318 - DNA, 19 bp, Homo sapiens
  siRNA target sequence for TJP1 (NM_003257.2,1042-1060).
ggtgaaatcccggaaaaat

SEQ ID NO: 331319 - DNA, 19 bp, Homo sapiens
  siRNA target sequence for TJP1 (NM_003257.2,1076-1094).
cgattggcaagccatatat

SEQ ID NO: 331320 - DNA, 19 bp, Homo sapiens
  siRNA target sequence for TJP1 (NM_003257.2,1081-1099).
ggcaagccatatatttgtt

SEQ ID NO: 331321 - DNA, 19 bp, Homo sapiens
  siRNA target sequence for TJP1 (NM_003257.2,1082-1100).
gcaagccatatatttgtta

SEQ ID NO: 331322 - DNA, 19 bp, Homo sapiens
  siRNA target sequence for TJP1 (NM_003257.2,1148-1166).
gaaggtgatgttgtattga

SEQ ID NO: 331323 - DNA, 19 bp, Homo sapiens
  siRNA target sequence for TJP1 (NM_003257.2,1151-1169).
ggtgatgttgtattgaaga

SEQ ID NO: 331324 - DNA, 19 bp, Homo sapiens
  siRNA target sequence for TJP1 (NM_003257.2,1152-1170).
gtgatgttgtattgaagat

SEQ ID NO: 331325 - DNA, 19 bp, Homo sapiens
  siRNA target sequence for TJP1 (NM_003257.2,1175-1193).
ggtactgtgacagaaaata

SEQ ID NO: 331326 - DNA, 19 bp, Homo sapiens
  siRNA target sequence for TJP1 (NM_003257.2,1265-1283).
gaacgggctacgctattga

SEQ ID NO: 331327 - DNA, 19 bp, Homo sapiens
  siRNA target sequence for TJP1 (NM_003257.2,1269-1287).
gggctacgctattgaatgt

SEQ ID NO: 331328 - DNA, 19 bp, Homo sapiens
  siRNA target sequence for TJP1 (NM_003257.2,1429-1447).
gcggtcagagccttctgat

SEQ ID NO: 331329 - DNA, 19 bp, Homo sapiens
  siRNA target sequence for TJP1 (NM_003257.2,1553-1571).
gatgatcacacacctaaaa

SEQ ID NO: 331330 - DNA, 19 bp, Homo sapiens
  siRNA target sequence for TJP1 (NM_003257.2,1653-1671).
gcaaccagatgtggattta

SEQ ID NO: 331331 - DNA, 19 bp, Homo sapiens
  siRNA target sequence for TJP1 (NM_003257.2,1685-1703).
ctgatggtgtcctacctaa

SEQ ID NO: 331332 - DNA, 19 bp, Homo sapiens
  siRNA target sequence for TJP1 (NM_003257.2,1687-1705).
gatggtgtcctacctaatt

SEQ ID NO: 331333 - DNA, 19 bp, Homo sapiens
  siRNA target sequence for TJP1 (NM_003257.2,1690-1708).
ggtgtcctacctaattcaa

SEQ ID NO: 331334 - DNA, 19 bp, Homo sapiens
  siRNA target sequence for TJP1 (NM_003257.2,1695-1713).
cctacctaattcaactcat

SEQ ID NO: 331335 - DNA, 19 bp, Homo sapiens
  siRNA target sequence for TJP1 (NM_003257.2,1731-1749).
ggcccagcatgaaattggt

SEQ ID NO: 331336 - DNA, 19 bp, Homo sapiens
  siRNA target sequence for TJP1 (NM_003257.2,1732-1750).
gcccagcatgaaattggta

SEQ ID NO: 331337 - DNA, 19 bp, Homo sapiens
  siRNA target sequence for TJP1 (NM_003257.2,1733-1751).
cccagcatgaaattggtaa

SEQ ID NO: 331338 - DNA, 19 bp, Homo sapiens
  siRNA target sequence for TJP1 (NM_003257.2,1734-1752).
ccagcatgaaattggtaaa

SEQ ID NO: 331339 - DNA, 19 bp, Homo sapiens
  siRNA target sequence for TJP1 (NM_003257.2,1741-1759).
gaaattggtaaaattcaga

SEQ ID NO: 331340 - DNA, 19 bp, Homo sapiens
  siRNA target sequence for TJP1 (NM_003257.2,1817-1835).
gctggcgttctagaagata

SEQ ID NO: 331341 - DNA, 19 bp, Homo sapiens
  siRNA target sequence for TJP1 (NM_003257.2,1881-1899).
gggtaaacaacgtagattt

SEQ ID NO: 331342 - DNA, 19 bp, Homo sapiens
  siRNA target sequence for TJP1 (NM_003257.2,1883-1901).
gtaaacaacgtagatttta

SEQ ID NO: 331343 - DNA, 19 bp, Homo sapiens
  siRNA target sequence for TJP1 (NM_003257.2,1888-1906).
caacgtagattttacaaat

SEQ ID NO: 331344 - DNA, 19 bp, Homo sapiens
  siRNA target sequence for TJP1 (NM_003257.2,1952-1970).
ggagaagaagtgaccatat

SEQ ID NO: 331345 - DNA, 19 bp, Homo sapiens
  siRNA target sequence for TJP1 (NM_003257.2,1953-1971).
gagaagaagtgaccatatt

SEQ ID NO: 331346 - DNA, 19 bp, Homo sapiens
  siRNA target sequence for TJP1 (NM_003257.2,1981-1999).
gaagaaggatgtttatcgt

SEQ ID NO: 331347 - DNA, 19 bp, Homo sapiens
  siRNA target sequence for TJP1 (NM_003257.2,1998-2016).
gtcgcattgtagaatcaga

SEQ ID NO: 331348 - DNA, 19 bp, Homo sapiens
  siRNA target sequence for TJP1 (NM_003257.2,2067-2085).
ctccctatggacttagttt

SEQ ID NO: 331349 - DNA, 19 bp, Homo sapiens
  siRNA target sequence for TJP1 (NM_003257.2,2069-2087).
ccctatggacttagtttta

SEQ ID NO: 331350 - DNA, 19 bp, Homo sapiens
  siRNA target sequence for TJP1 (NM_003257.2,2070-2088).
cctatggacttagttttaa

SEQ ID NO: 331351 - DNA, 19 bp, Homo sapiens
  siRNA target sequence for TJP1 (NM_003257.2,2114-2132).
gataccttgtacaatggaa

SEQ ID NO: 331352 - DNA, 19 bp, Homo sapiens
  siRNA target sequence for TJP1 (NM_003257.2,2137-2155).
gggctcttggcttgctatt

SEQ ID NO: 331353 - DNA, 19 bp, Homo sapiens
  siRNA target sequence for TJP1 (NM_003257.2,2140-2158).
ctcttggcttgctattcga

SEQ ID NO: 331354 - DNA, 19 bp, Homo sapiens
  siRNA target sequence for TJP1 (NM_003257.2,2146-2164).
gcttgctattcgaattggt

SEQ ID NO: 331355 - DNA, 19 bp, Homo sapiens
  siRNA target sequence for TJP1 (NM_003257.2,2147-2165).
cttgctattcgaattggta

SEQ ID NO: 331356 - DNA, 19 bp, Homo sapiens
  siRNA target sequence for TJP1 (NM_003257.2,2150-2168).
gctattcgaattggtaaaa

SEQ ID NO: 331357 - DNA, 19 bp, Homo sapiens
  siRNA target sequence for TJP1 (NM_003257.2,2186-2204).
cgaggcatcatccctaata

SEQ ID NO: 331358 - DNA, 19 bp, Homo sapiens
  siRNA target sequence for TJP1 (NM_003257.2,2190-2208).
gcatcatccctaataagaa

SEQ ID NO: 331359 - DNA, 19 bp, Homo sapiens
  siRNA target sequence for TJP1 (NM_003257.2,2221-2239).
gctagccagtgtacagtat

SEQ ID NO: 331360 - DNA, 19 bp, Homo sapiens
  siRNA target sequence for TJP1 (NM_003257.2,2222-2240).
ctagccagtgtacagtata

SEQ ID NO: 331361 - DNA, 19 bp, Homo sapiens
  siRNA target sequence for TJP1 (NM_003257.2,2226-2244).
ccagtgtacagtatacact

SEQ ID NO: 331362 - DNA, 19 bp, Homo sapiens
  siRNA target sequence for TJP1 (NM_003257.2,2227-2245).
cagtgtacagtatacactt

SEQ ID NO: 331363 - DNA, 19 bp, Homo sapiens
  siRNA target sequence for TJP1 (NM_003257.2,2270-2288).
gctgacttctggagattca

SEQ ID NO: 331364 - DNA, 19 bp, Homo sapiens
  siRNA target sequence for TJP1 (NM_003257.2,2294-2312).
cttcgcagctccaagagaa

SEQ ID NO: 331365 - DNA, 19 bp, Homo sapiens
  siRNA target sequence for TJP1 (NM_003257.2,2304-2322).
ccaagagaaatcttcgaaa

SEQ ID NO: 331366 - DNA, 19 bp, Homo sapiens
  siRNA target sequence for TJP1 (NM_003257.2,2338-2356).
gtccgctcagcctgttcaa

SEQ ID NO: 331367 - DNA, 19 bp, Homo sapiens
  siRNA target sequence for TJP1 (NM_003257.2,2347-2365).
gcctgttcaaacaaagttt

SEQ ID NO: 331368 - DNA, 19 bp, Homo sapiens
  siRNA target sequence for TJP1 (NM_003257.2,2405-2423).
ctgaggcctgtaaccattt

SEQ ID NO: 331369 - DNA, 19 bp, Homo sapiens
  siRNA target sequence for TJP1 (NM_003257.2,2410-2428).
gcctgtaaccatttttgga

SEQ ID NO: 331370 - DNA, 19 bp, Homo sapiens
  siRNA target sequence for TJP1 (NM_003257.2,2544-2562).
gcctgcatacaataaagca

SEQ ID NO: 331371 - DNA, 19 bp, Homo sapiens
  siRNA target sequence for TJP1 (NM_003257.2,2609-2627).
gcagttgatcgtcttaact

SEQ ID NO: 331372 - DNA, 19 bp, Homo sapiens
  siRNA target sequence for TJP1 (NM_003257.2,2610-2628).
cagttgatcgtcttaacta

SEQ ID NO: 331373 - DNA, 19 bp, Homo sapiens
  siRNA target sequence for TJP1 (NM_003257.2,2632-2650).
ccagtggtatccaattgtt

SEQ ID NO: 331374 - DNA, 19 bp, Homo sapiens
  siRNA target sequence for TJP1 (NM_003257.2,2635-2653).
gtggtatccaattgttgta

SEQ ID NO: 331375 - DNA, 19 bp, Homo sapiens
  siRNA target sequence for TJP1 (NM_003257.2,2719-2737).
gaaaagtgccaggaagtta

SEQ ID NO: 331376 - DNA, 19 bp, Homo sapiens
  siRNA target sequence for TJP1 (NM_003257.2,2734-2752).
gttatacgagcgatctcat

SEQ ID NO: 331377 - DNA, 19 bp, Homo sapiens
  siRNA target sequence for TJP1 (NM_003257.2,2745-2763).
gatctcataaacttcgtaa

SEQ ID NO: 331378 - DNA, 19 bp, Homo sapiens
  siRNA target sequence for TJP1 (NM_003257.2,2748-2766).
ctcataaacttcgtaaaaa

SEQ ID NO: 331379 - DNA, 19 bp, Homo sapiens
  siRNA target sequence for TJP1 (NM_003257.2,2797-2815).
cttaaattcaatgaatgat

SEQ ID NO: 331380 - DNA, 19 bp, Homo sapiens
  siRNA target sequence for TJP1 (NM_003257.2,2820-2838).
ggtatggtgcgctgaaaga

SEQ ID NO: 331381 - DNA, 19 bp, Homo sapiens
  siRNA target sequence for TJP1 (NM_003257.2,2887-2905).
ggcggatggtgctacaagt

SEQ ID NO: 331382 - DNA, 19 bp, Homo sapiens
  siRNA target sequence for TJP1 (NM_003257.2,2890-2908).
ggatggtgctacaagtgat

SEQ ID NO: 331383 - DNA, 19 bp, Homo sapiens
  siRNA target sequence for TJP1 (NM_003257.2,2944-2962).
gtcagctccaggtagtgaa

SEQ ID NO: 331384 - DNA, 19 bp, Homo sapiens
  siRNA target sequence for TJP1 (NM_003257.2,2948-2966).
gctccaggtagtgaatact

SEQ ID NO: 331385 - DNA, 19 bp, Homo sapiens
  siRNA target sequence for TJP1 (NM_003257.2,2951-2969).
ccaggtagtgaatactcaa

SEQ ID NO: 331386 - DNA, 19 bp, Homo sapiens
  siRNA target sequence for TJP1 (NM_003257.2,2955-2973).
gtagtgaatactcaatgta

SEQ ID NO: 331387 - DNA, 19 bp, Homo sapiens
  siRNA target sequence for TJP1 (NM_003257.2,2960-2978).
gaatactcaatgtatagca

SEQ ID NO: 331388 - DNA, 19 bp, Homo sapiens
  siRNA target sequence for TJP1 (NM_003257.2,2988-3006).
gacacacttctgactatga

SEQ ID NO: 331389 - DNA, 19 bp, Homo sapiens
  siRNA target sequence for TJP1 (NM_003257.2,3028-3046).
ggcctacactgatcaagaa

SEQ ID NO: 331390 - DNA, 19 bp, Homo sapiens
  siRNA target sequence for TJP1 (NM_003257.2,3034-3052).
cactgatcaagaactagat

SEQ ID NO: 331391 - DNA, 19 bp, Homo sapiens
  siRNA target sequence for TJP1 (NM_003257.2,3180-3198).
cgcagccacaaccaattca

SEQ ID NO: 331392 - DNA, 19 bp, Homo sapiens
  siRNA target sequence for TJP1 (NM_003257.2,3181-3199).
gcagccacaaccaattcat

SEQ ID NO: 331393 - DNA, 19 bp, Homo sapiens
  siRNA target sequence for TJP1 (NM_003257.2,3182-3200).
cagccacaaccaattcata

SEQ ID NO: 331394 - DNA, 19 bp, Homo sapiens
  siRNA target sequence for TJP1 (NM_003257.2,3184-3202).
gccacaaccaattcataga

SEQ ID NO: 331395 - DNA, 19 bp, Homo sapiens
  siRNA target sequence for TJP1 (NM_003257.2,3186-3204).
cacaaccaattcatagaat

SEQ ID NO: 331396 - DNA, 19 bp, Homo sapiens
  siRNA target sequence for TJP1 (NM_003257.2,3191-3209).
ccaattcatagaatagact

SEQ ID NO: 331397 - DNA, 19 bp, Homo sapiens
  siRNA target sequence for TJP1 (NM_003257.2,3378-3396).
caccacaagctgattcttt

SEQ ID NO: 331398 - DNA, 19 bp, Homo sapiens
  siRNA target sequence for TJP1 (NM_003257.2,3383-3401).
caagctgattctttaagaa

SEQ ID NO: 331399 - DNA, 19 bp, Homo sapiens
  siRNA target sequence for TJP1 (NM_003257.2,3415-3433).
ggcagctcacataatgcta

SEQ ID NO: 331400 - DNA, 19 bp, Homo sapiens
  siRNA target sequence for TJP1 (NM_003257.2,3450-3468).
cattgtcgtcgcatgtaga

SEQ ID NO: 331401 - DNA, 19 bp, Homo sapiens
  siRNA target sequence for TJP1 (NM_003257.2,3459-3477).
cgcatgtagatccaacaaa

SEQ ID NO: 331402 - DNA, 19 bp, Homo sapiens
  siRNA target sequence for TJP1 (NM_003257.2,3467-3485).
gatccaacaaaggtgtata

SEQ ID NO: 331403 - DNA, 19 bp, Homo sapiens
  siRNA target sequence for TJP1 (NM_003257.2,3481-3499).
gtatagaaaggatccatat

SEQ ID NO: 331404 - DNA, 19 bp, Homo sapiens
  siRNA target sequence for TJP1 (NM_003257.2,3495-3513).
catatcccgaggaaatgat

SEQ ID NO: 331405 - DNA, 19 bp, Homo sapiens
  siRNA target sequence for TJP1 (NM_003257.2,3577-3595).
gcctaatctgacctatgaa

SEQ ID NO: 331406 - DNA, 19 bp, Homo sapiens
  siRNA target sequence for TJP1 (NM_003257.2,3604-3622).
cccatacgtagagaaacaa

SEQ ID NO: 331407 - DNA, 19 bp, Homo sapiens
  siRNA target sequence for TJP1 (NM_003257.2,3635-3653).
ctcgagcagcccacataca

SEQ ID NO: 331408 - DNA, 19 bp, Homo sapiens
  siRNA target sequence for TJP1 (NM_003257.2,3679-3697).
ccagttttctcgaaactat

SEQ ID NO: 331409 - DNA, 19 bp, Homo sapiens
  siRNA target sequence for TJP1 (NM_003257.2,3682-3700).
gttttctcgaaactatgaa

SEQ ID NO: 331410 - DNA, 19 bp, Homo sapiens
  siRNA target sequence for TJP1 (NM_003257.2,3723-3741).
gcgtccccatgtatgaaga

SEQ ID NO: 331411 - DNA, 19 bp, Homo sapiens
  siRNA target sequence for TJP1 (NM_003257.2,3724-3742).
cgtccccatgtatgaagaa

SEQ ID NO: 331412 - DNA, 19 bp, Homo sapiens
  siRNA target sequence for TJP1 (NM_003257.2,3747-3765).
ggtcatattatgatgacaa

SEQ ID NO: 331413 - DNA, 19 bp, Homo sapiens
  siRNA target sequence for TJP1 (NM_003257.2,3775-3793).
cccatctcggccacctttt

SEQ ID NO: 331414 - DNA, 19 bp, Homo sapiens
  siRNA target sequence for TJP1 (NM_003257.2,3777-3795).
catctcggccaccttttga

SEQ ID NO: 331415 - DNA, 19 bp, Homo sapiens
  siRNA target sequence for TJP1 (NM_003257.2,3783-3801).
ggccaccttttgataatca

SEQ ID NO: 331416 - DNA, 19 bp, Homo sapiens
  siRNA target sequence for TJP1 (NM_003257.2,3844-3862).
ctcagaacgagggtacttt

SEQ ID NO: 331417 - DNA, 19 bp, Homo sapiens
  siRNA target sequence for TJP1 (NM_003257.2,3898-3916).
cagcagaccacgttacgaa

SEQ ID NO: 331418 - DNA, 19 bp, Homo sapiens
  siRNA target sequence for TJP1 (NM_003257.2,4032-4050).
cagagtccaagcagtattt

SEQ ID NO: 331419 - DNA, 19 bp, Homo sapiens
  siRNA target sequence for TJP1 (NM_003257.2,4042-4060).
gcagtattttgagcaatat

SEQ ID NO: 331420 - DNA, 19 bp, Homo sapiens
  siRNA target sequence for TJP1 (NM_003257.2,4045-4063).
gtattttgagcaatattca

SEQ ID NO: 331421 - DNA, 19 bp, Homo sapiens
  siRNA target sequence for TJP1 (NM_003257.2,4098-4116).
cctctagagcaggtcattt

SEQ ID NO: 331422 - DNA, 19 bp, Homo sapiens
  siRNA target sequence for TJP1 (NM_003257.2,4263-4281).
ctgtactcaccagagttaa

SEQ ID NO: 331423 - DNA, 19 bp, Homo sapiens
  siRNA target sequence for TJP1 (NM_003257.2,4265-4283).
gtactcaccagagttaaga

SEQ ID NO: 331424 - DNA, 19 bp, Homo sapiens
  siRNA target sequence for TJP1 (NM_003257.2,4272-4290).
ccagagttaagatgtttga

SEQ ID NO: 331425 - DNA, 19 bp, Homo sapiens
  siRNA target sequence for TJP1 (NM_003257.2,4358-4376).
gaagtagcatctaaacctt

SEQ ID NO: 331426 - DNA, 19 bp, Homo sapiens
  siRNA target sequence for TJP1 (NM_003257.2,4399-4417).
caaacccacttctcagaat

SEQ ID NO: 331427 - DNA, 19 bp, Homo sapiens
  siRNA target sequence for TJP1 (NM_003257.2,4414-4432).
gaatcaattcagtgaacat

SEQ ID NO: 331428 - DNA, 19 bp, Homo sapiens
  siRNA target sequence for TJP1 (NM_003257.2,4461-4479).
ctcaaaaacctcaactgaa

SEQ ID NO: 331429 - DNA, 19 bp, Homo sapiens
  siRNA target sequence for TJP1 (NM_003257.2,4541-4559).
cgaaaacagctgtcatact

SEQ ID NO: 331430 - DNA, 19 bp, Homo sapiens
  siRNA target sequence for TJP1 (NM_003257.2,4558-4576).
ctttgaccgaagaagtttt

SEQ ID NO: 331431 - DNA, 19 bp, Homo sapiens
  siRNA target sequence for TJP1 (NM_003257.2,4694-4712).
gctgatggtgtggatagat

SEQ ID NO: 331432 - DNA, 19 bp, Homo sapiens
  siRNA target sequence for TJP1 (NM_003257.2,4697-4715).
gatggtgtggatagatcat

SEQ ID NO: 331433 - DNA, 19 bp, Homo sapiens
  siRNA target sequence for TJP1 (NM_003257.2,4806-4824).
gcgcgtctctccacataca

SEQ ID NO: 331434 - DNA, 19 bp, Homo sapiens
  siRNA target sequence for TJP1 (NM_003257.2,4807-4825).
cgcgtctctccacatacat

SEQ ID NO: 331435 - DNA, 19 bp, Homo sapiens
  siRNA target sequence for TJP1 (NM_003257.2,5037-5055).
ctccagcatacaatcgatt

SEQ ID NO: 331436 - DNA, 19 bp, Homo sapiens
  siRNA target sequence for TJP1 (NM_003257.2,5047-5065).
caatcgattcacaccaaaa

SEQ ID NO: 331437 - DNA, 19 bp, Homo sapiens
  siRNA target sequence for TJP1 (NM_003257.2,5051-5069).
cgattcacaccaaaaccat

SEQ ID NO: 331438 - DNA, 19 bp, Homo sapiens
  siRNA target sequence for TJP1 (NM_003257.2,5052-5070).
gattcacaccaaaaccata

SEQ ID NO: 331439 - DNA, 19 bp, Homo sapiens
  siRNA target sequence for TJP1 (NM_003257.2,5060-5078).
ccaaaaccatatacaagtt

SEQ ID NO: 331440 - DNA, 19 bp, Homo sapiens
  siRNA target sequence for TJP1 (NM_003257.2,5076-5094).
gttctgcccgaccatttga

SEQ ID NO: 331441 - DNA, 19 bp, Homo sapiens
  siRNA target sequence for TJP1 (NM_003257.2,5088-5106).
catttgaacgcaagtttga

SEQ ID NO: 331442 - DNA, 19 bp, Homo sapiens
  siRNA target sequence for TJP1 (NM_003257.2,5112-5130).
ctaaattcaatcacaatct

SEQ ID NO: 331443 - DNA, 19 bp, Homo sapiens
  siRNA target sequence for TJP1 (NM_003257.2,5125-5143).
caatcttctgccaagtgaa

SEQ ID NO: 331444 - DNA, 19 bp, Homo sapiens
  siRNA target sequence for TJP1 (NM_003257.2,5215-5233).
ggcacagcctcctgagttt

SEQ ID NO: 331445 - DNA, 19 bp, Homo sapiens
  siRNA target sequence for TJP1 (NM_003257.2,5269-5287).
gaagcctaaatatcaaata

SEQ ID NO: 331446 - DNA, 19 bp, Homo sapiens
  siRNA target sequence for TJP1 (NM_003257.2,5296-5314).
cagcacagtgcctaaagct

SEQ ID NO: 331447 - DNA, 19 bp, Homo sapiens
  siRNA target sequence for TJP1 (NM_003257.2,5298-5316).
gcacagtgcctaaagctat

SEQ ID NO: 331448 - DNA, 19 bp, Homo sapiens
  siRNA target sequence for TJP1 (NM_003257.2,5377-5395).
cacagcccgaggcatattt

SEQ ID NO: 331449 - DNA, 19 bp, Homo sapiens
  siRNA target sequence for TJP1 (NM_003257.2,5379-5397).
cagcccgaggcatatttaa

SEQ ID NO: 331450 - DNA, 19 bp, Homo sapiens
  siRNA target sequence for TJP1 (NM_003257.2,5381-5399).
gcccgaggcatatttaaca

SEQ ID NO: 331451 - DNA, 19 bp, Homo sapiens
  siRNA target sequence for TJP1 (NM_003257.2,5410-5428).
cgtgctgagttccatagaa

SEQ ID NO: 331452 - DNA, 19 bp, Homo sapiens
  siRNA target sequence for TJP1 (NM_003257.2,5413-5431).
gctgagttccatagaaact

SEQ ID NO: 331453 - DNA, 19 bp, Homo sapiens
  siRNA target sequence for TJP1 (NM_003257.2,5422-5440).
catagaaactggtgttagt

SEQ ID NO: 331454 - DNA, 19 bp, Homo sapiens
  siRNA target sequence for TJP1 (NM_003257.2,5426-5444).
gaaactggtgttagtataa

SEQ ID NO: 331455 - DNA, 19 bp, Homo sapiens
  siRNA target sequence for TJP1 (NM_003257.2,5471-5489).
ggagttgagcaggaaatct

SEQ ID NO: 331456 - DNA, 19 bp, Homo sapiens
  siRNA target sequence for TJP1 (NM_003257.2,5477-5495).
gagcaggaaatctatttca

SEQ ID NO: 331457 - DNA, 19 bp, Homo sapiens
  siRNA target sequence for TJP1 (NM_003257.2,5518-5536).
ccttccacctttagataaa

SEQ ID NO: 331458 - DNA, 19 bp, Homo sapiens
  siRNA target sequence for TJP1 (NM_003257.2,5522-5540).
ccacctttagataaagaga

SEQ ID NO: 331459 - DNA, 19 bp, Homo sapiens
  siRNA target sequence for TJP1 (NM_003257.2,5577-5595).
gtccccatggcctcaagtt

SEQ ID NO: 331460 - DNA, 19 bp, Homo sapiens
  siRNA target sequence for TJP1 (NM_003257.2,5634-5652).
ctaaaacctggcaaaacaa

SEQ ID NO: 331461 - DNA, 19 bp, Homo sapiens
  siRNA target sequence for TJP1 (NM_003257.2,5657-5675).
cttcccggagatccaaatt

SEQ ID NO: 331462 - DNA, 19 bp, Homo sapiens
  siRNA target sequence for TJP1 (NM_003257.2,5681-5699).
gttggagcaaactgtgttt

SEQ ID NO: 331463 - DNA, 19 bp, Homo sapiens
  siRNA target sequence for TJP1 (NM_003257.2,5702-5720).
gtccttattgaccactttt

SEQ ID NO: 331464 - DNA, 19 bp, Homo sapiens
  siRNA target sequence for TPS1 (NM_003293.2,551-569).
gaaggtccccataatggaa

SEQ ID NO: 331465 - DNA, 19 bp, Homo sapiens
  siRNA target sequence for TPS1 (NM_003293.2,573-591).
cacatttgtgacgcaaaat

SEQ ID NO: 331466 - DNA, 19 bp, Homo sapiens
  siRNA target sequence for TPS1 (NM_003293.2,790-808).
cccgtgtcacctactactt

SEQ ID NO: 331467 - DNA, 19 bp, Homo sapiens
  siRNA target sequence for TRPM2 (NM_003307.1,586-604).
gtgccccttcggcaacaat

SEQ ID NO: 331468 - DNA, 19 bp, Homo sapiens
  siRNA target sequence for TRPM2 (NM_003307.1,588-606).
gccccttcggcaacaatga

SEQ ID NO: 331469 - DNA, 19 bp, Homo sapiens
  siRNA target sequence for TRPM2 (NM_003307.1,590-608).
cccttcggcaacaatgaca

SEQ ID NO: 331470 - DNA, 19 bp, Homo sapiens
  siRNA target sequence for TRPM2 (NM_003307.1,671-689).
gtggaaagttccaaactgt

SEQ ID NO: 331471 - DNA, 19 bp, Homo sapiens
  siRNA target sequence for TRPM2 (NM_003307.1,783-801).
gggacccaaagaaacatgt

SEQ ID NO: 331472 - DNA, 19 bp, Homo sapiens
  siRNA target sequence for TRPM2 (NM_003307.1,891-909).
cgccctccagcgtgatcta

SEQ ID NO: 331473 - DNA, 19 bp, Homo sapiens
  siRNA target sequence for TRPM2 (NM_003307.1,935-953).
ctggacgtccccaatctct

SEQ ID NO: 331474 - DNA, 19 bp, Homo sapiens
  siRNA target sequence for TRPM2 (NM_003307.1,1074-1092).
cccacaccggcgtcatgaa

SEQ ID NO: 331475 - DNA, 19 bp, Homo sapiens
  siRNA target sequence for TRPM2 (NM_003307.1,1350-1368).
ggaccaggctggagaagtt

SEQ ID NO: 331476 - DNA, 19 bp, Homo sapiens
  siRNA target sequence for TRPM2 (NM_003307.1,1553-1571).
cctgtctcggacatcacta

SEQ ID NO: 331477 - DNA, 19 bp, Homo sapiens
  siRNA target sequence for TRPM2 (NM_003307.1,1554-1572).
ctgtctcggacatcactat

SEQ ID NO: 331478 - DNA, 19 bp, Homo sapiens
  siRNA target sequence for TRPM2 (NM_003307.1,1556-1574).
gtctcggacatcactatct

SEQ ID NO: 331479 - DNA, 19 bp, Homo sapiens
  siRNA target sequence for TRPM2 (NM_003307.1,1575-1593).
ccctgatccagcagaaact

SEQ ID NO: 331480 - DNA, 19 bp, Homo sapiens
  siRNA target sequence for TRPM2 (NM_003307.1,2158-2176).
cttcacgcagccgctttat

SEQ ID NO: 331481 - DNA, 19 bp, Homo sapiens
  siRNA target sequence for TRPM2 (NM_003307.1,2351-2369).
gagctggcaggaatcatct

SEQ ID NO: 331482 - DNA, 19 bp, Homo sapiens
  siRNA target sequence for TRPM2 (NM_003307.1,2974-2992).
gatgcggcagctcttctat

SEQ ID NO: 331483 - DNA, 19 bp, Homo sapiens
  siRNA target sequence for TRPM2 (NM_003307.1,3167-3185).
ctccggctcatgcacattt

SEQ ID NO: 331484 - DNA, 19 bp, Homo sapiens
  siRNA target sequence for TRPM2 (NM_003307.1,3169-3187).
ccggctcatgcacattttt

SEQ ID NO: 331485 - DNA, 19 bp, Homo sapiens
  siRNA target sequence for TRPM2 (NM_003307.1,3173-3191).
ctcatgcacatttttacca

SEQ ID NO: 331486 - DNA, 19 bp, Homo sapiens
  siRNA target sequence for TRPM2 (NM_003307.1,3617-3635).
cacacggaccagatttgga

SEQ ID NO: 331487 - DNA, 19 bp, Homo sapiens
  siRNA target sequence for TRPM2 (NM_003307.1,4240-4258).
gacggagttcctgatctat

SEQ ID NO: 331488 - DNA, 19 bp, Homo sapiens
  siRNA target sequence for TRPM2 (NM_003307.1,4705-4723).
cggcatggaggtgtacaaa

SEQ ID NO: 331489 - DNA, 19 bp, Homo sapiens
  siRNA target sequence for TRPM2 (NM_003307.1,4882-4900).
caggcgcatcccactctat

SEQ ID NO: 331490 - DNA, 19 bp, Homo sapiens
  siRNA target sequence for TSSC1 (NM_003310.1,190-208).
ccaggcacgtgccttaaca

SEQ ID NO: 331491 - DNA, 19 bp, Homo sapiens
  siRNA target sequence for TSSC1 (NM_003310.1,225-243).
cagatgccattcggttttt

SEQ ID NO: 331492 - DNA, 19 bp, Homo sapiens
  siRNA target sequence for TSSC1 (NM_003310.1,249-267).
ggacgcagtctcttaaata

SEQ ID NO: 331493 - DNA, 19 bp, Homo sapiens
  siRNA target sequence for TSSC1 (NM_003310.1,250-268).
gacgcagtctcttaaatat

SEQ ID NO: 331494 - DNA, 19 bp, Homo sapiens
  siRNA target sequence for TSSC1 (NM_003310.1,256-274).
gtctcttaaatatgataat

SEQ ID NO: 331495 - DNA, 19 bp, Homo sapiens
  siRNA target sequence for TSSC1 (NM_003310.1,275-293).
cagatccatatcatagatt

SEQ ID NO: 331496 - DNA, 19 bp, Homo sapiens
  siRNA target sequence for TSSC1 (NM_003310.1,344-362).
ggtgaaatctggcatatta

SEQ ID NO: 331497 - DNA, 19 bp, Homo sapiens
  siRNA target sequence for TSSC1 (NM_003310.1,397-415).
ctgctacaacagaacttca

SEQ ID NO: 331498 - DNA, 19 bp, Homo sapiens
  siRNA target sequence for TSSC1 (NM_003310.1,451-469).
gatgccgaaggaattggaa

SEQ ID NO: 331499 - DNA, 19 bp, Homo sapiens
  siRNA target sequence for TSSC1 (NM_003310.1,478-496).
ccacgagtcccctgatgat

SEQ ID NO: 331500 - DNA, 19 bp, Homo sapiens
  siRNA target sequence for TSSC1 (NM_003310.1,479-497).
cacgagtcccctgatgatt

SEQ ID NO: 331501 - DNA, 19 bp, Homo sapiens
  siRNA target sequence for TSSC1 (NM_003310.1,481-499).
cgagtcccctgatgattca

SEQ ID NO: 331502 - DNA, 19 bp, Homo sapiens
  siRNA target sequence for TSSC1 (NM_003310.1,841-859).
ggtgcgggaccttgacttt

SEQ ID NO: 331503 - DNA, 19 bp, Homo sapiens
  siRNA target sequence for TSSC1 (NM_003310.1,842-860).
gtgcgggaccttgacttta

SEQ ID NO: 331504 - DNA, 19 bp, Homo sapiens
  siRNA target sequence for TSSC1 (NM_003310.1,863-881).
cccaataagcagtactact

SEQ ID NO: 331505 - DNA, 19 bp, Homo sapiens
  siRNA target sequence for TSSC1 (NM_003310.1,888-906).
gctgcggagacgactgtaa

SEQ ID NO: 331506 - DNA, 19 bp, Homo sapiens
  siRNA target sequence for TSSC1 (NM_003310.1,899-917).
gactgtaaggtgaagttct

SEQ ID NO: 331507 - DNA, 19 bp, Homo sapiens
  siRNA target sequence for TSSC1 (NM_003310.1,1117-1135).
ggaggaccaccgttctgaa

SEQ ID NO: 331508 - DNA, 19 bp, Homo sapiens
  siRNA target sequence for TSSC1 (NM_003310.1,1259-1277).
gggaggctcgtgatcaaca

SEQ ID NO: 331509 - DNA, 19 bp, Homo sapiens
  siRNA target sequence for UGT8 (NM_003360.2,518-536).
gaagtcttacactccatat

SEQ ID NO: 331510 - DNA, 19 bp, Homo sapiens
  siRNA target sequence for UGT8 (NM_003360.2,523-541).
cttacactccatatttcat

SEQ ID NO: 331511 - DNA, 19 bp, Homo sapiens
  siRNA target sequence for UGT8 (NM_003360.2,567-585).
gcgaaggctgccaaaatca

SEQ ID NO: 331512 - DNA, 19 bp, Homo sapiens
  siRNA target sequence for UGT8 (NM_003360.2,590-608).
cgtgccgccaattatgttt

SEQ ID NO: 331513 - DNA, 19 bp, Homo sapiens
  siRNA target sequence for UGT8 (NM_003360.2,593-611).
gccgccaattatgtttgaa

SEQ ID NO: 331514 - DNA, 19 bp, Homo sapiens
  siRNA target sequence for UGT8 (NM_003360.2,594-612).
ccgccaattatgtttgaaa

SEQ ID NO: 331515 - DNA, 19 bp, Homo sapiens
  siRNA target sequence for UGT8 (NM_003360.2,609-627).
gaaagccatatgtacattt

SEQ ID NO: 331516 - DNA, 19 bp, Homo sapiens
  siRNA target sequence for UGT8 (NM_003360.2,698-716).
catcgccccatctaatcat

SEQ ID NO: 331517 - DNA, 19 bp, Homo sapiens
  siRNA target sequence for UGT8 (NM_003360.2,729-747).
cgctacccagggatcttta

SEQ ID NO: 331518 - DNA, 19 bp, Homo sapiens
  siRNA target sequence for UGT8 (NM_003360.2,734-752).
cccagggatctttaacagt

SEQ ID NO: 331519 - DNA, 19 bp, Homo sapiens
  siRNA target sequence for UGT8 (NM_003360.2,735-753).
ccagggatctttaacagta

SEQ ID NO: 331520 - DNA, 19 bp, Homo sapiens
  siRNA target sequence for UGT8 (NM_003360.2,776-794).
gtccaagatgcggaatatt

SEQ ID NO: 331521 - DNA, 19 bp, Homo sapiens
  siRNA target sequence for UGT8 (NM_003360.2,782-800).
gatgcggaatattttctct

SEQ ID NO: 331522 - DNA, 19 bp, Homo sapiens
  siRNA target sequence for UGT8 (NM_003360.2,803-821).
gagattgacagcaatcgaa

SEQ ID NO: 331523 - DNA, 19 bp, Homo sapiens
  siRNA target sequence for UGT8 (NM_003360.2,813-831).
gcaatcgaactgtttgaca

SEQ ID NO: 331524 - DNA, 19 bp, Homo sapiens
  siRNA target sequence for UGT8 (NM_003360.2,814-832).
caatcgaactgtttgacat

SEQ ID NO: 331525 - DNA, 19 bp, Homo sapiens
  siRNA target sequence for UGT8 (NM_003360.2,920-938).
gctggtggaccctaatgat

SEQ ID NO: 331526 - DNA, 19 bp, Homo sapiens
  siRNA target sequence for UGT8 (NM_003360.2,921-939).
ctggtggaccctaatgata

SEQ ID NO: 331527 - DNA, 19 bp, Homo sapiens
  siRNA target sequence for UGT8 (NM_003360.2,924-942).
gtggaccctaatgatatgt

SEQ ID NO: 331528 - DNA, 19 bp, Homo sapiens
  siRNA target sequence for UGT8 (NM_003360.2,960-978).
catcttttaggggttaaat

SEQ ID NO: 331529 - DNA, 19 bp, Homo sapiens
  siRNA target sequence for UGT8 (NM_003360.2,1019-1037).
gggtgctcctgctccatta

SEQ ID NO: 331530 - DNA, 19 bp, Homo sapiens
  siRNA target sequence for UGT8 (NM_003360.2,1038-1056).
gcatacgtcccagagttta

SEQ ID NO: 331531 - DNA, 19 bp, Homo sapiens
  siRNA target sequence for UGT8 (NM_003360.2,1039-1057).
catacgtcccagagtttaa

SEQ ID NO: 331532 - DNA, 19 bp, Homo sapiens
  siRNA target sequence for UGT8 (NM_003360.2,1043-1061).
cgtcccagagtttaactca

SEQ ID NO: 331533 - DNA, 19 bp, Homo sapiens
  siRNA target sequence for UGT8 (NM_003360.2,1107-1125).
ggtgtttacctcatttcca

SEQ ID NO: 331534 - DNA, 19 bp, Homo sapiens
  siRNA target sequence for UGT8 (NM_003360.2,1153-1171).
ccaaatatgaaaggataat

SEQ ID NO: 331535 - DNA, 19 bp, Homo sapiens
  siRNA target sequence for UGT8 (NM_003360.2,1199-1217).
gtccatgtatgatttggtt

SEQ ID NO: 331536 - DNA, 19 bp, Homo sapiens
  siRNA target sequence for UGT8 (NM_003360.2,1246-1264).
ctgacgtagcactggaatt

SEQ ID NO: 331537 - DNA, 19 bp, Homo sapiens
  siRNA target sequence for UGT8 (NM_003360.2,1351-1369).
gggtaaatggtgctaatga

SEQ ID NO: 331538 - DNA, 19 bp, Homo sapiens
  siRNA target sequence for UGT8 (NM_003360.2,1352-1370).
ggtaaatggtgctaatgaa

SEQ ID NO: 331539 - DNA, 19 bp, Homo sapiens
  siRNA target sequence for UGT8 (NM_003360.2,1396-1414).
gagctggtgtcaagtatct

SEQ ID NO: 331540 - DNA, 19 bp, Homo sapiens
  siRNA target sequence for UGT8 (NM_003360.2,1398-1416).
gctggtgtcaagtatctgt

SEQ ID NO: 331541 - DNA, 19 bp, Homo sapiens
  siRNA target sequence for UGT8 (NM_003360.2,1453-1471).
ggagattgcctcaaaaagt

SEQ ID NO: 331542 - DNA, 19 bp, Homo sapiens
  siRNA target sequence for UGT8 (NM_003360.2,1456-1474).
gattgcctcaaaaagtgat

SEQ ID NO: 331543 - DNA, 19 bp, Homo sapiens
  siRNA target sequence for UGT8 (NM_003360.2,1519-1537).
ctaaactcatagaatggtt

SEQ ID NO: 331544 - DNA, 19 bp, Homo sapiens
  siRNA target sequence for UGT8 (NM_003360.2,1551-1569).
ctgcttgggcattcaaaga

SEQ ID NO: 331545 - DNA, 19 bp, Homo sapiens
  siRNA target sequence for UGT8 (NM_003360.2,1554-1572).
cttgggcattcaaagatta

SEQ ID NO: 331546 - DNA, 19 bp, Homo sapiens
  siRNA target sequence for UGT8 (NM_003360.2,1594-1612).
gtttgaacagtatttttga

SEQ ID NO: 331547 - DNA, 19 bp, Homo sapiens
  siRNA target sequence for UGT8 (NM_003360.2,1648-1666).
cactctttggagaccatta

SEQ ID NO: 331548 - DNA, 19 bp, Homo sapiens
  siRNA target sequence for UGT8 (NM_003360.2,1656-1674).
ggagaccattatgatacta

SEQ ID NO: 331549 - DNA, 19 bp, Homo sapiens
  siRNA target sequence for UGT8 (NM_003360.2,1657-1675).
gagaccattatgatactat

SEQ ID NO: 331550 - DNA, 19 bp, Homo sapiens
  siRNA target sequence for UGT8 (NM_003360.2,1702-1720).
ggatattgctagaatggaa

SEQ ID NO: 331551 - DNA, 19 bp, Homo sapiens
  siRNA target sequence for UGT8 (NM_003360.2,1746-1764).
gaagcactagtgaaggtta

SEQ ID NO: 331552 - DNA, 19 bp, Homo sapiens
  siRNA target sequence for UGT8 (NM_003360.2,1749-1767).
gcactagtgaaggttatca

SEQ ID NO: 331553 - DNA, 19 bp, Homo sapiens
  siRNA target sequence for UGT8 (NM_003360.2,1752-1770).
ctagtgaaggttatcaata

SEQ ID NO: 331554 - DNA, 19 bp, Homo sapiens
  siRNA target sequence for UGT8 (NM_003360.2,1827-1845).
ggtcaccctgtcaatcgaa

SEQ ID NO: 331555 - DNA, 19 bp, Homo sapiens
  siRNA target sequence for UGT8 (NM_003360.2,1833-1851).
cctgtcaatcgaactatct

SEQ ID NO: 331556 - DNA, 19 bp, Homo sapiens
  siRNA target sequence for UGT8 (NM_003360.2,1836-1854).
gtcaatcgaactatctatt

SEQ ID NO: 331557 - DNA, 19 bp, Homo sapiens
  siRNA target sequence for UGT8 (NM_003360.2,1846-1864).
ctatctattggatagatta

SEQ ID NO: 331558 - DNA, 19 bp, Homo sapiens
  siRNA target sequence for UGT8 (NM_003360.2,1856-1874).
gatagattatattattcgt

SEQ ID NO: 331559 - DNA, 19 bp, Homo sapiens
  siRNA target sequence for UGT8 (NM_003360.2,1897-1915).
gtgccgctgtccatcagat

SEQ ID NO: 331560 - DNA, 19 bp, Homo sapiens
  siRNA target sequence for UGT8 (NM_003360.2,1905-1923).
gtccatcagatctcctttt

SEQ ID NO: 331561 - DNA, 19 bp, Homo sapiens
  siRNA target sequence for UGT8 (NM_003360.2,1913-1931).
gatctccttttgtcagtat

SEQ ID NO: 331562 - DNA, 19 bp, Homo sapiens
  siRNA target sequence for UGT8 (NM_003360.2,1991-2009).
gtcttgggtgacaaaattt

SEQ ID NO: 331563 - DNA, 19 bp, Homo sapiens
  siRNA target sequence for UGT8 (NM_003360.2,1996-2014).
gggtgacaaaatttatcta

SEQ ID NO: 331564 - DNA, 19 bp, Homo sapiens
  siRNA target sequence for UGT8 (NM_003360.2,2029-2047).
gtctgtggtctagaaataa

SEQ ID NO: 331565 - DNA, 19 bp, Homo sapiens
  siRNA target sequence for UGT8 (NM_003360.2,2053-2071).
gcacagttaatggacatta

SEQ ID NO: 331566 - DNA, 19 bp, Homo sapiens
  siRNA target sequence for UGT8 (NM_003360.2,2056-2074).
cagttaatggacattacca

SEQ ID NO: 331567 - DNA, 19 bp, Homo sapiens
  siRNA target sequence for UGT8 (NM_003360.2,2109-2127).
ggccatattaaacatgaaa

SEQ ID NO: 331568 - DNA, 19 bp, Homo sapiens
  siRNA target sequence for VLDLR (NM_003383.2,598-616).
gaagacgtgtgctgaatct

SEQ ID NO: 331569 - DNA, 19 bp, Homo sapiens
  siRNA target sequence for VLDLR (NM_003383.2,707-725).
gaacagtgccatatgagaa

SEQ ID NO: 331570 - DNA, 19 bp, Homo sapiens
  siRNA target sequence for VLDLR (NM_003383.2,710-728).
cagtgccatatgagaacat

SEQ ID NO: 331571 - DNA, 19 bp, Homo sapiens
  siRNA target sequence for VLDLR (NM_003383.2,721-739).
gagaacatgccgcatacat

SEQ ID NO: 331572 - DNA, 19 bp, Homo sapiens
  siRNA target sequence for VLDLR (NM_003383.2,756-774).
cccattctactcagtgtat

SEQ ID NO: 331573 - DNA, 19 bp, Homo sapiens
  siRNA target sequence for VLDLR (NM_003383.2,886-904).
ctgcatctccaggaacttt

SEQ ID NO: 331574 - DNA, 19 bp, Homo sapiens
  siRNA target sequence for VLDLR (NM_003383.2,1042-1060).
ctgctccgaccaatctgat

SEQ ID NO: 331575 - DNA, 19 bp, Homo sapiens
  siRNA target sequence for VLDLR (NM_003383.2,1080-1098).
gccgtcagccagtcataca

SEQ ID NO: 331576 - DNA, 19 bp, Homo sapiens
  siRNA target sequence for VLDLR (NM_003383.2,1134-1152).
ctggcgagtgcatccataa

SEQ ID NO: 331577 - DNA, 19 bp, Homo sapiens
  siRNA target sequence for VLDLR (NM_003383.2,1136-1154).
ggcgagtgcatccataaga

SEQ ID NO: 331578 - DNA, 19 bp, Homo sapiens
  siRNA target sequence for VLDLR (NM_003383.2,1137-1155).
gcgagtgcatccataagaa

SEQ ID NO: 331579 - DNA, 19 bp, Homo sapiens
  siRNA target sequence for VLDLR (NM_003383.2,1139-1157).
gagtgcatccataagaagt

SEQ ID NO: 331580 - DNA, 19 bp, Homo sapiens
  siRNA target sequence for VLDLR (NM_003383.2,1221-1239).
cttgccgacctgaccaatt

SEQ ID NO: 331581 - DNA, 19 bp, Homo sapiens
  siRNA target sequence for VLDLR (NM_003383.2,1224-1242).
gccgacctgaccaatttga

SEQ ID NO: 331582 - DNA, 19 bp, Homo sapiens
  siRNA target sequence for VLDLR (NM_003383.2,1226-1244).
cgacctgaccaatttgaat

SEQ ID NO: 331583 - DNA, 19 bp, Homo sapiens
  siRNA target sequence for VLDLR (NM_003383.2,1321-1339).
caactgcaaaaatgtcaat

SEQ ID NO: 331584 - DNA, 19 bp, Homo sapiens
  siRNA target sequence for VLDLR (NM_003383.2,1374-1392).
gtggagaatgcatagatat

SEQ ID NO: 331585 - DNA, 19 bp, Homo sapiens
  siRNA target sequence for VLDLR (NM_003383.2,1376-1394).
ggagaatgcatagatatca

SEQ ID NO: 331586 - DNA, 19 bp, Homo sapiens
  siRNA target sequence for VLDLR (NM_003383.2,1434-1452).
gtgatgagcccctgaaaga

SEQ ID NO: 331587 - DNA, 19 bp, Homo sapiens
  siRNA target sequence for VLDLR (NM_003383.2,1436-1454).
gatgagcccctgaaagagt

SEQ ID NO: 331588 - DNA, 19 bp, Homo sapiens
  siRNA target sequence for VLDLR (NM_003383.2,1443-1461).
ccctgaaagagtgtcatat

SEQ ID NO: 331589 - DNA, 19 bp, Homo sapiens
  siRNA target sequence for VLDLR (NM_003383.2,1444-1462).
cctgaaagagtgtcatata

SEQ ID NO: 331590 - DNA, 19 bp, Homo sapiens
  siRNA target sequence for VLDLR (NM_003383.2,1445-1463).
ctgaaagagtgtcatataa

SEQ ID NO: 331591 - DNA, 19 bp, Homo sapiens
  siRNA target sequence for VLDLR (NM_003383.2,1451-1469).
gagtgtcatataaacgaat

SEQ ID NO: 331592 - DNA, 19 bp, Homo sapiens
  siRNA target sequence for VLDLR (NM_003383.2,1455-1473).
gtcatataaacgaatgctt

SEQ ID NO: 331593 - DNA, 19 bp, Homo sapiens
  siRNA target sequence for VLDLR (NM_003383.2,1536-1554).
gtgcagctgggtttgaact

SEQ ID NO: 331594 - DNA, 19 bp, Homo sapiens
  siRNA target sequence for VLDLR (NM_003383.2,1544-1562).
gggtttgaactgatagata

SEQ ID NO: 331595 - DNA, 19 bp, Homo sapiens
  siRNA target sequence for VLDLR (NM_003383.2,1550-1568).
gaactgatagataggaaaa

SEQ ID NO: 331596 - DNA, 19 bp, Homo sapiens
  siRNA target sequence for VLDLR (NM_003383.2,1634-1652).
ggcggttacaagtgtgaat

SEQ ID NO: 331597 - DNA, 19 bp, Homo sapiens
  siRNA target sequence for VLDLR (NM_003383.2,1636-1654).
cggttacaagtgtgaatgt

SEQ ID NO: 331598 - DNA, 19 bp, Homo sapiens
  siRNA target sequence for VLDLR (NM_003383.2,1712-1730).
ccaagtctgatcttcacta

SEQ ID NO: 331599 - DNA, 19 bp, Homo sapiens
  siRNA target sequence for VLDLR (NM_003383.2,1718-1736).
ctgatcttcactaatcgaa

SEQ ID NO: 331600 - DNA, 19 bp, Homo sapiens
  siRNA target sequence for VLDLR (NM_003383.2,1756-1774).
cttagagaggaaagaatat

SEQ ID NO: 331601 - DNA, 19 bp, Homo sapiens
  siRNA target sequence for VLDLR (NM_003383.2,1781-1799).
ctagttgaacagctaagaa

SEQ ID NO: 331602 - DNA, 19 bp, Homo sapiens
  siRNA target sequence for VLDLR (NM_003383.2,1826-1844).
gctgcccagaaactattct

SEQ ID NO: 331603 - DNA, 19 bp, Homo sapiens
  siRNA target sequence for VLDLR (NM_003383.2,1875-1893).
gtgcctcaattgatgacaa

SEQ ID NO: 331604 - DNA, 19 bp, Homo sapiens
  siRNA target sequence for VLDLR (NM_003383.2,1894-1912).
ggttggtagacatgttaaa

SEQ ID NO: 331605 - DNA, 19 bp, Homo sapiens
  siRNA target sequence for VLDLR (NM_003383.2,1895-1913).
gttggtagacatgttaaaa

SEQ ID NO: 331606 - DNA, 19 bp, Homo sapiens
  siRNA target sequence for VLDLR (NM_003383.2,1898-1916).
ggtagacatgttaaaatga

SEQ ID NO: 331607 - DNA, 19 bp, Homo sapiens
  siRNA target sequence for VLDLR (NM_003383.2,1915-1933).
gatcgacaatgtctataat

SEQ ID NO: 331608 - DNA, 19 bp, Homo sapiens
  siRNA target sequence for VLDLR (NM_003383.2,1947-1965).
ctgttgattgggtgtacaa

SEQ ID NO: 331609 - DNA, 19 bp, Homo sapiens
  siRNA target sequence for VLDLR (NM_003383.2,1949-1967).
gttgattgggtgtacaaga

SEQ ID NO: 331610 - DNA, 19 bp, Homo sapiens
  siRNA target sequence for VLDLR (NM_003383.2,1958-1976).
gtgtacaagaccatctact

SEQ ID NO: 331611 - DNA, 19 bp, Homo sapiens
  siRNA target sequence for VLDLR (NM_003383.2,1977-1995).
ggactgatgcggcttctaa

SEQ ID NO: 331612 - DNA, 19 bp, Homo sapiens
  siRNA target sequence for VLDLR (NM_003383.2,1982-2000).
gatgcggcttctaagacta

SEQ ID NO: 331613 - DNA, 19 bp, Homo sapiens
  siRNA target sequence for VLDLR (NM_003383.2,1989-2007).
cttctaagactatttcagt

SEQ ID NO: 331614 - DNA, 19 bp, Homo sapiens
  siRNA target sequence for VLDLR (NM_003383.2,2083-2101).
cccactgtctggctttgtt

SEQ ID NO: 331615 - DNA, 19 bp, Homo sapiens
  siRNA target sequence for VLDLR (NM_003383.2,2113-2131).
ctggggtgaaccagctaaa

SEQ ID NO: 331616 - DNA, 19 bp, Homo sapiens
  siRNA target sequence for VLDLR (NM_003383.2,2189-2207).
cagtggcctaacggaatta

SEQ ID NO: 331617 - DNA, 19 bp, Homo sapiens
  siRNA target sequence for VLDLR (NM_003383.2,2191-2209).
gtggcctaacggaattaca

SEQ ID NO: 331618 - DNA, 19 bp, Homo sapiens
  siRNA target sequence for VLDLR (NM_003383.2,2193-2211).
ggcctaacggaattacact

SEQ ID NO: 331619 - DNA, 19 bp, Homo sapiens
  siRNA target sequence for VLDLR (NM_003383.2,2194-2212).
gcctaacggaattacactt

SEQ ID NO: 331620 - DNA, 19 bp, Homo sapiens
  siRNA target sequence for VLDLR (NM_003383.2,2228-2246).
cgcctctattggcttgatt

SEQ ID NO: 331621 - DNA, 19 bp, Homo sapiens
  siRNA target sequence for VLDLR (NM_003383.2,2231-2249).
ctctattggcttgattcta

SEQ ID NO: 331622 - DNA, 19 bp, Homo sapiens
  siRNA target sequence for VLDLR (NM_003383.2,2284-2302).
ccaagatcgtaggatagta

SEQ ID NO: 331623 - DNA, 19 bp, Homo sapiens
  siRNA target sequence for VLDLR (NM_003383.2,2288-2306).
gatcgtaggatagtactaa

SEQ ID NO: 331624 - DNA, 19 bp, Homo sapiens
  siRNA target sequence for VLDLR (NM_003383.2,2291-2309).
cgtaggatagtactaaagt

SEQ ID NO: 331625 - DNA, 19 bp, Homo sapiens
  siRNA target sequence for VLDLR (NM_003383.2,2327-2345).
catcctcttgcactaacaa

SEQ ID NO: 331626 - DNA, 19 bp, Homo sapiens
  siRNA target sequence for VLDLR (NM_003383.2,2464-2482).
cattgtctatcatgaactt

SEQ ID NO: 331627 - DNA, 19 bp, Homo sapiens
  siRNA target sequence for VLDLR (NM_003383.2,2483-2501).
gtacagccatcaggtaaaa

SEQ ID NO: 331628 - DNA, 19 bp, Homo sapiens
  siRNA target sequence for VLDLR (NM_003383.2,2551-2569).
gccagcaccacagattaat

SEQ ID NO: 331629 - DNA, 19 bp, Homo sapiens
  siRNA target sequence for VLDLR (NM_003383.2,2553-2571).
cagcaccacagattaatga

SEQ ID NO: 331630 - DNA, 19 bp, Homo sapiens
  siRNA target sequence for VLDLR (NM_003383.2,2601-2619).
ccagtgggtacaatgtaga

SEQ ID NO: 331631 - DNA, 19 bp, Homo sapiens
  siRNA target sequence for VLDLR (NM_003383.2,2629-2647).
ccgagactgtcaaagtact

SEQ ID NO: 331632 - DNA, 19 bp, Homo sapiens
  siRNA target sequence for VLDLR (NM_003383.2,2646-2664).
ctgcaactactgtgactta

SEQ ID NO: 331633 - DNA, 19 bp, Homo sapiens
  siRNA target sequence for VLDLR (NM_003383.2,2659-2677).
gacttacagtgagacaaaa

SEQ ID NO: 331634 - DNA, 19 bp, Homo sapiens
  siRNA target sequence for VLDLR (NM_003383.2,2667-2685).
gtgagacaaaagatacgaa

SEQ ID NO: 331635 - DNA, 19 bp, Homo sapiens
  siRNA target sequence for VLDLR (NM_003383.2,2801-2819).
cctctcttgctcttagtga

SEQ ID NO: 331636 - DNA, 19 bp, Homo sapiens
  siRNA target sequence for VLDLR (NM_003383.2,2825-2843).
gcagtaggtggctacttga

SEQ ID NO: 331637 - DNA, 19 bp, Homo sapiens
  siRNA target sequence for VLDLR (NM_003383.2,2826-2844).
cagtaggtggctacttgat

SEQ ID NO: 331638 - DNA, 19 bp, Homo sapiens
  siRNA target sequence for VLDLR (NM_003383.2,2828-2846).
gtaggtggctacttgatgt

SEQ ID NO: 331639 - DNA, 19 bp, Homo sapiens
  siRNA target sequence for VLDLR (NM_003383.2,2888-2906).
gacaatcctgtgtacttga

SEQ ID NO: 331640 - DNA, 19 bp, Homo sapiens
  siRNA target sequence for VLDLR (NM_003383.2,2918-2936).
gaggacctctccatagaca

SEQ ID NO: 331641 - DNA, 19 bp, Homo sapiens
  siRNA target sequence for VLDLR (NM_003383.2,2963-2981).
cacacgtacccagcaatat

SEQ ID NO: 331642 - DNA, 19 bp, Homo sapiens
  siRNA target sequence for VLDLR (NM_003383.2,2967-2985).
cgtacccagcaatatcagt

SEQ ID NO: 331643 - DNA, 19 bp, Homo sapiens
  siRNA target sequence for VLDLR (NM_003383.2,2968-2986).
gtacccagcaatatcagtt

SEQ ID NO: 331644 - DNA, 19 bp, Homo sapiens
  siRNA target sequence for VLDLR (NM_003383.2,2971-2989).
cccagcaatatcagttgta

SEQ ID NO: 331645 - DNA, 19 bp, Homo sapiens
  siRNA target sequence for VLDLR (NM_003383.2,2972-2990).
ccagcaatatcagttgtaa

SEQ ID NO: 331646 - DNA, 19 bp, Homo sapiens
  siRNA target sequence for CYLN2 (NM_003388.3,533-551).
cggaagtgggggatgactt

SEQ ID NO: 331647 - DNA, 19 bp, Homo sapiens
  siRNA target sequence for CYLN2 (NM_003388.3,672-690).
cccggtgggcaagaatgat

SEQ ID NO: 331648 - DNA, 19 bp, Homo sapiens
  siRNA target sequence for CYLN2 (NM_003388.3,727-745).
gccctccagggtatcttca

SEQ ID NO: 331649 - DNA, 19 bp, Homo sapiens
  siRNA target sequence for CYLN2 (NM_003388.3,1529-1547).
cacagcatgagcagtatgt

SEQ ID NO: 331650 - DNA, 19 bp, Homo sapiens
  siRNA target sequence for CYLN2 (NM_003388.3,1782-1800).
gcggctgctccgagaatta

SEQ ID NO: 331651 - DNA, 19 bp, Homo sapiens
  siRNA target sequence for CYLN2 (NM_003388.3,2008-2026).
ggggtgctgcgggataaat

SEQ ID NO: 331652 - DNA, 19 bp, Homo sapiens
  siRNA target sequence for CYLN2 (NM_003388.3,2009-2027).
gggtgctgcgggataaata

SEQ ID NO: 331653 - DNA, 19 bp, Homo sapiens
  siRNA target sequence for CYLN2 (NM_003388.3,2871-2889).
gctcagggcccaagtaagt

SEQ ID NO: 331654 - DNA, 19 bp, Homo sapiens
  siRNA target sequence for ZIC1 (NM_003412.2,969-987).
ggccacgtcggctcctatt

SEQ ID NO: 331655 - DNA, 19 bp, Homo sapiens
  siRNA target sequence for ZIC1 (NM_003412.2,972-990).
cacgtcggctcctattcca

SEQ ID NO: 331656 - DNA, 19 bp, Homo sapiens
  siRNA target sequence for ZIC1 (NM_003412.2,1216-1234).
gcttctcgggggacatgta

SEQ ID NO: 331657 - DNA, 19 bp, Homo sapiens
  siRNA target sequence for ZIC1 (NM_003412.2,1433-1451).
caaaaagtcgtgcaacaaa

SEQ ID NO: 331658 - DNA, 19 bp, Homo sapiens
  siRNA target sequence for ZIC1 (NM_003412.2,1509-1527).
ccggagcagagtaatcaca

SEQ ID NO: 331659 - DNA, 19 bp, Homo sapiens
  siRNA target sequence for ZIC1 (NM_003412.2,1510-1528).
cggagcagagtaatcacat

SEQ ID NO: 331660 - DNA, 19 bp, Homo sapiens
  siRNA target sequence for ZIC1 (NM_003412.2,1662-1680).
cgctccgagaatttaaaga

SEQ ID NO: 331661 - DNA, 19 bp, Homo sapiens
  siRNA target sequence for ZIC1 (NM_003412.2,1663-1681).
gctccgagaatttaaagat

SEQ ID NO: 331662 - DNA, 19 bp, Homo sapiens
  siRNA target sequence for ZIC1 (NM_003412.2,1711-1729).
ccttcaagtgcgagtttga

SEQ ID NO: 331663 - DNA, 19 bp, Homo sapiens
  siRNA target sequence for ZIC1 (NM_003412.2,1790-1808).
gagcgacaagccctatctt

SEQ ID NO: 331664 - DNA, 19 bp, Homo sapiens
  siRNA target sequence for ZIC1 (NM_003412.2,2024-2042).
cagtgcgctctcttccaat

SEQ ID NO: 331665 - DNA, 19 bp, Homo sapiens
  siRNA target sequence for ZIC1 (NM_003412.2,2026-2044).
gtgcgctctcttccaattt

SEQ ID NO: 331666 - DNA, 19 bp, Homo sapiens
  siRNA target sequence for ZIC1 (NM_003412.2,2028-2046).
gcgctctcttccaatttta

SEQ ID NO: 331667 - DNA, 19 bp, Homo sapiens
  siRNA target sequence for CUL5 (NM_003478.2,433-451).
ggcgacgtctaatctgtta

SEQ ID NO: 331668 - DNA, 19 bp, Homo sapiens
  siRNA target sequence for CUL5 (NM_003478.2,434-452).
gcgacgtctaatctgttaa

SEQ ID NO: 331669 - DNA, 19 bp, Homo sapiens
  siRNA target sequence for CUL5 (NM_003478.2,435-453).
cgacgtctaatctgttaaa

SEQ ID NO: 331670 - DNA, 19 bp, Homo sapiens
  siRNA target sequence for CUL5 (NM_003478.2,438-456).
cgtctaatctgttaaagaa

SEQ ID NO: 331671 - DNA, 19 bp, Homo sapiens
  siRNA target sequence for CUL5 (NM_003478.2,501-519).
cgattgttttgaagctttt

SEQ ID NO: 331672 - DNA, 19 bp, Homo sapiens
  siRNA target sequence for CUL5 (NM_003478.2,521-539).
cgccaggaatctgttacaa

SEQ ID NO: 331673 - DNA, 19 bp, Homo sapiens
  siRNA target sequence for CUL5 (NM_003478.2,666-684).
gagtactgagccatcaaga

SEQ ID NO: 331674 - DNA, 19 bp, Homo sapiens
  siRNA target sequence for CUL5 (NM_003478.2,671-689).
ctgagccatcaagatgata

SEQ ID NO: 331675 - DNA, 19 bp, Homo sapiens
  siRNA target sequence for CUL5 (NM_003478.2,690-708).
cggctttgctaaaagcata

SEQ ID NO: 331676 - DNA, 19 bp, Homo sapiens
  siRNA target sequence for CUL5 (NM_003478.2,716-734).
gaatggcgaaagttcttta

SEQ ID NO: 331677 - DNA, 19 bp, Homo sapiens
  siRNA target sequence for CUL5 (NM_003478.2,720-738).
ggcgaaagttctttacaca

SEQ ID NO: 331678 - DNA, 19 bp, Homo sapiens
  siRNA target sequence for CUL5 (NM_003478.2,721-739).
gcgaaagttctttacacaa

SEQ ID NO: 331679 - DNA, 19 bp, Homo sapiens
  siRNA target sequence for CUL5 (NM_003478.2,722-740).
cgaaagttctttacacaat

SEQ ID NO: 331680 - DNA, 19 bp, Homo sapiens
  siRNA target sequence for CUL5 (NM_003478.2,727-745).
gttctttacacaatgtgat

SEQ ID NO: 331681 - DNA, 19 bp, Homo sapiens
  siRNA target sequence for CUL5 (NM_003478.2,737-755).
caatgtgatattttaccaa

SEQ ID NO: 331682 - DNA, 19 bp, Homo sapiens
  siRNA target sequence for CUL5 (NM_003478.2,765-783).
gtcaactagagattacttt

SEQ ID NO: 331683 - DNA, 19 bp, Homo sapiens
  siRNA target sequence for CUL5 (NM_003478.2,767-785).
caactagagattactttaa

SEQ ID NO: 331684 - DNA, 19 bp, Homo sapiens
  siRNA target sequence for CUL5 (NM_003478.2,826-844).
cagtattgttcgaaagctt

SEQ ID NO: 331685 - DNA, 19 bp, Homo sapiens
  siRNA target sequence for CUL5 (NM_003478.2,828-846).
gtattgttcgaaagcttat

SEQ ID NO: 331686 - DNA, 19 bp, Homo sapiens
  siRNA target sequence for CUL5 (NM_003478.2,836-854).
cgaaagcttatgcttgata

SEQ ID NO: 331687 - DNA, 19 bp, Homo sapiens
  siRNA target sequence for CUL5 (NM_003478.2,855-873).
catggaatgagtcaatctt

SEQ ID NO: 331688 - DNA, 19 bp, Homo sapiens
  siRNA target sequence for CUL5 (NM_003478.2,867-885).
caatcttttcaaacataaa

SEQ ID NO: 331689 - DNA, 19 bp, Homo sapiens
  siRNA target sequence for CUL5 (NM_003478.2,930-948).
gattgggagaagcttttga

SEQ ID NO: 331690 - DNA, 19 bp, Homo sapiens
  siRNA target sequence for CUL5 (NM_003478.2,955-973).
gctggttattggagtaaga

SEQ ID NO: 331691 - DNA, 19 bp, Homo sapiens
  siRNA target sequence for CUL5 (NM_003478.2,959-977).
gttattggagtaagagaat

SEQ ID NO: 331692 - DNA, 19 bp, Homo sapiens
  siRNA target sequence for CUL5 (NM_003478.2,972-990).
gagaatcctatgttaacct

SEQ ID NO: 331693 - DNA, 19 bp, Homo sapiens
  siRNA target sequence for CUL5 (NM_003478.2,974-992).
gaatcctatgttaaccttt

SEQ ID NO: 331694 - DNA, 19 bp, Homo sapiens
  siRNA target sequence for CUL5 (NM_003478.2,1001-1019).
cctgaggataaacttcaaa

SEQ ID NO: 331695 - DNA, 19 bp, Homo sapiens
  siRNA target sequence for CUL5 (NM_003478.2,1016-1034).
caaatttatagggacaatt

SEQ ID NO: 331696 - DNA, 19 bp, Homo sapiens
  siRNA target sequence for CUL5 (NM_003478.2,1042-1060).
ggcatacttggattcaaca

SEQ ID NO: 331697 - DNA, 19 bp, Homo sapiens
  siRNA target sequence for CUL5 (NM_003478.2,1077-1095).
cacaagcaccctcgtattt

SEQ ID NO: 331698 - DNA, 19 bp, Homo sapiens
  siRNA target sequence for CUL5 (NM_003478.2,1083-1101).
caccctcgtatttacaaca

SEQ ID NO: 331699 - DNA, 19 bp, Homo sapiens
  siRNA target sequence for CUL5 (NM_003478.2,1086-1104).
cctcgtatttacaacaaaa

SEQ ID NO: 331700 - DNA, 19 bp, Homo sapiens
  siRNA target sequence for CUL5 (NM_003478.2,1213-1231).
catggaatgctgtgtaaat

SEQ ID NO: 331701 - DNA, 19 bp, Homo sapiens
  siRNA target sequence for CUL5 (NM_003478.2,1242-1260).
catcatttaaagagactat

SEQ ID NO: 331702 - DNA, 19 bp, Homo sapiens
  siRNA target sequence for CUL5 (NM_003478.2,1327-1345).
gatggacaaagttcctaat

SEQ ID NO: 331703 - DNA, 19 bp, Homo sapiens
  siRNA target sequence for CUL5 (NM_003478.2,1330-1348).
ggacaaagttcctaatggt

SEQ ID NO: 331704 - DNA, 19 bp, Homo sapiens
  siRNA target sequence for CUL5 (NM_003478.2,1331-1349).
gacaaagttcctaatggta

SEQ ID NO: 331705 - DNA, 19 bp, Homo sapiens
  siRNA target sequence for CUL5 (NM_003478.2,1333-1351).
caaagttcctaatggtata

SEQ ID NO: 331706 - DNA, 19 bp, Homo sapiens
  siRNA target sequence for CUL5 (NM_003478.2,1372-1390).
ggaggaacatatcattagt

SEQ ID NO: 331707 - DNA, 19 bp, Homo sapiens
  siRNA target sequence for CUL5 (NM_003478.2,1408-1426).
ggtagcagctgctgaaact

SEQ ID NO: 331708 - DNA, 19 bp, Homo sapiens
  siRNA target sequence for CUL5 (NM_003478.2,1415-1433).
gctgctgaaactattacta

SEQ ID NO: 331709 - DNA, 19 bp, Homo sapiens
  siRNA target sequence for CUL5 (NM_003478.2,1434-1452).
ctgactctgagaaatacgt

SEQ ID NO: 331710 - DNA, 19 bp, Homo sapiens
  siRNA target sequence for CUL5 (NM_003478.2,1492-1510).
cgtcaaagaagcttttcaa

SEQ ID NO: 331711 - DNA, 19 bp, Homo sapiens
  siRNA target sequence for CUL5 (NM_003478.2,1511-1529).
gatgatccacgatttctta

SEQ ID NO: 331712 - DNA, 19 bp, Homo sapiens
  siRNA target sequence for CUL5 (NM_003478.2,1533-1551).
caagagataaggcgtataa

SEQ ID NO: 331713 - DNA, 19 bp, Homo sapiens
  siRNA target sequence for CUL5 (NM_003478.2,1606-1624).
gggggtgggattaaaaact

SEQ ID NO: 331714 - DNA, 19 bp, Homo sapiens
  siRNA target sequence for CUL5 (NM_003478.2,1686-1704).
caccattaagcaaaaaact

SEQ ID NO: 331715 - DNA, 19 bp, Homo sapiens
  siRNA target sequence for CUL5 (NM_003478.2,1736-1754).
gaagtgctcttggtactta

SEQ ID NO: 331716 - DNA, 19 bp, Homo sapiens
  siRNA target sequence for CUL5 (NM_003478.2,1739-1757).
gtgctcttggtacttaagt

SEQ ID NO: 331717 - DNA, 19 bp, Homo sapiens
  siRNA target sequence for CUL5 (NM_003478.2,1785-1803).
ggtatcataaagctcattt

SEQ ID NO: 331718 - DNA, 19 bp, Homo sapiens
  siRNA target sequence for CUL5 (NM_003478.2,1804-1822).
gacacgacgtcttatatta

SEQ ID NO: 331719 - DNA, 19 bp, Homo sapiens
  siRNA target sequence for CUL5 (NM_003478.2,1806-1824).
cacgacgtcttatattaga

SEQ ID NO: 331720 - DNA, 19 bp, Homo sapiens
  siRNA target sequence for CUL5 (NM_003478.2,1808-1826).
cgacgtcttatattagaca

SEQ ID NO: 331721 - DNA, 19 bp, Homo sapiens
  siRNA target sequence for CUL5 (NM_003478.2,1825-1843).
catctctgccgatagtgaa

SEQ ID NO: 331722 - DNA, 19 bp, Homo sapiens
  siRNA target sequence for CUL5 (NM_003478.2,1828-1846).
ctctgccgatagtgaaatt

SEQ ID NO: 331723 - DNA, 19 bp, Homo sapiens
  siRNA target sequence for CUL5 (NM_003478.2,1830-1848).
ctgccgatagtgaaattga

SEQ ID NO: 331724 - DNA, 19 bp, Homo sapiens
  siRNA target sequence for CUL5 (NM_003478.2,1858-1876).
ggtagagtggctaagagaa

SEQ ID NO: 331725 - DNA, 19 bp, Homo sapiens
  siRNA target sequence for CUL5 (NM_003478.2,1866-1884).
ggctaagagaagttggtat

SEQ ID NO: 331726 - DNA, 19 bp, Homo sapiens
  siRNA target sequence for CUL5 (NM_003478.2,1886-1904).
ccagcggattatgtaaaca

SEQ ID NO: 331727 - DNA, 19 bp, Homo sapiens
  siRNA target sequence for CUL5 (NM_003478.2,1903-1921).
caagcttgctagaatgttt

SEQ ID NO: 331728 - DNA, 19 bp, Homo sapiens
  siRNA target sequence for CUL5 (NM_003478.2,1987-2005).
ggcattaccagctgattca

SEQ ID NO: 331729 - DNA, 19 bp, Homo sapiens
  siRNA target sequence for CUL5 (NM_003478.2,1994-2012).
ccagctgattcagttaata

SEQ ID NO: 331730 - DNA, 19 bp, Homo sapiens
  siRNA target sequence for CUL5 (NM_003478.2,1997-2015).
gctgattcagttaatataa

SEQ ID NO: 331731 - DNA, 19 bp, Homo sapiens
  siRNA target sequence for CUL5 (NM_003478.2,2089-2107).
cttgataccggaagtagaa

SEQ ID NO: 331732 - DNA, 19 bp, Homo sapiens
  siRNA target sequence for CUL5 (NM_003478.2,2102-2120).
gtagaagaattctacaaaa

SEQ ID NO: 331733 - DNA, 19 bp, Homo sapiens
  siRNA target sequence for CUL5 (NM_003478.2,2148-2166).
ggcatcatctcatgtcaaa

SEQ ID NO: 331734 - DNA, 19 bp, Homo sapiens
  siRNA target sequence for CUL5 (NM_003478.2,2161-2179).
gtcaaatggaattataaca

SEQ ID NO: 331735 - DNA, 19 bp, Homo sapiens
  siRNA target sequence for CUL5 (NM_003478.2,2220-2238).
cgtttcagctcgctgtatt

SEQ ID NO: 331736 - DNA, 19 bp, Homo sapiens
  siRNA target sequence for CUL5 (NM_003478.2,2228-2246).
ctcgctgtattgtttgcat

SEQ ID NO: 331737 - DNA, 19 bp, Homo sapiens
  siRNA target sequence for CUL5 (NM_003478.2,2303-2321).
ctccctgatgctgaactta

SEQ ID NO: 331738 - DNA, 19 bp, Homo sapiens
  siRNA target sequence for CUL5 (NM_003478.2,2318-2336).
cttaggaggactttatggt

SEQ ID NO: 331739 - DNA, 19 bp, Homo sapiens
  siRNA target sequence for CUL5 (NM_003478.2,2325-2343).
ggactttatggtctttagt

SEQ ID NO: 331740 - DNA, 19 bp, Homo sapiens
  siRNA target sequence for CUL5 (NM_003478.2,2326-2344).
gactttatggtctttagta

SEQ ID NO: 331741 - DNA, 19 bp, Homo sapiens
  siRNA target sequence for CUL5 (NM_003478.2,2357-2375).
ctcaaacggcaagttttgt

SEQ ID NO: 331742 - DNA, 19 bp, Homo sapiens
  siRNA target sequence for CUL5 (NM_003478.2,2437-2455).
ccaggagttcagtttaata

SEQ ID NO: 331743 - DNA, 19 bp, Homo sapiens
  siRNA target sequence for CUL5 (NM_003478.2,2478-2496).
ggggtaaaatcaacttgat

SEQ ID NO: 331744 - DNA, 19 bp, Homo sapiens
  siRNA target sequence for CUL5 (NM_003478.2,2547-2565).
gaatagttcaactacgaat

SEQ ID NO: 331745 - DNA, 19 bp, Homo sapiens
  siRNA target sequence for CUL5 (NM_003478.2,2552-2570).
gttcaactacgaatactaa

SEQ ID NO: 331746 - DNA, 19 bp, Homo sapiens
  siRNA target sequence for CUL5 (NM_003478.2,2574-2592).
cccaggaagctatcataca

SEQ ID NO: 331747 - DNA, 19 bp, Homo sapiens
  siRNA target sequence for CUL5 (NM_003478.2,2575-2593).
ccaggaagctatcatacaa

SEQ ID NO: 331748 - DNA, 19 bp, Homo sapiens
  siRNA target sequence for CUL5 (NM_003478.2,2578-2596).
ggaagctatcatacaaata

SEQ ID NO: 331749 - DNA, 19 bp, Homo sapiens
  siRNA target sequence for CUL5 (NM_003478.2,2579-2597).
gaagctatcatacaaataa

SEQ ID NO: 331750 - DNA, 19 bp, Homo sapiens
  siRNA target sequence for CUL5 (NM_003478.2,2582-2600).
gctatcatacaaataatga

SEQ ID NO: 331751 - DNA, 19 bp, Homo sapiens
  siRNA target sequence for CUL5 (NM_003478.2,2583-2601).
ctatcatacaaataatgaa

SEQ ID NO: 331752 - DNA, 19 bp, Homo sapiens
  siRNA target sequence for CUL5 (NM_003478.2,2706-2724).
ggctaatagagcacaaata

SEQ ID NO: 331753 - DNA, 19 bp, Homo sapiens
  siRNA target sequence for CUL5 (NM_003478.2,2714-2732).
gagcacaaatacatcagaa

SEQ ID NO: 331754 - DNA, 19 bp, Homo sapiens
  siRNA target sequence for CUL5 (NM_003478.2,2719-2737).
caaatacatcagaagagat

SEQ ID NO: 331755 - DNA, 19 bp, Homo sapiens
  siRNA target sequence for CUL5 (NM_003478.2,2738-2756).
gaatctgatatcaacactt

SEQ ID NO: 331756 - DNA, 19 bp, Homo sapiens
  siRNA target sequence for GPR68 (NM_003485.2,531-549).
cggtggccgacctcttcta

SEQ ID NO: 331757 - DNA, 19 bp, Homo sapiens
  siRNA target sequence for GPR68 (NM_003485.2,638-656).
ctcctgtacgagaacatct

SEQ ID NO: 331758 - DNA, 19 bp, Homo sapiens
  siRNA target sequence for GPR68 (NM_003485.2,641-659).
ctgtacgagaacatctaca

SEQ ID NO: 331759 - DNA, 19 bp, Homo sapiens
  siRNA target sequence for HIST1H4C (NM_003542.3,138-156).
catttccggtcttatctat

SEQ ID NO: 331760 - DNA, 19 bp, Homo sapiens
  siRNA target sequence for HIST1H4C (NM_003542.3,164-182).
ctcgaggtgtgcttaaggt

SEQ ID NO: 331761 - DNA, 19 bp, Homo sapiens
  siRNA target sequence for HIST1H4C (NM_003542.3,169-187).
ggtgtgcttaaggttttct

SEQ ID NO: 331762 - DNA, 19 bp, Homo sapiens
  siRNA target sequence for HIST1H4C (NM_003542.3,181-199).
gttttcttagagaacgtta

SEQ ID NO: 331763 - DNA, 19 bp, Homo sapiens
  siRNA target sequence for HIST1H4C (NM_003542.3,186-204).
cttagagaacgttattcga

SEQ ID NO: 331764 - DNA, 19 bp, Homo sapiens
  siRNA target sequence for HIST1H4H (NM_003543.3,9-27).
ccgtggtaaaggtggaaaa

SEQ ID NO: 331765 - DNA, 19 bp, Homo sapiens
  siRNA target sequence for HIST1H4B (NM_003544.2,135-153).
gcgaatttccggtttgatt

SEQ ID NO: 331766 - DNA, 19 bp, Homo sapiens
  siRNA target sequence for HIST1H4B (NM_003544.2,136-154).
cgaatttccggtttgattt

SEQ ID NO: 331767 - DNA, 19 bp, Homo sapiens
  siRNA target sequence for HIST1H4E (NM_003545.3,59-77).
gtaaggtcctgcgagataa

SEQ ID NO: 331768 - DNA, 19 bp, Homo sapiens
  siRNA target sequence for HIST1H4L (NM_003546.2,163-181).
gacacgcggagttcttaaa

SEQ ID NO: 331769 - DNA, 19 bp, Homo sapiens
  siRNA target sequence for HIST1H4L (NM_003546.2,165-183).
cacgcggagttcttaaagt

SEQ ID NO: 331770 - DNA, 19 bp, Homo sapiens
  siRNA target sequence for OR1D4 (NM_003552.1,446-464).
gggggctgtctgttctcta

SEQ ID NO: 331771 - DNA, 19 bp, Homo sapiens
  siRNA target sequence for OR1D4 (NM_003552.1,566-584).
gttccaacacccacatcat

SEQ ID NO: 331772 - DNA, 19 bp, Homo sapiens
  siRNA target sequence for OR1D4 (NM_003552.1,569-587).
ccaacacccacatcattca

SEQ ID NO: 331773 - DNA, 19 bp, Homo sapiens
  siRNA target sequence for OR1D4 (NM_003552.1,639-657).
catgaccacatcctatgta

SEQ ID NO: 331774 - DNA, 19 bp, Homo sapiens
  siRNA target sequence for OR1D4 (NM_003552.1,644-662).
ccacatcctatgtacgtat

SEQ ID NO: 331775 - DNA, 19 bp, Homo sapiens
  siRNA target sequence for OR1D4 (NM_003552.1,645-663).
cacatcctatgtacgtatt

SEQ ID NO: 331776 - DNA, 19 bp, Homo sapiens
  siRNA target sequence for OR1D4 (NM_003552.1,647-665).
catcctatgtacgtattgt

SEQ ID NO: 331777 - DNA, 19 bp, Homo sapiens
  siRNA target sequence for TIEG2 (NM_003597.4,253-271).
gacagcgaaaggtctactt

SEQ ID NO: 331778 - DNA, 19 bp, Homo sapiens
  siRNA target sequence for TIEG2 (NM_003597.4,301-319).
gctgtcgaggctcttgttt

SEQ ID NO: 331779 - DNA, 19 bp, Homo sapiens
  siRNA target sequence for TIEG2 (NM_003597.4,304-322).
gtcgaggctcttgtttgta

SEQ ID NO: 331780 - DNA, 19 bp, Homo sapiens
  siRNA target sequence for TIEG2 (NM_003597.4,307-325).
gaggctcttgtttgtatga

SEQ ID NO: 331781 - DNA, 19 bp, Homo sapiens
  siRNA target sequence for TIEG2 (NM_003597.4,407-425).
ccaccactgtgcatatgga

SEQ ID NO: 331782 - DNA, 19 bp, Homo sapiens
  siRNA target sequence for TIEG2 (NM_003597.4,451-469).
gacttccattctttatcga

SEQ ID NO: 331783 - DNA, 19 bp, Homo sapiens
  siRNA target sequence for TIEG2 (NM_003597.4,526-544).
cctgtttctccccaagtaa

SEQ ID NO: 331784 - DNA, 19 bp, Homo sapiens
  siRNA target sequence for TIEG2 (NM_003597.4,560-578).
gtacagccacggatgttct

SEQ ID NO: 331785 - DNA, 19 bp, Homo sapiens
  siRNA target sequence for TIEG2 (NM_003597.4,812-830).
cacacctcacggacagttt

SEQ ID NO: 331786 - DNA, 19 bp, Homo sapiens
  siRNA target sequence for TIEG2 (NM_003597.4,827-845).
gtttactcagcactaactt

SEQ ID NO: 331787 - DNA, 19 bp, Homo sapiens
  siRNA target sequence for TIEG2 (NM_003597.4,938-956).
gctcaccaaagaattatga

SEQ ID NO: 331788 - DNA, 19 bp, Homo sapiens
  siRNA target sequence for TIEG2 (NM_003597.4,1166-1184).
ctcagggagctgtgatgtt

SEQ ID NO: 331789 - DNA, 19 bp, Homo sapiens
  siRNA target sequence for TIEG2 (NM_003597.4,1243-1261).
gccgggaataccaagttgt

SEQ ID NO: 331790 - DNA, 19 bp, Homo sapiens
  siRNA target sequence for TIEG2 (NM_003597.4,1244-1262).
ccgggaataccaagttgtt

SEQ ID NO: 331791 - DNA, 19 bp, Homo sapiens
  siRNA target sequence for TIEG2 (NM_003597.4,1290-1308).
cacctctagccaaaactgt

SEQ ID NO: 331792 - DNA, 19 bp, Homo sapiens
  siRNA target sequence for TIEG2 (NM_003597.4,1328-1346).
cccgaaggaggaactatgt

SEQ ID NO: 331793 - DNA, 19 bp, Homo sapiens
  siRNA target sequence for TIEG2 (NM_003597.4,1364-1382).
gccggaagacctacttcaa

SEQ ID NO: 331794 - DNA, 19 bp, Homo sapiens
  siRNA target sequence for TIEG2 (NM_003597.4,1588-1606).
cacatgacgaccaagaaga

SEQ ID NO: 331795 - DNA, 19 bp, Homo sapiens
  siRNA target sequence for SLC43A1 (NM_003627.3,219-237).
gctccctgttgatcattct

SEQ ID NO: 331796 - DNA, 19 bp, Homo sapiens
  siRNA target sequence for SLC43A1 (NM_003627.3,350-368).
ctgggcttcaccattggtt

SEQ ID NO: 331797 - DNA, 19 bp, Homo sapiens
  siRNA target sequence for SLC43A1 (NM_003627.3,578-596).
ctcacgctgcccaacatgt

SEQ ID NO: 331798 - DNA, 19 bp, Homo sapiens
  siRNA target sequence for SLC43A1 (NM_003627.3,580-598).
cacgctgcccaacatgttt

SEQ ID NO: 331799 - DNA, 19 bp, Homo sapiens
  siRNA target sequence for SLC43A1 (NM_003627.3,615-633).
cgttaatggccctcatgat

SEQ ID NO: 331800 - DNA, 19 bp, Homo sapiens
  siRNA target sequence for SLC43A1 (NM_003627.3,616-634).
gttaatggccctcatgatt

SEQ ID NO: 331801 - DNA, 19 bp, Homo sapiens
  siRNA target sequence for SLC43A1 (NM_003627.3,800-818).
gtcaattacacgaagaaga

SEQ ID NO: 331802 - DNA, 19 bp, Homo sapiens
  siRNA target sequence for SLC43A1 (NM_003627.3,929-947).
ggttcggatgccttcatgt

SEQ ID NO: 331803 - DNA, 19 bp, Homo sapiens
  siRNA target sequence for SLC43A1 (NM_003627.3,959-977).
gttcggggcacctcagaaa

SEQ ID NO: 331804 - DNA, 19 bp, Homo sapiens
  siRNA target sequence for SLC43A1 (NM_003627.3,1125-1143).
gccaggagcatgagacaaa

SEQ ID NO: 331805 - DNA, 19 bp, Homo sapiens
  siRNA target sequence for SLC43A1 (NM_003627.3,1312-1330).
ggacggggttgctaccaaa

SEQ ID NO: 331806 - DNA, 19 bp, Homo sapiens
  siRNA target sequence for SLC43A1 (NM_003627.3,1313-1331).
gacggggttgctaccaaat

SEQ ID NO: 331807 - DNA, 19 bp, Homo sapiens
  siRNA target sequence for SLC43A1 (NM_003627.3,1317-1335).
gggttgctaccaaatccat

SEQ ID NO: 331808 - DNA, 19 bp, Homo sapiens
  siRNA target sequence for SLC43A1 (NM_003627.3,1343-1361).
cgctactgcaagatccaaa

SEQ ID NO: 331809 - DNA, 19 bp, Homo sapiens
  siRNA target sequence for SLC43A1 (NM_003627.3,1344-1362).
gctactgcaagatccaaaa

SEQ ID NO: 331810 - DNA, 19 bp, Homo sapiens
  siRNA target sequence for SLC43A1 (NM_003627.3,1428-1446).
gtctcatcaacaacttaca

SEQ ID NO: 331811 - DNA, 19 bp, Homo sapiens
  siRNA target sequence for SLC43A1 (NM_003627.3,1660-1678).
gggcctcctgctattctca

SEQ ID NO: 331812 - DNA, 19 bp, Homo sapiens
  siRNA target sequence for PIK3R3 (NM_003629.2,742-760).
gtgatgatgccctattcga

SEQ ID NO: 331813 - DNA, 19 bp, Homo sapiens
  siRNA target sequence for PIK3R3 (NM_003629.2,752-770).
cctattcgacagaactgat

SEQ ID NO: 331814 - DNA, 19 bp, Homo sapiens
  siRNA target sequence for PIK3R3 (NM_003629.2,753-771).
ctattcgacagaactgata

SEQ ID NO: 331815 - DNA, 19 bp, Homo sapiens
  siRNA target sequence for PIK3R3 (NM_003629.2,758-776).
cgacagaactgatatttta

SEQ ID NO: 331816 - DNA, 19 bp, Homo sapiens
  siRNA target sequence for PIK3R3 (NM_003629.2,761-779).
cagaactgatattttatat

SEQ ID NO: 331817 - DNA, 19 bp, Homo sapiens
  siRNA target sequence for PIK3R3 (NM_003629.2,830-848).
cagcagttccaaatggaat

SEQ ID NO: 331818 - DNA, 19 bp, Homo sapiens
  siRNA target sequence for PIK3R3 (NM_003629.2,957-975).
ccgagatgcctcaacaaaa

SEQ ID NO: 331819 - DNA, 19 bp, Homo sapiens
  siRNA target sequence for PIK3R3 (NM_003629.2,958-976).
cgagatgcctcaacaaaaa

SEQ ID NO: 331820 - DNA, 19 bp, Homo sapiens
  siRNA target sequence for PIK3R3 (NM_003629.2,983-1001).
gagattatactttgacttt

SEQ ID NO: 331821 - DNA, 19 bp, Homo sapiens
  siRNA target sequence for PIK3R3 (NM_003629.2,1003-1021).
cggaagggaggcaataata

SEQ ID NO: 331822 - DNA, 19 bp, Homo sapiens
  siRNA target sequence for PIK3R3 (NM_003629.2,1008-1026).
gggaggcaataataagtta

SEQ ID NO: 331823 - DNA, 19 bp, Homo sapiens
  siRNA target sequence for PIK3R3 (NM_003629.2,1009-1027).
ggaggcaataataagttaa

SEQ ID NO: 331824 - DNA, 19 bp, Homo sapiens
  siRNA target sequence for PIK3R3 (NM_003629.2,1035-1053).
ctatcaccgggatggtaaa

SEQ ID NO: 331825 - DNA, 19 bp, Homo sapiens
  siRNA target sequence for PIK3R3 (NM_003629.2,1085-1103).
ccgtggtggagctcattaa

SEQ ID NO: 331826 - DNA, 19 bp, Homo sapiens
  siRNA target sequence for PIK3R3 (NM_003629.2,1104-1122).
ccactatcaccatgaatct

SEQ ID NO: 331827 - DNA, 19 bp, Homo sapiens
  siRNA target sequence for PIK3R3 (NM_003629.2,1107-1125).
ctatcaccatgaatctctt

SEQ ID NO: 331828 - DNA, 19 bp, Homo sapiens
  siRNA target sequence for PIK3R3 (NM_003629.2,1131-1149).
gtacaatcccaaacttgat

SEQ ID NO: 331829 - DNA, 19 bp, Homo sapiens
  siRNA target sequence for PIK3R3 (NM_003629.2,1175-1193).
gataccaacaggatcagtt

SEQ ID NO: 331830 - DNA, 19 bp, Homo sapiens
  siRNA target sequence for PIK3R3 (NM_003629.2,1255-1273).
caggagaagagtaaagagt

SEQ ID NO: 331831 - DNA, 19 bp, Homo sapiens
  siRNA target sequence for PIK3R3 (NM_003629.2,1260-1278).
gaagagtaaagagtatgat

SEQ ID NO: 331832 - DNA, 19 bp, Homo sapiens
  siRNA target sequence for PIK3R3 (NM_003629.2,1272-1290).
gtatgataggctgtatgaa

SEQ ID NO: 331833 - DNA, 19 bp, Homo sapiens
  siRNA target sequence for PIK3R3 (NM_003629.2,1331-1349).
ctgcaatagaagcttttaa

SEQ ID NO: 331834 - DNA, 19 bp, Homo sapiens
  siRNA target sequence for PIK3R3 (NM_003629.2,1444-1462).
gagattgaacgaattatga

SEQ ID NO: 331835 - DNA, 19 bp, Homo sapiens
  siRNA target sequence for PIK3R3 (NM_003629.2,1487-1505).
gtctgggtgagattcatga

SEQ ID NO: 331836 - DNA, 19 bp, Homo sapiens
  siRNA target sequence for PIK3R3 (NM_003629.2,1489-1507).
ctgggtgagattcatgata

SEQ ID NO: 331837 - DNA, 19 bp, Homo sapiens
  siRNA target sequence for PIK3R3 (NM_003629.2,1493-1511).
gtgagattcatgatagcaa

SEQ ID NO: 331838 - DNA, 19 bp, Homo sapiens
  siRNA target sequence for PIK3R3 (NM_003629.2,1495-1513).
gagattcatgatagcaaaa

SEQ ID NO: 331839 - DNA, 19 bp, Homo sapiens
  siRNA target sequence for PIK3R3 (NM_003629.2,1524-1542).
gcaggatttgaagaatcaa

SEQ ID NO: 331840 - DNA, 19 bp, Homo sapiens
  siRNA target sequence for PIK3R3 (NM_003629.2,1544-1562).
ctttggacaaccgagaaat

SEQ ID NO: 331841 - DNA, 19 bp, Homo sapiens
  siRNA target sequence for PIK3R3 (NM_003629.2,1548-1566).
ggacaaccgagaaatagat

SEQ ID NO: 331842 - DNA, 19 bp, Homo sapiens
  siRNA target sequence for PIK3R3 (NM_003629.2,1554-1572).
ccgagaaatagataaaaaa

SEQ ID NO: 331843 - DNA, 19 bp, Homo sapiens
  siRNA target sequence for PIK3R3 (NM_003629.2,1607-1625).
gaaagatccgagatcaaca

SEQ ID NO: 331844 - DNA, 19 bp, Homo sapiens
  siRNA target sequence for PIK3R3 (NM_003629.2,1627-1645).
cttgtatggctcaatcaca

SEQ ID NO: 331845 - DNA, 19 bp, Homo sapiens
  siRNA target sequence for PIK3R3 (NM_003629.2,1773-1791).
ggatatcaatcgagtacaa

SEQ ID NO: 331846 - DNA, 19 bp, Homo sapiens
  siRNA target sequence for PIK3R3 (NM_003629.2,1789-1807).
caagcagaggacttgcttt

SEQ ID NO: 331847 - DNA, 19 bp, Homo sapiens
  siRNA target sequence for PIK3R3 (NM_003629.2,1816-1834).
cctgatggtgcattcttaa

SEQ ID NO: 331848 - DNA, 19 bp, Homo sapiens
  siRNA target sequence for PIK3R3 (NM_003629.2,1817-1835).
ctgatggtgcattcttaat

SEQ ID NO: 331849 - DNA, 19 bp, Homo sapiens
  siRNA target sequence for NIPSNAP1 (NM_003634.1,383-401).
gttccgctccctctttgtt

SEQ ID NO: 331850 - DNA, 19 bp, Homo sapiens
  siRNA target sequence for NIPSNAP1 (NM_003634.1,388-406).
gctccctctttgttcacaa

SEQ ID NO: 331851 - DNA, 19 bp, Homo sapiens
  siRNA target sequence for NIPSNAP1 (NM_003634.1,473-491).
gatccagtttcacaatgta

SEQ ID NO: 331852 - DNA, 19 bp, Homo sapiens
  siRNA target sequence for NIPSNAP1 (NM_003634.1,623-641).
gcacctgtggcgattctca

SEQ ID NO: 331853 - DNA, 19 bp, Homo sapiens
  siRNA target sequence for NIPSNAP1 (NM_003634.1,911-929).
cggcttcttctcacagata

SEQ ID NO: 331854 - DNA, 19 bp, Homo sapiens
  siRNA target sequence for NIPSNAP1 (NM_003634.1,950-968).
ccatctctgggcctataaa

SEQ ID NO: 331855 - DNA, 19 bp, Homo sapiens
  siRNA target sequence for NIPSNAP1 (NM_003634.1,1021-1039).
gggatgaaaatgtctacta

SEQ ID NO: 331856 - DNA, 19 bp, Homo sapiens
  siRNA target sequence for NIPSNAP1 (NM_003634.1,1023-1041).
gatgaaaatgtctactata

SEQ ID NO: 331857 - DNA, 19 bp, Homo sapiens
  siRNA target sequence for IFITM1 (NM_003641.2,639-657).
ctgtgacagtctaccatat

SEQ ID NO: 331858 - DNA, 19 bp, Homo sapiens
  siRNA target sequence for IFITM1 (NM_003641.2,641-659).
gtgacagtctaccatatta

SEQ ID NO: 331859 - DNA, 19 bp, Homo sapiens
  siRNA target sequence for DDO (NM_003649.2,19-37).
gcactgggaaacaaggttt

SEQ ID NO: 331860 - DNA, 19 bp, Homo sapiens
  siRNA target sequence for DDO (NM_003649.2,34-52).
gtttggtgccagagatttt

SEQ ID NO: 331861 - DNA, 19 bp, Homo sapiens
  siRNA target sequence for DDO (NM_003649.2,61-79).
ccaagactgctttttcaga

SEQ ID NO: 331862 - DNA, 19 bp, Homo sapiens
  siRNA target sequence for DDO (NM_003649.2,168-186).
cccgatgctccgttaccat

SEQ ID NO: 331863 - DNA, 19 bp, Homo sapiens
  siRNA target sequence for DDO (NM_003649.2,177-195).
ccgttaccatcatttcaga

SEQ ID NO: 331864 - DNA, 19 bp, Homo sapiens
  siRNA target sequence for DDO (NM_003649.2,224-242).
gtggcagccggaatgctta

SEQ ID NO: 331865 - DNA, 19 bp, Homo sapiens
  siRNA target sequence for DDO (NM_003649.2,238-256).
gcttattcctcacacttat

SEQ ID NO: 331866 - DNA, 19 bp, Homo sapiens
  siRNA target sequence for DDO (NM_003649.2,288-306).
ggttcagagaaacctttaa

SEQ ID NO: 331867 - DNA, 19 bp, Homo sapiens
  siRNA target sequence for DDO (NM_003649.2,289-307).
gttcagagaaacctttaat

SEQ ID NO: 331868 - DNA, 19 bp, Homo sapiens
  siRNA target sequence for DDO (NM_003649.2,362-380).
gtatcaggttggcagatat

SEQ ID NO: 331869 - DNA, 19 bp, Homo sapiens
  siRNA target sequence for DDO (NM_003649.2,385-403).
gagcactccgactgaagaa

SEQ ID NO: 331870 - DNA, 19 bp, Homo sapiens
  siRNA target sequence for DDO (NM_003649.2,387-405).
gcactccgactgaagaagt

SEQ ID NO: 331871 - DNA, 19 bp, Homo sapiens
  siRNA target sequence for DDO (NM_003649.2,421-439).
cgtggttctgggatttcga

SEQ ID NO: 331872 - DNA, 19 bp, Homo sapiens
  siRNA target sequence for DDO (NM_003649.2,422-440).
gtggttctgggatttcgaa

SEQ ID NO: 331873 - DNA, 19 bp, Homo sapiens
  siRNA target sequence for DDO (NM_003649.2,479-497).
gtgtttggtcaggctttta

SEQ ID NO: 331874 - DNA, 19 bp, Homo sapiens
  siRNA target sequence for DDO (NM_003649.2,570-588).
cactcactcggcgaataga

SEQ ID NO: 331875 - DNA, 19 bp, Homo sapiens
  siRNA target sequence for DDO (NM_003649.2,617-635).
gacatcgtggtcaactgtt

SEQ ID NO: 331876 - DNA, 19 bp, Homo sapiens
  siRNA target sequence for DDO (NM_003649.2,713-731).
ccctgggtggagcatttta

SEQ ID NO: 331877 - DNA, 19 bp, Homo sapiens
  siRNA target sequence for DDO (NM_003649.2,714-732).
cctgggtggagcattttat

SEQ ID NO: 331878 - DNA, 19 bp, Homo sapiens
  siRNA target sequence for DDO (NM_003649.2,740-758).
ggcagtgggctgacatata

SEQ ID NO: 331879 - DNA, 19 bp, Homo sapiens
  siRNA target sequence for COPS3 (NM_003653.2,161-179).
ctttgtgaactgatcaaca

SEQ ID NO: 331880 - DNA, 19 bp, Homo sapiens
  siRNA target sequence for COPS3 (NM_003653.2,191-209).
ctccttgcgaagaacttat

SEQ ID NO: 331881 - DNA, 19 bp, Homo sapiens
  siRNA target sequence for COPS3 (NM_003653.2,229-247).
cggggctctggatgtacaa

SEQ ID NO: 331882 - DNA, 19 bp, Homo sapiens
  siRNA target sequence for COPS3 (NM_003653.2,261-279).
gcgtccttgctgttttgtt

SEQ ID NO: 331883 - DNA, 19 bp, Homo sapiens
  siRNA target sequence for COPS3 (NM_003653.2,327-345).
cacaggttcagctcttcat

SEQ ID NO: 331884 - DNA, 19 bp, Homo sapiens
  siRNA target sequence for COPS3 (NM_003653.2,398-416).
ctttgccatcagctaacaa

SEQ ID NO: 331885 - DNA, 19 bp, Homo sapiens
  siRNA target sequence for COPS3 (NM_003653.2,450-468).
gaattggcatccttaagca

SEQ ID NO: 331886 - DNA, 19 bp, Homo sapiens
  siRNA target sequence for COPS3 (NM_003653.2,478-496).
caagatgcagatgaataca

SEQ ID NO: 331887 - DNA, 19 bp, Homo sapiens
  siRNA target sequence for COPS3 (NM_003653.2,532-550).
gctttgtttgctagcaaaa

SEQ ID NO: 331888 - DNA, 19 bp, Homo sapiens
  siRNA target sequence for COPS3 (NM_003653.2,570-588).
catatcttgacgtggatat

SEQ ID NO: 331889 - DNA, 19 bp, Homo sapiens
  siRNA target sequence for COPS3 (NM_003653.2,578-596).
gacgtggatatgatggata

SEQ ID NO: 331890 - DNA, 19 bp, Homo sapiens
  siRNA target sequence for COPS3 (NM_003653.2,583-601).
ggatatgatggatatctgt

SEQ ID NO: 331891 - DNA, 19 bp, Homo sapiens
  siRNA target sequence for COPS3 (NM_003653.2,612-630).
gagcctatgatgcaaaaca

SEQ ID NO: 331892 - DNA, 19 bp, Homo sapiens
  siRNA target sequence for COPS3 (NM_003653.2,615-633).
cctatgatgcaaaacactt

SEQ ID NO: 331893 - DNA, 19 bp, Homo sapiens
  siRNA target sequence for COPS3 (NM_003653.2,690-708).
gagctctctacttttatga

SEQ ID NO: 331894 - DNA, 19 bp, Homo sapiens
  siRNA target sequence for COPS3 (NM_003653.2,693-711).
ctctctacttttatgaaca

SEQ ID NO: 331895 - DNA, 19 bp, Homo sapiens
  siRNA target sequence for COPS3 (NM_003653.2,728-746).
gccatggcggtcagtcata

SEQ ID NO: 331896 - DNA, 19 bp, Homo sapiens
  siRNA target sequence for COPS3 (NM_003653.2,729-747).
ccatggcggtcagtcatat

SEQ ID NO: 331897 - DNA, 19 bp, Homo sapiens
  siRNA target sequence for COPS3 (NM_003653.2,734-752).
gcggtcagtcatatcatgt

SEQ ID NO: 331898 - DNA, 19 bp, Homo sapiens
  siRNA target sequence for COPS3 (NM_003653.2,735-753).
cggtcagtcatatcatgtt

SEQ ID NO: 331899 - DNA, 19 bp, Homo sapiens
  siRNA target sequence for COPS3 (NM_003653.2,743-761).
catatcatgttggaatcat

SEQ ID NO: 331900 - DNA, 19 bp, Homo sapiens
  siRNA target sequence for COPS3 (NM_003653.2,803-821).
gtacaacagctaccaaaat

SEQ ID NO: 331901 - DNA, 19 bp, Homo sapiens
  siRNA target sequence for COPS3 (NM_003653.2,828-846).
ctcaaattgtgggtagatt

SEQ ID NO: 331902 - DNA, 19 bp, Homo sapiens
  siRNA target sequence for COPS3 (NM_003653.2,830-848).
caaattgtgggtagattca

SEQ ID NO: 331903 - DNA, 19 bp, Homo sapiens
  siRNA target sequence for COPS3 (NM_003653.2,874-892).
cgagttagcacaagtgtat

SEQ ID NO: 331904 - DNA, 19 bp, Homo sapiens
  siRNA target sequence for COPS3 (NM_003653.2,875-893).
gagttagcacaagtgtatt

SEQ ID NO: 331905 - DNA, 19 bp, Homo sapiens
  siRNA target sequence for COPS3 (NM_003653.2,914-932).
ctccgaaacctggtgaata

SEQ ID NO: 331906 - DNA, 19 bp, Homo sapiens
  siRNA target sequence for COPS3 (NM_003653.2,945-963).
ccttcactcgcgataacaa

SEQ ID NO: 331907 - DNA, 19 bp, Homo sapiens
  siRNA target sequence for COPS3 (NM_003653.2,984-1002).
gcttgtcatctctttataa

SEQ ID NO: 331908 - DNA, 19 bp, Homo sapiens
  siRNA target sequence for COPS3 (NM_003653.2,1156-1174).
cggtatggtcagtttccat

SEQ ID NO: 331909 - DNA, 19 bp, Homo sapiens
  siRNA target sequence for COPS3 (NM_003653.2,1199-1217).
ccagccatgcttcataaca

SEQ ID NO: 331910 - DNA, 19 bp, Homo sapiens
  siRNA target sequence for COPS3 (NM_003653.2,1203-1221).
ccatgcttcataacattga

SEQ ID NO: 331911 - DNA, 19 bp, Homo sapiens
  siRNA target sequence for COPS3 (NM_003653.2,1284-1302).
cagtgaaccctcagtttgt

SEQ ID NO: 331912 - DNA, 19 bp, Homo sapiens
  siRNA target sequence for COPS3 (NM_003653.2,1288-1306).
gaaccctcagtttgtacaa

SEQ ID NO: 331913 - DNA, 19 bp, Homo sapiens
  siRNA target sequence for COPS3 (NM_003653.2,1315-1333).
gggctcacaagaagatgat

SEQ ID NO: 331914 - DNA, 19 bp, Homo sapiens
  siRNA target sequence for BCAS1 (NM_003657.1,275-293).
gtgtcaagacggataatgt

SEQ ID NO: 331915 - DNA, 19 bp, Homo sapiens
  siRNA target sequence for BCAS1 (NM_003657.1,309-327).
cgagacaacggagataagt

SEQ ID NO: 331916 - DNA, 19 bp, Homo sapiens
  siRNA target sequence for BCAS1 (NM_003657.1,335-353).
cggatgccaacggaaagaa

SEQ ID NO: 331917 - DNA, 19 bp, Homo sapiens
  siRNA target sequence for BCAS1 (NM_003657.1,336-354).
ggatgccaacggaaagaat

SEQ ID NO: 331918 - DNA, 19 bp, Homo sapiens
  siRNA target sequence for BCAS1 (NM_003657.1,375-393).
cgaggcaccagctgctaaa

SEQ ID NO: 331919 - DNA, 19 bp, Homo sapiens
  siRNA target sequence for BCAS1 (NM_003657.1,376-394).
gaggcaccagctgctaaat

SEQ ID NO: 331920 - DNA, 19 bp, Homo sapiens
  siRNA target sequence for BCAS1 (NM_003657.1,467-485).
gatcagtgaagcttgatgt

SEQ ID NO: 331921 - DNA, 19 bp, Homo sapiens
  siRNA target sequence for BCAS1 (NM_003657.1,952-970).
gctatagcagagaataata

SEQ ID NO: 331922 - DNA, 19 bp, Homo sapiens
  siRNA target sequence for BCAS1 (NM_003657.1,959-977).
cagagaataataattccat

SEQ ID NO: 331923 - DNA, 19 bp, Homo sapiens
  siRNA target sequence for BCAS1 (NM_003657.1,974-992).
ccatcatgagtttctttaa

SEQ ID NO: 331924 - DNA, 19 bp, Homo sapiens
  siRNA target sequence for BCAS1 (NM_003657.1,1039-1057).
gacacgggtgctgaaaagt

SEQ ID NO: 331925 - DNA, 19 bp, Homo sapiens
  siRNA target sequence for BCAS1 (NM_003657.1,1064-1082).
ccacttcagctgaccttaa

SEQ ID NO: 331926 - DNA, 19 bp, Homo sapiens
  siRNA target sequence for BCAS1 (NM_003657.1,1116-1134).
ccaaggggctggcaagaat

SEQ ID NO: 331927 - DNA, 19 bp, Homo sapiens
  siRNA target sequence for BCAS1 (NM_003657.1,1121-1139).
gggctggcaagaattccaa

SEQ ID NO: 331928 - DNA, 19 bp, Homo sapiens
  siRNA target sequence for BCAS1 (NM_003657.1,1126-1144).
ggcaagaattccaaaggat

SEQ ID NO: 331929 - DNA, 19 bp, Homo sapiens
  siRNA target sequence for BCAS1 (NM_003657.1,1231-1249).
cctctgggcaaactgtttt

SEQ ID NO: 331930 - DNA, 19 bp, Homo sapiens
  siRNA target sequence for BCAS1 (NM_003657.1,1307-1325).
gtgagtcaccagtagagat

SEQ ID NO: 331931 - DNA, 19 bp, Homo sapiens
  siRNA target sequence for BCAS1 (NM_003657.1,1309-1327).
gagtcaccagtagagatta

SEQ ID NO: 331932 - DNA, 19 bp, Homo sapiens
  siRNA target sequence for BCAS1 (NM_003657.1,1313-1331).
caccagtagagattataaa

SEQ ID NO: 331933 - DNA, 19 bp, Homo sapiens
  siRNA target sequence for BCAS1 (NM_003657.1,1332-1350).
gtccaaggaagtagaatca

SEQ ID NO: 331934 - DNA, 19 bp, Homo sapiens
  siRNA target sequence for BCAS1 (NM_003657.1,1396-1414).
cccacagaagcgaaactca

SEQ ID NO: 331935 - DNA, 19 bp, Homo sapiens
  siRNA target sequence for BCAS1 (NM_003657.1,1397-1415).
ccacagaagcgaaactcaa

SEQ ID NO: 331936 - DNA, 19 bp, Homo sapiens
  siRNA target sequence for BCAS1 (NM_003657.1,1450-1468).
gcgtttctcagacaaatgt

SEQ ID NO: 331937 - DNA, 19 bp, Homo sapiens
  siRNA target sequence for BCAS1 (NM_003657.1,1773-1791).
ccttgggggcttctttaaa

SEQ ID NO: 331938 - DNA, 19 bp, Homo sapiens
  siRNA target sequence for PPFIA3 (NM_003660.1,587-605).
gacgaaggagctgaactta

SEQ ID NO: 331939 - DNA, 19 bp, Homo sapiens
  siRNA target sequence for PPFIA3 (NM_003660.1,590-608).
gaaggagctgaacttatgt

SEQ ID NO: 331940 - DNA, 19 bp, Homo sapiens
  siRNA target sequence for PPFIA3 (NM_003660.1,786-804).
gtgctcaaagctctaaagt

SEQ ID NO: 331941 - DNA, 19 bp, Homo sapiens
  siRNA target sequence for PPFIA3 (NM_003660.1,1219-1237).
cgcagcgggaagatatgga

SEQ ID NO: 331942 - DNA, 19 bp, Homo sapiens
  siRNA target sequence for PPFIA3 (NM_003660.1,1317-1335).
ctggagaacgagttagcta

SEQ ID NO: 331943 - DNA, 19 bp, Homo sapiens
  siRNA target sequence for PPFIA3 (NM_003660.1,1499-1517).
ggaacgtcatgggaatttt

SEQ ID NO: 331944 - DNA, 19 bp, Homo sapiens
  siRNA target sequence for PPFIA3 (NM_003660.1,1752-1770).
gatgagttgctgctaaaca

SEQ ID NO: 331945 - DNA, 19 bp, Homo sapiens
  siRNA target sequence for PPFIA3 (NM_003660.1,1871-1889).
cctggagctccgttactct

SEQ ID NO: 331946 - DNA, 19 bp, Homo sapiens
  siRNA target sequence for PPFIA3 (NM_003660.1,1890-1908).
caggcacccactttacctt

SEQ ID NO: 331947 - DNA, 19 bp, Homo sapiens
  siRNA target sequence for PPFIA3 (NM_003660.1,2398-2416).
ccgacaaggctaatcatgt

SEQ ID NO: 331948 - DNA, 19 bp, Homo sapiens
  siRNA target sequence for PPFIA3 (NM_003660.1,2496-2514).
gcccgtcttgagagaatga

SEQ ID NO: 331949 - DNA, 19 bp, Homo sapiens
  siRNA target sequence for PPFIA3 (NM_003660.1,2615-2633).
gagcatcaagtcatccata

SEQ ID NO: 331950 - DNA, 19 bp, Homo sapiens
  siRNA target sequence for PPFIA3 (NM_003660.1,2818-2836).
gccgccagggcctaccttt

SEQ ID NO: 331951 - DNA, 19 bp, Homo sapiens
  siRNA target sequence for PPFIA3 (NM_003660.1,2819-2837).
ccgccagggcctacctttt

SEQ ID NO: 331952 - DNA, 19 bp, Homo sapiens
  siRNA target sequence for PPFIA3 (NM_003660.1,3266-3284).
ggtggacgctcgaatgtta

SEQ ID NO: 331953 - DNA, 19 bp, Homo sapiens
  siRNA target sequence for PPFIA3 (NM_003660.1,3269-3287).
ggacgctcgaatgttagat

SEQ ID NO: 331954 - DNA, 19 bp, Homo sapiens
  siRNA target sequence for PPFIA3 (NM_003660.1,3341-3359).
cagggtgagtctacattat

SEQ ID NO: 331955 - DNA, 19 bp, Homo sapiens
  siRNA target sequence for PPFIA3 (NM_003660.1,3351-3369).
ctacattatgggattatgt

SEQ ID NO: 331956 - DNA, 19 bp, Homo sapiens
  siRNA target sequence for PPFIA3 (NM_003660.1,3370-3388).
gcctgaaacggctcaacta

SEQ ID NO: 331957 - DNA, 19 bp, Homo sapiens
  siRNA target sequence for PPFIA3 (NM_003660.1,3371-3389).
cctgaaacggctcaactat

SEQ ID NO: 331958 - DNA, 19 bp, Homo sapiens
  siRNA target sequence for PPFIA3 (NM_003660.1,3407-3425).
gcggaggcgggaagaaagt

SEQ ID NO: 331959 - DNA, 19 bp, Homo sapiens
  siRNA target sequence for PPFIA3 (NM_003660.1,3714-3732).
ccatcctggcggaagatgt

SEQ ID NO: 331960 - DNA, 19 bp, Homo sapiens
  siRNA target sequence for PPFIA3 (NM_003660.1,3715-3733).
catcctggcggaagatgtt

SEQ ID NO: 331961 - DNA, 19 bp, Homo sapiens
  siRNA target sequence for PPFIA3 (NM_003660.1,3763-3781).
ccgactcagctgagatgtt

SEQ ID NO: 331962 - DNA, 19 bp, Homo sapiens
  siRNA target sequence for PPFIA3 (NM_003660.1,3891-3909).
gtttcggtccggacctatt

SEQ ID NO: 331963 - DNA, 19 bp, Homo sapiens
  siRNA target sequence for INE1 (NM_003669.1,262-280).
ggtcagggagccaactcat

SEQ ID NO: 331964 - DNA, 19 bp, Homo sapiens
  siRNA target sequence for INE1 (NM_003669.1,327-345).
gagggacgtggcccaattt

SEQ ID NO: 331965 - DNA, 19 bp, Homo sapiens
  siRNA target sequence for INE1 (NM_003669.1,337-355).
gcccaatttgggctttgaa

SEQ ID NO: 331966 - DNA, 19 bp, Homo sapiens
  siRNA target sequence for CDC14B (NM_003671.2,701-719).
gaacttctacgcagatttt

SEQ ID NO: 331967 - DNA, 19 bp, Homo sapiens
  siRNA target sequence for CDC14B (NM_003671.2,1333-1351).
ccattgtcaaagaattcct

SEQ ID NO: 331968 - DNA, 19 bp, Homo sapiens
  siRNA target sequence for CDC14B (NM_003671.2,1691-1709).
cgaaccgtacagtgatgat

SEQ ID NO: 331969 - DNA, 19 bp, Homo sapiens
  siRNA target sequence for C22orf19 (NM_003678.2,142-160).
caccgagcaggaaggtaaa

SEQ ID NO: 331970 - DNA, 19 bp, Homo sapiens
  siRNA target sequence for C22orf19 (NM_003678.2,144-162).
ccgagcaggaaggtaaata

SEQ ID NO: 331971 - DNA, 19 bp, Homo sapiens
  siRNA target sequence for C22orf19 (NM_003678.2,146-164).
gagcaggaaggtaaatact

SEQ ID NO: 331972 - DNA, 19 bp, Homo sapiens
  siRNA target sequence for C22orf19 (NM_003678.2,204-222).
gagactatgagttatacaa

SEQ ID NO: 331973 - DNA, 19 bp, Homo sapiens
  siRNA target sequence for C22orf19 (NM_003678.2,206-224).
gactatgagttatacaagt

SEQ ID NO: 331974 - DNA, 19 bp, Homo sapiens
  siRNA target sequence for C22orf19 (NM_003678.2,370-388).
ccacatcaggttgaagaaa

SEQ ID NO: 331975 - DNA, 19 bp, Homo sapiens
  siRNA target sequence for C22orf19 (NM_003678.2,418-436).
gaaagtagatgcctatcat

SEQ ID NO: 331976 - DNA, 19 bp, Homo sapiens
  siRNA target sequence for C22orf19 (NM_003678.2,442-460).
gctccagaacctgttgtat

SEQ ID NO: 331977 - DNA, 19 bp, Homo sapiens
  siRNA target sequence for C22orf19 (NM_003678.2,495-513).
gtttggagtttaagtcaaa

SEQ ID NO: 331978 - DNA, 19 bp, Homo sapiens
  siRNA target sequence for C22orf19 (NM_003678.2,533-551).
gtcagtttagaggagtttt

SEQ ID NO: 331979 - DNA, 19 bp, Homo sapiens
  siRNA target sequence for C22orf19 (NM_003678.2,671-689).
cgagagtgcctatctaaca

SEQ ID NO: 331980 - DNA, 19 bp, Homo sapiens
  siRNA target sequence for C22orf19 (NM_003678.2,672-690).
gagagtgcctatctaacaa

SEQ ID NO: 331981 - DNA, 19 bp, Homo sapiens
  siRNA target sequence for C22orf19 (NM_003678.2,782-800).
gtgcaggagtacctgttta

SEQ ID NO: 331982 - DNA, 19 bp, Homo sapiens
  siRNA target sequence for C22orf19 (NM_003678.2,896-914).
gcctgtgataagacgttat

SEQ ID NO: 331983 - DNA, 19 bp, Homo sapiens
  siRNA target sequence for C22orf19 (NM_003678.2,898-916).
ctgtgataagacgttatct

SEQ ID NO: 331984 - DNA, 19 bp, Homo sapiens
  siRNA target sequence for C22orf19 (NM_003678.2,900-918).
gtgataagacgttatctgt

SEQ ID NO: 331985 - DNA, 19 bp, Homo sapiens
  siRNA target sequence for C22orf19 (NM_003678.2,910-928).
gttatctgtggcaatcgaa

SEQ ID NO: 331986 - DNA, 19 bp, Homo sapiens
  siRNA target sequence for C22orf19 (NM_003678.2,1295-1313).
ccgaatccagccaatcagt

SEQ ID NO: 331987 - DNA, 19 bp, Homo sapiens
  siRNA target sequence for C22orf19 (NM_003678.2,1296-1314).
cgaatccagccaatcagta

SEQ ID NO: 331988 - DNA, 19 bp, Homo sapiens
  siRNA target sequence for C22orf19 (NM_003678.2,1297-1315).
gaatccagccaatcagtat

SEQ ID NO: 331989 - DNA, 19 bp, Homo sapiens
  siRNA target sequence for C22orf19 (NM_003678.2,1305-1323).
ccaatcagtatcagtttga

SEQ ID NO: 331990 - DNA, 19 bp, Homo sapiens
  siRNA target sequence for C22orf19 (NM_003678.2,1339-1357).
gactttgagcgactatgta

SEQ ID NO: 331991 - DNA, 19 bp, Homo sapiens
  siRNA target sequence for C22orf19 (NM_003678.2,1341-1359).
ctttgagcgactatgtact

SEQ ID NO: 331992 - DNA, 19 bp, Homo sapiens
  siRNA target sequence for C22orf19 (NM_003678.2,1476-1494).
ccaccatgaaacttctgaa

SEQ ID NO: 331993 - DNA, 19 bp, Homo sapiens
  siRNA target sequence for C22orf19 (NM_003678.2,1520-1538).
ctccacaaacagtttgcat

SEQ ID NO: 331994 - DNA, 19 bp, Homo sapiens
  siRNA target sequence for C22orf19 (NM_003678.2,1689-1707).
ctggggacaccaatctcta

SEQ ID NO: 331995 - DNA, 19 bp, Homo sapiens
  siRNA target sequence for C22orf19 (NM_003678.2,1790-1808).
gttttccagctctgtttga

SEQ ID NO: 331996 - DNA, 19 bp, Homo sapiens
  siRNA target sequence for C4orf8 (NM_003704.1,425-443).
cgcaagcgcaccagttcat

SEQ ID NO: 331997 - DNA, 19 bp, Homo sapiens
  siRNA target sequence for C4orf8 (NM_003704.1,1154-1172).
ccagctctcccatcacaat

SEQ ID NO: 331998 - DNA, 19 bp, Homo sapiens
  siRNA target sequence for C4orf8 (NM_003704.1,1155-1173).
cagctctcccatcacaatt

SEQ ID NO: 331999 - DNA, 19 bp, Homo sapiens
  siRNA target sequence for C4orf8 (NM_003704.1,1157-1175).
gctctcccatcacaattca

SEQ ID NO: 332000 - DNA, 19 bp, Homo sapiens
  siRNA target sequence for C4orf8 (NM_003704.1,1205-1223).
gtggctcggcaccaacttt

SEQ ID NO: 332001 - DNA, 19 bp, Homo sapiens
  siRNA target sequence for C4orf8 (NM_003704.1,1207-1225).
ggctcggcaccaacttttt

SEQ ID NO: 332002 - DNA, 19 bp, Homo sapiens
  siRNA target sequence for C4orf8 (NM_003704.1,1212-1230).
ggcaccaactttttgtagt

SEQ ID NO: 332003 - DNA, 19 bp, Homo sapiens
  siRNA target sequence for C4orf8 (NM_003704.1,1247-1265).
caccattgtcagccaaatt

SEQ ID NO: 332004 - DNA, 19 bp, Homo sapiens
  siRNA target sequence for C4orf8 (NM_003704.1,1270-1288).
gatatttatccattgagta

SEQ ID NO: 332005 - DNA, 19 bp, Homo sapiens
  siRNA target sequence for C4orf8 (NM_003704.1,1372-1390).
gatgagtctcctcagataa

SEQ ID NO: 332006 - DNA, 19 bp, Homo sapiens
  siRNA target sequence for C4orf8 (NM_003704.1,1375-1393).
gagtctcctcagataagca

SEQ ID NO: 332007 - DNA, 19 bp, Homo sapiens
  siRNA target sequence for C4orf8 (NM_003704.1,1764-1782).
catccaccccaccttgtat

SEQ ID NO: 332008 - DNA, 19 bp, Homo sapiens
  siRNA target sequence for C4orf8 (NM_003704.1,1826-1844).
ctgttcagaatcacacaaa

SEQ ID NO: 332009 - DNA, 19 bp, Homo sapiens
  siRNA target sequence for C4orf8 (NM_003704.1,1849-1867).
catcaggtattcaatgcat

SEQ ID NO: 332010 - DNA, 19 bp, Homo sapiens
  siRNA target sequence for C4orf8 (NM_003704.1,1854-1872).
ggtattcaatgcatctctt

SEQ ID NO: 332011 - DNA, 19 bp, Homo sapiens
  siRNA target sequence for C4orf8 (NM_003704.1,1868-1886).
ctcttcaagaccatattta

SEQ ID NO: 332012 - DNA, 19 bp, Homo sapiens
  siRNA target sequence for C4orf8 (NM_003704.1,1909-1927).
ccagagtggaatagttcta

SEQ ID NO: 332013 - DNA, 19 bp, Homo sapiens
  siRNA target sequence for C4orf8 (NM_003704.1,1922-1940).
gttctaaatttataagtct

SEQ ID NO: 332014 - DNA, 19 bp, Homo sapiens
  siRNA target sequence for C4orf8 (NM_003704.1,1989-2007).
cttgccagatacaatttct

SEQ ID NO: 332015 - DNA, 19 bp, Homo sapiens
  siRNA target sequence for C4orf8 (NM_003704.1,2023-2041).
gggccaacactctcagaaa

SEQ ID NO: 332016 - DNA, 19 bp, Homo sapiens
  siRNA target sequence for C4orf8 (NM_003704.1,2062-2080).
cctccatctagcaatgaaa

SEQ ID NO: 332017 - DNA, 19 bp, Homo sapiens
  siRNA target sequence for C4orf8 (NM_003704.1,2083-2101).
cctgcagtctcggatagta

SEQ ID NO: 332018 - DNA, 19 bp, Homo sapiens
  siRNA target sequence for C4orf8 (NM_003704.1,2084-2102).
ctgcagtctcggatagtaa

SEQ ID NO: 332019 - DNA, 19 bp, Homo sapiens
  siRNA target sequence for C4orf8 (NM_003704.1,2089-2107).
gtctcggatagtaaagaga

SEQ ID NO: 332020 - DNA, 19 bp, Homo sapiens
  siRNA target sequence for C4orf8 (NM_003704.1,2091-2109).
ctcggatagtaaagagaaa

SEQ ID NO: 332021 - DNA, 19 bp, Homo sapiens
  siRNA target sequence for C4orf8 (NM_003704.1,2262-2280).
caagagacctccttcagta

SEQ ID NO: 332022 - DNA, 19 bp, Homo sapiens
  siRNA target sequence for C4orf8 (NM_003704.1,2276-2294).
cagtaggtgacgtgtttca

SEQ ID NO: 332023 - DNA, 19 bp, Homo sapiens
  siRNA target sequence for C4orf8 (NM_003704.1,2448-2466).
cccatcattccccaaaaca

SEQ ID NO: 332024 - DNA, 19 bp, Homo sapiens
  siRNA target sequence for C4orf8 (NM_003704.1,2488-2506).
gtggacacacgcaagagtt

SEQ ID NO: 332025 - DNA, 19 bp, Homo sapiens
  siRNA target sequence for C4orf8 (NM_003704.1,2493-2511).
cacacgcaagagtttctgt

SEQ ID NO: 332026 - DNA, 19 bp, Homo sapiens
  siRNA target sequence for C4orf8 (NM_003704.1,2698-2716).
cagaaggagggcaagtact

SEQ ID NO: 332027 - DNA, 19 bp, Homo sapiens
  siRNA target sequence for C4orf8 (NM_003704.1,2724-2742).
ctgctactgcgaattcttt

SEQ ID NO: 332028 - DNA, 19 bp, Homo sapiens
  siRNA target sequence for C4orf8 (NM_003704.1,2758-2776).
ccagctgcaccaacaagta

SEQ ID NO: 332029 - DNA, 19 bp, Homo sapiens
  siRNA target sequence for C4orf8 (NM_003704.1,2761-2779).
gctgcaccaacaagtagaa

SEQ ID NO: 332030 - DNA, 19 bp, Homo sapiens
  siRNA target sequence for C4orf8 (NM_003704.1,2762-2780).
ctgcaccaacaagtagaaa

SEQ ID NO: 332031 - DNA, 19 bp, Homo sapiens
  siRNA target sequence for C4orf8 (NM_003704.1,2896-2914).
gaggatttgttgcagttta

SEQ ID NO: 332032 - DNA, 19 bp, Homo sapiens
  siRNA target sequence for C4orf8 (NM_003704.1,2961-2979).
gcgagcaaggcataagcaa

SEQ ID NO: 332033 - DNA, 19 bp, Homo sapiens
  siRNA target sequence for C4orf8 (NM_003704.1,2962-2980).
cgagcaaggcataagcaaa

SEQ ID NO: 332034 - DNA, 19 bp, Homo sapiens
  siRNA target sequence for C4orf8 (NM_003704.1,3135-3153).
gaagctaagagctgtaaaa

SEQ ID NO: 332035 - DNA, 19 bp, Homo sapiens
  siRNA target sequence for C4orf8 (NM_003704.1,3264-3282).
ctcactagagcaaactgaa

SEQ ID NO: 332036 - DNA, 19 bp, Homo sapiens
  siRNA target sequence for C4orf8 (NM_003704.1,3305-3323).
ccccatccaggcatatgaa

SEQ ID NO: 332037 - DNA, 19 bp, Homo sapiens
  siRNA target sequence for C4orf8 (NM_003704.1,3429-3447).
gcatgagccactctctttt

SEQ ID NO: 332038 - DNA, 19 bp, Homo sapiens
  siRNA target sequence for C4orf8 (NM_003704.1,3430-3448).
catgagccactctcttttt

SEQ ID NO: 332039 - DNA, 19 bp, Homo sapiens
  siRNA target sequence for C4orf8 (NM_003704.1,3691-3709).
cacatcaaggacgaaaagt

SEQ ID NO: 332040 - DNA, 19 bp, Homo sapiens
  siRNA target sequence for C4orf8 (NM_003704.1,3833-3851).
gagtcaacaattcaattga

SEQ ID NO: 332041 - DNA, 19 bp, Homo sapiens
  siRNA target sequence for C4orf8 (NM_003704.1,3907-3925).
gagagggaagtggaatatt

SEQ ID NO: 332042 - DNA, 19 bp, Homo sapiens
  siRNA target sequence for C4orf8 (NM_003704.1,3953-3971).
gacagacccgacaaagact

SEQ ID NO: 332043 - DNA, 19 bp, Homo sapiens
  siRNA target sequence for C4orf8 (NM_003704.1,3959-3977).
cccgacaaagactgtctat

SEQ ID NO: 332044 - DNA, 19 bp, Homo sapiens
  siRNA target sequence for C4orf8 (NM_003704.1,3961-3979).
cgacaaagactgtctatca

SEQ ID NO: 332045 - DNA, 19 bp, Homo sapiens
  siRNA target sequence for C4orf8 (NM_003704.1,3962-3980).
gacaaagactgtctatcaa

SEQ ID NO: 332046 - DNA, 19 bp, Homo sapiens
  siRNA target sequence for C4orf8 (NM_003704.1,3984-4002).
gtccaattttagcttgaaa

SEQ ID NO: 332047 - DNA, 19 bp, Homo sapiens
  siRNA target sequence for PCDHGA12 (NM_003735.2,253-271).
cacccagatacgctattca

SEQ ID NO: 332048 - DNA, 19 bp, Homo sapiens
  siRNA target sequence for PCDHGA12 (NM_003735.2,255-273).
cccagatacgctattcagt

SEQ ID NO: 332049 - DNA, 19 bp, Homo sapiens
  siRNA target sequence for PCDHGA12 (NM_003735.2,463-481).
ggccatcaagtgtcaatta

SEQ ID NO: 332050 - DNA, 19 bp, Homo sapiens
  siRNA target sequence for PCDHGA12 (NM_003735.2,464-482).
gccatcaagtgtcaattaa

SEQ ID NO: 332051 - DNA, 19 bp, Homo sapiens
  siRNA target sequence for PCDHGA12 (NM_003735.2,550-568).
cgacaatgcgccttacttt

SEQ ID NO: 332052 - DNA, 19 bp, Homo sapiens
  siRNA target sequence for PCDHGA12 (NM_003735.2,561-579).
cttactttcgtgaaagtga

SEQ ID NO: 332053 - DNA, 19 bp, Homo sapiens
  siRNA target sequence for PCDHGA12 (NM_003735.2,569-587).
cgtgaaagtgaattagaaa

SEQ ID NO: 332054 - DNA, 19 bp, Homo sapiens
  siRNA target sequence for PCDHGA12 (NM_003735.2,647-665).
ccggatatcgggaagaact

SEQ ID NO: 332055 - DNA, 19 bp, Homo sapiens
  siRNA target sequence for PCDHGA12 (NM_003735.2,703-721).
ctccctcatcgtgcaaaat

SEQ ID NO: 332056 - DNA, 19 bp, Homo sapiens
  siRNA target sequence for PCDHGA12 (NM_003735.2,722-740).
ggagccgacggtagtaagt

SEQ ID NO: 332057 - DNA, 19 bp, Homo sapiens
  siRNA target sequence for PCDHGA12 (NM_003735.2,723-741).
gagccgacggtagtaagta

SEQ ID NO: 332058 - DNA, 19 bp, Homo sapiens
  siRNA target sequence for PCDHGA12 (NM_003735.2,735-753).
gtaagtaccccgaattggt

SEQ ID NO: 332059 - DNA, 19 bp, Homo sapiens
  siRNA target sequence for PCDHGA12 (NM_003735.2,915-933).
cgagcgttccggagaatct

SEQ ID NO: 332060 - DNA, 19 bp, Homo sapiens
  siRNA target sequence for PCDHGA12 (NM_003735.2,992-1010).
gcggaagtgaggtattcct

SEQ ID NO: 332061 - DNA, 19 bp, Homo sapiens
  siRNA target sequence for PCDHGA12 (NM_003735.2,993-1011).
cggaagtgaggtattcctt

SEQ ID NO: 332062 - DNA, 19 bp, Homo sapiens
  siRNA target sequence for PCDHGA12 (NM_003735.2,1126-1144).
gcaagcaatggataatgca

SEQ ID NO: 332063 - DNA, 19 bp, Homo sapiens
  siRNA target sequence for PCDHGA12 (NM_003735.2,1231-1249).
ctcggttcccgaaaactct

SEQ ID NO: 332064 - DNA, 19 bp, Homo sapiens
  siRNA target sequence for PCDHGA12 (NM_003735.2,1307-1325).
ggacaggtgatctgtttca

SEQ ID NO: 332065 - DNA, 19 bp, Homo sapiens
  siRNA target sequence for PCDHGA12 (NM_003735.2,1363-1381).
cggaaattactatagttta

SEQ ID NO: 332066 - DNA, 19 bp, Homo sapiens
  siRNA target sequence for PCDHGA12 (NM_003735.2,1412-1430).
gttcctagctacaacatca

SEQ ID NO: 332067 - DNA, 19 bp, Homo sapiens
  siRNA target sequence for PCDHGA12 (NM_003735.2,1461-1479).
ccctatccacggaaactca

SEQ ID NO: 332068 - DNA, 19 bp, Homo sapiens
  siRNA target sequence for PCDHGA12 (NM_003735.2,1463-1481).
ctatccacggaaactcata

SEQ ID NO: 332069 - DNA, 19 bp, Homo sapiens
  siRNA target sequence for PCDHGA12 (NM_003735.2,1744-1762).
ccgagacttgcaagtgaaa

SEQ ID NO: 332070 - DNA, 19 bp, Homo sapiens
  siRNA target sequence for PCDHGA12 (NM_003735.2,1746-1764).
gagacttgcaagtgaaagt

SEQ ID NO: 332071 - DNA, 19 bp, Homo sapiens
  siRNA target sequence for PCDHGA12 (NM_003735.2,2548-2566).
gtcaggtgattcggtattt

SEQ ID NO: 332072 - DNA, 19 bp, Homo sapiens
  siRNA target sequence for PCDHGB4 (NM_003736.2,447-465).
cacacgatttatattagga

SEQ ID NO: 332073 - DNA, 19 bp, Homo sapiens
  siRNA target sequence for PCDHGB4 (NM_003736.2,471-489).
ccatgatgcggatattggt

SEQ ID NO: 332074 - DNA, 19 bp, Homo sapiens
  siRNA target sequence for PCDHGB4 (NM_003736.2,472-490).
catgatgcggatattggta

SEQ ID NO: 332075 - DNA, 19 bp, Homo sapiens
  siRNA target sequence for PCDHGB4 (NM_003736.2,491-509).
gcaacacactgcagaatta

SEQ ID NO: 332076 - DNA, 19 bp, Homo sapiens
  siRNA target sequence for PCDHGB4 (NM_003736.2,526-544).
gatcatttctcactgataa

SEQ ID NO: 332077 - DNA, 19 bp, Homo sapiens
  siRNA target sequence for PCDHGB4 (NM_003736.2,574-592).
cctgagatggtattgaaga

SEQ ID NO: 332078 - DNA, 19 bp, Homo sapiens
  siRNA target sequence for PCDHGB4 (NM_003736.2,677-695).
cacagatacacgttctagt

SEQ ID NO: 332079 - DNA, 19 bp, Homo sapiens
  siRNA target sequence for PCDHGB4 (NM_003736.2,741-759).
cagggtgagcctttcagaa

SEQ ID NO: 332080 - DNA, 19 bp, Homo sapiens
  siRNA target sequence for PCDHGB4 (NM_003736.2,817-835).
gtcaatgccgagattactt

SEQ ID NO: 332081 - DNA, 19 bp, Homo sapiens
  siRNA target sequence for PCDHGB4 (NM_003736.2,823-841).
gccgagattactttctctt

SEQ ID NO: 332082 - DNA, 19 bp, Homo sapiens
  siRNA target sequence for PCDHGB4 (NM_003736.2,824-842).
ccgagattactttctcttt

SEQ ID NO: 332083 - DNA, 19 bp, Homo sapiens
  siRNA target sequence for PCDHGB4 (NM_003736.2,854-872).
gccagatcacccaatttga

SEQ ID NO: 332084 - DNA, 19 bp, Homo sapiens
  siRNA target sequence for PCDHGB4 (NM_003736.2,879-897).
ctctaacaccggggaaatt

SEQ ID NO: 332085 - DNA, 19 bp, Homo sapiens
  siRNA target sequence for PCDHGB4 (NM_003736.2,885-903).
caccggggaaattactgtt

SEQ ID NO: 332086 - DNA, 19 bp, Homo sapiens
  siRNA target sequence for PCDHGB4 (NM_003736.2,888-906).
cggggaaattactgtttta

SEQ ID NO: 332087 - DNA, 19 bp, Homo sapiens
  siRNA target sequence for PCDHGB4 (NM_003736.2,960-978).
ggacggtggaggaatgatt

SEQ ID NO: 332088 - DNA, 19 bp, Homo sapiens
  siRNA target sequence for PCDHGB4 (NM_003736.2,986-1004).
gcacagtggaggtagaagt

SEQ ID NO: 332089 - DNA, 19 bp, Homo sapiens
  siRNA target sequence for PCDHGB4 (NM_003736.2,993-1011).
ggaggtagaagtcatagat

SEQ ID NO: 332090 - DNA, 19 bp, Homo sapiens
  siRNA target sequence for PCDHGB4 (NM_003736.2,996-1014).
ggtagaagtcatagatgaa

SEQ ID NO: 332091 - DNA, 19 bp, Homo sapiens
  siRNA target sequence for PCDHGB4 (NM_003736.2,1020-1038).
caacgccccagaagtgata

SEQ ID NO: 332092 - DNA, 19 bp, Homo sapiens
  siRNA target sequence for PCDHGB4 (NM_003736.2,1042-1060).
cagtctctacccaacctaa

SEQ ID NO: 332093 - DNA, 19 bp, Homo sapiens
  siRNA target sequence for PCDHGB4 (NM_003736.2,1044-1062).
gtctctacccaacctaatt

SEQ ID NO: 332094 - DNA, 19 bp, Homo sapiens
  siRNA target sequence for PCDHGB4 (NM_003736.2,1046-1064).
ctctacccaacctaattat

SEQ ID NO: 332095 - DNA, 19 bp, Homo sapiens
  siRNA target sequence for PCDHGB4 (NM_003736.2,1071-1089).
cgccgagctgggaacacat

SEQ ID NO: 332096 - DNA, 19 bp, Homo sapiens
  siRNA target sequence for PCDHGB4 (NM_003736.2,1072-1090).
gccgagctgggaacacata

SEQ ID NO: 332097 - DNA, 19 bp, Homo sapiens
  siRNA target sequence for PCDHGB4 (NM_003736.2,1073-1091).
ccgagctgggaacacatat

SEQ ID NO: 332098 - DNA, 19 bp, Homo sapiens
  siRNA target sequence for PCDHGB4 (NM_003736.2,1074-1092).
cgagctgggaacacatatt

SEQ ID NO: 332099 - DNA, 19 bp, Homo sapiens
  siRNA target sequence for PCDHGB4 (NM_003736.2,1311-1329).
cctgcacattggtgatgta

SEQ ID NO: 332100 - DNA, 19 bp, Homo sapiens
  siRNA target sequence for PCDHGB4 (NM_003736.2,1335-1353).
caacgctccggttttctca

SEQ ID NO: 332101 - DNA, 19 bp, Homo sapiens
  siRNA target sequence for PCDHGB4 (NM_003736.2,1350-1368).
ctcacagtcttcctatata

SEQ ID NO: 332102 - DNA, 19 bp, Homo sapiens
  siRNA target sequence for PCDHGB4 (NM_003736.2,1392-1410).
gcctggagcctctatttca

SEQ ID NO: 332103 - DNA, 19 bp, Homo sapiens
  siRNA target sequence for PCDHGB4 (NM_003736.2,1394-1412).
ctggagcctctatttcaca

SEQ ID NO: 332104 - DNA, 19 bp, Homo sapiens
  siRNA target sequence for PCDHGB4 (NM_003736.2,1442-1460).
ccaacggccaagtctctta

SEQ ID NO: 332105 - DNA, 19 bp, Homo sapiens
  siRNA target sequence for GALNT4 (NM_003774.3,246-264).
ctgctgctggcgtttttaa

SEQ ID NO: 332106 - DNA, 19 bp, Homo sapiens
  siRNA target sequence for GALNT4 (NM_003774.3,248-266).
gctgctggcgtttttaaca

SEQ ID NO: 332107 - DNA, 19 bp, Homo sapiens
  siRNA target sequence for GALNT4 (NM_003774.3,388-406).
ctcgaccgctttataagaa

SEQ ID NO: 332108 - DNA, 19 bp, Homo sapiens
  siRNA target sequence for GALNT4 (NM_003774.3,501-519).
gagagatacgccatcaata

SEQ ID NO: 332109 - DNA, 19 bp, Homo sapiens
  siRNA target sequence for GALNT4 (NM_003774.3,505-523).
gatacgccatcaatattta

SEQ ID NO: 332110 - DNA, 19 bp, Homo sapiens
  siRNA target sequence for GALNT4 (NM_003774.3,541-559).
ccctgcatcgacacataga

SEQ ID NO: 332111 - DNA, 19 bp, Homo sapiens
  siRNA target sequence for GALNT4 (NM_003774.3,549-567).
cgacacatagaggataaaa

SEQ ID NO: 332112 - DNA, 19 bp, Homo sapiens
  siRNA target sequence for GALNT4 (NM_003774.3,609-627).
cttcctaccacctctgtta

SEQ ID NO: 332113 - DNA, 19 bp, Homo sapiens
  siRNA target sequence for GALNT4 (NM_003774.3,612-630).
cctaccacctctgttatca

SEQ ID NO: 332114 - DNA, 19 bp, Homo sapiens
  siRNA target sequence for GALNT4 (NM_003774.3,613-631).
ctaccacctctgttatcat

SEQ ID NO: 332115 - DNA, 19 bp, Homo sapiens
  siRNA target sequence for GALNT4 (NM_003774.3,622-640).
ctgttatcattgctttcta

SEQ ID NO: 332116 - DNA, 19 bp, Homo sapiens
  siRNA target sequence for GALNT4 (NM_003774.3,656-674).
gactttgctccgtaccatt

SEQ ID NO: 332117 - DNA, 19 bp, Homo sapiens
  siRNA target sequence for GALNT4 (NM_003774.3,760-778).
cacaacttgaaacttacat

SEQ ID NO: 332118 - DNA, 19 bp, Homo sapiens
  siRNA target sequence for GALNT4 (NM_003774.3,772-790).
cttacatcagcaatcttga

SEQ ID NO: 332119 - DNA, 19 bp, Homo sapiens
  siRNA target sequence for GALNT4 (NM_003774.3,789-807).
gatagagtacgcttgatta

SEQ ID NO: 332120 - DNA, 19 bp, Homo sapiens
  siRNA target sequence for GALNT4 (NM_003774.3,798-816).
cgcttgattaggaccaata

SEQ ID NO: 332121 - DNA, 19 bp, Homo sapiens
  siRNA target sequence for GALNT4 (NM_003774.3,799-817).
gcttgattaggaccaataa

SEQ ID NO: 332122 - DNA, 19 bp, Homo sapiens
  siRNA target sequence for GALNT4 (NM_003774.3,865-883).
ctggggacgtcctcacttt

SEQ ID NO: 332123 - DNA, 19 bp, Homo sapiens
  siRNA target sequence for GALNT4 (NM_003774.3,916-934).
ggctggaaccgcttttgga

SEQ ID NO: 332124 - DNA, 19 bp, Homo sapiens
  siRNA target sequence for GALNT4 (NM_003774.3,963-981).
gtgtgtcctgttatagaca

SEQ ID NO: 332125 - DNA, 19 bp, Homo sapiens
  siRNA target sequence for GALNT4 (NM_003774.3,967-985).
gtcctgttatagacacaat

SEQ ID NO: 332126 - DNA, 19 bp, Homo sapiens
  siRNA target sequence for GALNT4 (NM_003774.3,970-988).
ctgttatagacacaattga

SEQ ID NO: 332127 - DNA, 19 bp, Homo sapiens
  siRNA target sequence for GALNT4 (NM_003774.3,972-990).
gttatagacacaattgatt

SEQ ID NO: 332128 - DNA, 19 bp, Homo sapiens
  siRNA target sequence for GALNT4 (NM_003774.3,1038-1056).
gggtttgactggcgtttaa

SEQ ID NO: 332129 - DNA, 19 bp, Homo sapiens
  siRNA target sequence for GALNT4 (NM_003774.3,1040-1058).
gtttgactggcgtttaaca

SEQ ID NO: 332130 - DNA, 19 bp, Homo sapiens
  siRNA target sequence for GALNT4 (NM_003774.3,1057-1075).
catttcagtggcattctgt

SEQ ID NO: 332131 - DNA, 19 bp, Homo sapiens
  siRNA target sequence for GALNT4 (NM_003774.3,1091-1109).
ggacaggcggatatcaaga

SEQ ID NO: 332132 - DNA, 19 bp, Homo sapiens
  siRNA target sequence for GALNT4 (NM_003774.3,1094-1112).
caggcggatatcaagaatt

SEQ ID NO: 332133 - DNA, 19 bp, Homo sapiens
  siRNA target sequence for GALNT4 (NM_003774.3,1096-1114).
ggcggatatcaagaattga

SEQ ID NO: 332134 - DNA, 19 bp, Homo sapiens
  siRNA target sequence for GALNT4 (NM_003774.3,1282-1300).
cccacgtgggccatgtgtt

SEQ ID NO: 332135 - DNA, 19 bp, Homo sapiens
  siRNA target sequence for GALNT4 (NM_003774.3,1301-1319).
ccccaagcgggcaccatat

SEQ ID NO: 332136 - DNA, 19 bp, Homo sapiens
  siRNA target sequence for GALNT4 (NM_003774.3,1304-1322).
caagcgggcaccatatgct

SEQ ID NO: 332137 - DNA, 19 bp, Homo sapiens
  siRNA target sequence for GALNT4 (NM_003774.3,1315-1333).
catatgctcgccccaattt

SEQ ID NO: 332138 - DNA, 19 bp, Homo sapiens
  siRNA target sequence for GALNT4 (NM_003774.3,1328-1346).
caatttcctacagaatact

SEQ ID NO: 332139 - DNA, 19 bp, Homo sapiens
  siRNA target sequence for GALNT4 (NM_003774.3,1379-1397).
caaagagcacttctacaat

SEQ ID NO: 332140 - DNA, 19 bp, Homo sapiens
  siRNA target sequence for GALNT4 (NM_003774.3,1452-1470).
ctacgagagcggttgagat

SEQ ID NO: 332141 - DNA, 19 bp, Homo sapiens
  siRNA target sequence for GALNT4 (NM_003774.3,1484-1502).
ctggtatttgaaaaacgtt

SEQ ID NO: 332142 - DNA, 19 bp, Homo sapiens
  siRNA target sequence for GALNT4 (NM_003774.3,1563-1581).
gggatctcgtctgaatgtt

SEQ ID NO: 332143 - DNA, 19 bp, Homo sapiens
  siRNA target sequence for GALNT4 (NM_003774.3,1564-1582).
ggatctcgtctgaatgttt

SEQ ID NO: 332144 - DNA, 19 bp, Homo sapiens
  siRNA target sequence for GALNT4 (NM_003774.3,1565-1583).
gatctcgtctgaatgttta

SEQ ID NO: 332145 - DNA, 19 bp, Homo sapiens
  siRNA target sequence for GALNT4 (NM_003774.3,1568-1586).
ctcgtctgaatgtttagat

SEQ ID NO: 332146 - DNA, 19 bp, Homo sapiens
  siRNA target sequence for GALNT4 (NM_003774.3,1570-1588).
cgtctgaatgtttagatta

SEQ ID NO: 332147 - DNA, 19 bp, Homo sapiens
  siRNA target sequence for GALNT4 (NM_003774.3,1607-1625).
ccccacaggtgctaacctt

SEQ ID NO: 332148 - DNA, 19 bp, Homo sapiens
  siRNA target sequence for GALNT4 (NM_003774.3,1608-1626).
cccacaggtgctaaccttt

SEQ ID NO: 332149 - DNA, 19 bp, Homo sapiens
  siRNA target sequence for GALNT4 (NM_003774.3,1612-1630).
caggtgctaacctttcact

SEQ ID NO: 332150 - DNA, 19 bp, Homo sapiens
  siRNA target sequence for GALNT4 (NM_003774.3,1644-1662).
ggtcaaggaggcaatcaat

SEQ ID NO: 332151 - DNA, 19 bp, Homo sapiens
  siRNA target sequence for GALNT4 (NM_003774.3,1645-1663).
gtcaaggaggcaatcaatt

SEQ ID NO: 332152 - DNA, 19 bp, Homo sapiens
  siRNA target sequence for GALNT4 (NM_003774.3,1651-1669).
gaggcaatcaattctttga

SEQ ID NO: 332153 - DNA, 19 bp, Homo sapiens
  siRNA target sequence for GALNT4 (NM_003774.3,1653-1671).
ggcaatcaattctttgaat

SEQ ID NO: 332154 - DNA, 19 bp, Homo sapiens
  siRNA target sequence for GALNT4 (NM_003774.3,1838-1856).
ctcaggactgtgtcttagt

SEQ ID NO: 332155 - DNA, 19 bp, Homo sapiens
  siRNA target sequence for GALNT4 (NM_003774.3,1874-1892).
gggccgacctgatgtacaa

SEQ ID NO: 332156 - DNA, 19 bp, Homo sapiens
  siRNA target sequence for GALNT4 (NM_003774.3,1875-1893).
ggccgacctgatgtacaaa

SEQ ID NO: 332157 - DNA, 19 bp, Homo sapiens
  siRNA target sequence for GALNT4 (NM_003774.3,1876-1894).
gccgacctgatgtacaaat

SEQ ID NO: 332158 - DNA, 19 bp, Homo sapiens
  siRNA target sequence for GALNT4 (NM_003774.3,1878-1896).
cgacctgatgtacaaatga

SEQ ID NO: 332159 - DNA, 19 bp, Homo sapiens
  siRNA target sequence for TNFSF12 (NM_003809.2,294-312).
ggacccgtcggaactgaat

SEQ ID NO: 332160 - DNA, 19 bp, Homo sapiens
  siRNA target sequence for TNFSF12 (NM_003809.2,413-431).
cgatcgcagcccattatga

SEQ ID NO: 332161 - DNA, 19 bp, Homo sapiens
  siRNA target sequence for TNFSF12 (NM_003809.2,414-432).
gatcgcagcccattatgaa

SEQ ID NO: 332162 - DNA, 19 bp, Homo sapiens
  siRNA target sequence for TNFSF12 (NM_003809.2,538-556).
cgccagatcggggagttta

SEQ ID NO: 332163 - DNA, 19 bp, Homo sapiens
  siRNA target sequence for TNFSF12 (NM_003809.2,539-557).
gccagatcggggagtttat

SEQ ID NO: 332164 - DNA, 19 bp, Homo sapiens
  siRNA target sequence for TNFSF12 (NM_003809.2,540-558).
ccagatcggggagtttata

SEQ ID NO: 332165 - DNA, 19 bp, Homo sapiens
  siRNA target sequence for TNFSF12 (NM_003809.2,590-608).
gtcaggtgcactttgatga

SEQ ID NO: 332166 - DNA, 19 bp, Homo sapiens
  siRNA target sequence for TNFSF12 (NM_003809.2,664-682).
cgctgcctggaggaattct

SEQ ID NO: 332167 - DNA, 19 bp, Homo sapiens
  siRNA target sequence for FGF16 (NM_003868.1,335-353).
gcctgtacctaggaatgaa

SEQ ID NO: 332168 - DNA, 19 bp, Homo sapiens
  siRNA target sequence for FGF16 (NM_003868.1,381-399).
gaaactcacacgtgaatgt

SEQ ID NO: 332169 - DNA, 19 bp, Homo sapiens
  siRNA target sequence for FGF16 (NM_003868.1,385-403).
ctcacacgtgaatgtgttt

SEQ ID NO: 332170 - DNA, 19 bp, Homo sapiens
  siRNA target sequence for FGF16 (NM_003868.1,398-416).
gtgttttccgggaacagtt

SEQ ID NO: 332171 - DNA, 19 bp, Homo sapiens
  siRNA target sequence for FGF16 (NM_003868.1,443-461).
cctcaaccttgtacaaaca

SEQ ID NO: 332172 - DNA, 19 bp, Homo sapiens
  siRNA target sequence for FGF16 (NM_003868.1,466-484).
gactcagagagacagtatt

SEQ ID NO: 332173 - DNA, 19 bp, Homo sapiens
  siRNA target sequence for FGF16 (NM_003868.1,470-488).
cagagagacagtattacgt

SEQ ID NO: 332174 - DNA, 19 bp, Homo sapiens
  siRNA target sequence for FGF16 (NM_003868.1,516-534).
ggagggatacaggactaaa

SEQ ID NO: 332175 - DNA, 19 bp, Homo sapiens
  siRNA target sequence for FGF16 (NM_003868.1,519-537).
gggatacaggactaaacga

SEQ ID NO: 332176 - DNA, 19 bp, Homo sapiens
  siRNA target sequence for FGF16 (NM_003868.1,566-584).
ggcctgtagatccttctaa

SEQ ID NO: 332177 - DNA, 19 bp, Homo sapiens
  siRNA target sequence for FGF16 (NM_003868.1,568-586).
cctgtagatccttctaagt

SEQ ID NO: 332178 - DNA, 19 bp, Homo sapiens
  siRNA target sequence for FGF16 (NM_003868.1,569-587).
ctgtagatccttctaagtt

SEQ ID NO: 332179 - DNA, 19 bp, Homo sapiens
  siRNA target sequence for FGF16 (NM_003868.1,599-617).
ccagagacctctttcacta

SEQ ID NO: 332180 - DNA, 19 bp, Homo sapiens
  siRNA target sequence for FGF16 (NM_003868.1,600-618).
cagagacctctttcactat

SEQ ID NO: 332181 - DNA, 19 bp, Homo sapiens
  siRNA target sequence for NRP1 (NM_003873.2,246-264).
gcgcttttcgcaacgataa

SEQ ID NO: 332182 - DNA, 19 bp, Homo sapiens
  siRNA target sequence for NRP1 (NM_003873.2,247-265).
cgcttttcgcaacgataaa

SEQ ID NO: 332183 - DNA, 19 bp, Homo sapiens
  siRNA target sequence for NRP1 (NM_003873.2,248-266).
gcttttcgcaacgataaat

SEQ ID NO: 332184 - DNA, 19 bp, Homo sapiens
  siRNA target sequence for NRP1 (NM_003873.2,260-278).
gataaatgtggcgatacta

SEQ ID NO: 332185 - DNA, 19 bp, Homo sapiens
  siRNA target sequence for NRP1 (NM_003873.2,267-285).
gtggcgatactataaaaat

SEQ ID NO: 332186 - DNA, 19 bp, Homo sapiens
  siRNA target sequence for NRP1 (NM_003873.2,270-288).
gcgatactataaaaattga

SEQ ID NO: 332187 - DNA, 19 bp, Homo sapiens
  siRNA target sequence for NRP1 (NM_003873.2,315-333).
gttatcctcattcttatca

SEQ ID NO: 332188 - DNA, 19 bp, Homo sapiens
  siRNA target sequence for NRP1 (NM_003873.2,369-387).
cggacccataccagagaat

SEQ ID NO: 332189 - DNA, 19 bp, Homo sapiens
  siRNA target sequence for NRP1 (NM_003873.2,374-392).
ccataccagagaattatga

SEQ ID NO: 332190 - DNA, 19 bp, Homo sapiens
  siRNA target sequence for NRP1 (NM_003873.2,375-393).
cataccagagaattatgat

SEQ ID NO: 332191 - DNA, 19 bp, Homo sapiens
  siRNA target sequence for NRP1 (NM_003873.2,380-398).
cagagaattatgatcaact

SEQ ID NO: 332192 - DNA, 19 bp, Homo sapiens
  siRNA target sequence for NRP1 (NM_003873.2,559-577).
ctctgactacgaaacacat

SEQ ID NO: 332193 - DNA, 19 bp, Homo sapiens
  siRNA target sequence for NRP1 (NM_003873.2,591-609).
ccatacgttatgaaatttt

SEQ ID NO: 332194 - DNA, 19 bp, Homo sapiens
  siRNA target sequence for NRP1 (NM_003873.2,610-628).
caagagaggtcctgaatgt

SEQ ID NO: 332195 - DNA, 19 bp, Homo sapiens
  siRNA target sequence for NRP1 (NM_003873.2,696-714).
gccttgaatgcacttatat

SEQ ID NO: 332196 - DNA, 19 bp, Homo sapiens
  siRNA target sequence for NRP1 (NM_003873.2,697-715).
ccttgaatgcacttatatt

SEQ ID NO: 332197 - DNA, 19 bp, Homo sapiens
  siRNA target sequence for NRP1 (NM_003873.2,701-719).
gaatgcacttatattgtct

SEQ ID NO: 332198 - DNA, 19 bp, Homo sapiens
  siRNA target sequence for NRP1 (NM_003873.2,735-753).
cagagattatcctggaatt

SEQ ID NO: 332199 - DNA, 19 bp, Homo sapiens
  siRNA target sequence for NRP1 (NM_003873.2,806-824).
cgctacgaccggctagaaa

SEQ ID NO: 332200 - DNA, 19 bp, Homo sapiens
  siRNA target sequence for NRP1 (NM_003873.2,807-825).
gctacgaccggctagaaat

SEQ ID NO: 332201 - DNA, 19 bp, Homo sapiens
  siRNA target sequence for NRP1 (NM_003873.2,862-880).
gcgttactgtggacagaaa

SEQ ID NO: 332202 - DNA, 19 bp, Homo sapiens
  siRNA target sequence for NRP1 (NM_003873.2,933-951).
ccgacagcgcgatagcaaa

SEQ ID NO: 332203 - DNA, 19 bp, Homo sapiens
  siRNA target sequence for NRP1 (NM_003873.2,934-952).
cgacagcgcgatagcaaaa

SEQ ID NO: 332204 - DNA, 19 bp, Homo sapiens
  siRNA target sequence for NRP1 (NM_003873.2,1031-1049).
gaatcaggagaaattcatt

SEQ ID NO: 332205 - DNA, 19 bp, Homo sapiens
  siRNA target sequence for NRP1 (NM_003873.2,1064-1082).
gcttcttcccagtatagca

SEQ ID NO: 332206 - DNA, 19 bp, Homo sapiens
  siRNA target sequence for NRP1 (NM_003873.2,1178-1196).
ggccttctgcgctttgtca

SEQ ID NO: 332207 - DNA, 19 bp, Homo sapiens
  siRNA target sequence for NRP1 (NM_003873.2,1389-1407).
ctcgatttgtccgaatcaa

SEQ ID NO: 332208 - DNA, 19 bp, Homo sapiens
  siRNA target sequence for NRP1 (NM_003873.2,1421-1439).
gaaactggcatatctatga

SEQ ID NO: 332209 - DNA, 19 bp, Homo sapiens
  siRNA target sequence for NRP1 (NM_003873.2,1428-1446).
gcatatctatgagatttga

SEQ ID NO: 332210 - DNA, 19 bp, Homo sapiens
  siRNA target sequence for NRP1 (NM_003873.2,1448-1466).
gtatacggttgcaagataa

SEQ ID NO: 332211 - DNA, 19 bp, Homo sapiens
  siRNA target sequence for NRP1 (NM_003873.2,1459-1477).
caagataacagattatcct

SEQ ID NO: 332212 - DNA, 19 bp, Homo sapiens
  siRNA target sequence for NRP1 (NM_003873.2,1608-1626).
cacccgcacctcattccta

SEQ ID NO: 332213 - DNA, 19 bp, Homo sapiens
  siRNA target sequence for NRP1 (NM_003873.2,1613-1631).
gcacctcattcctacatca

SEQ ID NO: 332214 - DNA, 19 bp, Homo sapiens
  siRNA target sequence for NRP1 (NM_003873.2,1617-1635).
ctcattcctacatcaatga

SEQ ID NO: 332215 - DNA, 19 bp, Homo sapiens
  siRNA target sequence for NRP1 (NM_003873.2,1619-1637).
cattcctacatcaatgagt

SEQ ID NO: 332216 - DNA, 19 bp, Homo sapiens
  siRNA target sequence for NRP1 (NM_003873.2,1630-1648).
caatgagtggctccaaata

SEQ ID NO: 332217 - DNA, 19 bp, Homo sapiens
  siRNA target sequence for NRP1 (NM_003873.2,1669-1687).
cgtgaggggcatcatcatt

SEQ ID NO: 332218 - DNA, 19 bp, Homo sapiens
  siRNA target sequence for NRP1 (NM_003873.2,1754-1772).
ggctcggactggaagatga

SEQ ID NO: 332219 - DNA, 19 bp, Homo sapiens
  siRNA target sequence for NRP1 (NM_003873.2,1755-1773).
gctcggactggaagatgat

SEQ ID NO: 332220 - DNA, 19 bp, Homo sapiens
  siRNA target sequence for NRP1 (NM_003873.2,1811-1829).
ggcaacaacaactatgata

SEQ ID NO: 332221 - DNA, 19 bp, Homo sapiens
  siRNA target sequence for NRP1 (NM_003873.2,1813-1831).
caacaacaactatgataca

SEQ ID NO: 332222 - DNA, 19 bp, Homo sapiens
  siRNA target sequence for NRP1 (NM_003873.2,1854-1872).
ctctctccacgcgattcat

SEQ ID NO: 332223 - DNA, 19 bp, Homo sapiens
  siRNA target sequence for NRP1 (NM_003873.2,2098-2116).
caccatacaatcagagttt

SEQ ID NO: 332224 - DNA, 19 bp, Homo sapiens
  siRNA target sequence for NRP1 (NM_003873.2,2250-2268).
gagatggcaacttcatcta

SEQ ID NO: 332225 - DNA, 19 bp, Homo sapiens
  siRNA target sequence for NRP1 (NM_003873.2,2252-2270).
gatggcaacttcatctatt

SEQ ID NO: 332226 - DNA, 19 bp, Homo sapiens
  siRNA target sequence for NRP1 (NM_003873.2,2271-2289).
cccaagctgacgaaaatca

SEQ ID NO: 332227 - DNA, 19 bp, Homo sapiens
  siRNA target sequence for NRP1 (NM_003873.2,2273-2291).
caagctgacgaaaatcaga

SEQ ID NO: 332228 - DNA, 19 bp, Homo sapiens
  siRNA target sequence for NRP1 (NM_003873.2,2312-2330).
gtgagccctgtggtttatt

SEQ ID NO: 332229 - DNA, 19 bp, Homo sapiens
  siRNA target sequence for NRP1 (NM_003873.2,2494-2512).
gctccacaagtctctgaaa

SEQ ID NO: 332230 - DNA, 19 bp, Homo sapiens
  siRNA target sequence for NRP1 (NM_003873.2,2533-2551).
gggcgaaatcggaaaagga

SEQ ID NO: 332231 - DNA, 19 bp, Homo sapiens
  siRNA target sequence for NRP1 (NM_003873.2,2562-2580).
ggattgctgtggatgacat

SEQ ID NO: 332232 - DNA, 19 bp, Homo sapiens
  siRNA target sequence for NRP1 (NM_003873.2,2568-2586).
ctgtggatgacattagtat

SEQ ID NO: 332233 - DNA, 19 bp, Homo sapiens
  siRNA target sequence for NRP1 (NM_003873.2,2570-2588).
gtggatgacattagtatta

SEQ ID NO: 332234 - DNA, 19 bp, Homo sapiens
  siRNA target sequence for NRP1 (NM_003873.2,2671-2689).
gagcacgccaggatacgaa

SEQ ID NO: 332235 - DNA, 19 bp, Homo sapiens
  siRNA target sequence for NRP1 (NM_003873.2,2846-2864).
gggatgtcagaaagaaact

SEQ ID NO: 332236 - DNA, 19 bp, Homo sapiens
  siRNA target sequence for NRP1 (NM_003873.2,2927-2945).
ctgaatacacagagtactt

SEQ ID NO: 332237 - DNA, 19 bp, Homo sapiens
  siRNA target sequence for NRP1 (NM_003873.2,2929-2947).
gaatacacagagtacttat

SEQ ID NO: 332238 - DNA, 19 bp, Homo sapiens
  siRNA target sequence for FCGBP (NM_003890.1,324-342).
catgcggtggtgatccatt

SEQ ID NO: 332239 - DNA, 19 bp, Homo sapiens
  siRNA target sequence for FCGBP (NM_003890.1,328-346).
cggtggtgatccattctga

SEQ ID NO: 332240 - DNA, 19 bp, Homo sapiens
  siRNA target sequence for FCGBP (NM_003890.1,332-350).
ggtgatccattctgactat

SEQ ID NO: 332241 - DNA, 19 bp, Homo sapiens
  siRNA target sequence for FCGBP (NM_003890.1,420-438).
gccctaggcaccgagtatt

SEQ ID NO: 332242 - DNA, 19 bp, Homo sapiens
  siRNA target sequence for FCGBP (NM_003890.1,421-439).
ccctaggcaccgagtattt

SEQ ID NO: 332243 - DNA, 19 bp, Homo sapiens
  siRNA target sequence for FCGBP (NM_003890.1,422-440).
cctaggcaccgagtatttt

SEQ ID NO: 332244 - DNA, 19 bp, Homo sapiens
  siRNA target sequence for FCGBP (NM_003890.1,589-607).
ctctacagccctacaatgt

SEQ ID NO: 332245 - DNA, 19 bp, Homo sapiens
  siRNA target sequence for FCGBP (NM_003890.1,749-767).
ctggggcacccactatgta

SEQ ID NO: 332246 - DNA, 19 bp, Homo sapiens
  siRNA target sequence for FCGBP (NM_003890.1,751-769).
ggggcacccactatgtagt

SEQ ID NO: 332247 - DNA, 19 bp, Homo sapiens
  siRNA target sequence for FCGBP (NM_003890.1,782-800).
ctcccaatctcgctatgat

SEQ ID NO: 332248 - DNA, 19 bp, Homo sapiens
  siRNA target sequence for FCGBP (NM_003890.1,784-802).
cccaatctcgctatgattt

SEQ ID NO: 332249 - DNA, 19 bp, Homo sapiens
  siRNA target sequence for FCGBP (NM_003890.1,943-961).
gcatccaggtcctgttgtt

SEQ ID NO: 332250 - DNA, 19 bp, Homo sapiens
  siRNA target sequence for FCGBP (NM_003890.1,963-981).
ggcacaggtgccataagga

SEQ ID NO: 332251 - DNA, 19 bp, Homo sapiens
  siRNA target sequence for FCGBP (NM_003890.1,1462-1480).
gccgtcgctacgacatgat

SEQ ID NO: 332252 - DNA, 19 bp, Homo sapiens
  siRNA target sequence for FCGBP (NM_003890.1,1651-1669).
gcttcgtcctggttgacaa

SEQ ID NO: 332253 - DNA, 19 bp, Homo sapiens
  siRNA target sequence for FCGBP (NM_003890.1,1761-1779).
ctggtggtcacttatgact

SEQ ID NO: 332254 - DNA, 19 bp, Homo sapiens
  siRNA target sequence for FCGBP (NM_003890.1,1959-1977).
gatggctgccagaacaact

SEQ ID NO: 332255 - DNA, 19 bp, Homo sapiens
  siRNA target sequence for FCGBP (NM_003890.1,2606-2624).
gtccggggacccacactat

SEQ ID NO: 332256 - DNA, 19 bp, Homo sapiens
  siRNA target sequence for FCGBP (NM_003890.1,2608-2626).
ccggggacccacactatgt

SEQ ID NO: 332257 - DNA, 19 bp, Homo sapiens
  siRNA target sequence for FCGBP (NM_003890.1,2935-2953).
gcctgactgtcacttatga

SEQ ID NO: 332258 - DNA, 19 bp, Homo sapiens
  siRNA target sequence for FCGBP (NM_003890.1,2937-2955).
ctgactgtcacttatgact

SEQ ID NO: 332259 - DNA, 19 bp, Homo sapiens
  siRNA target sequence for FCGBP (NM_003890.1,3094-3112).
ggaacagctggcaagaaga

SEQ ID NO: 332260 - DNA, 19 bp, Homo sapiens
  siRNA target sequence for FCGBP (NM_003890.1,3269-3287).
cgtgcgcgactgtgtctat

SEQ ID NO: 332261 - DNA, 19 bp, Homo sapiens
  siRNA target sequence for FCGBP (NM_003890.1,14413-14431).
cactgggcgaggtcttcta

SEQ ID NO: 332262 - DNA, 19 bp, Homo sapiens
  siRNA target sequence for FCGBP (NM_003890.1,14845-14863).
ccgccgagggccgaaacat

SEQ ID NO: 332263 - DNA, 19 bp, Homo sapiens
  siRNA target sequence for FCGBP (NM_003890.1,15251-15269).
cgcgcaaaagggtgacaaa

SEQ ID NO: 332264 - DNA, 19 bp, Homo sapiens
  siRNA target sequence for FCGBP (NM_003890.1,15446-15464).
ctgcaccacccgctgtttt

SEQ ID NO: 332265 - DNA, 19 bp, Homo sapiens
  siRNA target sequence for FCGBP (NM_003890.1,15538-15556).
cccataatggccgatactt

SEQ ID NO: 332266 - DNA, 19 bp, Homo sapiens
  siRNA target sequence for FCGBP (NM_003890.1,15549-15567).
cgatacttgccggtaaact

SEQ ID NO: 332267 - DNA, 19 bp, Homo sapiens
  siRNA target sequence for FCGBP (NM_003890.1,15647-15665).
cccaccaggccgtgtatgt

SEQ ID NO: 332268 - DNA, 19 bp, Homo sapiens
  siRNA target sequence for FCGBP (NM_003890.1,15649-15667).
caccaggccgtgtatgtga

SEQ ID NO: 332269 - DNA, 19 bp, Homo sapiens
  siRNA target sequence for FCGBP (NM_003890.1,15800-15818).
ctgcccaggactacagaat

SEQ ID NO: 332270 - DNA, 19 bp, Homo sapiens
  siRNA target sequence for FCGBP (NM_003890.1,15804-15822).
ccaggactacagaatacca

SEQ ID NO: 332271 - DNA, 19 bp, Homo sapiens
  siRNA target sequence for FCGBP (NM_003890.1,15824-15842).
cccctggtaccgtgtagtt

SEQ ID NO: 332272 - DNA, 19 bp, Homo sapiens
  siRNA target sequence for FCGBP (NM_003890.1,15969-15987).
ccagctgagaagttagcat

SEQ ID NO: 332273 - DNA, 19 bp, Homo sapiens
  siRNA target sequence for FCGBP (NM_003890.1,16202-16220).
ggacttctccccatgttat

SEQ ID NO: 332274 - DNA, 19 bp, Homo sapiens
  siRNA target sequence for BAIAP3 (NM_003933.3,110-128).
cgaccttgctggacattaa

SEQ ID NO: 332275 - DNA, 19 bp, Homo sapiens
  siRNA target sequence for BAIAP3 (NM_003933.3,245-263).
gggatggcgtggagttctt

SEQ ID NO: 332276 - DNA, 19 bp, Homo sapiens
  siRNA target sequence for BAIAP3 (NM_003933.3,428-446).
ccctgtacacggtgcttta

SEQ ID NO: 332277 - DNA, 19 bp, Homo sapiens
  siRNA target sequence for BAIAP3 (NM_003933.3,578-596).
ccacgtatgccctgaaagt

SEQ ID NO: 332278 - DNA, 19 bp, Homo sapiens
  siRNA target sequence for BAIAP3 (NM_003933.3,950-968).
gcatgggcaggtacttcaa

SEQ ID NO: 332279 - DNA, 19 bp, Homo sapiens
  siRNA target sequence for BAIAP3 (NM_003933.3,955-973).
ggcaggtacttcaaacaga

SEQ ID NO: 332280 - DNA, 19 bp, Homo sapiens
  siRNA target sequence for BAIAP3 (NM_003933.3,1035-1053).
cctggggtgcctcaacata

SEQ ID NO: 332281 - DNA, 19 bp, Homo sapiens
  siRNA target sequence for BAIAP3 (NM_003933.3,1147-1165).
gttctcaagctgatcacta

SEQ ID NO: 332282 - DNA, 19 bp, Homo sapiens
  siRNA target sequence for BAIAP3 (NM_003933.3,1550-1568).
gccagctccgagactactt

SEQ ID NO: 332283 - DNA, 19 bp, Homo sapiens
  siRNA target sequence for BAIAP3 (NM_003933.3,1802-1820).
ctgacgccgtctatgatga

SEQ ID NO: 332284 - DNA, 19 bp, Homo sapiens
  siRNA target sequence for BAIAP3 (NM_003933.3,2321-2339).
gtgaggccaccctcttcta

SEQ ID NO: 332285 - DNA, 19 bp, Homo sapiens
  siRNA target sequence for BAIAP3 (NM_003933.3,2409-2427).
ctgcgtggtcctcaacaat

SEQ ID NO: 332286 - DNA, 19 bp, Homo sapiens
  siRNA target sequence for BAIAP3 (NM_003933.3,2411-2429).
gcgtggtcctcaacaatgt

SEQ ID NO: 332287 - DNA, 19 bp, Homo sapiens
  siRNA target sequence for BAIAP3 (NM_003933.3,2581-2599).
gcgcacctgacctctaaga

SEQ ID NO: 332288 - DNA, 19 bp, Homo sapiens
  siRNA target sequence for BAIAP3 (NM_003933.3,2582-2600).
cgcacctgacctctaagat

SEQ ID NO: 332289 - DNA, 19 bp, Homo sapiens
  siRNA target sequence for BAIAP3 (NM_003933.3,2604-2622).
gggcgacatccgcaagtat

SEQ ID NO: 332290 - DNA, 19 bp, Homo sapiens
  siRNA target sequence for BAIAP3 (NM_003933.3,2606-2624).
gcgacatccgcaagtatgt

SEQ ID NO: 332291 - DNA, 19 bp, Homo sapiens
  siRNA target sequence for BAIAP3 (NM_003933.3,2607-2625).
cgacatccgcaagtatgta

SEQ ID NO: 332292 - DNA, 19 bp, Homo sapiens
  siRNA target sequence for BAIAP3 (NM_003933.3,2992-3010).
ctggacaagctcaaacaga

SEQ ID NO: 332293 - DNA, 19 bp, Homo sapiens
  siRNA target sequence for BAIAP3 (NM_003933.3,3120-3138).
ggacgccaacggcttaagt

SEQ ID NO: 332294 - DNA, 19 bp, Homo sapiens
  siRNA target sequence for BAIAP3 (NM_003933.3,3218-3236).
ggacgctgcaccctgtata

SEQ ID NO: 332295 - DNA, 19 bp, Homo sapiens
  siRNA target sequence for BAIAP3 (NM_003933.3,3221-3239).
cgctgcaccctgtatacga

SEQ ID NO: 332296 - DNA, 19 bp, Homo sapiens
  siRNA target sequence for BAIAP3 (NM_003933.3,3230-3248).
ctgtatacgacgaactctt

SEQ ID NO: 332297 - DNA, 19 bp, Homo sapiens
  siRNA target sequence for BAIAP3 (NM_003933.3,3238-3256).
gacgaactcttctactttt

SEQ ID NO: 332298 - DNA, 19 bp, Homo sapiens
  siRNA target sequence for BAIAP3 (NM_003933.3,3506-3524).
cgcaggagttcgtgaagaa

SEQ ID NO: 332299 - DNA, 19 bp, Homo sapiens
  siRNA target sequence for RNF8 (NM_003958.2,290-308).
cataccaactggtatcaaa

SEQ ID NO: 332300 - DNA, 19 bp, Homo sapiens
  siRNA target sequence for RNF8 (NM_003958.2,331-349).
cgaaaccactgtgttttga

SEQ ID NO: 332301 - DNA, 19 bp, Homo sapiens
  siRNA target sequence for RNF8 (NM_003958.2,361-379).
gagggccaatggacaatta

SEQ ID NO: 332302 - DNA, 19 bp, Homo sapiens
  siRNA target sequence for RNF8 (NM_003958.2,371-389).
ggacaattatggacaacaa

SEQ ID NO: 332303 - DNA, 19 bp, Homo sapiens
  siRNA target sequence for RNF8 (NM_003958.2,416-434).
gagcgcgtctggaaccttt

SEQ ID NO: 332304 - DNA, 19 bp, Homo sapiens
  siRNA target sequence for RNF8 (NM_003958.2,418-436).
gcgcgtctggaacctttaa

SEQ ID NO: 332305 - DNA, 19 bp, Homo sapiens
  siRNA target sequence for RNF8 (NM_003958.2,430-448).
cctttaagggtctattcca

SEQ ID NO: 332306 - DNA, 19 bp, Homo sapiens
  siRNA target sequence for RNF8 (NM_003958.2,431-449).
ctttaagggtctattccat

SEQ ID NO: 332307 - DNA, 19 bp, Homo sapiens
  siRNA target sequence for RNF8 (NM_003958.2,437-455).
gggtctattccattcatca

SEQ ID NO: 332308 - DNA, 19 bp, Homo sapiens
  siRNA target sequence for RNF8 (NM_003958.2,649-667).
gaaggcccctcaaatttga

SEQ ID NO: 332309 - DNA, 19 bp, Homo sapiens
  siRNA target sequence for RNF8 (NM_003958.2,652-670).
ggcccctcaaatttgaaat

SEQ ID NO: 332310 - DNA, 19 bp, Homo sapiens
  siRNA target sequence for RNF8 (NM_003958.2,850-868).
cagaaagcctcaaactctt

SEQ ID NO: 332311 - DNA, 19 bp, Homo sapiens
  siRNA target sequence for RNF8 (NM_003958.2,955-973).
gccgttatgaatgtgaaaa

SEQ ID NO: 332312 - DNA, 19 bp, Homo sapiens
  siRNA target sequence for RNF8 (NM_003958.2,982-1000).
caaaaggggaactcaaaga

SEQ ID NO: 332313 - DNA, 19 bp, Homo sapiens
  siRNA target sequence for RNF8 (NM_003958.2,995-1013).
caaagaaagttgtgcaaat

SEQ ID NO: 332314 - DNA, 19 bp, Homo sapiens
  siRNA target sequence for RNF8 (NM_003958.2,1073-1091).
caagagtggagcaactaga

SEQ ID NO: 332315 - DNA, 19 bp, Homo sapiens
  siRNA target sequence for RNF8 (NM_003958.2,1081-1099).
gagcaactagagaagactt

SEQ ID NO: 332316 - DNA, 19 bp, Homo sapiens
  siRNA target sequence for RNF8 (NM_003958.2,1188-1206).
gcattgggctctaatggaa

SEQ ID NO: 332317 - DNA, 19 bp, Homo sapiens
  siRNA target sequence for RNF8 (NM_003958.2,1227-1245).
ggactttgaagcaatcatt

SEQ ID NO: 332318 - DNA, 19 bp, Homo sapiens
  siRNA target sequence for RNF8 (NM_003958.2,1342-1360).
gagaatgagctccaatgta

SEQ ID NO: 332319 - DNA, 19 bp, Homo sapiens
  siRNA target sequence for RNF8 (NM_003958.2,1344-1362).
gaatgagctccaatgtatt

SEQ ID NO: 332320 - DNA, 19 bp, Homo sapiens
  siRNA target sequence for RNF8 (NM_003958.2,1350-1368).
gctccaatgtattatttgt

SEQ ID NO: 332321 - DNA, 19 bp, Homo sapiens
  siRNA target sequence for RNF8 (NM_003958.2,1412-1430).
gtttctgctcctactgtat

SEQ ID NO: 332322 - DNA, 19 bp, Homo sapiens
  siRNA target sequence for RNF8 (NM_003958.2,1416-1434).
ctgctcctactgtatcaat

SEQ ID NO: 332323 - DNA, 19 bp, Homo sapiens
  siRNA target sequence for RNF8 (NM_003958.2,1418-1436).
gctcctactgtatcaatga

SEQ ID NO: 332324 - DNA, 19 bp, Homo sapiens
  siRNA target sequence for RNF8 (NM_003958.2,1452-1470).
gatagaatgccccatttgt

SEQ ID NO: 332325 - DNA, 19 bp, Homo sapiens
  siRNA target sequence for RNF8 (NM_003958.2,1477-1495).
gacattaagtccaaaacgt

SEQ ID NO: 332326 - DNA, 19 bp, Homo sapiens
  siRNA target sequence for RNF8 (NM_003958.2,1504-1522).
gttctggacaattgcatta

SEQ ID NO: 332327 - DNA, 19 bp, Homo sapiens
  siRNA target sequence for RNF8 (NM_003958.2,1554-1572).
gaaagaacgacgaattgtt

SEQ ID NO: 332328 - DNA, 19 bp, Homo sapiens
  siRNA target sequence for RNF8 (NM_003958.2,1561-1579).
cgacgaattgttctcatta

SEQ ID NO: 332329 - DNA, 19 bp, Homo sapiens
  siRNA target sequence for RNF8 (NM_003958.2,1575-1593).
cattagggaacgaaaagca

SEQ ID NO: 332330 - DNA, 19 bp, Homo sapiens
  siRNA target sequence for RNF8 (NM_003958.2,1585-1603).
cgaaaagcaaagagattgt

SEQ ID NO: 332331 - DNA, 19 bp, Homo sapiens
  siRNA target sequence for AMY1A (NM_004038.2,931-949).
ggttcccggaaggtagtaa

SEQ ID NO: 332332 - DNA, 19 bp, Homo sapiens
  siRNA target sequence for AMY1A (NM_004038.2,932-950).
gttcccggaaggtagtaaa

SEQ ID NO: 332333 - DNA, 19 bp, Homo sapiens
  siRNA target sequence for AMY1A (NM_004038.2,935-953).
cccggaaggtagtaaacct

SEQ ID NO: 332334 - DNA, 19 bp, Homo sapiens
  siRNA target sequence for AMY1A (NM_004038.2,936-954).
ccggaaggtagtaaacctt

SEQ ID NO: 332335 - DNA, 19 bp, Homo sapiens
  siRNA target sequence for AMY1A (NM_004038.2,937-955).
cggaaggtagtaaaccttt

SEQ ID NO: 332336 - DNA, 19 bp, Homo sapiens
  siRNA target sequence for DDIT3 (NM_004083.3,576-594).
cacagctagctgaagagaa

SEQ ID NO: 332337 - DNA, 19 bp, Homo sapiens
  siRNA target sequence for DDIT3 (NM_004083.3,600-618).
ggctcaagcaggaaatcga

SEQ ID NO: 332338 - DNA, 19 bp, Homo sapiens
  siRNA target sequence for DDIT3 (NM_004083.3,643-661).
gactcgccgagctctgatt

SEQ ID NO: 332339 - DNA, 19 bp, Homo sapiens
  siRNA target sequence for DDIT3 (NM_004083.3,645-663).
ctcgccgagctctgattga

SEQ ID NO: 332340 - DNA, 19 bp, Homo sapiens
  siRNA target sequence for HNF4G (NM_004133.3,257-275).
cgtaagagtcacgtttatt

SEQ ID NO: 332341 - DNA, 19 bp, Homo sapiens
  siRNA target sequence for HNF4G (NM_004133.3,282-300).
ggttcagtcggcaatgtgt

SEQ ID NO: 332342 - DNA, 19 bp, Homo sapiens
  siRNA target sequence for HNF4G (NM_004133.3,283-301).
gttcagtcggcaatgtgtt

SEQ ID NO: 332343 - DNA, 19 bp, Homo sapiens
  siRNA target sequence for HNF4G (NM_004133.3,286-304).
cagtcggcaatgtgttgtt

SEQ ID NO: 332344 - DNA, 19 bp, Homo sapiens
  siRNA target sequence for HNF4G (NM_004133.3,288-306).
gtcggcaatgtgttgttga

SEQ ID NO: 332345 - DNA, 19 bp, Homo sapiens
  siRNA target sequence for HNF4G (NM_004133.3,291-309).
ggcaatgtgttgttgacaa

SEQ ID NO: 332346 - DNA, 19 bp, Homo sapiens
  siRNA target sequence for HNF4G (NM_004133.3,299-317).
gttgttgacaaggacaaaa

SEQ ID NO: 332347 - DNA, 19 bp, Homo sapiens
  siRNA target sequence for HNF4G (NM_004133.3,336-354).
gtcgattaagaaagtgttt

SEQ ID NO: 332348 - DNA, 19 bp, Homo sapiens
  siRNA target sequence for HNF4G (NM_004133.3,389-407).
gaacgtgacagaataagca

SEQ ID NO: 332349 - DNA, 19 bp, Homo sapiens
  siRNA target sequence for HNF4G (NM_004133.3,432-450).
gcaacatcccctccattaa

SEQ ID NO: 332350 - DNA, 19 bp, Homo sapiens
  siRNA target sequence for HNF4G (NM_004133.3,503-521).
gggtcaagcactgacataa

SEQ ID NO: 332351 - DNA, 19 bp, Homo sapiens
  siRNA target sequence for HNF4G (NM_004133.3,507-525).
caagcactgacataaacgt

SEQ ID NO: 332352 - DNA, 19 bp, Homo sapiens
  siRNA target sequence for HNF4G (NM_004133.3,510-528).
gcactgacataaacgttaa

SEQ ID NO: 332353 - DNA, 19 bp, Homo sapiens
  siRNA target sequence for HNF4G (NM_004133.3,586-604).
ggtggaatgggctaaatat

SEQ ID NO: 332354 - DNA, 19 bp, Homo sapiens
  siRNA target sequence for HNF4G (NM_004133.3,690-708).
caaagagatccatgatgta

SEQ ID NO: 332355 - DNA, 19 bp, Homo sapiens
  siRNA target sequence for HNF4G (NM_004133.3,748-766).
ccgcaacagctgtgaagtt

SEQ ID NO: 332356 - DNA, 19 bp, Homo sapiens
  siRNA target sequence for HNF4G (NM_004133.3,781-799).
ggccaatcgtgttctagat

SEQ ID NO: 332357 - DNA, 19 bp, Homo sapiens
  siRNA target sequence for HNF4G (NM_004133.3,783-801).
ccaatcgtgttctagatga

SEQ ID NO: 332358 - DNA, 19 bp, Homo sapiens
  siRNA target sequence for HNF4G (NM_004133.3,838-856).
caatgagtatgcttgttta

SEQ ID NO: 332359 - DNA, 19 bp, Homo sapiens
  siRNA target sequence for HNF4G (NM_004133.3,891-909).
ggctaagcgatccagtaaa

SEQ ID NO: 332360 - DNA, 19 bp, Homo sapiens
  siRNA target sequence for HNF4G (NM_004133.3,892-910).
gctaagcgatccagtaaaa

SEQ ID NO: 332361 - DNA, 19 bp, Homo sapiens
  siRNA target sequence for HNF4G (NM_004133.3,893-911).
ctaagcgatccagtaaaaa

SEQ ID NO: 332362 - DNA, 19 bp, Homo sapiens
  siRNA target sequence for HNF4G (NM_004133.3,899-917).
gatccagtaaaaattaaga

SEQ ID NO: 332363 - DNA, 19 bp, Homo sapiens
  siRNA target sequence for HNF4G (NM_004133.3,1027-1045).
catcacgtggcaaatgatt

SEQ ID NO: 332364 - DNA, 19 bp, Homo sapiens
  siRNA target sequence for HNF4G (NM_004133.3,1046-1064).
gagcaaatacagtttgtta

SEQ ID NO: 332365 - DNA, 19 bp, Homo sapiens
  siRNA target sequence for HNF4G (NM_004133.3,1074-1092).
ggatggttaaaattgacaa

SEQ ID NO: 332366 - DNA, 19 bp, Homo sapiens
  siRNA target sequence for HNF4G (NM_004133.3,1075-1093).
gatggttaaaattgacaat

SEQ ID NO: 332367 - DNA, 19 bp, Homo sapiens
  siRNA target sequence for HNF4G (NM_004133.3,1168-1186).
gtctcaagacccattaact

SEQ ID NO: 332368 - DNA, 19 bp, Homo sapiens
  siRNA target sequence for HNF4G (NM_004133.3,1199-1217).
cttttaggtcccatgtcaa

SEQ ID NO: 332369 - DNA, 19 bp, Homo sapiens
  siRNA target sequence for HNF4G (NM_004133.3,1226-1244).
catgcagaccagatctcaa

SEQ ID NO: 332370 - DNA, 19 bp, Homo sapiens
  siRNA target sequence for HNF4G (NM_004133.3,1278-1296).
gctctgggcaagaacagta

SEQ ID NO: 332371 - DNA, 19 bp, Homo sapiens
  siRNA target sequence for HNF4G (NM_004133.3,1281-1299).
ctgggcaagaacagtacaa

SEQ ID NO: 332372 - DNA, 19 bp, Homo sapiens
  siRNA target sequence for MMPL1 (NM_004142.1,477-495).
gcggctcaccggttgatga

SEQ ID NO: 332373 - DNA, 19 bp, Homo sapiens
  siRNA target sequence for DRG1 (NM_004147.2,78-96).
ctaagatcgcggagataga

SEQ ID NO: 332374 - DNA, 19 bp, Homo sapiens
  siRNA target sequence for DRG1 (NM_004147.2,101-119).
gagatggctcggactcaaa

SEQ ID NO: 332375 - DNA, 19 bp, Homo sapiens
  siRNA target sequence for DRG1 (NM_004147.2,157-175).
ggctcgtcttgctaagctt

SEQ ID NO: 332376 - DNA, 19 bp, Homo sapiens
  siRNA target sequence for DRG1 (NM_004147.2,172-190).
gcttcgtcgagaactcatt

SEQ ID NO: 332377 - DNA, 19 bp, Homo sapiens
  siRNA target sequence for DRG1 (NM_004147.2,173-191).
cttcgtcgagaactcatta

SEQ ID NO: 332378 - DNA, 19 bp, Homo sapiens
  siRNA target sequence for DRG1 (NM_004147.2,248-266).
ggtgatgctcgaattggat

SEQ ID NO: 332379 - DNA, 19 bp, Homo sapiens
  siRNA target sequence for DRG1 (NM_004147.2,249-267).
gtgatgctcgaattggatt

SEQ ID NO: 332380 - DNA, 19 bp, Homo sapiens
  siRNA target sequence for DRG1 (NM_004147.2,278-296).
ccatctgtggggaagtcaa

SEQ ID NO: 332381 - DNA, 19 bp, Homo sapiens
  siRNA target sequence for DRG1 (NM_004147.2,310-328).
cctggcaggggtatattct

SEQ ID NO: 332382 - DNA, 19 bp, Homo sapiens
  siRNA target sequence for DRG1 (NM_004147.2,368-386).
cctggtgtcatcagataca

SEQ ID NO: 332383 - DNA, 19 bp, Homo sapiens
  siRNA target sequence for DRG1 (NM_004147.2,409-427).
ggatctcccaggtatcatt

SEQ ID NO: 332384 - DNA, 19 bp, Homo sapiens
  siRNA target sequence for DRG1 (NM_004147.2,450-468).
gtagaggtcgtcaagtcat

SEQ ID NO: 332385 - DNA, 19 bp, Homo sapiens
  siRNA target sequence for DRG1 (NM_004147.2,473-491).
gtggcccgaacctgtaact

SEQ ID NO: 332386 - DNA, 19 bp, Homo sapiens
  siRNA target sequence for DRG1 (NM_004147.2,476-494).
gcccgaacctgtaacttga

SEQ ID NO: 332387 - DNA, 19 bp, Homo sapiens
  siRNA target sequence for DRG1 (NM_004147.2,477-495).
cccgaacctgtaacttgat

SEQ ID NO: 332388 - DNA, 19 bp, Homo sapiens
  siRNA target sequence for DRG1 (NM_004147.2,479-497).
cgaacctgtaacttgatct

SEQ ID NO: 332389 - DNA, 19 bp, Homo sapiens
  siRNA target sequence for DRG1 (NM_004147.2,484-502).
ctgtaacttgatcttgatt

SEQ ID NO: 332390 - DNA, 19 bp, Homo sapiens
  siRNA target sequence for DRG1 (NM_004147.2,486-504).
gtaacttgatcttgattgt

SEQ ID NO: 332391 - DNA, 19 bp, Homo sapiens
  siRNA target sequence for DRG1 (NM_004147.2,506-524).
ctggatgtcctgaaacctt

SEQ ID NO: 332392 - DNA, 19 bp, Homo sapiens
  siRNA target sequence for DRG1 (NM_004147.2,689-707).
gctgaatacaagattcata

SEQ ID NO: 332393 - DNA, 19 bp, Homo sapiens
  siRNA target sequence for DRG1 (NM_004147.2,690-708).
ctgaatacaagattcataa

SEQ ID NO: 332394 - DNA, 19 bp, Homo sapiens
  siRNA target sequence for DRG1 (NM_004147.2,784-802).
cccctgtatctatgtgtta

SEQ ID NO: 332395 - DNA, 19 bp, Homo sapiens
  siRNA target sequence for DRG1 (NM_004147.2,785-803).
ccctgtatctatgtgttaa

SEQ ID NO: 332396 - DNA, 19 bp, Homo sapiens
  siRNA target sequence for DRG1 (NM_004147.2,820-838).
ctccattgaggaattggat

SEQ ID NO: 332397 - DNA, 19 bp, Homo sapiens
  siRNA target sequence for DRG1 (NM_004147.2,822-840).
ccattgaggaattggatat

SEQ ID NO: 332398 - DNA, 19 bp, Homo sapiens
  siRNA target sequence for DRG1 (NM_004147.2,875-893).
gcccatcaccgctggaatt

SEQ ID NO: 332399 - DNA, 19 bp, Homo sapiens
  siRNA target sequence for DRG1 (NM_004147.2,876-894).
cccatcaccgctggaattt

SEQ ID NO: 332400 - DNA, 19 bp, Homo sapiens
  siRNA target sequence for DRG1 (NM_004147.2,877-895).
ccatcaccgctggaatttt

SEQ ID NO: 332401 - DNA, 19 bp, Homo sapiens
  siRNA target sequence for DRG1 (NM_004147.2,888-906).
ggaattttgatgacctatt

SEQ ID NO: 332402 - DNA, 19 bp, Homo sapiens
  siRNA target sequence for DRG1 (NM_004147.2,899-917).
gacctattggaaaagatct

SEQ ID NO: 332403 - DNA, 19 bp, Homo sapiens
  siRNA target sequence for DRG1 (NM_004147.2,913-931).
gatctgggactatctgaaa

SEQ ID NO: 332404 - DNA, 19 bp, Homo sapiens
  siRNA target sequence for DRG1 (NM_004147.2,916-934).
ctgggactatctgaaacta

SEQ ID NO: 332405 - DNA, 19 bp, Homo sapiens
  siRNA target sequence for DRG1 (NM_004147.2,926-944).
ctgaaactagtgagaattt

SEQ ID NO: 332406 - DNA, 19 bp, Homo sapiens
  siRNA target sequence for DRG1 (NM_004147.2,962-980).
cagttaccagattacacat

SEQ ID NO: 332407 - DNA, 19 bp, Homo sapiens
  siRNA target sequence for DRG1 (NM_004147.2,1024-1042).
ctgcatgaagattcacaaa

SEQ ID NO: 332408 - DNA, 19 bp, Homo sapiens
  siRNA target sequence for DRG1 (NM_004147.2,1139-1157).
gatgtcattcaaattgtga

SEQ ID NO: 332409 - DNA, 19 bp, Homo sapiens
  siRNA target sequence for CCL14 (NM_004166.3,1030-1048).
cctacactacctacaagat

SEQ ID NO: 332410 - DNA, 19 bp, Homo sapiens
  siRNA target sequence for CCL14 (NM_004166.3,1051-1069).
cgcgtcagcggattatgga

SEQ ID NO: 332411 - DNA, 19 bp, Homo sapiens
  siRNA target sequence for CCL14 (NM_004166.3,1052-1070).
gcgtcagcggattatggat

SEQ ID NO: 332412 - DNA, 19 bp, Homo sapiens
  siRNA target sequence for CCL14 (NM_004166.3,1056-1074).
cagcggattatggattact

SEQ ID NO: 332413 - DNA, 19 bp, Homo sapiens
  siRNA target sequence for CCL14 (NM_004166.3,1058-1076).
gcggattatggattactat

SEQ ID NO: 332414 - DNA, 19 bp, Homo sapiens
  siRNA target sequence for CCL14 (NM_004166.3,1060-1078).
ggattatggattactatga

SEQ ID NO: 332415 - DNA, 19 bp, Homo sapiens
  siRNA target sequence for CCL14 (NM_004166.3,1096-1114).
ccaagcccggaattgtctt

SEQ ID NO: 332416 - DNA, 19 bp, Homo sapiens
  siRNA target sequence for CCL14 (NM_004166.3,1101-1119).
cccggaattgtcttcatca

SEQ ID NO: 332417 - DNA, 19 bp, Homo sapiens
  siRNA target sequence for SLC1A2 (NM_004171.2,494-512).
caccctgatgtggttatgt

SEQ ID NO: 332418 - DNA, 19 bp, Homo sapiens
  siRNA target sequence for SLC1A2 (NM_004171.2,496-514).
ccctgatgtggttatgtta

SEQ ID NO: 332419 - DNA, 19 bp, Homo sapiens
  siRNA target sequence for SLC1A2 (NM_004171.2,497-515).
cctgatgtggttatgttaa

SEQ ID NO: 332420 - DNA, 19 bp, Homo sapiens
  siRNA target sequence for SLC1A2 (NM_004171.2,498-516).
ctgatgtggttatgttaat

SEQ ID NO: 332421 - DNA, 19 bp, Homo sapiens
  siRNA target sequence for SLC1A2 (NM_004171.2,519-537).
ccttcccaggggatatact

SEQ ID NO: 332422 - DNA, 19 bp, Homo sapiens
  siRNA target sequence for SLC1A2 (NM_004171.2,569-587).
ctaatcatctccagcttaa

SEQ ID NO: 332423 - DNA, 19 bp, Homo sapiens
  siRNA target sequence for SLC1A2 (NM_004171.2,636-654).
cgagagccatggtgtatta

SEQ ID NO: 332424 - DNA, 19 bp, Homo sapiens
  siRNA target sequence for SLC1A2 (NM_004171.2,717-735).
gcaatcccaagctcaagaa

SEQ ID NO: 332425 - DNA, 19 bp, Homo sapiens
  siRNA target sequence for SLC1A2 (NM_004171.2,784-802).
cttcctggaccttattcga

SEQ ID NO: 332426 - DNA, 19 bp, Homo sapiens
  siRNA target sequence for SLC1A2 (NM_004171.2,787-805).
cctggaccttattcgaaat

SEQ ID NO: 332427 - DNA, 19 bp, Homo sapiens
  siRNA target sequence for SLC1A2 (NM_004171.2,791-809).
gaccttattcgaaatctct

SEQ ID NO: 332428 - DNA, 19 bp, Homo sapiens
  siRNA target sequence for SLC1A2 (NM_004171.2,956-974).
gagactaagatggttatca

SEQ ID NO: 332429 - DNA, 19 bp, Homo sapiens
  siRNA target sequence for SLC1A2 (NM_004171.2,1003-1021).
gaacgtcttaggtctgata

SEQ ID NO: 332430 - DNA, 19 bp, Homo sapiens
  siRNA target sequence for SLC1A2 (NM_004171.2,1168-1186).
gatctgtggaaagatcatt

SEQ ID NO: 332431 - DNA, 19 bp, Homo sapiens
  siRNA target sequence for SLC1A2 (NM_004171.2,1220-1238).
ctggggatgtacatggtaa

SEQ ID NO: 332432 - DNA, 19 bp, Homo sapiens
  siRNA target sequence for SLC1A2 (NM_004171.2,1231-1249).
catggtaacagtgatcata

SEQ ID NO: 332433 - DNA, 19 bp, Homo sapiens
  siRNA target sequence for SLC1A2 (NM_004171.2,1368-1386).
cttccagtgctggaacttt

SEQ ID NO: 332434 - DNA, 19 bp, Homo sapiens
  siRNA target sequence for SLC1A2 (NM_004171.2,1412-1430).
gaaaatctggggattgata

SEQ ID NO: 332435 - DNA, 19 bp, Homo sapiens
  siRNA target sequence for SLC1A2 (NM_004171.2,1427-1445).
gataagcgtgtgactagat

SEQ ID NO: 332436 - DNA, 19 bp, Homo sapiens
  siRNA target sequence for SLC1A2 (NM_004171.2,1454-1472).
cctgttggagcaaccatta

SEQ ID NO: 332437 - DNA, 19 bp, Homo sapiens
  siRNA target sequence for SLC1A2 (NM_004171.2,1455-1473).
ctgttggagcaaccattaa

SEQ ID NO: 332438 - DNA, 19 bp, Homo sapiens
  siRNA target sequence for SLC1A2 (NM_004171.2,1477-1495).
ggatggtacagccctttat

SEQ ID NO: 332439 - DNA, 19 bp, Homo sapiens
  siRNA target sequence for SLC1A2 (NM_004171.2,1777-1795).
gtctgagctggataccatt

SEQ ID NO: 332440 - DNA, 19 bp, Homo sapiens
  siRNA target sequence for SLC1A2 (NM_004171.2,1804-1822).
gcatcgagtgcatgaagat

SEQ ID NO: 332441 - DNA, 19 bp, Homo sapiens
  siRNA target sequence for SLC1A2 (NM_004171.2,1805-1823).
catcgagtgcatgaagata

SEQ ID NO: 332442 - DNA, 19 bp, Homo sapiens
  siRNA target sequence for SLC1A2 (NM_004171.2,1826-1844).
gaaatgaccaagactcaat

SEQ ID NO: 332443 - DNA, 19 bp, Homo sapiens
  siRNA target sequence for SLC1A2 (NM_004171.2,1831-1849).
gaccaagactcaatccatt

SEQ ID NO: 332444 - DNA, 19 bp, Homo sapiens
  siRNA target sequence for SLC1A2 (NM_004171.2,1833-1851).
ccaagactcaatccattta

SEQ ID NO: 332445 - DNA, 19 bp, Homo sapiens
  siRNA target sequence for SLC1A2 (NM_004171.2,1834-1852).
caagactcaatccatttat

SEQ ID NO: 332446 - DNA, 19 bp, Homo sapiens
  siRNA target sequence for SLC1A2 (NM_004171.2,1837-1855).
gactcaatccatttatgat

SEQ ID NO: 332447 - DNA, 19 bp, Homo sapiens
  siRNA target sequence for SLC1A2 (NM_004171.2,1878-1896).
gcaactctaatcaatgtgt

SEQ ID NO: 332448 - DNA, 19 bp, Homo sapiens
  siRNA target sequence for SLC1A2 (NM_004171.2,1905-1923).
cacacaactctgtcatagt

SEQ ID NO: 332449 - DNA, 19 bp, Homo sapiens
  siRNA target sequence for SLC1A2 (NM_004171.2,1909-1927).
caactctgtcatagtagat

SEQ ID NO: 332450 - DNA, 19 bp, Homo sapiens
  siRNA target sequence for SLC1A2 (NM_004171.2,1922-1940).
gtagatgaatgcaaggtaa

SEQ ID NO: 332451 - DNA, 19 bp, Homo sapiens
  siRNA target sequence for SLC1A2 (NM_004171.2,1988-2006).
ccttggaaacgtgagaaat

SEQ ID NO: 332452 - DNA, 19 bp, Homo sapiens
  siRNA target sequence for GFI1B (NM_004188.2,205-223).
ccgtgtgcaggaagatgaa

SEQ ID NO: 332453 - DNA, 19 bp, Homo sapiens
  siRNA target sequence for GFI1B (NM_004188.2,438-456).
ccgactcacccccattcta

SEQ ID NO: 332454 - DNA, 19 bp, Homo sapiens
  siRNA target sequence for GFI1B (NM_004188.2,440-458).
gactcacccccattctaca

SEQ ID NO: 332455 - DNA, 19 bp, Homo sapiens
  siRNA target sequence for GFI1B (NM_004188.2,478-496).
caccttggccacaacctat

SEQ ID NO: 332456 - DNA, 19 bp, Homo sapiens
  siRNA target sequence for ASMTL (NM_004192.1,109-127).
gtggtcccctccaagttta

SEQ ID NO: 332457 - DNA, 19 bp, Homo sapiens
  siRNA target sequence for ASMTL (NM_004192.1,111-129).
ggtcccctccaagtttaaa

SEQ ID NO: 332458 - DNA, 19 bp, Homo sapiens
  siRNA target sequence for ASMTL (NM_004192.1,116-134).
cctccaagtttaaagagaa

SEQ ID NO: 332459 - DNA, 19 bp, Homo sapiens
  siRNA target sequence for ASMTL (NM_004192.1,439-457).
gaaacgaaggtgaagttct

SEQ ID NO: 332460 - DNA, 19 bp, Homo sapiens
  siRNA target sequence for ASMTL (NM_004192.1,565-583).
gtacacggggactttctga

SEQ ID NO: 332461 - DNA, 19 bp, Homo sapiens
  siRNA target sequence for ASMTL (NM_004192.1,873-891).
gattgagggctttatgcta

SEQ ID NO: 332462 - DNA, 19 bp, Homo sapiens
  siRNA target sequence for ASMTL (NM_004192.1,954-972).
ccagaaggctgcggatatt

SEQ ID NO: 332463 - DNA, 19 bp, Homo sapiens
  siRNA target sequence for ASMTL (NM_004192.1,1050-1068).
gacagagcaaggttacagt

SEQ ID NO: 332464 - DNA, 19 bp, Homo sapiens
  siRNA target sequence for ASMTL (NM_004192.1,1056-1074).
gcaaggttacagtaacaca

SEQ ID NO: 332465 - DNA, 19 bp, Homo sapiens
  siRNA target sequence for ASMTL (NM_004192.1,1096-1114).
gcatcggatggcgaatact

SEQ ID NO: 332466 - DNA, 19 bp, Homo sapiens
  siRNA target sequence for ASMTL (NM_004192.1,1149-1167).
cacatggaacctctttaca

SEQ ID NO: 332467 - DNA, 19 bp, Homo sapiens
  siRNA target sequence for ASMTL (NM_004192.1,1151-1169).
catggaacctctttacata

SEQ ID NO: 332468 - DNA, 19 bp, Homo sapiens
  siRNA target sequence for ASMTL (NM_004192.1,1181-1199).
ccatccgagagggaacaaa

SEQ ID NO: 332469 - DNA, 19 bp, Homo sapiens
  siRNA target sequence for ASMTL (NM_004192.1,1596-1614).
cgacaaagtccacaagtta

SEQ ID NO: 332470 - DNA, 19 bp, Homo sapiens
  siRNA target sequence for ASMTL (NM_004192.1,1754-1772).
ggagcctgggcgagtatca

SEQ ID NO: 332471 - DNA, 19 bp, Homo sapiens
  siRNA target sequence for ASMTL (NM_004192.1,1867-1885).
gcccaggcagcatgttcat

SEQ ID NO: 332472 - DNA, 19 bp, Homo sapiens
  siRNA target sequence for ASMTL (NM_004192.1,1868-1886).
cccaggcagcatgttcatt

SEQ ID NO: 332473 - DNA, 19 bp, Homo sapiens
  siRNA target sequence for ASMTL (NM_004192.1,1869-1887).
ccaggcagcatgttcatta

SEQ ID NO: 332474 - DNA, 19 bp, Homo sapiens
  siRNA target sequence for ASMTL (NM_004192.1,1870-1888).
caggcagcatgttcattat

SEQ ID NO: 332475 - DNA, 19 bp, Homo sapiens
  siRNA target sequence for FARSLA (NM_004461.1,246-264).
ccgtgtgtttcgaagcatt

SEQ ID NO: 332476 - DNA, 19 bp, Homo sapiens
  siRNA target sequence for FARSLA (NM_004461.1,628-646).
cccttcaagccctacaact

SEQ ID NO: 332477 - DNA, 19 bp, Homo sapiens
  siRNA target sequence for FARSLA (NM_004461.1,743-761).
ccgagatgccgactgataa

SEQ ID NO: 332478 - DNA, 19 bp, Homo sapiens
  siRNA target sequence for FARSLA (NM_004461.1,745-763).
gagatgccgactgataact

SEQ ID NO: 332479 - DNA, 19 bp, Homo sapiens
  siRNA target sequence for FARSLA (NM_004461.1,750-768).
gccgactgataacttcatt

SEQ ID NO: 332480 - DNA, 19 bp, Homo sapiens
  siRNA target sequence for FARSLA (NM_004461.1,752-770).
cgactgataacttcattga

SEQ ID NO: 332481 - DNA, 19 bp, Homo sapiens
  siRNA target sequence for FARSLA (NM_004461.1,773-791).
gctccttctggaactttga

SEQ ID NO: 332482 - DNA, 19 bp, Homo sapiens
  siRNA target sequence for FARSLA (NM_004461.1,929-947).
gctcacaggggtacaagta

SEQ ID NO: 332483 - DNA, 19 bp, Homo sapiens
  siRNA target sequence for FARSLA (NM_004461.1,930-948).
ctcacaggggtacaagtat

SEQ ID NO: 332484 - DNA, 19 bp, Homo sapiens
  siRNA target sequence for FARSLA (NM_004461.1,932-950).
cacaggggtacaagtataa

SEQ ID NO: 332485 - DNA, 19 bp, Homo sapiens
  siRNA target sequence for FARSLA (NM_004461.1,934-952).
caggggtacaagtataact

SEQ ID NO: 332486 - DNA, 19 bp, Homo sapiens
  siRNA target sequence for FARSLA (NM_004461.1,1043-1061).
ccttcactccggtcaagta

SEQ ID NO: 332487 - DNA, 19 bp, Homo sapiens
  siRNA target sequence for FARSLA (NM_004461.1,1075-1093).
cgcgtattccggaatgaga

SEQ ID NO: 332488 - DNA, 19 bp, Homo sapiens
  siRNA target sequence for FARSLA (NM_004461.1,1178-1196).
gcgttctgcgggagttctt

SEQ ID NO: 332489 - DNA, 19 bp, Homo sapiens
  siRNA target sequence for FARSLA (NM_004461.1,1396-1414).
gagcgcccaacgatgatca

SEQ ID NO: 332490 - DNA, 19 bp, Homo sapiens
  siRNA target sequence for FARSLA (NM_004461.1,1398-1416).
gcgcccaacgatgatcaaa

SEQ ID NO: 332491 - DNA, 19 bp, Homo sapiens
  siRNA target sequence for FARSLA (NM_004461.1,1399-1417).
cgcccaacgatgatcaaat

SEQ ID NO: 332492 - DNA, 19 bp, Homo sapiens
  siRNA target sequence for FARSLA (NM_004461.1,1401-1419).
cccaacgatgatcaaatat

SEQ ID NO: 332493 - DNA, 19 bp, Homo sapiens
  siRNA target sequence for FARSLA (NM_004461.1,1462-1480).
ctgcagatggtgtatgaca

SEQ ID NO: 332494 - DNA, 19 bp, Homo sapiens
  siRNA target sequence for GRLF1 (NM_004491.2,48-66).
cagtgtggtgggattatct

SEQ ID NO: 332495 - DNA, 19 bp, Homo sapiens
  siRNA target sequence for GRLF1 (NM_004491.2,134-152).
cgagtgctgacgagtttca

SEQ ID NO: 332496 - DNA, 19 bp, Homo sapiens
  siRNA target sequence for GRLF1 (NM_004491.2,191-209).
gagggcgagtggtcaataa

SEQ ID NO: 332497 - DNA, 19 bp, Homo sapiens
  siRNA target sequence for GRLF1 (NM_004491.2,250-268).
gaggattgtgtggaatgta

SEQ ID NO: 332498 - DNA, 19 bp, Homo sapiens
  siRNA target sequence for GRLF1 (NM_004491.2,332-350).
cggccctgcagccctatat

SEQ ID NO: 332499 - DNA, 19 bp, Homo sapiens
  siRNA target sequence for GRLF1 (NM_004491.2,335-353).
ccctgcagccctatatcaa

SEQ ID NO: 332500 - DNA, 19 bp, Homo sapiens
  siRNA target sequence for GRLF1 (NM_004491.2,382-400).
gctgaaaaactcatgtact

SEQ ID NO: 332501 - DNA, 19 bp, Homo sapiens
  siRNA target sequence for GRLF1 (NM_004491.2,465-483).
gctggttgatggttttctt

SEQ ID NO: 332502 - DNA, 19 bp, Homo sapiens
  siRNA target sequence for GRLF1 (NM_004491.2,500-518).
gcaggggcatgaataggaa

SEQ ID NO: 332503 - DNA, 19 bp, Homo sapiens
  siRNA target sequence for GRLF1 (NM_004491.2,586-604).
gtggtggtcctgactaagt

SEQ ID NO: 332504 - DNA, 19 bp, Homo sapiens
  siRNA target sequence for GRLF1 (NM_004491.2,613-631).
ggtgttgagcggtacatta

SEQ ID NO: 332505 - DNA, 19 bp, Homo sapiens
  siRNA target sequence for GRLF1 (NM_004491.2,681-699).
gacctcagcgagatccaat

SEQ ID NO: 332506 - DNA, 19 bp, Homo sapiens
  siRNA target sequence for GRLF1 (NM_004491.2,684-702).
ctcagcgagatccaatgta

SEQ ID NO: 332507 - DNA, 19 bp, Homo sapiens
  siRNA target sequence for GRLF1 (NM_004491.2,686-704).
cagcgagatccaatgtaaa

SEQ ID NO: 332508 - DNA, 19 bp, Homo sapiens
  siRNA target sequence for GRLF1 (NM_004491.2,689-707).
cgagatccaatgtaaacgt

SEQ ID NO: 332509 - DNA, 19 bp, Homo sapiens
  siRNA target sequence for GRLF1 (NM_004491.2,726-744).
cttagtgcaactcattgat

SEQ ID NO: 332510 - DNA, 19 bp, Homo sapiens
  siRNA target sequence for GRLF1 (NM_004491.2,730-748).
gtgcaactcattgataaaa

SEQ ID NO: 332511 - DNA, 19 bp, Homo sapiens
  siRNA target sequence for GRLF1 (NM_004491.2,796-814).
cagagtcagcagatagcta

SEQ ID NO: 332512 - DNA, 19 bp, Homo sapiens
  siRNA target sequence for GRLF1 (NM_004491.2,840-858).
ggtgagtcgcattgtgaaa

SEQ ID NO: 332513 - DNA, 19 bp, Homo sapiens
  siRNA target sequence for GRLF1 (NM_004491.2,845-863).
gtcgcattgtgaaaaacca

SEQ ID NO: 332514 - DNA, 19 bp, Homo sapiens
  siRNA target sequence for GRLF1 (NM_004491.2,1023-1041).
ggcagccctgccattagct

SEQ ID NO: 332515 - DNA, 19 bp, Homo sapiens
  siRNA target sequence for GRLF1 (NM_004491.2,1029-1047).
cctgccattagcttttgaa

SEQ ID NO: 332516 - DNA, 19 bp, Homo sapiens
  siRNA target sequence for GRLF1 (NM_004491.2,1049-1067).
ctcttatacctaatctaga

SEQ ID NO: 332517 - DNA, 19 bp, Homo sapiens
  siRNA target sequence for GRLF1 (NM_004491.2,1058-1076).
ctaatctagatgaaataga

SEQ ID NO: 332518 - DNA, 19 bp, Homo sapiens
  siRNA target sequence for GRLF1 (NM_004491.2,1172-1190).
ccagtcacattgacaacat

SEQ ID NO: 332519 - DNA, 19 bp, Homo sapiens
  siRNA target sequence for GRLF1 (NM_004491.2,1197-1215).
cgaacggattccctttgat

SEQ ID NO: 332520 - DNA, 19 bp, Homo sapiens
  siRNA target sequence for GRLF1 (NM_004491.2,1198-1216).
gaacggattccctttgatt

SEQ ID NO: 332521 - DNA, 19 bp, Homo sapiens
  siRNA target sequence for GRLF1 (NM_004491.2,1201-1219).
cggattccctttgatttaa

SEQ ID NO: 332522 - DNA, 19 bp, Homo sapiens
  siRNA target sequence for GRLF1 (NM_004491.2,1207-1225).
ccctttgatttaatggata

SEQ ID NO: 332523 - DNA, 19 bp, Homo sapiens
  siRNA target sequence for GRLF1 (NM_004491.2,1293-1311).
gatgcgaagggcgtttaaa

SEQ ID NO: 332524 - DNA, 19 bp, Homo sapiens
  siRNA target sequence for GRLF1 (NM_004491.2,1296-1314).
gcgaagggcgtttaaagaa

SEQ ID NO: 332525 - DNA, 19 bp, Homo sapiens
  siRNA target sequence for GRLF1 (NM_004491.2,1297-1315).
cgaagggcgtttaaagaaa

SEQ ID NO: 332526 - DNA, 19 bp, Homo sapiens
  siRNA target sequence for GRLF1 (NM_004491.2,1301-1319).
gggcgtttaaagaaaacct

SEQ ID NO: 332527 - DNA, 19 bp, Homo sapiens
  siRNA target sequence for GRLF1 (NM_004491.2,1320-1338).
ggagacttctcctttcata

SEQ ID NO: 332528 - DNA, 19 bp, Homo sapiens
  siRNA target sequence for GRLF1 (NM_004491.2,1323-1341).
gacttctcctttcataact

SEQ ID NO: 332529 - DNA, 19 bp, Homo sapiens
  siRNA target sequence for GRLF1 (NM_004491.2,1355-1373).
gggaagaggcccgtagttt

SEQ ID NO: 332530 - DNA, 19 bp, Homo sapiens
  siRNA target sequence for GRLF1 (NM_004491.2,1356-1374).
ggaagaggcccgtagtttt

SEQ ID NO: 332531 - DNA, 19 bp, Homo sapiens
  siRNA target sequence for GRLF1 (NM_004491.2,1357-1375).
gaagaggcccgtagtttta

SEQ ID NO: 332532 - DNA, 19 bp, Homo sapiens
  siRNA target sequence for GRLF1 (NM_004491.2,1360-1378).
gaggcccgtagttttatta

SEQ ID NO: 332533 - DNA, 19 bp, Homo sapiens
  siRNA target sequence for GRLF1 (NM_004491.2,1363-1381).
gcccgtagttttattatga

SEQ ID NO: 332534 - DNA, 19 bp, Homo sapiens
  siRNA target sequence for GRLF1 (NM_004491.2,1365-1383).
ccgtagttttattatgaat

SEQ ID NO: 332535 - DNA, 19 bp, Homo sapiens
  siRNA target sequence for GRLF1 (NM_004491.2,1367-1385).
gtagttttattatgaatga

SEQ ID NO: 332536 - DNA, 19 bp, Homo sapiens
  siRNA target sequence for GRLF1 (NM_004491.2,1574-1592).
gagaggaacagcgatttaa

SEQ ID NO: 332537 - DNA, 19 bp, Homo sapiens
  siRNA target sequence for GRLF1 (NM_004491.2,1694-1712).
cttgtgtggacgctaagat

SEQ ID NO: 332538 - DNA, 19 bp, Homo sapiens
  siRNA target sequence for GRLF1 (NM_004491.2,1697-1715).
gtgtggacgctaagattga

SEQ ID NO: 332539 - DNA, 19 bp, Homo sapiens
  siRNA target sequence for GRLF1 (NM_004491.2,1710-1728).
gattgagcacttgattagt

SEQ ID NO: 332540 - DNA, 19 bp, Homo sapiens
  siRNA target sequence for GRLF1 (NM_004491.2,1744-1762).
ccgtctgaccggaatcaga

SEQ ID NO: 332541 - DNA, 19 bp, Homo sapiens
  siRNA target sequence for GRLF1 (NM_004491.2,1745-1763).
cgtctgaccggaatcagaa

SEQ ID NO: 332542 - DNA, 19 bp, Homo sapiens
  siRNA target sequence for GRLF1 (NM_004491.2,1746-1764).
gtctgaccggaatcagaaa

SEQ ID NO: 332543 - DNA, 19 bp, Homo sapiens
  siRNA target sequence for GRLF1 (NM_004491.2,1748-1766).
ctgaccggaatcagaaaaa

SEQ ID NO: 332544 - DNA, 19 bp, Homo sapiens
  siRNA target sequence for GRLF1 (NM_004491.2,1750-1768).
gaccggaatcagaaaaatt

SEQ ID NO: 332545 - DNA, 19 bp, Homo sapiens
  siRNA target sequence for GRLF1 (NM_004491.2,1780-1798).
cctaacattgatagaatca

SEQ ID NO: 332546 - DNA, 19 bp, Homo sapiens
  siRNA target sequence for GRLF1 (NM_004491.2,1781-1799).
ctaacattgatagaatcaa

SEQ ID NO: 332547 - DNA, 19 bp, Homo sapiens
  siRNA target sequence for GRLF1 (NM_004491.2,1789-1807).
gatagaatcaacttggtta

SEQ ID NO: 332548 - DNA, 19 bp, Homo sapiens
  siRNA target sequence for GRLF1 (NM_004491.2,1884-1902).
gatagatggtaaaatgtat

SEQ ID NO: 332549 - DNA, 19 bp, Homo sapiens
  siRNA target sequence for GRLF1 (NM_004491.2,1937-1955).
ggcttcctgtgaactcttt

SEQ ID NO: 332550 - DNA, 19 bp, Homo sapiens
  siRNA target sequence for GRLF1 (NM_004491.2,1981-1999).
ggctgtctctgcctttaca

SEQ ID NO: 332551 - DNA, 19 bp, Homo sapiens
  siRNA target sequence for GRLF1 (NM_004491.2,2003-2021).
caaaggaatcgctatccta

SEQ ID NO: 332552 - DNA, 19 bp, Homo sapiens
  siRNA target sequence for GRLF1 (NM_004491.2,2007-2025).
ggaatcgctatcctatgta

SEQ ID NO: 332553 - DNA, 19 bp, Homo sapiens
  siRNA target sequence for GRLF1 (NM_004491.2,2018-2036).
cctatgtagtggaaagtat

SEQ ID NO: 332554 - DNA, 19 bp, Homo sapiens
  siRNA target sequence for GRLF1 (NM_004491.2,2083-2101).
gtccatctcccccttacat

SEQ ID NO: 332555 - DNA, 19 bp, Homo sapiens
  siRNA target sequence for GRLF1 (NM_004491.2,2085-2103).
ccatctcccccttacatta

SEQ ID NO: 332556 - DNA, 19 bp, Homo sapiens
  siRNA target sequence for GRLF1 (NM_004491.2,2089-2107).
ctcccccttacattaattt

SEQ ID NO: 332557 - DNA, 19 bp, Homo sapiens
  siRNA target sequence for GRLF1 (NM_004491.2,2095-2113).
cttacattaattttggtta

SEQ ID NO: 332558 - DNA, 19 bp, Homo sapiens
  siRNA target sequence for GRLF1 (NM_004491.2,2099-2117).
cattaattttggttaacaa

SEQ ID NO: 332559 - DNA, 19 bp, Homo sapiens
  siRNA target sequence for GRLF1 (NM_004491.2,2137-2155).
gagactctgcatagcttaa

SEQ ID NO: 332560 - DNA, 19 bp, Homo sapiens
  siRNA target sequence for GRLF1 (NM_004491.2,2139-2157).
gactctgcatagcttaata

SEQ ID NO: 332561 - DNA, 19 bp, Homo sapiens
  siRNA target sequence for GRLF1 (NM_004491.2,2210-2228).
cttctgctggcattggtta

SEQ ID NO: 332562 - DNA, 19 bp, Homo sapiens
  siRNA target sequence for GRLF1 (NM_004491.2,2224-2242).
ggttacggacgcaacatta

SEQ ID NO: 332563 - DNA, 19 bp, Homo sapiens
  siRNA target sequence for GRLF1 (NM_004491.2,2225-2243).
gttacggacgcaacattaa

SEQ ID NO: 332564 - DNA, 19 bp, Homo sapiens
  siRNA target sequence for GRLF1 (NM_004491.2,2229-2247).
cggacgcaacattaatgaa

SEQ ID NO: 332565 - DNA, 19 bp, Homo sapiens
  siRNA target sequence for GRLF1 (NM_004491.2,2230-2248).
ggacgcaacattaatgaaa

SEQ ID NO: 332566 - DNA, 19 bp, Homo sapiens
  siRNA target sequence for GRLF1 (NM_004491.2,2231-2249).
gacgcaacattaatgaaaa

SEQ ID NO: 332567 - DNA, 19 bp, Homo sapiens
  siRNA target sequence for GRLF1 (NM_004491.2,2280-2298).
ggactctaagcgtaactta

SEQ ID NO: 332568 - DNA, 19 bp, Homo sapiens
  siRNA target sequence for GRLF1 (NM_004491.2,2281-2299).
gactctaagcgtaacttaa

SEQ ID NO: 332569 - DNA, 19 bp, Homo sapiens
  siRNA target sequence for GRLF1 (NM_004491.2,2285-2303).
ctaagcgtaacttaaacct

SEQ ID NO: 332570 - DNA, 19 bp, Homo sapiens
  siRNA target sequence for GRLF1 (NM_004491.2,2312-2330).
ctactgctagcatcaaaga

SEQ ID NO: 332571 - DNA, 19 bp, Homo sapiens
  siRNA target sequence for GRLF1 (NM_004491.2,2341-2359).
gttgatctgcgaattgtta

SEQ ID NO: 332572 - DNA, 19 bp, Homo sapiens
  siRNA target sequence for GRLF1 (NM_004491.2,2344-2362).
gatctgcgaattgttatgt

SEQ ID NO: 332573 - DNA, 19 bp, Homo sapiens
  siRNA target sequence for GRLF1 (NM_004491.2,2457-2475).
ctctgttttacttgaacta

SEQ ID NO: 332574 - DNA, 19 bp, Homo sapiens
  siRNA target sequence for GRLF1 (NM_004491.2,2503-2521).
gaactgtctgttctttcat

SEQ ID NO: 332575 - DNA, 19 bp, Homo sapiens
  siRNA target sequence for GRLF1 (NM_004491.2,2556-2574).
ggttcatgggtacattgtt

SEQ ID NO: 332576 - DNA, 19 bp, Homo sapiens
  siRNA target sequence for GRLF1 (NM_004491.2,2627-2645).
gtgaagtgcaggatattat

SEQ ID NO: 332577 - DNA, 19 bp, Homo sapiens
  siRNA target sequence for GRLF1 (NM_004491.2,2667-2685).
cactgatggcgctgtagat

SEQ ID NO: 332578 - DNA, 19 bp, Homo sapiens
  siRNA target sequence for GRLF1 (NM_004491.2,2686-2704).
gtcctggacaatgacttaa

SEQ ID NO: 332579 - DNA, 19 bp, Homo sapiens
  siRNA target sequence for GRLF1 (NM_004491.2,2705-2723).
gtagggaacagctaactga

SEQ ID NO: 332580 - DNA, 19 bp, Homo sapiens
  siRNA target sequence for GRLF1 (NM_004491.2,2774-2792).
gtagccaaccccagcataa

SEQ ID NO: 332581 - DNA, 19 bp, Homo sapiens
  siRNA target sequence for GRLF1 (NM_004491.2,2783-2801).
cccagcataaacttgagat

SEQ ID NO: 332582 - DNA, 19 bp, Homo sapiens
  siRNA target sequence for GRLF1 (NM_004491.2,2797-2815).
gagatctttcacccatttt

SEQ ID NO: 332583 - DNA, 19 bp, Homo sapiens
  siRNA target sequence for GRLF1 (NM_004491.2,2841-2859).
cataatcgaggctactcat

SEQ ID NO: 332584 - DNA, 19 bp, Homo sapiens
  siRNA target sequence for GRLF1 (NM_004491.2,2851-2869).
gctactcatatgtacgata

SEQ ID NO: 332585 - DNA, 19 bp, Homo sapiens
  siRNA target sequence for GRLF1 (NM_004491.2,2852-2870).
ctactcatatgtacgataa

SEQ ID NO: 332586 - DNA, 19 bp, Homo sapiens
  siRNA target sequence for GRLF1 (NM_004491.2,2891-2909).
ccaccgaagaggtgtttaa

SEQ ID NO: 332587 - DNA, 19 bp, Homo sapiens
  siRNA target sequence for GRLF1 (NM_004491.2,2965-2983).
gatatcgagccatcttaca

SEQ ID NO: 332588 - DNA, 19 bp, Homo sapiens
  siRNA target sequence for GRLF1 (NM_004491.2,3056-3074).
gaaatgatgggctgtcttt

SEQ ID NO: 332589 - DNA, 19 bp, Homo sapiens
  siRNA target sequence for GRLF1 (NM_004491.2,3061-3079).
gatgggctgtctttcatta

SEQ ID NO: 332590 - DNA, 19 bp, Homo sapiens
  siRNA target sequence for GRLF1 (NM_004491.2,3115-3133).
cctccgccagtcaaaccaa

SEQ ID NO: 332591 - DNA, 19 bp, Homo sapiens
  siRNA target sequence for GRLF1 (NM_004491.2,3135-3153).
gcctcctgtccattttgaa

SEQ ID NO: 332592 - DNA, 19 bp, Homo sapiens
  siRNA target sequence for GRLF1 (NM_004491.2,3136-3154).
cctcctgtccattttgaaa

SEQ ID NO: 332593 - DNA, 19 bp, Homo sapiens
  siRNA target sequence for GRLF1 (NM_004491.2,3433-3451).
gagcgagggcgcaaggttt

SEQ ID NO: 332594 - DNA, 19 bp, Homo sapiens
  siRNA target sequence for GRLF1 (NM_004491.2,3580-3598).
caggcatcccagggttata

SEQ ID NO: 332595 - DNA, 19 bp, Homo sapiens
  siRNA target sequence for GRLF1 (NM_004491.2,3582-3600).
ggcatcccagggttataaa

SEQ ID NO: 332596 - DNA, 19 bp, Homo sapiens
  siRNA target sequence for GRLF1 (NM_004491.2,3604-3622).
gacaatgctgtcattccat

SEQ ID NO: 332597 - DNA, 19 bp, Homo sapiens
  siRNA target sequence for GRLF1 (NM_004491.2,3610-3628).
gctgtcattccatacgaaa

SEQ ID NO: 332598 - DNA, 19 bp, Homo sapiens
  siRNA target sequence for GRLF1 (NM_004491.2,3665-3683).
gcctaaggaggaacactaa

SEQ ID NO: 332599 - DNA, 19 bp, Homo sapiens
  siRNA target sequence for GRLF1 (NM_004491.2,3667-3685).
ctaaggaggaacactaaga

SEQ ID NO: 332600 - DNA, 19 bp, Homo sapiens
  siRNA target sequence for GRLF1 (NM_004491.2,3722-3740).
caacctgggagagtaacta

SEQ ID NO: 332601 - DNA, 19 bp, Homo sapiens
  siRNA target sequence for GRLF1 (NM_004491.2,3853-3871).
cgggtcagcgggaacaagt

SEQ ID NO: 332602 - DNA, 19 bp, Homo sapiens
  siRNA target sequence for GRLF1 (NM_004491.2,3959-3977).
gtgccatgaagagcttttt

SEQ ID NO: 332603 - DNA, 19 bp, Homo sapiens
  siRNA target sequence for GRLF1 (NM_004491.2,3994-4012).
cccctggtcccgtataaca

SEQ ID NO: 332604 - DNA, 19 bp, Homo sapiens
  siRNA target sequence for GRLF1 (NM_004491.2,3995-4013).
ccctggtcccgtataacat

SEQ ID NO: 332605 - DNA, 19 bp, Homo sapiens
  siRNA target sequence for GRLF1 (NM_004491.2,4023-4041).
cttggtggaagcacacaaa

SEQ ID NO: 332606 - DNA, 19 bp, Homo sapiens
  siRNA target sequence for GRLF1 (NM_004491.2,4069-4087).
gcccttaaggaggtattaa

SEQ ID NO: 332607 - DNA, 19 bp, Homo sapiens
  siRNA target sequence for GRLF1 (NM_004491.2,4070-4088).
cccttaaggaggtattaaa

SEQ ID NO: 332608 - DNA, 19 bp, Homo sapiens
  siRNA target sequence for GRLF1 (NM_004491.2,4126-4144).
gtcatctctcacctaaaca

SEQ ID NO: 332609 - DNA, 19 bp, Homo sapiens
  siRNA target sequence for GRLF1 (NM_004491.2,4256-4274).
cgcgcacctaccagacaat

SEQ ID NO: 332610 - DNA, 19 bp, Homo sapiens
  siRNA target sequence for GRLF1 (NM_004491.2,4262-4280).
cctaccagacaatcattga

SEQ ID NO: 332611 - DNA, 19 bp, Homo sapiens
  siRNA target sequence for GRLF1 (NM_004491.2,4269-4287).
gacaatcattgaactcttt

SEQ ID NO: 332612 - DNA, 19 bp, Homo sapiens
  siRNA target sequence for LLGL2 (NM_004524.1,182-200).
cgggacctgttccagttta

SEQ ID NO: 332613 - DNA, 19 bp, Homo sapiens
  siRNA target sequence for LLGL2 (NM_004524.1,183-201).
gggacctgttccagtttaa

SEQ ID NO: 332614 - DNA, 19 bp, Homo sapiens
  siRNA target sequence for LLGL2 (NM_004524.1,965-983).
ccttgcaaagcgattacca

SEQ ID NO: 332615 - DNA, 19 bp, Homo sapiens
  siRNA target sequence for LLGL2 (NM_004524.1,1988-2006).
cggcaggtctttgttaagt

SEQ ID NO: 332616 - DNA, 19 bp, Homo sapiens
  siRNA target sequence for LLGL2 (NM_004524.1,2266-2284).
cgtccggaccctgtacttt

SEQ ID NO: 332617 - DNA, 19 bp, Homo sapiens
  siRNA target sequence for LLGL2 (NM_004524.1,2829-2847).
cctgcgtcttcaccaaata

SEQ ID NO: 332618 - DNA, 19 bp, Homo sapiens
  siRNA target sequence for LLGL2 (NM_004524.1,2830-2848).
ctgcgtcttcaccaaatat

SEQ ID NO: 332619 - DNA, 19 bp, Homo sapiens
  siRNA target sequence for LLGL2 (NM_004524.1,3087-3105).
cggcaactggcgttcacat

SEQ ID NO: 332620 - DNA, 19 bp, Homo sapiens
  siRNA target sequence for NDUFA1 (NM_004541.2,178-196).
gggcgtgtgcttgttgatt

SEQ ID NO: 332621 - DNA, 19 bp, Homo sapiens
  siRNA target sequence for NDUFA1 (NM_004541.2,298-316).
gcgcatctctggagttgat

SEQ ID NO: 332622 - DNA, 19 bp, Homo sapiens
  siRNA target sequence for NDUFA1 (NM_004541.2,306-324).
ctggagttgatcgttacta

SEQ ID NO: 332623 - DNA, 19 bp, Homo sapiens
  siRNA target sequence for NDUFA1 (NM_004541.2,309-327).
gagttgatcgttactatgt

SEQ ID NO: 332624 - DNA, 19 bp, Homo sapiens
  siRNA target sequence for RARRES3 (NM_004585.2,127-145).
gcactgggccctgtatata

SEQ ID NO: 332625 - DNA, 19 bp, Homo sapiens
  siRNA target sequence for RARRES3 (NM_004585.2,130-148).
ctgggccctgtatatagga

SEQ ID NO: 332626 - DNA, 19 bp, Homo sapiens
  siRNA target sequence for RARRES3 (NM_004585.2,265-283).
ggtgggaggctgttgctat

SEQ ID NO: 332627 - DNA, 19 bp, Homo sapiens
  siRNA target sequence for RARRES3 (NM_004585.2,326-344).
gtggaggtgatcatcagtt

SEQ ID NO: 332628 - DNA, 19 bp, Homo sapiens
  siRNA target sequence for TTC4 (NM_004623.2,166-184).
cgagagcgccatcagaaat

SEQ ID NO: 332629 - DNA, 19 bp, Homo sapiens
  siRNA target sequence for TTC4 (NM_004623.2,169-187).
gagcgccatcagaaattga

SEQ ID NO: 332630 - DNA, 19 bp, Homo sapiens
  siRNA target sequence for TTC4 (NM_004623.2,209-227).
ggcttgtctccagtcaatt

SEQ ID NO: 332631 - DNA, 19 bp, Homo sapiens
  siRNA target sequence for TTC4 (NM_004623.2,255-273).
gaacaggccaagacctata

SEQ ID NO: 332632 - DNA, 19 bp, Homo sapiens
  siRNA target sequence for TTC4 (NM_004623.2,260-278).
ggccaagacctataaagat

SEQ ID NO: 332633 - DNA, 19 bp, Homo sapiens
  siRNA target sequence for TTC4 (NM_004623.2,262-280).
ccaagacctataaagatga

SEQ ID NO: 332634 - DNA, 19 bp, Homo sapiens
  siRNA target sequence for TTC4 (NM_004623.2,276-294).
gatgagggcaatgattact

SEQ ID NO: 332635 - DNA, 19 bp, Homo sapiens
  siRNA target sequence for TTC4 (NM_004623.2,279-297).
gagggcaatgattacttta

SEQ ID NO: 332636 - DNA, 19 bp, Homo sapiens
  siRNA target sequence for TTC4 (NM_004623.2,281-299).
gggcaatgattactttaaa

SEQ ID NO: 332637 - DNA, 19 bp, Homo sapiens
  siRNA target sequence for TTC4 (NM_004623.2,308-326).
ctacaagaaagctgtaatt

SEQ ID NO: 332638 - DNA, 19 bp, Homo sapiens
  siRNA target sequence for TTC4 (NM_004623.2,407-425).
gtactatctgggcaatttt

SEQ ID NO: 332639 - DNA, 19 bp, Homo sapiens
  siRNA target sequence for TTC4 (NM_004623.2,547-565).
gtgatgagggactgcaaat

SEQ ID NO: 332640 - DNA, 19 bp, Homo sapiens
  siRNA target sequence for TTC4 (NM_004623.2,909-927).
catgaggactccaggttta

SEQ ID NO: 332641 - DNA, 19 bp, Homo sapiens
  siRNA target sequence for TTC4 (NM_004623.2,914-932).
ggactccaggtttattgat

SEQ ID NO: 332642 - DNA, 19 bp, Homo sapiens
  siRNA target sequence for TTC4 (NM_004623.2,917-935).
ctccaggtttattgatcat

SEQ ID NO: 332643 - DNA, 19 bp, Homo sapiens
  siRNA target sequence for TTC4 (NM_004623.2,920-938).
caggtttattgatcatcta

SEQ ID NO: 332644 - DNA, 19 bp, Homo sapiens
  siRNA target sequence for TTC4 (NM_004623.2,922-940).
ggtttattgatcatctaat

SEQ ID NO: 332645 - DNA, 19 bp, Homo sapiens
  siRNA target sequence for TTC4 (NM_004623.2,968-986).
ggacctagagcaaaaatat

SEQ ID NO: 332646 - DNA, 19 bp, Homo sapiens
  siRNA target sequence for TTC4 (NM_004623.2,969-987).
gacctagagcaaaaatatt

SEQ ID NO: 332647 - DNA, 19 bp, Homo sapiens
  siRNA target sequence for TTC4 (NM_004623.2,1020-1038).
gaggacagggcagaactat

SEQ ID NO: 332648 - DNA, 19 bp, Homo sapiens
  siRNA target sequence for TTC4 (NM_004623.2,1060-1078).
ccttgctacaggttctaca

SEQ ID NO: 332649 - DNA, 19 bp, Homo sapiens
  siRNA target sequence for TTC4 (NM_004623.2,1131-1149).
ggatcctctcctttttgca

SEQ ID NO: 332650 - DNA, 19 bp, Homo sapiens
  siRNA target sequence for BAT2 (NM_004638.2,155-173).
cctcgctcaacctgtttga

SEQ ID NO: 332651 - DNA, 19 bp, Homo sapiens
  siRNA target sequence for BAT2 (NM_004638.2,156-174).
ctcgctcaacctgtttgat

SEQ ID NO: 332652 - DNA, 19 bp, Homo sapiens
  siRNA target sequence for BAT2 (NM_004638.2,162-180).
caacctgtttgatacgtat

SEQ ID NO: 332653 - DNA, 19 bp, Homo sapiens
  siRNA target sequence for BAT2 (NM_004638.2,505-523).
gttccaagcggggtaaagt

SEQ ID NO: 332654 - DNA, 19 bp, Homo sapiens
  siRNA target sequence for BAT2 (NM_004638.2,593-611).
gattctctcgagaggaatt

SEQ ID NO: 332655 - DNA, 19 bp, Homo sapiens
  siRNA target sequence for BAT2 (NM_004638.2,764-782).
cggactccaaacttcatca

SEQ ID NO: 332656 - DNA, 19 bp, Homo sapiens
  siRNA target sequence for BAT2 (NM_004638.2,833-851).
ctccctaccgcggaatgat

SEQ ID NO: 332657 - DNA, 19 bp, Homo sapiens
  siRNA target sequence for BAT2 (NM_004638.2,849-867).
gatgccgcctttcatgtat

SEQ ID NO: 332658 - DNA, 19 bp, Homo sapiens
  siRNA target sequence for BAT2 (NM_004638.2,978-996).
gccaccaatgcgcttagta

SEQ ID NO: 332659 - DNA, 19 bp, Homo sapiens
  siRNA target sequence for BAT2 (NM_004638.2,980-998).
caccaatgcgcttagtaga

SEQ ID NO: 332660 - DNA, 19 bp, Homo sapiens
  siRNA target sequence for BAT2 (NM_004638.2,1006-1024).
ggtcgtccctctattctca

SEQ ID NO: 332661 - DNA, 19 bp, Homo sapiens
  siRNA target sequence for BAT2 (NM_004638.2,1007-1025).
gtcgtccctctattctcaa

SEQ ID NO: 332662 - DNA, 19 bp, Homo sapiens
  siRNA target sequence for BAT2 (NM_004638.2,1010-1028).
gtccctctattctcaaaga

SEQ ID NO: 332663 - DNA, 19 bp, Homo sapiens
  siRNA target sequence for BAT2 (NM_004638.2,1029-1047).
ggataatctcaaagagttt

SEQ ID NO: 332664 - DNA, 19 bp, Homo sapiens
  siRNA target sequence for BAT2 (NM_004638.2,1088-1106).
cccatgaagaggttgacta

SEQ ID NO: 332665 - DNA, 19 bp, Homo sapiens
  siRNA target sequence for BAT2 (NM_004638.2,1096-1114).
gaggttgactacactgaaa

SEQ ID NO: 332666 - DNA, 19 bp, Homo sapiens
  siRNA target sequence for BAT2 (NM_004638.2,1428-1446).
gcagtcgtcatctgagatt

SEQ ID NO: 332667 - DNA, 19 bp, Homo sapiens
  siRNA target sequence for BAT2 (NM_004638.2,1429-1447).
cagtcgtcatctgagattt

SEQ ID NO: 332668 - DNA, 19 bp, Homo sapiens
  siRNA target sequence for BAT2 (NM_004638.2,1539-1557).
gcgactcgatgaaaagttt

SEQ ID NO: 332669 - DNA, 19 bp, Homo sapiens
  siRNA target sequence for BAT2 (NM_004638.2,1838-1856).
cacaactgccctcaaaaga

SEQ ID NO: 332670 - DNA, 19 bp, Homo sapiens
  siRNA target sequence for BAT2 (NM_004638.2,1965-1983).
cttgggctaccccaaatat

SEQ ID NO: 332671 - DNA, 19 bp, Homo sapiens
  siRNA target sequence for BAT2 (NM_004638.2,2201-2219).
cacccatgcccccaatgaa

SEQ ID NO: 332672 - DNA, 19 bp, Homo sapiens
  siRNA target sequence for BAT2 (NM_004638.2,2203-2221).
cccatgcccccaatgaact

SEQ ID NO: 332673 - DNA, 19 bp, Homo sapiens
  siRNA target sequence for BAT2 (NM_004638.2,2208-2226).
gcccccaatgaactttgat

SEQ ID NO: 332674 - DNA, 19 bp, Homo sapiens
  siRNA target sequence for BAT2 (NM_004638.2,2224-2242).
gatccccgatggatgatga

SEQ ID NO: 332675 - DNA, 19 bp, Homo sapiens
  siRNA target sequence for BAT2 (NM_004638.2,2276-2294).
gtcgtccccctctagactt

SEQ ID NO: 332676 - DNA, 19 bp, Homo sapiens
  siRNA target sequence for BAT2 (NM_004638.2,2378-2396).
gtcatgcacctgctatgtt

SEQ ID NO: 332677 - DNA, 19 bp, Homo sapiens
  siRNA target sequence for BAT2 (NM_004638.2,2411-2429).
ctccaccggtggatccaaa

SEQ ID NO: 332678 - DNA, 19 bp, Homo sapiens
  siRNA target sequence for BAT2 (NM_004638.2,2414-2432).
caccggtggatccaaagtt

SEQ ID NO: 332679 - DNA, 19 bp, Homo sapiens
  siRNA target sequence for BAT2 (NM_004638.2,2565-2583).
ctatctggccagttatcca

SEQ ID NO: 332680 - DNA, 19 bp, Homo sapiens
  siRNA target sequence for BAT2 (NM_004638.2,2910-2928).
ggctgggcctataaagaaa

SEQ ID NO: 332681 - DNA, 19 bp, Homo sapiens
  siRNA target sequence for BAT2 (NM_004638.2,2971-2989).
ctcgaacagggggatgaaa

SEQ ID NO: 332682 - DNA, 19 bp, Homo sapiens
  siRNA target sequence for BAT2 (NM_004638.2,3056-3074).
ccccacccaatggaaatct

SEQ ID NO: 332683 - DNA, 19 bp, Homo sapiens
  siRNA target sequence for BAT2 (NM_004638.2,3057-3075).
cccacccaatggaaatctt

SEQ ID NO: 332684 - DNA, 19 bp, Homo sapiens
  siRNA target sequence for BAT2 (NM_004638.2,3091-3109).
cttcggagggactattcgt

SEQ ID NO: 332685 - DNA, 19 bp, Homo sapiens
  siRNA target sequence for BAT2 (NM_004638.2,3096-3114).
gagggactattcgtatgaa

SEQ ID NO: 332686 - DNA, 19 bp, Homo sapiens
  siRNA target sequence for BAT2 (NM_004638.2,3228-3246).
ccgcagttaccgagagttt

SEQ ID NO: 332687 - DNA, 19 bp, Homo sapiens
  siRNA target sequence for BAT2 (NM_004638.2,3741-3759).
cagcaatggaggtagcaat

SEQ ID NO: 332688 - DNA, 19 bp, Homo sapiens
  siRNA target sequence for BAT2 (NM_004638.2,4144-4162).
ggagccgtaccaggtattt

SEQ ID NO: 332689 - DNA, 19 bp, Homo sapiens
  siRNA target sequence for BAT2 (NM_004638.2,4193-4211).
gagccaaggatttgagtaa

SEQ ID NO: 332690 - DNA, 19 bp, Homo sapiens
  siRNA target sequence for BAT2 (NM_004638.2,4521-4539).
ccgtcaagggagtgtaact

SEQ ID NO: 332691 - DNA, 19 bp, Homo sapiens
  siRNA target sequence for BAT2 (NM_004638.2,4774-4792).
ctgctacaggaggaatctt

SEQ ID NO: 332692 - DNA, 19 bp, Homo sapiens
  siRNA target sequence for BAT2 (NM_004638.2,4896-4914).
ctggaaccgtttacatact

SEQ ID NO: 332693 - DNA, 19 bp, Homo sapiens
  siRNA target sequence for BAT2 (NM_004638.2,4915-4933).
gccactagccgaaagagtt

SEQ ID NO: 332694 - DNA, 19 bp, Homo sapiens
  siRNA target sequence for BAT2 (NM_004638.2,4989-5007).
ggctggcacagaaatgagt

SEQ ID NO: 332695 - DNA, 19 bp, Homo sapiens
  siRNA target sequence for BAT2 (NM_004638.2,5207-5225).
cccacgatggggacagaaa

SEQ ID NO: 332696 - DNA, 19 bp, Homo sapiens
  siRNA target sequence for BAT2 (NM_004638.2,5489-5507).
ctgctgagccacaatccaa

SEQ ID NO: 332697 - DNA, 19 bp, Homo sapiens
  siRNA target sequence for BAT2 (NM_004638.2,5621-5639).
ccatggactctcaattaca

SEQ ID NO: 332698 - DNA, 19 bp, Homo sapiens
  siRNA target sequence for BAT2 (NM_004638.2,5622-5640).
catggactctcaattacat

SEQ ID NO: 332699 - DNA, 19 bp, Homo sapiens
  siRNA target sequence for BAT2 (NM_004638.2,5673-5691).
ctcactgcacccttacaga

SEQ ID NO: 332700 - DNA, 19 bp, Homo sapiens
  siRNA target sequence for BAT2 (NM_004638.2,5916-5934).
gccatccccttcggatttt

SEQ ID NO: 332701 - DNA, 19 bp, Homo sapiens
  siRNA target sequence for BAT2 (NM_004638.2,6374-6392).
cccagcgcgtcgaccttta

SEQ ID NO: 332702 - DNA, 19 bp, Homo sapiens
  siRNA target sequence for BAT2 (NM_004638.2,6416-6434).
ccctgcgctggatacctaa

SEQ ID NO: 332703 - DNA, 19 bp, Homo sapiens
  siRNA target sequence for ASH2L (NM_004674.1,59-77).
ggagcggtcgcaaatgcaa

SEQ ID NO: 332704 - DNA, 19 bp, Homo sapiens
  siRNA target sequence for ASH2L (NM_004674.1,197-215).
gcaaacttggtcgatgtaa

SEQ ID NO: 332705 - DNA, 19 bp, Homo sapiens
  siRNA target sequence for ASH2L (NM_004674.1,223-241).
cttggagacagaatcatct

SEQ ID NO: 332706 - DNA, 19 bp, Homo sapiens
  siRNA target sequence for ASH2L (NM_004674.1,229-247).
gacagaatcatctaatgga

SEQ ID NO: 332707 - DNA, 19 bp, Homo sapiens
  siRNA target sequence for ASH2L (NM_004674.1,357-375).
ggatttgtacaaaatggtt

SEQ ID NO: 332708 - DNA, 19 bp, Homo sapiens
  siRNA target sequence for ASH2L (NM_004674.1,372-390).
ggttcacggctgacacatt

SEQ ID NO: 332709 - DNA, 19 bp, Homo sapiens
  siRNA target sequence for ASH2L (NM_004674.1,373-391).
gttcacggctgacacattt

SEQ ID NO: 332710 - DNA, 19 bp, Homo sapiens
  siRNA target sequence for ASH2L (NM_004674.1,383-401).
gacacatttggcatagata

SEQ ID NO: 332711 - DNA, 19 bp, Homo sapiens
  siRNA target sequence for ASH2L (NM_004674.1,416-434).
cctttcatgaccaactaca

SEQ ID NO: 332712 - DNA, 19 bp, Homo sapiens
  siRNA target sequence for ASH2L (NM_004674.1,421-439).
catgaccaactacagtttt

SEQ ID NO: 332713 - DNA, 19 bp, Homo sapiens
  siRNA target sequence for ASH2L (NM_004674.1,424-442).
gaccaactacagttttcat

SEQ ID NO: 332714 - DNA, 19 bp, Homo sapiens
  siRNA target sequence for ASH2L (NM_004674.1,455-473).
catcacagtgggaatacct

SEQ ID NO: 332715 - DNA, 19 bp, Homo sapiens
  siRNA target sequence for ASH2L (NM_004674.1,458-476).
cacagtgggaatacctatt

SEQ ID NO: 332716 - DNA, 19 bp, Homo sapiens
  siRNA target sequence for ASH2L (NM_004674.1,462-480).
gtgggaatacctatttcct

SEQ ID NO: 332717 - DNA, 19 bp, Homo sapiens
  siRNA target sequence for ASH2L (NM_004674.1,482-500).
cggaagcaagcaaacttga

SEQ ID NO: 332718 - DNA, 19 bp, Homo sapiens
  siRNA target sequence for ASH2L (NM_004674.1,543-561).
cccgaacacaggatgaaca

SEQ ID NO: 332719 - DNA, 19 bp, Homo sapiens
  siRNA target sequence for ASH2L (NM_004674.1,544-562).
ccgaacacaggatgaacat

SEQ ID NO: 332720 - DNA, 19 bp, Homo sapiens
  siRNA target sequence for ASH2L (NM_004674.1,557-575).
gaacatccgaagacaatgt

SEQ ID NO: 332721 - DNA, 19 bp, Homo sapiens
  siRNA target sequence for ASH2L (NM_004674.1,560-578).
catccgaagacaatgttct

SEQ ID NO: 332722 - DNA, 19 bp, Homo sapiens
  siRNA target sequence for ASH2L (NM_004674.1,584-602).
gataaggatattataccat

SEQ ID NO: 332723 - DNA, 19 bp, Homo sapiens
  siRNA target sequence for ASH2L (NM_004674.1,657-675).
cttggccaaataacattgt

SEQ ID NO: 332724 - DNA, 19 bp, Homo sapiens
  siRNA target sequence for ASH2L (NM_004674.1,835-853).
gtctactagtgggaattta

SEQ ID NO: 332725 - DNA, 19 bp, Homo sapiens
  siRNA target sequence for ASH2L (NM_004674.1,946-964).
ccggagtgaccctttgttt

SEQ ID NO: 332726 - DNA, 19 bp, Homo sapiens
  siRNA target sequence for ASH2L (NM_004674.1,947-965).
cggagtgaccctttgtttt

SEQ ID NO: 332727 - DNA, 19 bp, Homo sapiens
  siRNA target sequence for ASH2L (NM_004674.1,996-1014).
cattggaacacccgtttaa

SEQ ID NO: 332728 - DNA, 19 bp, Homo sapiens
  siRNA target sequence for ASH2L (NM_004674.1,1123-1141).
cagagcctgcttgtatgaa

SEQ ID NO: 332729 - DNA, 19 bp, Homo sapiens
  siRNA target sequence for ASH2L (NM_004674.1,1135-1153).
gtatgaacgggttttgtta

SEQ ID NO: 332730 - DNA, 19 bp, Homo sapiens
  siRNA target sequence for ASH2L (NM_004674.1,1163-1181).
gatcgagctccccagttaa

SEQ ID NO: 332731 - DNA, 19 bp, Homo sapiens
  siRNA target sequence for ASH2L (NM_004674.1,1264-1282).
ctggtattttgaaatcact

SEQ ID NO: 332732 - DNA, 19 bp, Homo sapiens
  siRNA target sequence for ASH2L (NM_004674.1,1343-1361).
cttcaagctcctttaggtt

SEQ ID NO: 332733 - DNA, 19 bp, Homo sapiens
  siRNA target sequence for ASH2L (NM_004674.1,1349-1367).
gctcctttaggttatgata

SEQ ID NO: 332734 - DNA, 19 bp, Homo sapiens
  siRNA target sequence for ASH2L (NM_004674.1,1353-1371).
ctttaggttatgataaatt

SEQ ID NO: 332735 - DNA, 19 bp, Homo sapiens
  siRNA target sequence for ASH2L (NM_004674.1,1359-1377).
gttatgataaatttagcta

SEQ ID NO: 332736 - DNA, 19 bp, Homo sapiens
  siRNA target sequence for ASH2L (NM_004674.1,1412-1430).
cagtccattggcaaacact

SEQ ID NO: 332737 - DNA, 19 bp, Homo sapiens
  siRNA target sequence for ASH2L (NM_004674.1,1452-1470).
gagacgtcctgggatttta

SEQ ID NO: 332738 - DNA, 19 bp, Homo sapiens
  siRNA target sequence for ASH2L (NM_004674.1,1506-1524).
cattgccagacacatacaa

SEQ ID NO: 332739 - DNA, 19 bp, Homo sapiens
  siRNA target sequence for ASH2L (NM_004674.1,1613-1631).
ccccatagtgagataatat

SEQ ID NO: 332740 - DNA, 19 bp, Homo sapiens
  siRNA target sequence for ASH2L (NM_004674.1,1614-1632).
cccatagtgagataatatt

SEQ ID NO: 332741 - DNA, 19 bp, Homo sapiens
  siRNA target sequence for ASH2L (NM_004674.1,1655-1673).
ggtgtggcttacaaagata

SEQ ID NO: 332742 - DNA, 19 bp, Homo sapiens
  siRNA target sequence for ASH2L (NM_004674.1,1758-1776).
ctccgaaggatctcactta

SEQ ID NO: 332743 - DNA, 19 bp, Homo sapiens
  siRNA target sequence for PRY (NM_004676.2,398-416).
ctcatttctctggagatat

SEQ ID NO: 332744 - DNA, 19 bp, Homo sapiens
  siRNA target sequence for SDCCAG1 (NM_004713.2,108-126).
ctcgcggagctgaatgcta

SEQ ID NO: 332745 - DNA, 19 bp, Homo sapiens
  siRNA target sequence for SDCCAG1 (NM_004713.2,140-158).
gagagtaaacaatgtttat

SEQ ID NO: 332746 - DNA, 19 bp, Homo sapiens
  siRNA target sequence for SDCCAG1 (NM_004713.2,165-183).
gataataagacatacctta

SEQ ID NO: 332747 - DNA, 19 bp, Homo sapiens
  siRNA target sequence for SDCCAG1 (NM_004713.2,179-197).
ccttattcgtcttcaaaaa

SEQ ID NO: 332748 - DNA, 19 bp, Homo sapiens
  siRNA target sequence for SDCCAG1 (NM_004713.2,210-228).
gctacacttttacttgaat

SEQ ID NO: 332749 - DNA, 19 bp, Homo sapiens
  siRNA target sequence for SDCCAG1 (NM_004713.2,222-240).
cttgaatctggcatacgaa

SEQ ID NO: 332750 - DNA, 19 bp, Homo sapiens
  siRNA target sequence for SDCCAG1 (NM_004713.2,231-249).
ggcatacgaattcatacaa

SEQ ID NO: 332751 - DNA, 19 bp, Homo sapiens
  siRNA target sequence for SDCCAG1 (NM_004713.2,233-251).
catacgaattcatacaaca

SEQ ID NO: 332752 - DNA, 19 bp, Homo sapiens
  siRNA target sequence for SDCCAG1 (NM_004713.2,258-276).
gagtggcctaagaatatga

SEQ ID NO: 332753 - DNA, 19 bp, Homo sapiens
  siRNA target sequence for SDCCAG1 (NM_004713.2,292-310).
ccatgaagtgccgaaaaca

SEQ ID NO: 332754 - DNA, 19 bp, Homo sapiens
  siRNA target sequence for SDCCAG1 (NM_004713.2,325-343).
gattagtcagtgcaaaaca

SEQ ID NO: 332755 - DNA, 19 bp, Homo sapiens
  siRNA target sequence for SDCCAG1 (NM_004713.2,342-360).
cagcttggtgtggatagaa

SEQ ID NO: 332756 - DNA, 19 bp, Homo sapiens
  siRNA target sequence for SDCCAG1 (NM_004713.2,351-369).
gtggatagaattgtagatt

SEQ ID NO: 332757 - DNA, 19 bp, Homo sapiens
  siRNA target sequence for SDCCAG1 (NM_004713.2,394-412).
cttaccatttaatcattga

SEQ ID NO: 332758 - DNA, 19 bp, Homo sapiens
  siRNA target sequence for SDCCAG1 (NM_004713.2,416-434).
ctatgatagggggaacatt

SEQ ID NO: 332759 - DNA, 19 bp, Homo sapiens
  siRNA target sequence for SDCCAG1 (NM_004713.2,431-449).
cattgttcttacagattat

SEQ ID NO: 332760 - DNA, 19 bp, Homo sapiens
  siRNA target sequence for SDCCAG1 (NM_004713.2,442-460).
cagattatgagtacgtaat

SEQ ID NO: 332761 - DNA, 19 bp, Homo sapiens
  siRNA target sequence for SDCCAG1 (NM_004713.2,444-462).
gattatgagtacgtaattt

SEQ ID NO: 332762 - DNA, 19 bp, Homo sapiens
  siRNA target sequence for SDCCAG1 (NM_004713.2,541-559).
ctagagctgctgaaccttt

SEQ ID NO: 332763 - DNA, 19 bp, Homo sapiens
  siRNA target sequence for SDCCAG1 (NM_004713.2,549-567).
gctgaacctttgcttactt

SEQ ID NO: 332764 - DNA, 19 bp, Homo sapiens
  siRNA target sequence for SDCCAG1 (NM_004713.2,596-614).
cgcacctaagggtgaacta

SEQ ID NO: 332765 - DNA, 19 bp, Homo sapiens
  siRNA target sequence for SDCCAG1 (NM_004713.2,598-616).
cacctaagggtgaactact

SEQ ID NO: 332766 - DNA, 19 bp, Homo sapiens
  siRNA target sequence for SDCCAG1 (NM_004713.2,644-662).
ctatggaccagctctcatt

SEQ ID NO: 332767 - DNA, 19 bp, Homo sapiens
  siRNA target sequence for SDCCAG1 (NM_004713.2,659-677).
cattgaacactgtctttta

SEQ ID NO: 332768 - DNA, 19 bp, Homo sapiens
  siRNA target sequence for SDCCAG1 (NM_004713.2,684-702).
ggattctcgggtaatgtca

SEQ ID NO: 332769 - DNA, 19 bp, Homo sapiens
  siRNA target sequence for SDCCAG1 (NM_004713.2,685-703).
gattctcgggtaatgtcaa

SEQ ID NO: 332770 - DNA, 19 bp, Homo sapiens
  siRNA target sequence for SDCCAG1 (NM_004713.2,796-814).
gtgggaagggatatatcat

SEQ ID NO: 332771 - DNA, 19 bp, Homo sapiens
  siRNA target sequence for SDCCAG1 (NM_004713.2,799-817).
ggaagggatatatcattca

SEQ ID NO: 332772 - DNA, 19 bp, Homo sapiens
  siRNA target sequence for SDCCAG1 (NM_004713.2,803-821).
gggatatatcattcagaaa

SEQ ID NO: 332773 - DNA, 19 bp, Homo sapiens
  siRNA target sequence for SDCCAG1 (NM_004713.2,872-890).
gacgtatgaggaatttcat

SEQ ID NO: 332774 - DNA, 19 bp, Homo sapiens
  siRNA target sequence for SDCCAG1 (NM_004713.2,915-933).
caatgtccatatatagaat

SEQ ID NO: 332775 - DNA, 19 bp, Homo sapiens
  siRNA target sequence for SDCCAG1 (NM_004713.2,1157-1175).
ggtagttcgaagtgcttta

SEQ ID NO: 332776 - DNA, 19 bp, Homo sapiens
  siRNA target sequence for SDCCAG1 (NM_004713.2,1161-1179).
gttcgaagtgctttagcta

SEQ ID NO: 332777 - DNA, 19 bp, Homo sapiens
  siRNA target sequence for SDCCAG1 (NM_004713.2,1171-1189).
ctttagctaaccagataga

SEQ ID NO: 332778 - DNA, 19 bp, Homo sapiens
  siRNA target sequence for SDCCAG1 (NM_004713.2,1184-1202).
gatagattggacagaaatt

SEQ ID NO: 332779 - DNA, 19 bp, Homo sapiens
  siRNA target sequence for SDCCAG1 (NM_004713.2,1192-1210).
ggacagaaattgggttaat

SEQ ID NO: 332780 - DNA, 19 bp, Homo sapiens
  siRNA target sequence for SDCCAG1 (NM_004713.2,1193-1211).
gacagaaattgggttaatt

SEQ ID NO: 332781 - DNA, 19 bp, Homo sapiens
  siRNA target sequence for SDCCAG1 (NM_004713.2,1197-1215).
gaaattgggttaattgtga

SEQ ID NO: 332782 - DNA, 19 bp, Homo sapiens
  siRNA target sequence for SDCCAG1 (NM_004713.2,1269-1287).
ctacaaacaaaccatgtta

SEQ ID NO: 332783 - DNA, 19 bp, Homo sapiens
  siRNA target sequence for SDCCAG1 (NM_004713.2,1296-1314).
ctaagaaatccatacttgt

SEQ ID NO: 332784 - DNA, 19 bp, Homo sapiens
  siRNA target sequence for SDCCAG1 (NM_004713.2,1347-1365).
gacgtcaatgttgagaaaa

SEQ ID NO: 332785 - DNA, 19 bp, Homo sapiens
  siRNA target sequence for SDCCAG1 (NM_004713.2,1349-1367).
cgtcaatgttgagaaaaat

SEQ ID NO: 332786 - DNA, 19 bp, Homo sapiens
  siRNA target sequence for SDCCAG1 (NM_004713.2,1439-1457).
gcccttacttgtagatgtt

SEQ ID NO: 332787 - DNA, 19 bp, Homo sapiens
  siRNA target sequence for SDCCAG1 (NM_004713.2,1441-1459).
ccttacttgtagatgttga

SEQ ID NO: 332788 - DNA, 19 bp, Homo sapiens
  siRNA target sequence for SDCCAG1 (NM_004713.2,1442-1460).
cttacttgtagatgttgat

SEQ ID NO: 332789 - DNA, 19 bp, Homo sapiens
  siRNA target sequence for SDCCAG1 (NM_004713.2,1480-1498).
ccaatgccaaaaagtatta

SEQ ID NO: 332790 - DNA, 19 bp, Homo sapiens
  siRNA target sequence for SDCCAG1 (NM_004713.2,1508-1526).
gagatatgctgctaagaaa

SEQ ID NO: 332791 - DNA, 19 bp, Homo sapiens
  siRNA target sequence for SDCCAG1 (NM_004713.2,1672-1690).
gctcagagaactatctaat

SEQ ID NO: 332792 - DNA, 19 bp, Homo sapiens
  siRNA target sequence for SDCCAG1 (NM_004713.2,1675-1693).
cagagaactatctaattat

SEQ ID NO: 332793 - DNA, 19 bp, Homo sapiens
  siRNA target sequence for SDCCAG1 (NM_004713.2,1699-1717).
gacgagatcagcaacagaa

SEQ ID NO: 332794 - DNA, 19 bp, Homo sapiens
  siRNA target sequence for SDCCAG1 (NM_004713.2,1709-1727).
gcaacagaatgaaataatt

SEQ ID NO: 332795 - DNA, 19 bp, Homo sapiens
  siRNA target sequence for SDCCAG1 (NM_004713.2,1739-1757).
cttgacaccaggagacatt

SEQ ID NO: 332796 - DNA, 19 bp, Homo sapiens
  siRNA target sequence for SDCCAG1 (NM_004713.2,1747-1765).
caggagacatttatgtaca

SEQ ID NO: 332797 - DNA, 19 bp, Homo sapiens
  siRNA target sequence for SDCCAG1 (NM_004713.2,1849-1867).
gcacaatggcactttgcta

SEQ ID NO: 332798 - DNA, 19 bp, Homo sapiens
  siRNA target sequence for SDCCAG1 (NM_004713.2,1876-1894).
cttgggatgcacgagttat

SEQ ID NO: 332799 - DNA, 19 bp, Homo sapiens
  siRNA target sequence for SDCCAG1 (NM_004713.2,1880-1898).
ggatgcacgagttatcact

SEQ ID NO: 332800 - DNA, 19 bp, Homo sapiens
  siRNA target sequence for SDCCAG1 (NM_004713.2,1881-1899).
gatgcacgagttatcacta

SEQ ID NO: 332801 - DNA, 19 bp, Homo sapiens
  siRNA target sequence for SDCCAG1 (NM_004713.2,1906-1924).
ggtgggtgtaccatcatca

SEQ ID NO: 332802 - DNA, 19 bp, Homo sapiens
  siRNA target sequence for SDCCAG1 (NM_004713.2,1916-1934).
ccatcatcaggtatctaaa

SEQ ID NO: 332803 - DNA, 19 bp, Homo sapiens
  siRNA target sequence for SDCCAG1 (NM_004713.2,1938-1956).
gcaccaactggagaatatt

SEQ ID NO: 332804 - DNA, 19 bp, Homo sapiens
  siRNA target sequence for SDCCAG1 (NM_004713.2,1941-1959).
ccaactggagaatatttga

SEQ ID NO: 332805 - DNA, 19 bp, Homo sapiens
  siRNA target sequence for SDCCAG1 (NM_004713.2,2013-2031).
ctaatgatggggtttagct

SEQ ID NO: 332806 - DNA, 19 bp, Homo sapiens
  siRNA target sequence for SDCCAG1 (NM_004713.2,2042-2060).
ggtagatgagtcttgtgtt

SEQ ID NO: 332807 - DNA, 19 bp, Homo sapiens
  siRNA target sequence for SDCCAG1 (NM_004713.2,2070-2088).
cagggtgaacgaaaagtca

SEQ ID NO: 332808 - DNA, 19 bp, Homo sapiens
  siRNA target sequence for SDCCAG1 (NM_004713.2,2108-2126).
ggagacactggcaagttgt

SEQ ID NO: 332809 - DNA, 19 bp, Homo sapiens
  siRNA target sequence for SDCCAG1 (NM_004713.2,2117-2135).
ggcaagttgtacaagtgaa

SEQ ID NO: 332810 - DNA, 19 bp, Homo sapiens
  siRNA target sequence for SDCCAG1 (NM_004713.2,2122-2140).
gttgtacaagtgaactcat

SEQ ID NO: 332811 - DNA, 19 bp, Homo sapiens
  siRNA target sequence for SDCCAG1 (NM_004713.2,2128-2146).
caagtgaactcatatcaga

SEQ ID NO: 332812 - DNA, 19 bp, Homo sapiens
  siRNA target sequence for SDCCAG1 (NM_004713.2,2238-2256).
gttgaccaagaggatatca

SEQ ID NO: 332813 - DNA, 19 bp, Homo sapiens
  siRNA target sequence for SDCCAG1 (NM_004713.2,2380-2398).
gggaagagacattaaatta

SEQ ID NO: 332814 - DNA, 19 bp, Homo sapiens
  siRNA target sequence for SDCCAG1 (NM_004713.2,2400-2418).
cctgatactaccattgact

SEQ ID NO: 332815 - DNA, 19 bp, Homo sapiens
  siRNA target sequence for SDCCAG1 (NM_004713.2,2401-2419).
ctgatactaccattgactt

SEQ ID NO: 332816 - DNA, 19 bp, Homo sapiens
  siRNA target sequence for SDCCAG1 (NM_004713.2,2482-2500).
ctagtgacagtaaatcaca

SEQ ID NO: 332817 - DNA, 19 bp, Homo sapiens
  siRNA target sequence for SDCCAG1 (NM_004713.2,2560-2578).
gtgactcaggagatttaga

SEQ ID NO: 332818 - DNA, 19 bp, Homo sapiens
  siRNA target sequence for SDCCAG1 (NM_004713.2,2580-2598).
gcgttagagggaaaggata

SEQ ID NO: 332819 - DNA, 19 bp, Homo sapiens
  siRNA target sequence for SDCCAG1 (NM_004713.2,2581-2599).
cgttagagggaaaggataa

SEQ ID NO: 332820 - DNA, 19 bp, Homo sapiens
  siRNA target sequence for SDCCAG1 (NM_004713.2,2614-2632).
ctgtacacattgaaactca

SEQ ID NO: 332821 - DNA, 19 bp, Homo sapiens
  siRNA target sequence for SDCCAG1 (NM_004713.2,2656-2674).
cggctgtgcagccaatgaa

SEQ ID NO: 332822 - DNA, 19 bp, Homo sapiens
  siRNA target sequence for SDCCAG1 (NM_004713.2,2657-2675).
ggctgtgcagccaatgaaa

SEQ ID NO: 332823 - DNA, 19 bp, Homo sapiens
  siRNA target sequence for SDCCAG1 (NM_004713.2,2730-2748).
gaagaagaccgtgaactta

SEQ ID NO: 332824 - DNA, 19 bp, Homo sapiens
  siRNA target sequence for SDCCAG1 (NM_004713.2,2733-2751).
gaagaccgtgaacttatca

SEQ ID NO: 332825 - DNA, 19 bp, Homo sapiens
  siRNA target sequence for SDCCAG1 (NM_004713.2,2736-2754).
gaccgtgaacttatcatga

SEQ ID NO: 332826 - DNA, 19 bp, Homo sapiens
  siRNA target sequence for SDCCAG1 (NM_004713.2,2739-2757).
cgtgaacttatcatgaagt

SEQ ID NO: 332827 - DNA, 19 bp, Homo sapiens
  siRNA target sequence for SDCCAG1 (NM_004713.2,2867-2885).
gagggtctctgacaacatt

SEQ ID NO: 332828 - DNA, 19 bp, Homo sapiens
  siRNA target sequence for SDCCAG1 (NM_004713.2,2869-2887).
gggtctctgacaacattaa

SEQ ID NO: 332829 - DNA, 19 bp, Homo sapiens
  siRNA target sequence for SDCCAG1 (NM_004713.2,2896-2914).
ctccgttccttgaggttat

SEQ ID NO: 332830 - DNA, 19 bp, Homo sapiens
  siRNA target sequence for SDCCAG1 (NM_004713.2,2898-2916).
ccgttccttgaggttataa

SEQ ID NO: 332831 - DNA, 19 bp, Homo sapiens
  siRNA target sequence for SDCCAG1 (NM_004713.2,2900-2918).
gttccttgaggttataact

SEQ ID NO: 332832 - DNA, 19 bp, Homo sapiens
  siRNA target sequence for SDCCAG1 (NM_004713.2,2903-2921).
ccttgaggttataactcat

SEQ ID NO: 332833 - DNA, 19 bp, Homo sapiens
  siRNA target sequence for SDCCAG1 (NM_004713.2,2997-3015).
gaaaacctatttgattctt

SEQ ID NO: 332834 - DNA, 19 bp, Homo sapiens
  siRNA target sequence for SDCCAG1 (NM_004713.2,3045-3063).
ctactgtttgccattccaa

SEQ ID NO: 332835 - DNA, 19 bp, Homo sapiens
  siRNA target sequence for SDCCAG1 (NM_004713.2,3072-3090).
ccttacaccaccatgacaa

SEQ ID NO: 332836 - DNA, 19 bp, Homo sapiens
  siRNA target sequence for SDCCAG1 (NM_004713.2,3083-3101).
catgacaaactacaaatat

SEQ ID NO: 332837 - DNA, 19 bp, Homo sapiens
  siRNA target sequence for SDCCAG1 (NM_004713.2,3151-3169).
cagccttgaatagtttcat

SEQ ID NO: 332838 - DNA, 19 bp, Homo sapiens
  siRNA target sequence for CPR8 (NM_004748.2,230-248).
cagtgacagtgattcatct

SEQ ID NO: 332839 - DNA, 19 bp, Homo sapiens
  siRNA target sequence for CPR8 (NM_004748.2,276-294).
gggtcagatatagaaatgt

SEQ ID NO: 332840 - DNA, 19 bp, Homo sapiens
  siRNA target sequence for CPR8 (NM_004748.2,332-350).
cccagaatgttcatcttta

SEQ ID NO: 332841 - DNA, 19 bp, Homo sapiens
  siRNA target sequence for CPR8 (NM_004748.2,486-504).
cccgaagacagtatctata

SEQ ID NO: 332842 - DNA, 19 bp, Homo sapiens
  siRNA target sequence for CPR8 (NM_004748.2,487-505).
ccgaagacagtatctatat

SEQ ID NO: 332843 - DNA, 19 bp, Homo sapiens
  siRNA target sequence for CPR8 (NM_004748.2,538-556).
cccttgagccacctaagtt

SEQ ID NO: 332844 - DNA, 19 bp, Homo sapiens
  siRNA target sequence for CPR8 (NM_004748.2,632-650).
ctctagcagccagtatact

SEQ ID NO: 332845 - DNA, 19 bp, Homo sapiens
  siRNA target sequence for CPR8 (NM_004748.2,634-652).
ctagcagccagtatacttt

SEQ ID NO: 332846 - DNA, 19 bp, Homo sapiens
  siRNA target sequence for CPR8 (NM_004748.2,653-671).
ctgtcagccagaaactgta

SEQ ID NO: 332847 - DNA, 19 bp, Homo sapiens
  siRNA target sequence for CPR8 (NM_004748.2,681-699).
cagcctagtgacgatgaat

SEQ ID NO: 332848 - DNA, 19 bp, Homo sapiens
  siRNA target sequence for CPR8 (NM_004748.2,683-701).
gcctagtgacgatgaatca

SEQ ID NO: 332849 - DNA, 19 bp, Homo sapiens
  siRNA target sequence for CPR8 (NM_004748.2,684-702).
cctagtgacgatgaatcaa

SEQ ID NO: 332850 - DNA, 19 bp, Homo sapiens
  siRNA target sequence for CPR8 (NM_004748.2,747-765).
cgccgtgctaggaagaaga

SEQ ID NO: 332851 - DNA, 19 bp, Homo sapiens
  siRNA target sequence for CPR8 (NM_004748.2,764-782).
gaccgtttctgcttcagaa

SEQ ID NO: 332852 - DNA, 19 bp, Homo sapiens
  siRNA target sequence for CPR8 (NM_004748.2,791-809).
ccggctagttgctgaacaa

SEQ ID NO: 332853 - DNA, 19 bp, Homo sapiens
  siRNA target sequence for CPR8 (NM_004748.2,794-812).
gctagttgctgaacaagaa

SEQ ID NO: 332854 - DNA, 19 bp, Homo sapiens
  siRNA target sequence for CPR8 (NM_004748.2,819-837).
ccttctaaggagttgagta

SEQ ID NO: 332855 - DNA, 19 bp, Homo sapiens
  siRNA target sequence for CPR8 (NM_004748.2,855-873).
ggtctcaataagtgtgtta

SEQ ID NO: 332856 - DNA, 19 bp, Homo sapiens
  siRNA target sequence for CPR8 (NM_004748.2,876-894).
cttgctttggtgattgcaa

SEQ ID NO: 332857 - DNA, 19 bp, Homo sapiens
  siRNA target sequence for CPR8 (NM_004748.2,902-920).
gggatttggccatttctat

SEQ ID NO: 332858 - DNA, 19 bp, Homo sapiens
  siRNA target sequence for CPR8 (NM_004748.2,911-929).
ccatttctatggcacaatt

SEQ ID NO: 332859 - DNA, 19 bp, Homo sapiens
  siRNA target sequence for CPR8 (NM_004748.2,921-939).
ggcacaattcagattcaga

SEQ ID NO: 332860 - DNA, 19 bp, Homo sapiens
  siRNA target sequence for CPR8 (NM_004748.2,943-961).
gtcaacagttagtcagaaa

SEQ ID NO: 332861 - DNA, 19 bp, Homo sapiens
  siRNA target sequence for CPR8 (NM_004748.2,980-998).
gaatgatatgaaggattat

SEQ ID NO: 332862 - DNA, 19 bp, Homo sapiens
  siRNA target sequence for CPR8 (NM_004748.2,1011-1029).
caacaggaacaagaatctt

SEQ ID NO: 332863 - DNA, 19 bp, Homo sapiens
  siRNA target sequence for CPR8 (NM_004748.2,1020-1038).
caagaatcttttatagatt

SEQ ID NO: 332864 - DNA, 19 bp, Homo sapiens
  siRNA target sequence for CPR8 (NM_004748.2,1023-1041).
gaatcttttatagattata

SEQ ID NO: 332865 - DNA, 19 bp, Homo sapiens
  siRNA target sequence for CPR8 (NM_004748.2,1066-1084).
ggtgttggacacttactga

SEQ ID NO: 332866 - DNA, 19 bp, Homo sapiens
  siRNA target sequence for CPR8 (NM_004748.2,1067-1085).
gtgttggacacttactgaa

SEQ ID NO: 332867 - DNA, 19 bp, Homo sapiens
  siRNA target sequence for CPR8 (NM_004748.2,1122-1140).
cttgctacagaaaatcagt

SEQ ID NO: 332868 - DNA, 19 bp, Homo sapiens
  siRNA target sequence for CPR8 (NM_004748.2,1125-1143).
gctacagaaaatcagtatt

SEQ ID NO: 332869 - DNA, 19 bp, Homo sapiens
  siRNA target sequence for CPR8 (NM_004748.2,1202-1220).
caaactaagagaacagatt

SEQ ID NO: 332870 - DNA, 19 bp, Homo sapiens
  siRNA target sequence for CPR8 (NM_004748.2,1246-1264).
gtactgaattagttaaaga

SEQ ID NO: 332871 - DNA, 19 bp, Homo sapiens
  siRNA target sequence for CPR8 (NM_004748.2,1373-1391).
ggagagagaacgactagta

SEQ ID NO: 332872 - DNA, 19 bp, Homo sapiens
  siRNA target sequence for CPR8 (NM_004748.2,1374-1392).
gagagagaacgactagtaa

SEQ ID NO: 332873 - DNA, 19 bp, Homo sapiens
  siRNA target sequence for CPR8 (NM_004748.2,1376-1394).
gagagaacgactagtaact

SEQ ID NO: 332874 - DNA, 19 bp, Homo sapiens
  siRNA target sequence for CPR8 (NM_004748.2,1407-1425).
ggggaactccagcagttaa

SEQ ID NO: 332875 - DNA, 19 bp, Homo sapiens
  siRNA target sequence for CPR8 (NM_004748.2,1489-1507).
caatcttacgggaaagact

SEQ ID NO: 332876 - DNA, 19 bp, Homo sapiens
  siRNA target sequence for CPR8 (NM_004748.2,1535-1553).
cgaacagcagcgttctgat

SEQ ID NO: 332877 - DNA, 19 bp, Homo sapiens
  siRNA target sequence for CPR8 (NM_004748.2,1536-1554).
gaacagcagcgttctgatt

SEQ ID NO: 332878 - DNA, 19 bp, Homo sapiens
  siRNA target sequence for CPR8 (NM_004748.2,1539-1557).
cagcagcgttctgatttgt

SEQ ID NO: 332879 - DNA, 19 bp, Homo sapiens
  siRNA target sequence for CPR8 (NM_004748.2,1549-1567).
ctgatttgtgggaaagatt

SEQ ID NO: 332880 - DNA, 19 bp, Homo sapiens
  siRNA target sequence for CPR8 (NM_004748.2,1558-1576).
gggaaagattgtatgttga

SEQ ID NO: 332881 - DNA, 19 bp, Homo sapiens
  siRNA target sequence for CPR8 (NM_004748.2,1636-1654).
gccacagggctaaaaataa

SEQ ID NO: 332882 - DNA, 19 bp, Homo sapiens
  siRNA target sequence for CPR8 (NM_004748.2,1638-1656).
cacagggctaaaaataagt

SEQ ID NO: 332883 - DNA, 19 bp, Homo sapiens
  siRNA target sequence for CPR8 (NM_004748.2,1642-1660).
gggctaaaaataagtcaaa

SEQ ID NO: 332884 - DNA, 19 bp, Homo sapiens
  siRNA target sequence for CPR8 (NM_004748.2,1721-1739).
gtttgtaaggcatcataaa

SEQ ID NO: 332885 - DNA, 19 bp, Homo sapiens
  siRNA target sequence for CPR8 (NM_004748.2,1827-1845).
gataccaccaagaatatct

SEQ ID NO: 332886 - DNA, 19 bp, Homo sapiens
  siRNA target sequence for CPR8 (NM_004748.2,1934-1952).
gtataaggcacctacagaa

SEQ ID NO: 332887 - DNA, 19 bp, Homo sapiens
  siRNA target sequence for CPR8 (NM_004748.2,2045-2063).
cagtcctgggcatgattgt

SEQ ID NO: 332888 - DNA, 19 bp, Homo sapiens
  siRNA target sequence for CPR8 (NM_004748.2,2090-2108).
ggcttgttctggtgtattt

SEQ ID NO: 332889 - DNA, 19 bp, Homo sapiens
  siRNA target sequence for CPR8 (NM_004748.2,2092-2110).
cttgttctggtgtatttga

SEQ ID NO: 332890 - DNA, 19 bp, Homo sapiens
  siRNA target sequence for CPR8 (NM_004748.2,2124-2142).
gagtccatgagccttttta

SEQ ID NO: 332891 - DNA, 19 bp, Homo sapiens
  siRNA target sequence for CPR8 (NM_004748.2,2157-2175).
cctataaggatggatgaat

SEQ ID NO: 332892 - DNA, 19 bp, Homo sapiens
  siRNA target sequence for CPR8 (NM_004748.2,2158-2176).
ctataaggatggatgaatt

SEQ ID NO: 332893 - DNA, 19 bp, Homo sapiens
  siRNA target sequence for CPR8 (NM_004748.2,2168-2186).
ggatgaatttagacagata

SEQ ID NO: 332894 - DNA, 19 bp, Homo sapiens
  siRNA target sequence for CPR8 (NM_004748.2,2194-2212).
ggtacatgttaaaagaact

SEQ ID NO: 332895 - DNA, 19 bp, Homo sapiens
  siRNA target sequence for CPR8 (NM_004748.2,2230-2248).
ggaacgaacttgatcagtt

SEQ ID NO: 332896 - DNA, 19 bp, Homo sapiens
  siRNA target sequence for CPR8 (NM_004748.2,2238-2256).
cttgatcagttcatcaata

SEQ ID NO: 332897 - DNA, 19 bp, Homo sapiens
  siRNA target sequence for CPR8 (NM_004748.2,2249-2267).
catcaataagtttttccta

SEQ ID NO: 332898 - DNA, 19 bp, Homo sapiens
  siRNA target sequence for CPR8 (NM_004748.2,2264-2282).
cctaaacggtgtctttata

SEQ ID NO: 332899 - DNA, 19 bp, Homo sapiens
  siRNA target sequence for CPR8 (NM_004748.2,2270-2288).
cggtgtctttatacatgat

SEQ ID NO: 332900 - DNA, 19 bp, Homo sapiens
  siRNA target sequence for CPR8 (NM_004748.2,2335-2353).
gaaacatgaaggaatatga

SEQ ID NO: 332901 - DNA, 19 bp, Homo sapiens
  siRNA target sequence for CPR8 (NM_004748.2,2339-2357).
catgaaggaatatgaagta

SEQ ID NO: 332902 - DNA, 19 bp, Homo sapiens
  siRNA target sequence for CPR8 (NM_004748.2,2345-2363).
ggaatatgaagtagataat

SEQ ID NO: 332903 - DNA, 19 bp, Homo sapiens
  siRNA target sequence for CPR8 (NM_004748.2,2378-2396).
gaagttggatgaatatata

SEQ ID NO: 332904 - DNA, 19 bp, Homo sapiens
  siRNA target sequence for CPR8 (NM_004748.2,2405-2423).
cttctttggtcacactttt

SEQ ID NO: 332905 - DNA, 19 bp, Homo sapiens
  siRNA target sequence for CPR8 (NM_004748.2,2436-2454).
ggacccaggtcggtttaca

SEQ ID NO: 332906 - DNA, 19 bp, Homo sapiens
  siRNA target sequence for CPR8 (NM_004748.2,2437-2455).
gacccaggtcggtttacat

SEQ ID NO: 332907 - DNA, 19 bp, Homo sapiens
  siRNA target sequence for CPR8 (NM_004748.2,2439-2457).
cccaggtcggtttacataa

SEQ ID NO: 332908 - DNA, 19 bp, Homo sapiens
  siRNA target sequence for CPR8 (NM_004748.2,2440-2458).
ccaggtcggtttacataaa

SEQ ID NO: 332909 - DNA, 19 bp, Homo sapiens
  siRNA target sequence for CPR8 (NM_004748.2,2441-2459).
caggtcggtttacataaaa

SEQ ID NO: 332910 - DNA, 19 bp, Homo sapiens
  siRNA target sequence for CPR8 (NM_004748.2,2460-2478).
ccgtgtcattacagtagtt

SEQ ID NO: 332911 - DNA, 19 bp, Homo sapiens
  siRNA target sequence for CPR2 (NM_004749.2,220-238).
gcctgggtagcccataaga

SEQ ID NO: 332912 - DNA, 19 bp, Homo sapiens
  siRNA target sequence for CPR2 (NM_004749.2,222-240).
ctgggtagcccataagact

SEQ ID NO: 332913 - DNA, 19 bp, Homo sapiens
  siRNA target sequence for CPR2 (NM_004749.2,417-435).
caatcaagcagcaatggta

SEQ ID NO: 332914 - DNA, 19 bp, Homo sapiens
  siRNA target sequence for CPR2 (NM_004749.2,765-783).
gcgttggacagaaattgaa

SEQ ID NO: 332915 - DNA, 19 bp, Homo sapiens
  siRNA target sequence for CPR2 (NM_004749.2,784-802).
gattcccacacattagtga

SEQ ID NO: 332916 - DNA, 19 bp, Homo sapiens
  siRNA target sequence for CPR2 (NM_004749.2,794-812).
cattagtgaccgtcatgat

SEQ ID NO: 332917 - DNA, 19 bp, Homo sapiens
  siRNA target sequence for CPR2 (NM_004749.2,826-844).
ctctcggagccactaatga

SEQ ID NO: 332918 - DNA, 19 bp, Homo sapiens
  siRNA target sequence for CPR2 (NM_004749.2,1250-1268).
cttttgcgcgtctgaactt

SEQ ID NO: 332919 - DNA, 19 bp, Homo sapiens
  siRNA target sequence for CPR2 (NM_004749.2,1857-1875).
cttgctgggtcgctttgtt

SEQ ID NO: 332920 - DNA, 19 bp, Homo sapiens
  siRNA target sequence for CPR2 (NM_004749.2,1918-1936).
gacgtcccattctatgagt

SEQ ID NO: 332921 - DNA, 19 bp, Homo sapiens
  siRNA target sequence for PIWIL1 (NM_004764.2,306-324).
ggaggtcgtcgtagagatt

SEQ ID NO: 332922 - DNA, 19 bp, Homo sapiens
  siRNA target sequence for PIWIL1 (NM_004764.2,307-325).
gaggtcgtcgtagagattt

SEQ ID NO: 332923 - DNA, 19 bp, Homo sapiens
  siRNA target sequence for PIWIL1 (NM_004764.2,310-328).
gtcgtcgtagagattttca

SEQ ID NO: 332924 - DNA, 19 bp, Homo sapiens
  siRNA target sequence for PIWIL1 (NM_004764.2,313-331).
gtcgtagagattttcatga

SEQ ID NO: 332925 - DNA, 19 bp, Homo sapiens
  siRNA target sequence for PIWIL1 (NM_004764.2,316-334).
gtagagattttcatgatct

SEQ ID NO: 332926 - DNA, 19 bp, Homo sapiens
  siRNA target sequence for PIWIL1 (NM_004764.2,327-345).
catgatcttggtgtgaata

SEQ ID NO: 332927 - DNA, 19 bp, Homo sapiens
  siRNA target sequence for PIWIL1 (NM_004764.2,330-348).
gatcttggtgtgaatacaa

SEQ ID NO: 332928 - DNA, 19 bp, Homo sapiens
  siRNA target sequence for PIWIL1 (NM_004764.2,353-371).
gaacctagaccatgttaaa

SEQ ID NO: 332929 - DNA, 19 bp, Homo sapiens
  siRNA target sequence for PIWIL1 (NM_004764.2,360-378).
gaccatgttaaagaatcaa

SEQ ID NO: 332930 - DNA, 19 bp, Homo sapiens
  siRNA target sequence for PIWIL1 (NM_004764.2,385-403).
gttcttcaggcattatagt

SEQ ID NO: 332931 - DNA, 19 bp, Homo sapiens
  siRNA target sequence for PIWIL1 (NM_004764.2,393-411).
ggcattatagtaaggttaa

SEQ ID NO: 332932 - DNA, 19 bp, Homo sapiens
  siRNA target sequence for PIWIL1 (NM_004764.2,439-457).
gtccccagtgggccttata

SEQ ID NO: 332933 - DNA, 19 bp, Homo sapiens
  siRNA target sequence for PIWIL1 (NM_004764.2,444-462).
cagtgggccttatatcagt

SEQ ID NO: 332934 - DNA, 19 bp, Homo sapiens
  siRNA target sequence for PIWIL1 (NM_004764.2,459-477).
cagtatcacattgactata

SEQ ID NO: 332935 - DNA, 19 bp, Homo sapiens
  siRNA target sequence for PIWIL1 (NM_004764.2,501-519).
ctccgttcagctcttcttt

SEQ ID NO: 332936 - DNA, 19 bp, Homo sapiens
  siRNA target sequence for PIWIL1 (NM_004764.2,525-543).
cacgaagatctaattggaa

SEQ ID NO: 332937 - DNA, 19 bp, Homo sapiens
  siRNA target sequence for PIWIL1 (NM_004764.2,558-576).
gatggaacgatattatttt

SEQ ID NO: 332938 - DNA, 19 bp, Homo sapiens
  siRNA target sequence for PIWIL1 (NM_004764.2,599-617).
ggttactgaagtttttagt

SEQ ID NO: 332939 - DNA, 19 bp, Homo sapiens
  siRNA target sequence for PIWIL1 (NM_004764.2,600-618).
gttactgaagtttttagta

SEQ ID NO: 332940 - DNA, 19 bp, Homo sapiens
  siRNA target sequence for PIWIL1 (NM_004764.2,639-657).
gtgaggataacgatcactt

SEQ ID NO: 332941 - DNA, 19 bp, Homo sapiens
  siRNA target sequence for PIWIL1 (NM_004764.2,644-662).
gataacgatcactttaaca

SEQ ID NO: 332942 - DNA, 19 bp, Homo sapiens
  siRNA target sequence for PIWIL1 (NM_004764.2,649-667).
cgatcactttaacaaatga

SEQ ID NO: 332943 - DNA, 19 bp, Homo sapiens
  siRNA target sequence for PIWIL1 (NM_004764.2,675-693).
cctacatcaccaacttgtt

SEQ ID NO: 332944 - DNA, 19 bp, Homo sapiens
  siRNA target sequence for PIWIL1 (NM_004764.2,688-706).
cttgtttgcagttctataa

SEQ ID NO: 332945 - DNA, 19 bp, Homo sapiens
  siRNA target sequence for PIWIL1 (NM_004764.2,826-844).
ctacttccatccttcagta

SEQ ID NO: 332946 - DNA, 19 bp, Homo sapiens
  siRNA target sequence for PIWIL1 (NM_004764.2,866-884).
cactgacgttagccataaa

SEQ ID NO: 332947 - DNA, 19 bp, Homo sapiens
  siRNA target sequence for PIWIL1 (NM_004764.2,868-886).
ctgacgttagccataaagt

SEQ ID NO: 332948 - DNA, 19 bp, Homo sapiens
  siRNA target sequence for PIWIL1 (NM_004764.2,888-906).
cttcgaagtgagactgttt

SEQ ID NO: 332949 - DNA, 19 bp, Homo sapiens
  siRNA target sequence for PIWIL1 (NM_004764.2,892-910).
gaagtgagactgttttgga

SEQ ID NO: 332950 - DNA, 19 bp, Homo sapiens
  siRNA target sequence for PIWIL1 (NM_004764.2,903-921).
gttttggatttcatgttca

SEQ ID NO: 332951 - DNA, 19 bp, Homo sapiens
  siRNA target sequence for PIWIL1 (NM_004764.2,960-978).
caagtttccaaagaactaa

SEQ ID NO: 332952 - DNA, 19 bp, Homo sapiens
  siRNA target sequence for PIWIL1 (NM_004764.2,990-1008).
gttcttaccaagtataaca

SEQ ID NO: 332953 - DNA, 19 bp, Homo sapiens
  siRNA target sequence for PIWIL1 (NM_004764.2,1229-1247).
ctatcttacaggtctaact

SEQ ID NO: 332954 - DNA, 19 bp, Homo sapiens
  siRNA target sequence for PIWIL1 (NM_004764.2,1233-1251).
cttacaggtctaactgata

SEQ ID NO: 332955 - DNA, 19 bp, Homo sapiens
  siRNA target sequence for PIWIL1 (NM_004764.2,1281-1299).
gacttagccgttcatacaa

SEQ ID NO: 332956 - DNA, 19 bp, Homo sapiens
  siRNA target sequence for PIWIL1 (NM_004764.2,1283-1301).
cttagccgttcatacaaga

SEQ ID NO: 332957 - DNA, 19 bp, Homo sapiens
  siRNA target sequence for PIWIL1 (NM_004764.2,1287-1305).
gccgttcatacaagactaa

SEQ ID NO: 332958 - DNA, 19 bp, Homo sapiens
  siRNA target sequence for PIWIL1 (NM_004764.2,1289-1307).
cgttcatacaagactaact

SEQ ID NO: 332959 - DNA, 19 bp, Homo sapiens
  siRNA target sequence for PIWIL1 (NM_004764.2,1329-1347).
gtgggacgactcattgatt

SEQ ID NO: 332960 - DNA, 19 bp, Homo sapiens
  siRNA target sequence for PIWIL1 (NM_004764.2,1332-1350).
ggacgactcattgattaca

SEQ ID NO: 332961 - DNA, 19 bp, Homo sapiens
  siRNA target sequence for PIWIL1 (NM_004764.2,1336-1354).
gactcattgattacattca

SEQ ID NO: 332962 - DNA, 19 bp, Homo sapiens
  siRNA target sequence for PIWIL1 (NM_004764.2,1519-1537).
gtgcaccattaattagtgt

SEQ ID NO: 332963 - DNA, 19 bp, Homo sapiens
  siRNA target sequence for PIWIL1 (NM_004764.2,1521-1539).
gcaccattaattagtgtta

SEQ ID NO: 332964 - DNA, 19 bp, Homo sapiens
  siRNA target sequence for PIWIL1 (NM_004764.2,1522-1540).
caccattaattagtgttaa

SEQ ID NO: 332965 - DNA, 19 bp, Homo sapiens
  siRNA target sequence for PIWIL1 (NM_004764.2,1548-1566).
gataactggctgttgatct

SEQ ID NO: 332966 - DNA, 19 bp, Homo sapiens
  siRNA target sequence for PIWIL1 (NM_004764.2,1562-1580).
gatctatacgcgaagaaat

SEQ ID NO: 332967 - DNA, 19 bp, Homo sapiens
  siRNA target sequence for PIWIL1 (NM_004764.2,1565-1583).
ctatacgcgaagaaattat

SEQ ID NO: 332968 - DNA, 19 bp, Homo sapiens
  siRNA target sequence for PIWIL1 (NM_004764.2,1676-1694).
cagaactgaagcctactta

SEQ ID NO: 332969 - DNA, 19 bp, Homo sapiens
  siRNA target sequence for PIWIL1 (NM_004764.2,1696-1714).
gagtcttacagcaaaaggt

SEQ ID NO: 332970 - DNA, 19 bp, Homo sapiens
  siRNA target sequence for PIWIL1 (NM_004764.2,1734-1752).
gttgtctgtctgttgtcaa

SEQ ID NO: 332971 - DNA, 19 bp, Homo sapiens
  siRNA target sequence for PIWIL1 (NM_004764.2,1737-1755).
gtctgtctgttgtcaagta

SEQ ID NO: 332972 - DNA, 19 bp, Homo sapiens
  siRNA target sequence for PIWIL1 (NM_004764.2,1739-1757).
ctgtctgttgtcaagtaat

SEQ ID NO: 332973 - DNA, 19 bp, Homo sapiens
  siRNA target sequence for PIWIL1 (NM_004764.2,1753-1771).
gtaatcggaaggacaaata

SEQ ID NO: 332974 - DNA, 19 bp, Homo sapiens
  siRNA target sequence for PIWIL1 (NM_004764.2,1763-1781).
ggacaaatacgatgctatt

SEQ ID NO: 332975 - DNA, 19 bp, Homo sapiens
  siRNA target sequence for PIWIL1 (NM_004764.2,1933-1951).
ccctgaagctcgtgatgat

SEQ ID NO: 332976 - DNA, 19 bp, Homo sapiens
  siRNA target sequence for PIWIL1 (NM_004764.2,1991-2009).
gaggtcaatcgcaggattt

SEQ ID NO: 332977 - DNA, 19 bp, Homo sapiens
  siRNA target sequence for PIWIL1 (NM_004764.2,1993-2011).
ggtcaatcgcaggatttgt

SEQ ID NO: 332978 - DNA, 19 bp, Homo sapiens
  siRNA target sequence for PIWIL1 (NM_004764.2,2041-2059).
ggttctcacgctgcatatt

SEQ ID NO: 332979 - DNA, 19 bp, Homo sapiens
  siRNA target sequence for PIWIL1 (NM_004764.2,2125-2143).
ggaatagctgcaatgagta

SEQ ID NO: 332980 - DNA, 19 bp, Homo sapiens
  siRNA target sequence for PIWIL1 (NM_004764.2,2181-2199).
ggagacggccagctgaaaa

SEQ ID NO: 332981 - DNA, 19 bp, Homo sapiens
  siRNA target sequence for PIWIL1 (NM_004764.2,2210-2228).
ctacgaagtgccacagttt

SEQ ID NO: 332982 - DNA, 19 bp, Homo sapiens
  siRNA target sequence for PIWIL1 (NM_004764.2,2221-2239).
cacagtttttggattgtct

SEQ ID NO: 332983 - DNA, 19 bp, Homo sapiens
  siRNA target sequence for PIWIL1 (NM_004764.2,2245-2263).
ccattggtagaggttacaa

SEQ ID NO: 332984 - DNA, 19 bp, Homo sapiens
  siRNA target sequence for PIWIL1 (NM_004764.2,2264-2282).
ccctagactaacggtaatt

SEQ ID NO: 332985 - DNA, 19 bp, Homo sapiens
  siRNA target sequence for PIWIL1 (NM_004764.2,2266-2284).
ctagactaacggtaattgt

SEQ ID NO: 332986 - DNA, 19 bp, Homo sapiens
  siRNA target sequence for PIWIL1 (NM_004764.2,2275-2293).
cggtaattgtggtgaagaa

SEQ ID NO: 332987 - DNA, 19 bp, Homo sapiens
  siRNA target sequence for PIWIL1 (NM_004764.2,2300-2318).
gaacaccagattttttgct

SEQ ID NO: 332988 - DNA, 19 bp, Homo sapiens
  siRNA target sequence for PIWIL1 (NM_004764.2,2418-2436).
gtgagaagtggtagtgttt

SEQ ID NO: 332989 - DNA, 19 bp, Homo sapiens
  siRNA target sequence for PIWIL1 (NM_004764.2,2437-2455).
ctcccacacattacaatgt

SEQ ID NO: 332990 - DNA, 19 bp, Homo sapiens
  siRNA target sequence for PIWIL1 (NM_004764.2,2507-2525).
caagctgtgccacatctat

SEQ ID NO: 332991 - DNA, 19 bp, Homo sapiens
  siRNA target sequence for PIWIL1 (NM_004764.2,2511-2529).
ctgtgccacatctattaca

SEQ ID NO: 332992 - DNA, 19 bp, Homo sapiens
  siRNA target sequence for PIWIL1 (NM_004764.2,2592-2610).
gttggccagagtattcaca

SEQ ID NO: 332993 - DNA, 19 bp, Homo sapiens
  siRNA target sequence for PIWIL1 (NM_004764.2,2607-2625).
cacagagagccaaatctgt

SEQ ID NO: 332994 - DNA, 19 bp, Homo sapiens
  siRNA target sequence for PIWIL1 (NM_004764.2,2628-2646).
ctgtcaaaccgcctttact

SEQ ID NO: 332995 - DNA, 19 bp, Homo sapiens
  siRNA target sequence for TAO1 (NM_004783.1,487-505).
ctctgacctccgggaaatt

SEQ ID NO: 332996 - DNA, 19 bp, Homo sapiens
  siRNA target sequence for TAO1 (NM_004783.1,516-534).
gctttggagccgtatactt

SEQ ID NO: 332997 - DNA, 19 bp, Homo sapiens
  siRNA target sequence for TAO1 (NM_004783.1,517-535).
ctttggagccgtatacttt

SEQ ID NO: 332998 - DNA, 19 bp, Homo sapiens
  siRNA target sequence for TAO1 (NM_004783.1,540-558).
gggatgtccggaatagtga

SEQ ID NO: 332999 - DNA, 19 bp, Homo sapiens
  siRNA target sequence for TAO1 (NM_004783.1,629-647).
gaggtgcggttcttacaga

SEQ ID NO: 333000 - DNA, 19 bp, Homo sapiens
  siRNA target sequence for TAO1 (NM_004783.1,656-674).
catcccaacaccattcagt

SEQ ID NO: 333001 - DNA, 19 bp, Homo sapiens
  siRNA target sequence for TAO1 (NM_004783.1,702-720).
cggcttggctggtaatgga

SEQ ID NO: 333002 - DNA, 19 bp, Homo sapiens
  siRNA target sequence for TAO1 (NM_004783.1,735-753).
cagcttctgaccttctaga

SEQ ID NO: 333003 - DNA, 19 bp, Homo sapiens
  siRNA target sequence for TAO1 (NM_004783.1,882-900).
cagagccagggttagtgaa

SEQ ID NO: 333004 - DNA, 19 bp, Homo sapiens
  siRNA target sequence for TAO1 (NM_004783.1,1064-1082).
cggaaaccaccgctcttta

SEQ ID NO: 333005 - DNA, 19 bp, Homo sapiens
  siRNA target sequence for TAO1 (NM_004783.1,1065-1083).
ggaaaccaccgctctttaa

SEQ ID NO: 333006 - DNA, 19 bp, Homo sapiens
  siRNA target sequence for TAO1 (NM_004783.1,1070-1088).
ccaccgctctttaacatga

SEQ ID NO: 333007 - DNA, 19 bp, Homo sapiens
  siRNA target sequence for TAO1 (NM_004783.1,1071-1089).
caccgctctttaacatgaa

SEQ ID NO: 333008 - DNA, 19 bp, Homo sapiens
  siRNA target sequence for TAO1 (NM_004783.1,1146-1164).
gacactggtctgagtactt

SEQ ID NO: 333009 - DNA, 19 bp, Homo sapiens
  siRNA target sequence for TAO1 (NM_004783.1,1155-1173).
ctgagtacttccggaattt

SEQ ID NO: 333010 - DNA, 19 bp, Homo sapiens
  siRNA target sequence for TAO1 (NM_004783.1,1632-1650).
cctctcacagctccattat

SEQ ID NO: 333011 - DNA, 19 bp, Homo sapiens
  siRNA target sequence for TAO1 (NM_004783.1,1663-1681).
gggctctgacaacctatat

SEQ ID NO: 333012 - DNA, 19 bp, Homo sapiens
  siRNA target sequence for TAO1 (NM_004783.1,1665-1683).
gctctgacaacctatatga

SEQ ID NO: 333013 - DNA, 19 bp, Homo sapiens
  siRNA target sequence for TAO1 (NM_004783.1,1666-1684).
ctctgacaacctatatgat

SEQ ID NO: 333014 - DNA, 19 bp, Homo sapiens
  siRNA target sequence for TAO1 (NM_004783.1,2152-2170).
gaagcggacctacaaactt

SEQ ID NO: 333015 - DNA, 19 bp, Homo sapiens
  siRNA target sequence for TAO1 (NM_004783.1,2304-2322).
ggcagcgccagtactttga

SEQ ID NO: 333016 - DNA, 19 bp, Homo sapiens
  siRNA target sequence for TAO1 (NM_004783.1,2620-2638).
gcccaagagcctcaaatct

SEQ ID NO: 333017 - DNA, 19 bp, Homo sapiens
  siRNA target sequence for TAO1 (NM_004783.1,3117-3135).
ccttcgatgcggaaagcat

SEQ ID NO: 333018 - DNA, 19 bp, Homo sapiens
  siRNA target sequence for TAO1 (NM_004783.1,3439-3457).
gggcagtggcagtgagaat

SEQ ID NO: 333019 - DNA, 19 bp, Homo sapiens
  siRNA target sequence for TAO1 (NM_004783.1,3530-3548).
ggttcttcccacttctatt

SEQ ID NO: 333020 - DNA, 19 bp, Homo sapiens
  siRNA target sequence for C9orf61 (NM_004816.2,549-567).
cttaggtgaaggcaagatt

SEQ ID NO: 333021 - DNA, 19 bp, Homo sapiens
  siRNA target sequence for C9orf61 (NM_004816.2,655-673).
gttcaccttctacttaaga

SEQ ID NO: 333022 - DNA, 19 bp, Homo sapiens
  siRNA target sequence for C9orf61 (NM_004816.2,780-798).
cgatgaatcccagatttct

SEQ ID NO: 333023 - DNA, 19 bp, Homo sapiens
  siRNA target sequence for C9orf61 (NM_004816.2,825-843).
catccccgaccctgatgat

SEQ ID NO: 333024 - DNA, 19 bp, Homo sapiens
  siRNA target sequence for C9orf61 (NM_004816.2,830-848).
ccgaccctgatgattttgt

SEQ ID NO: 333025 - DNA, 19 bp, Homo sapiens
  siRNA target sequence for C9orf61 (NM_004816.2,915-933).
gatggttggtcctgatgtt

SEQ ID NO: 333026 - DNA, 19 bp, Homo sapiens
  siRNA target sequence for C9orf61 (NM_004816.2,918-936).
ggttggtcctgatgttatt

SEQ ID NO: 333027 - DNA, 19 bp, Homo sapiens
  siRNA target sequence for C9orf61 (NM_004816.2,951-969).
ctacggagctcgaatcaaa

SEQ ID NO: 333028 - DNA, 19 bp, Homo sapiens
  siRNA target sequence for C9orf61 (NM_004816.2,1120-1138).
caagatggggacattccta

SEQ ID NO: 333029 - DNA, 19 bp, Homo sapiens
  siRNA target sequence for C9orf61 (NM_004816.2,1345-1363).
ctgaggagaggcttgagat

SEQ ID NO: 333030 - DNA, 19 bp, Homo sapiens
  siRNA target sequence for C9orf61 (NM_004816.2,1379-1397).
gcagaccgcggtctttgat

SEQ ID NO: 333031 - DNA, 19 bp, Homo sapiens
  siRNA target sequence for C9orf61 (NM_004816.2,1380-1398).
cagaccgcggtctttgata

SEQ ID NO: 333032 - DNA, 19 bp, Homo sapiens
  siRNA target sequence for C9orf61 (NM_004816.2,1382-1400).
gaccgcggtctttgataga

SEQ ID NO: 333033 - DNA, 19 bp, Homo sapiens
  siRNA target sequence for C9orf61 (NM_004816.2,1384-1402).
ccgcggtctttgatagatt

SEQ ID NO: 333034 - DNA, 19 bp, Homo sapiens
  siRNA target sequence for C9orf61 (NM_004816.2,1385-1403).
cgcggtctttgatagatta

SEQ ID NO: 333035 - DNA, 19 bp, Homo sapiens
  siRNA target sequence for C9orf61 (NM_004816.2,1387-1405).
cggtctttgatagattaca

SEQ ID NO: 333036 - DNA, 19 bp, Homo sapiens
  siRNA target sequence for C9orf61 (NM_004816.2,1388-1406).
ggtctttgatagattacaa

SEQ ID NO: 333037 - DNA, 19 bp, Homo sapiens
  siRNA target sequence for C9orf61 (NM_004816.2,1389-1407).
gtctttgatagattacaaa

SEQ ID NO: 333038 - DNA, 19 bp, Homo sapiens
  siRNA target sequence for C9orf61 (NM_004816.2,1469-1487).
ccccagacatccatgaact

SEQ ID NO: 333039 - DNA, 19 bp, Homo sapiens
  siRNA target sequence for C9orf61 (NM_004816.2,1470-1488).
cccagacatccatgaactt

SEQ ID NO: 333040 - DNA, 19 bp, Homo sapiens
  siRNA target sequence for C9orf61 (NM_004816.2,1472-1490).
cagacatccatgaacttgt

SEQ ID NO: 333041 - DNA, 19 bp, Homo sapiens
  siRNA target sequence for C9orf61 (NM_004816.2,1476-1494).
catccatgaacttgtagaa

SEQ ID NO: 333042 - DNA, 19 bp, Homo sapiens
  siRNA target sequence for C9orf61 (NM_004816.2,1542-1560).
catcacaagtgccagtttt

SEQ ID NO: 333043 - DNA, 19 bp, Homo sapiens
  siRNA target sequence for C9orf61 (NM_004816.2,1545-1563).
cacaagtgccagttttcta

SEQ ID NO: 333044 - DNA, 19 bp, Homo sapiens
  siRNA target sequence for C9orf61 (NM_004816.2,1547-1565).
caagtgccagttttctaga

SEQ ID NO: 333045 - DNA, 19 bp, Homo sapiens
  siRNA target sequence for MAP4K4 (NM_004834.2,61-79).
gaacgactcccctgcaaaa

SEQ ID NO: 333046 - DNA, 19 bp, Homo sapiens
  siRNA target sequence for MAP4K4 (NM_004834.2,64-82).
cgactcccctgcaaaaagt

SEQ ID NO: 333047 - DNA, 19 bp, Homo sapiens
  siRNA target sequence for MAP4K4 (NM_004834.2,111-129).
gggatcctgctgggatttt

SEQ ID NO: 333048 - DNA, 19 bp, Homo sapiens
  siRNA target sequence for MAP4K4 (NM_004834.2,172-190).
ctataagggtcgacatgtt

SEQ ID NO: 333049 - DNA, 19 bp, Homo sapiens
  siRNA target sequence for MAP4K4 (NM_004834.2,202-220).
gttggcagccatcaaagtt

SEQ ID NO: 333050 - DNA, 19 bp, Homo sapiens
  siRNA target sequence for MAP4K4 (NM_004834.2,381-399).
gggctgggtccattacaga

SEQ ID NO: 333051 - DNA, 19 bp, Homo sapiens
  siRNA target sequence for MAP4K4 (NM_004834.2,415-433).
caaagggaacacactcaaa

SEQ ID NO: 333052 - DNA, 19 bp, Homo sapiens
  siRNA target sequence for MAP4K4 (NM_004834.2,437-455).
gactggatcgcttacatct

SEQ ID NO: 333053 - DNA, 19 bp, Homo sapiens
  siRNA target sequence for MAP4K4 (NM_004834.2,469-487).
gaggggactggcacatctt

SEQ ID NO: 333054 - DNA, 19 bp, Homo sapiens
  siRNA target sequence for MAP4K4 (NM_004834.2,471-489).
ggggactggcacatcttca

SEQ ID NO: 333055 - DNA, 19 bp, Homo sapiens
  siRNA target sequence for MAP4K4 (NM_004834.2,474-492).
gactggcacatcttcacat

SEQ ID NO: 333056 - DNA, 19 bp, Homo sapiens
  siRNA target sequence for MAP4K4 (NM_004834.2,549-567).
cagaggtgaaacttgttga

SEQ ID NO: 333057 - DNA, 19 bp, Homo sapiens
  siRNA target sequence for MAP4K4 (NM_004834.2,714-732).
gcattacagccattgagat

SEQ ID NO: 333058 - DNA, 19 bp, Homo sapiens
  siRNA target sequence for MAP4K4 (NM_004834.2,1070-1088).
gagccaagttccattgtga

SEQ ID NO: 333059 - DNA, 19 bp, Homo sapiens
  siRNA target sequence for MAP4K4 (NM_004834.2,1093-1111).
gcctggtgagtctactctt

SEQ ID NO: 333060 - DNA, 19 bp, Homo sapiens
  siRNA target sequence for MAP4K4 (NM_004834.2,1104-1122).
ctactcttcgccgagattt

SEQ ID NO: 333061 - DNA, 19 bp, Homo sapiens
  siRNA target sequence for MAP4K4 (NM_004834.2,1107-1125).
ctcttcgccgagatttcct

SEQ ID NO: 333062 - DNA, 19 bp, Homo sapiens
  siRNA target sequence for MAP4K4 (NM_004834.2,1167-1185).
ggagacaacagttactaca

SEQ ID NO: 333063 - DNA, 19 bp, Homo sapiens
  siRNA target sequence for MAP4K4 (NM_004834.2,1198-1216).
ccgggagcaggaagaatat

SEQ ID NO: 333064 - DNA, 19 bp, Homo sapiens
  siRNA target sequence for MAP4K4 (NM_004834.2,1199-1217).
cgggagcaggaagaatata

SEQ ID NO: 333065 - DNA, 19 bp, Homo sapiens
  siRNA target sequence for MAP4K4 (NM_004834.2,1424-1442).
gaaaagaggagagttgaaa

SEQ ID NO: 333066 - DNA, 19 bp, Homo sapiens
  siRNA target sequence for MAP4K4 (NM_004834.2,1910-1928).
cgcttcagagtgagatcat

SEQ ID NO: 333067 - DNA, 19 bp, Homo sapiens
  siRNA target sequence for MAP4K4 (NM_004834.2,2078-2096).
cggccacctcacaaagtaa

SEQ ID NO: 333068 - DNA, 19 bp, Homo sapiens
  siRNA target sequence for MAP4K4 (NM_004834.2,2257-2275).
gattgtccatgatgatgta

SEQ ID NO: 333069 - DNA, 19 bp, Homo sapiens
  siRNA target sequence for MAP4K4 (NM_004834.2,2261-2279).
gtccatgatgatgtagaaa

SEQ ID NO: 333070 - DNA, 19 bp, Homo sapiens
  siRNA target sequence for MAP4K4 (NM_004834.2,2301-2319).
ccaaggagggcactctaat

SEQ ID NO: 333071 - DNA, 19 bp, Homo sapiens
  siRNA target sequence for MAP4K4 (NM_004834.2,2343-2361).
gtagcacactccagaaaca

SEQ ID NO: 333072 - DNA, 19 bp, Homo sapiens
  siRNA target sequence for MAP4K4 (NM_004834.2,2395-2413).
ccccagattactacagatt

SEQ ID NO: 333073 - DNA, 19 bp, Homo sapiens
  siRNA target sequence for MAP4K4 (NM_004834.2,2398-2416).
cagattactacagatttct

SEQ ID NO: 333074 - DNA, 19 bp, Homo sapiens
  siRNA target sequence for MAP4K4 (NM_004834.2,2507-2525).
ggctcagtggtcaatgtga

SEQ ID NO: 333075 - DNA, 19 bp, Homo sapiens
  siRNA target sequence for MAP4K4 (NM_004834.2,2552-2570).
gacaccccggagattcgta

SEQ ID NO: 333076 - DNA, 19 bp, Homo sapiens
  siRNA target sequence for MAP4K4 (NM_004834.2,2554-2572).
caccccggagattcgtaaa

SEQ ID NO: 333077 - DNA, 19 bp, Homo sapiens
  siRNA target sequence for MAP4K4 (NM_004834.2,2556-2574).
ccccggagattcgtaaata

SEQ ID NO: 333078 - DNA, 19 bp, Homo sapiens
  siRNA target sequence for MAP4K4 (NM_004834.2,2558-2576).
ccggagattcgtaaataca

SEQ ID NO: 333079 - DNA, 19 bp, Homo sapiens
  siRNA target sequence for MAP4K4 (NM_004834.2,2561-2579).
gagattcgtaaatacaaga

SEQ ID NO: 333080 - DNA, 19 bp, Homo sapiens
  siRNA target sequence for MAP4K4 (NM_004834.2,2581-2599).
gaggtttaactctgagatt

SEQ ID NO: 333081 - DNA, 19 bp, Homo sapiens
  siRNA target sequence for MAP4K4 (NM_004834.2,2609-2627).
gccttatggggagtgaatt

SEQ ID NO: 333082 - DNA, 19 bp, Homo sapiens
  siRNA target sequence for MAP4K4 (NM_004834.2,2610-2628).
ccttatggggagtgaattt

SEQ ID NO: 333083 - DNA, 19 bp, Homo sapiens
  siRNA target sequence for MAP4K4 (NM_004834.2,2679-2697).
ggaaggtctatcctcttat

SEQ ID NO: 333084 - DNA, 19 bp, Homo sapiens
  siRNA target sequence for MAP4K4 (NM_004834.2,2698-2716).
caaccgaagacgatttcaa

SEQ ID NO: 333085 - DNA, 19 bp, Homo sapiens
  siRNA target sequence for MAP4K4 (NM_004834.2,2725-2743).
cgtacttgagggcttgaat

SEQ ID NO: 333086 - DNA, 19 bp, Homo sapiens
  siRNA target sequence for MAP4K4 (NM_004834.2,2729-2747).
cttgagggcttgaatgtct

SEQ ID NO: 333087 - DNA, 19 bp, Homo sapiens
  siRNA target sequence for MAP4K4 (NM_004834.2,2740-2758).
gaatgtcttggtgacaata

SEQ ID NO: 333088 - DNA, 19 bp, Homo sapiens
  siRNA target sequence for MAP4K4 (NM_004834.2,2760-2778).
ctggcaaaaaggataagtt

SEQ ID NO: 333089 - DNA, 19 bp, Homo sapiens
  siRNA target sequence for MAP4K4 (NM_004834.2,2794-2812).
gtcctggttaagaaataaa

SEQ ID NO: 333090 - DNA, 19 bp, Homo sapiens
  siRNA target sequence for MAP4K4 (NM_004834.2,2856-2874).
caaccgtaggggatttgga

SEQ ID NO: 333091 - DNA, 19 bp, Homo sapiens
  siRNA target sequence for MAP4K4 (NM_004834.2,2964-2982).
caccaaagccatatcacaa

SEQ ID NO: 333092 - DNA, 19 bp, Homo sapiens
  siRNA target sequence for MAP4K4 (NM_004834.2,2967-2985).
caaagccatatcacaaatt

SEQ ID NO: 333093 - DNA, 19 bp, Homo sapiens
  siRNA target sequence for MAP4K4 (NM_004834.2,2989-3007).
ggcctttaagtcatttgga

SEQ ID NO: 333094 - DNA, 19 bp, Homo sapiens
  siRNA target sequence for MAP4K4 (NM_004834.2,2998-3016).
gtcatttggagaattggta

SEQ ID NO: 333095 - DNA, 19 bp, Homo sapiens
  siRNA target sequence for MAP4K4 (NM_004834.2,3058-3076).
gaggttgaaagtgatctat

SEQ ID NO: 333096 - DNA, 19 bp, Homo sapiens
  siRNA target sequence for MAP4K4 (NM_004834.2,3153-3171).
gaaagaacccacactctat

SEQ ID NO: 333097 - DNA, 19 bp, Homo sapiens
  siRNA target sequence for MAP4K4 (NM_004834.2,3183-3201).
gcatcaaaccccatgcaat

SEQ ID NO: 333098 - DNA, 19 bp, Homo sapiens
  siRNA target sequence for MAP4K4 (NM_004834.2,3310-3328).
gggagagatgcctacatca

SEQ ID NO: 333099 - DNA, 19 bp, Homo sapiens
  siRNA target sequence for MAP4K4 (NM_004834.2,3319-3337).
gcctacatcagtagcatat

SEQ ID NO: 333100 - DNA, 19 bp, Homo sapiens
  siRNA target sequence for MAP4K4 (NM_004834.2,3320-3338).
cctacatcagtagcatata

SEQ ID NO: 333101 - DNA, 19 bp, Homo sapiens
  siRNA target sequence for MAP4K4 (NM_004834.2,3321-3339).
ctacatcagtagcatatat

SEQ ID NO: 333102 - DNA, 19 bp, Homo sapiens
  siRNA target sequence for MAP4K4 (NM_004834.2,3427-3445).
caaaagggctcaaagacta

SEQ ID NO: 333103 - DNA, 19 bp, Homo sapiens
  siRNA target sequence for MAP4K4 (NM_004834.2,3526-3544).
cttaggcaggacttctctt

SEQ ID NO: 333104 - DNA, 19 bp, Homo sapiens
  siRNA target sequence for KIF23 (NM_004856.4,145-163).
cggaaacctaccgtgaaaa

SEQ ID NO: 333105 - DNA, 19 bp, Homo sapiens
  siRNA target sequence for KIF23 (NM_004856.4,166-184).
gggtcccaaacgaacctta

SEQ ID NO: 333106 - DNA, 19 bp, Homo sapiens
  siRNA target sequence for KIF23 (NM_004856.4,167-185).
ggtcccaaacgaaccttaa

SEQ ID NO: 333107 - DNA, 19 bp, Homo sapiens
  siRNA target sequence for KIF23 (NM_004856.4,168-186).
gtcccaaacgaaccttaaa

SEQ ID NO: 333108 - DNA, 19 bp, Homo sapiens
  siRNA target sequence for KIF23 (NM_004856.4,170-188).
cccaaacgaaccttaaaga

SEQ ID NO: 333109 - DNA, 19 bp, Homo sapiens
  siRNA target sequence for KIF23 (NM_004856.4,187-205).
gacccagttggggtatact

SEQ ID NO: 333110 - DNA, 19 bp, Homo sapiens
  siRNA target sequence for KIF23 (NM_004856.4,189-207).
cccagttggggtatactgt

SEQ ID NO: 333111 - DNA, 19 bp, Homo sapiens
  siRNA target sequence for KIF23 (NM_004856.4,190-208).
ccagttggggtatactgta

SEQ ID NO: 333112 - DNA, 19 bp, Homo sapiens
  siRNA target sequence for KIF23 (NM_004856.4,242-260).
gttgcatagaagtgatcaa

SEQ ID NO: 333113 - DNA, 19 bp, Homo sapiens
  siRNA target sequence for KIF23 (NM_004856.4,250-268).
gaagtgatcaataatacaa

SEQ ID NO: 333114 - DNA, 19 bp, Homo sapiens
  siRNA target sequence for KIF23 (NM_004856.4,297-315).
cagactcaaccgaaatgga

SEQ ID NO: 333115 - DNA, 19 bp, Homo sapiens
  siRNA target sequence for KIF23 (NM_004856.4,308-326).
gaaatggagactataagga

SEQ ID NO: 333116 - DNA, 19 bp, Homo sapiens
  siRNA target sequence for KIF23 (NM_004856.4,318-336).
ctataaggagactcagtat

SEQ ID NO: 333117 - DNA, 19 bp, Homo sapiens
  siRNA target sequence for KIF23 (NM_004856.4,365-383).
ccacccagaaggaactctt

SEQ ID NO: 333118 - DNA, 19 bp, Homo sapiens
  siRNA target sequence for KIF23 (NM_004856.4,395-413).
ctaatcccttggtcaatga

SEQ ID NO: 333119 - DNA, 19 bp, Homo sapiens
  siRNA target sequence for KIF23 (NM_004856.4,414-432).
cctcattcatggcaaaaat

SEQ ID NO: 333120 - DNA, 19 bp, Homo sapiens
  siRNA target sequence for KIF23 (NM_004856.4,454-472).
gtgacgggaagtggaaaaa

SEQ ID NO: 333121 - DNA, 19 bp, Homo sapiens
  siRNA target sequence for KIF23 (NM_004856.4,517-535).
cgttgtttggacatgatct

SEQ ID NO: 333122 - DNA, 19 bp, Homo sapiens
  siRNA target sequence for KIF23 (NM_004856.4,518-536).
gttgtttggacatgatctt

SEQ ID NO: 333123 - DNA, 19 bp, Homo sapiens
  siRNA target sequence for KIF23 (NM_004856.4,521-539).
gtttggacatgatctttaa

SEQ ID NO: 333124 - DNA, 19 bp, Homo sapiens
  siRNA target sequence for KIF23 (NM_004856.4,525-543).
ggacatgatctttaacagt

SEQ ID NO: 333125 - DNA, 19 bp, Homo sapiens
  siRNA target sequence for KIF23 (NM_004856.4,549-567).
gtcatttcaagctaaacga

SEQ ID NO: 333126 - DNA, 19 bp, Homo sapiens
  siRNA target sequence for KIF23 (NM_004856.4,551-569).
catttcaagctaaacgata

SEQ ID NO: 333127 - DNA, 19 bp, Homo sapiens
  siRNA target sequence for KIF23 (NM_004856.4,556-574).
caagctaaacgatatgttt

SEQ ID NO: 333128 - DNA, 19 bp, Homo sapiens
  siRNA target sequence for KIF23 (NM_004856.4,559-577).
gctaaacgatatgttttca

SEQ ID NO: 333129 - DNA, 19 bp, Homo sapiens
  siRNA target sequence for KIF23 (NM_004856.4,560-578).
ctaaacgatatgttttcaa

SEQ ID NO: 333130 - DNA, 19 bp, Homo sapiens
  siRNA target sequence for KIF23 (NM_004856.4,581-599).
ctaatgataggaatagtat

SEQ ID NO: 333131 - DNA, 19 bp, Homo sapiens
  siRNA target sequence for KIF23 (NM_004856.4,590-608).
ggaatagtatggatataca

SEQ ID NO: 333132 - DNA, 19 bp, Homo sapiens
  siRNA target sequence for KIF23 (NM_004856.4,624-642).
cttattagaacgtcagaaa

SEQ ID NO: 333133 - DNA, 19 bp, Homo sapiens
  siRNA target sequence for KIF23 (NM_004856.4,646-664).
gaagctatgcccaatccaa

SEQ ID NO: 333134 - DNA, 19 bp, Homo sapiens
  siRNA target sequence for KIF23 (NM_004856.4,674-692).
ctagcaaacgacaagtaga

SEQ ID NO: 333135 - DNA, 19 bp, Homo sapiens
  siRNA target sequence for KIF23 (NM_004856.4,694-712).
ccagagtttgcagatatga

SEQ ID NO: 333136 - DNA, 19 bp, Homo sapiens
  siRNA target sequence for KIF23 (NM_004856.4,695-713).
cagagtttgcagatatgat

SEQ ID NO: 333137 - DNA, 19 bp, Homo sapiens
  siRNA target sequence for KIF23 (NM_004856.4,697-715).
gagtttgcagatatgataa

SEQ ID NO: 333138 - DNA, 19 bp, Homo sapiens
  siRNA target sequence for KIF23 (NM_004856.4,758-776).
gtgtctatggtgtatttgt

SEQ ID NO: 333139 - DNA, 19 bp, Homo sapiens
  siRNA target sequence for KIF23 (NM_004856.4,804-822).
catatatgatctattggaa

SEQ ID NO: 333140 - DNA, 19 bp, Homo sapiens
  siRNA target sequence for KIF23 (NM_004856.4,819-837).
ggaagaggtgccgtttgat

SEQ ID NO: 333141 - DNA, 19 bp, Homo sapiens
  siRNA target sequence for KIF23 (NM_004856.4,828-846).
gccgtttgatcccataaaa

SEQ ID NO: 333142 - DNA, 19 bp, Homo sapiens
  siRNA target sequence for KIF23 (NM_004856.4,874-892).
cgtgaagataagaaccata

SEQ ID NO: 333143 - DNA, 19 bp, Homo sapiens
  siRNA target sequence for KIF23 (NM_004856.4,885-903).
gaaccataacatgtatgtt

SEQ ID NO: 333144 - DNA, 19 bp, Homo sapiens
  siRNA target sequence for KIF23 (NM_004856.4,897-915).
gtatgttgcaggatgtaca

SEQ ID NO: 333145 - DNA, 19 bp, Homo sapiens
  siRNA target sequence for KIF23 (NM_004856.4,1016-1034).
gttcccatagcgtgttcaa

SEQ ID NO: 333146 - DNA, 19 bp, Homo sapiens
  siRNA target sequence for KIF23 (NM_004856.4,1019-1037).
cccatagcgtgttcaacat

SEQ ID NO: 333147 - DNA, 19 bp, Homo sapiens
  siRNA target sequence for KIF23 (NM_004856.4,1020-1038).
ccatagcgtgttcaacatt

SEQ ID NO: 333148 - DNA, 19 bp, Homo sapiens
  siRNA target sequence for KIF23 (NM_004856.4,1021-1039).
catagcgtgttcaacatta

SEQ ID NO: 333149 - DNA, 19 bp, Homo sapiens
  siRNA target sequence for KIF23 (NM_004856.4,1113-1131).
gttgtccttggtagatctt

SEQ ID NO: 333150 - DNA, 19 bp, Homo sapiens
  siRNA target sequence for KIF23 (NM_004856.4,1180-1198).
cgtgaagctggtaatatta

SEQ ID NO: 333151 - DNA, 19 bp, Homo sapiens
  siRNA target sequence for KIF23 (NM_004856.4,1186-1204).
gctggtaatattaatcagt

SEQ ID NO: 333152 - DNA, 19 bp, Homo sapiens
  siRNA target sequence for KIF23 (NM_004856.4,1207-1225).
ctaatgacgctaagaacat

SEQ ID NO: 333153 - DNA, 19 bp, Homo sapiens
  siRNA target sequence for KIF23 (NM_004856.4,1243-1261).
gagaaccaaatgtatggaa

SEQ ID NO: 333154 - DNA, 19 bp, Homo sapiens
  siRNA target sequence for KIF23 (NM_004856.4,1266-1284).
caagatggttccatatcga

SEQ ID NO: 333155 - DNA, 19 bp, Homo sapiens
  siRNA target sequence for KIF23 (NM_004856.4,1272-1290).
ggttccatatcgagattca

SEQ ID NO: 333156 - DNA, 19 bp, Homo sapiens
  siRNA target sequence for KIF23 (NM_004856.4,1273-1291).
gttccatatcgagattcaa

SEQ ID NO: 333157 - DNA, 19 bp, Homo sapiens
  siRNA target sequence for KIF23 (NM_004856.4,1276-1294).
ccatatcgagattcaaagt

SEQ ID NO: 333158 - DNA, 19 bp, Homo sapiens
  siRNA target sequence for KIF23 (NM_004856.4,1277-1295).
catatcgagattcaaagtt

SEQ ID NO: 333159 - DNA, 19 bp, Homo sapiens
  siRNA target sequence for KIF23 (NM_004856.4,1300-1318).
catctgttcaagaactact

SEQ ID NO: 333160 - DNA, 19 bp, Homo sapiens
  siRNA target sequence for KIF23 (NM_004856.4,1438-1456).
cctgtagacaaggcaatat

SEQ ID NO: 333161 - DNA, 19 bp, Homo sapiens
  siRNA target sequence for KIF23 (NM_004856.4,1565-1583).
gcgaaattttggatatcaa

SEQ ID NO: 333162 - DNA, 19 bp, Homo sapiens
  siRNA target sequence for KIF23 (NM_004856.4,1628-1646).
gacataacttacgacaaat

SEQ ID NO: 333163 - DNA, 19 bp, Homo sapiens
  siRNA target sequence for KIF23 (NM_004856.4,1657-1675).
gagtttaacaaacaatcta

SEQ ID NO: 333164 - DNA, 19 bp, Homo sapiens
  siRNA target sequence for KIF23 (NM_004856.4,1734-1752).
catgcaagggaaactaaat

SEQ ID NO: 333165 - DNA, 19 bp, Homo sapiens
  siRNA target sequence for KIF23 (NM_004856.4,1770-1788).
ctcaggacagaaattggaa

SEQ ID NO: 333166 - DNA, 19 bp, Homo sapiens
  siRNA target sequence for KIF23 (NM_004856.4,1884-1902).
gcaacaggaacttgaaact

SEQ ID NO: 333167 - DNA, 19 bp, Homo sapiens
  siRNA target sequence for KIF23 (NM_004856.4,1911-1929).
gaaacttcagcgacagttt

SEQ ID NO: 333168 - DNA, 19 bp, Homo sapiens
  siRNA target sequence for KIF23 (NM_004856.4,1931-1949).
ctgacaaacgcagattaga

SEQ ID NO: 333169 - DNA, 19 bp, Homo sapiens
  siRNA target sequence for KIF23 (NM_004856.4,2047-2065).
ctctgggttaaagatgaaa

SEQ ID NO: 333170 - DNA, 19 bp, Homo sapiens
  siRNA target sequence for KIF23 (NM_004856.4,2133-2151).
gcgagatcgagaaaaagtt

SEQ ID NO: 333171 - DNA, 19 bp, Homo sapiens
  siRNA target sequence for KIF23 (NM_004856.4,2134-2152).
cgagatcgagaaaaagtta

SEQ ID NO: 333172 - DNA, 19 bp, Homo sapiens
  siRNA target sequence for KIF23 (NM_004856.4,2205-2223).
gaacgcaccaccaattcgt

SEQ ID NO: 333173 - DNA, 19 bp, Homo sapiens
  siRNA target sequence for KIF23 (NM_004856.4,2254-2272).
gacagatgggtagatcata

SEQ ID NO: 333174 - DNA, 19 bp, Homo sapiens
  siRNA target sequence for KIF23 (NM_004856.4,2402-2420).
cctccgatggggagattga

SEQ ID NO: 333175 - DNA, 19 bp, Homo sapiens
  siRNA target sequence for KIF23 (NM_004856.4,2403-2421).
ctccgatggggagattgaa

SEQ ID NO: 333176 - DNA, 19 bp, Homo sapiens
  siRNA target sequence for KIF23 (NM_004856.4,2406-2424).
cgatggggagattgaaact

SEQ ID NO: 333177 - DNA, 19 bp, Homo sapiens
  siRNA target sequence for KIF23 (NM_004856.4,2412-2430).
ggagattgaaactaaacta

SEQ ID NO: 333178 - DNA, 19 bp, Homo sapiens
  siRNA target sequence for KIF23 (NM_004856.4,2456-2474).
ggggtggtggacaatctgt

SEQ ID NO: 333179 - DNA, 19 bp, Homo sapiens
  siRNA target sequence for KIF23 (NM_004856.4,2563-2581).
gatggtgcagagtctgaat

SEQ ID NO: 333180 - DNA, 19 bp, Homo sapiens
  siRNA target sequence for KIF23 (NM_004856.4,2576-2594).
ctgaatggaccgatgtaga

SEQ ID NO: 333181 - DNA, 19 bp, Homo sapiens
  siRNA target sequence for KIF23 (NM_004856.4,2578-2596).
gaatggaccgatgtagaaa

SEQ ID NO: 333182 - DNA, 19 bp, Homo sapiens
  siRNA target sequence for CIR (NM_004882.3,140-158).
ctgcctccaaatccaatat

SEQ ID NO: 333183 - DNA, 19 bp, Homo sapiens
  siRNA target sequence for CIR (NM_004882.3,142-160).
gcctccaaatccaatatca

SEQ ID NO: 333184 - DNA, 19 bp, Homo sapiens
  siRNA target sequence for CIR (NM_004882.3,143-161).
cctccaaatccaatatcaa

SEQ ID NO: 333185 - DNA, 19 bp, Homo sapiens
  siRNA target sequence for CIR (NM_004882.3,144-162).
ctccaaatccaatatcaaa

SEQ ID NO: 333186 - DNA, 19 bp, Homo sapiens
  siRNA target sequence for CIR (NM_004882.3,293-311).
gccttaatttcatgtatga

SEQ ID NO: 333187 - DNA, 19 bp, Homo sapiens
  siRNA target sequence for CIR (NM_004882.3,294-312).
ccttaatttcatgtatgaa

SEQ ID NO: 333188 - DNA, 19 bp, Homo sapiens
  siRNA target sequence for CIR (NM_004882.3,313-331).
gccccaccaggagctaaaa

SEQ ID NO: 333189 - DNA, 19 bp, Homo sapiens
  siRNA target sequence for CIR (NM_004882.3,361-379).
ggagagaccgaatacaaat

SEQ ID NO: 333190 - DNA, 19 bp, Homo sapiens
  siRNA target sequence for CIR (NM_004882.3,362-380).
gagagaccgaatacaaatt

SEQ ID NO: 333191 - DNA, 19 bp, Homo sapiens
  siRNA target sequence for CIR (NM_004882.3,366-384).
gaccgaatacaaatttgaa

SEQ ID NO: 333192 - DNA, 19 bp, Homo sapiens
  siRNA target sequence for CIR (NM_004882.3,416-434).
ccaaagatgacatgaacat

SEQ ID NO: 333193 - DNA, 19 bp, Homo sapiens
  siRNA target sequence for CIR (NM_004882.3,437-455).
gagatcagccctttggtat

SEQ ID NO: 333194 - DNA, 19 bp, Homo sapiens
  siRNA target sequence for CIR (NM_004882.3,452-470).
gtattcaggttcgaaatgt

SEQ ID NO: 333195 - DNA, 19 bp, Homo sapiens
  siRNA target sequence for CIR (NM_004882.3,463-481).
cgaaatgtgaggtgcatta

SEQ ID NO: 333196 - DNA, 19 bp, Homo sapiens
  siRNA target sequence for CIR (NM_004882.3,504-522).
caacacagatcgagaatgt

SEQ ID NO: 333197 - DNA, 19 bp, Homo sapiens
  siRNA target sequence for CIR (NM_004882.3,535-553).
ctttctggaatcaatgcaa

SEQ ID NO: 333198 - DNA, 19 bp, Homo sapiens
  siRNA target sequence for CIR (NM_004882.3,588-606).
gcacccctcggagctaata

SEQ ID NO: 333199 - DNA, 19 bp, Homo sapiens
  siRNA target sequence for CIR (NM_004882.3,625-643).
gggtttgcactgaaacgaa

SEQ ID NO: 333200 - DNA, 19 bp, Homo sapiens
  siRNA target sequence for CIR (NM_004882.3,626-644).
ggtttgcactgaaacgaaa

SEQ ID NO: 333201 - DNA, 19 bp, Homo sapiens
  siRNA target sequence for CIR (NM_004882.3,632-650).
cactgaaacgaaatgtact

SEQ ID NO: 333202 - DNA, 19 bp, Homo sapiens
  siRNA target sequence for CIR (NM_004882.3,994-1012).
gggcataacaacagtgatt

SEQ ID NO: 333203 - DNA, 19 bp, Homo sapiens
  siRNA target sequence for CIR (NM_004882.3,1093-1111).
gaaaagcccaggttcttaa

SEQ ID NO: 333204 - DNA, 19 bp, Homo sapiens
  siRNA target sequence for CIR (NM_004882.3,1167-1185).
gtccagaacccataaacat

SEQ ID NO: 333205 - DNA, 19 bp, Homo sapiens
  siRNA target sequence for CIR (NM_004882.3,1271-1289).
gaagtcctggtagttacaa

SEQ ID NO: 333206 - DNA, 19 bp, Homo sapiens
  siRNA target sequence for CIR (NM_004882.3,1276-1294).
cctggtagttacaagcaaa

SEQ ID NO: 333207 - DNA, 19 bp, Homo sapiens
  siRNA target sequence for CIR (NM_004882.3,1363-1381).
catggcacagacttgtata

SEQ ID NO: 333208 - DNA, 19 bp, Homo sapiens
  siRNA target sequence for CIR (NM_004882.3,1405-1423).
cacccaggaggtacacata

SEQ ID NO: 333209 - DNA, 19 bp, Homo sapiens
  siRNA target sequence for CIR (NM_004882.3,1408-1426).
ccaggaggtacacatacta

SEQ ID NO: 333210 - DNA, 19 bp, Homo sapiens
  siRNA target sequence for CIR (NM_004882.3,1409-1427).
caggaggtacacatactaa

SEQ ID NO: 333211 - DNA, 19 bp, Homo sapiens
  siRNA target sequence for CIR (NM_004882.3,1420-1438).
catactaaagtgacacaaa

SEQ ID NO: 333212 - DNA, 19 bp, Homo sapiens
  siRNA target sequence for WTAP (NM_004906.3,246-264).
caagaaggttcgattgagt

SEQ ID NO: 333213 - DNA, 19 bp, Homo sapiens
  siRNA target sequence for WTAP (NM_004906.3,252-270).
ggttcgattgagtgaaaca

SEQ ID NO: 333214 - DNA, 19 bp, Homo sapiens
  siRNA target sequence for WTAP (NM_004906.3,285-303).
ggcaagagatgagttaatt

SEQ ID NO: 333215 - DNA, 19 bp, Homo sapiens
  siRNA target sequence for WTAP (NM_004906.3,297-315).
gttaattctaagatggaaa

SEQ ID NO: 333216 - DNA, 19 bp, Homo sapiens
  siRNA target sequence for WTAP (NM_004906.3,337-355).
gctttggagggcaagtaca

SEQ ID NO: 333217 - DNA, 19 bp, Homo sapiens
  siRNA target sequence for WTAP (NM_004906.3,345-363).
gggcaagtacacagatctt

SEQ ID NO: 333218 - DNA, 19 bp, Homo sapiens
  siRNA target sequence for WTAP (NM_004906.3,346-364).
ggcaagtacacagatctta

SEQ ID NO: 333219 - DNA, 19 bp, Homo sapiens
  siRNA target sequence for WTAP (NM_004906.3,674-692).
gccaaacagggaaaaagtt

SEQ ID NO: 333220 - DNA, 19 bp, Homo sapiens
  siRNA target sequence for WTAP (NM_004906.3,696-714).
ggcgaagtgtcgaatgctt

SEQ ID NO: 333221 - DNA, 19 bp, Homo sapiens
  siRNA target sequence for WTAP (NM_004906.3,697-715).
gcgaagtgtcgaatgctta

SEQ ID NO: 333222 - DNA, 19 bp, Homo sapiens
  siRNA target sequence for WTAP (NM_004906.3,698-716).
cgaagtgtcgaatgcttat

SEQ ID NO: 333223 - DNA, 19 bp, Homo sapiens
  siRNA target sequence for WTAP (NM_004906.3,744-762).
gctgtcccagggacgtatt

SEQ ID NO: 333224 - DNA, 19 bp, Homo sapiens
  siRNA target sequence for WTAP (NM_004906.3,753-771).
gggacgtattgcacaactt

SEQ ID NO: 333225 - DNA, 19 bp, Homo sapiens
  siRNA target sequence for WTAP (NM_004906.3,755-773).
gacgtattgcacaacttga

SEQ ID NO: 333226 - DNA, 19 bp, Homo sapiens
  siRNA target sequence for WTAP (NM_004906.3,819-837).
cagtcaggatgaactgaat

SEQ ID NO: 333227 - DNA, 19 bp, Homo sapiens
  siRNA target sequence for WTAP (NM_004906.3,821-839).
gtcaggatgaactgaatga

SEQ ID NO: 333228 - DNA, 19 bp, Homo sapiens
  siRNA target sequence for WTAP (NM_004906.3,870-888).
gggtatgcagagtaccatt

SEQ ID NO: 333229 - DNA, 19 bp, Homo sapiens
  siRNA target sequence for WTAP (NM_004906.3,876-894).
gcagagtaccattctagtt

SEQ ID NO: 333230 - DNA, 19 bp, Homo sapiens
  siRNA target sequence for WTAP (NM_004906.3,1008-1026).
gtcagaggccacaagtaaa

SEQ ID NO: 333231 - DNA, 19 bp, Homo sapiens
  siRNA target sequence for WTAP (NM_004906.3,1041-1059).
gacaaacggaccaagtaat

SEQ ID NO: 333232 - DNA, 19 bp, Homo sapiens
  siRNA target sequence for WTAP (NM_004906.3,1109-1127).
gcaacacaaccgaagatga

SEQ ID NO: 333233 - DNA, 19 bp, Homo sapiens
  siRNA target sequence for WTAP (NM_004906.3,1192-1210).
ggaggtagtggttacgtaa

SEQ ID NO: 333234 - DNA, 19 bp, Homo sapiens
  siRNA target sequence for WTAP (NM_004906.3,1193-1211).
gaggtagtggttacgtaaa

SEQ ID NO: 333235 - DNA, 19 bp, Homo sapiens
  siRNA target sequence for WTAP (NM_004906.3,1196-1214).
gtagtggttacgtaaatca

SEQ ID NO: 333236 - DNA, 19 bp, Homo sapiens
  siRNA target sequence for WTAP (NM_004906.3,1199-1217).
gtggttacgtaaatcaact

SEQ ID NO: 333237 - DNA, 19 bp, Homo sapiens
  siRNA target sequence for WTAP (NM_004906.3,1218-1236).
cagtgcggggtatgaaagt

SEQ ID NO: 333238 - DNA, 19 bp, Homo sapiens
  siRNA target sequence for WTAP (NM_004906.3,1220-1238).
gtgcggggtatgaaagtgt

SEQ ID NO: 333239 - DNA, 19 bp, Homo sapiens
  siRNA target sequence for WTAP (NM_004906.3,1246-1264).
cccacgggcagtgaaaact

SEQ ID NO: 333240 - DNA, 19 bp, Homo sapiens
  siRNA target sequence for WTAP (NM_004906.3,1326-1344).
gagtgggaaaggtaatcga

SEQ ID NO: 333241 - DNA, 19 bp, Homo sapiens
  siRNA target sequence for WTAP (NM_004906.3,1352-1370).
gttcccgccacgttcagaa

SEQ ID NO: 333242 - DNA, 19 bp, Homo sapiens
  siRNA target sequence for ETR101 (NM_004907.1,139-157).
gtcggtgtggaagatgtat

SEQ ID NO: 333243 - DNA, 19 bp, Homo sapiens
  siRNA target sequence for TRAG3 (NM_004909.1,220-238).
gaattctaccacaagacta

SEQ ID NO: 333244 - DNA, 19 bp, Homo sapiens
  siRNA target sequence for TRAG3 (NM_004909.1,228-246).
ccacaagactaacataaaa

SEQ ID NO: 333245 - DNA, 19 bp, Homo sapiens
  siRNA target sequence for DOCK3 (NM_004947.2,47-65).
gaaatacggcgtagtgata

SEQ ID NO: 333246 - DNA, 19 bp, Homo sapiens
  siRNA target sequence for DOCK3 (NM_004947.2,149-167).
gtacagaggagtttcaaca

SEQ ID NO: 333247 - DNA, 19 bp, Homo sapiens
  siRNA target sequence for DOCK3 (NM_004947.2,257-275).
ggttccacttgaagattct

SEQ ID NO: 333248 - DNA, 19 bp, Homo sapiens
  siRNA target sequence for DOCK3 (NM_004947.2,264-282).
cttgaagattctattgtga

SEQ ID NO: 333249 - DNA, 19 bp, Homo sapiens
  siRNA target sequence for DOCK3 (NM_004947.2,370-388).
gccatgtgatgaatgaact

SEQ ID NO: 333250 - DNA, 19 bp, Homo sapiens
  siRNA target sequence for DOCK3 (NM_004947.2,531-549).
gtggactcggaccagatta

SEQ ID NO: 333251 - DNA, 19 bp, Homo sapiens
  siRNA target sequence for DOCK3 (NM_004947.2,533-551).
ggactcggaccagattagt

SEQ ID NO: 333252 - DNA, 19 bp, Homo sapiens
  siRNA target sequence for DOCK3 (NM_004947.2,550-568).
gtgtctcagatctctataa

SEQ ID NO: 333253 - DNA, 19 bp, Homo sapiens
  siRNA target sequence for DOCK3 (NM_004947.2,552-570).
gtctcagatctctataaga

SEQ ID NO: 333254 - DNA, 19 bp, Homo sapiens
  siRNA target sequence for DOCK3 (NM_004947.2,558-576).
gatctctataagatgcatt

SEQ ID NO: 333255 - DNA, 19 bp, Homo sapiens
  siRNA target sequence for DOCK3 (NM_004947.2,605-623).
cacatcccaggtagataca

SEQ ID NO: 333256 - DNA, 19 bp, Homo sapiens
  siRNA target sequence for DOCK3 (NM_004947.2,607-625).
catcccaggtagatacaat

SEQ ID NO: 333257 - DNA, 19 bp, Homo sapiens
  siRNA target sequence for DOCK3 (NM_004947.2,712-730).
gggaagataccgatgtctt

SEQ ID NO: 333258 - DNA, 19 bp, Homo sapiens
  siRNA target sequence for DOCK3 (NM_004947.2,817-835).
cagagaagatagaacgaat

SEQ ID NO: 333259 - DNA, 19 bp, Homo sapiens
  siRNA target sequence for DOCK3 (NM_004947.2,875-893).
gagagatttgtatatcgtt

SEQ ID NO: 333260 - DNA, 19 bp, Homo sapiens
  siRNA target sequence for DOCK3 (NM_004947.2,956-974).
gcactacaggcgaccatat

SEQ ID NO: 333261 - DNA, 19 bp, Homo sapiens
  siRNA target sequence for DOCK3 (NM_004947.2,1008-1026).
cagtcactcacagaagtaa

SEQ ID NO: 333262 - DNA, 19 bp, Homo sapiens
  siRNA target sequence for DOCK3 (NM_004947.2,1084-1102).
cccagatccacgagaacat

SEQ ID NO: 333263 - DNA, 19 bp, Homo sapiens
  siRNA target sequence for DOCK3 (NM_004947.2,1138-1156).
gcgccagccatggtcttat

SEQ ID NO: 333264 - DNA, 19 bp, Homo sapiens
  siRNA target sequence for DOCK3 (NM_004947.2,1140-1158).
gccagccatggtcttatca

SEQ ID NO: 333265 - DNA, 19 bp, Homo sapiens
  siRNA target sequence for DOCK3 (NM_004947.2,1142-1160).
cagccatggtcttatcatt

SEQ ID NO: 333266 - DNA, 19 bp, Homo sapiens
  siRNA target sequence for DOCK3 (NM_004947.2,1188-1206).
gaacagattcggagagaaa

SEQ ID NO: 333267 - DNA, 19 bp, Homo sapiens
  siRNA target sequence for DOCK3 (NM_004947.2,1250-1268).
gggatttcctgatgtcatt

SEQ ID NO: 333268 - DNA, 19 bp, Homo sapiens
  siRNA target sequence for DOCK3 (NM_004947.2,1251-1269).
ggatttcctgatgtcatta

SEQ ID NO: 333269 - DNA, 19 bp, Homo sapiens
  siRNA target sequence for DOCK3 (NM_004947.2,1284-1302).
cgcaatgacctgtacctaa

SEQ ID NO: 333270 - DNA, 19 bp, Homo sapiens
  siRNA target sequence for DOCK3 (NM_004947.2,1361-1379).
gaccatgtatgtgctttat

SEQ ID NO: 333271 - DNA, 19 bp, Homo sapiens
  siRNA target sequence for DOCK3 (NM_004947.2,1364-1382).
catgtatgtgctttatgca

SEQ ID NO: 333272 - DNA, 19 bp, Homo sapiens
  siRNA target sequence for DOCK3 (NM_004947.2,1457-1475).
cctctaccacagtaatagt

SEQ ID NO: 333273 - DNA, 19 bp, Homo sapiens
  siRNA target sequence for DOCK3 (NM_004947.2,1474-1492).
gtcctcgctggggagaaat

SEQ ID NO: 333274 - DNA, 19 bp, Homo sapiens
  siRNA target sequence for DOCK3 (NM_004947.2,1476-1494).
cctcgctggggagaaatta

SEQ ID NO: 333275 - DNA, 19 bp, Homo sapiens
  siRNA target sequence for DOCK3 (NM_004947.2,1477-1495).
ctcgctggggagaaattat

SEQ ID NO: 333276 - DNA, 19 bp, Homo sapiens
  siRNA target sequence for DOCK3 (NM_004947.2,1531-1549).
cccacctgcgctttgagtt

SEQ ID NO: 333277 - DNA, 19 bp, Homo sapiens
  siRNA target sequence for DOCK3 (NM_004947.2,1539-1557).
cgctttgagttcagacatt

SEQ ID NO: 333278 - DNA, 19 bp, Homo sapiens
  siRNA target sequence for DOCK3 (NM_004947.2,1630-1648).
ccaccctctcagatgatat

SEQ ID NO: 333279 - DNA, 19 bp, Homo sapiens
  siRNA target sequence for DOCK3 (NM_004947.2,1677-1695).
gagaatagcacgtttaata

SEQ ID NO: 333280 - DNA, 19 bp, Homo sapiens
  siRNA target sequence for DOCK3 (NM_004947.2,1723-1741).
gctgcaaagaggactacaa

SEQ ID NO: 333281 - DNA, 19 bp, Homo sapiens
  siRNA target sequence for DOCK3 (NM_004947.2,1724-1742).
ctgcaaagaggactacaat

SEQ ID NO: 333282 - DNA, 19 bp, Homo sapiens
  siRNA target sequence for DOCK3 (NM_004947.2,1776-1794).
cagcgcagcaccaaagagt

SEQ ID NO: 333283 - DNA, 19 bp, Homo sapiens
  siRNA target sequence for DOCK3 (NM_004947.2,1783-1801).
gcaccaaagagtctttctt

SEQ ID NO: 333284 - DNA, 19 bp, Homo sapiens
  siRNA target sequence for DOCK3 (NM_004947.2,1883-1901).
ccggatcatggatgtacta

SEQ ID NO: 333285 - DNA, 19 bp, Homo sapiens
  siRNA target sequence for DOCK3 (NM_004947.2,1940-1958).
gtttctgcaggacatctta

SEQ ID NO: 333286 - DNA, 19 bp, Homo sapiens
  siRNA target sequence for DOCK3 (NM_004947.2,1944-1962).
ctgcaggacatcttagata

SEQ ID NO: 333287 - DNA, 19 bp, Homo sapiens
  siRNA target sequence for DOCK3 (NM_004947.2,1946-1964).
gcaggacatcttagataca

SEQ ID NO: 333288 - DNA, 19 bp, Homo sapiens
  siRNA target sequence for DOCK3 (NM_004947.2,1971-1989).
gtgattttggatgataata

SEQ ID NO: 333289 - DNA, 19 bp, Homo sapiens
  siRNA target sequence for DOCK3 (NM_004947.2,2016-2034).
cagtctctggtgttcatca

SEQ ID NO: 333290 - DNA, 19 bp, Homo sapiens
  siRNA target sequence for DOCK3 (NM_004947.2,2042-2060).
gctccgagacatcaagtat

SEQ ID NO: 333291 - DNA, 19 bp, Homo sapiens
  siRNA target sequence for DOCK3 (NM_004947.2,2043-2061).
ctccgagacatcaagtatt

SEQ ID NO: 333292 - DNA, 19 bp, Homo sapiens
  siRNA target sequence for DOCK3 (NM_004947.2,2045-2063).
ccgagacatcaagtatttt

SEQ ID NO: 333293 - DNA, 19 bp, Homo sapiens
  siRNA target sequence for DOCK3 (NM_004947.2,2127-2145).
gagctcatccgctgtttga

SEQ ID NO: 333294 - DNA, 19 bp, Homo sapiens
  siRNA target sequence for DOCK3 (NM_004947.2,2130-2148).
ctcatccgctgtttgaagt

SEQ ID NO: 333295 - DNA, 19 bp, Homo sapiens
  siRNA target sequence for DOCK3 (NM_004947.2,2136-2154).
cgctgtttgaagtggtata

SEQ ID NO: 333296 - DNA, 19 bp, Homo sapiens
  siRNA target sequence for DOCK3 (NM_004947.2,2159-2177).
ctgctcagcagaactgatt

SEQ ID NO: 333297 - DNA, 19 bp, Homo sapiens
  siRNA target sequence for DOCK3 (NM_004947.2,2209-2227).
ccttggagtaccttttcaa

SEQ ID NO: 333298 - DNA, 19 bp, Homo sapiens
  siRNA target sequence for DOCK3 (NM_004947.2,2293-2311).
gatccagtatccaagaact

SEQ ID NO: 333299 - DNA, 19 bp, Homo sapiens
  siRNA target sequence for DOCK3 (NM_004947.2,2343-2361).
gacagccgaaactcagaaa

SEQ ID NO: 333300 - DNA, 19 bp, Homo sapiens
  siRNA target sequence for DOCK3 (NM_004947.2,2380-2398).
ctgcactcctcaattcttt

SEQ ID NO: 333301 - DNA, 19 bp, Homo sapiens
  siRNA target sequence for DOCK3 (NM_004947.2,2438-2456).
gcaagaggtggcagagttt

SEQ ID NO: 333302 - DNA, 19 bp, Homo sapiens
  siRNA target sequence for DOCK3 (NM_004947.2,2547-2565).
gatagccgcctgttttctt

SEQ ID NO: 333303 - DNA, 19 bp, Homo sapiens
  siRNA target sequence for DOCK3 (NM_004947.2,3003-3021).
cctcgggactggatggtaa

SEQ ID NO: 333304 - DNA, 19 bp, Homo sapiens
  siRNA target sequence for DOCK3 (NM_004947.2,3004-3022).
ctcgggactggatggtaat

SEQ ID NO: 333305 - DNA, 19 bp, Homo sapiens
  siRNA target sequence for DOCK3 (NM_004947.2,3023-3041).
gagactgctcacaagcaat

SEQ ID NO: 333306 - DNA, 19 bp, Homo sapiens
  siRNA target sequence for DOCK3 (NM_004947.2,3025-3043).
gactgctcacaagcaatat

SEQ ID NO: 333307 - DNA, 19 bp, Homo sapiens
  siRNA target sequence for DOCK3 (NM_004947.2,3073-3091).
ctgcactgcacaagaattt

SEQ ID NO: 333308 - DNA, 19 bp, Homo sapiens
  siRNA target sequence for DOCK3 (NM_004947.2,3100-3118).
ctgactttgactttaaggt

SEQ ID NO: 333309 - DNA, 19 bp, Homo sapiens
  siRNA target sequence for DOCK3 (NM_004947.2,3110-3128).
ctttaaggtgtggaattct

SEQ ID NO: 333310 - DNA, 19 bp, Homo sapiens
  siRNA target sequence for DOCK3 (NM_004947.2,3137-3155).
cctggcagttctattcata

SEQ ID NO: 333311 - DNA, 19 bp, Homo sapiens
  siRNA target sequence for DOCK3 (NM_004947.2,3138-3156).
ctggcagttctattcataa

SEQ ID NO: 333312 - DNA, 19 bp, Homo sapiens
  siRNA target sequence for DOCK3 (NM_004947.2,3168-3186).
cttcagctagaaattatca

SEQ ID NO: 333313 - DNA, 19 bp, Homo sapiens
  siRNA target sequence for DOCK3 (NM_004947.2,3203-3221).
gaagattctagataagtat

SEQ ID NO: 333314 - DNA, 19 bp, Homo sapiens
  siRNA target sequence for DOCK3 (NM_004947.2,3279-3297).
gaacataagatccacttta

SEQ ID NO: 333315 - DNA, 19 bp, Homo sapiens
  siRNA target sequence for DOCK3 (NM_004947.2,3293-3311).
ctttattccgggaatgatt

SEQ ID NO: 333316 - DNA, 19 bp, Homo sapiens
  siRNA target sequence for DOCK3 (NM_004947.2,3345-3363).
ccagaagtacggaatatca

SEQ ID NO: 333317 - DNA, 19 bp, Homo sapiens
  siRNA target sequence for DOCK3 (NM_004947.2,3346-3364).
cagaagtacggaatatcat

SEQ ID NO: 333318 - DNA, 19 bp, Homo sapiens
  siRNA target sequence for DOCK3 (NM_004947.2,3348-3366).
gaagtacggaatatcatga

SEQ ID NO: 333319 - DNA, 19 bp, Homo sapiens
  siRNA target sequence for DOCK3 (NM_004947.2,3425-3443).
ggtggaggccgagttgatt

SEQ ID NO: 333320 - DNA, 19 bp, Homo sapiens
  siRNA target sequence for DOCK3 (NM_004947.2,3570-3588).
cgcgagaccggcatttcct

SEQ ID NO: 333321 - DNA, 19 bp, Homo sapiens
  siRNA target sequence for DOCK3 (NM_004947.2,3608-3626).
cctcatggaacgtcttctt

SEQ ID NO: 333322 - DNA, 19 bp, Homo sapiens
  siRNA target sequence for DOCK3 (NM_004947.2,3680-3698).
cactgttaacctgatgaat

SEQ ID NO: 333323 - DNA, 19 bp, Homo sapiens
  siRNA target sequence for DOCK3 (NM_004947.2,3682-3700).
ctgttaacctgatgaattt

SEQ ID NO: 333324 - DNA, 19 bp, Homo sapiens
  siRNA target sequence for DOCK3 (NM_004947.2,3737-3755).
ccgctacatccataagctt

SEQ ID NO: 333325 - DNA, 19 bp, Homo sapiens
  siRNA target sequence for DOCK3 (NM_004947.2,3738-3756).
cgctacatccataagcttt

SEQ ID NO: 333326 - DNA, 19 bp, Homo sapiens
  siRNA target sequence for DOCK3 (NM_004947.2,3796-3814).
catttaccctgctccttta

SEQ ID NO: 333327 - DNA, 19 bp, Homo sapiens
  siRNA target sequence for DOCK3 (NM_004947.2,3841-3859).
ggccactacgggaattcct

SEQ ID NO: 333328 - DNA, 19 bp, Homo sapiens
  siRNA target sequence for DOCK3 (NM_004947.2,3897-3915).
ggactgtgccggaagatca

SEQ ID NO: 333329 - DNA, 19 bp, Homo sapiens
  siRNA target sequence for DOCK3 (NM_004947.2,3898-3916).
gactgtgccggaagatcat

SEQ ID NO: 333330 - DNA, 19 bp, Homo sapiens
  siRNA target sequence for DOCK3 (NM_004947.2,3904-3922).
gccggaagatcattcacta

SEQ ID NO: 333331 - DNA, 19 bp, Homo sapiens
  siRNA target sequence for DOCK3 (NM_004947.2,3983-4001).
gtacgagagcctctatgat

SEQ ID NO: 333332 - DNA, 19 bp, Homo sapiens
  siRNA target sequence for DOCK3 (NM_004947.2,4085-4103).
ctttcgggtcggcttctat

SEQ ID NO: 333333 - DNA, 19 bp, Homo sapiens
  siRNA target sequence for DOCK3 (NM_004947.2,4187-4205).
gaggatgctcagtgagttt

SEQ ID NO: 333334 - DNA, 19 bp, Homo sapiens
  siRNA target sequence for DOCK3 (NM_004947.2,4292-4310).
gacgcccattccagattat

SEQ ID NO: 333335 - DNA, 19 bp, Homo sapiens
  siRNA target sequence for DOCK3 (NM_004947.2,4294-4312).
cgcccattccagattatgt

SEQ ID NO: 333336 - DNA, 19 bp, Homo sapiens
  siRNA target sequence for DOCK3 (NM_004947.2,4354-4372).
gcttctatcgcgtcaacaa

SEQ ID NO: 333337 - DNA, 19 bp, Homo sapiens
  siRNA target sequence for DOCK3 (NM_004947.2,4355-4373).
cttctatcgcgtcaacaat

SEQ ID NO: 333338 - DNA, 19 bp, Homo sapiens
  siRNA target sequence for DOCK3 (NM_004947.2,4387-4405).
ggtatgacaggccttttca

SEQ ID NO: 333339 - DNA, 19 bp, Homo sapiens
  siRNA target sequence for DOCK3 (NM_004947.2,4436-4454).
caagagcctgtggattgaa

SEQ ID NO: 333340 - DNA, 19 bp, Homo sapiens
  siRNA target sequence for DOCK3 (NM_004947.2,4651-4669).
gcctgaatggtgtcattga

SEQ ID NO: 333341 - DNA, 19 bp, Homo sapiens
  siRNA target sequence for DOCK3 (NM_004947.2,4652-4670).
cctgaatggtgtcattgat

SEQ ID NO: 333342 - DNA, 19 bp, Homo sapiens
  siRNA target sequence for DOCK3 (NM_004947.2,4664-4682).
cattgatgcagctgtcaat

SEQ ID NO: 333343 - DNA, 19 bp, Homo sapiens
  siRNA target sequence for DOCK3 (NM_004947.2,4810-4828).
ggctagcagttcatgagaa

SEQ ID NO: 333344 - DNA, 19 bp, Homo sapiens
  siRNA target sequence for DOCK3 (NM_004947.2,4894-4912).
ccagtctctaccatgagtt

SEQ ID NO: 333345 - DNA, 19 bp, Homo sapiens
  siRNA target sequence for DOCK3 (NM_004947.2,4895-4913).
cagtctctaccatgagttt

SEQ ID NO: 333346 - DNA, 19 bp, Homo sapiens
  siRNA target sequence for DOCK3 (NM_004947.2,4914-4932).
ccaggtttggataagctaa

SEQ ID NO: 333347 - DNA, 19 bp, Homo sapiens
  siRNA target sequence for DOCK3 (NM_004947.2,4928-4946).
gctaagtcctgcatgttca

SEQ ID NO: 333348 - DNA, 19 bp, Homo sapiens
  siRNA target sequence for DOCK3 (NM_004947.2,4954-4972).
gcaccccacggggaaatgt

SEQ ID NO: 333349 - DNA, 19 bp, Homo sapiens
  siRNA target sequence for DOCK3 (NM_004947.2,4955-4973).
caccccacggggaaatgtt

SEQ ID NO: 333350 - DNA, 19 bp, Homo sapiens
  siRNA target sequence for DOCK3 (NM_004947.2,4996-5014).
gtccggagagcatcaagat

SEQ ID NO: 333351 - DNA, 19 bp, Homo sapiens
  siRNA target sequence for DOCK3 (NM_004947.2,4998-5016).
ccggagagcatcaagatga

SEQ ID NO: 333352 - DNA, 19 bp, Homo sapiens
  siRNA target sequence for DOCK3 (NM_004947.2,5022-5040).
cggcacagccccatgaact

SEQ ID NO: 333353 - DNA, 19 bp, Homo sapiens
  siRNA target sequence for DOCK3 (NM_004947.2,5023-5041).
ggcacagccccatgaactt

SEQ ID NO: 333354 - DNA, 19 bp, Homo sapiens
  siRNA target sequence for DOCK3 (NM_004947.2,5078-5096).
ctcacatgcgtctagtgaa

SEQ ID NO: 333355 - DNA, 19 bp, Homo sapiens
  siRNA target sequence for DOCK3 (NM_004947.2,5272-5290).
cagcaccatcccagatgat

SEQ ID NO: 333356 - DNA, 19 bp, Homo sapiens
  siRNA target sequence for DOCK3 (NM_004947.2,5274-5292).
gcaccatcccagatgatta

SEQ ID NO: 333357 - DNA, 19 bp, Homo sapiens
  siRNA target sequence for DOCK3 (NM_004947.2,5320-5338).
ctccctctctgccagataa

SEQ ID NO: 333358 - DNA, 19 bp, Homo sapiens
  siRNA target sequence for DOCK3 (NM_004947.2,5344-5362).
gccatgcccgtgaaatgat

SEQ ID NO: 333359 - DNA, 19 bp, Homo sapiens
  siRNA target sequence for DOCK3 (NM_004947.2,5349-5367).
gcccgtgaaatgatgttgt

SEQ ID NO: 333360 - DNA, 19 bp, Homo sapiens
  siRNA target sequence for DOCK3 (NM_004947.2,5524-5542).
gtcattactccctacactt

SEQ ID NO: 333361 - DNA, 19 bp, Homo sapiens
  siRNA target sequence for DOCK3 (NM_004947.2,5707-5725).
ccttgagtgagagtaactt

SEQ ID NO: 333362 - DNA, 19 bp, Homo sapiens
  siRNA target sequence for DOCK3 (NM_004947.2,5708-5726).
cttgagtgagagtaacttt

SEQ ID NO: 333363 - DNA, 19 bp, Homo sapiens
  siRNA target sequence for NFKBIL1 (NM_005007.2,431-449).
gatgcctacaccgatttct

SEQ ID NO: 333364 - DNA, 19 bp, Homo sapiens
  siRNA target sequence for NFKBIL1 (NM_005007.2,473-491).
ccctccgccatgggaataa

SEQ ID NO: 333365 - DNA, 19 bp, Homo sapiens
  siRNA target sequence for NFKBIL1 (NM_005007.2,976-994).
cagcctctggcgatttggt

SEQ ID NO: 333366 - DNA, 19 bp, Homo sapiens
  siRNA target sequence for NFKBIL1 (NM_005007.2,1085-1103).
gctctgaggaggtacttga

SEQ ID NO: 333367 - DNA, 19 bp, Homo sapiens
  siRNA target sequence for NRCAM (NM_005010.1,458-476).
gcagagtgcccctgattct

SEQ ID NO: 333368 - DNA, 19 bp, Homo sapiens
  siRNA target sequence for NRCAM (NM_005010.1,461-479).
gagtgcccctgattctctt

SEQ ID NO: 333369 - DNA, 19 bp, Homo sapiens
  siRNA target sequence for NRCAM (NM_005010.1,567-585).
gtctccaaaagattacatt

SEQ ID NO: 333370 - DNA, 19 bp, Homo sapiens
  siRNA target sequence for NRCAM (NM_005010.1,591-609).
ccctcgggagaatattgta

SEQ ID NO: 333371 - DNA, 19 bp, Homo sapiens
  siRNA target sequence for NRCAM (NM_005010.1,592-610).
cctcgggagaatattgtaa

SEQ ID NO: 333372 - DNA, 19 bp, Homo sapiens
  siRNA target sequence for NRCAM (NM_005010.1,656-674).
cccgtaatgggactcattt

SEQ ID NO: 333373 - DNA, 19 bp, Homo sapiens
  siRNA target sequence for NRCAM (NM_005010.1,668-686).
ctcattttgacatcgataa

SEQ ID NO: 333374 - DNA, 19 bp, Homo sapiens
  siRNA target sequence for NRCAM (NM_005010.1,712-730).
ggcacaggaacgctcataa

SEQ ID NO: 333375 - DNA, 19 bp, Homo sapiens
  siRNA target sequence for NRCAM (NM_005010.1,716-734).
caggaacgctcataattaa

SEQ ID NO: 333376 - DNA, 19 bp, Homo sapiens
  siRNA target sequence for NRCAM (NM_005010.1,718-736).
ggaacgctcataattaaca

SEQ ID NO: 333377 - DNA, 19 bp, Homo sapiens
  siRNA target sequence for NRCAM (NM_005010.1,722-740).
cgctcataattaacatcat

SEQ ID NO: 333378 - DNA, 19 bp, Homo sapiens
  siRNA target sequence for NRCAM (NM_005010.1,759-777).
gacctatgaaggagtctat

SEQ ID NO: 333379 - DNA, 19 bp, Homo sapiens
  siRNA target sequence for NRCAM (NM_005010.1,761-779).
cctatgaaggagtctatca

SEQ ID NO: 333380 - DNA, 19 bp, Homo sapiens
  siRNA target sequence for NRCAM (NM_005010.1,801-819).
cggagctgcagtttctaat

SEQ ID NO: 333381 - DNA, 19 bp, Homo sapiens
  siRNA target sequence for NRCAM (NM_005010.1,852-870).
gtggaccaaagaaaaactt

SEQ ID NO: 333382 - DNA, 19 bp, Homo sapiens
  siRNA target sequence for NRCAM (NM_005010.1,871-889).
gaaccaatcacacttcaaa

SEQ ID NO: 333383 - DNA, 19 bp, Homo sapiens
  siRNA target sequence for NRCAM (NM_005010.1,890-908).
gtggtcagtctttagtact

SEQ ID NO: 333384 - DNA, 19 bp, Homo sapiens
  siRNA target sequence for NRCAM (NM_005010.1,912-930).
ctgcagacccccaattgga

SEQ ID NO: 333385 - DNA, 19 bp, Homo sapiens
  siRNA target sequence for NRCAM (NM_005010.1,914-932).
gcagacccccaattggatt

SEQ ID NO: 333386 - DNA, 19 bp, Homo sapiens
  siRNA target sequence for NRCAM (NM_005010.1,934-952).
ccaccacctataatatttt

SEQ ID NO: 333387 - DNA, 19 bp, Homo sapiens
  siRNA target sequence for NRCAM (NM_005010.1,937-955).
ccacctataatattttgga

SEQ ID NO: 333388 - DNA, 19 bp, Homo sapiens
  siRNA target sequence for NRCAM (NM_005010.1,1004-1022).
gtttgaatggggaccttta

SEQ ID NO: 333389 - DNA, 19 bp, Homo sapiens
  siRNA target sequence for NRCAM (NM_005010.1,1044-1062).
ggacacccgcgaagactat

SEQ ID NO: 333390 - DNA, 19 bp, Homo sapiens
  siRNA target sequence for NRCAM (NM_005010.1,1045-1063).
gacacccgcgaagactata

SEQ ID NO: 333391 - DNA, 19 bp, Homo sapiens
  siRNA target sequence for NRCAM (NM_005010.1,1050-1068).
ccgcgaagactatatctgt

SEQ ID NO: 333392 - DNA, 19 bp, Homo sapiens
  siRNA target sequence for NRCAM (NM_005010.1,1051-1069).
cgcgaagactatatctgtt

SEQ ID NO: 333393 - DNA, 19 bp, Homo sapiens
  siRNA target sequence for NRCAM (NM_005010.1,1052-1070).
gcgaagactatatctgtta

SEQ ID NO: 333394 - DNA, 19 bp, Homo sapiens
  siRNA target sequence for NRCAM (NM_005010.1,1053-1071).
cgaagactatatctgttat

SEQ ID NO: 333395 - DNA, 19 bp, Homo sapiens
  siRNA target sequence for NRCAM (NM_005010.1,1057-1075).
gactatatctgttatgcta

SEQ ID NO: 333396 - DNA, 19 bp, Homo sapiens
  siRNA target sequence for NRCAM (NM_005010.1,1067-1085).
gttatgctagatttaatca

SEQ ID NO: 333397 - DNA, 19 bp, Homo sapiens
  siRNA target sequence for NRCAM (NM_005010.1,1073-1091).
ctagatttaatcatactca

SEQ ID NO: 333398 - DNA, 19 bp, Homo sapiens
  siRNA target sequence for NRCAM (NM_005010.1,1155-1173).
gccaccaacatttttaact

SEQ ID NO: 333399 - DNA, 19 bp, Homo sapiens
  siRNA target sequence for NRCAM (NM_005010.1,1177-1195).
gaaggcaatgcaagtaaca

SEQ ID NO: 333400 - DNA, 19 bp, Homo sapiens
  siRNA target sequence for NRCAM (NM_005010.1,1243-1261).
ggactgcctaccccaatta

SEQ ID NO: 333401 - DNA, 19 bp, Homo sapiens
  siRNA target sequence for NRCAM (NM_005010.1,1246-1264).
ctgcctaccccaattattt

SEQ ID NO: 333402 - DNA, 19 bp, Homo sapiens
  siRNA target sequence for NRCAM (NM_005010.1,1304-1322).
cagtttataagaactttga

SEQ ID NO: 333403 - DNA, 19 bp, Homo sapiens
  siRNA target sequence for NRCAM (NM_005010.1,1328-1346).
ccttgcagatcattcatgt

SEQ ID NO: 333404 - DNA, 19 bp, Homo sapiens
  siRNA target sequence for NRCAM (NM_005010.1,1329-1347).
cttgcagatcattcatgtt

SEQ ID NO: 333405 - DNA, 19 bp, Homo sapiens
  siRNA target sequence for NRCAM (NM_005010.1,1399-1417).
gccatccaccataccattt

SEQ ID NO: 333406 - DNA, 19 bp, Homo sapiens
  siRNA target sequence for NRCAM (NM_005010.1,1401-1419).
catccaccataccatttct

SEQ ID NO: 333407 - DNA, 19 bp, Homo sapiens
  siRNA target sequence for NRCAM (NM_005010.1,1404-1422).
ccaccataccatttctgtt

SEQ ID NO: 333408 - DNA, 19 bp, Homo sapiens
  siRNA target sequence for NRCAM (NM_005010.1,1405-1423).
caccataccatttctgtta

SEQ ID NO: 333409 - DNA, 19 bp, Homo sapiens
  siRNA target sequence for NRCAM (NM_005010.1,1412-1430).
ccatttctgttagagttaa

SEQ ID NO: 333410 - DNA, 19 bp, Homo sapiens
  siRNA target sequence for NRCAM (NM_005010.1,1494-1512).
cttgatctgcagagctaat

SEQ ID NO: 333411 - DNA, 19 bp, Homo sapiens
  siRNA target sequence for NRCAM (NM_005010.1,1519-1537).
cccaaacccagaattagct

SEQ ID NO: 333412 - DNA, 19 bp, Homo sapiens
  siRNA target sequence for NRCAM (NM_005010.1,1594-1612).
gatggcgataccattattt

SEQ ID NO: 333413 - DNA, 19 bp, Homo sapiens
  siRNA target sequence for NRCAM (NM_005010.1,1597-1615).
ggcgataccattatttttt

SEQ ID NO: 333414 - DNA, 19 bp, Homo sapiens
  siRNA target sequence for NRCAM (NM_005010.1,1631-1649).
gatcaagtgcagtctatca

SEQ ID NO: 333415 - DNA, 19 bp, Homo sapiens
  siRNA target sequence for NRCAM (NM_005010.1,1650-1668).
gtgcaatgcctctaatgaa

SEQ ID NO: 333416 - DNA, 19 bp, Homo sapiens
  siRNA target sequence for NRCAM (NM_005010.1,1652-1670).
gcaatgcctctaatgaata

SEQ ID NO: 333417 - DNA, 19 bp, Homo sapiens
  siRNA target sequence for NRCAM (NM_005010.1,1657-1675).
gcctctaatgaatatggat

SEQ ID NO: 333418 - DNA, 19 bp, Homo sapiens
  siRNA target sequence for NRCAM (NM_005010.1,1658-1676).
cctctaatgaatatggata

SEQ ID NO: 333419 - DNA, 19 bp, Homo sapiens
  siRNA target sequence for NRCAM (NM_005010.1,1760-1778).
caaacaggcctgctttact

SEQ ID NO: 333420 - DNA, 19 bp, Homo sapiens
  siRNA target sequence for NRCAM (NM_005010.1,1807-1825).
ccaaccatcgagtggttta

SEQ ID NO: 333421 - DNA, 19 bp, Homo sapiens
  siRNA target sequence for NRCAM (NM_005010.1,1808-1826).
caaccatcgagtggtttaa

SEQ ID NO: 333422 - DNA, 19 bp, Homo sapiens
  siRNA target sequence for NRCAM (NM_005010.1,1812-1830).
catcgagtggtttaaagga

SEQ ID NO: 333423 - DNA, 19 bp, Homo sapiens
  siRNA target sequence for NRCAM (NM_005010.1,1821-1839).
gtttaaaggagctaaagga

SEQ ID NO: 333424 - DNA, 19 bp, Homo sapiens
  siRNA target sequence for NRCAM (NM_005010.1,1928-1946).
cgtgtgttgcaaggaataa

SEQ ID NO: 333425 - DNA, 19 bp, Homo sapiens
  siRNA target sequence for NRCAM (NM_005010.1,1991-2009).
ctacatggatcgttaaaca

SEQ ID NO: 333426 - DNA, 19 bp, Homo sapiens
  siRNA target sequence for NRCAM (NM_005010.1,2001-2019).
cgttaaacagcccgaatat

SEQ ID NO: 333427 - DNA, 19 bp, Homo sapiens
  siRNA target sequence for NRCAM (NM_005010.1,2296-2314).
ccaaatcctccctttgact

SEQ ID NO: 333428 - DNA, 19 bp, Homo sapiens
  siRNA target sequence for NRCAM (NM_005010.1,2297-2315).
caaatcctccctttgactt

SEQ ID NO: 333429 - DNA, 19 bp, Homo sapiens
  siRNA target sequence for NRCAM (NM_005010.1,2303-2321).
ctccctttgacttagaact

SEQ ID NO: 333430 - DNA, 19 bp, Homo sapiens
  siRNA target sequence for NRCAM (NM_005010.1,2313-2331).
cttagaactgacagatcaa

SEQ ID NO: 333431 - DNA, 19 bp, Homo sapiens
  siRNA target sequence for NRCAM (NM_005010.1,2322-2340).
gacagatcaacttgacaaa

SEQ ID NO: 333432 - DNA, 19 bp, Homo sapiens
  siRNA target sequence for NRCAM (NM_005010.1,2360-2378).
ccccaggcgatgacaacaa

SEQ ID NO: 333433 - DNA, 19 bp, Homo sapiens
  siRNA target sequence for NRCAM (NM_005010.1,2362-2380).
ccaggcgatgacaacaata

SEQ ID NO: 333434 - DNA, 19 bp, Homo sapiens
  siRNA target sequence for NRCAM (NM_005010.1,2381-2399).
gccccattacaaaattcat

SEQ ID NO: 333435 - DNA, 19 bp, Homo sapiens
  siRNA target sequence for NRCAM (NM_005010.1,2397-2415).
catcatcgaatatgaagat

SEQ ID NO: 333436 - DNA, 19 bp, Homo sapiens
  siRNA target sequence for NRCAM (NM_005010.1,2436-2454).
gtggcaccaccaaactgaa

SEQ ID NO: 333437 - DNA, 19 bp, Homo sapiens
  siRNA target sequence for NRCAM (NM_005010.1,2627-2645).
gatcagagcctgataattt

SEQ ID NO: 333438 - DNA, 19 bp, Homo sapiens
  siRNA target sequence for NRCAM (NM_005010.1,2630-2648).
cagagcctgataatttggt

SEQ ID NO: 333439 - DNA, 19 bp, Homo sapiens
  siRNA target sequence for NRCAM (NM_005010.1,2635-2653).
cctgataatttggtgatta

SEQ ID NO: 333440 - DNA, 19 bp, Homo sapiens
  siRNA target sequence for NRCAM (NM_005010.1,2638-2656).
gataatttggtgattacgt

SEQ ID NO: 333441 - DNA, 19 bp, Homo sapiens
  siRNA target sequence for NRCAM (NM_005010.1,2661-2679).
gcccttgaatggtttcgaa

SEQ ID NO: 333442 - DNA, 19 bp, Homo sapiens
  siRNA target sequence for NRCAM (NM_005010.1,2667-2685).
gaatggtttcgaatctaat

SEQ ID NO: 333443 - DNA, 19 bp, Homo sapiens
  siRNA target sequence for NRCAM (NM_005010.1,2690-2708).
caggccttcagtacaaagt

SEQ ID NO: 333444 - DNA, 19 bp, Homo sapiens
  siRNA target sequence for NRCAM (NM_005010.1,2692-2710).
ggccttcagtacaaagtta

SEQ ID NO: 333445 - DNA, 19 bp, Homo sapiens
  siRNA target sequence for NRCAM (NM_005010.1,2757-2775).
ggcaaatgtatccaaatat

SEQ ID NO: 333446 - DNA, 19 bp, Homo sapiens
  siRNA target sequence for NRCAM (NM_005010.1,2764-2782).
gtatccaaatatattgtct

SEQ ID NO: 333447 - DNA, 19 bp, Homo sapiens
  siRNA target sequence for NRCAM (NM_005010.1,2781-2799).
ctcaggcacgccaaccttt

SEQ ID NO: 333448 - DNA, 19 bp, Homo sapiens
  siRNA target sequence for NRCAM (NM_005010.1,2789-2807).
cgccaacctttgttccata

SEQ ID NO: 333449 - DNA, 19 bp, Homo sapiens
  siRNA target sequence for NRCAM (NM_005010.1,2804-2822).
catacctgatcaaagttca

SEQ ID NO: 333450 - DNA, 19 bp, Homo sapiens
  siRNA target sequence for NRCAM (NM_005010.1,2818-2836).
gttcaggccctgaatgaca

SEQ ID NO: 333451 - DNA, 19 bp, Homo sapiens
  siRNA target sequence for NRCAM (NM_005010.1,2849-2867).
ccgagccagctgtagtcat

SEQ ID NO: 333452 - DNA, 19 bp, Homo sapiens
  siRNA target sequence for NRCAM (NM_005010.1,2959-2977).
ccagtacctctgaaaagca

SEQ ID NO: 333453 - DNA, 19 bp, Homo sapiens
  siRNA target sequence for NRCAM (NM_005010.1,2992-3010).
caaggctatcggatttact

SEQ ID NO: 333454 - DNA, 19 bp, Homo sapiens
  siRNA target sequence for NRCAM (NM_005010.1,3018-3036).
gacccagagttcatctaaa

SEQ ID NO: 333455 - DNA, 19 bp, Homo sapiens
  siRNA target sequence for NRCAM (NM_005010.1,3038-3056).
gaaacagacgtcacattga

SEQ ID NO: 333456 - DNA, 19 bp, Homo sapiens
  siRNA target sequence for NRCAM (NM_005010.1,3217-3235).
gctccctcgtctttgaaga

SEQ ID NO: 333457 - DNA, 19 bp, Homo sapiens
  siRNA target sequence for NRCAM (NM_005010.1,3224-3242).
cgtctttgaagattgtgaa

SEQ ID NO: 333458 - DNA, 19 bp, Homo sapiens
  siRNA target sequence for NRCAM (NM_005010.1,3225-3243).
gtctttgaagattgtgaat

SEQ ID NO: 333459 - DNA, 19 bp, Homo sapiens
  siRNA target sequence for NRCAM (NM_005010.1,3352-3370).
ggccctctggtagatttga

SEQ ID NO: 333460 - DNA, 19 bp, Homo sapiens
  siRNA target sequence for NRCAM (NM_005010.1,3353-3371).
gccctctggtagatttgaa

SEQ ID NO: 333461 - DNA, 19 bp, Homo sapiens
  siRNA target sequence for NRCAM (NM_005010.1,3354-3372).
ccctctggtagatttgaaa

SEQ ID NO: 333462 - DNA, 19 bp, Homo sapiens
  siRNA target sequence for NRCAM (NM_005010.1,3360-3378).
ggtagatttgaaaattcct

SEQ ID NO: 333463 - DNA, 19 bp, Homo sapiens
  siRNA target sequence for NRCAM (NM_005010.1,3384-3402).
caagacacggtggacttta

SEQ ID NO: 333464 - DNA, 19 bp, Homo sapiens
  siRNA target sequence for NRCAM (NM_005010.1,3417-3435).
cagcactcgatataagttt

SEQ ID NO: 333465 - DNA, 19 bp, Homo sapiens
  siRNA target sequence for NRCAM (NM_005010.1,3419-3437).
gcactcgatataagtttta

SEQ ID NO: 333466 - DNA, 19 bp, Homo sapiens
  siRNA target sequence for NRCAM (NM_005010.1,3420-3438).
cactcgatataagttttat

SEQ ID NO: 333467 - DNA, 19 bp, Homo sapiens
  siRNA target sequence for NRCAM (NM_005010.1,3424-3442).
cgatataagttttatttct

SEQ ID NO: 333468 - DNA, 19 bp, Homo sapiens
  siRNA target sequence for NRCAM (NM_005010.1,3520-3538).
cggcaggtggatattgcaa

SEQ ID NO: 333469 - DNA, 19 bp, Homo sapiens
  siRNA target sequence for NRCAM (NM_005010.1,3571-3589).
gttgctctccttatcttaa

SEQ ID NO: 333470 - DNA, 19 bp, Homo sapiens
  siRNA target sequence for NRCAM (NM_005010.1,3574-3592).
gctctccttatcttaattt

SEQ ID NO: 333471 - DNA, 19 bp, Homo sapiens
  siRNA target sequence for NRCAM (NM_005010.1,3621-3639).
caagggtggtaaatatcca

SEQ ID NO: 333472 - DNA, 19 bp, Homo sapiens
  siRNA target sequence for NRCAM (NM_005010.1,3626-3644).
gtggtaaatatccagttaa

SEQ ID NO: 333473 - DNA, 19 bp, Homo sapiens
  siRNA target sequence for NRCAM (NM_005010.1,3659-3677).
cccatgctgaccctgaaat

SEQ ID NO: 333474 - DNA, 19 bp, Homo sapiens
  siRNA target sequence for NRCAM (NM_005010.1,3813-3831).
ctatggagaaggggttaat

SEQ ID NO: 333475 - DNA, 19 bp, Homo sapiens
  siRNA target sequence for NRCAM (NM_005010.1,3825-3843).
ggttaatggccagttcaat

SEQ ID NO: 333476 - DNA, 19 bp, Homo sapiens
  siRNA target sequence for NRCAM (NM_005010.1,3855-3873).
ctttattggacaatacagt

SEQ ID NO: 333477 - DNA, 19 bp, Homo sapiens
  siRNA target sequence for NRCAM (NM_005010.1,3863-3881).
gacaatacagtggtaagaa

SEQ ID NO: 333478 - DNA, 19 bp, Homo sapiens
  siRNA target sequence for NRCAM (NM_005010.1,3891-3909).
gccggctgaaggaaacgaa

SEQ ID NO: 333479 - DNA, 19 bp, Homo sapiens
  siRNA target sequence for NRCAM (NM_005010.1,3892-3910).
ccggctgaaggaaacgaaa

SEQ ID NO: 333480 - DNA, 19 bp, Homo sapiens
  siRNA target sequence for NRCAM (NM_005010.1,3928-3946).
cctgtcaacgccatgaatt

SEQ ID NO: 333481 - DNA, 19 bp, Homo sapiens
  siRNA target sequence for PCBP2 (NM_005016.2,877-895).
cggattcagtggcattgaa

SEQ ID NO: 333482 - DNA, 19 bp, Homo sapiens
  siRNA target sequence for PRF1 (NM_005041.2,641-659).
gagtgccgcttctacagtt

SEQ ID NO: 333483 - DNA, 19 bp, Homo sapiens
  siRNA target sequence for PRF1 (NM_005041.2,646-664).
ccgcttctacagtttccat

SEQ ID NO: 333484 - DNA, 19 bp, Homo sapiens
  siRNA target sequence for PRF1 (NM_005041.2,749-767).
gcctacctcaggcttatct

SEQ ID NO: 333485 - DNA, 19 bp, Homo sapiens
  siRNA target sequence for PRF1 (NM_005041.2,898-916).
cgaggcccaggtcaacata

SEQ ID NO: 333486 - DNA, 19 bp, Homo sapiens
  siRNA target sequence for PRF1 (NM_005041.2,1034-1052).
ggccatcacacctccatta

SEQ ID NO: 333487 - DNA, 19 bp, Homo sapiens
  siRNA target sequence for PRF1 (NM_005041.2,1418-1436).
gccacggatgcctatgtga

SEQ ID NO: 333488 - DNA, 19 bp, Homo sapiens
  siRNA target sequence for PRF1 (NM_005041.2,1500-1518).
ggtcagtgcggctggattt

SEQ ID NO: 333489 - DNA, 19 bp, Homo sapiens
  siRNA target sequence for PRF1 (NM_005041.2,1642-1660).
gagatgcaacctgaatcat

SEQ ID NO: 333490 - DNA, 19 bp, Homo sapiens
  siRNA target sequence for NR1D2 (NM_005126.2,276-294).
gaatgcaggaggtgtgatt

SEQ ID NO: 333491 - DNA, 19 bp, Homo sapiens
  siRNA target sequence for NR1D2 (NM_005126.2,289-307).
gtgattgcctatatcagtt

SEQ ID NO: 333492 - DNA, 19 bp, Homo sapiens
  siRNA target sequence for NR1D2 (NM_005126.2,388-406).
ccatcttctccaaatagct

SEQ ID NO: 333493 - DNA, 19 bp, Homo sapiens
  siRNA target sequence for NR1D2 (NM_005126.2,398-416).
caaatagctctaattctga

SEQ ID NO: 333494 - DNA, 19 bp, Homo sapiens
  siRNA target sequence for NR1D2 (NM_005126.2,420-438).
caatggtaatcccaagaat

SEQ ID NO: 333495 - DNA, 19 bp, Homo sapiens
  siRNA target sequence for NR1D2 (NM_005126.2,440-458).
gtgatctcgccaatattga

SEQ ID NO: 333496 - DNA, 19 bp, Homo sapiens
  siRNA target sequence for NR1D2 (NM_005126.2,465-483).
cttgaagaatgatcgaata

SEQ ID NO: 333497 - DNA, 19 bp, Homo sapiens
  siRNA target sequence for NR1D2 (NM_005126.2,468-486).
gaagaatgatcgaatagat

SEQ ID NO: 333498 - DNA, 19 bp, Homo sapiens
  siRNA target sequence for NR1D2 (NM_005126.2,471-489).
gaatgatcgaatagattgt

SEQ ID NO: 333499 - DNA, 19 bp, Homo sapiens
  siRNA target sequence for NR1D2 (NM_005126.2,475-493).
gatcgaatagattgttcta

SEQ ID NO: 333500 - DNA, 19 bp, Homo sapiens
  siRNA target sequence for NR1D2 (NM_005126.2,478-496).
cgaatagattgttctatga

SEQ ID NO: 333501 - DNA, 19 bp, Homo sapiens
  siRNA target sequence for NR1D2 (NM_005126.2,512-530).
gtgcacctgggatgacaaa

SEQ ID NO: 333502 - DNA, 19 bp, Homo sapiens
  siRNA target sequence for NR1D2 (NM_005126.2,522-540).
gatgacaaaaagtcatagt

SEQ ID NO: 333503 - DNA, 19 bp, Homo sapiens
  siRNA target sequence for NR1D2 (NM_005126.2,533-551).
gtcatagtggtgtgacaaa

SEQ ID NO: 333504 - DNA, 19 bp, Homo sapiens
  siRNA target sequence for NR1D2 (NM_005126.2,565-583).
gttctactgtgtaaagtct

SEQ ID NO: 333505 - DNA, 19 bp, Homo sapiens
  siRNA target sequence for NR1D2 (NM_005126.2,645-663).
ctttcggagaagtattcaa

SEQ ID NO: 333506 - DNA, 19 bp, Homo sapiens
  siRNA target sequence for NR1D2 (NM_005126.2,760-778).
ctgtctgttggaatgtcaa

SEQ ID NO: 333507 - DNA, 19 bp, Homo sapiens
  siRNA target sequence for NR1D2 (NM_005126.2,790-808).
cggtttggtcgtattccta

SEQ ID NO: 333508 - DNA, 19 bp, Homo sapiens
  siRNA target sequence for NR1D2 (NM_005126.2,791-809).
ggtttggtcgtattcctaa

SEQ ID NO: 333509 - DNA, 19 bp, Homo sapiens
  siRNA target sequence for NR1D2 (NM_005126.2,805-823).
cctaagcgtgaaaaacaga

SEQ ID NO: 333510 - DNA, 19 bp, Homo sapiens
  siRNA target sequence for NR1D2 (NM_005126.2,820-838).
cagaggatgctaattgaaa

SEQ ID NO: 333511 - DNA, 19 bp, Homo sapiens
  siRNA target sequence for NR1D2 (NM_005126.2,878-896).
gtggtcacttgcaaaatga

SEQ ID NO: 333512 - DNA, 19 bp, Homo sapiens
  siRNA target sequence for NR1D2 (NM_005126.2,880-898).
ggtcacttgcaaaatgaca

SEQ ID NO: 333513 - DNA, 19 bp, Homo sapiens
  siRNA target sequence for NR1D2 (NM_005126.2,885-903).
cttgcaaaatgacacatta

SEQ ID NO: 333514 - DNA, 19 bp, Homo sapiens
  siRNA target sequence for NR1D2 (NM_005126.2,1043-1061).
gagctcacaaggatacctt

SEQ ID NO: 333515 - DNA, 19 bp, Homo sapiens
  siRNA target sequence for NR1D2 (NM_005126.2,1045-1063).
gctcacaaggataccttta

SEQ ID NO: 333516 - DNA, 19 bp, Homo sapiens
  siRNA target sequence for NR1D2 (NM_005126.2,1046-1064).
ctcacaaggatacctttat

SEQ ID NO: 333517 - DNA, 19 bp, Homo sapiens
  siRNA target sequence for NR1D2 (NM_005126.2,1134-1152).
gaacatggagcaatataat

SEQ ID NO: 333518 - DNA, 19 bp, Homo sapiens
  siRNA target sequence for NR1D2 (NM_005126.2,1206-1224).
gagccagcagcatctcaat

SEQ ID NO: 333519 - DNA, 19 bp, Homo sapiens
  siRNA target sequence for NR1D2 (NM_005126.2,1228-1246).
cagttcaaagggaggaata

SEQ ID NO: 333520 - DNA, 19 bp, Homo sapiens
  siRNA target sequence for NR1D2 (NM_005126.2,1230-1248).
gttcaaagggaggaatata

SEQ ID NO: 333521 - DNA, 19 bp, Homo sapiens
  siRNA target sequence for NR1D2 (NM_005126.2,1267-1285).
catgccatttgtattgcaa

SEQ ID NO: 333522 - DNA, 19 bp, Homo sapiens
  siRNA target sequence for NR1D2 (NM_005126.2,1288-1306).
ggacattgtatgaacttct

SEQ ID NO: 333523 - DNA, 19 bp, Homo sapiens
  siRNA target sequence for NR1D2 (NM_005126.2,1302-1320).
cttctccaatgcttatact

SEQ ID NO: 333524 - DNA, 19 bp, Homo sapiens
  siRNA target sequence for NR1D2 (NM_005126.2,1305-1323).
ctccaatgcttatactcaa

SEQ ID NO: 333525 - DNA, 19 bp, Homo sapiens
  siRNA target sequence for NR1D2 (NM_005126.2,1312-1330).
gcttatactcaaagagtat

SEQ ID NO: 333526 - DNA, 19 bp, Homo sapiens
  siRNA target sequence for NR1D2 (NM_005126.2,1343-1361).
cgatagatggattttctca

SEQ ID NO: 333527 - DNA, 19 bp, Homo sapiens
  siRNA target sequence for NR1D2 (NM_005126.2,1608-1626).
ggtacggttcgcatcatta

SEQ ID NO: 333528 - DNA, 19 bp, Homo sapiens
  siRNA target sequence for NR1D2 (NM_005126.2,1609-1627).
gtacggttcgcatcattat

SEQ ID NO: 333529 - DNA, 19 bp, Homo sapiens
  siRNA target sequence for NR1D2 (NM_005126.2,1613-1631).
ggttcgcatcattatttga

SEQ ID NO: 333530 - DNA, 19 bp, Homo sapiens
  siRNA target sequence for NR1D2 (NM_005126.2,1614-1632).
gttcgcatcattatttgat

SEQ ID NO: 333531 - DNA, 19 bp, Homo sapiens
  siRNA target sequence for NR1D2 (NM_005126.2,1642-1660).
cgtactgtcacctttttaa

SEQ ID NO: 333532 - DNA, 19 bp, Homo sapiens
  siRNA target sequence for NR1D2 (NM_005126.2,1702-1720).
gcaggggatctgctaaact

SEQ ID NO: 333533 - DNA, 19 bp, Homo sapiens
  siRNA target sequence for NR1D2 (NM_005126.2,1705-1723).
ggggatctgctaaactcta

SEQ ID NO: 333534 - DNA, 19 bp, Homo sapiens
  siRNA target sequence for NR1D2 (NM_005126.2,1729-1747).
gaatttagtgagaagctaa

SEQ ID NO: 333535 - DNA, 19 bp, Homo sapiens
  siRNA target sequence for NR1D2 (NM_005126.2,1752-1770).
cctccaacttagtgatgaa

SEQ ID NO: 333536 - DNA, 19 bp, Homo sapiens
  siRNA target sequence for NR1D2 (NM_005126.2,1808-1826).
cagatcgatctggaataga

SEQ ID NO: 333537 - DNA, 19 bp, Homo sapiens
  siRNA target sequence for NR1D2 (NM_005126.2,1810-1828).
gatcgatctggaatagaaa

SEQ ID NO: 333538 - DNA, 19 bp, Homo sapiens
  siRNA target sequence for NR1D2 (NM_005126.2,1867-1885).
cgtgcactaaggaccttaa

SEQ ID NO: 333539 - DNA, 19 bp, Homo sapiens
  siRNA target sequence for NR1D2 (NM_005126.2,1873-1891).
ctaaggaccttaataatga

SEQ ID NO: 333540 - DNA, 19 bp, Homo sapiens
  siRNA target sequence for NR1D2 (NM_005126.2,1941-1959).
gccagatcttcgatcttta

SEQ ID NO: 333541 - DNA, 19 bp, Homo sapiens
  siRNA target sequence for NR1D2 (NM_005126.2,1942-1960).
ccagatcttcgatctttaa

SEQ ID NO: 333542 - DNA, 19 bp, Homo sapiens
  siRNA target sequence for NR1D2 (NM_005126.2,1945-1963).
gatcttcgatctttaaaca

SEQ ID NO: 333543 - DNA, 19 bp, Homo sapiens
  siRNA target sequence for NR1D2 (NM_005126.2,1948-1966).
cttcgatctttaaacaaca

SEQ ID NO: 333544 - DNA, 19 bp, Homo sapiens
  siRNA target sequence for CHKL (NM_005198.3,248-266).
ggcttgcagcagtctaagt

SEQ ID NO: 333545 - DNA, 19 bp, Homo sapiens
  siRNA target sequence for CHKL (NM_005198.3,320-338).
gagcgccgagcctaccaat

SEQ ID NO: 333546 - DNA, 19 bp, Homo sapiens
  siRNA target sequence for CHKL (NM_005198.3,544-562).
cgtgatgttcgccatactt

SEQ ID NO: 333547 - DNA, 19 bp, Homo sapiens
  siRNA target sequence for CHKL (NM_005198.3,628-646).
cccaagtcggccattgaaa

SEQ ID NO: 333548 - DNA, 19 bp, Homo sapiens
  siRNA target sequence for CHKL (NM_005198.3,688-706).
cacgaagatggcgcaattt

SEQ ID NO: 333549 - DNA, 19 bp, Homo sapiens
  siRNA target sequence for CHKL (NM_005198.3,690-708).
cgaagatggcgcaatttca

SEQ ID NO: 333550 - DNA, 19 bp, Homo sapiens
  siRNA target sequence for CHKL (NM_005198.3,757-775).
catggagcggtacctaaaa

SEQ ID NO: 333551 - DNA, 19 bp, Homo sapiens
  siRNA target sequence for CHKL (NM_005198.3,761-779).
gagcggtacctaaaacaga

SEQ ID NO: 333552 - DNA, 19 bp, Homo sapiens
  siRNA target sequence for CHKL (NM_005198.3,976-994).
cttcgagtacagcagttat

SEQ ID NO: 333553 - DNA, 19 bp, Homo sapiens
  siRNA target sequence for CHKL (NM_005198.3,982-1000).
gtacagcagttataactat

SEQ ID NO: 333554 - DNA, 19 bp, Homo sapiens
  siRNA target sequence for CHKL (NM_005198.3,997-1015).
ctataggggctttgacatt

SEQ ID NO: 333555 - DNA, 19 bp, Homo sapiens
  siRNA target sequence for CHKL (NM_005198.3,1035-1053).
gggtttatgattatactca

SEQ ID NO: 333556 - DNA, 19 bp, Homo sapiens
  siRNA target sequence for CHKL (NM_005198.3,1055-1073).
gaggaatggcctttctaca

SEQ ID NO: 333557 - DNA, 19 bp, Homo sapiens
  siRNA target sequence for CHKL (NM_005198.3,1057-1075).
ggaatggcctttctacaaa

SEQ ID NO: 333558 - DNA, 19 bp, Homo sapiens
  siRNA target sequence for CHKL (NM_005198.3,1220-1238).
gctctggcatcccatttct

SEQ ID NO: 333559 - DNA, 19 bp, Homo sapiens
  siRNA target sequence for CHKL (NM_005198.3,1311-1329).
ctcggttccagttctactt

SEQ ID NO: 333560 - DNA, 19 bp, Homo sapiens
  siRNA target sequence for CHRNG (NM_005199.3,407-425).
cccctgacggctgtatcta

SEQ ID NO: 333561 - DNA, 19 bp, Homo sapiens
  siRNA target sequence for CHRNG (NM_005199.3,448-466).
cgttccgcctgctctatct

SEQ ID NO: 333562 - DNA, 19 bp, Homo sapiens
  siRNA target sequence for CHRNG (NM_005199.3,575-593).
ccatcgagtggattttcat

SEQ ID NO: 333563 - DNA, 19 bp, Homo sapiens
  siRNA target sequence for CHRNG (NM_005199.3,977-995).
ctgtggttgtgctcaatgt

SEQ ID NO: 333564 - DNA, 19 bp, Homo sapiens
  siRNA target sequence for CHRNG (NM_005199.3,1119-1137).
ccagtcccggctacagaat

SEQ ID NO: 333565 - DNA, 19 bp, Homo sapiens
  siRNA target sequence for CHRNG (NM_005199.3,1371-1389).
gcagagtcactttgacaat

SEQ ID NO: 333566 - DNA, 19 bp, Homo sapiens
  siRNA target sequence for COL8A2 (NM_005202.1,117-135).
gctatgccccagtgaagta

SEQ ID NO: 333567 - DNA, 19 bp, Homo sapiens
  siRNA target sequence for COL8A2 (NM_005202.1,1770-1788).
cgggcatgcccgtgaaatt

SEQ ID NO: 333568 - DNA, 19 bp, Homo sapiens
  siRNA target sequence for COL8A2 (NM_005202.1,1771-1789).
gggcatgcccgtgaaattt

SEQ ID NO: 333569 - DNA, 19 bp, Homo sapiens
  siRNA target sequence for COL8A2 (NM_005202.1,1773-1791).
gcatgcccgtgaaatttga

SEQ ID NO: 333570 - DNA, 19 bp, Homo sapiens
  siRNA target sequence for COL8A2 (NM_005202.1,1941-1959).
cctatacctacgatgagta

SEQ ID NO: 333571 - DNA, 19 bp, Homo sapiens
  siRNA target sequence for COL13A1 (NM_005203.3,783-801).
caaatggagacggctattt

SEQ ID NO: 333572 - DNA, 19 bp, Homo sapiens
  siRNA target sequence for COL13A1 (NM_005203.3,819-837).
ctgctggacgagaaatgga

SEQ ID NO: 333573 - DNA, 19 bp, Homo sapiens
  siRNA target sequence for COL13A1 (NM_005203.3,986-1004).
cgctgggctgtccatcatt

SEQ ID NO: 333574 - DNA, 19 bp, Homo sapiens
  siRNA target sequence for COL13A1 (NM_005203.3,1221-1239).
ctgcgctccagccaaataa

SEQ ID NO: 333575 - DNA, 19 bp, Homo sapiens
  siRNA target sequence for COL13A1 (NM_005203.3,1223-1241).
gcgctccagccaaataatt

SEQ ID NO: 333576 - DNA, 19 bp, Homo sapiens
  siRNA target sequence for COL13A1 (NM_005203.3,2033-2051).
gggacctcgcggtaaacca

SEQ ID NO: 333577 - DNA, 19 bp, Homo sapiens
  siRNA target sequence for GJA8 (NM_005267.2,320-338).
ccaccccgtccctgatgta

SEQ ID NO: 333578 - DNA, 19 bp, Homo sapiens
  siRNA target sequence for GJA8 (NM_005267.2,460-478).
ggcagcaaaggcactaaga

SEQ ID NO: 333579 - DNA, 19 bp, Homo sapiens
  siRNA target sequence for GJA8 (NM_005267.2,936-954).
gcctgccaagcctttcaat

SEQ ID NO: 333580 - DNA, 19 bp, Homo sapiens
  siRNA target sequence for GJA8 (NM_005267.2,1158-1176).
gccagagggggagaaagta

SEQ ID NO: 333581 - DNA, 19 bp, Homo sapiens
  siRNA target sequence for GJA8 (NM_005267.2,1224-1242).
ggagaaggtgtcaaagcaa

SEQ ID NO: 333582 - DNA, 19 bp, Homo sapiens
  siRNA target sequence for GJA8 (NM_005267.2,1304-1322).
ccctgagcaggctaagcaa

SEQ ID NO: 333583 - DNA, 19 bp, Homo sapiens
  siRNA target sequence for GJA8 (NM_005267.2,1305-1323).
cctgagcaggctaagcaaa

SEQ ID NO: 333584 - DNA, 19 bp, Homo sapiens
  siRNA target sequence for GJA8 (NM_005267.2,1336-1354).
gccaggtcagacgatctaa

SEQ ID NO: 333585 - DNA, 19 bp, Homo sapiens
  siRNA target sequence for GPR8 (NM_005286.2,191-209).
cggccgtcatccttgtaat

SEQ ID NO: 333586 - DNA, 19 bp, Homo sapiens
  siRNA target sequence for GPR8 (NM_005286.2,195-213).
cgtcatccttgtaatccta

SEQ ID NO: 333587 - DNA, 19 bp, Homo sapiens
  siRNA target sequence for GPR8 (NM_005286.2,364-382).
gccgtcgaccactacaaca

SEQ ID NO: 333588 - DNA, 19 bp, Homo sapiens
  siRNA target sequence for GPR8 (NM_005286.2,365-383).
ccgtcgaccactacaacat

SEQ ID NO: 333589 - DNA, 19 bp, Homo sapiens
  siRNA target sequence for GPR8 (NM_005286.2,367-385).
gtcgaccactacaacatct

SEQ ID NO: 333590 - DNA, 19 bp, Homo sapiens
  siRNA target sequence for GPR8 (NM_005286.2,872-890).
ccccactggtcatcagtat

SEQ ID NO: 333591 - DNA, 19 bp, Homo sapiens
  siRNA target sequence for GPR21 (NM_005294.1,6-24).
ctccaccttggatggtaat

SEQ ID NO: 333592 - DNA, 19 bp, Homo sapiens
  siRNA target sequence for GPR21 (NM_005294.1,8-26).
ccaccttggatggtaatca

SEQ ID NO: 333593 - DNA, 19 bp, Homo sapiens
  siRNA target sequence for GPR21 (NM_005294.1,133-151).
ggcaacatcattgtgattt

SEQ ID NO: 333594 - DNA, 19 bp, Homo sapiens
  siRNA target sequence for GPR21 (NM_005294.1,184-202).
cacactacaagttatttta

SEQ ID NO: 333595 - DNA, 19 bp, Homo sapiens
  siRNA target sequence for GPR21 (NM_005294.1,194-212).
gttattttatccagactat

SEQ ID NO: 333596 - DNA, 19 bp, Homo sapiens
  siRNA target sequence for GPR21 (NM_005294.1,242-260).
gctgcgtggtcccttcttt

SEQ ID NO: 333597 - DNA, 19 bp, Homo sapiens
  siRNA target sequence for GPR21 (NM_005294.1,243-261).
ctgcgtggtcccttcttta

SEQ ID NO: 333598 - DNA, 19 bp, Homo sapiens
  siRNA target sequence for GPR21 (NM_005294.1,246-264).
cgtggtcccttctttatca

SEQ ID NO: 333599 - DNA, 19 bp, Homo sapiens
  siRNA target sequence for GPR21 (NM_005294.1,309-327).
gatatttggttttgtagta

SEQ ID NO: 333600 - DNA, 19 bp, Homo sapiens
  siRNA target sequence for GPR21 (NM_005294.1,388-406).
gccattactaaacctttaa

SEQ ID NO: 333601 - DNA, 19 bp, Homo sapiens
  siRNA target sequence for GPR21 (NM_005294.1,401-419).
ctttaacctataatactct

SEQ ID NO: 333602 - DNA, 19 bp, Homo sapiens
  siRNA target sequence for GPR21 (NM_005294.1,431-449).
ggagactacgcctgtgtat

SEQ ID NO: 333603 - DNA, 19 bp, Homo sapiens
  siRNA target sequence for GPR21 (NM_005294.1,432-450).
gagactacgcctgtgtatt

SEQ ID NO: 333604 - DNA, 19 bp, Homo sapiens
  siRNA target sequence for GPR21 (NM_005294.1,503-521).
ggggcaaacctggatatca

SEQ ID NO: 333605 - DNA, 19 bp, Homo sapiens
  siRNA target sequence for GPR21 (NM_005294.1,504-522).
gggcaaacctggatatcat

SEQ ID NO: 333606 - DNA, 19 bp, Homo sapiens
  siRNA target sequence for GPR21 (NM_005294.1,515-533).
gatatcatggagatgtgtt

SEQ ID NO: 333607 - DNA, 19 bp, Homo sapiens
  siRNA target sequence for GPR21 (NM_005294.1,582-600).
catcgtgatgatgttatat

SEQ ID NO: 333608 - DNA, 19 bp, Homo sapiens
  siRNA target sequence for GPR21 (NM_005294.1,751-769).
gccatggtcctgtttcgaa

SEQ ID NO: 333609 - DNA, 19 bp, Homo sapiens
  siRNA target sequence for GPR21 (NM_005294.1,752-770).
ccatggtcctgtttcgaat

SEQ ID NO: 333610 - DNA, 19 bp, Homo sapiens
  siRNA target sequence for GPR21 (NM_005294.1,756-774).
ggtcctgtttcgaatcact

SEQ ID NO: 333611 - DNA, 19 bp, Homo sapiens
  siRNA target sequence for GPR21 (NM_005294.1,757-775).
gtcctgtttcgaatcacta

SEQ ID NO: 333612 - DNA, 19 bp, Homo sapiens
  siRNA target sequence for GPR21 (NM_005294.1,766-784).
cgaatcactagtgtatttt

SEQ ID NO: 333613 - DNA, 19 bp, Homo sapiens
  siRNA target sequence for GPR21 (NM_005294.1,794-812).
ggttgccatatatcatcta

SEQ ID NO: 333614 - DNA, 19 bp, Homo sapiens
  siRNA target sequence for GPR21 (NM_005294.1,799-817).
ccatatatcatctacttct

SEQ ID NO: 333615 - DNA, 19 bp, Homo sapiens
  siRNA target sequence for GPR21 (NM_005294.1,847-865).
cgcttcgcatccttcttga

SEQ ID NO: 333616 - DNA, 19 bp, Homo sapiens
  siRNA target sequence for GPR21 (NM_005294.1,864-882).
gaccacctggcttgctatt

SEQ ID NO: 333617 - DNA, 19 bp, Homo sapiens
  siRNA target sequence for GPR21 (NM_005294.1,874-892).
cttgctattagtaacagtt

SEQ ID NO: 333618 - DNA, 19 bp, Homo sapiens
  siRNA target sequence for GPR21 (NM_005294.1,914-932).
gtctctccaacagtgtatt

SEQ ID NO: 333619 - DNA, 19 bp, Homo sapiens
  siRNA target sequence for GPR21 (NM_005294.1,951-969).
cctctcaggggctatgtgt

SEQ ID NO: 333620 - DNA, 19 bp, Homo sapiens
  siRNA target sequence for GPR21 (NM_005294.1,952-970).
ctctcaggggctatgtgta

SEQ ID NO: 333621 - DNA, 19 bp, Homo sapiens
  siRNA target sequence for GPR21 (NM_005294.1,1000-1018).
gacccttacacagttagaa

SEQ ID NO: 333622 - DNA, 19 bp, Homo sapiens
  siRNA target sequence for GPR21 (NM_005294.1,1028-1046).
ctcttaatggatgtcatat

SEQ ID NO: 333623 - DNA, 19 bp, Homo sapiens
  siRNA target sequence for GPR21 (NM_005294.1,1030-1048).
cttaatggatgtcatatct

SEQ ID NO: 333624 - DNA, 19 bp, Homo sapiens
  siRNA target sequence for GPT (NM_005309.1,567-585).
ccctgacgatgccaagaaa

SEQ ID NO: 333625 - DNA, 19 bp, Homo sapiens
  siRNA target sequence for GPT (NM_005309.1,568-586).
cctgacgatgccaagaaaa

SEQ ID NO: 333626 - DNA, 19 bp, Homo sapiens
  siRNA target sequence for GPT (NM_005309.1,971-989).
gtgcgctctgtgtcatcaa

SEQ ID NO: 333627 - DNA, 19 bp, Homo sapiens
  siRNA target sequence for GPT (NM_005309.1,1115-1133).
gttcgcagttccactcatt

SEQ ID NO: 333628 - DNA, 19 bp, Homo sapiens
  siRNA target sequence for GPT (NM_005309.1,1118-1136).
cgcagttccactcattcaa

SEQ ID NO: 333629 - DNA, 19 bp, Homo sapiens
  siRNA target sequence for GPT (NM_005309.1,1445-1463).
ccgagcaggtcttcaatga

SEQ ID NO: 333630 - DNA, 19 bp, Homo sapiens
  siRNA target sequence for HSPCA (NM_005348.2,1971-1989).
ccctgaccattccattatt

SEQ ID NO: 333631 - DNA, 19 bp, Homo sapiens
  siRNA target sequence for LIPE (NM_005357.2,424-442).
gaagcctgcttcaaaccaa

SEQ ID NO: 333632 - DNA, 19 bp, Homo sapiens
  siRNA target sequence for LIPE (NM_005357.2,460-478).
ggagacccctgcacaacat

SEQ ID NO: 333633 - DNA, 19 bp, Homo sapiens
  siRNA target sequence for LIPE (NM_005357.2,519-537).
ctgcttcacaagaggaatt

SEQ ID NO: 333634 - DNA, 19 bp, Homo sapiens
  siRNA target sequence for LIPE (NM_005357.2,566-584).
caatcaccttacatccaaa

SEQ ID NO: 333635 - DNA, 19 bp, Homo sapiens
  siRNA target sequence for LIPE (NM_005357.2,629-647).
gggctaggaaaagaatcta

SEQ ID NO: 333636 - DNA, 19 bp, Homo sapiens
  siRNA target sequence for LIPE (NM_005357.2,1104-1122).
ggacgtcgccacatgagaa

SEQ ID NO: 333637 - DNA, 19 bp, Homo sapiens
  siRNA target sequence for LIPE (NM_005357.2,1105-1123).
gacgtcgccacatgagaaa

SEQ ID NO: 333638 - DNA, 19 bp, Homo sapiens
  siRNA target sequence for LIPE (NM_005357.2,1164-1182).
caaggctcatccacaacat

SEQ ID NO: 333639 - DNA, 19 bp, Homo sapiens
  siRNA target sequence for LIPE (NM_005357.2,1215-1233).
ctctggcggaggacaacat

SEQ ID NO: 333640 - DNA, 19 bp, Homo sapiens
  siRNA target sequence for LIPE (NM_005357.2,1347-1365).
gtgtggcgcacctctttga

SEQ ID NO: 333641 - DNA, 19 bp, Homo sapiens
  siRNA target sequence for LIPE (NM_005357.2,1430-1448).
gcgcacctcctgcacaaat

SEQ ID NO: 333642 - DNA, 19 bp, Homo sapiens
  siRNA target sequence for LIPE (NM_005357.2,1567-1585).
gcgcctgctggttaccaat

SEQ ID NO: 333643 - DNA, 19 bp, Homo sapiens
  siRNA target sequence for LIPE (NM_005357.2,1749-1767).
ccttcggggagcactacaa

SEQ ID NO: 333644 - DNA, 19 bp, Homo sapiens
  siRNA target sequence for LIPE (NM_005357.2,1750-1768).
cttcggggagcactacaaa

SEQ ID NO: 333645 - DNA, 19 bp, Homo sapiens
  siRNA target sequence for LIPE (NM_005357.2,1988-2006).
ccacccgaagcctttgaga

SEQ ID NO: 333646 - DNA, 19 bp, Homo sapiens
  siRNA target sequence for LIPE (NM_005357.2,1989-2007).
cacccgaagcctttgagat

SEQ ID NO: 333647 - DNA, 19 bp, Homo sapiens
  siRNA target sequence for LIPE (NM_005357.2,2132-2150).
ctcagcagcctgataaagt

SEQ ID NO: 333648 - DNA, 19 bp, Homo sapiens
  siRNA target sequence for LIPE (NM_005357.2,2202-2220).
gctcgcggtccctgatagt

SEQ ID NO: 333649 - DNA, 19 bp, Homo sapiens
  siRNA target sequence for LIPE (NM_005357.2,2415-2433).
gctcaacaggggaacgaat

SEQ ID NO: 333650 - DNA, 19 bp, Homo sapiens
  siRNA target sequence for LIPE (NM_005357.2,2877-2895).
gcacggattccctcaagaa

SEQ ID NO: 333651 - DNA, 19 bp, Homo sapiens
  siRNA target sequence for LIPE (NM_005357.2,2988-3006).
ccacaccctccgatgtcaa

SEQ ID NO: 333652 - DNA, 19 bp, Homo sapiens
  siRNA target sequence for LIPE (NM_005357.2,2991-3009).
caccctccgatgtcaactt

SEQ ID NO: 333653 - DNA, 19 bp, Homo sapiens
  siRNA target sequence for LIPE (NM_005357.2,2993-3011).
ccctccgatgtcaacttct

SEQ ID NO: 333654 - DNA, 19 bp, Homo sapiens
  siRNA target sequence for LIPE (NM_005357.2,2995-3013).
ctccgatgtcaacttctta

SEQ ID NO: 333655 - DNA, 19 bp, Homo sapiens
  siRNA target sequence for LIPE (NM_005357.2,2997-3015).
ccgatgtcaacttcttatt

SEQ ID NO: 333656 - DNA, 19 bp, Homo sapiens
  siRNA target sequence for LIPE (NM_005357.2,2998-3016).
cgatgtcaacttcttatta

SEQ ID NO: 333657 - DNA, 19 bp, Homo sapiens
  siRNA target sequence for LIPE (NM_005357.2,3159-3177).
cctcacccatagtcaagaa

SEQ ID NO: 333658 - DNA, 19 bp, Homo sapiens
  siRNA target sequence for MAGEA2 (NM_005361.2,1338-1356).
ctgcaccatacactaaaga

SEQ ID NO: 333659 - DNA, 19 bp, Homo sapiens
  siRNA target sequence for MAGEA8 (NM_005364.3,278-296).
ggcaccagggcttatggat

SEQ ID NO: 333660 - DNA, 19 bp, Homo sapiens
  siRNA target sequence for MAGEA8 (NM_005364.3,337-355).
cctcctctactctgatcat

SEQ ID NO: 333661 - DNA, 19 bp, Homo sapiens
  siRNA target sequence for MAGEA8 (NM_005364.3,536-554).
gttccgggaagcacttgat

SEQ ID NO: 333662 - DNA, 19 bp, Homo sapiens
  siRNA target sequence for MAGEA8 (NM_005364.3,584-602).
gctccgcaaatatcaaatt

SEQ ID NO: 333663 - DNA, 19 bp, Homo sapiens
  siRNA target sequence for MAGEA8 (NM_005364.3,836-854).
cgtcctgggcatgatctta

SEQ ID NO: 333664 - DNA, 19 bp, Homo sapiens
  siRNA target sequence for MAGEA8 (NM_005364.3,927-945).
gagcacagtgtctattgga

SEQ ID NO: 333665 - DNA, 19 bp, Homo sapiens
  siRNA target sequence for MAGEA11 (NM_005366.3,602-620).
ctttgggagcctatctgat

SEQ ID NO: 333666 - DNA, 19 bp, Homo sapiens
  siRNA target sequence for MAGEA11 (NM_005366.3,658-676).
cctcgcctgacctgataga

SEQ ID NO: 333667 - DNA, 19 bp, Homo sapiens
  siRNA target sequence for MAGEA11 (NM_005366.3,705-723).
catgacaagataattgatt

SEQ ID NO: 333668 - DNA, 19 bp, Homo sapiens
  siRNA target sequence for MAGEA11 (NM_005366.3,753-771).
gtcaaggggctgatcacaa

SEQ ID NO: 333669 - DNA, 19 bp, Homo sapiens
  siRNA target sequence for MAGEA11 (NM_005366.3,920-938).
cctcaacctctcttatgat

SEQ ID NO: 333670 - DNA, 19 bp, Homo sapiens
  siRNA target sequence for MAGEA11 (NM_005366.3,1042-1060).
gggaagtcctgagcattat

SEQ ID NO: 333671 - DNA, 19 bp, Homo sapiens
  siRNA target sequence for MAGEA11 (NM_005366.3,1260-1278).
gggagggatcccacttctt

SEQ ID NO: 333672 - DNA, 19 bp, Homo sapiens
  siRNA target sequence for MAGEA11 (NM_005366.3,1261-1279).
ggagggatcccacttctta

SEQ ID NO: 333673 - DNA, 19 bp, Homo sapiens
  siRNA target sequence for PRKAB2 (NM_005399.2,302-320).
ggggacaaagagtttgtat

SEQ ID NO: 333674 - DNA, 19 bp, Homo sapiens
  siRNA target sequence for PRKAB2 (NM_005399.2,430-448).
caattggagcaccaagatt

SEQ ID NO: 333675 - DNA, 19 bp, Homo sapiens
  siRNA target sequence for PRKAB2 (NM_005399.2,460-478).
gagccataatgactttgtt

SEQ ID NO: 333676 - DNA, 19 bp, Homo sapiens
  siRNA target sequence for PRKAB2 (NM_005399.2,595-613).
gatccatgtcaagaaatct

SEQ ID NO: 333677 - DNA, 19 bp, Homo sapiens
  siRNA target sequence for PRKAB2 (NM_005399.2,598-616).
ccatgtcaagaaatctgat

SEQ ID NO: 333678 - DNA, 19 bp, Homo sapiens
  siRNA target sequence for PRKAB2 (NM_005399.2,620-638).
gaggtgttcgatgctttaa

SEQ ID NO: 333679 - DNA, 19 bp, Homo sapiens
  siRNA target sequence for PRKAB2 (NM_005399.2,625-643).
gttcgatgctttaaagtta

SEQ ID NO: 333680 - DNA, 19 bp, Homo sapiens
  siRNA target sequence for PRKAB2 (NM_005399.2,698-716).
gggccttatggtcaagaaa

SEQ ID NO: 333681 - DNA, 19 bp, Homo sapiens
  siRNA target sequence for PRKAB2 (NM_005399.2,699-717).
ggccttatggtcaagaaat

SEQ ID NO: 333682 - DNA, 19 bp, Homo sapiens
  siRNA target sequence for PRKAB2 (NM_005399.2,702-720).
cttatggtcaagaaatgta

SEQ ID NO: 333683 - DNA, 19 bp, Homo sapiens
  siRNA target sequence for PRKAB2 (NM_005399.2,728-746).
cgatctgaggaaagattca

SEQ ID NO: 333684 - DNA, 19 bp, Homo sapiens
  siRNA target sequence for PRKAB2 (NM_005399.2,773-791).
ctacttcaagttattctta

SEQ ID NO: 333685 - DNA, 19 bp, Homo sapiens
  siRNA target sequence for PRKAB2 (NM_005399.2,851-869).
ctgaaccatctctatgcat

SEQ ID NO: 333686 - DNA, 19 bp, Homo sapiens
  siRNA target sequence for PRKAB2 (NM_005399.2,919-937).
gaagaagtatgttactact

SEQ ID NO: 333687 - DNA, 19 bp, Homo sapiens
  siRNA target sequence for PRKAB2 (NM_005399.2,929-947).
gttactactctgctataca

SEQ ID NO: 333688 - DNA, 19 bp, Homo sapiens
  siRNA target sequence for SKIL (NM_005414.2,675-693).
gaaaacctccagacaaatt

SEQ ID NO: 333689 - DNA, 19 bp, Homo sapiens
  siRNA target sequence for SKIL (NM_005414.2,701-719).
ggttcagggctcaactaaa

SEQ ID NO: 333690 - DNA, 19 bp, Homo sapiens
  siRNA target sequence for SKIL (NM_005414.2,702-720).
gttcagggctcaactaaaa

SEQ ID NO: 333691 - DNA, 19 bp, Homo sapiens
  siRNA target sequence for SKIL (NM_005414.2,725-743).
gaatgggatgggagatgat

SEQ ID NO: 333692 - DNA, 19 bp, Homo sapiens
  siRNA target sequence for SKIL (NM_005414.2,752-770).
cccagcgaaaaaaatgata

SEQ ID NO: 333693 - DNA, 19 bp, Homo sapiens
  siRNA target sequence for SKIL (NM_005414.2,876-894).
gttaagcgaacctgtactt

SEQ ID NO: 333694 - DNA, 19 bp, Homo sapiens
  siRNA target sequence for SKIL (NM_005414.2,881-899).
gcgaacctgtacttctgtt

SEQ ID NO: 333695 - DNA, 19 bp, Homo sapiens
  siRNA target sequence for SKIL (NM_005414.2,935-953).
cacattggcacaattccat

SEQ ID NO: 333696 - DNA, 19 bp, Homo sapiens
  siRNA target sequence for SKIL (NM_005414.2,942-960).
gcacaattccatttaagta

SEQ ID NO: 333697 - DNA, 19 bp, Homo sapiens
  siRNA target sequence for SKIL (NM_005414.2,1015-1033).
gcatgtcgcctactgtatt

SEQ ID NO: 333698 - DNA, 19 bp, Homo sapiens
  siRNA target sequence for SKIL (NM_005414.2,1016-1034).
catgtcgcctactgtattt

SEQ ID NO: 333699 - DNA, 19 bp, Homo sapiens
  siRNA target sequence for SKIL (NM_005414.2,1113-1131).
gtgttggaaggggaatcta

SEQ ID NO: 333700 - DNA, 19 bp, Homo sapiens
  siRNA target sequence for SKIL (NM_005414.2,1115-1133).
gttggaaggggaatctatt

SEQ ID NO: 333701 - DNA, 19 bp, Homo sapiens
  siRNA target sequence for SKIL (NM_005414.2,1119-1137).
gaaggggaatctatttctt

SEQ ID NO: 333702 - DNA, 19 bp, Homo sapiens
  siRNA target sequence for SKIL (NM_005414.2,1122-1140).
ggggaatctatttcttgtt

SEQ ID NO: 333703 - DNA, 19 bp, Homo sapiens
  siRNA target sequence for SKIL (NM_005414.2,1166-1184).
ctgtttgccccaagtctta

SEQ ID NO: 333704 - DNA, 19 bp, Homo sapiens
  siRNA target sequence for SKIL (NM_005414.2,1172-1190).
gccccaagtcttaaattct

SEQ ID NO: 333705 - DNA, 19 bp, Homo sapiens
  siRNA target sequence for SKIL (NM_005414.2,1174-1192).
cccaagtcttaaattctgt

SEQ ID NO: 333706 - DNA, 19 bp, Homo sapiens
  siRNA target sequence for SKIL (NM_005414.2,1231-1249).
gtgatgaactgtacatata

SEQ ID NO: 333707 - DNA, 19 bp, Homo sapiens
  siRNA target sequence for SKIL (NM_005414.2,1233-1251).
gatgaactgtacatatatt

SEQ ID NO: 333708 - DNA, 19 bp, Homo sapiens
  siRNA target sequence for SKIL (NM_005414.2,1267-1285).
cagaccagcttcatatctt

SEQ ID NO: 333709 - DNA, 19 bp, Homo sapiens
  siRNA target sequence for SKIL (NM_005414.2,1295-1313).
gggcatacttccattcaat

SEQ ID NO: 333710 - DNA, 19 bp, Homo sapiens
  siRNA target sequence for SKIL (NM_005414.2,1322-1340).
ctgtgggctgattacatta

SEQ ID NO: 333711 - DNA, 19 bp, Homo sapiens
  siRNA target sequence for SKIL (NM_005414.2,1350-1368).
caaagattatgtaatgctt

SEQ ID NO: 333712 - DNA, 19 bp, Homo sapiens
  siRNA target sequence for SKIL (NM_005414.2,1420-1438).
gctcattggcccagttaaa

SEQ ID NO: 333713 - DNA, 19 bp, Homo sapiens
  siRNA target sequence for SKIL (NM_005414.2,1479-1497).
ggcaaatgtcagggtttat

SEQ ID NO: 333714 - DNA, 19 bp, Homo sapiens
  siRNA target sequence for SKIL (NM_005414.2,1480-1498).
gcaaatgtcagggtttatt

SEQ ID NO: 333715 - DNA, 19 bp, Homo sapiens
  siRNA target sequence for SKIL (NM_005414.2,1501-1519).
caccccagttttatgttca

SEQ ID NO: 333716 - DNA, 19 bp, Homo sapiens
  siRNA target sequence for SKIL (NM_005414.2,1520-1538).
gcctgatgctccgtgtatt

SEQ ID NO: 333717 - DNA, 19 bp, Homo sapiens
  siRNA target sequence for SKIL (NM_005414.2,1522-1540).
ctgatgctccgtgtattca

SEQ ID NO: 333718 - DNA, 19 bp, Homo sapiens
  siRNA target sequence for SKIL (NM_005414.2,1524-1542).
gatgctccgtgtattcaat

SEQ ID NO: 333719 - DNA, 19 bp, Homo sapiens
  siRNA target sequence for SKIL (NM_005414.2,1528-1546).
ctccgtgtattcaatgtct

SEQ ID NO: 333720 - DNA, 19 bp, Homo sapiens
  siRNA target sequence for SKIL (NM_005414.2,1566-1584).
gcaccccagacgtttgtga

SEQ ID NO: 333721 - DNA, 19 bp, Homo sapiens
  siRNA target sequence for SKIL (NM_005414.2,1576-1594).
cgtttgtgatgcattctca

SEQ ID NO: 333722 - DNA, 19 bp, Homo sapiens
  siRNA target sequence for SKIL (NM_005414.2,1595-1613).
cagatcacctgacaaaaga

SEQ ID NO: 333723 - DNA, 19 bp, Homo sapiens
  siRNA target sequence for SKIL (NM_005414.2,1659-1677).
catgtgaaccaaaaatact

SEQ ID NO: 333724 - DNA, 19 bp, Homo sapiens
  siRNA target sequence for SKIL (NM_005414.2,1728-1746).
gagaagtttagcatgagaa

SEQ ID NO: 333725 - DNA, 19 bp, Homo sapiens
  siRNA target sequence for SKIL (NM_005414.2,1799-1817).
gtcatggtatcctgttata

SEQ ID NO: 333726 - DNA, 19 bp, Homo sapiens
  siRNA target sequence for SKIL (NM_005414.2,1864-1882).
ccagctactacttatacat

SEQ ID NO: 333727 - DNA, 19 bp, Homo sapiens
  siRNA target sequence for SKIL (NM_005414.2,1893-1911).
gtggttgccccaaatgtgt

SEQ ID NO: 333728 - DNA, 19 bp, Homo sapiens
  siRNA target sequence for SKIL (NM_005414.2,1924-1942).
ctgtatcccagtctaaaga

SEQ ID NO: 333729 - DNA, 19 bp, Homo sapiens
  siRNA target sequence for SKIL (NM_005414.2,1948-1966).
caaagacagaggcaagtaa

SEQ ID NO: 333730 - DNA, 19 bp, Homo sapiens
  siRNA target sequence for SKIL (NM_005414.2,1956-1974).
gaggcaagtaagtccatat

SEQ ID NO: 333731 - DNA, 19 bp, Homo sapiens
  siRNA target sequence for SKIL (NM_005414.2,1958-1976).
ggcaagtaagtccatatca

SEQ ID NO: 333732 - DNA, 19 bp, Homo sapiens
  siRNA target sequence for SKIL (NM_005414.2,1959-1977).
gcaagtaagtccatatcaa

SEQ ID NO: 333733 - DNA, 19 bp, Homo sapiens
  siRNA target sequence for SKIL (NM_005414.2,1991-2009).
ggctcacagtagtggtaaa

SEQ ID NO: 333734 - DNA, 19 bp, Homo sapiens
  siRNA target sequence for SKIL (NM_005414.2,1993-2011).
ctcacagtagtggtaaact

SEQ ID NO: 333735 - DNA, 19 bp, Homo sapiens
  siRNA target sequence for SKIL (NM_005414.2,2063-2081).
ggatttaaaaacaagtaga

SEQ ID NO: 333736 - DNA, 19 bp, Homo sapiens
  siRNA target sequence for SKIL (NM_005414.2,2092-2110).
gccgtttagatgcatcaat

SEQ ID NO: 333737 - DNA, 19 bp, Homo sapiens
  siRNA target sequence for SKIL (NM_005414.2,2094-2112).
cgtttagatgcatcaatct

SEQ ID NO: 333738 - DNA, 19 bp, Homo sapiens
  siRNA target sequence for SKIL (NM_005414.2,2103-2121).
gcatcaatctcaaataatt

SEQ ID NO: 333739 - DNA, 19 bp, Homo sapiens
  siRNA target sequence for SKIL (NM_005414.2,2146-2164).
ctgccacttgcaacttagt

SEQ ID NO: 333740 - DNA, 19 bp, Homo sapiens
  siRNA target sequence for SKIL (NM_005414.2,2148-2166).
gccacttgcaacttagtca

SEQ ID NO: 333741 - DNA, 19 bp, Homo sapiens
  siRNA target sequence for SKIL (NM_005414.2,2206-2224).
cttcatctccgcttcttgt

SEQ ID NO: 333742 - DNA, 19 bp, Homo sapiens
  siRNA target sequence for SKIL (NM_005414.2,2212-2230).
ctccgcttcttgtgaaaga

SEQ ID NO: 333743 - DNA, 19 bp, Homo sapiens
  siRNA target sequence for SKIL (NM_005414.2,2331-2349).
caacttcagatggaagtaa

SEQ ID NO: 333744 - DNA, 19 bp, Homo sapiens
  siRNA target sequence for SKIL (NM_005414.2,2343-2361).
gaagtaaaaatgttgagta

SEQ ID NO: 333745 - DNA, 19 bp, Homo sapiens
  siRNA target sequence for SKIL (NM_005414.2,2354-2372).
gttgagtagttcaaaatct

SEQ ID NO: 333746 - DNA, 19 bp, Homo sapiens
  siRNA target sequence for SKIL (NM_005414.2,2429-2447).
gaatgaacatgctcaaaga

SEQ ID NO: 333747 - DNA, 19 bp, Homo sapiens
  siRNA target sequence for SKIL (NM_005414.2,2493-2511).
gagcagataatgaagcaaa

SEQ ID NO: 333748 - DNA, 19 bp, Homo sapiens
  siRNA target sequence for SKIL (NM_005414.2,2515-2533).
gtacctgtgactcaaattt

SEQ ID NO: 333749 - DNA, 19 bp, Homo sapiens
  siRNA target sequence for SKIL (NM_005414.2,2518-2536).
cctgtgactcaaatttaga

SEQ ID NO: 333750 - DNA, 19 bp, Homo sapiens
  siRNA target sequence for SKIL (NM_005414.2,2682-2700).
ctaaagctgcaaattctga

SEQ ID NO: 333751 - DNA, 19 bp, Homo sapiens
  siRNA target sequence for SKIL (NM_005414.2,2688-2706).
ctgcaaattctgaaatcat

SEQ ID NO: 333752 - DNA, 19 bp, Homo sapiens
  siRNA target sequence for SKIL (NM_005414.2,2690-2708).
gcaaattctgaaatcatca

SEQ ID NO: 333753 - DNA, 19 bp, Homo sapiens
  siRNA target sequence for SKIL (NM_005414.2,2691-2709).
caaattctgaaatcatcaa

SEQ ID NO: 333754 - DNA, 19 bp, Homo sapiens
  siRNA target sequence for SPRR3 (NM_005416.1,503-521).
gaccaaggcttcatcaagt

SEQ ID NO: 333755 - DNA, 19 bp, Homo sapiens
  siRNA target sequence for SPRR3 (NM_005416.1,529-547).
gccaggtgccatcaaagtt

SEQ ID NO: 333756 - DNA, 19 bp, Homo sapiens
  siRNA target sequence for ST5 (NM_005418.2,153-171).
cggagctggtggcactaaa

SEQ ID NO: 333757 - DNA, 19 bp, Homo sapiens
  siRNA target sequence for ST5 (NM_005418.2,246-264).
ctacccgctcagtgatagt

SEQ ID NO: 333758 - DNA, 19 bp, Homo sapiens
  siRNA target sequence for ST5 (NM_005418.2,761-779).
ctgaaaagacctttgattt

SEQ ID NO: 333759 - DNA, 19 bp, Homo sapiens
  siRNA target sequence for ST5 (NM_005418.2,960-978).
gagccggatccagaaaatt

SEQ ID NO: 333760 - DNA, 19 bp, Homo sapiens
  siRNA target sequence for ST5 (NM_005418.2,1231-1249).
cggctgccatcgaagagtt

SEQ ID NO: 333761 - DNA, 19 bp, Homo sapiens
  siRNA target sequence for ST5 (NM_005418.2,1282-1300).
cccaagcgcacctttgaat

SEQ ID NO: 333762 - DNA, 19 bp, Homo sapiens
  siRNA target sequence for ST5 (NM_005418.2,1283-1301).
ccaagcgcacctttgaata

SEQ ID NO: 333763 - DNA, 19 bp, Homo sapiens
  siRNA target sequence for ST5 (NM_005418.2,1320-1338).
caagagtaagcccagtaat

SEQ ID NO: 333764 - DNA, 19 bp, Homo sapiens
  siRNA target sequence for ST5 (NM_005418.2,1323-1341).
gagtaagcccagtaatggt

SEQ ID NO: 333765 - DNA, 19 bp, Homo sapiens
  siRNA target sequence for ST5 (NM_005418.2,1597-1615).
ctgcccaaggagaatccat

SEQ ID NO: 333766 - DNA, 19 bp, Homo sapiens
  siRNA target sequence for ST5 (NM_005418.2,1638-1656).
ccgaagagcaggacgaaaa

SEQ ID NO: 333767 - DNA, 19 bp, Homo sapiens
  siRNA target sequence for ST5 (NM_005418.2,1709-1727).
ctcaggacaggaagtacaa

SEQ ID NO: 333768 - DNA, 19 bp, Homo sapiens
  siRNA target sequence for ST5 (NM_005418.2,1803-1821).
ccaccggctgccacgatta

SEQ ID NO: 333769 - DNA, 19 bp, Homo sapiens
  siRNA target sequence for ST5 (NM_005418.2,1880-1898).
caccctccagcctcaatga

SEQ ID NO: 333770 - DNA, 19 bp, Homo sapiens
  siRNA target sequence for ST5 (NM_005418.2,2082-2100).
ctctgatgacaggttcaaa

SEQ ID NO: 333771 - DNA, 19 bp, Homo sapiens
  siRNA target sequence for ST5 (NM_005418.2,2191-2209).
gagcgggagctttttgagt

SEQ ID NO: 333772 - DNA, 19 bp, Homo sapiens
  siRNA target sequence for ST5 (NM_005418.2,2196-2214).
ggagctttttgagtacttt

SEQ ID NO: 333773 - DNA, 19 bp, Homo sapiens
  siRNA target sequence for ST5 (NM_005418.2,2377-2395).
cctgtgtcagagtatagca

SEQ ID NO: 333774 - DNA, 19 bp, Homo sapiens
  siRNA target sequence for ST5 (NM_005418.2,2581-2599).
gctgcattggtctatcctt

SEQ ID NO: 333775 - DNA, 19 bp, Homo sapiens
  siRNA target sequence for ST5 (NM_005418.2,2582-2600).
ctgcattggtctatccttt

SEQ ID NO: 333776 - DNA, 19 bp, Homo sapiens
  siRNA target sequence for ST5 (NM_005418.2,2590-2608).
gtctatcctttcatgagaa

SEQ ID NO: 333777 - DNA, 19 bp, Homo sapiens
  siRNA target sequence for ST5 (NM_005418.2,2731-2749).
gactttgagtgccttttta

SEQ ID NO: 333778 - DNA, 19 bp, Homo sapiens
  siRNA target sequence for ST5 (NM_005418.2,2765-2783).
gccagctcatccgaatctt

SEQ ID NO: 333779 - DNA, 19 bp, Homo sapiens
  siRNA target sequence for ST5 (NM_005418.2,3060-3078).
cgacgaagacacgttgtta

SEQ ID NO: 333780 - DNA, 19 bp, Homo sapiens
  siRNA target sequence for ST5 (NM_005418.2,3064-3082).
gaagacacgttgttaccta

SEQ ID NO: 333781 - DNA, 19 bp, Homo sapiens
  siRNA target sequence for ST5 (NM_005418.2,3072-3090).
gttgttacctaggaagtta

SEQ ID NO: 333782 - DNA, 19 bp, Homo sapiens
  siRNA target sequence for ST5 (NM_005418.2,3153-3171).
cgactccgacgatgaatgt

SEQ ID NO: 333783 - DNA, 19 bp, Homo sapiens
  siRNA target sequence for ST5 (NM_005418.2,3156-3174).
ctccgacgatgaatgtaat

SEQ ID NO: 333784 - DNA, 19 bp, Homo sapiens
  siRNA target sequence for ST5 (NM_005418.2,3230-3248).
ggcactactccctctttct

SEQ ID NO: 333785 - DNA, 19 bp, Homo sapiens
  siRNA target sequence for ST5 (NM_005418.2,3325-3343).
cgctttcttgaggttttta

SEQ ID NO: 333786 - DNA, 19 bp, Homo sapiens
  siRNA target sequence for ST5 (NM_005418.2,3457-3475).
gagcagagtggaatgaata

SEQ ID NO: 333787 - DNA, 19 bp, Homo sapiens
  siRNA target sequence for ST5 (NM_005418.2,3484-3502).
cgaggtttgggcaacaaaa

SEQ ID NO: 333788 - DNA, 19 bp, Homo sapiens
  siRNA target sequence for ST5 (NM_005418.2,3485-3503).
gaggtttgggcaacaaaat

SEQ ID NO: 333789 - DNA, 19 bp, Homo sapiens
  siRNA target sequence for GPR51 (NM_005458.5,784-802).
caacgcaaaagggttgaaa

SEQ ID NO: 333790 - DNA, 19 bp, Homo sapiens
  siRNA target sequence for GPR51 (NM_005458.5,803-821).
gccttctacgatgcaataa

SEQ ID NO: 333791 - DNA, 19 bp, Homo sapiens
  siRNA target sequence for GPR51 (NM_005458.5,804-822).
ccttctacgatgcaataaa

SEQ ID NO: 333792 - DNA, 19 bp, Homo sapiens
  siRNA target sequence for GPR51 (NM_005458.5,805-823).
cttctacgatgcaataaaa

SEQ ID NO: 333793 - DNA, 19 bp, Homo sapiens
  siRNA target sequence for GPR51 (NM_005458.5,938-956).
cctgttctagccgataaga

SEQ ID NO: 333794 - DNA, 19 bp, Homo sapiens
  siRNA target sequence for GPR51 (NM_005458.5,939-957).
ctgttctagccgataagaa

SEQ ID NO: 333795 - DNA, 19 bp, Homo sapiens
  siRNA target sequence for GPR51 (NM_005458.5,941-959).
gttctagccgataagaaaa

SEQ ID NO: 333796 - DNA, 19 bp, Homo sapiens
  siRNA target sequence for GPR51 (NM_005458.5,1099-1117).
cctgactggagttctgtat

SEQ ID NO: 333797 - DNA, 19 bp, Homo sapiens
  siRNA target sequence for GPR51 (NM_005458.5,1164-1182).
cctgtaccagtgtcaaaaa

SEQ ID NO: 333798 - DNA, 19 bp, Homo sapiens
  siRNA target sequence for GPR51 (NM_005458.5,1256-1274).
gcatacgaggagaacatgt

SEQ ID NO: 333799 - DNA, 19 bp, Homo sapiens
  siRNA target sequence for GPR51 (NM_005458.5,1257-1275).
catacgaggagaacatgta

SEQ ID NO: 333800 - DNA, 19 bp, Homo sapiens
  siRNA target sequence for GPR51 (NM_005458.5,1262-1280).
gaggagaacatgtatggta

SEQ ID NO: 333801 - DNA, 19 bp, Homo sapiens
  siRNA target sequence for GPR51 (NM_005458.5,1357-1375).
ccgctgcctccggaagaat

SEQ ID NO: 333802 - DNA, 19 bp, Homo sapiens
  siRNA target sequence for GPR51 (NM_005458.5,1395-1413).
gctacattggcgtggattt

SEQ ID NO: 333803 - DNA, 19 bp, Homo sapiens
  siRNA target sequence for GPR51 (NM_005458.5,1608-1626).
ggatccaggacttcaacta

SEQ ID NO: 333804 - DNA, 19 bp, Homo sapiens
  siRNA target sequence for GPR51 (NM_005458.5,1684-1702).
cggggtcacgggtcaagtt

SEQ ID NO: 333805 - DNA, 19 bp, Homo sapiens
  siRNA target sequence for GPR51 (NM_005458.5,1686-1704).
gggtcacgggtcaagttgt

SEQ ID NO: 333806 - DNA, 19 bp, Homo sapiens
  siRNA target sequence for GPR51 (NM_005458.5,1687-1705).
ggtcacgggtcaagttgta

SEQ ID NO: 333807 - DNA, 19 bp, Homo sapiens
  siRNA target sequence for GPR51 (NM_005458.5,1688-1706).
gtcacgggtcaagttgtat

SEQ ID NO: 333808 - DNA, 19 bp, Homo sapiens
  siRNA target sequence for GPR51 (NM_005458.5,1718-1736).
gagagaatggggaccatta

SEQ ID NO: 333809 - DNA, 19 bp, Homo sapiens
  siRNA target sequence for GPR51 (NM_005458.5,1726-1744).
ggggaccattaaatttact

SEQ ID NO: 333810 - DNA, 19 bp, Homo sapiens
  siRNA target sequence for GPR51 (NM_005458.5,1800-1818).
cactggagatcatcaatga

SEQ ID NO: 333811 - DNA, 19 bp, Homo sapiens
  siRNA target sequence for GPR51 (NM_005458.5,1836-1854).
gatccgaaccaccaaaaga

SEQ ID NO: 333812 - DNA, 19 bp, Homo sapiens
  siRNA target sequence for GPR51 (NM_005458.5,1839-1857).
ccgaaccaccaaaagacaa

SEQ ID NO: 333813 - DNA, 19 bp, Homo sapiens
  siRNA target sequence for GPR51 (NM_005458.5,2036-2054).
gggatgctctcctatgctt

SEQ ID NO: 333814 - DNA, 19 bp, Homo sapiens
  siRNA target sequence for GPR51 (NM_005458.5,2155-2173).
cgcttttggggccatgttt

SEQ ID NO: 333815 - DNA, 19 bp, Homo sapiens
  siRNA target sequence for GPR51 (NM_005458.5,2357-2375).
ccagcaggacgggatatct

SEQ ID NO: 333816 - DNA, 19 bp, Homo sapiens
  siRNA target sequence for GPR51 (NM_005458.5,2442-2460).
cctacaagggacttctcat

SEQ ID NO: 333817 - DNA, 19 bp, Homo sapiens
  siRNA target sequence for GPR51 (NM_005458.5,2461-2479).
gttgttcggttgtttctta

SEQ ID NO: 333818 - DNA, 19 bp, Homo sapiens
  siRNA target sequence for GPR51 (NM_005458.5,2687-2705).
ctcatcaccctgagaacaa

SEQ ID NO: 333819 - DNA, 19 bp, Homo sapiens
  siRNA target sequence for GPR51 (NM_005458.5,2827-2845).
cctacagtcagaaaaccat

SEQ ID NO: 333820 - DNA, 19 bp, Homo sapiens
  siRNA target sequence for GPR51 (NM_005458.5,2843-2861).
catcgcctgcgaatgaaga

SEQ ID NO: 333821 - DNA, 19 bp, Homo sapiens
  siRNA target sequence for GPR51 (NM_005458.5,2918-2936).
gaaaagaccacctacatta

SEQ ID NO: 333822 - DNA, 19 bp, Homo sapiens
  siRNA target sequence for GPR51 (NM_005458.5,3067-3085).
gccctctcgaacatgcaaa

SEQ ID NO: 333823 - DNA, 19 bp, Homo sapiens
  siRNA target sequence for GUCA1C (NM_005459.2,17-35).
gaatggcaaatctatagct

SEQ ID NO: 333824 - DNA, 19 bp, Homo sapiens
  siRNA target sequence for GUCA1C (NM_005459.2,28-46).
ctatagctggtgatcagaa

SEQ ID NO: 333825 - DNA, 19 bp, Homo sapiens
  siRNA target sequence for GUCA1C (NM_005459.2,69-87).
catgtgtggtacagaacat

SEQ ID NO: 333826 - DNA, 19 bp, Homo sapiens
  siRNA target sequence for GUCA1C (NM_005459.2,76-94).
ggtacagaacatttatgat

SEQ ID NO: 333827 - DNA, 19 bp, Homo sapiens
  siRNA target sequence for GUCA1C (NM_005459.2,143-161).
gggtctgcaaggtctgaat

SEQ ID NO: 333828 - DNA, 19 bp, Homo sapiens
  siRNA target sequence for GUCA1C (NM_005459.2,145-163).
gtctgcaaggtctgaatca

SEQ ID NO: 333829 - DNA, 19 bp, Homo sapiens
  siRNA target sequence for GUCA1C (NM_005459.2,162-180).
cagaaggccaataaacata

SEQ ID NO: 333830 - DNA, 19 bp, Homo sapiens
  siRNA target sequence for GUCA1C (NM_005459.2,164-182).
gaaggccaataaacatatt

SEQ ID NO: 333831 - DNA, 19 bp, Homo sapiens
  siRNA target sequence for GUCA1C (NM_005459.2,177-195).
catattgatcaagtttata

SEQ ID NO: 333832 - DNA, 19 bp, Homo sapiens
  siRNA target sequence for GUCA1C (NM_005459.2,206-224).
cacgaacaaggatggattt

SEQ ID NO: 333833 - DNA, 19 bp, Homo sapiens
  siRNA target sequence for GUCA1C (NM_005459.2,246-264).
gctgctgtaaatctaatca

SEQ ID NO: 333834 - DNA, 19 bp, Homo sapiens
  siRNA target sequence for GUCA1C (NM_005459.2,316-334).
ctgatggaaatggttctat

SEQ ID NO: 333835 - DNA, 19 bp, Homo sapiens
  siRNA target sequence for GUCA1C (NM_005459.2,322-340).
gaaatggttctattgacaa

SEQ ID NO: 333836 - DNA, 19 bp, Homo sapiens
  siRNA target sequence for GUCA1C (NM_005459.2,345-363).
gaactactggacatgttca

SEQ ID NO: 333837 - DNA, 19 bp, Homo sapiens
  siRNA target sequence for GUCA1C (NM_005459.2,402-420).
cctgaagaattcatcaact

SEQ ID NO: 333838 - DNA, 19 bp, Homo sapiens
  siRNA target sequence for GUCA1C (NM_005459.2,423-441).
gtgttccataagatcgata

SEQ ID NO: 333839 - DNA, 19 bp, Homo sapiens
  siRNA target sequence for GUCA1C (NM_005459.2,425-443).
gttccataagatcgatata

SEQ ID NO: 333840 - DNA, 19 bp, Homo sapiens
  siRNA target sequence for GUCA1C (NM_005459.2,434-452).
gatcgatataaacaatgat

SEQ ID NO: 333841 - DNA, 19 bp, Homo sapiens
  siRNA target sequence for GUCA1C (NM_005459.2,446-464).
caatgatggggaattgact

SEQ ID NO: 333842 - DNA, 19 bp, Homo sapiens
  siRNA target sequence for GUCA1C (NM_005459.2,456-474).
gaattgactttagaagaat

SEQ ID NO: 333843 - DNA, 19 bp, Homo sapiens
  siRNA target sequence for GUCA1C (NM_005459.2,479-497).
caatggcatggcaaaagat

SEQ ID NO: 333844 - DNA, 19 bp, Homo sapiens
  siRNA target sequence for GUCA1C (NM_005459.2,543-561).
gtgctgagagtaatctgta

SEQ ID NO: 333845 - DNA, 19 bp, Homo sapiens
  siRNA target sequence for GUCA1C (NM_005459.2,545-563).
gctgagagtaatctgtaat

SEQ ID NO: 333846 - DNA, 19 bp, Homo sapiens
  siRNA target sequence for GUCA1C (NM_005459.2,582-600).
gagacagactcctccaaat

SEQ ID NO: 333847 - DNA, 19 bp, Homo sapiens
  siRNA target sequence for GUCA1C (NM_005459.2,615-633).
ggtctagggaaggtgaaaa

SEQ ID NO: 333848 - DNA, 19 bp, Homo sapiens
  siRNA target sequence for MAGEC1 (NM_005462.2,2901-2919).
gcagcccagtagatgaata

SEQ ID NO: 333849 - DNA, 19 bp, Homo sapiens
  siRNA target sequence for MAGEC1 (NM_005462.2,2905-2923).
cccagtagatgaatataca

SEQ ID NO: 333850 - DNA, 19 bp, Homo sapiens
  siRNA target sequence for MAGEC1 (NM_005462.2,2909-2927).
gtagatgaatatacaagtt

SEQ ID NO: 333851 - DNA, 19 bp, Homo sapiens
  siRNA target sequence for MAGEC1 (NM_005462.2,3455-3473).
cgggaggtgcccaactctt

SEQ ID NO: 333852 - DNA, 19 bp, Homo sapiens
  siRNA target sequence for MAGEC1 (NM_005462.2,3474-3492).
ctcctcctcgttacgaatt

SEQ ID NO: 333853 - DNA, 19 bp, Homo sapiens
  siRNA target sequence for MAGEC1 (NM_005462.2,3510-3528).
ctcattcagaagtcattaa

SEQ ID NO: 333854 - DNA, 19 bp, Homo sapiens
  siRNA target sequence for MAGEC1 (NM_005462.2,3569-3587).
gtccctattacctttccat

SEQ ID NO: 333855 - DNA, 19 bp, Homo sapiens
  siRNA target sequence for MAGEC1 (NM_005462.2,3653-3671).
gattcgactgccacagaaa

SEQ ID NO: 333856 - DNA, 19 bp, Homo sapiens
  siRNA target sequence for RANBP9 (NM_005493.2,685-703).
cagcagcctgtgggattta

SEQ ID NO: 333857 - DNA, 19 bp, Homo sapiens
  siRNA target sequence for RANBP9 (NM_005493.2,792-810).
ccaggttgggataagcatt

SEQ ID NO: 333858 - DNA, 19 bp, Homo sapiens
  siRNA target sequence for RANBP9 (NM_005493.2,795-813).
ggttgggataagcattcat

SEQ ID NO: 333859 - DNA, 19 bp, Homo sapiens
  siRNA target sequence for RANBP9 (NM_005493.2,796-814).
gttgggataagcattcata

SEQ ID NO: 333860 - DNA, 19 bp, Homo sapiens
  siRNA target sequence for RANBP9 (NM_005493.2,800-818).
ggataagcattcatatggt

SEQ ID NO: 333861 - DNA, 19 bp, Homo sapiens
  siRNA target sequence for RANBP9 (NM_005493.2,801-819).
gataagcattcatatggtt

SEQ ID NO: 333862 - DNA, 19 bp, Homo sapiens
  siRNA target sequence for RANBP9 (NM_005493.2,827-845).
ggatgatggacattcgttt

SEQ ID NO: 333863 - DNA, 19 bp, Homo sapiens
  siRNA target sequence for RANBP9 (NM_005493.2,867-885).
ccttatggaccaactttca

SEQ ID NO: 333864 - DNA, 19 bp, Homo sapiens
  siRNA target sequence for RANBP9 (NM_005493.2,884-902).
cactactggtgatgtcatt

SEQ ID NO: 333865 - DNA, 19 bp, Homo sapiens
  siRNA target sequence for RANBP9 (NM_005493.2,899-917).
cattggctgttgtgttaat

SEQ ID NO: 333866 - DNA, 19 bp, Homo sapiens
  siRNA target sequence for RANBP9 (NM_005493.2,910-928).
gtgttaatcttatcaacaa

SEQ ID NO: 333867 - DNA, 19 bp, Homo sapiens
  siRNA target sequence for RANBP9 (NM_005493.2,947-965).
gaatggacatagtttaggt

SEQ ID NO: 333868 - DNA, 19 bp, Homo sapiens
  siRNA target sequence for RANBP9 (NM_005493.2,978-996).
gacctaccgccaaatttgt

SEQ ID NO: 333869 - DNA, 19 bp, Homo sapiens
  siRNA target sequence for RANBP9 (NM_005493.2,984-1002).
ccgccaaatttgtatccta

SEQ ID NO: 333870 - DNA, 19 bp, Homo sapiens
  siRNA target sequence for RANBP9 (NM_005493.2,999-1017).
cctactgtggggcttcaaa

SEQ ID NO: 333871 - DNA, 19 bp, Homo sapiens
  siRNA target sequence for RANBP9 (NM_005493.2,1053-1071).
catcctttcgtgtttgata

SEQ ID NO: 333872 - DNA, 19 bp, Homo sapiens
  siRNA target sequence for RANBP9 (NM_005493.2,1113-1131).
cagatagatcgatttccta

SEQ ID NO: 333873 - DNA, 19 bp, Homo sapiens
  siRNA target sequence for RANBP9 (NM_005493.2,1159-1177).
ccatgatacaaaaaatggt

SEQ ID NO: 333874 - DNA, 19 bp, Homo sapiens
  siRNA target sequence for RANBP9 (NM_005493.2,1160-1178).
catgatacaaaaaatggtt

SEQ ID NO: 333875 - DNA, 19 bp, Homo sapiens
  siRNA target sequence for RANBP9 (NM_005493.2,1220-1238).
ggcctttgccagatctaca

SEQ ID NO: 333876 - DNA, 19 bp, Homo sapiens
  siRNA target sequence for RANBP9 (NM_005493.2,1237-1255).
cagaccagaccgttctaga

SEQ ID NO: 333877 - DNA, 19 bp, Homo sapiens
  siRNA target sequence for RANBP9 (NM_005493.2,1244-1262).
gaccgttctagaagaatta

SEQ ID NO: 333878 - DNA, 19 bp, Homo sapiens
  siRNA target sequence for RANBP9 (NM_005493.2,1247-1265).
cgttctagaagaattagct

SEQ ID NO: 333879 - DNA, 19 bp, Homo sapiens
  siRNA target sequence for RANBP9 (NM_005493.2,1248-1266).
gttctagaagaattagctt

SEQ ID NO: 333880 - DNA, 19 bp, Homo sapiens
  siRNA target sequence for RANBP9 (NM_005493.2,1316-1334).
gggagaagccattgaaaca

SEQ ID NO: 333881 - DNA, 19 bp, Homo sapiens
  siRNA target sequence for RANBP9 (NM_005493.2,1343-1361).
gttatacccaagtttactt

SEQ ID NO: 333882 - DNA, 19 bp, Homo sapiens
  siRNA target sequence for RANBP9 (NM_005493.2,1366-1384).
gaaatcctaatctcctttt

SEQ ID NO: 333883 - DNA, 19 bp, Homo sapiens
  siRNA target sequence for RANBP9 (NM_005493.2,1395-1413).
gtgcgtcagtttatagaaa

SEQ ID NO: 333884 - DNA, 19 bp, Homo sapiens
  siRNA target sequence for RANBP9 (NM_005493.2,1415-1433).
ggtgaatggtacagatagt

SEQ ID NO: 333885 - DNA, 19 bp, Homo sapiens
  siRNA target sequence for RANBP9 (NM_005493.2,1462-1480).
caaagtctcaagacagtta

SEQ ID NO: 333886 - DNA, 19 bp, Homo sapiens
  siRNA target sequence for RANBP9 (NM_005493.2,1466-1484).
gtctcaagacagttatcct

SEQ ID NO: 333887 - DNA, 19 bp, Homo sapiens
  siRNA target sequence for RANBP9 (NM_005493.2,1485-1503).
gttagtcctcgacctttta

SEQ ID NO: 333888 - DNA, 19 bp, Homo sapiens
  siRNA target sequence for RANBP9 (NM_005493.2,1522-1540).
ccagccatggaatgaatat

SEQ ID NO: 333889 - DNA, 19 bp, Homo sapiens
  siRNA target sequence for RANBP9 (NM_005493.2,1525-1543).
gccatggaatgaatatcca

SEQ ID NO: 333890 - DNA, 19 bp, Homo sapiens
  siRNA target sequence for RANBP9 (NM_005493.2,1535-1553).
gaatatccacaatttagca

SEQ ID NO: 333891 - DNA, 19 bp, Homo sapiens
  siRNA target sequence for RANBP9 (NM_005493.2,1571-1589).
cgcacatttttcaggtttt

SEQ ID NO: 333892 - DNA, 19 bp, Homo sapiens
  siRNA target sequence for RANBP9 (NM_005493.2,1600-1618).
gtaatggtgtaatatcaaa

SEQ ID NO: 333893 - DNA, 19 bp, Homo sapiens
  siRNA target sequence for RANBP9 (NM_005493.2,1633-1651).
catattgccatagtaataa

SEQ ID NO: 333894 - DNA, 19 bp, Homo sapiens
  siRNA target sequence for RANBP9 (NM_005493.2,1655-1673).
ccagtcatccaacttgaat

SEQ ID NO: 333895 - DNA, 19 bp, Homo sapiens
  siRNA target sequence for RANBP9 (NM_005493.2,1658-1676).
gtcatccaacttgaatgta

SEQ ID NO: 333896 - DNA, 19 bp, Homo sapiens
  siRNA target sequence for RANBP9 (NM_005493.2,1667-1685).
cttgaatgtaccagaacta

SEQ ID NO: 333897 - DNA, 19 bp, Homo sapiens
  siRNA target sequence for RANBP9 (NM_005493.2,1674-1692).
gtaccagaactaaacagta

SEQ ID NO: 333898 - DNA, 19 bp, Homo sapiens
  siRNA target sequence for RANBP9 (NM_005493.2,1724-1742).
cttcaccagtaatgatgta

SEQ ID NO: 333899 - DNA, 19 bp, Homo sapiens
  siRNA target sequence for RANBP9 (NM_005493.2,1779-1797).
gaaacttcatccaatggtt

SEQ ID NO: 333900 - DNA, 19 bp, Homo sapiens
  siRNA target sequence for RANBP9 (NM_005493.2,1786-1804).
catccaatggtttcctaaa

SEQ ID NO: 333901 - DNA, 19 bp, Homo sapiens
  siRNA target sequence for RANBP9 (NM_005493.2,1813-1831).
ctaaacatgaccacgaaat

SEQ ID NO: 333902 - DNA, 19 bp, Homo sapiens
  siRNA target sequence for RANBP9 (NM_005493.2,1821-1839).
gaccacgaaatggaagatt

SEQ ID NO: 333903 - DNA, 19 bp, Homo sapiens
  siRNA target sequence for RANBP9 (NM_005493.2,1823-1841).
ccacgaaatggaagattgt

SEQ ID NO: 333904 - DNA, 19 bp, Homo sapiens
  siRNA target sequence for RANBP9 (NM_005493.2,1847-1865).
cgaaatggaagttgattca

SEQ ID NO: 333905 - DNA, 19 bp, Homo sapiens
  siRNA target sequence for RANBP9 (NM_005493.2,1930-1948).
gacgagagctgcaagcaat

SEQ ID NO: 333906 - DNA, 19 bp, Homo sapiens
  siRNA target sequence for RANBP9 (NM_005493.2,2006-2024).
ggatgcattcagtctacta

SEQ ID NO: 333907 - DNA, 19 bp, Homo sapiens
  siRNA target sequence for RANBP9 (NM_005493.2,2011-2029).
cattcagtctactagcata

SEQ ID NO: 333908 - DNA, 19 bp, Homo sapiens
  siRNA target sequence for RANBP9 (NM_005493.2,2015-2033).
cagtctactagcatattca

SEQ ID NO: 333909 - DNA, 19 bp, Homo sapiens
  siRNA target sequence for RANBP9 (NM_005493.2,2017-2035).
gtctactagcatattcaga

SEQ ID NO: 333910 - DNA, 19 bp, Homo sapiens
  siRNA target sequence for RANBP9 (NM_005493.2,2162-2180).
gggacaggccacacaatgt

SEQ ID NO: 333911 - DNA, 19 bp, Homo sapiens
  siRNA target sequence for RANBP9 (NM_005493.2,2164-2182).
gacaggccacacaatgtct

SEQ ID NO: 333912 - DNA, 19 bp, Homo sapiens
  siRNA target sequence for RANBP9 (NM_005493.2,2189-2207).
gatggctcgatcaggaatt

SEQ ID NO: 333913 - DNA, 19 bp, Homo sapiens
  siRNA target sequence for RANBP9 (NM_005493.2,2192-2210).
ggctcgatcaggaattgga

SEQ ID NO: 333914 - DNA, 19 bp, Homo sapiens
  siRNA target sequence for RANBP9 (NM_005493.2,2193-2211).
gctcgatcaggaattggat

SEQ ID NO: 333915 - DNA, 19 bp, Homo sapiens
  siRNA target sequence for RANBP9 (NM_005493.2,2229-2247).
gtggaagactacctacatt

SEQ ID NO: 333916 - DNA, 19 bp, Homo sapiens
  siRNA target sequence for SMC4L1 (NM_005496.2,383-401).
gaggaacttgataatagaa

SEQ ID NO: 333917 - DNA, 19 bp, Homo sapiens
  siRNA target sequence for SMC4L1 (NM_005496.2,385-403).
ggaacttgataatagaagt

SEQ ID NO: 333918 - DNA, 19 bp, Homo sapiens
  siRNA target sequence for SMC4L1 (NM_005496.2,386-404).
gaacttgataatagaagtt

SEQ ID NO: 333919 - DNA, 19 bp, Homo sapiens
  siRNA target sequence for SMC4L1 (NM_005496.2,471-489).
ctcggcttatgataactca

SEQ ID NO: 333920 - DNA, 19 bp, Homo sapiens
  siRNA target sequence for SMC4L1 (NM_005496.2,473-491).
cggcttatgataactcata

SEQ ID NO: 333921 - DNA, 19 bp, Homo sapiens
  siRNA target sequence for SMC4L1 (NM_005496.2,585-603).
gcaaatccaatgttattga

SEQ ID NO: 333922 - DNA, 19 bp, Homo sapiens
  siRNA target sequence for SMC4L1 (NM_005496.2,623-641).
ggctatcgagcacaaaaaa

SEQ ID NO: 333923 - DNA, 19 bp, Homo sapiens
  siRNA target sequence for SMC4L1 (NM_005496.2,624-642).
gctatcgagcacaaaaaat

SEQ ID NO: 333924 - DNA, 19 bp, Homo sapiens
  siRNA target sequence for SMC4L1 (NM_005496.2,629-647).
cgagcacaaaaaataagat

SEQ ID NO: 333925 - DNA, 19 bp, Homo sapiens
  siRNA target sequence for SMC4L1 (NM_005496.2,632-650).
gcacaaaaaataagatcta

SEQ ID NO: 333926 - DNA, 19 bp, Homo sapiens
  siRNA target sequence for SMC4L1 (NM_005496.2,656-674).
ctctcagtattaatacata

SEQ ID NO: 333927 - DNA, 19 bp, Homo sapiens
  siRNA target sequence for SMC4L1 (NM_005496.2,700-718).
gagttgtacagtagaagtt

SEQ ID NO: 333928 - DNA, 19 bp, Homo sapiens
  siRNA target sequence for SMC4L1 (NM_005496.2,705-723).
gtacagtagaagttcattt

SEQ ID NO: 333929 - DNA, 19 bp, Homo sapiens
  siRNA target sequence for SMC4L1 (NM_005496.2,708-726).
cagtagaagttcattttca

SEQ ID NO: 333930 - DNA, 19 bp, Homo sapiens
  siRNA target sequence for SMC4L1 (NM_005496.2,737-755).
gataaggaaggggatgatt

SEQ ID NO: 333931 - DNA, 19 bp, Homo sapiens
  siRNA target sequence for SMC4L1 (NM_005496.2,752-770).
gattatgaagtcattccta

SEQ ID NO: 333932 - DNA, 19 bp, Homo sapiens
  siRNA target sequence for SMC4L1 (NM_005496.2,758-776).
gaagtcattcctaacagta

SEQ ID NO: 333933 - DNA, 19 bp, Homo sapiens
  siRNA target sequence for SMC4L1 (NM_005496.2,796-814).
ggcctgcagagataatact

SEQ ID NO: 333934 - DNA, 19 bp, Homo sapiens
  siRNA target sequence for SMC4L1 (NM_005496.2,873-891).
gaagccatggaattgactt

SEQ ID NO: 333935 - DNA, 19 bp, Homo sapiens
  siRNA target sequence for SMC4L1 (NM_005496.2,882-900).
gaattgacttggaccataa

SEQ ID NO: 333936 - DNA, 19 bp, Homo sapiens
  siRNA target sequence for SMC4L1 (NM_005496.2,887-905).
gacttggaccataatagat

SEQ ID NO: 333937 - DNA, 19 bp, Homo sapiens
  siRNA target sequence for SMC4L1 (NM_005496.2,889-907).
cttggaccataatagattt

SEQ ID NO: 333938 - DNA, 19 bp, Homo sapiens
  siRNA target sequence for SMC4L1 (NM_005496.2,917-935).
cagggtgaagttgaacaaa

SEQ ID NO: 333939 - DNA, 19 bp, Homo sapiens
  siRNA target sequence for SMC4L1 (NM_005496.2,919-937).
gggtgaagttgaacaaatt

SEQ ID NO: 333940 - DNA, 19 bp, Homo sapiens
  siRNA target sequence for SMC4L1 (NM_005496.2,929-947).
gaacaaattgctatgatga

SEQ ID NO: 333941 - DNA, 19 bp, Homo sapiens
  siRNA target sequence for SMC4L1 (NM_005496.2,971-989).
gatgagggtatgcttgaat

SEQ ID NO: 333942 - DNA, 19 bp, Homo sapiens
  siRNA target sequence for SMC4L1 (NM_005496.2,1008-1026).
gttgtggacggctaaatga

SEQ ID NO: 333943 - DNA, 19 bp, Homo sapiens
  siRNA target sequence for SMC4L1 (NM_005496.2,1016-1034).
cggctaaatgaacctatta

SEQ ID NO: 333944 - DNA, 19 bp, Homo sapiens
  siRNA target sequence for SMC4L1 (NM_005496.2,1018-1036).
gctaaatgaacctattaaa

SEQ ID NO: 333945 - DNA, 19 bp, Homo sapiens
  siRNA target sequence for SMC4L1 (NM_005496.2,1044-1062).
gtcggagagttgaaatatt

SEQ ID NO: 333946 - DNA, 19 bp, Homo sapiens
  siRNA target sequence for SMC4L1 (NM_005496.2,1046-1064).
cggagagttgaaatattaa

SEQ ID NO: 333947 - DNA, 19 bp, Homo sapiens
  siRNA target sequence for SMC4L1 (NM_005496.2,1047-1065).
ggagagttgaaatattaaa

SEQ ID NO: 333948 - DNA, 19 bp, Homo sapiens
  siRNA target sequence for SMC4L1 (NM_005496.2,1135-1153).
gaaaaacatagctatcgaa

SEQ ID NO: 333949 - DNA, 19 bp, Homo sapiens
  siRNA target sequence for SMC4L1 (NM_005496.2,1141-1159).
catagctatcgaatttctt

SEQ ID NO: 333950 - DNA, 19 bp, Homo sapiens
  siRNA target sequence for SMC4L1 (NM_005496.2,1146-1164).
ctatcgaatttcttacctt

SEQ ID NO: 333951 - DNA, 19 bp, Homo sapiens
  siRNA target sequence for SMC4L1 (NM_005496.2,1219-1237).
gttgcagaaacgaattgct

SEQ ID NO: 333952 - DNA, 19 bp, Homo sapiens
  siRNA target sequence for SMC4L1 (NM_005496.2,1289-1307).
gagaagagcaatatactat

SEQ ID NO: 333953 - DNA, 19 bp, Homo sapiens
  siRNA target sequence for SMC4L1 (NM_005496.2,1296-1314).
gcaatatactatcaaatga

SEQ ID NO: 333954 - DNA, 19 bp, Homo sapiens
  siRNA target sequence for SMC4L1 (NM_005496.2,1455-1473).
cgagtaaagccaaaaaact

SEQ ID NO: 333955 - DNA, 19 bp, Homo sapiens
  siRNA target sequence for SMC4L1 (NM_005496.2,1521-1539).
gtatacctgccaagagtaa

SEQ ID NO: 333956 - DNA, 19 bp, Homo sapiens
  siRNA target sequence for SMC4L1 (NM_005496.2,1526-1544).
cctgccaagagtaacaata

SEQ ID NO: 333957 - DNA, 19 bp, Homo sapiens
  siRNA target sequence for SMC4L1 (NM_005496.2,1527-1545).
ctgccaagagtaacaatat

SEQ ID NO: 333958 - DNA, 19 bp, Homo sapiens
  siRNA target sequence for SMC4L1 (NM_005496.2,1629-1647).
gccttaaacaggaaacaca

SEQ ID NO: 333959 - DNA, 19 bp, Homo sapiens
  siRNA target sequence for SMC4L1 (NM_005496.2,1671-1689).
gtcgagagaaagaacttat

SEQ ID NO: 333960 - DNA, 19 bp, Homo sapiens
  siRNA target sequence for SMC4L1 (NM_005496.2,1685-1703).
cttatgggtttcagcaaat

SEQ ID NO: 333961 - DNA, 19 bp, Homo sapiens
  siRNA target sequence for SMC4L1 (NM_005496.2,1741-1759).
gtcagaacttgatatctat

SEQ ID NO: 333962 - DNA, 19 bp, Homo sapiens
  siRNA target sequence for SMC4L1 (NM_005496.2,1743-1761).
cagaacttgatatctatct

SEQ ID NO: 333963 - DNA, 19 bp, Homo sapiens
  siRNA target sequence for SMC4L1 (NM_005496.2,1745-1763).
gaacttgatatctatctca

SEQ ID NO: 333964 - DNA, 19 bp, Homo sapiens
  siRNA target sequence for SMC4L1 (NM_005496.2,1778-1796).
gcagtgtctcaattaacta

SEQ ID NO: 333965 - DNA, 19 bp, Homo sapiens
  siRNA target sequence for SMC4L1 (NM_005496.2,1953-1971).
gtttggttcatgatctctt

SEQ ID NO: 333966 - DNA, 19 bp, Homo sapiens
  siRNA target sequence for SMC4L1 (NM_005496.2,1957-1975).
ggttcatgatctctttcaa

SEQ ID NO: 333967 - DNA, 19 bp, Homo sapiens
  siRNA target sequence for SMC4L1 (NM_005496.2,1988-2006).
gcaaagagctcattagcaa

SEQ ID NO: 333968 - DNA, 19 bp, Homo sapiens
  siRNA target sequence for SMC4L1 (NM_005496.2,1993-2011).
gagctcattagcaatgaat

SEQ ID NO: 333969 - DNA, 19 bp, Homo sapiens
  siRNA target sequence for SMC4L1 (NM_005496.2,2029-2047).
ccttgatgcaataattcaa

SEQ ID NO: 333970 - DNA, 19 bp, Homo sapiens
  siRNA target sequence for SMC4L1 (NM_005496.2,2062-2080).
caggattccaggaatatat

SEQ ID NO: 333971 - DNA, 19 bp, Homo sapiens
  siRNA target sequence for SMC4L1 (NM_005496.2,2142-2160).
gtcatgcactggactacat

SEQ ID NO: 333972 - DNA, 19 bp, Homo sapiens
  siRNA target sequence for SMC4L1 (NM_005496.2,2148-2166).
cactggactacattgttgt

SEQ ID NO: 333973 - DNA, 19 bp, Homo sapiens
  siRNA target sequence for SMC4L1 (NM_005496.2,2155-2173).
ctacattgttgttgattct

SEQ ID NO: 333974 - DNA, 19 bp, Homo sapiens
  siRNA target sequence for SMC4L1 (NM_005496.2,2162-2180).
gttgttgattctattgata

SEQ ID NO: 333975 - DNA, 19 bp, Homo sapiens
  siRNA target sequence for SMC4L1 (NM_005496.2,2183-2201).
gcccaagaatgtgtaaact

SEQ ID NO: 333976 - DNA, 19 bp, Homo sapiens
  siRNA target sequence for SMC4L1 (NM_005496.2,2184-2202).
cccaagaatgtgtaaactt

SEQ ID NO: 333977 - DNA, 19 bp, Homo sapiens
  siRNA target sequence for SMC4L1 (NM_005496.2,2229-2247).
caacctttataggtttaga

SEQ ID NO: 333978 - DNA, 19 bp, Homo sapiens
  siRNA target sequence for SMC4L1 (NM_005496.2,2232-2250).
cctttataggtttagataa

SEQ ID NO: 333979 - DNA, 19 bp, Homo sapiens
  siRNA target sequence for SMC4L1 (NM_005496.2,2258-2276).
gtatgggcgaaaaagatga

SEQ ID NO: 333980 - DNA, 19 bp, Homo sapiens
  siRNA target sequence for SMC4L1 (NM_005496.2,2266-2284).
gaaaaagatgaccgaaatt

SEQ ID NO: 333981 - DNA, 19 bp, Homo sapiens
  siRNA target sequence for SMC4L1 (NM_005496.2,2272-2290).
gatgaccgaaattcaaact

SEQ ID NO: 333982 - DNA, 19 bp, Homo sapiens
  siRNA target sequence for SMC4L1 (NM_005496.2,2306-2324).
cgtttatttgatttagtaa

SEQ ID NO: 333983 - DNA, 19 bp, Homo sapiens
  siRNA target sequence for SMC4L1 (NM_005496.2,2338-2356).
gaaaattcgccaagctttt

SEQ ID NO: 333984 - DNA, 19 bp, Homo sapiens
  siRNA target sequence for SMC4L1 (NM_005496.2,2395-2413).
ggatcaagccacaagagta

SEQ ID NO: 333985 - DNA, 19 bp, Homo sapiens
  siRNA target sequence for SMC4L1 (NM_005496.2,2404-2422).
cacaagagtagcatatcaa

SEQ ID NO: 333986 - DNA, 19 bp, Homo sapiens
  siRNA target sequence for SMC4L1 (NM_005496.2,2406-2424).
caagagtagcatatcaaaa

SEQ ID NO: 333987 - DNA, 19 bp, Homo sapiens
  siRNA target sequence for SMC4L1 (NM_005496.2,2409-2427).
gagtagcatatcaaaaaga

SEQ ID NO: 333988 - DNA, 19 bp, Homo sapiens
  siRNA target sequence for SMC4L1 (NM_005496.2,2468-2486).
gaacagtcaggtacaatga

SEQ ID NO: 333989 - DNA, 19 bp, Homo sapiens
  siRNA target sequence for SMC4L1 (NM_005496.2,2492-2510).
ggtggaagcaaagtaatga

SEQ ID NO: 333990 - DNA, 19 bp, Homo sapiens
  siRNA target sequence for SMC4L1 (NM_005496.2,2521-2539).
gggttcctcacttgttatt

SEQ ID NO: 333991 - DNA, 19 bp, Homo sapiens
  siRNA target sequence for SMC4L1 (NM_005496.2,2578-2596).
gttgcaaaacgactctaaa

SEQ ID NO: 333992 - DNA, 19 bp, Homo sapiens
  siRNA target sequence for SMC4L1 (NM_005496.2,2657-2675).
catagtgaacgagaaatga

SEQ ID NO: 333993 - DNA, 19 bp, Homo sapiens
  siRNA target sequence for SMC4L1 (NM_005496.2,2699-2717).
gcaagcatccagcgtttaa

SEQ ID NO: 333994 - DNA, 19 bp, Homo sapiens
  siRNA target sequence for SMC4L1 (NM_005496.2,2700-2718).
caagcatccagcgtttaat

SEQ ID NO: 333995 - DNA, 19 bp, Homo sapiens
  siRNA target sequence for SMC4L1 (NM_005496.2,2703-2721).
gcatccagcgtttaataga

SEQ ID NO: 333996 - DNA, 19 bp, Homo sapiens
  siRNA target sequence for SMC4L1 (NM_005496.2,2774-2792).
gctacagcccctgacaaaa

SEQ ID NO: 333997 - DNA, 19 bp, Homo sapiens
  siRNA target sequence for SMC4L1 (NM_005496.2,2775-2793).
ctacagcccctgacaaaaa

SEQ ID NO: 333998 - DNA, 19 bp, Homo sapiens
  siRNA target sequence for SMC4L1 (NM_005496.2,2818-2836).
cgttagtgctttcaaaaca

SEQ ID NO: 333999 - DNA, 19 bp, Homo sapiens
  siRNA target sequence for SMC4L1 (NM_005496.2,2826-2844).
ctttcaaaacagaatatga

SEQ ID NO: 334000 - DNA, 19 bp, Homo sapiens
  siRNA target sequence for SMC4L1 (NM_005496.2,2879-2897).
gaggttaaacgcttacaca

SEQ ID NO: 334001 - DNA, 19 bp, Homo sapiens
  siRNA target sequence for SMC4L1 (NM_005496.2,2881-2899).
ggttaaacgcttacacaat

SEQ ID NO: 334002 - DNA, 19 bp, Homo sapiens
  siRNA target sequence for SMC4L1 (NM_005496.2,2882-2900).
gttaaacgcttacacaata

SEQ ID NO: 334003 - DNA, 19 bp, Homo sapiens
  siRNA target sequence for SMC4L1 (NM_005496.2,2901-2919).
ccatcgtagaaatcaataa

SEQ ID NO: 334004 - DNA, 19 bp, Homo sapiens
  siRNA target sequence for SMC4L1 (NM_005496.2,2975-2993).
gaatgtgcttctgctatta

SEQ ID NO: 334005 - DNA, 19 bp, Homo sapiens
  siRNA target sequence for SMC4L1 (NM_005496.2,2979-2997).
gtgcttctgctattactaa

SEQ ID NO: 334006 - DNA, 19 bp, Homo sapiens
  siRNA target sequence for SMC4L1 (NM_005496.2,2994-3012).
ctaaagcccaagtagcaat

SEQ ID NO: 334007 - DNA, 19 bp, Homo sapiens
  siRNA target sequence for SMC4L1 (NM_005496.2,3055-3073).
cttgcgtacagagaaagaa

SEQ ID NO: 334008 - DNA, 19 bp, Homo sapiens
  siRNA target sequence for SMC4L1 (NM_005496.2,3058-3076).
gcgtacagagaaagaaata

SEQ ID NO: 334009 - DNA, 19 bp, Homo sapiens
  siRNA target sequence for SMC4L1 (NM_005496.2,3137-3155).
gcagcagaggtcgtaaaga

SEQ ID NO: 334010 - DNA, 19 bp, Homo sapiens
  siRNA target sequence for SMC4L1 (NM_005496.2,3138-3156).
cagcagaggtcgtaaagaa

SEQ ID NO: 334011 - DNA, 19 bp, Homo sapiens
  siRNA target sequence for SMC4L1 (NM_005496.2,3140-3158).
gcagaggtcgtaaagaata

SEQ ID NO: 334012 - DNA, 19 bp, Homo sapiens
  siRNA target sequence for SMC4L1 (NM_005496.2,3145-3163).
ggtcgtaaagaatacaaat

SEQ ID NO: 334013 - DNA, 19 bp, Homo sapiens
  siRNA target sequence for SMC4L1 (NM_005496.2,3203-3221).
cgcaatctgcttcaagaat

SEQ ID NO: 334014 - DNA, 19 bp, Homo sapiens
  siRNA target sequence for SMC4L1 (NM_005496.2,3254-3272).
caaaaagatgcacttagta

SEQ ID NO: 334015 - DNA, 19 bp, Homo sapiens
  siRNA target sequence for SMC4L1 (NM_005496.2,3260-3278).
gatgcacttagtattaagt

SEQ ID NO: 334016 - DNA, 19 bp, Homo sapiens
  siRNA target sequence for SMC4L1 (NM_005496.2,3264-3282).
cacttagtattaagttgaa

SEQ ID NO: 334017 - DNA, 19 bp, Homo sapiens
  siRNA target sequence for SMC4L1 (NM_005496.2,3299-3317).
ggtcacattgctgaacata

SEQ ID NO: 334018 - DNA, 19 bp, Homo sapiens
  siRNA target sequence for SMC4L1 (NM_005496.2,3300-3318).
gtcacattgctgaacataa

SEQ ID NO: 334019 - DNA, 19 bp, Homo sapiens
  siRNA target sequence for SMC4L1 (NM_005496.2,3360-3378).
cactgcatcctatagaaga

SEQ ID NO: 334020 - DNA, 19 bp, Homo sapiens
  siRNA target sequence for SMC4L1 (NM_005496.2,3362-3380).
ctgcatcctatagaagata

SEQ ID NO: 334021 - DNA, 19 bp, Homo sapiens
  siRNA target sequence for SMC4L1 (NM_005496.2,3364-3382).
gcatcctatagaagataat

SEQ ID NO: 334022 - DNA, 19 bp, Homo sapiens
  siRNA target sequence for SMC4L1 (NM_005496.2,3368-3386).
cctatagaagataatccta

SEQ ID NO: 334023 - DNA, 19 bp, Homo sapiens
  siRNA target sequence for SMC4L1 (NM_005496.2,3369-3387).
ctatagaagataatcctat

SEQ ID NO: 334024 - DNA, 19 bp, Homo sapiens
  siRNA target sequence for SMC4L1 (NM_005496.2,3708-3726).
ccgaactcgagcttgtaga

SEQ ID NO: 334025 - DNA, 19 bp, Homo sapiens
  siRNA target sequence for SMC4L1 (NM_005496.2,3762-3780).
gtgttcgaccacctaagaa

SEQ ID NO: 334026 - DNA, 19 bp, Homo sapiens
  siRNA target sequence for SMC4L1 (NM_005496.2,3764-3782).
gttcgaccacctaagaaaa

SEQ ID NO: 334027 - DNA, 19 bp, Homo sapiens
  siRNA target sequence for SMC4L1 (NM_005496.2,3802-3820).
cctttcgggaggagagaaa

SEQ ID NO: 334028 - DNA, 19 bp, Homo sapiens
  siRNA target sequence for SMC4L1 (NM_005496.2,3866-3884).
cccactcccctttacttca

SEQ ID NO: 334029 - DNA, 19 bp, Homo sapiens
  siRNA target sequence for SMC4L1 (NM_005496.2,3899-3917).
gcagcccttgattttaaaa

SEQ ID NO: 334030 - DNA, 19 bp, Homo sapiens
  siRNA target sequence for SMC4L1 (NM_005496.2,3981-3999).
ctcttcgaaataatatgtt

SEQ ID NO: 334031 - DNA, 19 bp, Homo sapiens
  siRNA target sequence for SMC4L1 (NM_005496.2,4001-4019).
gagatttcggatagactta

SEQ ID NO: 334032 - DNA, 19 bp, Homo sapiens
  siRNA target sequence for SMC4L1 (NM_005496.2,4008-4026).
cggatagacttattggaat

SEQ ID NO: 334033 - DNA, 19 bp, Homo sapiens
  siRNA target sequence for SMC4L1 (NM_005496.2,4009-4027).
ggatagacttattggaatt

SEQ ID NO: 334034 - DNA, 19 bp, Homo sapiens
  siRNA target sequence for SMC4L1 (NM_005496.2,4010-4028).
gatagacttattggaattt

SEQ ID NO: 334035 - DNA, 19 bp, Homo sapiens
  siRNA target sequence for SMC4L1 (NM_005496.2,4014-4032).
gacttattggaatttacaa

SEQ ID NO: 334036 - DNA, 19 bp, Homo sapiens
  siRNA target sequence for SMC4L1 (NM_005496.2,4016-4034).
cttattggaatttacaaga

SEQ ID NO: 334037 - DNA, 19 bp, Homo sapiens
  siRNA target sequence for SMC4L1 (NM_005496.2,4030-4048).
caagacatacaacataaca

SEQ ID NO: 334038 - DNA, 19 bp, Homo sapiens
  siRNA target sequence for SMC4L1 (NM_005496.2,4079-4097).
gcatctaagggactttgtt

SEQ ID NO: 334039 - DNA, 19 bp, Homo sapiens
  siRNA target sequence for DOM3Z (NM_005510.2,176-194).
ctgagcctcggaacaaact

SEQ ID NO: 334040 - DNA, 19 bp, Homo sapiens
  siRNA target sequence for DOM3Z (NM_005510.2,592-610).
cggttccagggaacactat

SEQ ID NO: 334041 - DNA, 19 bp, Homo sapiens
  siRNA target sequence for DOM3Z (NM_005510.2,670-688).
ctccgggagcttatgtaca

SEQ ID NO: 334042 - DNA, 19 bp, Homo sapiens
  siRNA target sequence for DOM3Z (NM_005510.2,684-702).
gtacatgggatacaaattt

SEQ ID NO: 334043 - DNA, 19 bp, Homo sapiens
  siRNA target sequence for DOM3Z (NM_005510.2,920-938).
gccaatggaggagtttcta

SEQ ID NO: 334044 - DNA, 19 bp, Homo sapiens
  siRNA target sequence for DOM3Z (NM_005510.2,978-996).
cccaggggtcccgaatgtt

SEQ ID NO: 334045 - DNA, 19 bp, Homo sapiens
  siRNA target sequence for DOM3Z (NM_005510.2,980-998).
caggggtcccgaatgttgt

SEQ ID NO: 334046 - DNA, 19 bp, Homo sapiens
  siRNA target sequence for DOM3Z (NM_005510.2,1010-1028).
gtaacccagacggttttgt

SEQ ID NO: 334047 - DNA, 19 bp, Homo sapiens
  siRNA target sequence for DOM3Z (NM_005510.2,1121-1139).
gtgccgccttccttagctt

SEQ ID NO: 334048 - DNA, 19 bp, Homo sapiens
  siRNA target sequence for DOM3Z (NM_005510.2,1169-1187).
ccaggctcgttcatctctt

SEQ ID NO: 334049 - DNA, 19 bp, Homo sapiens
  siRNA target sequence for DOM3Z (NM_005510.2,1243-1261).
gccttcctgcccatatggt

SEQ ID NO: 334050 - DNA, 19 bp, Homo sapiens
  siRNA target sequence for DOM3Z (NM_005510.2,1244-1262).
ccttcctgcccatatggta

SEQ ID NO: 334051 - DNA, 19 bp, Homo sapiens
  siRNA target sequence for INPP5D (NM_005541.2,651-669).
cggaattgcgtttacactt

SEQ ID NO: 334052 - DNA, 19 bp, Homo sapiens
  siRNA target sequence for INPP5D (NM_005541.2,652-670).
ggaattgcgtttacactta

SEQ ID NO: 334053 - DNA, 19 bp, Homo sapiens
  siRNA target sequence for INPP5D (NM_005541.2,658-676).
gcgtttacacttacagaat

SEQ ID NO: 334054 - DNA, 19 bp, Homo sapiens
  siRNA target sequence for INPP5D (NM_005541.2,659-677).
cgtttacacttacagaatt

SEQ ID NO: 334055 - DNA, 19 bp, Homo sapiens
  siRNA target sequence for INPP5D (NM_005541.2,673-691).
gaattctgcccaatgaaga

SEQ ID NO: 334056 - DNA, 19 bp, Homo sapiens
  siRNA target sequence for INPP5D (NM_005541.2,723-741).
gtctccatgaggttcttca

SEQ ID NO: 334057 - DNA, 19 bp, Homo sapiens
  siRNA target sequence for INPP5D (NM_005541.2,880-898).
ccgagctgcccccaagaaa

SEQ ID NO: 334058 - DNA, 19 bp, Homo sapiens
  siRNA target sequence for INPP5D (NM_005541.2,929-947).
caaggaggttcctttttca

SEQ ID NO: 334059 - DNA, 19 bp, Homo sapiens
  siRNA target sequence for INPP5D (NM_005541.2,982-1000).
cgagcctctccgagacatt

SEQ ID NO: 334060 - DNA, 19 bp, Homo sapiens
  siRNA target sequence for INPP5D (NM_005541.2,985-1003).
gcctctccgagacattgtt

SEQ ID NO: 334061 - DNA, 19 bp, Homo sapiens
  siRNA target sequence for INPP5D (NM_005541.2,1506-1524).
ggttctgaggacaagttct

SEQ ID NO: 334062 - DNA, 19 bp, Homo sapiens
  siRNA target sequence for INPP5D (NM_005541.2,1614-1632).
ctgcggaaggaatatgttt

SEQ ID NO: 334063 - DNA, 19 bp, Homo sapiens
  siRNA target sequence for INPP5D (NM_005541.2,1616-1634).
gcggaaggaatatgttttt

SEQ ID NO: 334064 - DNA, 19 bp, Homo sapiens
  siRNA target sequence for INPP5D (NM_005541.2,1704-1722).
ccggagcccgacatgatca

SEQ ID NO: 334065 - DNA, 19 bp, Homo sapiens
  siRNA target sequence for INPP5D (NM_005541.2,2079-2097).
gtgggggtgtcgttcatgt

SEQ ID NO: 334066 - DNA, 19 bp, Homo sapiens
  siRNA target sequence for INPP5D (NM_005541.2,2083-2101).
gggtgtcgttcatgttcaa

SEQ ID NO: 334067 - DNA, 19 bp, Homo sapiens
  siRNA target sequence for INPP5D (NM_005541.2,2084-2102).
ggtgtcgttcatgttcaat

SEQ ID NO: 334068 - DNA, 19 bp, Homo sapiens
  siRNA target sequence for INPP5D (NM_005541.2,2153-2171).
gaaactcaggcgaaaccaa

SEQ ID NO: 334069 - DNA, 19 bp, Homo sapiens
  siRNA target sequence for INPP5D (NM_005541.2,2159-2177).
caggcgaaaccaaaactat

SEQ ID NO: 334070 - DNA, 19 bp, Homo sapiens
  siRNA target sequence for INPP5D (NM_005541.2,2161-2179).
ggcgaaaccaaaactatat

SEQ ID NO: 334071 - DNA, 19 bp, Homo sapiens
  siRNA target sequence for INPP5D (NM_005541.2,2163-2181).
cgaaaccaaaactatatga

SEQ ID NO: 334072 - DNA, 19 bp, Homo sapiens
  siRNA target sequence for INPP5D (NM_005541.2,2431-2449).
ccccaacctaccgttttga

SEQ ID NO: 334073 - DNA, 19 bp, Homo sapiens
  siRNA target sequence for INPP5D (NM_005541.2,2433-2451).
ccaacctaccgttttgaga

SEQ ID NO: 334074 - DNA, 19 bp, Homo sapiens
  siRNA target sequence for INPP5D (NM_005541.2,2452-2470).
gactgactcgggacaaata

SEQ ID NO: 334075 - DNA, 19 bp, Homo sapiens
  siRNA target sequence for INPP5D (NM_005541.2,2490-2508).
gcgacagggatgaagtaca

SEQ ID NO: 334076 - DNA, 19 bp, Homo sapiens
  siRNA target sequence for INPP5D (NM_005541.2,2491-2509).
cgacagggatgaagtacaa

SEQ ID NO: 334077 - DNA, 19 bp, Homo sapiens
  siRNA target sequence for INPP5D (NM_005541.2,2529-2547).
cgagtcctctggaagtctt

SEQ ID NO: 334078 - DNA, 19 bp, Homo sapiens
  siRNA target sequence for INPP5D (NM_005541.2,2530-2548).
gagtcctctggaagtctta

SEQ ID NO: 334079 - DNA, 19 bp, Homo sapiens
  siRNA target sequence for INPP5D (NM_005541.2,2694-2712).
ggacagattgagtttctca

SEQ ID NO: 334080 - DNA, 19 bp, Homo sapiens
  siRNA target sequence for INPP5D (NM_005541.2,2713-2731).
ggtgctatgccacattgaa

SEQ ID NO: 334081 - DNA, 19 bp, Homo sapiens
  siRNA target sequence for INPP5D (NM_005541.2,2863-2881).
caaagctgaagcccattat

SEQ ID NO: 334082 - DNA, 19 bp, Homo sapiens
  siRNA target sequence for INPP5D (NM_005541.2,2935-2953).
ctgacagcgacgaatccta

SEQ ID NO: 334083 - DNA, 19 bp, Homo sapiens
  siRNA target sequence for INPP5D (NM_005541.2,2976-2994).
cggttagaggccacagaaa

SEQ ID NO: 334084 - DNA, 19 bp, Homo sapiens
  siRNA target sequence for INPP5D (NM_005541.2,3113-3131).
gaagacggagcgtgatgaa

SEQ ID NO: 334085 - DNA, 19 bp, Homo sapiens
  siRNA target sequence for INPP5D (NM_005541.2,3226-3244).
gcatcactgaaatcatcaa

SEQ ID NO: 334086 - DNA, 19 bp, Homo sapiens
  siRNA target sequence for INPP5D (NM_005541.2,3544-3562).
cgaagcccgagatgtttga

SEQ ID NO: 334087 - DNA, 19 bp, Homo sapiens
  siRNA target sequence for INPP5D (NM_005541.2,3660-3678).
ccggaacccggcatcttgt

SEQ ID NO: 334088 - DNA, 19 bp, Homo sapiens
  siRNA target sequence for MAB21L1 (NM_005584.2,540-558).
gctggtctaccatctgaat

SEQ ID NO: 334089 - DNA, 19 bp, Homo sapiens
  siRNA target sequence for MAB21L1 (NM_005584.2,550-568).
catctgaataaatactaca

SEQ ID NO: 334090 - DNA, 19 bp, Homo sapiens
  siRNA target sequence for MAB21L1 (NM_005584.2,612-630).
ccgggaagtctgcaaagta

SEQ ID NO: 334091 - DNA, 19 bp, Homo sapiens
  siRNA target sequence for MAB21L1 (NM_005584.2,763-781).
caaatgggggtgttcaact

SEQ ID NO: 334092 - DNA, 19 bp, Homo sapiens
  siRNA target sequence for MAB21L1 (NM_005584.2,806-824).
gctgcgcggtgctgaagtt

SEQ ID NO: 334093 - DNA, 19 bp, Homo sapiens
  siRNA target sequence for MAB21L1 (NM_005584.2,851-869).
ccctctgggtggaattcat

SEQ ID NO: 334094 - DNA, 19 bp, Homo sapiens
  siRNA target sequence for MAB21L1 (NM_005584.2,853-871).
ctctgggtggaattcatta

SEQ ID NO: 334095 - DNA, 19 bp, Homo sapiens
  siRNA target sequence for MAB21L1 (NM_005584.2,927-945).
ggctcaagcggtagacaaa

SEQ ID NO: 334096 - DNA, 19 bp, Homo sapiens
  siRNA target sequence for MAB21L1 (NM_005584.2,928-946).
gctcaagcggtagacaaat

SEQ ID NO: 334097 - DNA, 19 bp, Homo sapiens
  siRNA target sequence for MAB21L1 (NM_005584.2,931-949).
caagcggtagacaaatgta

SEQ ID NO: 334098 - DNA, 19 bp, Homo sapiens
  siRNA target sequence for MAB21L1 (NM_005584.2,1128-1146).
caaggcggaaggtttcaat

SEQ ID NO: 334099 - DNA, 19 bp, Homo sapiens
  siRNA target sequence for MAB21L1 (NM_005584.2,1132-1150).
gcggaaggtttcaatctct

SEQ ID NO: 334100 - DNA, 19 bp, Homo sapiens
  siRNA target sequence for MAB21L1 (NM_005584.2,1272-1290).
ctccatcctcaaaacctta

SEQ ID NO: 334101 - DNA, 19 bp, Homo sapiens
  siRNA target sequence for MAB21L1 (NM_005584.2,1292-1310).
gggatcgtcaccttgaact

SEQ ID NO: 334102 - DNA, 19 bp, Homo sapiens
  siRNA target sequence for MAB21L1 (NM_005584.2,1320-1338).
gcccttgaacaattaccat

SEQ ID NO: 334103 - DNA, 19 bp, Homo sapiens
  siRNA target sequence for MAB21L1 (NM_005584.2,1321-1339).
cccttgaacaattaccata

SEQ ID NO: 334104 - DNA, 19 bp, Homo sapiens
  siRNA target sequence for MAB21L1 (NM_005584.2,1322-1340).
ccttgaacaattaccatat

SEQ ID NO: 334105 - DNA, 19 bp, Homo sapiens
  siRNA target sequence for MAB21L1 (NM_005584.2,1351-1369).
gtttcctacgagtgtgaaa

SEQ ID NO: 334106 - DNA, 19 bp, Homo sapiens
  siRNA target sequence for MAB21L1 (NM_005584.2,1415-1433).
ggctgaacgggattttgct

SEQ ID NO: 334107 - DNA, 19 bp, Homo sapiens
  siRNA target sequence for MAB21L1 (NM_005584.2,1423-1441).
gggattttgctgcaactta

SEQ ID NO: 334108 - DNA, 19 bp, Homo sapiens
  siRNA target sequence for MAB21L1 (NM_005584.2,1473-1491).
ctactttctaccgaactta

SEQ ID NO: 334109 - DNA, 19 bp, Homo sapiens
  siRNA target sequence for MAB21L1 (NM_005584.2,1476-1494).
ctttctaccgaacttagat

SEQ ID NO: 334110 - DNA, 19 bp, Homo sapiens
  siRNA target sequence for FARSLB (NM_005687.2,66-84).
cctacactgacgaagaatt

SEQ ID NO: 334111 - DNA, 19 bp, Homo sapiens
  siRNA target sequence for FARSLB (NM_005687.2,67-85).
ctacactgacgaagaattt

SEQ ID NO: 334112 - DNA, 19 bp, Homo sapiens
  siRNA target sequence for FARSLB (NM_005687.2,76-94).
cgaagaatttgatgaacta

SEQ ID NO: 334113 - DNA, 19 bp, Homo sapiens
  siRNA target sequence for FARSLB (NM_005687.2,77-95).
gaagaatttgatgaactat

SEQ ID NO: 334114 - DNA, 19 bp, Homo sapiens
  siRNA target sequence for FARSLB (NM_005687.2,107-125).
ggtctggagcttgatgaaa

SEQ ID NO: 334115 - DNA, 19 bp, Homo sapiens
  siRNA target sequence for FARSLB (NM_005687.2,108-126).
gtctggagcttgatgaaat

SEQ ID NO: 334116 - DNA, 19 bp, Homo sapiens
  siRNA target sequence for FARSLB (NM_005687.2,110-128).
ctggagcttgatgaaatta

SEQ ID NO: 334117 - DNA, 19 bp, Homo sapiens
  siRNA target sequence for FARSLB (NM_005687.2,209-227).
gacgtccctgccaatagat

SEQ ID NO: 334118 - DNA, 19 bp, Homo sapiens
  siRNA target sequence for FARSLB (NM_005687.2,211-229).
cgtccctgccaatagatat

SEQ ID NO: 334119 - DNA, 19 bp, Homo sapiens
  siRNA target sequence for FARSLB (NM_005687.2,258-276).
gaggacttcaggtcttcaa

SEQ ID NO: 334120 - DNA, 19 bp, Homo sapiens
  siRNA target sequence for FARSLB (NM_005687.2,268-286).
ggtcttcaaagaaaggata

SEQ ID NO: 334121 - DNA, 19 bp, Homo sapiens
  siRNA target sequence for FARSLB (NM_005687.2,306-324).
gggtaatgcctgatggaaa

SEQ ID NO: 334122 - DNA, 19 bp, Homo sapiens
  siRNA target sequence for FARSLB (NM_005687.2,380-398).
gcagcagttctccgtaata

SEQ ID NO: 334123 - DNA, 19 bp, Homo sapiens
  siRNA target sequence for FARSLB (NM_005687.2,381-399).
cagcagttctccgtaatat

SEQ ID NO: 334124 - DNA, 19 bp, Homo sapiens
  siRNA target sequence for FARSLB (NM_005687.2,383-401).
gcagttctccgtaatataa

SEQ ID NO: 334125 - DNA, 19 bp, Homo sapiens
  siRNA target sequence for FARSLB (NM_005687.2,386-404).
gttctccgtaatataaagt

SEQ ID NO: 334126 - DNA, 19 bp, Homo sapiens
  siRNA target sequence for FARSLB (NM_005687.2,389-407).
ctccgtaatataaagttta

SEQ ID NO: 334127 - DNA, 19 bp, Homo sapiens
  siRNA target sequence for FARSLB (NM_005687.2,403-421).
gtttactaaagatcgatat

SEQ ID NO: 334128 - DNA, 19 bp, Homo sapiens
  siRNA target sequence for FARSLB (NM_005687.2,476-494).
gcactggttgccattggta

SEQ ID NO: 334129 - DNA, 19 bp, Homo sapiens
  siRNA target sequence for FARSLB (NM_005687.2,485-503).
gccattggtacccatgatt

SEQ ID NO: 334130 - DNA, 19 bp, Homo sapiens
  siRNA target sequence for FARSLB (NM_005687.2,486-504).
ccattggtacccatgattt

SEQ ID NO: 334131 - DNA, 19 bp, Homo sapiens
  siRNA target sequence for FARSLB (NM_005687.2,495-513).
cccatgatttggacacttt

SEQ ID NO: 334132 - DNA, 19 bp, Homo sapiens
  siRNA target sequence for FARSLB (NM_005687.2,536-554).
gcaaagcgtccttcagata

SEQ ID NO: 334133 - DNA, 19 bp, Homo sapiens
  siRNA target sequence for FARSLB (NM_005687.2,542-560).
cgtccttcagatatcaaat

SEQ ID NO: 334134 - DNA, 19 bp, Homo sapiens
  siRNA target sequence for FARSLB (NM_005687.2,610-628).
catatacaagactgacaat

SEQ ID NO: 334135 - DNA, 19 bp, Homo sapiens
  siRNA target sequence for FARSLB (NM_005687.2,623-641).
gacaatcacctgaaacatt

SEQ ID NO: 334136 - DNA, 19 bp, Homo sapiens
  siRNA target sequence for FARSLB (NM_005687.2,625-643).
caatcacctgaaacattat

SEQ ID NO: 334137 - DNA, 19 bp, Homo sapiens
  siRNA target sequence for FARSLB (NM_005687.2,666-684).
ccctgtatccagttatcta

SEQ ID NO: 334138 - DNA, 19 bp, Homo sapiens
  siRNA target sequence for FARSLB (NM_005687.2,670-688).
gtatccagttatctatgat

SEQ ID NO: 334139 - DNA, 19 bp, Homo sapiens
  siRNA target sequence for FARSLB (NM_005687.2,675-693).
cagttatctatgatagcaa

SEQ ID NO: 334140 - DNA, 19 bp, Homo sapiens
  siRNA target sequence for FARSLB (NM_005687.2,730-748).
ggatcattccagaataaca

SEQ ID NO: 334141 - DNA, 19 bp, Homo sapiens
  siRNA target sequence for FARSLB (NM_005687.2,778-796).
cacgggaactgactttact

SEQ ID NO: 334142 - DNA, 19 bp, Homo sapiens
  siRNA target sequence for FARSLB (NM_005687.2,780-798).
cgggaactgactttactaa

SEQ ID NO: 334143 - DNA, 19 bp, Homo sapiens
  siRNA target sequence for FARSLB (NM_005687.2,809-827).
gttcttgatattattgtca

SEQ ID NO: 334144 - DNA, 19 bp, Homo sapiens
  siRNA target sequence for FARSLB (NM_005687.2,824-842).
gtcaccatgttcagtgaat

SEQ ID NO: 334145 - DNA, 19 bp, Homo sapiens
  siRNA target sequence for FARSLB (NM_005687.2,878-896).
gtggtttttcctaatggaa

SEQ ID NO: 334146 - DNA, 19 bp, Homo sapiens
  siRNA target sequence for FARSLB (NM_005687.2,887-905).
cctaatggaaaatcacata

SEQ ID NO: 334147 - DNA, 19 bp, Homo sapiens
  siRNA target sequence for FARSLB (NM_005687.2,937-955).
ggtgagagctgacctaatt

SEQ ID NO: 334148 - DNA, 19 bp, Homo sapiens
  siRNA target sequence for FARSLB (NM_005687.2,938-956).
gtgagagctgacctaatta

SEQ ID NO: 334149 - DNA, 19 bp, Homo sapiens
  siRNA target sequence for FARSLB (NM_005687.2,942-960).
gagctgacctaattaacaa

SEQ ID NO: 334150 - DNA, 19 bp, Homo sapiens
  siRNA target sequence for FARSLB (NM_005687.2,1070-1088).
ccaaccagagctgacatta

SEQ ID NO: 334151 - DNA, 19 bp, Homo sapiens
  siRNA target sequence for FARSLB (NM_005687.2,1071-1089).
caaccagagctgacattat

SEQ ID NO: 334152 - DNA, 19 bp, Homo sapiens
  siRNA target sequence for FARSLB (NM_005687.2,1075-1093).
cagagctgacattatccat

SEQ ID NO: 334153 - DNA, 19 bp, Homo sapiens
  siRNA target sequence for FARSLB (NM_005687.2,1090-1108).
ccatgcatgtgatattgta

SEQ ID NO: 334154 - DNA, 19 bp, Homo sapiens
  siRNA target sequence for FARSLB (NM_005687.2,1118-1136).
gctattgcttatggatata

SEQ ID NO: 334155 - DNA, 19 bp, Homo sapiens
  siRNA target sequence for FARSLB (NM_005687.2,1119-1137).
ctattgcttatggatataa

SEQ ID NO: 334156 - DNA, 19 bp, Homo sapiens
  siRNA target sequence for FARSLB (NM_005687.2,1124-1142).
gcttatggatataacaaca

SEQ ID NO: 334157 - DNA, 19 bp, Homo sapiens
  siRNA target sequence for FARSLB (NM_005687.2,1130-1148).
ggatataacaacattcaga

SEQ ID NO: 334158 - DNA, 19 bp, Homo sapiens
  siRNA target sequence for FARSLB (NM_005687.2,1131-1149).
gatataacaacattcagat

SEQ ID NO: 334159 - DNA, 19 bp, Homo sapiens
  siRNA target sequence for FARSLB (NM_005687.2,1168-1186).
caccatagctaatcaattt

SEQ ID NO: 334160 - DNA, 19 bp, Homo sapiens
  siRNA target sequence for FARSLB (NM_005687.2,1176-1194).
ctaatcaatttcctcttaa

SEQ ID NO: 334161 - DNA, 19 bp, Homo sapiens
  siRNA target sequence for FARSLB (NM_005687.2,1318-1336).
ggcagtccacataagtaat

SEQ ID NO: 334162 - DNA, 19 bp, Homo sapiens
  siRNA target sequence for FARSLB (NM_005687.2,1322-1340).
gtccacataagtaatccta

SEQ ID NO: 334163 - DNA, 19 bp, Homo sapiens
  siRNA target sequence for FARSLB (NM_005687.2,1324-1342).
ccacataagtaatcctaaa

SEQ ID NO: 334164 - DNA, 19 bp, Homo sapiens
  siRNA target sequence for FARSLB (NM_005687.2,1327-1345).
cataagtaatcctaaaaca

SEQ ID NO: 334165 - DNA, 19 bp, Homo sapiens
  siRNA target sequence for FARSLB (NM_005687.2,1393-1411).
gaccatagcagcaaatcgt

SEQ ID NO: 334166 - DNA, 19 bp, Homo sapiens
  siRNA target sequence for FARSLB (NM_005687.2,1395-1413).
ccatagcagcaaatcgtaa

SEQ ID NO: 334167 - DNA, 19 bp, Homo sapiens
  siRNA target sequence for FARSLB (NM_005687.2,1420-1438).
ccttccactgaaactgttt

SEQ ID NO: 334168 - DNA, 19 bp, Homo sapiens
  siRNA target sequence for FARSLB (NM_005687.2,1473-1491).
cagatgtaggtgcaaaaaa

SEQ ID NO: 334169 - DNA, 19 bp, Homo sapiens
  siRNA target sequence for FARSLB (NM_005687.2,1475-1493).
gatgtaggtgcaaaaaact

SEQ ID NO: 334170 - DNA, 19 bp, Homo sapiens
  siRNA target sequence for FARSLB (NM_005687.2,1478-1496).
gtaggtgcaaaaaactaca

SEQ ID NO: 334171 - DNA, 19 bp, Homo sapiens
  siRNA target sequence for FARSLB (NM_005687.2,1502-1520).
ctctgtgctgtttattaca

SEQ ID NO: 334172 - DNA, 19 bp, Homo sapiens
  siRNA target sequence for FARSLB (NM_005687.2,1506-1524).
gtgctgtttattacaacaa

SEQ ID NO: 334173 - DNA, 19 bp, Homo sapiens
  siRNA target sequence for FARSLB (NM_005687.2,1551-1569).
ggctgctggacagaattat

SEQ ID NO: 334174 - DNA, 19 bp, Homo sapiens
  siRNA target sequence for FARSLB (NM_005687.2,1703-1721).
cttcatcctgacgttatca

SEQ ID NO: 334175 - DNA, 19 bp, Homo sapiens
  siRNA target sequence for FARSLB (NM_005687.2,1709-1727).
cctgacgttatcaccaaat

SEQ ID NO: 334176 - DNA, 19 bp, Homo sapiens
  siRNA target sequence for FARSLB (NM_005687.2,1710-1728).
ctgacgttatcaccaaatt

SEQ ID NO: 334177 - DNA, 19 bp, Homo sapiens
  siRNA target sequence for FARSLB (NM_005687.2,1747-1765).
ctcctccctagaaatcaat

SEQ ID NO: 334178 - DNA, 19 bp, Homo sapiens
  siRNA target sequence for TSSC4 (NM_005706.2,230-248).
cacgggacggagtatgaca

SEQ ID NO: 334179 - DNA, 19 bp, Homo sapiens
  siRNA target sequence for TSSC4 (NM_005706.2,406-424).
cacggtgcagccattccat

SEQ ID NO: 334180 - DNA, 19 bp, Homo sapiens
  siRNA target sequence for TSSC4 (NM_005706.2,1118-1136).
gaccacttccggaacaaga

SEQ ID NO: 334181 - DNA, 19 bp, Homo sapiens
  siRNA target sequence for PDCD7 (NM_005707.1,944-962).
gccgctgatggcgtactat

SEQ ID NO: 334182 - DNA, 19 bp, Homo sapiens
  siRNA target sequence for PDCD7 (NM_005707.1,946-964).
cgctgatggcgtactatct

SEQ ID NO: 334183 - DNA, 19 bp, Homo sapiens
  siRNA target sequence for PDCD7 (NM_005707.1,948-966).
ctgatggcgtactatctga

SEQ ID NO: 334184 - DNA, 19 bp, Homo sapiens
  siRNA target sequence for PDCD7 (NM_005707.1,959-977).
ctatctgaagtgaggaaaa

SEQ ID NO: 334185 - DNA, 19 bp, Homo sapiens
  siRNA target sequence for PDCD7 (NM_005707.1,1010-1028).
ctacgggctttggagaaat

SEQ ID NO: 334186 - DNA, 19 bp, Homo sapiens
  siRNA target sequence for PDCD7 (NM_005707.1,1081-1099).
ctcagcagatgagactttt

SEQ ID NO: 334187 - DNA, 19 bp, Homo sapiens
  siRNA target sequence for PDCD7 (NM_005707.1,1093-1111).
gacttttacgcatcatctt

SEQ ID NO: 334188 - DNA, 19 bp, Homo sapiens
  siRNA target sequence for PDCD7 (NM_005707.1,1095-1113).
cttttacgcatcatcttca

SEQ ID NO: 334189 - DNA, 19 bp, Homo sapiens
  siRNA target sequence for PDCD7 (NM_005707.1,1115-1133).
cgactgagaaaactcatta

SEQ ID NO: 334190 - DNA, 19 bp, Homo sapiens
  siRNA target sequence for PDCD7 (NM_005707.1,1167-1185).
gagccctcagagttatgct

SEQ ID NO: 334191 - DNA, 19 bp, Homo sapiens
  siRNA target sequence for PDCD7 (NM_005707.1,1327-1345).
ggagcctttccgacagtat

SEQ ID NO: 334192 - DNA, 19 bp, Homo sapiens
  siRNA target sequence for PDCD7 (NM_005707.1,1328-1346).
gagcctttccgacagtatt

SEQ ID NO: 334193 - DNA, 19 bp, Homo sapiens
  siRNA target sequence for PDCD7 (NM_005707.1,1330-1348).
gcctttccgacagtattat

SEQ ID NO: 334194 - DNA, 19 bp, Homo sapiens
  siRNA target sequence for PDCD7 (NM_005707.1,1332-1350).
ctttccgacagtattatct

SEQ ID NO: 334195 - DNA, 19 bp, Homo sapiens
  siRNA target sequence for PDCD7 (NM_005707.1,1389-1407).
ggcatgattgggatcagta

SEQ ID NO: 334196 - DNA, 19 bp, Homo sapiens
  siRNA target sequence for PDCD7 (NM_005707.1,1488-1506).
gggcaactgctgttaagct

SEQ ID NO: 334197 - DNA, 19 bp, Homo sapiens
  siRNA target sequence for HHLA1 (NM_005712.1,980-998).
gacaggggtcagaatctgt

SEQ ID NO: 334198 - DNA, 19 bp, Homo sapiens
  siRNA target sequence for HHLA1 (NM_005712.1,1012-1030).
caaatgcctgatactttta

SEQ ID NO: 334199 - DNA, 19 bp, Homo sapiens
  siRNA target sequence for HHLA1 (NM_005712.1,1046-1064).
gaatctccacattcatata

SEQ ID NO: 334200 - DNA, 19 bp, Homo sapiens
  siRNA target sequence for HHLA1 (NM_005712.1,1100-1118).
caaagtgtcaagcatgtta

SEQ ID NO: 334201 - DNA, 19 bp, Homo sapiens
  siRNA target sequence for HHLA1 (NM_005712.1,1439-1457).
cagacgtgggcttccatat

SEQ ID NO: 334202 - DNA, 19 bp, Homo sapiens
  siRNA target sequence for HHLA1 (NM_005712.1,1550-1568).
gaggaagccatgaacacta

SEQ ID NO: 334203 - DNA, 19 bp, Homo sapiens
  siRNA target sequence for HHLA1 (NM_005712.1,1553-1571).
gaagccatgaacactacaa

SEQ ID NO: 334204 - DNA, 19 bp, Homo sapiens
  siRNA target sequence for HHLA1 (NM_005712.1,1579-1597).
ggcgcctgctgctgagata

SEQ ID NO: 334205 - DNA, 19 bp, Homo sapiens
  siRNA target sequence for HHLA1 (NM_005712.1,1580-1598).
gcgcctgctgctgagataa

SEQ ID NO: 334206 - DNA, 19 bp, Homo sapiens
  siRNA target sequence for HHLA1 (NM_005712.1,1681-1699).
ggcaacagcccccagatat

SEQ ID NO: 334207 - DNA, 19 bp, Homo sapiens
  siRNA target sequence for HHLA1 (NM_005712.1,1788-1806).
gtcctcagccactcttcaa

SEQ ID NO: 334208 - DNA, 19 bp, Homo sapiens
  siRNA target sequence for HHLA1 (NM_005712.1,1923-1941).
ggacagaggacatgagata

SEQ ID NO: 334209 - DNA, 19 bp, Homo sapiens
  siRNA target sequence for HHLA1 (NM_005712.1,1933-1951).
catgagatactgtcttgaa

SEQ ID NO: 334210 - DNA, 19 bp, Homo sapiens
  siRNA target sequence for HHLA1 (NM_005712.1,2018-2036).
cacaccttaaagcaaaagt

SEQ ID NO: 334211 - DNA, 19 bp, Homo sapiens
  siRNA target sequence for TSFM (NM_005726.2,202-220).
ggctactcctttgtaaatt

SEQ ID NO: 334212 - DNA, 19 bp, Homo sapiens
  siRNA target sequence for TSFM (NM_005726.2,493-511).
caaccctctgcatacagta

SEQ ID NO: 334213 - DNA, 19 bp, Homo sapiens
  siRNA target sequence for TSFM (NM_005726.2,571-589).
cttgagggtttcttgaatt

SEQ ID NO: 334214 - DNA, 19 bp, Homo sapiens
  siRNA target sequence for TSFM (NM_005726.2,574-592).
gagggtttcttgaattcct

SEQ ID NO: 334215 - DNA, 19 bp, Homo sapiens
  siRNA target sequence for TSFM (NM_005726.2,642-660).
ggatcagttggctttagca

SEQ ID NO: 334216 - DNA, 19 bp, Homo sapiens
  siRNA target sequence for TSFM (NM_005726.2,643-661).
gatcagttggctttagcaa

SEQ ID NO: 334217 - DNA, 19 bp, Homo sapiens
  siRNA target sequence for TSFM (NM_005726.2,723-741).
gttctacgttggctcttat

SEQ ID NO: 334218 - DNA, 19 bp, Homo sapiens
  siRNA target sequence for TSFM (NM_005726.2,961-979).
ctggatccctccattacct

SEQ ID NO: 334219 - DNA, 19 bp, Homo sapiens
  siRNA target sequence for TSFM (NM_005726.2,1004-1022).
gggtgtcggtagtagactt

SEQ ID NO: 334220 - DNA, 19 bp, Homo sapiens
  siRNA target sequence for TSFM (NM_005726.2,1005-1023).
ggtgtcggtagtagacttt

SEQ ID NO: 334221 - DNA, 19 bp, Homo sapiens
  siRNA target sequence for TSFM (NM_005726.2,1020-1038).
ctttgtgcggtttgaatgt

SEQ ID NO: 334222 - DNA, 19 bp, Homo sapiens
  siRNA target sequence for C3F (NM_005768.4,136-154).
gccgtcctcactacctttt

SEQ ID NO: 334223 - DNA, 19 bp, Homo sapiens
  siRNA target sequence for C3F (NM_005768.4,139-157).
gtcctcactaccttttgct

SEQ ID NO: 334224 - DNA, 19 bp, Homo sapiens
  siRNA target sequence for C3F (NM_005768.4,177-195).
ggctggatactattacact

SEQ ID NO: 334225 - DNA, 19 bp, Homo sapiens
  siRNA target sequence for C3F (NM_005768.4,197-215).
ccaccggcaactacgatat

SEQ ID NO: 334226 - DNA, 19 bp, Homo sapiens
  siRNA target sequence for C3F (NM_005768.4,202-220).
ggcaactacgatatcaagt

SEQ ID NO: 334227 - DNA, 19 bp, Homo sapiens
  siRNA target sequence for C3F (NM_005768.4,282-300).
cggagggaaagatcagaat

SEQ ID NO: 334228 - DNA, 19 bp, Homo sapiens
  siRNA target sequence for C3F (NM_005768.4,287-305).
ggaaagatcagaattcctt

SEQ ID NO: 334229 - DNA, 19 bp, Homo sapiens
  siRNA target sequence for C3F (NM_005768.4,308-326).
cctctgagcaacagaaata

SEQ ID NO: 334230 - DNA, 19 bp, Homo sapiens
  siRNA target sequence for C3F (NM_005768.4,410-428).
caatgaatcactacatgaa

SEQ ID NO: 334231 - DNA, 19 bp, Homo sapiens
  siRNA target sequence for C3F (NM_005768.4,671-689).
cagaaggagtatgcatttt

SEQ ID NO: 334232 - DNA, 19 bp, Homo sapiens
  siRNA target sequence for C3F (NM_005768.4,794-812).
gcaccattgcctcattcaa

SEQ ID NO: 334233 - DNA, 19 bp, Homo sapiens
  siRNA target sequence for C3F (NM_005768.4,886-904).
cagggtctctcgttgctat

SEQ ID NO: 334234 - DNA, 19 bp, Homo sapiens
  siRNA target sequence for C3F (NM_005768.4,890-908).
gtctctcgttgctattcct

SEQ ID NO: 334235 - DNA, 19 bp, Homo sapiens
  siRNA target sequence for C3F (NM_005768.4,1130-1148).
gggacaaatggcttaaggt

SEQ ID NO: 334236 - DNA, 19 bp, Homo sapiens
  siRNA target sequence for C3F (NM_005768.4,1141-1159).
cttaaggtgtataaatcca

SEQ ID NO: 334237 - DNA, 19 bp, Homo sapiens
  siRNA target sequence for C3F (NM_005768.4,1185-1203).
cctgagcctactattcata

SEQ ID NO: 334238 - DNA, 19 bp, Homo sapiens
  siRNA target sequence for C3F (NM_005768.4,1186-1204).
ctgagcctactattcatat

SEQ ID NO: 334239 - DNA, 19 bp, Homo sapiens
  siRNA target sequence for C3F (NM_005768.4,1195-1213).
ctattcatattgccttata

SEQ ID NO: 334240 - DNA, 19 bp, Homo sapiens
  siRNA target sequence for ZNF255 (NM_005774.1,2916-2934).
ccttcgacttcatcagaat

SEQ ID NO: 334241 - DNA, 19 bp, Homo sapiens
  siRNA target sequence for LHFPL2 (NM_005779.1,113-131).
ggaccttgctgagtattgt

SEQ ID NO: 334242 - DNA, 19 bp, Homo sapiens
  siRNA target sequence for LHFPL2 (NM_005779.1,363-381).
ctggcaggccacagctatt

SEQ ID NO: 334243 - DNA, 19 bp, Homo sapiens
  siRNA target sequence for LHFPL2 (NM_005779.1,365-383).
ggcaggccacagctatttt

SEQ ID NO: 334244 - DNA, 19 bp, Homo sapiens
  siRNA target sequence for LHFPL2 (NM_005779.1,391-409).
gtgggaatctttattctct

SEQ ID NO: 334245 - DNA, 19 bp, Homo sapiens
  siRNA target sequence for LHFPL2 (NM_005779.1,443-461).
gtgtacagagcatcatgaa

SEQ ID NO: 334246 - DNA, 19 bp, Homo sapiens
  siRNA target sequence for LHFPL2 (NM_005779.1,445-463).
gtacagagcatcatgaaga

SEQ ID NO: 334247 - DNA, 19 bp, Homo sapiens
  siRNA target sequence for LHFPL2 (NM_005779.1,482-500).
gtgggctgttgcaaggaat

SEQ ID NO: 334248 - DNA, 19 bp, Homo sapiens
  siRNA target sequence for LHFPL2 (NM_005779.1,513-531).
ccttatcctcggtttgata

SEQ ID NO: 334249 - DNA, 19 bp, Homo sapiens
  siRNA target sequence for LHFPL2 (NM_005779.1,644-662).
ggggcacagtcctcacttt

SEQ ID NO: 334250 - DNA, 19 bp, Homo sapiens
  siRNA target sequence for LHFPL2 (NM_005779.1,698-716).
caacctctagtgacaaagt

SEQ ID NO: 334251 - DNA, 19 bp, Homo sapiens
  siRNA target sequence for LHFPL2 (NM_005779.1,701-719).
cctctagtgacaaagtaca

SEQ ID NO: 334252 - DNA, 19 bp, Homo sapiens
  siRNA target sequence for RNF41 (NM_005785.2,400-418).
gatgttgacgaagatctta

SEQ ID NO: 334253 - DNA, 19 bp, Homo sapiens
  siRNA target sequence for RNF41 (NM_005785.2,403-421).
gttgacgaagatcttatct

SEQ ID NO: 334254 - DNA, 19 bp, Homo sapiens
  siRNA target sequence for RNF41 (NM_005785.2,412-430).
gatcttatctgccctattt

SEQ ID NO: 334255 - DNA, 19 bp, Homo sapiens
  siRNA target sequence for RNF41 (NM_005785.2,415-433).
cttatctgccctatttgca

SEQ ID NO: 334256 - DNA, 19 bp, Homo sapiens
  siRNA target sequence for RNF41 (NM_005785.2,577-595).
cggatcatgcggaacatgt

SEQ ID NO: 334257 - DNA, 19 bp, Homo sapiens
  siRNA target sequence for RNF41 (NM_005785.2,578-596).
ggatcatgcggaacatgtt

SEQ ID NO: 334258 - DNA, 19 bp, Homo sapiens
  siRNA target sequence for RNF41 (NM_005785.2,644-662).
ccgttgtccggcttgacaa

SEQ ID NO: 334259 - DNA, 19 bp, Homo sapiens
  siRNA target sequence for RNF41 (NM_005785.2,751-769).
gagctgcccaaccataact

SEQ ID NO: 334260 - DNA, 19 bp, Homo sapiens
  siRNA target sequence for RNF41 (NM_005785.2,757-775).
cccaaccataactgcatta

SEQ ID NO: 334261 - DNA, 19 bp, Homo sapiens
  siRNA target sequence for RNF41 (NM_005785.2,758-776).
ccaaccataactgcattaa

SEQ ID NO: 334262 - DNA, 19 bp, Homo sapiens
  siRNA target sequence for RNF41 (NM_005785.2,940-958).
gaggagacaattgaataca

SEQ ID NO: 334263 - DNA, 19 bp, Homo sapiens
  siRNA target sequence for RNF41 (NM_005785.2,1076-1094).
gtggctgtcctgcttctat

SEQ ID NO: 334264 - DNA, 19 bp, Homo sapiens
  siRNA target sequence for RNF41 (NM_005785.2,1082-1100).
gtcctgcttctattgtcaa

SEQ ID NO: 334265 - DNA, 19 bp, Homo sapiens
  siRNA target sequence for RNF41 (NM_005785.2,1098-1116).
caacgagctgattgaaaat

SEQ ID NO: 334266 - DNA, 19 bp, Homo sapiens
  siRNA target sequence for RNF41 (NM_005785.2,1167-1185).
gatgaaccgacgctactat

SEQ ID NO: 334267 - DNA, 19 bp, Homo sapiens
  siRNA target sequence for RNF41 (NM_005785.2,1175-1193).
gacgctactatgagaacta

SEQ ID NO: 334268 - DNA, 19 bp, Homo sapiens
  siRNA target sequence for RNF41 (NM_005785.2,1278-1296).
gccaggccttgtcatgata

SEQ ID NO: 334269 - DNA, 19 bp, Homo sapiens
  siRNA target sequence for RNF41 (NM_005785.2,1279-1297).
ccaggccttgtcatgatat

SEQ ID NO: 334270 - DNA, 19 bp, Homo sapiens
  siRNA target sequence for RNF41 (NM_005785.2,1280-1298).
caggccttgtcatgatatt

SEQ ID NO: 334271 - DNA, 19 bp, Homo sapiens
  siRNA target sequence for RNF41 (NM_005785.2,1301-1319).
cgcatggcgtggaagagat

SEQ ID NO: 334272 - DNA, 19 bp, Homo sapiens
  siRNA target sequence for RNF41 (NM_005785.2,1302-1320).
gcatggcgtggaagagata

SEQ ID NO: 334273 - DNA, 19 bp, Homo sapiens
  siRNA target sequence for RNF41 (NM_005785.2,1303-1321).
catggcgtggaagagatat

SEQ ID NO: 334274 - DNA, 19 bp, Homo sapiens
  siRNA target sequence for LRRC17 (NM_005824.1,284-302).
gcgtgtggttaccattgta

SEQ ID NO: 334275 - DNA, 19 bp, Homo sapiens
  siRNA target sequence for LRRC17 (NM_005824.1,285-303).
cgtgtggttaccattgtaa

SEQ ID NO: 334276 - DNA, 19 bp, Homo sapiens
  siRNA target sequence for LRRC17 (NM_005824.1,288-306).
gtggttaccattgtaatct

SEQ ID NO: 334277 - DNA, 19 bp, Homo sapiens
  siRNA target sequence for LRRC17 (NM_005824.1,438-456).
ccgtgtgacgtgtacacat

SEQ ID NO: 334278 - DNA, 19 bp, Homo sapiens
  siRNA target sequence for LRRC17 (NM_005824.1,439-457).
cgtgtgacgtgtacacata

SEQ ID NO: 334279 - DNA, 19 bp, Homo sapiens
  siRNA target sequence for LRRC17 (NM_005824.1,440-458).
gtgtgacgtgtacacatat

SEQ ID NO: 334280 - DNA, 19 bp, Homo sapiens
  siRNA target sequence for LRRC17 (NM_005824.1,442-460).
gtgacgtgtacacatatct

SEQ ID NO: 334281 - DNA, 19 bp, Homo sapiens
  siRNA target sequence for LRRC17 (NM_005824.1,452-470).
cacatatctccatgagaaa

SEQ ID NO: 334282 - DNA, 19 bp, Homo sapiens
  siRNA target sequence for LRRC17 (NM_005824.1,461-479).
ccatgagaaatacttagat

SEQ ID NO: 334283 - DNA, 19 bp, Homo sapiens
  siRNA target sequence for LRRC17 (NM_005824.1,511-529).
ctggttggcctcaggattt

SEQ ID NO: 334284 - DNA, 19 bp, Homo sapiens
  siRNA target sequence for LRRC17 (NM_005824.1,561-579).
cgcacattgaagaacaaca

SEQ ID NO: 334285 - DNA, 19 bp, Homo sapiens
  siRNA target sequence for LRRC17 (NM_005824.1,562-580).
gcacattgaagaacaacat

SEQ ID NO: 334286 - DNA, 19 bp, Homo sapiens
  siRNA target sequence for LRRC17 (NM_005824.1,621-639).
cagaatgagatctctaaaa

SEQ ID NO: 334287 - DNA, 19 bp, Homo sapiens
  siRNA target sequence for LRRC17 (NM_005824.1,623-641).
gaatgagatctctaaaatt

SEQ ID NO: 334288 - DNA, 19 bp, Homo sapiens
  siRNA target sequence for LRRC17 (NM_005824.1,627-645).
gagatctctaaaattgaga

SEQ ID NO: 334289 - DNA, 19 bp, Homo sapiens
  siRNA target sequence for LRRC17 (NM_005824.1,651-669).
gcgttctttggtttaaaca

SEQ ID NO: 334290 - DNA, 19 bp, Homo sapiens
  siRNA target sequence for LRRC17 (NM_005824.1,713-731).
gacggaggaagtgttcatt

SEQ ID NO: 334291 - DNA, 19 bp, Homo sapiens
  siRNA target sequence for LRRC17 (NM_005824.1,715-733).
cggaggaagtgttcattta

SEQ ID NO: 334292 - DNA, 19 bp, Homo sapiens
  siRNA target sequence for LRRC17 (NM_005824.1,746-764).
gagctacctgcgtctttat

SEQ ID NO: 334293 - DNA, 19 bp, Homo sapiens
  siRNA target sequence for LRRC17 (NM_005824.1,748-766).
gctacctgcgtctttatga

SEQ ID NO: 334294 - DNA, 19 bp, Homo sapiens
  siRNA target sequence for LRRC17 (NM_005824.1,789-807).
gagatagaaacgcttattt

SEQ ID NO: 334295 - DNA, 19 bp, Homo sapiens
  siRNA target sequence for LRRC17 (NM_005824.1,845-863).
ctacgccaagtgtgaaagt

SEQ ID NO: 334296 - DNA, 19 bp, Homo sapiens
  siRNA target sequence for LRRC17 (NM_005824.1,1029-1047).
caaacactggactgcaaaa

SEQ ID NO: 334297 - DNA, 19 bp, Homo sapiens
  siRNA target sequence for LRRC17 (NM_005824.1,1079-1097).
ccctccagatattgttaaa

SEQ ID NO: 334298 - DNA, 19 bp, Homo sapiens
  siRNA target sequence for LRRC17 (NM_005824.1,1125-1143).
caacttcgacccaaggaat

SEQ ID NO: 334299 - DNA, 19 bp, Homo sapiens
  siRNA target sequence for LRRC17 (NM_005824.1,1132-1150).
gacccaaggaatttgaaga

SEQ ID NO: 334300 - DNA, 19 bp, Homo sapiens
  siRNA target sequence for LRRC17 (NM_005824.1,1183-1201).
gcaatggcattgaattcat

SEQ ID NO: 334301 - DNA, 19 bp, Homo sapiens
  siRNA target sequence for SPRY1 (NM_005841.1,346-364).
cagtggcagttcgttagtt

SEQ ID NO: 334302 - DNA, 19 bp, Homo sapiens
  siRNA target sequence for SPRY1 (NM_005841.1,348-366).
gtggcagttcgttagttgt

SEQ ID NO: 334303 - DNA, 19 bp, Homo sapiens
  siRNA target sequence for SPRY1 (NM_005841.1,351-369).
gcagttcgttagttgtgat

SEQ ID NO: 334304 - DNA, 19 bp, Homo sapiens
  siRNA target sequence for SPRY1 (NM_005841.1,390-408).
gccgtcagagattagacta

SEQ ID NO: 334305 - DNA, 19 bp, Homo sapiens
  siRNA target sequence for SPRY1 (NM_005841.1,391-409).
ccgtcagagattagactat

SEQ ID NO: 334306 - DNA, 19 bp, Homo sapiens
  siRNA target sequence for SPRY1 (NM_005841.1,422-440).
cagcctactgctattttgt

SEQ ID NO: 334307 - DNA, 19 bp, Homo sapiens
  siRNA target sequence for SPRY1 (NM_005841.1,448-466).
ccagatcaaggccataaga

SEQ ID NO: 334308 - DNA, 19 bp, Homo sapiens
  siRNA target sequence for SPRY1 (NM_005841.1,488-506).
gggccttcggtggtgaaaa

SEQ ID NO: 334309 - DNA, 19 bp, Homo sapiens
  siRNA target sequence for SPRY1 (NM_005841.1,490-508).
gccttcggtggtgaaaaga

SEQ ID NO: 334310 - DNA, 19 bp, Homo sapiens
  siRNA target sequence for SPRY1 (NM_005841.1,542-560).
catgaaaggactcatgaaa

SEQ ID NO: 334311 - DNA, 19 bp, Homo sapiens
  siRNA target sequence for SPRY1 (NM_005841.1,545-563).
gaaaggactcatgaaatca

SEQ ID NO: 334312 - DNA, 19 bp, Homo sapiens
  siRNA target sequence for SPRY1 (NM_005841.1,562-580).
cataccaattaatgtgaat

SEQ ID NO: 334313 - DNA, 19 bp, Homo sapiens
  siRNA target sequence for SPRY1 (NM_005841.1,758-776).
cctggtcataggtctgaaa

SEQ ID NO: 334314 - DNA, 19 bp, Homo sapiens
  siRNA target sequence for SPRY1 (NM_005841.1,1030-1048).
cgaaggggattcctattca

SEQ ID NO: 334315 - DNA, 19 bp, Homo sapiens
  siRNA target sequence for SPRY1 (NM_005841.1,1035-1053).
gggattcctattcagataa

SEQ ID NO: 334316 - DNA, 19 bp, Homo sapiens
  siRNA target sequence for SPRY1 (NM_005841.1,1036-1054).
ggattcctattcagataat

SEQ ID NO: 334317 - DNA, 19 bp, Homo sapiens
  siRNA target sequence for SPRY1 (NM_005841.1,1083-1101).
gctctagatacctgtgtat

SEQ ID NO: 334318 - DNA, 19 bp, Homo sapiens
  siRNA target sequence for SPRY1 (NM_005841.1,1135-1153).
ctgttatcctcctgctaaa

SEQ ID NO: 334319 - DNA, 19 bp, Homo sapiens
  siRNA target sequence for SPRY1 (NM_005841.1,1197-1215).
gcccagggtgcagatgtaa

SEQ ID NO: 334320 - DNA, 19 bp, Homo sapiens
  siRNA target sequence for SPRY1 (NM_005841.1,1216-1234).
gaactccaacactgtctat

SEQ ID NO: 334321 - DNA, 19 bp, Homo sapiens
  siRNA target sequence for TRIP (NM_005879.2,129-147).
ctatctgctccgacttctt

SEQ ID NO: 334322 - DNA, 19 bp, Homo sapiens
  siRNA target sequence for TRIP (NM_005879.2,193-211).
ccacttgcagtgcctaatt

SEQ ID NO: 334323 - DNA, 19 bp, Homo sapiens
  siRNA target sequence for TRIP (NM_005879.2,262-280).
ggttggcaaaagaaccatt

SEQ ID NO: 334324 - DNA, 19 bp, Homo sapiens
  siRNA target sequence for TRIP (NM_005879.2,263-281).
gttggcaaaagaaccatta

SEQ ID NO: 334325 - DNA, 19 bp, Homo sapiens
  siRNA target sequence for TRIP (NM_005879.2,267-285).
gcaaaagaaccattatcaa

SEQ ID NO: 334326 - DNA, 19 bp, Homo sapiens
  siRNA target sequence for TRIP (NM_005879.2,268-286).
caaaagaaccattatcaat

SEQ ID NO: 334327 - DNA, 19 bp, Homo sapiens
  siRNA target sequence for TRIP (NM_005879.2,323-341).
gtcttggatgcagaattct

SEQ ID NO: 334328 - DNA, 19 bp, Homo sapiens
  siRNA target sequence for TRIP (NM_005879.2,325-343).
cttggatgcagaattctta

SEQ ID NO: 334329 - DNA, 19 bp, Homo sapiens
  siRNA target sequence for TRIP (NM_005879.2,721-739).
gaaagagtacgagaatcta

SEQ ID NO: 334330 - DNA, 19 bp, Homo sapiens
  siRNA target sequence for TRIP (NM_005879.2,861-879).
cagcccagaaggacttaca

SEQ ID NO: 334331 - DNA, 19 bp, Homo sapiens
  siRNA target sequence for TRIP (NM_005879.2,884-902).
gctgacaaggaaatcatga

SEQ ID NO: 334332 - DNA, 19 bp, Homo sapiens
  siRNA target sequence for TRIP (NM_005879.2,921-939).
cgatgctgcaggaaacctt

SEQ ID NO: 334333 - DNA, 19 bp, Homo sapiens
  siRNA target sequence for TRIP (NM_005879.2,966-984).
ctgtcgaccgcctggtttt

SEQ ID NO: 334334 - DNA, 19 bp, Homo sapiens
  siRNA target sequence for TRIP (NM_005879.2,971-989).
gaccgcctggttttagaga

SEQ ID NO: 334335 - DNA, 19 bp, Homo sapiens
  siRNA target sequence for TRIP (NM_005879.2,1033-1051).
cttccgtgatgatattgat

SEQ ID NO: 334336 - DNA, 19 bp, Homo sapiens
  siRNA target sequence for TRIP (NM_005879.2,1038-1056).
gtgatgatattgatctcaa

SEQ ID NO: 334337 - DNA, 19 bp, Homo sapiens
  siRNA target sequence for TRIP (NM_005879.2,1095-1113).
ccagctcccagcatggtta

SEQ ID NO: 334338 - DNA, 19 bp, Homo sapiens
  siRNA target sequence for TRIP (NM_005879.2,1098-1116).
gctcccagcatggttacta

SEQ ID NO: 334339 - DNA, 19 bp, Homo sapiens
  siRNA target sequence for TRIP (NM_005879.2,1103-1121).
cagcatggttactacgaaa

SEQ ID NO: 334340 - DNA, 19 bp, Homo sapiens
  siRNA target sequence for TRIP (NM_005879.2,1323-1341).
cctcttgcagcaaagatgt

SEQ ID NO: 334341 - DNA, 19 bp, Homo sapiens
  siRNA target sequence for TRIP (NM_005879.2,1363-1381).
gctcggtggccggacaaaa

SEQ ID NO: 334342 - DNA, 19 bp, Homo sapiens
  siRNA target sequence for TRIP (NM_005879.2,1364-1382).
ctcggtggccggacaaaat

SEQ ID NO: 334343 - DNA, 19 bp, Homo sapiens
  siRNA target sequence for TRIP (NM_005879.2,1367-1385).
ggtggccggacaaaattca

SEQ ID NO: 334344 - DNA, 19 bp, Homo sapiens
  siRNA target sequence for TRIP (NM_005879.2,1368-1386).
gtggccggacaaaattcat

SEQ ID NO: 334345 - DNA, 19 bp, Homo sapiens
  siRNA target sequence for TEB4 (NM_005885.2,192-210).
cgcggaggaagacatatgt

SEQ ID NO: 334346 - DNA, 19 bp, Homo sapiens
  siRNA target sequence for TEB4 (NM_005885.2,193-211).
gcggaggaagacatatgta

SEQ ID NO: 334347 - DNA, 19 bp, Homo sapiens
  siRNA target sequence for TEB4 (NM_005885.2,195-213).
ggaggaagacatatgtaga

SEQ ID NO: 334348 - DNA, 19 bp, Homo sapiens
  siRNA target sequence for TEB4 (NM_005885.2,236-254).
ctgagaaaccgctttatca

SEQ ID NO: 334349 - DNA, 19 bp, Homo sapiens
  siRNA target sequence for TEB4 (NM_005885.2,246-264).
gctttatcatccttgtgta

SEQ ID NO: 334350 - DNA, 19 bp, Homo sapiens
  siRNA target sequence for TEB4 (NM_005885.2,262-280).
gtatgtactggcagtatta

SEQ ID NO: 334351 - DNA, 19 bp, Homo sapiens
  siRNA target sequence for TEB4 (NM_005885.2,266-284).
gtactggcagtattaagtt

SEQ ID NO: 334352 - DNA, 19 bp, Homo sapiens
  siRNA target sequence for TEB4 (NM_005885.2,272-290).
gcagtattaagtttatcca

SEQ ID NO: 334353 - DNA, 19 bp, Homo sapiens
  siRNA target sequence for TEB4 (NM_005885.2,273-291).
cagtattaagtttatccat

SEQ ID NO: 334354 - DNA, 19 bp, Homo sapiens
  siRNA target sequence for TEB4 (NM_005885.2,288-306).
ccatcaagaatgcttagtt

SEQ ID NO: 334355 - DNA, 19 bp, Homo sapiens
  siRNA target sequence for TEB4 (NM_005885.2,292-310).
caagaatgcttagttcaat

SEQ ID NO: 334356 - DNA, 19 bp, Homo sapiens
  siRNA target sequence for TEB4 (NM_005885.2,304-322).
gttcaatggctgaaacaca

SEQ ID NO: 334357 - DNA, 19 bp, Homo sapiens
  siRNA target sequence for TEB4 (NM_005885.2,319-337).
cacagtcgaaaagaatact

SEQ ID NO: 334358 - DNA, 19 bp, Homo sapiens
  siRNA target sequence for TEB4 (NM_005885.2,321-339).
cagtcgaaaagaatactgt

SEQ ID NO: 334359 - DNA, 19 bp, Homo sapiens
  siRNA target sequence for TEB4 (NM_005885.2,351-369).
gcacagatttgcttttaca

SEQ ID NO: 334360 - DNA, 19 bp, Homo sapiens
  siRNA target sequence for TEB4 (NM_005885.2,395-413).
cacggcttccaattcaaga

SEQ ID NO: 334361 - DNA, 19 bp, Homo sapiens
  siRNA target sequence for TEB4 (NM_005885.2,442-460).
ggcactgcaatacgatatt

SEQ ID NO: 334362 - DNA, 19 bp, Homo sapiens
  siRNA target sequence for TEB4 (NM_005885.2,446-464).
ctgcaatacgatattggtt

SEQ ID NO: 334363 - DNA, 19 bp, Homo sapiens
  siRNA target sequence for TEB4 (NM_005885.2,495-513).
gggagttgttcctcttaca

SEQ ID NO: 334364 - DNA, 19 bp, Homo sapiens
  siRNA target sequence for TEB4 (NM_005885.2,562-580).
ctgacgctgccattagata

SEQ ID NO: 334365 - DNA, 19 bp, Homo sapiens
  siRNA target sequence for TEB4 (NM_005885.2,566-584).
cgctgccattagatatgct

SEQ ID NO: 334366 - DNA, 19 bp, Homo sapiens
  siRNA target sequence for TEB4 (NM_005885.2,583-601).
ctgtcaacggaaaatttgt

SEQ ID NO: 334367 - DNA, 19 bp, Homo sapiens
  siRNA target sequence for TEB4 (NM_005885.2,611-629).
gtttgcagggttgttttgt

SEQ ID NO: 334368 - DNA, 19 bp, Homo sapiens
  siRNA target sequence for TEB4 (NM_005885.2,638-656).
gcacactgtgtgcattcat

SEQ ID NO: 334369 - DNA, 19 bp, Homo sapiens
  siRNA target sequence for TEB4 (NM_005885.2,687-705).
ccatgggggagcaccaatt

SEQ ID NO: 334370 - DNA, 19 bp, Homo sapiens
  siRNA target sequence for TEB4 (NM_005885.2,688-706).
catgggggagcaccaattt

SEQ ID NO: 334371 - DNA, 19 bp, Homo sapiens
  siRNA target sequence for TEB4 (NM_005885.2,691-709).
gggggagcaccaatttggt

SEQ ID NO: 334372 - DNA, 19 bp, Homo sapiens
  siRNA target sequence for TEB4 (NM_005885.2,692-710).
ggggagcaccaatttggtt

SEQ ID NO: 334373 - DNA, 19 bp, Homo sapiens
  siRNA target sequence for TEB4 (NM_005885.2,919-937).
gatgcggcagatgctaata

SEQ ID NO: 334374 - DNA, 19 bp, Homo sapiens
  siRNA target sequence for TEB4 (NM_005885.2,941-959).
gagcccaggatgacatgaa

SEQ ID NO: 334375 - DNA, 19 bp, Homo sapiens
  siRNA target sequence for TEB4 (NM_005885.2,957-975).
gaattggaatgctttagaa

SEQ ID NO: 334376 - DNA, 19 bp, Homo sapiens
  siRNA target sequence for TEB4 (NM_005885.2,1021-1039).
cttgatggatcactagttt

SEQ ID NO: 334377 - DNA, 19 bp, Homo sapiens
  siRNA target sequence for TEB4 (NM_005885.2,1051-1069).
gtcttctgggtggtatctt

SEQ ID NO: 334378 - DNA, 19 bp, Homo sapiens
  siRNA target sequence for TEB4 (NM_005885.2,1053-1071).
cttctgggtggtatcttta

SEQ ID NO: 334379 - DNA, 19 bp, Homo sapiens
  siRNA target sequence for TEB4 (NM_005885.2,1097-1115).
cattttgcccttaccatat

SEQ ID NO: 334380 - DNA, 19 bp, Homo sapiens
  siRNA target sequence for TEB4 (NM_005885.2,1179-1197).
cctaatcacaaccatagtt

SEQ ID NO: 334381 - DNA, 19 bp, Homo sapiens
  siRNA target sequence for TEB4 (NM_005885.2,1187-1205).
caaccatagttgggtatat

SEQ ID NO: 334382 - DNA, 19 bp, Homo sapiens
  siRNA target sequence for TEB4 (NM_005885.2,1190-1208).
ccatagttgggtatatact

SEQ ID NO: 334383 - DNA, 19 bp, Homo sapiens
  siRNA target sequence for TEB4 (NM_005885.2,1213-1231).
gcaataacactgataattt

SEQ ID NO: 334384 - DNA, 19 bp, Homo sapiens
  siRNA target sequence for TEB4 (NM_005885.2,1281-1299).
gggagtctgctatattgtt

SEQ ID NO: 334385 - DNA, 19 bp, Homo sapiens
  siRNA target sequence for TEB4 (NM_005885.2,1283-1301).
gagtctgctatattgttgt

SEQ ID NO: 334386 - DNA, 19 bp, Homo sapiens
  siRNA target sequence for TEB4 (NM_005885.2,1285-1303).
gtctgctatattgttgtta

SEQ ID NO: 334387 - DNA, 19 bp, Homo sapiens
  siRNA target sequence for TEB4 (NM_005885.2,1289-1307).
gctatattgttgttaaggt

SEQ ID NO: 334388 - DNA, 19 bp, Homo sapiens
  siRNA target sequence for TEB4 (NM_005885.2,1386-1404).
gtttgatgctactctgaaa

SEQ ID NO: 334389 - DNA, 19 bp, Homo sapiens
  siRNA target sequence for TEB4 (NM_005885.2,1408-1426).
cgagaactgagctttcagt

SEQ ID NO: 334390 - DNA, 19 bp, Homo sapiens
  siRNA target sequence for TEB4 (NM_005885.2,1433-1451).
caggtactaccatgtttct

SEQ ID NO: 334391 - DNA, 19 bp, Homo sapiens
  siRNA target sequence for TEB4 (NM_005885.2,1457-1475).
ggctagtgggaatggtata

SEQ ID NO: 334392 - DNA, 19 bp, Homo sapiens
  siRNA target sequence for TEB4 (NM_005885.2,1458-1476).
gctagtgggaatggtatat

SEQ ID NO: 334393 - DNA, 19 bp, Homo sapiens
  siRNA target sequence for TEB4 (NM_005885.2,1462-1480).
gtgggaatggtatatgtct

SEQ ID NO: 334394 - DNA, 19 bp, Homo sapiens
  siRNA target sequence for TEB4 (NM_005885.2,1607-1625).
ggcatctccgaagatttat

SEQ ID NO: 334395 - DNA, 19 bp, Homo sapiens
  siRNA target sequence for TEB4 (NM_005885.2,1608-1626).
gcatctccgaagatttatt

SEQ ID NO: 334396 - DNA, 19 bp, Homo sapiens
  siRNA target sequence for TEB4 (NM_005885.2,1612-1630).
ctccgaagatttattttgt

SEQ ID NO: 334397 - DNA, 19 bp, Homo sapiens
  siRNA target sequence for TEB4 (NM_005885.2,1670-1688).
ggcttcctatacgtataat

SEQ ID NO: 334398 - DNA, 19 bp, Homo sapiens
  siRNA target sequence for TEB4 (NM_005885.2,1671-1689).
gcttcctatacgtataatt

SEQ ID NO: 334399 - DNA, 19 bp, Homo sapiens
  siRNA target sequence for TEB4 (NM_005885.2,1692-1710).
gagtgtgctgcctaatttt

SEQ ID NO: 334400 - DNA, 19 bp, Homo sapiens
  siRNA target sequence for TEB4 (NM_005885.2,1782-1800).
ggttgtcttgccagcatta

SEQ ID NO: 334401 - DNA, 19 bp, Homo sapiens
  siRNA target sequence for TEB4 (NM_005885.2,1865-1883).
gatacttgctggatcttca

SEQ ID NO: 334402 - DNA, 19 bp, Homo sapiens
  siRNA target sequence for TEB4 (NM_005885.2,1875-1893).
ggatcttcattcttattta

SEQ ID NO: 334403 - DNA, 19 bp, Homo sapiens
  siRNA target sequence for TEB4 (NM_005885.2,1922-1940).
gtgcaaatcaacaagttaa

SEQ ID NO: 334404 - DNA, 19 bp, Homo sapiens
  siRNA target sequence for TEB4 (NM_005885.2,1948-1966).
cagcatgctcgaaataaca

SEQ ID NO: 334405 - DNA, 19 bp, Homo sapiens
  siRNA target sequence for TEB4 (NM_005885.2,2046-2064).
gccttaccgccgaccttta

SEQ ID NO: 334406 - DNA, 19 bp, Homo sapiens
  siRNA target sequence for TEB4 (NM_005885.2,2047-2065).
ccttaccgccgacctttaa

SEQ ID NO: 334407 - DNA, 19 bp, Homo sapiens
  siRNA target sequence for TEB4 (NM_005885.2,2048-2066).
cttaccgccgacctttaaa

SEQ ID NO: 334408 - DNA, 19 bp, Homo sapiens
  siRNA target sequence for TEB4 (NM_005885.2,2052-2070).
ccgccgacctttaaatttt

SEQ ID NO: 334409 - DNA, 19 bp, Homo sapiens
  siRNA target sequence for TEB4 (NM_005885.2,2130-2148).
catctgccttactttacca

SEQ ID NO: 334410 - DNA, 19 bp, Homo sapiens
  siRNA target sequence for TEB4 (NM_005885.2,2135-2153).
gccttactttaccagtatt

SEQ ID NO: 334411 - DNA, 19 bp, Homo sapiens
  siRNA target sequence for TEB4 (NM_005885.2,2136-2154).
ccttactttaccagtattt

SEQ ID NO: 334412 - DNA, 19 bp, Homo sapiens
  siRNA target sequence for TEB4 (NM_005885.2,2155-2173).
gctggccgttggttaatgt

SEQ ID NO: 334413 - DNA, 19 bp, Homo sapiens
  siRNA target sequence for TEB4 (NM_005885.2,2161-2179).
cgttggttaatgtcgtttt

SEQ ID NO: 334414 - DNA, 19 bp, Homo sapiens
  siRNA target sequence for TEB4 (NM_005885.2,2184-2202).
ggggactgccaaaatccat

SEQ ID NO: 334415 - DNA, 19 bp, Homo sapiens
  siRNA target sequence for TEB4 (NM_005885.2,2298-2316).
gatcttccagaaggttaaa

SEQ ID NO: 334416 - DNA, 19 bp, Homo sapiens
  siRNA target sequence for TEB4 (NM_005885.2,2317-2335).
gagtggtctctcatgatca

SEQ ID NO: 334417 - DNA, 19 bp, Homo sapiens
  siRNA target sequence for TEB4 (NM_005885.2,2326-2344).
ctcatgatcatgaagactt

SEQ ID NO: 334418 - DNA, 19 bp, Homo sapiens
  siRNA target sequence for TEB4 (NM_005885.2,2480-2498).
gagtcctgcatgccaaaat

SEQ ID NO: 334419 - DNA, 19 bp, Homo sapiens
  siRNA target sequence for TEB4 (NM_005885.2,2482-2500).
gtcctgcatgccaaaatca

SEQ ID NO: 334420 - DNA, 19 bp, Homo sapiens
  siRNA target sequence for TEB4 (NM_005885.2,2484-2502).
cctgcatgccaaaatcatt

SEQ ID NO: 334421 - DNA, 19 bp, Homo sapiens
  siRNA target sequence for TEB4 (NM_005885.2,2524-2542).
cctcagtggtggttgaaaa

SEQ ID NO: 334422 - DNA, 19 bp, Homo sapiens
  siRNA target sequence for TEB4 (NM_005885.2,2532-2550).
gtggttgaaaactgtaatt

SEQ ID NO: 334423 - DNA, 19 bp, Homo sapiens
  siRNA target sequence for TEB4 (NM_005885.2,2580-2598).
cattgaccttcactatatt

SEQ ID NO: 334424 - DNA, 19 bp, Homo sapiens
  siRNA target sequence for TEB4 (NM_005885.2,2642-2660).
ccctgtgtgtaccttatgt

SEQ ID NO: 334425 - DNA, 19 bp, Homo sapiens
  siRNA target sequence for TEB4 (NM_005885.2,2644-2662).
ctgtgtgtaccttatgtca

SEQ ID NO: 334426 - DNA, 19 bp, Homo sapiens
  siRNA target sequence for TEB4 (NM_005885.2,2646-2664).
gtgtgtaccttatgtcata

SEQ ID NO: 334427 - DNA, 19 bp, Homo sapiens
  siRNA target sequence for TEB4 (NM_005885.2,2650-2668).
gtaccttatgtcatagctt

SEQ ID NO: 334428 - DNA, 19 bp, Homo sapiens
  siRNA target sequence for TEB4 (NM_005885.2,2669-2687).
ctggtgttgttcctttact

SEQ ID NO: 334429 - DNA, 19 bp, Homo sapiens
  siRNA target sequence for TEB4 (NM_005885.2,2690-2708).
gtgttactgcggaaatgca

SEQ ID NO: 334430 - DNA, 19 bp, Homo sapiens
  siRNA target sequence for TEB4 (NM_005885.2,2696-2714).
ctgcggaaatgcaaaactt

SEQ ID NO: 334431 - DNA, 19 bp, Homo sapiens
  siRNA target sequence for TEB4 (NM_005885.2,2718-2736).
ccatcggcggatttatcca

SEQ ID NO: 334432 - DNA, 19 bp, Homo sapiens
  siRNA target sequence for TEB4 (NM_005885.2,2719-2737).
catcggcggatttatccat

SEQ ID NO: 334433 - DNA, 19 bp, Homo sapiens
  siRNA target sequence for TEB4 (NM_005885.2,2722-2740).
cggcggatttatccatttt

SEQ ID NO: 334434 - DNA, 19 bp, Homo sapiens
  siRNA target sequence for TEB4 (NM_005885.2,2752-2770).
gtggtattgatggcaattt

SEQ ID NO: 334435 - DNA, 19 bp, Homo sapiens
  siRNA target sequence for TEB4 (NM_005885.2,2787-2805).
ccagtttaagcgcctttat

SEQ ID NO: 334436 - DNA, 19 bp, Homo sapiens
  siRNA target sequence for TEB4 (NM_005885.2,2796-2814).
gcgcctttatgaacatatt

SEQ ID NO: 334437 - DNA, 19 bp, Homo sapiens
  siRNA target sequence for TEB4 (NM_005885.2,2797-2815).
cgcctttatgaacatatta

SEQ ID NO: 334438 - DNA, 19 bp, Homo sapiens
  siRNA target sequence for TEB4 (NM_005885.2,2837-2855).
gtcaacgactcgtgaacta

SEQ ID NO: 334439 - DNA, 19 bp, Homo sapiens
  siRNA target sequence for M17S2 (NM_005899.2,93-111).
caggttactctaaatgtga

SEQ ID NO: 334440 - DNA, 19 bp, Homo sapiens
  siRNA target sequence for M17S2 (NM_005899.2,171-189).
gatatcgaagctatggtaa

SEQ ID NO: 334441 - DNA, 19 bp, Homo sapiens
  siRNA target sequence for M17S2 (NM_005899.2,176-194).
cgaagctatggtaaaagtt

SEQ ID NO: 334442 - DNA, 19 bp, Homo sapiens
  siRNA target sequence for M17S2 (NM_005899.2,243-261).
gaagaggtatccatcaaca

SEQ ID NO: 334443 - DNA, 19 bp, Homo sapiens
  siRNA target sequence for M17S2 (NM_005899.2,283-301).
cgcttaagatggcagttaa

SEQ ID NO: 334444 - DNA, 19 bp, Homo sapiens
  siRNA target sequence for M17S2 (NM_005899.2,482-500).
gcagtcgtttccacttgtt

SEQ ID NO: 334445 - DNA, 19 bp, Homo sapiens
  siRNA target sequence for M17S2 (NM_005899.2,531-549).
cccccagactggttcacaa

SEQ ID NO: 334446 - DNA, 19 bp, Homo sapiens
  siRNA target sequence for M17S2 (NM_005899.2,557-575).
ggagacgttcagagaacaa

SEQ ID NO: 334447 - DNA, 19 bp, Homo sapiens
  siRNA target sequence for M17S2 (NM_005899.2,568-586).
gagaacaagtggttaacga

SEQ ID NO: 334448 - DNA, 19 bp, Homo sapiens
  siRNA target sequence for M17S2 (NM_005899.2,589-607).
cggttgagaagcttgaaca

SEQ ID NO: 334449 - DNA, 19 bp, Homo sapiens
  siRNA target sequence for M17S2 (NM_005899.2,655-673).
gtccctcagaagtctcaat

SEQ ID NO: 334450 - DNA, 19 bp, Homo sapiens
  siRNA target sequence for M17S2 (NM_005899.2,713-731).
gttcagctggcatattgct

SEQ ID NO: 334451 - DNA, 19 bp, Homo sapiens
  siRNA target sequence for M17S2 (NM_005899.2,723-741).
catattgcttgcaacaact

SEQ ID NO: 334452 - DNA, 19 bp, Homo sapiens
  siRNA target sequence for M17S2 (NM_005899.2,740-758).
ctgccaaagaaggattgtt

SEQ ID NO: 334453 - DNA, 19 bp, Homo sapiens
  siRNA target sequence for M17S2 (NM_005899.2,779-797).
cctatgcccatcctacaat

SEQ ID NO: 334454 - DNA, 19 bp, Homo sapiens
  siRNA target sequence for M17S2 (NM_005899.2,780-798).
ctatgcccatcctacaata

SEQ ID NO: 334455 - DNA, 19 bp, Homo sapiens
  siRNA target sequence for M17S2 (NM_005899.2,888-906).
ccgttctgtcactcaaagt

SEQ ID NO: 334456 - DNA, 19 bp, Homo sapiens
  siRNA target sequence for M17S2 (NM_005899.2,889-907).
cgttctgtcactcaaagta

SEQ ID NO: 334457 - DNA, 19 bp, Homo sapiens
  siRNA target sequence for M17S2 (NM_005899.2,995-1013).
gttgcgagctgagaagaaa

SEQ ID NO: 334458 - DNA, 19 bp, Homo sapiens
  siRNA target sequence for M17S2 (NM_005899.2,1073-1091).
cctgtggaattcaatccat

SEQ ID NO: 334459 - DNA, 19 bp, Homo sapiens
  siRNA target sequence for M17S2 (NM_005899.2,1100-1118).
gagccccaagtctccttta

SEQ ID NO: 334460 - DNA, 19 bp, Homo sapiens
  siRNA target sequence for M17S2 (NM_005899.2,1249-1267).
gaaccaagtttatcaaaca

SEQ ID NO: 334461 - DNA, 19 bp, Homo sapiens
  siRNA target sequence for M17S2 (NM_005899.2,1306-1324).
cagacacaaagctcaagtt

SEQ ID NO: 334462 - DNA, 19 bp, Homo sapiens
  siRNA target sequence for M17S2 (NM_005899.2,1392-1410).
ggccatgtgggagttgtat

SEQ ID NO: 334463 - DNA, 19 bp, Homo sapiens
  siRNA target sequence for M17S2 (NM_005899.2,1433-1451).
cttggagggaacgtatact

SEQ ID NO: 334464 - DNA, 19 bp, Homo sapiens
  siRNA target sequence for M17S2 (NM_005899.2,1468-1486).
ctcacaaaggccagcaatt

SEQ ID NO: 334465 - DNA, 19 bp, Homo sapiens
  siRNA target sequence for M17S2 (NM_005899.2,1494-1512).
cgggtctggtgcagtatca

SEQ ID NO: 334466 - DNA, 19 bp, Homo sapiens
  siRNA target sequence for M17S2 (NM_005899.2,1495-1513).
gggtctggtgcagtatcat

SEQ ID NO: 334467 - DNA, 19 bp, Homo sapiens
  siRNA target sequence for M17S2 (NM_005899.2,1496-1514).
ggtctggtgcagtatcata

SEQ ID NO: 334468 - DNA, 19 bp, Homo sapiens
  siRNA target sequence for M17S2 (NM_005899.2,1499-1517).
ctggtgcagtatcatagta

SEQ ID NO: 334469 - DNA, 19 bp, Homo sapiens
  siRNA target sequence for M17S2 (NM_005899.2,1501-1519).
ggtgcagtatcatagtaga

SEQ ID NO: 334470 - DNA, 19 bp, Homo sapiens
  siRNA target sequence for M17S2 (NM_005899.2,1502-1520).
gtgcagtatcatagtagat

SEQ ID NO: 334471 - DNA, 19 bp, Homo sapiens
  siRNA target sequence for M17S2 (NM_005899.2,1531-1549).
ccgaagagagccctgataa

SEQ ID NO: 334472 - DNA, 19 bp, Homo sapiens
  siRNA target sequence for M17S2 (NM_005899.2,1533-1551).
gaagagagccctgataaca

SEQ ID NO: 334473 - DNA, 19 bp, Homo sapiens
  siRNA target sequence for M17S2 (NM_005899.2,1538-1556).
gagccctgataacattgaa

SEQ ID NO: 334474 - DNA, 19 bp, Homo sapiens
  siRNA target sequence for M17S2 (NM_005899.2,1540-1558).
gccctgataacattgaaaa

SEQ ID NO: 334475 - DNA, 19 bp, Homo sapiens
  siRNA target sequence for M17S2 (NM_005899.2,1562-1580).
catgatcagctcaagcaaa

SEQ ID NO: 334476 - DNA, 19 bp, Homo sapiens
  siRNA target sequence for M17S2 (NM_005899.2,1685-1703).
cccacagaaggcaaaaaat

SEQ ID NO: 334477 - DNA, 19 bp, Homo sapiens
  siRNA target sequence for M17S2 (NM_005899.2,1773-1791).
gagctgttggatataaaca

SEQ ID NO: 334478 - DNA, 19 bp, Homo sapiens
  siRNA target sequence for M17S2 (NM_005899.2,1859-1877).
gccacatgacagtccttta

SEQ ID NO: 334479 - DNA, 19 bp, Homo sapiens
  siRNA target sequence for M17S2 (NM_005899.2,1861-1879).
cacatgacagtcctttaat

SEQ ID NO: 334480 - DNA, 19 bp, Homo sapiens
  siRNA target sequence for M17S2 (NM_005899.2,1944-1962).
gattctatggtgtcagtaa

SEQ ID NO: 334481 - DNA, 19 bp, Homo sapiens
  siRNA target sequence for M17S2 (NM_005899.2,2130-2148).
ggaccacttggaaatgaga

SEQ ID NO: 334482 - DNA, 19 bp, Homo sapiens
  siRNA target sequence for M17S2 (NM_005899.2,2263-2281).
cttcctcagaggattacat

SEQ ID NO: 334483 - DNA, 19 bp, Homo sapiens
  siRNA target sequence for M17S2 (NM_005899.2,2289-2307).
ctgcctgagtgctttgata

SEQ ID NO: 334484 - DNA, 19 bp, Homo sapiens
  siRNA target sequence for M17S2 (NM_005899.2,2316-2334).
cccctgggggattctatgt

SEQ ID NO: 334485 - DNA, 19 bp, Homo sapiens
  siRNA target sequence for M17S2 (NM_005899.2,2317-2335).
ccctgggggattctatgta

SEQ ID NO: 334486 - DNA, 19 bp, Homo sapiens
  siRNA target sequence for M17S2 (NM_005899.2,2319-2337).
ctgggggattctatgtaca

SEQ ID NO: 334487 - DNA, 19 bp, Homo sapiens
  siRNA target sequence for M17S2 (NM_005899.2,2549-2567).
caggagctctccttgtgta

SEQ ID NO: 334488 - DNA, 19 bp, Homo sapiens
  siRNA target sequence for M17S2 (NM_005899.2,2552-2570).
gagctctccttgtgtacat

SEQ ID NO: 334489 - DNA, 19 bp, Homo sapiens
  siRNA target sequence for M17S2 (NM_005899.2,2554-2572).
gctctccttgtgtacatca

SEQ ID NO: 334490 - DNA, 19 bp, Homo sapiens
  siRNA target sequence for M17S2 (NM_005899.2,2555-2573).
ctctccttgtgtacatcat

SEQ ID NO: 334491 - DNA, 19 bp, Homo sapiens
  siRNA target sequence for M17S2 (NM_005899.2,2655-2673).
ggctcatcaggacttgtaa

SEQ ID NO: 334492 - DNA, 19 bp, Homo sapiens
  siRNA target sequence for M17S2 (NM_005899.2,2924-2942).
gcaggttgtgacagaactt

SEQ ID NO: 334493 - DNA, 19 bp, Homo sapiens
  siRNA target sequence for M17S2 (NM_005899.2,2933-2951).
gacagaacttcttcagtta

SEQ ID NO: 334494 - DNA, 19 bp, Homo sapiens
  siRNA target sequence for MAN1A1 (NM_005907.2,581-599).
gtattcagcgccttcatca

SEQ ID NO: 334495 - DNA, 19 bp, Homo sapiens
  siRNA target sequence for MAN1A1 (NM_005907.2,807-825).
ccaggatccgcgaaaacca

SEQ ID NO: 334496 - DNA, 19 bp, Homo sapiens
  siRNA target sequence for MAN1A1 (NM_005907.2,870-888).
ccgaggagatccaaagaga

SEQ ID NO: 334497 - DNA, 19 bp, Homo sapiens
  siRNA target sequence for MAN1A1 (NM_005907.2,1076-1094).
ggttatgcctggggattaa

SEQ ID NO: 334498 - DNA, 19 bp, Homo sapiens
  siRNA target sequence for MAN1A1 (NM_005907.2,1077-1095).
gttatgcctggggattaaa

SEQ ID NO: 334499 - DNA, 19 bp, Homo sapiens
  siRNA target sequence for MAN1A1 (NM_005907.2,1097-1115).
gaactcaaacctatatcaa

SEQ ID NO: 334500 - DNA, 19 bp, Homo sapiens
  siRNA target sequence for MAN1A1 (NM_005907.2,1121-1139).
ggccattcaagcagtttgt

SEQ ID NO: 334501 - DNA, 19 bp, Homo sapiens
  siRNA target sequence for MAN1A1 (NM_005907.2,1122-1140).
gccattcaagcagtttgtt

SEQ ID NO: 334502 - DNA, 19 bp, Homo sapiens
  siRNA target sequence for MAN1A1 (NM_005907.2,1123-1141).
ccattcaagcagtttgttt

SEQ ID NO: 334503 - DNA, 19 bp, Homo sapiens
  siRNA target sequence for MAN1A1 (NM_005907.2,1131-1149).
gcagtttgtttggtaacat

SEQ ID NO: 334504 - DNA, 19 bp, Homo sapiens
  siRNA target sequence for MAN1A1 (NM_005907.2,1227-1245).
catgggttgaagaaaattt

SEQ ID NO: 334505 - DNA, 19 bp, Homo sapiens
  siRNA target sequence for MAN1A1 (NM_005907.2,1230-1248).
gggttgaagaaaatttaga

SEQ ID NO: 334506 - DNA, 19 bp, Homo sapiens
  siRNA target sequence for MAN1A1 (NM_005907.2,1331-1349).
ggagaagagatttttcgaa

SEQ ID NO: 334507 - DNA, 19 bp, Homo sapiens
  siRNA target sequence for MAN1A1 (NM_005907.2,1414-1432).
ggcattgctgaatatgaaa

SEQ ID NO: 334508 - DNA, 19 bp, Homo sapiens
  siRNA target sequence for MAN1A1 (NM_005907.2,1415-1433).
gcattgctgaatatgaaaa

SEQ ID NO: 334509 - DNA, 19 bp, Homo sapiens
  siRNA target sequence for MAN1A1 (NM_005907.2,1516-1534).
gcacttgagccacttatca

SEQ ID NO: 334510 - DNA, 19 bp, Homo sapiens
  siRNA target sequence for MAN1A1 (NM_005907.2,1605-1623).
gcctttatcctaactatct

SEQ ID NO: 334511 - DNA, 19 bp, Homo sapiens
  siRNA target sequence for MAN1A1 (NM_005907.2,1638-1656).
gacagtggggtcaacatca

SEQ ID NO: 334512 - DNA, 19 bp, Homo sapiens
  siRNA target sequence for MAN1A1 (NM_005907.2,1677-1695).
gagacagcttctatgagta

SEQ ID NO: 334513 - DNA, 19 bp, Homo sapiens
  siRNA target sequence for MAN1A1 (NM_005907.2,1702-1720).
gaaggcctggttaatgtct

SEQ ID NO: 334514 - DNA, 19 bp, Homo sapiens
  siRNA target sequence for MAN1A1 (NM_005907.2,1736-1754).
gaagctaagaagatgtatt

SEQ ID NO: 334515 - DNA, 19 bp, Homo sapiens
  siRNA target sequence for MAN1A1 (NM_005907.2,1766-1784).
caggctatcgagactcatt

SEQ ID NO: 334516 - DNA, 19 bp, Homo sapiens
  siRNA target sequence for MAN1A1 (NM_005907.2,1769-1787).
gctatcgagactcatttga

SEQ ID NO: 334517 - DNA, 19 bp, Homo sapiens
  siRNA target sequence for MAN1A1 (NM_005907.2,1770-1788).
ctatcgagactcatttgat

SEQ ID NO: 334518 - DNA, 19 bp, Homo sapiens
  siRNA target sequence for MAN1A1 (NM_005907.2,1781-1799).
catttgatccgcaagtcta

SEQ ID NO: 334519 - DNA, 19 bp, Homo sapiens
  siRNA target sequence for MAN1A1 (NM_005907.2,1795-1813).
gtctagcagcggactaact

SEQ ID NO: 334520 - DNA, 19 bp, Homo sapiens
  siRNA target sequence for MAN1A1 (NM_005907.2,1797-1815).
ctagcagcggactaactta

SEQ ID NO: 334521 - DNA, 19 bp, Homo sapiens
  siRNA target sequence for MAN1A1 (NM_005907.2,1974-1992).
catataatcgaacatttat

SEQ ID NO: 334522 - DNA, 19 bp, Homo sapiens
  siRNA target sequence for MAN1A1 (NM_005907.2,2038-2056).
catcgctacaagacaaaat

SEQ ID NO: 334523 - DNA, 19 bp, Homo sapiens
  siRNA target sequence for MAN1A1 (NM_005907.2,2041-2059).
cgctacaagacaaaatgaa

SEQ ID NO: 334524 - DNA, 19 bp, Homo sapiens
  siRNA target sequence for MAN1A1 (NM_005907.2,2068-2086).
catcttacggccagaagtt

SEQ ID NO: 334525 - DNA, 19 bp, Homo sapiens
  siRNA target sequence for MAN1A1 (NM_005907.2,2079-2097).
cagaagttatggagactta

SEQ ID NO: 334526 - DNA, 19 bp, Homo sapiens
  siRNA target sequence for MAN1A1 (NM_005907.2,2090-2108).
gagacttacatgtatatgt

SEQ ID NO: 334527 - DNA, 19 bp, Homo sapiens
  siRNA target sequence for MAN1A1 (NM_005907.2,2318-2336).
ctggagcattggatcttca

SEQ ID NO: 334528 - DNA, 19 bp, Homo sapiens
  siRNA target sequence for MAN1A1 (NM_005907.2,2320-2338).
ggagcattggatcttcaat

SEQ ID NO: 334529 - DNA, 19 bp, Homo sapiens
  siRNA target sequence for MAN1A1 (NM_005907.2,2321-2339).
gagcattggatcttcaata

SEQ ID NO: 334530 - DNA, 19 bp, Homo sapiens
  siRNA target sequence for MAN1A1 (NM_005907.2,2335-2353).
caatagcgaggcacatctt

SEQ ID NO: 334531 - DNA, 19 bp, Homo sapiens
  siRNA target sequence for MEF2D (NM_005920.2,512-530).
gcgagatcgcactcatcat

SEQ ID NO: 334532 - DNA, 19 bp, Homo sapiens
  siRNA target sequence for MEF2D (NM_005920.2,1195-1213).
gacctgcgagtcatcactt

SEQ ID NO: 334533 - DNA, 19 bp, Homo sapiens
  siRNA target sequence for MEF2D (NM_005920.2,1247-1265).
ctgaggaccatttagatct

SEQ ID NO: 334534 - DNA, 19 bp, Homo sapiens
  siRNA target sequence for MEF2D (NM_005920.2,1333-1351).
gcaacgccgagtttactca

SEQ ID NO: 334535 - DNA, 19 bp, Homo sapiens
  siRNA target sequence for MEF2D (NM_005920.2,1385-1403).
cctacaacacagattacca

SEQ ID NO: 334536 - DNA, 19 bp, Homo sapiens
  siRNA target sequence for MEF2D (NM_005920.2,1456-1474).
ctgtcgctaggcaatgtca

SEQ ID NO: 334537 - DNA, 19 bp, Homo sapiens
  siRNA target sequence for MEF2D (NM_005920.2,1932-1950).
gcttgatacctggacatta

SEQ ID NO: 334538 - DNA, 19 bp, Homo sapiens
  siRNA target sequence for MOCS1 (NM_005942.1,157-175).
cgcacagatgtcagagtaa

SEQ ID NO: 334539 - DNA, 19 bp, Homo sapiens
  siRNA target sequence for MOCS1 (NM_005942.1,570-588).
ggaagggctgagaaccata

SEQ ID NO: 334540 - DNA, 19 bp, Homo sapiens
  siRNA target sequence for MOCS1 (NM_005942.1,678-696).
cctggtgcctgccaagttt

SEQ ID NO: 334541 - DNA, 19 bp, Homo sapiens
  siRNA target sequence for MOCS1 (NM_005942.1,1033-1051).
cagatcagcttcatcacat

SEQ ID NO: 334542 - DNA, 19 bp, Homo sapiens
  siRNA target sequence for MOCS1 (NM_005942.1,1318-1336).
gccaatccaagcattttct

SEQ ID NO: 334543 - DNA, 19 bp, Homo sapiens
  siRNA target sequence for MOCS1 (NM_005942.1,1350-1368).
ccatgttcagggtctaaga

SEQ ID NO: 334544 - DNA, 19 bp, Homo sapiens
  siRNA target sequence for MOCS1 (NM_005942.1,1360-1378).
ggtctaagacccagaatga

SEQ ID NO: 334545 - DNA, 19 bp, Homo sapiens
  siRNA target sequence for MOCS1 (NM_005942.1,1363-1381).
ctaagacccagaatgagtt

SEQ ID NO: 334546 - DNA, 19 bp, Homo sapiens
  siRNA target sequence for MOCS1 (NM_005942.1,1386-1404).
cagccaggtggccacttta

SEQ ID NO: 334547 - DNA, 19 bp, Homo sapiens
  siRNA target sequence for MOCS1 (NM_005942.1,1396-1414).
gccactttatggaaaggat

SEQ ID NO: 334548 - DNA, 19 bp, Homo sapiens
  siRNA target sequence for MOCS1 (NM_005942.1,1456-1474).
gggtctggctcctttcaga

SEQ ID NO: 334549 - DNA, 19 bp, Homo sapiens
  siRNA target sequence for MOCS1 (NM_005942.1,1568-1586).
cctcagaacaactaactca

SEQ ID NO: 334550 - DNA, 19 bp, Homo sapiens
  siRNA target sequence for MOCS1 (NM_005942.1,1569-1587).
ctcagaacaactaactcat

SEQ ID NO: 334551 - DNA, 19 bp, Homo sapiens
  siRNA target sequence for MOCS1 (NM_005942.1,1604-1622).
gggcagctatggtagatgt

SEQ ID NO: 334552 - DNA, 19 bp, Homo sapiens
  siRNA target sequence for MOCS1 (NM_005942.1,1847-1865).
cacgccatgccgtgaagat

SEQ ID NO: 334553 - DNA, 19 bp, Homo sapiens
  siRNA target sequence for MOCS1 (NM_005942.1,1936-1954).
gccctcaccctgtatgaca

SEQ ID NO: 334554 - DNA, 19 bp, Homo sapiens
  siRNA target sequence for MTHFR (NM_005957.2,121-139).
gagagctccaaagatagtt

SEQ ID NO: 334555 - DNA, 19 bp, Homo sapiens
  siRNA target sequence for MTHFR (NM_005957.2,273-291).
caatctcatctcaaggttt

SEQ ID NO: 334556 - DNA, 19 bp, Homo sapiens
  siRNA target sequence for MTHFR (NM_005957.2,389-407).
ccagcaccgccgtgaacta

SEQ ID NO: 334557 - DNA, 19 bp, Homo sapiens
  siRNA target sequence for MTHFR (NM_005957.2,519-537).
gcggggagacccaataggt

SEQ ID NO: 334558 - DNA, 19 bp, Homo sapiens
  siRNA target sequence for MTHFR (NM_005957.2,1119-1137).
gcgccgagaggaagatgta

SEQ ID NO: 334559 - DNA, 19 bp, Homo sapiens
  siRNA target sequence for MTHFR (NM_005957.2,1132-1150).
gatgtacgtcccatcttct

SEQ ID NO: 334560 - DNA, 19 bp, Homo sapiens
  siRNA target sequence for MTHFR (NM_005957.2,1160-1178).
gaccaaagagttacatcta

SEQ ID NO: 334561 - DNA, 19 bp, Homo sapiens
  siRNA target sequence for MTHFR (NM_005957.2,1384-1402).
cggaatggtcacaaagtga

SEQ ID NO: 334562 - DNA, 19 bp, Homo sapiens
  siRNA target sequence for MTHFR (NM_005957.2,1483-1501).
ggcatcctcaccatcaact

SEQ ID NO: 334563 - DNA, 19 bp, Homo sapiens
  siRNA target sequence for MTHFR (NM_005957.2,1576-1594).
cagaaggcctacttagagt

SEQ ID NO: 334564 - DNA, 19 bp, Homo sapiens
  siRNA target sequence for MTHFR (NM_005957.2,1578-1596).
gaaggcctacttagagttt

SEQ ID NO: 334565 - DNA, 19 bp, Homo sapiens
  siRNA target sequence for MTHFR (NM_005957.2,1644-1662).
gtacgagctccgggttaat

SEQ ID NO: 334566 - DNA, 19 bp, Homo sapiens
  siRNA target sequence for MTHFR (NM_005957.2,1678-1696).
gtgaagggtgaaaacatca

SEQ ID NO: 334567 - DNA, 19 bp, Homo sapiens
  siRNA target sequence for MTHFR (NM_005957.2,1777-1795).
gatcccgtcagcttcatgt

SEQ ID NO: 334568 - DNA, 19 bp, Homo sapiens
  siRNA target sequence for PPYR1 (NM_005972.2,153-171).
ccctgggcaccccatacaa

SEQ ID NO: 334569 - DNA, 19 bp, Homo sapiens
  siRNA target sequence for PPYR1 (NM_005972.2,155-173).
ctgggcaccccatacaact

SEQ ID NO: 334570 - DNA, 19 bp, Homo sapiens
  siRNA target sequence for PPYR1 (NM_005972.2,1141-1159).
gcccctgtccacagtacat

SEQ ID NO: 334571 - DNA, 19 bp, Homo sapiens
  siRNA target sequence for PPYR1 (NM_005972.2,1142-1160).
cccctgtccacagtacata

SEQ ID NO: 334572 - DNA, 19 bp, Homo sapiens
  siRNA target sequence for ARMET (NM_006010.1,370-388).
ggcgactgcgaagtttgta

SEQ ID NO: 334573 - DNA, 19 bp, Homo sapiens
  siRNA target sequence for ARMET (NM_006010.1,371-389).
gcgactgcgaagtttgtat

SEQ ID NO: 334574 - DNA, 19 bp, Homo sapiens
  siRNA target sequence for ARMET (NM_006010.1,372-390).
cgactgcgaagtttgtatt

SEQ ID NO: 334575 - DNA, 19 bp, Homo sapiens
  siRNA target sequence for ARMET (NM_006010.1,373-391).
gactgcgaagtttgtattt

SEQ ID NO: 334576 - DNA, 19 bp, Homo sapiens
  siRNA target sequence for ARMET (NM_006010.1,378-396).
cgaagtttgtatttcttat

SEQ ID NO: 334577 - DNA, 19 bp, Homo sapiens
  siRNA target sequence for ARMET (NM_006010.1,441-459).
ctcaccagccactattgaa

SEQ ID NO: 334578 - DNA, 19 bp, Homo sapiens
  siRNA target sequence for ARMET (NM_006010.1,443-461).
caccagccactattgaaaa

SEQ ID NO: 334579 - DNA, 19 bp, Homo sapiens
  siRNA target sequence for ARMET (NM_006010.1,452-470).
ctattgaaaacgaacttat

SEQ ID NO: 334580 - DNA, 19 bp, Homo sapiens
  siRNA target sequence for ARMET (NM_006010.1,501-519).
gaatcggttgtgctactat

SEQ ID NO: 334581 - DNA, 19 bp, Homo sapiens
  siRNA target sequence for ARMET (NM_006010.1,633-651).
gatatgtgagcttaagtat

SEQ ID NO: 334582 - DNA, 19 bp, Homo sapiens
  siRNA target sequence for ARMET (NM_006010.1,763-781).
gactacatccggaagataa

SEQ ID NO: 334583 - DNA, 19 bp, Homo sapiens
  siRNA target sequence for ARMET (NM_006010.1,765-783).
ctacatccggaagataaat

SEQ ID NO: 334584 - DNA, 19 bp, Homo sapiens
  siRNA target sequence for HTR3B (NM_006028.2,193-211).
ggaattctagccacagata

SEQ ID NO: 334585 - DNA, 19 bp, Homo sapiens
  siRNA target sequence for HTR3B (NM_006028.2,225-243).
ggattctgctctgtatcat

SEQ ID NO: 334586 - DNA, 19 bp, Homo sapiens
  siRNA target sequence for HTR3B (NM_006028.2,248-266).
gcaagcagctattacagaa

SEQ ID NO: 334587 - DNA, 19 bp, Homo sapiens
  siRNA target sequence for HTR3B (NM_006028.2,327-345).
cctgttcgtccatgctata

SEQ ID NO: 334588 - DNA, 19 bp, Homo sapiens
  siRNA target sequence for HTR3B (NM_006028.2,328-346).
ctgttcgtccatgctatat

SEQ ID NO: 334589 - DNA, 19 bp, Homo sapiens
  siRNA target sequence for HTR3B (NM_006028.2,393-411).
ccaagaggtctggaatgat

SEQ ID NO: 334590 - DNA, 19 bp, Homo sapiens
  siRNA target sequence for HTR3B (NM_006028.2,423-441).
ctggaactccagcatgttt

SEQ ID NO: 334591 - DNA, 19 bp, Homo sapiens
  siRNA target sequence for HTR3B (NM_006028.2,435-453).
catgtttgatgagattaga

SEQ ID NO: 334592 - DNA, 19 bp, Homo sapiens
  siRNA target sequence for HTR3B (NM_006028.2,529-547).
cctgaccttccctatgttt

SEQ ID NO: 334593 - DNA, 19 bp, Homo sapiens
  siRNA target sequence for HTR3B (NM_006028.2,530-548).
ctgaccttccctatgttta

SEQ ID NO: 334594 - DNA, 19 bp, Homo sapiens
  siRNA target sequence for HTR3B (NM_006028.2,560-578).
ctgggaccattgagaacta

SEQ ID NO: 334595 - DNA, 19 bp, Homo sapiens
  siRNA target sequence for HTR3B (NM_006028.2,562-580).
gggaccattgagaactata

SEQ ID NO: 334596 - DNA, 19 bp, Homo sapiens
  siRNA target sequence for HTR3B (NM_006028.2,563-581).
ggaccattgagaactataa

SEQ ID NO: 334597 - DNA, 19 bp, Homo sapiens
  siRNA target sequence for HTR3B (NM_006028.2,594-612).
ggtctctgcgtgcagttta

SEQ ID NO: 334598 - DNA, 19 bp, Homo sapiens
  siRNA target sequence for HTR3B (NM_006028.2,602-620).
cgtgcagtttagagacata

SEQ ID NO: 334599 - DNA, 19 bp, Homo sapiens
  siRNA target sequence for HTR3B (NM_006028.2,603-621).
gtgcagtttagagacatat

SEQ ID NO: 334600 - DNA, 19 bp, Homo sapiens
  siRNA target sequence for HTR3B (NM_006028.2,613-631).
gagacatatgcttttccat

SEQ ID NO: 334601 - DNA, 19 bp, Homo sapiens
  siRNA target sequence for HTR3B (NM_006028.2,615-633).
gacatatgcttttccattt

SEQ ID NO: 334602 - DNA, 19 bp, Homo sapiens
  siRNA target sequence for HTR3B (NM_006028.2,814-832).
ggatttgcacagattcagt

SEQ ID NO: 334603 - DNA, 19 bp, Homo sapiens
  siRNA target sequence for HTR3B (NM_006028.2,871-889).
gtgagtctgctgattccta

SEQ ID NO: 334604 - DNA, 19 bp, Homo sapiens
  siRNA target sequence for HTR3B (NM_006028.2,944-962).
gagccaggattgtgttcaa

SEQ ID NO: 334605 - DNA, 19 bp, Homo sapiens
  siRNA target sequence for HTR3B (NM_006028.2,986-1004).
ccgtcttcagggtcaacat

SEQ ID NO: 334606 - DNA, 19 bp, Homo sapiens
  siRNA target sequence for HTR3B (NM_006028.2,1040-1058).
ctctgattgggcacttctt

SEQ ID NO: 334607 - DNA, 19 bp, Homo sapiens
  siRNA target sequence for HTR3B (NM_006028.2,1100-1118).
ccatcgtgttggtcaaatt

SEQ ID NO: 334608 - DNA, 19 bp, Homo sapiens
  siRNA target sequence for HTR3B (NM_006028.2,1282-1300).
gtctggtcgcagcttcaat

SEQ ID NO: 334609 - DNA, 19 bp, Homo sapiens
  siRNA target sequence for HTR3B (NM_006028.2,1284-1302).
ctggtcgcagcttcaatct

SEQ ID NO: 334610 - DNA, 19 bp, Homo sapiens
  siRNA target sequence for HTR3B (NM_006028.2,1286-1304).
ggtcgcagcttcaatctat

SEQ ID NO: 334611 - DNA, 19 bp, Homo sapiens
  siRNA target sequence for HTR3B (NM_006028.2,1307-1325).
gcaactacctccaaactca

SEQ ID NO: 334612 - DNA, 19 bp, Homo sapiens
  siRNA target sequence for HTR3B (NM_006028.2,1378-1396).
gaccgactgctcttccaaa

SEQ ID NO: 334613 - DNA, 19 bp, Homo sapiens
  siRNA target sequence for HTR3B (NM_006028.2,1387-1405).
ctcttccaaagctaccttt

SEQ ID NO: 334614 - DNA, 19 bp, Homo sapiens
  siRNA target sequence for RBM12 (NM_006047.4,460-478).
gggtcaaaagtaacactat

SEQ ID NO: 334615 - DNA, 19 bp, Homo sapiens
  siRNA target sequence for RBM12 (NM_006047.4,461-479).
ggtcaaaagtaacactatt

SEQ ID NO: 334616 - DNA, 19 bp, Homo sapiens
  siRNA target sequence for RBM12 (NM_006047.4,464-482).
caaaagtaacactattgtt

SEQ ID NO: 334617 - DNA, 19 bp, Homo sapiens
  siRNA target sequence for RBM12 (NM_006047.4,473-491).
cactattgttgagtagtaa

SEQ ID NO: 334618 - DNA, 19 bp, Homo sapiens
  siRNA target sequence for RBM12 (NM_006047.4,475-493).
ctattgttgagtagtaaga

SEQ ID NO: 334619 - DNA, 19 bp, Homo sapiens
  siRNA target sequence for RBM12 (NM_006047.4,485-503).
gtagtaagacggaaatgca

SEQ ID NO: 334620 - DNA, 19 bp, Homo sapiens
  siRNA target sequence for RBM12 (NM_006047.4,519-537).
gagtcgtaggcgttttgaa

SEQ ID NO: 334621 - DNA, 19 bp, Homo sapiens
  siRNA target sequence for RBM12 (NM_006047.4,624-642).
cacaacagtatccaacttt

SEQ ID NO: 334622 - DNA, 19 bp, Homo sapiens
  siRNA target sequence for RBM12 (NM_006047.4,629-647).
cagtatccaactttaataa

SEQ ID NO: 334623 - DNA, 19 bp, Homo sapiens
  siRNA target sequence for RBM12 (NM_006047.4,649-667).
ccatcacccagtgtagtta

SEQ ID NO: 334624 - DNA, 19 bp, Homo sapiens
  siRNA target sequence for RBM12 (NM_006047.4,677-695).
cttctgttcatgaaagcaa

SEQ ID NO: 334625 - DNA, 19 bp, Homo sapiens
  siRNA target sequence for RBM12 (NM_006047.4,731-749).
gaacagctcctccaaatat

SEQ ID NO: 334626 - DNA, 19 bp, Homo sapiens
  siRNA target sequence for RBM12 (NM_006047.4,763-781).
gggagcccaacgtttagct

SEQ ID NO: 334627 - DNA, 19 bp, Homo sapiens
  siRNA target sequence for RBM12 (NM_006047.4,1046-1064).
gctctggagcacctatgaa

SEQ ID NO: 334628 - DNA, 19 bp, Homo sapiens
  siRNA target sequence for RBM12 (NM_006047.4,1047-1065).
ctctggagcacctatgaat

SEQ ID NO: 334629 - DNA, 19 bp, Homo sapiens
  siRNA target sequence for RBM12 (NM_006047.4,1051-1069).
ggagcacctatgaatttga

SEQ ID NO: 334630 - DNA, 19 bp, Homo sapiens
  siRNA target sequence for RBM12 (NM_006047.4,1052-1070).
gagcacctatgaatttgaa

SEQ ID NO: 334631 - DNA, 19 bp, Homo sapiens
  siRNA target sequence for RBM12 (NM_006047.4,1054-1072).
gcacctatgaatttgaaca

SEQ ID NO: 334632 - DNA, 19 bp, Homo sapiens
  siRNA target sequence for RBM12 (NM_006047.4,1089-1107).
gtttcttggtccgttgaat

SEQ ID NO: 334633 - DNA, 19 bp, Homo sapiens
  siRNA target sequence for RBM12 (NM_006047.4,1097-1115).
gtccgttgaatcctgttaa

SEQ ID NO: 334634 - DNA, 19 bp, Homo sapiens
  siRNA target sequence for RBM12 (NM_006047.4,1157-1175).
ccatcaaccctgatgatct

SEQ ID NO: 334635 - DNA, 19 bp, Homo sapiens
  siRNA target sequence for RBM12 (NM_006047.4,1165-1183).
cctgatgatctgtatgtca

SEQ ID NO: 334636 - DNA, 19 bp, Homo sapiens
  siRNA target sequence for RBM12 (NM_006047.4,1249-1267).
gttgatgcagtgcatttgt

SEQ ID NO: 334637 - DNA, 19 bp, Homo sapiens
  siRNA target sequence for RBM12 (NM_006047.4,1256-1274).
cagtgcatttgttgaaaga

SEQ ID NO: 334638 - DNA, 19 bp, Homo sapiens
  siRNA target sequence for RBM12 (NM_006047.4,1273-1291).
gatcatgtaggtcgaaata

SEQ ID NO: 334639 - DNA, 19 bp, Homo sapiens
  siRNA target sequence for RBM12 (NM_006047.4,1285-1303).
cgaaataatgggaatggat

SEQ ID NO: 334640 - DNA, 19 bp, Homo sapiens
  siRNA target sequence for RBM12 (NM_006047.4,1294-1312).
gggaatggattggttaagt

SEQ ID NO: 334641 - DNA, 19 bp, Homo sapiens
  siRNA target sequence for RBM12 (NM_006047.4,1319-1337).
cccctcaagatacatttga

SEQ ID NO: 334642 - DNA, 19 bp, Homo sapiens
  siRNA target sequence for RBM12 (NM_006047.4,1320-1338).
ccctcaagatacatttgaa

SEQ ID NO: 334643 - DNA, 19 bp, Homo sapiens
  siRNA target sequence for RBM12 (NM_006047.4,1417-1435).
gctggaggccatatcactt

SEQ ID NO: 334644 - DNA, 19 bp, Homo sapiens
  siRNA target sequence for RBM12 (NM_006047.4,1418-1436).
ctggaggccatatcacttt

SEQ ID NO: 334645 - DNA, 19 bp, Homo sapiens
  siRNA target sequence for RBM12 (NM_006047.4,1420-1438).
ggaggccatatcactttta

SEQ ID NO: 334646 - DNA, 19 bp, Homo sapiens
  siRNA target sequence for RBM12 (NM_006047.4,1421-1439).
gaggccatatcacttttaa

SEQ ID NO: 334647 - DNA, 19 bp, Homo sapiens
  siRNA target sequence for RBM12 (NM_006047.4,1424-1442).
gccatatcacttttaagca

SEQ ID NO: 334648 - DNA, 19 bp, Homo sapiens
  siRNA target sequence for RBM12 (NM_006047.4,1425-1443).
ccatatcacttttaagcaa

SEQ ID NO: 334649 - DNA, 19 bp, Homo sapiens
  siRNA target sequence for RBM12 (NM_006047.4,1563-1581).
cttgaaagggctaccattt

SEQ ID NO: 334650 - DNA, 19 bp, Homo sapiens
  siRNA target sequence for RBM12 (NM_006047.4,1657-1675).
ggacccaatgggaaagcaa

SEQ ID NO: 334651 - DNA, 19 bp, Homo sapiens
  siRNA target sequence for RBM12 (NM_006047.4,1676-1694).
ctggcgaaggctttgtaga

SEQ ID NO: 334652 - DNA, 19 bp, Homo sapiens
  siRNA target sequence for RBM12 (NM_006047.4,1679-1697).
gcgaaggctttgtagagtt

SEQ ID NO: 334653 - DNA, 19 bp, Homo sapiens
  siRNA target sequence for RBM12 (NM_006047.4,1685-1703).
gctttgtagagttcagaaa

SEQ ID NO: 334654 - DNA, 19 bp, Homo sapiens
  siRNA target sequence for RBM12 (NM_006047.4,1721-1739).
ctgctctgtgtcgtcataa

SEQ ID NO: 334655 - DNA, 19 bp, Homo sapiens
  siRNA target sequence for RBM12 (NM_006047.4,1746-1764).
catgggcaatcgctttatt

SEQ ID NO: 334656 - DNA, 19 bp, Homo sapiens
  siRNA target sequence for RBM12 (NM_006047.4,1749-1767).
gggcaatcgctttattcaa

SEQ ID NO: 334657 - DNA, 19 bp, Homo sapiens
  siRNA target sequence for RBM12 (NM_006047.4,1765-1783).
caagttcatccaattacta

SEQ ID NO: 334658 - DNA, 19 bp, Homo sapiens
  siRNA target sequence for RBM12 (NM_006047.4,1795-1813).
ctagaaaagatagatatga

SEQ ID NO: 334659 - DNA, 19 bp, Homo sapiens
  siRNA target sequence for RBM12 (NM_006047.4,1803-1821).
gatagatatgattcgaaaa

SEQ ID NO: 334660 - DNA, 19 bp, Homo sapiens
  siRNA target sequence for RBM12 (NM_006047.4,1845-1863).
ccagagggaaatgatacta

SEQ ID NO: 334661 - DNA, 19 bp, Homo sapiens
  siRNA target sequence for RBM12 (NM_006047.4,1846-1864).
cagagggaaatgatactaa

SEQ ID NO: 334662 - DNA, 19 bp, Homo sapiens
  siRNA target sequence for RBM12 (NM_006047.4,1898-1916).
gtgcccacataacaaatat

SEQ ID NO: 334663 - DNA, 19 bp, Homo sapiens
  siRNA target sequence for RBM12 (NM_006047.4,1931-1949).
caaagatggatgttcttca

SEQ ID NO: 334664 - DNA, 19 bp, Homo sapiens
  siRNA target sequence for RBM12 (NM_006047.4,2068-2086).
gaacgcttacaccgtaaaa

SEQ ID NO: 334665 - DNA, 19 bp, Homo sapiens
  siRNA target sequence for RBM12 (NM_006047.4,2072-2090).
gcttacaccgtaaaaaact

SEQ ID NO: 334666 - DNA, 19 bp, Homo sapiens
  siRNA target sequence for RBM12 (NM_006047.4,2073-2091).
cttacaccgtaaaaaactt

SEQ ID NO: 334667 - DNA, 19 bp, Homo sapiens
  siRNA target sequence for RBM12 (NM_006047.4,2119-2137).
gttaccctagaagatatga

SEQ ID NO: 334668 - DNA, 19 bp, Homo sapiens
  siRNA target sequence for RBM12 (NM_006047.4,2164-2182).
caaggaaaaaagggattaa

SEQ ID NO: 334669 - DNA, 19 bp, Homo sapiens
  siRNA target sequence for RBM12 (NM_006047.4,2184-2202).
gatgcctgtgccaggtaat

SEQ ID NO: 334670 - DNA, 19 bp, Homo sapiens
  siRNA target sequence for RBM12 (NM_006047.4,2293-2311).
ctgcctggttcagcaataa

SEQ ID NO: 334671 - DNA, 19 bp, Homo sapiens
  siRNA target sequence for RBM12 (NM_006047.4,2340-2358).
gcccagtgcaggaatacct

SEQ ID NO: 334672 - DNA, 19 bp, Homo sapiens
  siRNA target sequence for RBM12 (NM_006047.4,2341-2359).
cccagtgcaggaataccta

SEQ ID NO: 334673 - DNA, 19 bp, Homo sapiens
  siRNA target sequence for RBM12 (NM_006047.4,2396-2414).
gatcaaaggaagccaataa

SEQ ID NO: 334674 - DNA, 19 bp, Homo sapiens
  siRNA target sequence for RBM12 (NM_006047.4,2438-2456).
gtaattttggtggatcaaa

SEQ ID NO: 334675 - DNA, 19 bp, Homo sapiens
  siRNA target sequence for RBM12 (NM_006047.4,2517-2535).
gcctggtatgccttcagtt

SEQ ID NO: 334676 - DNA, 19 bp, Homo sapiens
  siRNA target sequence for RBM12 (NM_006047.4,2581-2599).
ggaggtggaccaaacaatt

SEQ ID NO: 334677 - DNA, 19 bp, Homo sapiens
  siRNA target sequence for RBM12 (NM_006047.4,2582-2600).
gaggtggaccaaacaattt

SEQ ID NO: 334678 - DNA, 19 bp, Homo sapiens
  siRNA target sequence for RBM12 (NM_006047.4,2765-2783).
gccctggcccaatccatat

SEQ ID NO: 334679 - DNA, 19 bp, Homo sapiens
  siRNA target sequence for RBM12 (NM_006047.4,2766-2784).
ccctggcccaatccatatt

SEQ ID NO: 334680 - DNA, 19 bp, Homo sapiens
  siRNA target sequence for RBM12 (NM_006047.4,2822-2840).
caggaccgacagtaattaa

SEQ ID NO: 334681 - DNA, 19 bp, Homo sapiens
  siRNA target sequence for RBM12 (NM_006047.4,2844-2862).
gcaaaacatgccctttact

SEQ ID NO: 334682 - DNA, 19 bp, Homo sapiens
  siRNA target sequence for RBM12 (NM_006047.4,2856-2874).
ctttactgtgtctattgat

SEQ ID NO: 334683 - DNA, 19 bp, Homo sapiens
  siRNA target sequence for RBM12 (NM_006047.4,2889-2907).
cttttatggctatcaagta

SEQ ID NO: 334684 - DNA, 19 bp, Homo sapiens
  siRNA target sequence for RBM12 (NM_006047.4,2910-2928).
cccaggctcagtgtgttta

SEQ ID NO: 334685 - DNA, 19 bp, Homo sapiens
  siRNA target sequence for RBM12 (NM_006047.4,3023-3041).
ggcctataggttcaagaaa

SEQ ID NO: 334686 - DNA, 19 bp, Homo sapiens
  siRNA target sequence for RBM12 (NM_006047.4,3024-3042).
gcctataggttcaagaaaa

SEQ ID NO: 334687 - DNA, 19 bp, Homo sapiens
  siRNA target sequence for RBM12 (NM_006047.4,3026-3044).
ctataggttcaagaaaagt

SEQ ID NO: 334688 - DNA, 19 bp, Homo sapiens
  siRNA target sequence for UBE4B (NM_006048.2,695-713).
gctgagcgctgatgagatt

SEQ ID NO: 334689 - DNA, 19 bp, Homo sapiens
  siRNA target sequence for UBE4B (NM_006048.2,847-865).
gtctcaatgtccacaacat

SEQ ID NO: 334690 - DNA, 19 bp, Homo sapiens
  siRNA target sequence for UBE4B (NM_006048.2,941-959).
cagcagctcgccctctaat

SEQ ID NO: 334691 - DNA, 19 bp, Homo sapiens
  siRNA target sequence for UBE4B (NM_006048.2,990-1008).
cgttcccagagcatggata

SEQ ID NO: 334692 - DNA, 19 bp, Homo sapiens
  siRNA target sequence for UBE4B (NM_006048.2,994-1012).
cccagagcatggatatcga

SEQ ID NO: 334693 - DNA, 19 bp, Homo sapiens
  siRNA target sequence for UBE4B (NM_006048.2,1105-1123).
ggagcctcagtgataagga

SEQ ID NO: 334694 - DNA, 19 bp, Homo sapiens
  siRNA target sequence for UBE4B (NM_006048.2,1159-1177).
ccttacagctggtctgtaa

SEQ ID NO: 334695 - DNA, 19 bp, Homo sapiens
  siRNA target sequence for UBE4B (NM_006048.2,1164-1182).
cagctggtctgtaagatct

SEQ ID NO: 334696 - DNA, 19 bp, Homo sapiens
  siRNA target sequence for UBE4B (NM_006048.2,1263-1281).
gaagtattctccgatttta

SEQ ID NO: 334697 - DNA, 19 bp, Homo sapiens
  siRNA target sequence for UBE4B (NM_006048.2,1396-1414).
ggtcaccagacagaaatct

SEQ ID NO: 334698 - DNA, 19 bp, Homo sapiens
  siRNA target sequence for UBE4B (NM_006048.2,1440-1458).
ggaacaagccccatgttct

SEQ ID NO: 334699 - DNA, 19 bp, Homo sapiens
  siRNA target sequence for UBE4B (NM_006048.2,1479-1497).
gccagctctttgtctagtt

SEQ ID NO: 334700 - DNA, 19 bp, Homo sapiens
  siRNA target sequence for UBE4B (NM_006048.2,1480-1498).
ccagctctttgtctagttt

SEQ ID NO: 334701 - DNA, 19 bp, Homo sapiens
  siRNA target sequence for UBE4B (NM_006048.2,1504-1522).
cctctggtggagcaagtaa

SEQ ID NO: 334702 - DNA, 19 bp, Homo sapiens
  siRNA target sequence for UBE4B (NM_006048.2,1597-1615).
gtttcgaccgagttggaat

SEQ ID NO: 334703 - DNA, 19 bp, Homo sapiens
  siRNA target sequence for UBE4B (NM_006048.2,1691-1709).
catatcccatactgcttta

SEQ ID NO: 334704 - DNA, 19 bp, Homo sapiens
  siRNA target sequence for UBE4B (NM_006048.2,1696-1714).
cccatactgctttagtact

SEQ ID NO: 334705 - DNA, 19 bp, Homo sapiens
  siRNA target sequence for UBE4B (NM_006048.2,1697-1715).
ccatactgctttagtacta

SEQ ID NO: 334706 - DNA, 19 bp, Homo sapiens
  siRNA target sequence for UBE4B (NM_006048.2,1756-1774).
ccttcctagtgccgtatat

SEQ ID NO: 334707 - DNA, 19 bp, Homo sapiens
  siRNA target sequence for UBE4B (NM_006048.2,1839-1857).
gaagtgttcaagcagatat

SEQ ID NO: 334708 - DNA, 19 bp, Homo sapiens
  siRNA target sequence for UBE4B (NM_006048.2,1842-1860).
gtgttcaagcagatattta

SEQ ID NO: 334709 - DNA, 19 bp, Homo sapiens
  siRNA target sequence for UBE4B (NM_006048.2,1903-1921).
ccctcgacagtgactactt

SEQ ID NO: 334710 - DNA, 19 bp, Homo sapiens
  siRNA target sequence for UBE4B (NM_006048.2,1904-1922).
cctcgacagtgactacttt

SEQ ID NO: 334711 - DNA, 19 bp, Homo sapiens
  siRNA target sequence for UBE4B (NM_006048.2,1907-1925).
cgacagtgactactttaaa

SEQ ID NO: 334712 - DNA, 19 bp, Homo sapiens
  siRNA target sequence for UBE4B (NM_006048.2,1941-1959).
ctaggtgagctctgtgaaa

SEQ ID NO: 334713 - DNA, 19 bp, Homo sapiens
  siRNA target sequence for UBE4B (NM_006048.2,1979-1997).
ccctgtgtgcaatttggtt

SEQ ID NO: 334714 - DNA, 19 bp, Homo sapiens
  siRNA target sequence for UBE4B (NM_006048.2,2054-2072).
gcagagactctcttactta

SEQ ID NO: 334715 - DNA, 19 bp, Homo sapiens
  siRNA target sequence for UBE4B (NM_006048.2,2109-2127).
gatgttaaagtggttgaaa

SEQ ID NO: 334716 - DNA, 19 bp, Homo sapiens
  siRNA target sequence for UBE4B (NM_006048.2,2166-2184).
cgtgtggttagccaatcat

SEQ ID NO: 334717 - DNA, 19 bp, Homo sapiens
  siRNA target sequence for UBE4B (NM_006048.2,2167-2185).
gtgtggttagccaatcatt

SEQ ID NO: 334718 - DNA, 19 bp, Homo sapiens
  siRNA target sequence for UBE4B (NM_006048.2,2176-2194).
gccaatcattgcagcatta

SEQ ID NO: 334719 - DNA, 19 bp, Homo sapiens
  siRNA target sequence for UBE4B (NM_006048.2,2206-2224).
gaaggcaagagctttttaa

SEQ ID NO: 334720 - DNA, 19 bp, Homo sapiens
  siRNA target sequence for UBE4B (NM_006048.2,2209-2227).
ggcaagagctttttaagat

SEQ ID NO: 334721 - DNA, 19 bp, Homo sapiens
  siRNA target sequence for UBE4B (NM_006048.2,2287-2305).
ctgtcgtcaatgccaatat

SEQ ID NO: 334722 - DNA, 19 bp, Homo sapiens
  siRNA target sequence for UBE4B (NM_006048.2,2289-2307).
gtcgtcaatgccaatatga

SEQ ID NO: 334723 - DNA, 19 bp, Homo sapiens
  siRNA target sequence for UBE4B (NM_006048.2,2339-2357).
ggtgtctacagatggattt

SEQ ID NO: 334724 - DNA, 19 bp, Homo sapiens
  siRNA target sequence for UBE4B (NM_006048.2,2376-2394).
gtactgcagcagctaagta

SEQ ID NO: 334725 - DNA, 19 bp, Homo sapiens
  siRNA target sequence for UBE4B (NM_006048.2,2381-2399).
gcagcagctaagtacaaaa

SEQ ID NO: 334726 - DNA, 19 bp, Homo sapiens
  siRNA target sequence for UBE4B (NM_006048.2,2415-2433).
gttgatcccacgtatattt

SEQ ID NO: 334727 - DNA, 19 bp, Homo sapiens
  siRNA target sequence for UBE4B (NM_006048.2,2438-2456).
cccaagatgtcggattact

SEQ ID NO: 334728 - DNA, 19 bp, Homo sapiens
  siRNA target sequence for UBE4B (NM_006048.2,2440-2458).
caagatgtcggattactct

SEQ ID NO: 334729 - DNA, 19 bp, Homo sapiens
  siRNA target sequence for UBE4B (NM_006048.2,2469-2487).
gagacgcgtgtgaatgcaa

SEQ ID NO: 334730 - DNA, 19 bp, Homo sapiens
  siRNA target sequence for UBE4B (NM_006048.2,2507-2525).
ctggctgactgaactctat

SEQ ID NO: 334731 - DNA, 19 bp, Homo sapiens
  siRNA target sequence for UBE4B (NM_006048.2,2526-2544).
ggcgatcagcctccatttt

SEQ ID NO: 334732 - DNA, 19 bp, Homo sapiens
  siRNA target sequence for UBE4B (NM_006048.2,2528-2546).
cgatcagcctccattttct

SEQ ID NO: 334733 - DNA, 19 bp, Homo sapiens
  siRNA target sequence for UBE4B (NM_006048.2,2558-2576).
ccctacggagtgcttcttt

SEQ ID NO: 334734 - DNA, 19 bp, Homo sapiens
  siRNA target sequence for UBE4B (NM_006048.2,2560-2578).
ctacggagtgcttctttct

SEQ ID NO: 334735 - DNA, 19 bp, Homo sapiens
  siRNA target sequence for UBE4B (NM_006048.2,2611-2629).
ctagttgccgtcgctatat

SEQ ID NO: 334736 - DNA, 19 bp, Homo sapiens
  siRNA target sequence for UBE4B (NM_006048.2,2654-2672).
gctcaatagaactgtagaa

SEQ ID NO: 334737 - DNA, 19 bp, Homo sapiens
  siRNA target sequence for UBE4B (NM_006048.2,2719-2737).
ctagacaccgcgaaatgct

SEQ ID NO: 334738 - DNA, 19 bp, Homo sapiens
  siRNA target sequence for UBE4B (NM_006048.2,2735-2753).
gctgaagcgctgtaaaact

SEQ ID NO: 334739 - DNA, 19 bp, Homo sapiens
  siRNA target sequence for UBE4B (NM_006048.2,2817-2835).
ctgagaagatgtctgaatt

SEQ ID NO: 334740 - DNA, 19 bp, Homo sapiens
  siRNA target sequence for UBE4B (NM_006048.2,2819-2837).
gagaagatgtctgaatttt

SEQ ID NO: 334741 - DNA, 19 bp, Homo sapiens
  siRNA target sequence for UBE4B (NM_006048.2,2876-2894).
ccccgcatatcccgatata

SEQ ID NO: 334742 - DNA, 19 bp, Homo sapiens
  siRNA target sequence for UBE4B (NM_006048.2,2877-2895).
cccgcatatcccgatataa

SEQ ID NO: 334743 - DNA, 19 bp, Homo sapiens
  siRNA target sequence for UBE4B (NM_006048.2,2879-2897).
cgcatatcccgatataaca

SEQ ID NO: 334744 - DNA, 19 bp, Homo sapiens
  siRNA target sequence for UBE4B (NM_006048.2,2881-2899).
catatcccgatataacact

SEQ ID NO: 334745 - DNA, 19 bp, Homo sapiens
  siRNA target sequence for UBE4B (NM_006048.2,2889-2907).
gatataacactgcctttaa

SEQ ID NO: 334746 - DNA, 19 bp, Homo sapiens
  siRNA target sequence for UBE4B (NM_006048.2,2896-2914).
cactgcctttaaattcaga

SEQ ID NO: 334747 - DNA, 19 bp, Homo sapiens
  siRNA target sequence for UBE4B (NM_006048.2,2931-2949).
gcagcgttgcctgagtttt

SEQ ID NO: 334748 - DNA, 19 bp, Homo sapiens
  siRNA target sequence for UBE4B (NM_006048.2,2932-2950).
cagcgttgcctgagtttta

SEQ ID NO: 334749 - DNA, 19 bp, Homo sapiens
  siRNA target sequence for UBE4B (NM_006048.2,2935-2953).
cgttgcctgagttttatgt

SEQ ID NO: 334750 - DNA, 19 bp, Homo sapiens
  siRNA target sequence for UBE4B (NM_006048.2,2936-2954).
gttgcctgagttttatgta

SEQ ID NO: 334751 - DNA, 19 bp, Homo sapiens
  siRNA target sequence for UBE4B (NM_006048.2,2939-2957).
gcctgagttttatgtagaa

SEQ ID NO: 334752 - DNA, 19 bp, Homo sapiens
  siRNA target sequence for UBE4B (NM_006048.2,3016-3034).
cctgtactcaggatattgt

SEQ ID NO: 334753 - DNA, 19 bp, Homo sapiens
  siRNA target sequence for UBE4B (NM_006048.2,3137-3155).
gccacgaacccagaagttt

SEQ ID NO: 334754 - DNA, 19 bp, Homo sapiens
  siRNA target sequence for UBE4B (NM_006048.2,3138-3156).
ccacgaacccagaagtttt

SEQ ID NO: 334755 - DNA, 19 bp, Homo sapiens
  siRNA target sequence for UBE4B (NM_006048.2,3198-3216).
gtaccttccctgatgaagt

SEQ ID NO: 334756 - DNA, 19 bp, Homo sapiens
  siRNA target sequence for UBE4B (NM_006048.2,3239-3257).
cggagccaccagtgagttt

SEQ ID NO: 334757 - DNA, 19 bp, Homo sapiens
  siRNA target sequence for UBE4B (NM_006048.2,3241-3259).
gagccaccagtgagtttta

SEQ ID NO: 334758 - DNA, 19 bp, Homo sapiens
  siRNA target sequence for UBE4B (NM_006048.2,3247-3265).
ccagtgagttttatgacaa

SEQ ID NO: 334759 - DNA, 19 bp, Homo sapiens
  siRNA target sequence for UBE4B (NM_006048.2,3250-3268).
gtgagttttatgacaagtt

SEQ ID NO: 334760 - DNA, 19 bp, Homo sapiens
  siRNA target sequence for UBE4B (NM_006048.2,3266-3284).
gttcacaattcgctatcat

SEQ ID NO: 334761 - DNA, 19 bp, Homo sapiens
  siRNA target sequence for UBE4B (NM_006048.2,3269-3287).
cacaattcgctatcatatt

SEQ ID NO: 334762 - DNA, 19 bp, Homo sapiens
  siRNA target sequence for UBE4B (NM_006048.2,3353-3371).
ctccgggaagcagtttgtt

SEQ ID NO: 334763 - DNA, 19 bp, Homo sapiens
  siRNA target sequence for UBE4B (NM_006048.2,3369-3387).
gttcgctatataaacatgt

SEQ ID NO: 334764 - DNA, 19 bp, Homo sapiens
  siRNA target sequence for UBE4B (NM_006048.2,3372-3390).
cgctatataaacatgttga

SEQ ID NO: 334765 - DNA, 19 bp, Homo sapiens
  siRNA target sequence for UBE4B (NM_006048.2,3373-3391).
gctatataaacatgttgat

SEQ ID NO: 334766 - DNA, 19 bp, Homo sapiens
  siRNA target sequence for UBE4B (NM_006048.2,3404-3422).
gtttttgctcgatgaaagt

SEQ ID NO: 334767 - DNA, 19 bp, Homo sapiens
  siRNA target sequence for UBE4B (NM_006048.2,3428-3446).
gtctctgaagcgaatccat

SEQ ID NO: 334768 - DNA, 19 bp, Homo sapiens
  siRNA target sequence for UBE4B (NM_006048.2,3571-3589).
ccgaaaccgtggacatgtt

SEQ ID NO: 334769 - DNA, 19 bp, Homo sapiens
  siRNA target sequence for UBE4B (NM_006048.2,3655-3673).
caatgctgaactttaatct

SEQ ID NO: 334770 - DNA, 19 bp, Homo sapiens
  siRNA target sequence for UBE4B (NM_006048.2,3695-3713).
gtgccgtgacctgaaagtt

SEQ ID NO: 334771 - DNA, 19 bp, Homo sapiens
  siRNA target sequence for UBE4B (NM_006048.2,3755-3773).
ggaccaactgacggatatt

SEQ ID NO: 334772 - DNA, 19 bp, Homo sapiens
  siRNA target sequence for UBE4B (NM_006048.2,3759-3777).
caactgacggatatttact

SEQ ID NO: 334773 - DNA, 19 bp, Homo sapiens
  siRNA target sequence for UBE4B (NM_006048.2,3826-3844).
gatcctacagtaaggaatt

SEQ ID NO: 334774 - DNA, 19 bp, Homo sapiens
  siRNA target sequence for UBE4B (NM_006048.2,3884-3902).
caaatccacaatagcaata

SEQ ID NO: 334775 - DNA, 19 bp, Homo sapiens
  siRNA target sequence for UBE4B (NM_006048.2,3976-3994).
gcgacgctcctgatgagtt

SEQ ID NO: 334776 - DNA, 19 bp, Homo sapiens
  siRNA target sequence for UBE4B (NM_006048.2,4174-4192).
cgtggatgagagagaaaca

SEQ ID NO: 334777 - DNA, 19 bp, Homo sapiens
  siRNA target sequence for OA48-18 (NM_006107.1,342-360).
gtcctgcaaaacattttga

SEQ ID NO: 334778 - DNA, 19 bp, Homo sapiens
  siRNA target sequence for OA48-18 (NM_006107.1,369-387).
gttttgtctcagctatttt

SEQ ID NO: 334779 - DNA, 19 bp, Homo sapiens
  siRNA target sequence for OA48-18 (NM_006107.1,394-412).
gactcgtgcccccattagt

SEQ ID NO: 334780 - DNA, 19 bp, Homo sapiens
  siRNA target sequence for OA48-18 (NM_006107.1,396-414).
ctcgtgcccccattagtgt

SEQ ID NO: 334781 - DNA, 19 bp, Homo sapiens
  siRNA target sequence for OA48-18 (NM_006107.1,413-431).
gtgcctctttggaaattat

SEQ ID NO: 334782 - DNA, 19 bp, Homo sapiens
  siRNA target sequence for OA48-18 (NM_006107.1,424-442).
gaaattatcgcccacattt

SEQ ID NO: 334783 - DNA, 19 bp, Homo sapiens
  siRNA target sequence for SPON1 (NM_006108.1,413-431).
ggcgaccccgacttctaca

SEQ ID NO: 334784 - DNA, 19 bp, Homo sapiens
  siRNA target sequence for SPON1 (NM_006108.1,441-459).
ccagctaccgcgtaacact

SEQ ID NO: 334785 - DNA, 19 bp, Homo sapiens
  siRNA target sequence for SPON1 (NM_006108.1,442-460).
cagctaccgcgtaacactt

SEQ ID NO: 334786 - DNA, 19 bp, Homo sapiens
  siRNA target sequence for SPON1 (NM_006108.1,445-463).
ctaccgcgtaacactttca

SEQ ID NO: 334787 - DNA, 19 bp, Homo sapiens
  siRNA target sequence for SPON1 (NM_006108.1,562-580).
catagacgaagaagaaact

SEQ ID NO: 334788 - DNA, 19 bp, Homo sapiens
  siRNA target sequence for SPON1 (NM_006108.1,694-712).
ggccagcatcgtacaaaaa

SEQ ID NO: 334789 - DNA, 19 bp, Homo sapiens
  siRNA target sequence for SPON1 (NM_006108.1,703-721).
cgtacaaaaacgcattatt

SEQ ID NO: 334790 - DNA, 19 bp, Homo sapiens
  siRNA target sequence for SPON1 (NM_006108.1,745-763).
gaccaagaaactttgtgaa

SEQ ID NO: 334791 - DNA, 19 bp, Homo sapiens
  siRNA target sequence for SPON1 (NM_006108.1,787-805).
gactgacaaacccatctta

SEQ ID NO: 334792 - DNA, 19 bp, Homo sapiens
  siRNA target sequence for SPON1 (NM_006108.1,791-809).
gacaaacccatcttagact

SEQ ID NO: 334793 - DNA, 19 bp, Homo sapiens
  siRNA target sequence for SPON1 (NM_006108.1,828-846).
ccaagtacagactcacatt

SEQ ID NO: 334794 - DNA, 19 bp, Homo sapiens
  siRNA target sequence for SPON1 (NM_006108.1,829-847).
caagtacagactcacattt

SEQ ID NO: 334795 - DNA, 19 bp, Homo sapiens
  siRNA target sequence for SPON1 (NM_006108.1,923-941).
ggatcccactccaagaatt

SEQ ID NO: 334796 - DNA, 19 bp, Homo sapiens
  siRNA target sequence for SPON1 (NM_006108.1,928-946).
ccactccaagaattatgta

SEQ ID NO: 334797 - DNA, 19 bp, Homo sapiens
  siRNA target sequence for SPON1 (NM_006108.1,970-988).
cagcgaaggcgtcaaacaa

SEQ ID NO: 334798 - DNA, 19 bp, Homo sapiens
  siRNA target sequence for SPON1 (NM_006108.1,972-990).
gcgaaggcgtcaaacaagt

SEQ ID NO: 334799 - DNA, 19 bp, Homo sapiens
  siRNA target sequence for SPON1 (NM_006108.1,973-991).
cgaaggcgtcaaacaagtt

SEQ ID NO: 334800 - DNA, 19 bp, Homo sapiens
  siRNA target sequence for SPON1 (NM_006108.1,1002-1020).
gctcacccgtgaaaatgga

SEQ ID NO: 334801 - DNA, 19 bp, Homo sapiens
  siRNA target sequence for SPON1 (NM_006108.1,1135-1153).
ggacagaacgcgccattta

SEQ ID NO: 334802 - DNA, 19 bp, Homo sapiens
  siRNA target sequence for SPON1 (NM_006108.1,1136-1154).
gacagaacgcgccatttaa

SEQ ID NO: 334803 - DNA, 19 bp, Homo sapiens
  siRNA target sequence for SPON1 (NM_006108.1,1300-1318).
ctatgagtcacccaacaaa

SEQ ID NO: 334804 - DNA, 19 bp, Homo sapiens
  siRNA target sequence for SPON1 (NM_006108.1,1419-1437).
gagttgtcatcgagagaat

SEQ ID NO: 334805 - DNA, 19 bp, Homo sapiens
  siRNA target sequence for SPON1 (NM_006108.1,1438-1456).
cgcacggaagggtgaacaa

SEQ ID NO: 334806 - DNA, 19 bp, Homo sapiens
  siRNA target sequence for SPON1 (NM_006108.1,1439-1457).
gcacggaagggtgaacaat

SEQ ID NO: 334807 - DNA, 19 bp, Homo sapiens
  siRNA target sequence for SPON1 (NM_006108.1,1443-1461).
ggaagggtgaacaatgcaa

SEQ ID NO: 334808 - DNA, 19 bp, Homo sapiens
  siRNA target sequence for SPON1 (NM_006108.1,1470-1488).
ctgacaatgtcgatgatat

SEQ ID NO: 334809 - DNA, 19 bp, Homo sapiens
  siRNA target sequence for SPON1 (NM_006108.1,1474-1492).
caatgtcgatgatattgta

SEQ ID NO: 334810 - DNA, 19 bp, Homo sapiens
  siRNA target sequence for SPON1 (NM_006108.1,1782-1800).
cccgggagaggtatgtgaa

SEQ ID NO: 334811 - DNA, 19 bp, Homo sapiens
  siRNA target sequence for SPON1 (NM_006108.1,1955-1973).
cggcaccgcatgatcaaga

SEQ ID NO: 334812 - DNA, 19 bp, Homo sapiens
  siRNA target sequence for SPON1 (NM_006108.1,1956-1974).
ggcaccgcatgatcaagat

SEQ ID NO: 334813 - DNA, 19 bp, Homo sapiens
  siRNA target sequence for SPON1 (NM_006108.1,1958-1976).
caccgcatgatcaagatga

SEQ ID NO: 334814 - DNA, 19 bp, Homo sapiens
  siRNA target sequence for SPON1 (NM_006108.1,2238-2256).
cccagtggtcggaatgtaa

SEQ ID NO: 334815 - DNA, 19 bp, Homo sapiens
  siRNA target sequence for SPON1 (NM_006108.1,2240-2258).
cagtggtcggaatgtaaca

SEQ ID NO: 334816 - DNA, 19 bp, Homo sapiens
  siRNA target sequence for SPON1 (NM_006108.1,2285-2303).
cgaacccggatgatccaaa

SEQ ID NO: 334817 - DNA, 19 bp, Homo sapiens
  siRNA target sequence for SPON1 (NM_006108.1,2289-2307).
cccggatgatccaaatgga

SEQ ID NO: 334818 - DNA, 19 bp, Homo sapiens
  siRNA target sequence for SPON1 (NM_006108.1,2543-2561).
cgttacatgactgtaaaga

SEQ ID NO: 334819 - DNA, 19 bp, Homo sapiens
  siRNA target sequence for SPON1 (NM_006108.1,2605-2623).
ggagatcagagcatgcaat

SEQ ID NO: 334820 - DNA, 19 bp, Homo sapiens
  siRNA target sequence for SPON1 (NM_006108.1,2608-2626).
gatcagagcatgcaatgtt

SEQ ID NO: 334821 - DNA, 19 bp, Homo sapiens
  siRNA target sequence for PRAME (NM_006115.2,247-265).
gcgtttgtggggttccatt

SEQ ID NO: 334822 - DNA, 19 bp, Homo sapiens
  siRNA target sequence for PRAME (NM_006115.2,261-279).
ccattcagagccgatacat

SEQ ID NO: 334823 - DNA, 19 bp, Homo sapiens
  siRNA target sequence for PRAME (NM_006115.2,493-511).
gatgaagggacaacatctt

SEQ ID NO: 334824 - DNA, 19 bp, Homo sapiens
  siRNA target sequence for PRAME (NM_006115.2,599-617).
ctggatttacggaagaact

SEQ ID NO: 334825 - DNA, 19 bp, Homo sapiens
  siRNA target sequence for PRAME (NM_006115.2,686-704).
gcagctcagcccatgacaa

SEQ ID NO: 334826 - DNA, 19 bp, Homo sapiens
  siRNA target sequence for PRAME (NM_006115.2,791-809).
ggtgcctgtgatgaattgt

SEQ ID NO: 334827 - DNA, 19 bp, Homo sapiens
  siRNA target sequence for PRAME (NM_006115.2,835-853).
gcgaaagaaaaatgtacta

SEQ ID NO: 334828 - DNA, 19 bp, Homo sapiens
  siRNA target sequence for PRAME (NM_006115.2,885-903).
caatgcccatgcaggatat

SEQ ID NO: 334829 - DNA, 19 bp, Homo sapiens
  siRNA target sequence for PRAME (NM_006115.2,891-909).
ccatgcaggatatcaagat

SEQ ID NO: 334830 - DNA, 19 bp, Homo sapiens
  siRNA target sequence for PRAME (NM_006115.2,1046-1064).
catgcatcttcctacattt

SEQ ID NO: 334831 - DNA, 19 bp, Homo sapiens
  siRNA target sequence for PRAME (NM_006115.2,1125-1143).
gcctgcaggctctctatgt

SEQ ID NO: 334832 - DNA, 19 bp, Homo sapiens
  siRNA target sequence for PRAME (NM_006115.2,1136-1154).
ctctatgtggactctttat

SEQ ID NO: 334833 - DNA, 19 bp, Homo sapiens
  siRNA target sequence for PRAME (NM_006115.2,1145-1163).
gactctttatttttcctta

SEQ ID NO: 334834 - DNA, 19 bp, Homo sapiens
  siRNA target sequence for PRAME (NM_006115.2,1275-1293).
gcgtcagtcagctaagtgt

SEQ ID NO: 334835 - DNA, 19 bp, Homo sapiens
  siRNA target sequence for PRAME (NM_006115.2,1310-1328).
gtcatgctgaccgatgtaa

SEQ ID NO: 334836 - DNA, 19 bp, Homo sapiens
  siRNA target sequence for PRAME (NM_006115.2,1312-1330).
catgctgaccgatgtaagt

SEQ ID NO: 334837 - DNA, 19 bp, Homo sapiens
  siRNA target sequence for PRAME (NM_006115.2,1398-1416).
gtgggatcacggatgatca

SEQ ID NO: 334838 - DNA, 19 bp, Homo sapiens
  siRNA target sequence for PRAME (NM_006115.2,1450-1468).
ctcccagcttacaacctta

SEQ ID NO: 334839 - DNA, 19 bp, Homo sapiens
  siRNA target sequence for PRAME (NM_006115.2,1478-1496).
gggaattccatctccatat

SEQ ID NO: 334840 - DNA, 19 bp, Homo sapiens
  siRNA target sequence for PRAME (NM_006115.2,1480-1498).
gaattccatctccatatct

SEQ ID NO: 334841 - DNA, 19 bp, Homo sapiens
  siRNA target sequence for C21orf4 (NM_006134.4,150-168).
ggcaggcttcctagataat

SEQ ID NO: 334842 - DNA, 19 bp, Homo sapiens
  siRNA target sequence for C21orf4 (NM_006134.4,172-190).
cgttggccagaatgtgaat

SEQ ID NO: 334843 - DNA, 19 bp, Homo sapiens
  siRNA target sequence for C21orf4 (NM_006134.4,181-199).
gaatgtgaatgtattgact

SEQ ID NO: 334844 - DNA, 19 bp, Homo sapiens
  siRNA target sequence for C21orf4 (NM_006134.4,227-245).
ctgttgtcgcaggtatatt

SEQ ID NO: 334845 - DNA, 19 bp, Homo sapiens
  siRNA target sequence for C21orf4 (NM_006134.4,229-247).
gttgtcgcaggtatattgt

SEQ ID NO: 334846 - DNA, 19 bp, Homo sapiens
  siRNA target sequence for C21orf4 (NM_006134.4,234-252).
cgcaggtatattgtttttt

SEQ ID NO: 334847 - DNA, 19 bp, Homo sapiens
  siRNA target sequence for C21orf4 (NM_006134.4,257-275).
gctggtggataatgattga

SEQ ID NO: 334848 - DNA, 19 bp, Homo sapiens
  siRNA target sequence for C21orf4 (NM_006134.4,278-296).
cagctgtggtgtatcctaa

SEQ ID NO: 334849 - DNA, 19 bp, Homo sapiens
  siRNA target sequence for C21orf4 (NM_006134.4,322-340).
cacacatgtggtgtatttt

SEQ ID NO: 334850 - DNA, 19 bp, Homo sapiens
  siRNA target sequence for C21orf4 (NM_006134.4,348-366).
ggctttcttcatgataaat

SEQ ID NO: 334851 - DNA, 19 bp, Homo sapiens
  siRNA target sequence for C21orf4 (NM_006134.4,384-402).
ggtgagaggtgatagctat

SEQ ID NO: 334852 - DNA, 19 bp, Homo sapiens
  siRNA target sequence for C21orf4 (NM_006134.4,408-426).
cggctgtttaggaagaaca

SEQ ID NO: 334853 - DNA, 19 bp, Homo sapiens
  siRNA target sequence for C21orf4 (NM_006134.4,430-448).
gctcgagtttggcttttca

SEQ ID NO: 334854 - DNA, 19 bp, Homo sapiens
  siRNA target sequence for C21orf4 (NM_006134.4,462-480).
gatgtttgggtcacttatt

SEQ ID NO: 334855 - DNA, 19 bp, Homo sapiens
  siRNA target sequence for C21orf4 (NM_006134.4,465-483).
gtttgggtcacttattgct

SEQ ID NO: 334856 - DNA, 19 bp, Homo sapiens
  siRNA target sequence for C21orf4 (NM_006134.4,492-510).
gattctttttggtgcatat

SEQ ID NO: 334857 - DNA, 19 bp, Homo sapiens
  siRNA target sequence for C21orf4 (NM_006134.4,535-553).
ccgggactagctgtgtttt

SEQ ID NO: 334858 - DNA, 19 bp, Homo sapiens
  siRNA target sequence for C21orf4 (NM_006134.4,536-554).
cgggactagctgtgttttt

SEQ ID NO: 334859 - DNA, 19 bp, Homo sapiens
  siRNA target sequence for C21orf4 (NM_006134.4,537-555).
gggactagctgtgtttttt

SEQ ID NO: 334860 - DNA, 19 bp, Homo sapiens
  siRNA target sequence for C21orf4 (NM_006134.4,562-580).
gcacttatattttttagca

SEQ ID NO: 334861 - DNA, 19 bp, Homo sapiens
  siRNA target sequence for MS4A3 (NM_006138.3,103-121).
cctcccacgaagttgataa

SEQ ID NO: 334862 - DNA, 19 bp, Homo sapiens
  siRNA target sequence for MS4A3 (NM_006138.3,104-122).
ctcccacgaagttgataat

SEQ ID NO: 334863 - DNA, 19 bp, Homo sapiens
  siRNA target sequence for MS4A3 (NM_006138.3,266-284).
cctgaatgcagcaatgatt

SEQ ID NO: 334864 - DNA, 19 bp, Homo sapiens
  siRNA target sequence for MS4A3 (NM_006138.3,380-398).
gggtgctgtgtttttctgt

SEQ ID NO: 334865 - DNA, 19 bp, Homo sapiens
  siRNA target sequence for MS4A3 (NM_006138.3,415-433).
ctgttgtagcagggataaa

SEQ ID NO: 334866 - DNA, 19 bp, Homo sapiens
  siRNA target sequence for MS4A3 (NM_006138.3,439-457).
caagaacatggatacagaa

SEQ ID NO: 334867 - DNA, 19 bp, Homo sapiens
  siRNA target sequence for MS4A3 (NM_006138.3,529-547).
cagttaatatccagtcatt

SEQ ID NO: 334868 - DNA, 19 bp, Homo sapiens
  siRNA target sequence for MS4A3 (NM_006138.3,572-590).
gtcaccggacctatgcaat

SEQ ID NO: 334869 - DNA, 19 bp, Homo sapiens
  siRNA target sequence for MS4A3 (NM_006138.3,574-592).
caccggacctatgcaatta

SEQ ID NO: 334870 - DNA, 19 bp, Homo sapiens
  siRNA target sequence for MS4A3 (NM_006138.3,576-594).
ccggacctatgcaattaca

SEQ ID NO: 334871 - DNA, 19 bp, Homo sapiens
  siRNA target sequence for MS4A3 (NM_006138.3,690-708).
gcaaactgctgtaattcaa

SEQ ID NO: 334872 - DNA, 19 bp, Homo sapiens
  siRNA target sequence for LPO (NM_006151.1,350-368).
ctgccatctccgatactgt

SEQ ID NO: 334873 - DNA, 19 bp, Homo sapiens
  siRNA target sequence for LPO (NM_006151.1,377-395).
ccaaggtccaagtcaacaa

SEQ ID NO: 334874 - DNA, 19 bp, Homo sapiens
  siRNA target sequence for LPO (NM_006151.1,522-540).
ggtgtgggaggagtcttta

SEQ ID NO: 334875 - DNA, 19 bp, Homo sapiens
  siRNA target sequence for LPO (NM_006151.1,528-546).
ggaggagtctttaaagaga

SEQ ID NO: 334876 - DNA, 19 bp, Homo sapiens
  siRNA target sequence for LPO (NM_006151.1,559-577).
gcatccttgaccaatgtca

SEQ ID NO: 334877 - DNA, 19 bp, Homo sapiens
  siRNA target sequence for LPO (NM_006151.1,832-850).
cgggaggtatctaacaaga

SEQ ID NO: 334878 - DNA, 19 bp, Homo sapiens
  siRNA target sequence for LPO (NM_006151.1,833-851).
gggaggtatctaacaagat

SEQ ID NO: 334879 - DNA, 19 bp, Homo sapiens
  siRNA target sequence for LPO (NM_006151.1,834-852).
ggaggtatctaacaagatt

SEQ ID NO: 334880 - DNA, 19 bp, Homo sapiens
  siRNA target sequence for LPO (NM_006151.1,837-855).
ggtatctaacaagattgtt

SEQ ID NO: 334881 - DNA, 19 bp, Homo sapiens
  siRNA target sequence for LPO (NM_006151.1,849-867).
gattgttggctatctgaat

SEQ ID NO: 334882 - DNA, 19 bp, Homo sapiens
  siRNA target sequence for LPO (NM_006151.1,906-924).
catgcagtggggtcagatt

SEQ ID NO: 334883 - DNA, 19 bp, Homo sapiens
  siRNA target sequence for LPO (NM_006151.1,1310-1328).
gcccctgtgagttcatcaa

SEQ ID NO: 334884 - DNA, 19 bp, Homo sapiens
  siRNA target sequence for LPO (NM_006151.1,1312-1330).
ccctgtgagttcatcaaca

SEQ ID NO: 334885 - DNA, 19 bp, Homo sapiens
  siRNA target sequence for LPO (NM_006151.1,1350-1368).
cttcctggcaggagattct

SEQ ID NO: 334886 - DNA, 19 bp, Homo sapiens
  siRNA target sequence for LPO (NM_006151.1,1367-1385).
ctcgagcctcagagcatat

SEQ ID NO: 334887 - DNA, 19 bp, Homo sapiens
  siRNA target sequence for LPO (NM_006151.1,1429-1447).
cggctggccagagaactaa

SEQ ID NO: 334888 - DNA, 19 bp, Homo sapiens
  siRNA target sequence for LPO (NM_006151.1,1430-1448).
ggctggccagagaactaaa

SEQ ID NO: 334889 - DNA, 19 bp, Homo sapiens
  siRNA target sequence for LPO (NM_006151.1,1507-1525).
ggagccttcgtgcagatta

SEQ ID NO: 334890 - DNA, 19 bp, Homo sapiens
  siRNA target sequence for LPO (NM_006151.1,1508-1526).
gagccttcgtgcagattat

SEQ ID NO: 334891 - DNA, 19 bp, Homo sapiens
  siRNA target sequence for LPO (NM_006151.1,1535-1553).
gggactacctacccatttt

SEQ ID NO: 334892 - DNA, 19 bp, Homo sapiens
  siRNA target sequence for LPO (NM_006151.1,1539-1557).
ctacctacccattttgcta

SEQ ID NO: 334893 - DNA, 19 bp, Homo sapiens
  siRNA target sequence for LPO (NM_006151.1,1575-1593).
gtggatacccccatatcaa

SEQ ID NO: 334894 - DNA, 19 bp, Homo sapiens
  siRNA target sequence for LPO (NM_006151.1,1615-1633).
cccagaatttccaatgtct

SEQ ID NO: 334895 - DNA, 19 bp, Homo sapiens
  siRNA target sequence for LPO (NM_006151.1,1663-1681).
gaggtcccctctagtatgt

SEQ ID NO: 334896 - DNA, 19 bp, Homo sapiens
  siRNA target sequence for LPO (NM_006151.1,1680-1698).
gttccgcctggatgagaat

SEQ ID NO: 334897 - DNA, 19 bp, Homo sapiens
  siRNA target sequence for LPO (NM_006151.1,1852-1870).
gagctgcgcaacaagcttt

SEQ ID NO: 334898 - DNA, 19 bp, Homo sapiens
  siRNA target sequence for LPO (NM_006151.1,1939-1957).
gggcaacctgggtacaatt

SEQ ID NO: 334899 - DNA, 19 bp, Homo sapiens
  siRNA target sequence for LPO (NM_006151.1,1942-1960).
caacctgggtacaattcct

SEQ ID NO: 334900 - DNA, 19 bp, Homo sapiens
  siRNA target sequence for NEUROD2 (NM_006160.2,687-705).
gcgcctagccaagaactat

SEQ ID NO: 334901 - DNA, 19 bp, Homo sapiens
  siRNA target sequence for NEUROD2 (NM_006160.2,688-706).
cgcctagccaagaactata

SEQ ID NO: 334902 - DNA, 19 bp, Homo sapiens
  siRNA target sequence for NEUROD2 (NM_006160.2,689-707).
gcctagccaagaactatat

SEQ ID NO: 334903 - DNA, 19 bp, Homo sapiens
  siRNA target sequence for NEUROD2 (NM_006160.2,1054-1072).
gcgagcccggactacaaca

SEQ ID NO: 334904 - DNA, 19 bp, Homo sapiens
  siRNA target sequence for NEUROD2 (NM_006160.2,1148-1166).
ccgaccacgagaaaagcta

SEQ ID NO: 334905 - DNA, 19 bp, Homo sapiens
  siRNA target sequence for NEUROD2 (NM_006160.2,1211-1229).
cgggccacgggctagtctt

SEQ ID NO: 334906 - DNA, 19 bp, Homo sapiens
  siRNA target sequence for NEUROD2 (NM_006160.2,1253-1271).
gcgtccactcggagaatct

SEQ ID NO: 334907 - DNA, 19 bp, Homo sapiens
  siRNA target sequence for NEUROD2 (NM_006160.2,1255-1273).
gtccactcggagaatctct

SEQ ID NO: 334908 - DNA, 19 bp, Homo sapiens
  siRNA target sequence for NEUROD2 (NM_006160.2,1262-1280).
cggagaatctcttgtctta

SEQ ID NO: 334909 - DNA, 19 bp, Homo sapiens
  siRNA target sequence for NEUROD2 (NM_006160.2,1266-1284).
gaatctcttgtcttacgat

SEQ ID NO: 334910 - DNA, 19 bp, Homo sapiens
  siRNA target sequence for NEUROD2 (NM_006160.2,1320-1338).
ggagctcaatgcgtttttt

SEQ ID NO: 334911 - DNA, 19 bp, Homo sapiens
  siRNA target sequence for NEUROD2 (NM_006160.2,1323-1341).
gctcaatgcgttttttcat

SEQ ID NO: 334912 - DNA, 19 bp, Homo sapiens
  siRNA target sequence for NEUROD2 (NM_006160.2,1324-1342).
ctcaatgcgttttttcata

SEQ ID NO: 334913 - DNA, 19 bp, Homo sapiens
  siRNA target sequence for NFRKB (NM_006165.2,148-166).
gagtacctgtggagaagaa

SEQ ID NO: 334914 - DNA, 19 bp, Homo sapiens
  siRNA target sequence for NFRKB (NM_006165.2,262-280).
gggaggcaccagagttagt

SEQ ID NO: 334915 - DNA, 19 bp, Homo sapiens
  siRNA target sequence for NFRKB (NM_006165.2,264-282).
gaggcaccagagttagtct

SEQ ID NO: 334916 - DNA, 19 bp, Homo sapiens
  siRNA target sequence for NFRKB (NM_006165.2,336-354).
caacatggcaggaagtgtt

SEQ ID NO: 334917 - DNA, 19 bp, Homo sapiens
  siRNA target sequence for NFRKB (NM_006165.2,342-360).
ggcaggaagtgttaagtga

SEQ ID NO: 334918 - DNA, 19 bp, Homo sapiens
  siRNA target sequence for NFRKB (NM_006165.2,431-449).
ctcatcttagccttgttca

SEQ ID NO: 334919 - DNA, 19 bp, Homo sapiens
  siRNA target sequence for NFRKB (NM_006165.2,455-473).
gagaacttccgctttggaa

SEQ ID NO: 334920 - DNA, 19 bp, Homo sapiens
  siRNA target sequence for NFRKB (NM_006165.2,539-557).
cggcagttatgcttcaagt

SEQ ID NO: 334921 - DNA, 19 bp, Homo sapiens
  siRNA target sequence for NFRKB (NM_006165.2,582-600).
cccagcagcagtatttcca

SEQ ID NO: 334922 - DNA, 19 bp, Homo sapiens
  siRNA target sequence for NFRKB (NM_006165.2,732-750).
cccagcagcgctacttgaa

SEQ ID NO: 334923 - DNA, 19 bp, Homo sapiens
  siRNA target sequence for NFRKB (NM_006165.2,751-769).
ggtcttaagggaagtgaaa

SEQ ID NO: 334924 - DNA, 19 bp, Homo sapiens
  siRNA target sequence for NFRKB (NM_006165.2,810-828).
ccacgttggatttacaaga

SEQ ID NO: 334925 - DNA, 19 bp, Homo sapiens
  siRNA target sequence for NFRKB (NM_006165.2,811-829).
cacgttggatttacaagaa

SEQ ID NO: 334926 - DNA, 19 bp, Homo sapiens
  siRNA target sequence for NFRKB (NM_006165.2,905-923).
cgggtggtgcccacacttt

SEQ ID NO: 334927 - DNA, 19 bp, Homo sapiens
  siRNA target sequence for NFRKB (NM_006165.2,907-925).
ggtggtgcccacactttca

SEQ ID NO: 334928 - DNA, 19 bp, Homo sapiens
  siRNA target sequence for NFRKB (NM_006165.2,908-926).
gtggtgcccacactttcaa

SEQ ID NO: 334929 - DNA, 19 bp, Homo sapiens
  siRNA target sequence for NFRKB (NM_006165.2,920-938).
ctttcaaccacggatatga

SEQ ID NO: 334930 - DNA, 19 bp, Homo sapiens
  siRNA target sequence for NFRKB (NM_006165.2,1022-1040).
gatcacccggaccttttga

SEQ ID NO: 334931 - DNA, 19 bp, Homo sapiens
  siRNA target sequence for NFRKB (NM_006165.2,1066-1084).
catgactcgagtaaatgct

SEQ ID NO: 334932 - DNA, 19 bp, Homo sapiens
  siRNA target sequence for NFRKB (NM_006165.2,1095-1113).
gctctctggcagccttata

SEQ ID NO: 334933 - DNA, 19 bp, Homo sapiens
  siRNA target sequence for NFRKB (NM_006165.2,1210-1228).
gccgctaagcagtactgaa

SEQ ID NO: 334934 - DNA, 19 bp, Homo sapiens
  siRNA target sequence for NFRKB (NM_006165.2,1255-1273).
ctctccgctggcaattcct

SEQ ID NO: 334935 - DNA, 19 bp, Homo sapiens
  siRNA target sequence for NFRKB (NM_006165.2,1311-1329).
gccttggaatcaatgaaat

SEQ ID NO: 334936 - DNA, 19 bp, Homo sapiens
  siRNA target sequence for NFRKB (NM_006165.2,1347-1365).
ctcttctattagagatctt

SEQ ID NO: 334937 - DNA, 19 bp, Homo sapiens
  siRNA target sequence for NFRKB (NM_006165.2,1377-1395).
gtcaggctagccttcctat

SEQ ID NO: 334938 - DNA, 19 bp, Homo sapiens
  siRNA target sequence for NFRKB (NM_006165.2,1400-1418).
gaggagcgagttttggatt

SEQ ID NO: 334939 - DNA, 19 bp, Homo sapiens
  siRNA target sequence for NFRKB (NM_006165.2,1638-1656).
ggctagagaccaaagatca

SEQ ID NO: 334940 - DNA, 19 bp, Homo sapiens
  siRNA target sequence for NFRKB (NM_006165.2,1713-1731).
gggtaagaactgactatgt

SEQ ID NO: 334941 - DNA, 19 bp, Homo sapiens
  siRNA target sequence for NFRKB (NM_006165.2,1775-1793).
caggagcgttacaggtata

SEQ ID NO: 334942 - DNA, 19 bp, Homo sapiens
  siRNA target sequence for NFRKB (NM_006165.2,1820-1838).
cgcatgcacggctttgagt

SEQ ID NO: 334943 - DNA, 19 bp, Homo sapiens
  siRNA target sequence for NFRKB (NM_006165.2,2052-2070).
gcactcaggtaaatacagt

SEQ ID NO: 334944 - DNA, 19 bp, Homo sapiens
  siRNA target sequence for NFRKB (NM_006165.2,2081-2099).
gcactggatcggctacatt

SEQ ID NO: 334945 - DNA, 19 bp, Homo sapiens
  siRNA target sequence for NFRKB (NM_006165.2,2082-2100).
cactggatcggctacatta

SEQ ID NO: 334946 - DNA, 19 bp, Homo sapiens
  siRNA target sequence for NFRKB (NM_006165.2,2086-2104).
ggatcggctacattacgaa

SEQ ID NO: 334947 - DNA, 19 bp, Homo sapiens
  siRNA target sequence for NFRKB (NM_006165.2,2087-2105).
gatcggctacattacgaaa

SEQ ID NO: 334948 - DNA, 19 bp, Homo sapiens
  siRNA target sequence for NFRKB (NM_006165.2,2091-2109).
ggctacattacgaaaaaga

SEQ ID NO: 334949 - DNA, 19 bp, Homo sapiens
  siRNA target sequence for NFRKB (NM_006165.2,2092-2110).
gctacattacgaaaaagat

SEQ ID NO: 334950 - DNA, 19 bp, Homo sapiens
  siRNA target sequence for NFRKB (NM_006165.2,2274-2292).
gcaaggagagctccataaa

SEQ ID NO: 334951 - DNA, 19 bp, Homo sapiens
  siRNA target sequence for NFRKB (NM_006165.2,2458-2476).
ctcagaaccagctaagtct

SEQ ID NO: 334952 - DNA, 19 bp, Homo sapiens
  siRNA target sequence for NFRKB (NM_006165.2,2473-2491).
gtctagctcgggtgttctt

SEQ ID NO: 334953 - DNA, 19 bp, Homo sapiens
  siRNA target sequence for NFRKB (NM_006165.2,2475-2493).
ctagctcgggtgttcttct

SEQ ID NO: 334954 - DNA, 19 bp, Homo sapiens
  siRNA target sequence for NFRKB (NM_006165.2,2516-2534).
catctgggaacaatgcttt

SEQ ID NO: 334955 - DNA, 19 bp, Homo sapiens
  siRNA target sequence for NFRKB (NM_006165.2,2744-2762).
gtagtgccccagacagtaa

SEQ ID NO: 334956 - DNA, 19 bp, Homo sapiens
  siRNA target sequence for NFRKB (NM_006165.2,2919-2937).
ccacggctgccgtcattca

SEQ ID NO: 334957 - DNA, 19 bp, Homo sapiens
  siRNA target sequence for NFRKB (NM_006165.2,2920-2938).
cacggctgccgtcattcaa

SEQ ID NO: 334958 - DNA, 19 bp, Homo sapiens
  siRNA target sequence for NFRKB (NM_006165.2,2922-2940).
cggctgccgtcattcaaaa

SEQ ID NO: 334959 - DNA, 19 bp, Homo sapiens
  siRNA target sequence for NFRKB (NM_006165.2,2923-2941).
ggctgccgtcattcaaaat

SEQ ID NO: 334960 - DNA, 19 bp, Homo sapiens
  siRNA target sequence for NFRKB (NM_006165.2,2962-2980).
caagcaggtggcaatcact

SEQ ID NO: 334961 - DNA, 19 bp, Homo sapiens
  siRNA target sequence for NFRKB (NM_006165.2,3040-3058).
ccgcatccagggtaaggat

SEQ ID NO: 334962 - DNA, 19 bp, Homo sapiens
  siRNA target sequence for NFRKB (NM_006165.2,3106-3124).
gacggttctgcgaatcact

SEQ ID NO: 334963 - DNA, 19 bp, Homo sapiens
  siRNA target sequence for NFRKB (NM_006165.2,3117-3135).
gaatcactccggacatgat

SEQ ID NO: 334964 - DNA, 19 bp, Homo sapiens
  siRNA target sequence for NFRKB (NM_006165.2,3154-3172).
ccaggttaccacagtcaaa

SEQ ID NO: 334965 - DNA, 19 bp, Homo sapiens
  siRNA target sequence for NFRKB (NM_006165.2,3155-3173).
caggttaccacagtcaaat

SEQ ID NO: 334966 - DNA, 19 bp, Homo sapiens
  siRNA target sequence for NFRKB (NM_006165.2,3232-3250).
cttacacgtcacttccaat

SEQ ID NO: 334967 - DNA, 19 bp, Homo sapiens
  siRNA target sequence for NFRKB (NM_006165.2,3590-3608).
gtgtccttacccagtatga

SEQ ID NO: 334968 - DNA, 19 bp, Homo sapiens
  siRNA target sequence for NFRKB (NM_006165.2,3808-3826).
cacagcccccatcatcaaa

SEQ ID NO: 334969 - DNA, 19 bp, Homo sapiens
  siRNA target sequence for NFRKB (NM_006165.2,3908-3926).
ggcaataagcctgttagtt

SEQ ID NO: 334970 - DNA, 19 bp, Homo sapiens
  siRNA target sequence for NRAP (NM_006175.2,213-231).
cgagaagatcagctgtata

SEQ ID NO: 334971 - DNA, 19 bp, Homo sapiens
  siRNA target sequence for NRAP (NM_006175.2,216-234).
gaagatcagctgtatagat

SEQ ID NO: 334972 - DNA, 19 bp, Homo sapiens
  siRNA target sequence for NRAP (NM_006175.2,276-294).
gatgatgctgtctgttaat

SEQ ID NO: 334973 - DNA, 19 bp, Homo sapiens
  siRNA target sequence for NRAP (NM_006175.2,331-349).
gcccataaccctaagaaca

SEQ ID NO: 334974 - DNA, 19 bp, Homo sapiens
  siRNA target sequence for NRAP (NM_006175.2,334-352).
cataaccctaagaacaaca

SEQ ID NO: 334975 - DNA, 19 bp, Homo sapiens
  siRNA target sequence for NRAP (NM_006175.2,353-371).
ctttcaccagtgtctatca

SEQ ID NO: 334976 - DNA, 19 bp, Homo sapiens
  siRNA target sequence for NRAP (NM_006175.2,364-382).
gtctatcacactccattaa

SEQ ID NO: 334977 - DNA, 19 bp, Homo sapiens
  siRNA target sequence for NRAP (NM_006175.2,370-388).
cacactccattaaatctaa

SEQ ID NO: 334978 - DNA, 19 bp, Homo sapiens
  siRNA target sequence for NRAP (NM_006175.2,372-390).
cactccattaaatctaaat

SEQ ID NO: 334979 - DNA, 19 bp, Homo sapiens
  siRNA target sequence for NRAP (NM_006175.2,374-392).
ctccattaaatctaaatgt

SEQ ID NO: 334980 - DNA, 19 bp, Homo sapiens
  siRNA target sequence for NRAP (NM_006175.2,376-394).
ccattaaatctaaatgtga

SEQ ID NO: 334981 - DNA, 19 bp, Homo sapiens
  siRNA target sequence for NRAP (NM_006175.2,419-437).
ggatccatgaccaagaaga

SEQ ID NO: 334982 - DNA, 19 bp, Homo sapiens
  siRNA target sequence for NRAP (NM_006175.2,579-597).
gccagaccccgaaattgta

SEQ ID NO: 334983 - DNA, 19 bp, Homo sapiens
  siRNA target sequence for NRAP (NM_006175.2,580-598).
ccagaccccgaaattgtaa

SEQ ID NO: 334984 - DNA, 19 bp, Homo sapiens
  siRNA target sequence for NRAP (NM_006175.2,618-636).
gtctcttggtgaggaatat

SEQ ID NO: 334985 - DNA, 19 bp, Homo sapiens
  siRNA target sequence for NRAP (NM_006175.2,727-745).
gccagccaagtggagtata

SEQ ID NO: 334986 - DNA, 19 bp, Homo sapiens
  siRNA target sequence for NRAP (NM_006175.2,728-746).
ccagccaagtggagtataa

SEQ ID NO: 334987 - DNA, 19 bp, Homo sapiens
  siRNA target sequence for NRAP (NM_006175.2,817-835).
gctggggcacagcttcaaa

SEQ ID NO: 334988 - DNA, 19 bp, Homo sapiens
  siRNA target sequence for NRAP (NM_006175.2,845-863).
gatacacagaggactatga

SEQ ID NO: 334989 - DNA, 19 bp, Homo sapiens
  siRNA target sequence for NRAP (NM_006175.2,900-918).
cacacccgcctatcagata

SEQ ID NO: 334990 - DNA, 19 bp, Homo sapiens
  siRNA target sequence for NRAP (NM_006175.2,949-967).
gtgaggtaccatcaacaat

SEQ ID NO: 334991 - DNA, 19 bp, Homo sapiens
  siRNA target sequence for NRAP (NM_006175.2,951-969).
gaggtaccatcaacaatat

SEQ ID NO: 334992 - DNA, 19 bp, Homo sapiens
  siRNA target sequence for NRAP (NM_006175.2,1009-1027).
gctgagggcatcttgacaa

SEQ ID NO: 334993 - DNA, 19 bp, Homo sapiens
  siRNA target sequence for NRAP (NM_006175.2,1055-1073).
gttacccggaggagtatga

SEQ ID NO: 334994 - DNA, 19 bp, Homo sapiens
  siRNA target sequence for NRAP (NM_006175.2,1091-1109).
gcagcttcccagctatgat

SEQ ID NO: 334995 - DNA, 19 bp, Homo sapiens
  siRNA target sequence for NRAP (NM_006175.2,1143-1161).
cgaactcgctagtgacata

SEQ ID NO: 334996 - DNA, 19 bp, Homo sapiens
  siRNA target sequence for NRAP (NM_006175.2,1144-1162).
gaactcgctagtgacataa

SEQ ID NO: 334997 - DNA, 19 bp, Homo sapiens
  siRNA target sequence for NRAP (NM_006175.2,1147-1165).
ctcgctagtgacataaaat

SEQ ID NO: 334998 - DNA, 19 bp, Homo sapiens
  siRNA target sequence for NRAP (NM_006175.2,1169-1187).
ggcaggacttcaataagat

SEQ ID NO: 334999 - DNA, 19 bp, Homo sapiens
  siRNA target sequence for NRAP (NM_006175.2,1245-1263).
ggctcagagcgtaaacaaa

SEQ ID NO: 335000 - DNA, 19 bp, Homo sapiens
  siRNA target sequence for NRAP (NM_006175.2,1247-1265).
ctcagagcgtaaacaaact

SEQ ID NO: 335001 - DNA, 19 bp, Homo sapiens
  siRNA target sequence for NRAP (NM_006175.2,1264-1282).
ctcgtgagtgagaataaat

SEQ ID NO: 335002 - DNA, 19 bp, Homo sapiens
  siRNA target sequence for NRAP (NM_006175.2,1305-1323).
catgagaggccgctatgaa

SEQ ID NO: 335003 - DNA, 19 bp, Homo sapiens
  siRNA target sequence for NRAP (NM_006175.2,1343-1361).
gcactctgcatgctatgaa

SEQ ID NO: 335004 - DNA, 19 bp, Homo sapiens
  siRNA target sequence for NRAP (NM_006175.2,1388-1406).
cctacaaagctgattataa

SEQ ID NO: 335005 - DNA, 19 bp, Homo sapiens
  siRNA target sequence for NRAP (NM_006175.2,1392-1410).
caaagctgattataaacat

SEQ ID NO: 335006 - DNA, 19 bp, Homo sapiens
  siRNA target sequence for NRAP (NM_006175.2,1397-1415).
ctgattataaacatgatat

SEQ ID NO: 335007 - DNA, 19 bp, Homo sapiens
  siRNA target sequence for NRAP (NM_006175.2,1411-1429).
gatattgtcgactacaact

SEQ ID NO: 335008 - DNA, 19 bp, Homo sapiens
  siRNA target sequence for NRAP (NM_006175.2,1437-1455).
cactctcacgccttcctat

SEQ ID NO: 335009 - DNA, 19 bp, Homo sapiens
  siRNA target sequence for NRAP (NM_006175.2,1441-1459).
ctcacgccttcctatcaaa

SEQ ID NO: 335010 - DNA, 19 bp, Homo sapiens
  siRNA target sequence for NRAP (NM_006175.2,1443-1461).
cacgccttcctatcaaaca

SEQ ID NO: 335011 - DNA, 19 bp, Homo sapiens
  siRNA target sequence for NRAP (NM_006175.2,1467-1485).
gaaactggtgcccttgaaa

SEQ ID NO: 335012 - DNA, 19 bp, Homo sapiens
  siRNA target sequence for NRAP (NM_006175.2,1539-1557).
caccccacagattgttcaa

SEQ ID NO: 335013 - DNA, 19 bp, Homo sapiens
  siRNA target sequence for NRAP (NM_006175.2,1590-1608).
gaattaccgtgctgactat

SEQ ID NO: 335014 - DNA, 19 bp, Homo sapiens
  siRNA target sequence for NRAP (NM_006175.2,1596-1614).
ccgtgctgactatgagaaa

SEQ ID NO: 335015 - DNA, 19 bp, Homo sapiens
  siRNA target sequence for NRAP (NM_006175.2,1597-1615).
cgtgctgactatgagaaaa

SEQ ID NO: 335016 - DNA, 19 bp, Homo sapiens
  siRNA target sequence for NRAP (NM_006175.2,1656-1674).
ggtgaaggccaaaaccaat

SEQ ID NO: 335017 - DNA, 19 bp, Homo sapiens
  siRNA target sequence for NRAP (NM_006175.2,1783-1801).
ggggagcttgctagcaata

SEQ ID NO: 335018 - DNA, 19 bp, Homo sapiens
  siRNA target sequence for NRAP (NM_006175.2,1784-1802).
gggagcttgctagcaatat

SEQ ID NO: 335019 - DNA, 19 bp, Homo sapiens
  siRNA target sequence for NRAP (NM_006175.2,1785-1803).
ggagcttgctagcaatatt

SEQ ID NO: 335020 - DNA, 19 bp, Homo sapiens
  siRNA target sequence for NRAP (NM_006175.2,1786-1804).
gagcttgctagcaatatta

SEQ ID NO: 335021 - DNA, 19 bp, Homo sapiens
  siRNA target sequence for NRAP (NM_006175.2,1788-1806).
gcttgctagcaatattaaa

SEQ ID NO: 335022 - DNA, 19 bp, Homo sapiens
  siRNA target sequence for NRAP (NM_006175.2,1792-1810).
gctagcaatattaaatata

SEQ ID NO: 335023 - DNA, 19 bp, Homo sapiens
  siRNA target sequence for NRAP (NM_006175.2,1947-1965).
cctgcccatggatatggta

SEQ ID NO: 335024 - DNA, 19 bp, Homo sapiens
  siRNA target sequence for NRAP (NM_006175.2,1948-1966).
ctgcccatggatatggtaa

SEQ ID NO: 335025 - DNA, 19 bp, Homo sapiens
  siRNA target sequence for NRAP (NM_006175.2,1951-1969).
cccatggatatggtaaaca

SEQ ID NO: 335026 - DNA, 19 bp, Homo sapiens
  siRNA target sequence for NRAP (NM_006175.2,2039-2057).
ctgtgctgcctgaagatat

SEQ ID NO: 335027 - DNA, 19 bp, Homo sapiens
  siRNA target sequence for NRAP (NM_006175.2,2194-2212).
ctggtcagcgagaaaaact

SEQ ID NO: 335028 - DNA, 19 bp, Homo sapiens
  siRNA target sequence for NRAP (NM_006175.2,2307-2325).
ggcctacaaggcaggaaat

SEQ ID NO: 335029 - DNA, 19 bp, Homo sapiens
  siRNA target sequence for NRAP (NM_006175.2,2329-2347).
cagtctgtccatcagtata

SEQ ID NO: 335030 - DNA, 19 bp, Homo sapiens
  siRNA target sequence for NRAP (NM_006175.2,2333-2351).
ctgtccatcagtataccat

SEQ ID NO: 335031 - DNA, 19 bp, Homo sapiens
  siRNA target sequence for NRAP (NM_006175.2,2382-2400).
ccgagccaatgctgcaaat

SEQ ID NO: 335032 - DNA, 19 bp, Homo sapiens
  siRNA target sequence for NRAP (NM_006175.2,2384-2402).
gagccaatgctgcaaatct

SEQ ID NO: 335033 - DNA, 19 bp, Homo sapiens
  siRNA target sequence for NRAP (NM_006175.2,2396-2414).
caaatctcagcgagaaact

SEQ ID NO: 335034 - DNA, 19 bp, Homo sapiens
  siRNA target sequence for NRAP (NM_006175.2,2451-2469).
gtttgagctgcgtcttgat

SEQ ID NO: 335035 - DNA, 19 bp, Homo sapiens
  siRNA target sequence for NRAP (NM_006175.2,2509-2527).
gctagcgaggtgaagtaca

SEQ ID NO: 335036 - DNA, 19 bp, Homo sapiens
  siRNA target sequence for NRAP (NM_006175.2,2510-2528).
ctagcgaggtgaagtacaa

SEQ ID NO: 335037 - DNA, 19 bp, Homo sapiens
  siRNA target sequence for NRAP (NM_006175.2,2578-2596).
cagggagattcgcaaatga

SEQ ID NO: 335038 - DNA, 19 bp, Homo sapiens
  siRNA target sequence for NRAP (NM_006175.2,2647-2665).
ggattcgaggacaccaaat

SEQ ID NO: 335039 - DNA, 19 bp, Homo sapiens
  siRNA target sequence for NRAP (NM_006175.2,2748-2766).
gacagcggaacatcacttt

SEQ ID NO: 335040 - DNA, 19 bp, Homo sapiens
  siRNA target sequence for NRAP (NM_006175.2,2816-2834).
gcttacagagtgataacca

SEQ ID NO: 335041 - DNA, 19 bp, Homo sapiens
  siRNA target sequence for NRAP (NM_006175.2,2817-2835).
cttacagagtgataaccaa

SEQ ID NO: 335042 - DNA, 19 bp, Homo sapiens
  siRNA target sequence for NRAP (NM_006175.2,2874-2892).
ggtcgccaccgggtcatta

SEQ ID NO: 335043 - DNA, 19 bp, Homo sapiens
  siRNA target sequence for NRAP (NM_006175.2,2875-2893).
gtcgccaccgggtcattaa

SEQ ID NO: 335044 - DNA, 19 bp, Homo sapiens
  siRNA target sequence for NRAP (NM_006175.2,2877-2895).
cgccaccgggtcattaaat

SEQ ID NO: 335045 - DNA, 19 bp, Homo sapiens
  siRNA target sequence for NRAP (NM_006175.2,2879-2897).
ccaccgggtcattaaatgt

SEQ ID NO: 335046 - DNA, 19 bp, Homo sapiens
  siRNA target sequence for NRAP (NM_006175.2,2923-2941).
ctcattagcgagaagaagt

SEQ ID NO: 335047 - DNA, 19 bp, Homo sapiens
  siRNA target sequence for NRAP (NM_006175.2,2956-2974).
gatgctttgaagtttacca

SEQ ID NO: 335048 - DNA, 19 bp, Homo sapiens
  siRNA target sequence for NRAP (NM_006175.2,2994-3012).
gatggtccaggccagaatt

SEQ ID NO: 335049 - DNA, 19 bp, Homo sapiens
  siRNA target sequence for NRAP (NM_006175.2,2997-3015).
ggtccaggccagaattagt

SEQ ID NO: 335050 - DNA, 19 bp, Homo sapiens
  siRNA target sequence for NRAP (NM_006175.2,3000-3018).
ccaggccagaattagttat

SEQ ID NO: 335051 - DNA, 19 bp, Homo sapiens
  siRNA target sequence for NRAP (NM_006175.2,3001-3019).
caggccagaattagttata

SEQ ID NO: 335052 - DNA, 19 bp, Homo sapiens
  siRNA target sequence for NRAP (NM_006175.2,3021-3039).
ccaagcagtggatagatta

SEQ ID NO: 335053 - DNA, 19 bp, Homo sapiens
  siRNA target sequence for NRAP (NM_006175.2,3022-3040).
caagcagtggatagattat

SEQ ID NO: 335054 - DNA, 19 bp, Homo sapiens
  siRNA target sequence for NRAP (NM_006175.2,3025-3043).
gcagtggatagattataca

SEQ ID NO: 335055 - DNA, 19 bp, Homo sapiens
  siRNA target sequence for NRAP (NM_006175.2,3060-3078).
cataaagcatcattacaca

SEQ ID NO: 335056 - DNA, 19 bp, Homo sapiens
  siRNA target sequence for NRAP (NM_006175.2,3134-3152).
gtgagacgcgttataagga

SEQ ID NO: 335057 - DNA, 19 bp, Homo sapiens
  siRNA target sequence for NRAP (NM_006175.2,3136-3154).
gagacgcgttataaggaat

SEQ ID NO: 335058 - DNA, 19 bp, Homo sapiens
  siRNA target sequence for NRAP (NM_006175.2,3230-3248).
gtgaaatcataagtgatta

SEQ ID NO: 335059 - DNA, 19 bp, Homo sapiens
  siRNA target sequence for NRAP (NM_006175.2,3298-3316).
cggagcttggaagatgata

SEQ ID NO: 335060 - DNA, 19 bp, Homo sapiens
  siRNA target sequence for NRAP (NM_006175.2,3321-3339).
ccttgcacattcagtgtat

SEQ ID NO: 335061 - DNA, 19 bp, Homo sapiens
  siRNA target sequence for NRAP (NM_006175.2,3458-3476).
ccagcaatcaggactacaa

SEQ ID NO: 335062 - DNA, 19 bp, Homo sapiens
  siRNA target sequence for NRAP (NM_006175.2,3462-3480).
caatcaggactacaaacat

SEQ ID NO: 335063 - DNA, 19 bp, Homo sapiens
  siRNA target sequence for NRAP (NM_006175.2,3568-3586).
cggtcagacctgaacttta

SEQ ID NO: 335064 - DNA, 19 bp, Homo sapiens
  siRNA target sequence for NRAP (NM_006175.2,3611-3629).
caggcacgttagagattga

SEQ ID NO: 335065 - DNA, 19 bp, Homo sapiens
  siRNA target sequence for NRAP (NM_006175.2,3674-3692).
ggcagcatccccactcatt

SEQ ID NO: 335066 - DNA, 19 bp, Homo sapiens
  siRNA target sequence for NRAP (NM_006175.2,3724-3742).
ctccttcatgcgaaattca

SEQ ID NO: 335067 - DNA, 19 bp, Homo sapiens
  siRNA target sequence for NRAP (NM_006175.2,3741-3759).
cagcaaccagataacgaat

SEQ ID NO: 335068 - DNA, 19 bp, Homo sapiens
  siRNA target sequence for NRAP (NM_006175.2,3755-3773).
cgaatgagcgcctctataa

SEQ ID NO: 335069 - DNA, 19 bp, Homo sapiens
  siRNA target sequence for NRAP (NM_006175.2,3831-3849).
catccgagcaaaaacgaat

SEQ ID NO: 335070 - DNA, 19 bp, Homo sapiens
  siRNA target sequence for NRAP (NM_006175.2,3861-3879).
gagtgacgcaagatacaaa

SEQ ID NO: 335071 - DNA, 19 bp, Homo sapiens
  siRNA target sequence for NRAP (NM_006175.2,3863-3881).
gtgacgcaagatacaaaga

SEQ ID NO: 335072 - DNA, 19 bp, Homo sapiens
  siRNA target sequence for NRAP (NM_006175.2,3865-3883).
gacgcaagatacaaagagt

SEQ ID NO: 335073 - DNA, 19 bp, Homo sapiens
  siRNA target sequence for NRAP (NM_006175.2,3958-3976).
ggagatatagccagtgatt

SEQ ID NO: 335074 - DNA, 19 bp, Homo sapiens
  siRNA target sequence for NRAP (NM_006175.2,3959-3977).
gagatatagccagtgattt

SEQ ID NO: 335075 - DNA, 19 bp, Homo sapiens
  siRNA target sequence for NRAP (NM_006175.2,4002-4020).
ggagcgagggaaactcata

SEQ ID NO: 335076 - DNA, 19 bp, Homo sapiens
  siRNA target sequence for NRAP (NM_006175.2,4197-4215).
cgactacaggacacagtat

SEQ ID NO: 335077 - DNA, 19 bp, Homo sapiens
  siRNA target sequence for NRAP (NM_006175.2,4312-4330).
ggcatgaagggcataggat

SEQ ID NO: 335078 - DNA, 19 bp, Homo sapiens
  siRNA target sequence for NRAP (NM_006175.2,4390-4408).
gagaccaagtaccgtaaaa

SEQ ID NO: 335079 - DNA, 19 bp, Homo sapiens
  siRNA target sequence for NRAP (NM_006175.2,4392-4410).
gaccaagtaccgtaaaaaa

SEQ ID NO: 335080 - DNA, 19 bp, Homo sapiens
  siRNA target sequence for NRAP (NM_006175.2,4395-4413).
caagtaccgtaaaaaacca

SEQ ID NO: 335081 - DNA, 19 bp, Homo sapiens
  siRNA target sequence for NRAP (NM_006175.2,4463-4481).
ccaagaacagctatatgca

SEQ ID NO: 335082 - DNA, 19 bp, Homo sapiens
  siRNA target sequence for NRAP (NM_006175.2,4482-4500).
ctgcaatgagcgcatgtat

SEQ ID NO: 335083 - DNA, 19 bp, Homo sapiens
  siRNA target sequence for NRAP (NM_006175.2,4514-4532).
cagaatccctgcacagata

SEQ ID NO: 335084 - DNA, 19 bp, Homo sapiens
  siRNA target sequence for NRAP (NM_006175.2,4543-4561).
cccgaccatcccgatttca

SEQ ID NO: 335085 - DNA, 19 bp, Homo sapiens
  siRNA target sequence for NRAP (NM_006175.2,4594-4612).
gacaaagtctacagaaact

SEQ ID NO: 335086 - DNA, 19 bp, Homo sapiens
  siRNA target sequence for NRAP (NM_006175.2,4688-4706).
gggagatcgccagtgattt

SEQ ID NO: 335087 - DNA, 19 bp, Homo sapiens
  siRNA target sequence for NRAP (NM_006175.2,4698-4716).
cagtgatttccggtacaaa

SEQ ID NO: 335088 - DNA, 19 bp, Homo sapiens
  siRNA target sequence for NRAP (NM_006175.2,4700-4718).
gtgatttccggtacaaaga

SEQ ID NO: 335089 - DNA, 19 bp, Homo sapiens
  siRNA target sequence for NRAP (NM_006175.2,5007-5025).
gcagagtgatgtcaagtat

SEQ ID NO: 335090 - DNA, 19 bp, Homo sapiens
  siRNA target sequence for NRAP (NM_006175.2,5008-5026).
cagagtgatgtcaagtata

SEQ ID NO: 335091 - DNA, 19 bp, Homo sapiens
  siRNA target sequence for NRAP (NM_006175.2,5010-5028).
gagtgatgtcaagtataaa

SEQ ID NO: 335092 - DNA, 19 bp, Homo sapiens
  siRNA target sequence for NRAP (NM_006175.2,5066-5084).
ctcctggctcctacaaagt

SEQ ID NO: 335093 - DNA, 19 bp, Homo sapiens
  siRNA target sequence for NRAP (NM_006175.2,5212-5230).
gagattctgcacgtcaaaa

SEQ ID NO: 335094 - DNA, 19 bp, Homo sapiens
  siRNA target sequence for OMP (NM_006189.1,330-348).
ggactcggatgccatagat

SEQ ID NO: 335095 - DNA, 19 bp, Homo sapiens
  siRNA target sequence for OMP (NM_006189.1,331-349).
gactcggatgccatagatt

SEQ ID NO: 335096 - DNA, 19 bp, Homo sapiens
  siRNA target sequence for OMP (NM_006189.1,335-353).
cggatgccatagattggaa

SEQ ID NO: 335097 - DNA, 19 bp, Homo sapiens
  siRNA target sequence for OMP (NM_006189.1,336-354).
ggatgccatagattggaat

SEQ ID NO: 335098 - DNA, 19 bp, Homo sapiens
  siRNA target sequence for OMP (NM_006189.1,462-480).
caaggcctccgtggttttt

SEQ ID NO: 335099 - DNA, 19 bp, Homo sapiens
  siRNA target sequence for OMP (NM_006189.1,467-485).
cctccgtggtttttaacca

SEQ ID NO: 335100 - DNA, 19 bp, Homo sapiens
  siRNA target sequence for PENK (NM_006211.2,211-229).
cctggcttgcgtaatggaa

SEQ ID NO: 335101 - DNA, 19 bp, Homo sapiens
  siRNA target sequence for PENK (NM_006211.2,212-230).
ctggcttgcgtaatggaat

SEQ ID NO: 335102 - DNA, 19 bp, Homo sapiens
  siRNA target sequence for PENK (NM_006211.2,216-234).
cttgcgtaatggaatgtga

SEQ ID NO: 335103 - DNA, 19 bp, Homo sapiens
  siRNA target sequence for PENK (NM_006211.2,345-363).
cggaagaaagccatttgct

SEQ ID NO: 335104 - DNA, 19 bp, Homo sapiens
  siRNA target sequence for PENK (NM_006211.2,346-364).
ggaagaaagccatttgcta

SEQ ID NO: 335105 - DNA, 19 bp, Homo sapiens
  siRNA target sequence for PENK (NM_006211.2,356-374).
catttgctagccaaaaggt

SEQ ID NO: 335106 - DNA, 19 bp, Homo sapiens
  siRNA target sequence for PENK (NM_006211.2,377-395).
gggggcttcatgaaaaggt

SEQ ID NO: 335107 - DNA, 19 bp, Homo sapiens
  siRNA target sequence for PENK (NM_006211.2,378-396).
ggggcttcatgaaaaggta

SEQ ID NO: 335108 - DNA, 19 bp, Homo sapiens
  siRNA target sequence for PENK (NM_006211.2,518-536).
gactcgctggccaattcct

SEQ ID NO: 335109 - DNA, 19 bp, Homo sapiens
  siRNA target sequence for PENK (NM_006211.2,534-552).
cctcagacctgctaaaaga

SEQ ID NO: 335110 - DNA, 19 bp, Homo sapiens
  siRNA target sequence for PENK (NM_006211.2,643-661).
catgagaggcttaaagaga

SEQ ID NO: 335111 - DNA, 19 bp, Homo sapiens
  siRNA target sequence for PENK (NM_006211.2,860-878).
ggaggatttatgagatttt

SEQ ID NO: 335112 - DNA, 19 bp, Homo sapiens
  siRNA target sequence for PRKAA1 (NM_006251.2,54-72).
gaagatcggccactacatt

SEQ ID NO: 335113 - DNA, 19 bp, Homo sapiens
  siRNA target sequence for PRKAA1 (NM_006251.2,183-201).
ccttgatgtggtaggaaaa

SEQ ID NO: 335114 - DNA, 19 bp, Homo sapiens
  siRNA target sequence for PRKAA1 (NM_006251.2,234-252).
caggcatcctcatataatt

SEQ ID NO: 335115 - DNA, 19 bp, Homo sapiens
  siRNA target sequence for PRKAA1 (NM_006251.2,256-274).
ctgtaccaggtcatcagta

SEQ ID NO: 335116 - DNA, 19 bp, Homo sapiens
  siRNA target sequence for PRKAA1 (NM_006251.2,272-290).
gtacaccatctgatatttt

SEQ ID NO: 335117 - DNA, 19 bp, Homo sapiens
  siRNA target sequence for PRKAA1 (NM_006251.2,321-339).
gctatttgattatatctgt

SEQ ID NO: 335118 - DNA, 19 bp, Homo sapiens
  siRNA target sequence for PRKAA1 (NM_006251.2,371-389).
ggcgtctgttccaacagat

SEQ ID NO: 335119 - DNA, 19 bp, Homo sapiens
  siRNA target sequence for PRKAA1 (NM_006251.2,555-573).
ctatgctgcaccagaagta

SEQ ID NO: 335120 - DNA, 19 bp, Homo sapiens
  siRNA target sequence for PRKAA1 (NM_006251.2,559-577).
gctgcaccagaagtaattt

SEQ ID NO: 335121 - DNA, 19 bp, Homo sapiens
  siRNA target sequence for PRKAA1 (NM_006251.2,571-589).
gtaatttcaggaagattgt

SEQ ID NO: 335122 - DNA, 19 bp, Homo sapiens
  siRNA target sequence for PRKAA1 (NM_006251.2,595-613).
ggcccagaggtagatatat

SEQ ID NO: 335123 - DNA, 19 bp, Homo sapiens
  siRNA target sequence for PRKAA1 (NM_006251.2,598-616).
ccagaggtagatatatgga

SEQ ID NO: 335124 - DNA, 19 bp, Homo sapiens
  siRNA target sequence for PRKAA1 (NM_006251.2,617-635).
gcagtggggttattctcta

SEQ ID NO: 335125 - DNA, 19 bp, Homo sapiens
  siRNA target sequence for PRKAA1 (NM_006251.2,618-636).
cagtggggttattctctat

SEQ ID NO: 335126 - DNA, 19 bp, Homo sapiens
  siRNA target sequence for PRKAA1 (NM_006251.2,623-641).
gggttattctctatgcttt

SEQ ID NO: 335127 - DNA, 19 bp, Homo sapiens
  siRNA target sequence for PRKAA1 (NM_006251.2,673-691).
catgtgccaactcttttta

SEQ ID NO: 335128 - DNA, 19 bp, Homo sapiens
  siRNA target sequence for PRKAA1 (NM_006251.2,720-738).
ccctcaatatttaaatcct

SEQ ID NO: 335129 - DNA, 19 bp, Homo sapiens
  siRNA target sequence for PRKAA1 (NM_006251.2,832-850).
gaccttccaaaatatctct

SEQ ID NO: 335130 - DNA, 19 bp, Homo sapiens
  siRNA target sequence for PRKAA1 (NM_006251.2,858-876).
ggatccatcatatagttca

SEQ ID NO: 335131 - DNA, 19 bp, Homo sapiens
  siRNA target sequence for PRKAA1 (NM_006251.2,859-877).
gatccatcatatagttcaa

SEQ ID NO: 335132 - DNA, 19 bp, Homo sapiens
  siRNA target sequence for PRKAA1 (NM_006251.2,872-890).
gttcaaccatgattgatga

SEQ ID NO: 335133 - DNA, 19 bp, Homo sapiens
  siRNA target sequence for PRKAA1 (NM_006251.2,875-893).
caaccatgattgatgatga

SEQ ID NO: 335134 - DNA, 19 bp, Homo sapiens
  siRNA target sequence for PRKAA1 (NM_006251.2,896-914).
ccttaaaagaagtatgtga

SEQ ID NO: 335135 - DNA, 19 bp, Homo sapiens
  siRNA target sequence for PRKAA1 (NM_006251.2,943-961).
ctcagctgtctttacaaca

SEQ ID NO: 335136 - DNA, 19 bp, Homo sapiens
  siRNA target sequence for PRKAA1 (NM_006251.2,962-980).
gaaatcaccaggatccttt

SEQ ID NO: 335137 - DNA, 19 bp, Homo sapiens
  siRNA target sequence for PRKAA1 (NM_006251.2,985-1003).
gttgcctaccatctcataa

SEQ ID NO: 335138 - DNA, 19 bp, Homo sapiens
  siRNA target sequence for PRKAA1 (NM_006251.2,994-1012).
catctcataatagataaca

SEQ ID NO: 335139 - DNA, 19 bp, Homo sapiens
  siRNA target sequence for PRKAA1 (NM_006251.2,1052-1070).
caagcccacctgattcttt

SEQ ID NO: 335140 - DNA, 19 bp, Homo sapiens
  siRNA target sequence for PRKAA1 (NM_006251.2,1142-1160).
cacgccatacccttgatga

SEQ ID NO: 335141 - DNA, 19 bp, Homo sapiens
  siRNA target sequence for PRKAA1 (NM_006251.2,1144-1162).
cgccatacccttgatgaat

SEQ ID NO: 335142 - DNA, 19 bp, Homo sapiens
  siRNA target sequence for PRKAA1 (NM_006251.2,1146-1164).
ccatacccttgatgaatta

SEQ ID NO: 335143 - DNA, 19 bp, Homo sapiens
  siRNA target sequence for PRKAA1 (NM_006251.2,1147-1165).
catacccttgatgaattaa

SEQ ID NO: 335144 - DNA, 19 bp, Homo sapiens
  siRNA target sequence for PRKAA1 (NM_006251.2,1186-1204).
caaggtgtaaggaaagcaa

SEQ ID NO: 335145 - DNA, 19 bp, Homo sapiens
  siRNA target sequence for PRKAA1 (NM_006251.2,1209-1227).
gcatttaggaattagaagt

SEQ ID NO: 335146 - DNA, 19 bp, Homo sapiens
  siRNA target sequence for PRKAA1 (NM_006251.2,1228-1246).
caaagtcgaccaaatgata

SEQ ID NO: 335147 - DNA, 19 bp, Homo sapiens
  siRNA target sequence for PRKAA1 (NM_006251.2,1232-1250).
gtcgaccaaatgatattat

SEQ ID NO: 335148 - DNA, 19 bp, Homo sapiens
  siRNA target sequence for PRKAA1 (NM_006251.2,1267-1285).
gcaatcaaacaattggatt

SEQ ID NO: 335149 - DNA, 19 bp, Homo sapiens
  siRNA target sequence for PRKAA1 (NM_006251.2,1297-1315).
gttgtaaacccatattatt

SEQ ID NO: 335150 - DNA, 19 bp, Homo sapiens
  siRNA target sequence for PRKAA1 (NM_006251.2,1317-1335).
gcgtgtacgaaggaagaat

SEQ ID NO: 335151 - DNA, 19 bp, Homo sapiens
  siRNA target sequence for PRKAA1 (NM_006251.2,1336-1354).
cctgtgacaagcacttact

SEQ ID NO: 335152 - DNA, 19 bp, Homo sapiens
  siRNA target sequence for PRKAA1 (NM_006251.2,1343-1361).
caagcacttactccaaaat

SEQ ID NO: 335153 - DNA, 19 bp, Homo sapiens
  siRNA target sequence for PRKAA1 (NM_006251.2,1355-1373).
ccaaaatgagtctacagtt

SEQ ID NO: 335154 - DNA, 19 bp, Homo sapiens
  siRNA target sequence for PRKAA1 (NM_006251.2,1356-1374).
caaaatgagtctacagtta

SEQ ID NO: 335155 - DNA, 19 bp, Homo sapiens
  siRNA target sequence for PRKAA1 (NM_006251.2,1362-1380).
gagtctacagttataccaa

SEQ ID NO: 335156 - DNA, 19 bp, Homo sapiens
  siRNA target sequence for PRKAA1 (NM_006251.2,1391-1409).
gaacttatctactggattt

SEQ ID NO: 335157 - DNA, 19 bp, Homo sapiens
  siRNA target sequence for PRKAA1 (NM_006251.2,1404-1422).
ggatttccgtagtattgat

SEQ ID NO: 335158 - DNA, 19 bp, Homo sapiens
  siRNA target sequence for PRKAA1 (NM_006251.2,1466-1484).
gatcgggatcagttagcaa

SEQ ID NO: 335159 - DNA, 19 bp, Homo sapiens
  siRNA target sequence for PRKAA1 (NM_006251.2,1470-1488).
gggatcagttagcaactat

SEQ ID NO: 335160 - DNA, 19 bp, Homo sapiens
  siRNA target sequence for PRKAA1 (NM_006251.2,1606-1624).
ggaagtcacacaatagaat

SEQ ID NO: 335161 - DNA, 19 bp, Homo sapiens
  siRNA target sequence for PRKAA1 (NM_006251.2,1607-1625).
gaagtcacacaatagaatt

SEQ ID NO: 335162 - DNA, 19 bp, Homo sapiens
  siRNA target sequence for PRKAA1 (NM_006251.2,1635-1653).
gtgtgcaaatctaattaaa

SEQ ID NO: 335163 - DNA, 19 bp, Homo sapiens
  siRNA target sequence for PROP1 (NM_006261.2,663-681).
gaaccgcagagctaagcaa

SEQ ID NO: 335164 - DNA, 19 bp, Homo sapiens
  siRNA target sequence for TFPI (NM_006287.3,204-222).
ccctcttaatgctgattct

SEQ ID NO: 335165 - DNA, 19 bp, Homo sapiens
  siRNA target sequence for TFPI (NM_006287.3,206-224).
ctcttaatgctgattctga

SEQ ID NO: 335166 - DNA, 19 bp, Homo sapiens
  siRNA target sequence for TFPI (NM_006287.3,266-284).
caccactgaaacttatgca

SEQ ID NO: 335167 - DNA, 19 bp, Homo sapiens
  siRNA target sequence for TFPI (NM_006287.3,273-291).
gaaacttatgcattcattt

SEQ ID NO: 335168 - DNA, 19 bp, Homo sapiens
  siRNA target sequence for TFPI (NM_006287.3,305-323).
cggatgatggcccatgtaa

SEQ ID NO: 335169 - DNA, 19 bp, Homo sapiens
  siRNA target sequence for TFPI (NM_006287.3,306-324).
ggatgatggcccatgtaaa

SEQ ID NO: 335170 - DNA, 19 bp, Homo sapiens
  siRNA target sequence for TFPI (NM_006287.3,314-332).
gcccatgtaaagcaatcat

SEQ ID NO: 335171 - DNA, 19 bp, Homo sapiens
  siRNA target sequence for TFPI (NM_006287.3,359-377).
ctcgacagtgcgaagaatt

SEQ ID NO: 335172 - DNA, 19 bp, Homo sapiens
  siRNA target sequence for TFPI (NM_006287.3,362-380).
gacagtgcgaagaatttat

SEQ ID NO: 335173 - DNA, 19 bp, Homo sapiens
  siRNA target sequence for TFPI (NM_006287.3,398-416).
gaaatcagaatcgatttga

SEQ ID NO: 335174 - DNA, 19 bp, Homo sapiens
  siRNA target sequence for TFPI (NM_006287.3,474-492).
gacaacattgcaacaagaa

SEQ ID NO: 335175 - DNA, 19 bp, Homo sapiens
  siRNA target sequence for TFPI (NM_006287.3,526-544).
ggaatatgtcgaggttata

SEQ ID NO: 335176 - DNA, 19 bp, Homo sapiens
  siRNA target sequence for TFPI (NM_006287.3,527-545).
gaatatgtcgaggttatat

SEQ ID NO: 335177 - DNA, 19 bp, Homo sapiens
  siRNA target sequence for TFPI (NM_006287.3,538-556).
ggttatattaccaggtatt

SEQ ID NO: 335178 - DNA, 19 bp, Homo sapiens
  siRNA target sequence for TFPI (NM_006287.3,548-566).
ccaggtatttttataacaa

SEQ ID NO: 335179 - DNA, 19 bp, Homo sapiens
  siRNA target sequence for TFPI (NM_006287.3,577-595).
cagtgtgaacgtttcaagt

SEQ ID NO: 335180 - DNA, 19 bp, Homo sapiens
  siRNA target sequence for TFPI (NM_006287.3,599-617).
gtggatgcctgggcaatat

SEQ ID NO: 335181 - DNA, 19 bp, Homo sapiens
  siRNA target sequence for TFPI (NM_006287.3,607-625).
ctgggcaatatgaacaatt

SEQ ID NO: 335182 - DNA, 19 bp, Homo sapiens
  siRNA target sequence for TFPI (NM_006287.3,609-627).
gggcaatatgaacaatttt

SEQ ID NO: 335183 - DNA, 19 bp, Homo sapiens
  siRNA target sequence for TFPI (NM_006287.3,658-676).
gaagatggtccgaatggtt

SEQ ID NO: 335184 - DNA, 19 bp, Homo sapiens
  siRNA target sequence for TFPI (NM_006287.3,679-697).
caggtggataattatggaa

SEQ ID NO: 335185 - DNA, 19 bp, Homo sapiens
  siRNA target sequence for TFPI (NM_006287.3,703-721).
ctcaatgctgtgaataact

SEQ ID NO: 335186 - DNA, 19 bp, Homo sapiens
  siRNA target sequence for TFPI (NM_006287.3,749-767).
ccagcctttttgaatttca

SEQ ID NO: 335187 - DNA, 19 bp, Homo sapiens
  siRNA target sequence for TFPI (NM_006287.3,811-829).
cgtgccaatgagaacagat

SEQ ID NO: 335188 - DNA, 19 bp, Homo sapiens
  siRNA target sequence for TFPI (NM_006287.3,812-830).
gtgccaatgagaacagatt

SEQ ID NO: 335189 - DNA, 19 bp, Homo sapiens
  siRNA target sequence for TFPI (NM_006287.3,820-838).
gagaacagattctactaca

SEQ ID NO: 335190 - DNA, 19 bp, Homo sapiens
  siRNA target sequence for TFPI (NM_006287.3,822-840).
gaacagattctactacaat

SEQ ID NO: 335191 - DNA, 19 bp, Homo sapiens
  siRNA target sequence for TFPI (NM_006287.3,825-843).
cagattctactacaattca

SEQ ID NO: 335192 - DNA, 19 bp, Homo sapiens
  siRNA target sequence for TFPI (NM_006287.3,827-845).
gattctactacaattcagt

SEQ ID NO: 335193 - DNA, 19 bp, Homo sapiens
  siRNA target sequence for TFPI (NM_006287.3,831-849).
ctactacaattcagtcatt

SEQ ID NO: 335194 - DNA, 19 bp, Homo sapiens
  siRNA target sequence for TFPI (NM_006287.3,920-938).
gtctgagggcatgtaaaaa

SEQ ID NO: 335195 - DNA, 19 bp, Homo sapiens
  siRNA target sequence for TFPI (NM_006287.3,926-944).
gggcatgtaaaaaaggttt

SEQ ID NO: 335196 - DNA, 19 bp, Homo sapiens
  siRNA target sequence for TFPI (NM_006287.3,940-958).
ggtttcatccaaagaatat

SEQ ID NO: 335197 - DNA, 19 bp, Homo sapiens
  siRNA target sequence for RNF3 (NM_006315.3,486-504).
ggagctgcctggtgaagta

SEQ ID NO: 335198 - DNA, 19 bp, Homo sapiens
  siRNA target sequence for RNF3 (NM_006315.3,528-546).
ccacctgcaggattgtgat

SEQ ID NO: 335199 - DNA, 19 bp, Homo sapiens
  siRNA target sequence for RNF3 (NM_006315.3,581-599).
gacagaaccatgcaagata

SEQ ID NO: 335200 - DNA, 19 bp, Homo sapiens
  siRNA target sequence for RNF3 (NM_006315.3,583-601).
cagaaccatgcaagatatt

SEQ ID NO: 335201 - DNA, 19 bp, Homo sapiens
  siRNA target sequence for RNF3 (NM_006315.3,585-603).
gaaccatgcaagatattgt

SEQ ID NO: 335202 - DNA, 19 bp, Homo sapiens
  siRNA target sequence for RNF3 (NM_006315.3,588-606).
ccatgcaagatattgttta

SEQ ID NO: 335203 - DNA, 19 bp, Homo sapiens
  siRNA target sequence for RNF3 (NM_006315.3,647-665).
cagagggagttctatcaca

SEQ ID NO: 335204 - DNA, 19 bp, Homo sapiens
  siRNA target sequence for RNF3 (NM_006315.3,651-669).
gggagttctatcacaaatt

SEQ ID NO: 335205 - DNA, 19 bp, Homo sapiens
  siRNA target sequence for RNF3 (NM_006315.3,755-773).
gcagacgacagttcaaaca

SEQ ID NO: 335206 - DNA, 19 bp, Homo sapiens
  siRNA target sequence for RNF3 (NM_006315.3,756-774).
cagacgacagttcaaacaa

SEQ ID NO: 335207 - DNA, 19 bp, Homo sapiens
  siRNA target sequence for RNF3 (NM_006315.3,909-927).
cgaccgtcttgcatctgaa

SEQ ID NO: 335208 - DNA, 19 bp, Homo sapiens
  siRNA target sequence for RNF3 (NM_006315.3,947-965).
ctcaacctttcatccttta

SEQ ID NO: 335209 - DNA, 19 bp, Homo sapiens
  siRNA target sequence for RNF3 (NM_006315.3,1031-1049).
gtcactaggtggagattca

SEQ ID NO: 335210 - DNA, 19 bp, Homo sapiens
  siRNA target sequence for RNF3 (NM_006315.3,1035-1053).
ctaggtggagattcaagaa

SEQ ID NO: 335211 - DNA, 19 bp, Homo sapiens
  siRNA target sequence for IFI30 (NM_006332.3,248-266).
gcaccgcttgtcaatgtga

SEQ ID NO: 335212 - DNA, 19 bp, Homo sapiens
  siRNA target sequence for IFI30 (NM_006332.3,404-422).
ggcaggtgggagttcaagt

SEQ ID NO: 335213 - DNA, 19 bp, Homo sapiens
  siRNA target sequence for IFI30 (NM_006332.3,437-455).
gaggagtgcaaattcaaca

SEQ ID NO: 335214 - DNA, 19 bp, Homo sapiens
  siRNA target sequence for IFI30 (NM_006332.3,465-483).
cctgcgtgttggatgaact

SEQ ID NO: 335215 - DNA, 19 bp, Homo sapiens
  siRNA target sequence for IFI30 (NM_006332.3,466-484).
ctgcgtgttggatgaactt

SEQ ID NO: 335216 - DNA, 19 bp, Homo sapiens
  siRNA target sequence for IFI30 (NM_006332.3,497-515).
gccttcctgaccattgtct

SEQ ID NO: 335217 - DNA, 19 bp, Homo sapiens
  siRNA target sequence for IFI30 (NM_006332.3,579-597).
ggctgtcgccagacactat

SEQ ID NO: 335218 - DNA, 19 bp, Homo sapiens
  siRNA target sequence for IFI30 (NM_006332.3,581-599).
ctgtcgccagacactatca

SEQ ID NO: 335219 - DNA, 19 bp, Homo sapiens
  siRNA target sequence for C9orf60 (NM_006336.2,537-555).
ggctacatccggacatctt

SEQ ID NO: 335220 - DNA, 19 bp, Homo sapiens
  siRNA target sequence for C9orf60 (NM_006336.2,539-557).
ctacatccggacatcttct

SEQ ID NO: 335221 - DNA, 19 bp, Homo sapiens
  siRNA target sequence for C9orf60 (NM_006336.2,573-591).
gtgaccggctcgtcaatga

SEQ ID NO: 335222 - DNA, 19 bp, Homo sapiens
  siRNA target sequence for C9orf60 (NM_006336.2,577-595).
ccggctcgtcaatgagtat

SEQ ID NO: 335223 - DNA, 19 bp, Homo sapiens
  siRNA target sequence for C9orf60 (NM_006336.2,605-623).
gtgaacgctgcctgtaact

SEQ ID NO: 335224 - DNA, 19 bp, Homo sapiens
  siRNA target sequence for C9orf60 (NM_006336.2,847-865).
ctgtacaaacattttctat

SEQ ID NO: 335225 - DNA, 19 bp, Homo sapiens
  siRNA target sequence for C9orf60 (NM_006336.2,919-937).
ccaggtgctggttaaggat

SEQ ID NO: 335226 - DNA, 19 bp, Homo sapiens
  siRNA target sequence for C9orf60 (NM_006336.2,920-938).
caggtgctggttaaggatt

SEQ ID NO: 335227 - DNA, 19 bp, Homo sapiens
  siRNA target sequence for C9orf60 (NM_006336.2,1554-1572).
ccatcaacttgctttttga

SEQ ID NO: 335228 - DNA, 19 bp, Homo sapiens
  siRNA target sequence for C9orf60 (NM_006336.2,1633-1651).
cctcaagtgccacaaatat

SEQ ID NO: 335229 - DNA, 19 bp, Homo sapiens
  siRNA target sequence for C9orf60 (NM_006336.2,1811-1829).
ctgacgctctgcaacttca

SEQ ID NO: 335230 - DNA, 19 bp, Homo sapiens
  siRNA target sequence for C9orf60 (NM_006336.2,2118-2136).
gcgagatgttcctcaattt

SEQ ID NO: 335231 - DNA, 19 bp, Homo sapiens
  siRNA target sequence for C9orf60 (NM_006336.2,2243-2261).
ctgaggcctcaactaatga

SEQ ID NO: 335232 - DNA, 19 bp, Homo sapiens
  siRNA target sequence for C9orf60 (NM_006336.2,2245-2263).
gaggcctcaactaatgact

SEQ ID NO: 335233 - DNA, 19 bp, Homo sapiens
  siRNA target sequence for C9orf60 (NM_006336.2,2452-2470).
ctctcggagaaacatcaat

SEQ ID NO: 335234 - DNA, 19 bp, Homo sapiens
  siRNA target sequence for C9orf60 (NM_006336.2,2464-2482).
catcaattacaggtcattt

SEQ ID NO: 335235 - DNA, 19 bp, Homo sapiens
  siRNA target sequence for C9orf60 (NM_006336.2,2473-2491).
caggtcatttgaaccaatt

SEQ ID NO: 335236 - DNA, 19 bp, Homo sapiens
  siRNA target sequence for C9orf60 (NM_006336.2,2475-2493).
ggtcatttgaaccaattct

SEQ ID NO: 335237 - DNA, 19 bp, Homo sapiens
  siRNA target sequence for C9orf60 (NM_006336.2,2538-2556).
caacctgggccctgtataa

SEQ ID NO: 335238 - DNA, 19 bp, Homo sapiens
  siRNA target sequence for C9orf60 (NM_006336.2,2565-2583).
ctgtctacccggacaagta

SEQ ID NO: 335239 - DNA, 19 bp, Homo sapiens
  siRNA target sequence for C9orf60 (NM_006336.2,2567-2585).
gtctacccggacaagtact

SEQ ID NO: 335240 - DNA, 19 bp, Homo sapiens
  siRNA target sequence for C9orf60 (NM_006336.2,2615-2633).
ccccttctgagggacataa

SEQ ID NO: 335241 - DNA, 19 bp, Homo sapiens
  siRNA target sequence for C9orf60 (NM_006336.2,2617-2635).
ccttctgagggacataatt

SEQ ID NO: 335242 - DNA, 19 bp, Homo sapiens
  siRNA target sequence for PIBF1 (NM_006346.1,52-70).
ctggaatctgaagatatta

SEQ ID NO: 335243 - DNA, 19 bp, Homo sapiens
  siRNA target sequence for PIBF1 (NM_006346.1,83-101).
cagttcctacggatgatat

SEQ ID NO: 335244 - DNA, 19 bp, Homo sapiens
  siRNA target sequence for PIBF1 (NM_006346.1,85-103).
gttcctacggatgatattt

SEQ ID NO: 335245 - DNA, 19 bp, Homo sapiens
  siRNA target sequence for PIBF1 (NM_006346.1,88-106).
cctacggatgatatttcct

SEQ ID NO: 335246 - DNA, 19 bp, Homo sapiens
  siRNA target sequence for PIBF1 (NM_006346.1,115-133).
gagcgagagggcaaagtca

SEQ ID NO: 335247 - DNA, 19 bp, Homo sapiens
  siRNA target sequence for PIBF1 (NM_006346.1,134-152).
gaatcaccaggcagctaat

SEQ ID NO: 335248 - DNA, 19 bp, Homo sapiens
  siRNA target sequence for PIBF1 (NM_006346.1,138-156).
caccaggcagctaattgaa

SEQ ID NO: 335249 - DNA, 19 bp, Homo sapiens
  siRNA target sequence for PIBF1 (NM_006346.1,147-165).
gctaattgaacgaaaagaa

SEQ ID NO: 335250 - DNA, 19 bp, Homo sapiens
  siRNA target sequence for PIBF1 (NM_006346.1,157-175).
cgaaaagaactacttcata

SEQ ID NO: 335251 - DNA, 19 bp, Homo sapiens
  siRNA target sequence for PIBF1 (NM_006346.1,203-221).
cccagaaaactatgatgat

SEQ ID NO: 335252 - DNA, 19 bp, Homo sapiens
  siRNA target sequence for PIBF1 (NM_006346.1,216-234).
gatgatcgacaatttgaaa

SEQ ID NO: 335253 - DNA, 19 bp, Homo sapiens
  siRNA target sequence for PIBF1 (NM_006346.1,244-262).
cttacaaagattgaagaat

SEQ ID NO: 335254 - DNA, 19 bp, Homo sapiens
  siRNA target sequence for PIBF1 (NM_006346.1,298-316).
cagctactaacattgagat

SEQ ID NO: 335255 - DNA, 19 bp, Homo sapiens
  siRNA target sequence for PIBF1 (NM_006346.1,349-367).
gccagcaaatatcaagaat

SEQ ID NO: 335256 - DNA, 19 bp, Homo sapiens
  siRNA target sequence for PIBF1 (NM_006346.1,490-508).
gagcaatatattaaattaa

SEQ ID NO: 335257 - DNA, 19 bp, Homo sapiens
  siRNA target sequence for PIBF1 (NM_006346.1,557-575).
gcttctatgagctagtgaa

SEQ ID NO: 335258 - DNA, 19 bp, Homo sapiens
  siRNA target sequence for PIBF1 (NM_006346.1,558-576).
cttctatgagctagtgaat

SEQ ID NO: 335259 - DNA, 19 bp, Homo sapiens
  siRNA target sequence for PIBF1 (NM_006346.1,567-585).
gctagtgaatccattaaga

SEQ ID NO: 335260 - DNA, 19 bp, Homo sapiens
  siRNA target sequence for PIBF1 (NM_006346.1,568-586).
ctagtgaatccattaagaa

SEQ ID NO: 335261 - DNA, 19 bp, Homo sapiens
  siRNA target sequence for PIBF1 (NM_006346.1,674-692).
catatgaggaagatcgaaa

SEQ ID NO: 335262 - DNA, 19 bp, Homo sapiens
  siRNA target sequence for PIBF1 (NM_006346.1,682-700).
gaagatcgaaaaaactact

SEQ ID NO: 335263 - DNA, 19 bp, Homo sapiens
  siRNA target sequence for PIBF1 (NM_006346.1,774-792).
ctaccgtcaagagaactat

SEQ ID NO: 335264 - DNA, 19 bp, Homo sapiens
  siRNA target sequence for PIBF1 (NM_006346.1,777-795).
ccgtcaagagaactatgat

SEQ ID NO: 335265 - DNA, 19 bp, Homo sapiens
  siRNA target sequence for PIBF1 (NM_006346.1,778-796).
cgtcaagagaactatgata

SEQ ID NO: 335266 - DNA, 19 bp, Homo sapiens
  siRNA target sequence for PIBF1 (NM_006346.1,779-797).
gtcaagagaactatgataa

SEQ ID NO: 335267 - DNA, 19 bp, Homo sapiens
  siRNA target sequence for PIBF1 (NM_006346.1,817-835).
gcacttgaacaggaagtaa

SEQ ID NO: 335268 - DNA, 19 bp, Homo sapiens
  siRNA target sequence for PIBF1 (NM_006346.1,840-858).
gcttaggagaaaacatgaa

SEQ ID NO: 335269 - DNA, 19 bp, Homo sapiens
  siRNA target sequence for PIBF1 (NM_006346.1,870-888).
ctctcacatgattcaaaca

SEQ ID NO: 335270 - DNA, 19 bp, Homo sapiens
  siRNA target sequence for PIBF1 (NM_006346.1,872-890).
ctcacatgattcaaacaaa

SEQ ID NO: 335271 - DNA, 19 bp, Homo sapiens
  siRNA target sequence for PIBF1 (NM_006346.1,887-905).
caaaagaacgaagtgaatt

SEQ ID NO: 335272 - DNA, 19 bp, Homo sapiens
  siRNA target sequence for PIBF1 (NM_006346.1,1138-1156).
gaactagaacaaatcagat

SEQ ID NO: 335273 - DNA, 19 bp, Homo sapiens
  siRNA target sequence for PIBF1 (NM_006346.1,1230-1248).
ccgagaagcaagggataat

SEQ ID NO: 335274 - DNA, 19 bp, Homo sapiens
  siRNA target sequence for PIBF1 (NM_006346.1,1303-1321).
cacgatcagctcttagaca

SEQ ID NO: 335275 - DNA, 19 bp, Homo sapiens
  siRNA target sequence for PIBF1 (NM_006346.1,1322-1340).
ggtacagagaactacaact

SEQ ID NO: 335276 - DNA, 19 bp, Homo sapiens
  siRNA target sequence for PIBF1 (NM_006346.1,1352-1370).
gcaaagtaacagaatttct

SEQ ID NO: 335277 - DNA, 19 bp, Homo sapiens
  siRNA target sequence for PIBF1 (NM_006346.1,1486-1504).
gaggttttaaccaaagaat

SEQ ID NO: 335278 - DNA, 19 bp, Homo sapiens
  siRNA target sequence for PIBF1 (NM_006346.1,1513-1531).
ctccaagcctcttctgaaa

SEQ ID NO: 335279 - DNA, 19 bp, Homo sapiens
  siRNA target sequence for PIBF1 (NM_006346.1,1570-1588).
caagcaaggctagacattt

SEQ ID NO: 335280 - DNA, 19 bp, Homo sapiens
  siRNA target sequence for PIBF1 (NM_006346.1,1577-1595).
ggctagacatttatgagaa

SEQ ID NO: 335281 - DNA, 19 bp, Homo sapiens
  siRNA target sequence for PIBF1 (NM_006346.1,1656-1674).
ggctgaaagggttcttttt

SEQ ID NO: 335282 - DNA, 19 bp, Homo sapiens
  siRNA target sequence for PIBF1 (NM_006346.1,1677-1695).
ctacggctatggtgctaat

SEQ ID NO: 335283 - DNA, 19 bp, Homo sapiens
  siRNA target sequence for PIBF1 (NM_006346.1,1680-1698).
cggctatggtgctaatgtt

SEQ ID NO: 335284 - DNA, 19 bp, Homo sapiens
  siRNA target sequence for PIBF1 (NM_006346.1,1715-1733).
gacgactaaagcaaagtgt

SEQ ID NO: 335285 - DNA, 19 bp, Homo sapiens
  siRNA target sequence for PIBF1 (NM_006346.1,1741-1759).
gcaagaagagtgcttcaat

SEQ ID NO: 335286 - DNA, 19 bp, Homo sapiens
  siRNA target sequence for PIBF1 (NM_006346.1,1742-1760).
caagaagagtgcttcaatt

SEQ ID NO: 335287 - DNA, 19 bp, Homo sapiens
  siRNA target sequence for PIBF1 (NM_006346.1,1745-1763).
gaagagtgcttcaattaga

SEQ ID NO: 335288 - DNA, 19 bp, Homo sapiens
  siRNA target sequence for PIBF1 (NM_006346.1,1748-1766).
gagtgcttcaattagaaaa

SEQ ID NO: 335289 - DNA, 19 bp, Homo sapiens
  siRNA target sequence for PIBF1 (NM_006346.1,1799-1817).
catcgaaaggaccaagtaa

SEQ ID NO: 335290 - DNA, 19 bp, Homo sapiens
  siRNA target sequence for PIBF1 (NM_006346.1,1847-1865).
ccaattcgctattaaacca

SEQ ID NO: 335291 - DNA, 19 bp, Homo sapiens
  siRNA target sequence for PIBF1 (NM_006346.1,1875-1893).
gccttacaggtatctcatt

SEQ ID NO: 335292 - DNA, 19 bp, Homo sapiens
  siRNA target sequence for PIBF1 (NM_006346.1,1877-1895).
cttacaggtatctcattga

SEQ ID NO: 335293 - DNA, 19 bp, Homo sapiens
  siRNA target sequence for PIBF1 (NM_006346.1,1881-1899).
caggtatctcattgaatca

SEQ ID NO: 335294 - DNA, 19 bp, Homo sapiens
  siRNA target sequence for PIBF1 (NM_006346.1,1883-1901).
ggtatctcattgaatcagt

SEQ ID NO: 335295 - DNA, 19 bp, Homo sapiens
  siRNA target sequence for PIBF1 (NM_006346.1,1924-1942).
gattcactgacggaatcta

SEQ ID NO: 335296 - DNA, 19 bp, Homo sapiens
  siRNA target sequence for PIBF1 (NM_006346.1,2018-2036).
cattagatttagaacaact

SEQ ID NO: 335297 - DNA, 19 bp, Homo sapiens
  siRNA target sequence for PIBF1 (NM_006346.1,2077-2095).
ctcgttaagatgcatagta

SEQ ID NO: 335298 - DNA, 19 bp, Homo sapiens
  siRNA target sequence for PIBF1 (NM_006346.1,2079-2097).
cgttaagatgcatagtaaa

SEQ ID NO: 335299 - DNA, 19 bp, Homo sapiens
  siRNA target sequence for PIBF1 (NM_006346.1,2102-2120).
ctgagaacagcttacttct

SEQ ID NO: 335300 - DNA, 19 bp, Homo sapiens
  siRNA target sequence for PIBF1 (NM_006346.1,2112-2130).
cttacttctcactaaaaca

SEQ ID NO: 335301 - DNA, 19 bp, Homo sapiens
  siRNA target sequence for PIBF1 (NM_006346.1,2215-2233).
ccaacactctttactaaaa

SEQ ID NO: 335302 - DNA, 19 bp, Homo sapiens
  siRNA target sequence for PIBF1 (NM_006346.1,2239-2257).
gcacctgagtggtctaaga

SEQ ID NO: 335303 - DNA, 19 bp, Homo sapiens
  siRNA target sequence for ZNHIT1 (NM_006349.2,651-669).
gagactgcctcagtttgat

SEQ ID NO: 335304 - DNA, 19 bp, Homo sapiens
  siRNA target sequence for ZNHIT1 (NM_006349.2,676-694).
gcggacactggaaagaaaa

SEQ ID NO: 335305 - DNA, 19 bp, Homo sapiens
  siRNA target sequence for ZNHIT1 (NM_006349.2,699-717).
gaaaacccgaggtgatcat

SEQ ID NO: 335306 - DNA, 19 bp, Homo sapiens
  siRNA target sequence for ZNHIT1 (NM_006349.2,704-722).
cccgaggtgatcattttaa

SEQ ID NO: 335307 - DNA, 19 bp, Homo sapiens
  siRNA target sequence for ZNHIT1 (NM_006349.2,705-723).
ccgaggtgatcattttaaa

SEQ ID NO: 335308 - DNA, 19 bp, Homo sapiens
  siRNA target sequence for ZNHIT1 (NM_006349.2,707-725).
gaggtgatcattttaaact

SEQ ID NO: 335309 - DNA, 19 bp, Homo sapiens
  siRNA target sequence for ZNHIT1 (NM_006349.2,724-742).
cttcgcttccgaaaaaact

SEQ ID NO: 335310 - DNA, 19 bp, Homo sapiens
  siRNA target sequence for ZNHIT1 (NM_006349.2,728-746).
gcttccgaaaaaactttca

SEQ ID NO: 335311 - DNA, 19 bp, Homo sapiens
  siRNA target sequence for GA17 (NM_006360.2,101-119).
gagcttcgtgcttatctga

SEQ ID NO: 335312 - DNA, 19 bp, Homo sapiens
  siRNA target sequence for GA17 (NM_006360.2,103-121).
gcttcgtgcttatctgaaa

SEQ ID NO: 335313 - DNA, 19 bp, Homo sapiens
  siRNA target sequence for GA17 (NM_006360.2,104-122).
cttcgtgcttatctgaaat

SEQ ID NO: 335314 - DNA, 19 bp, Homo sapiens
  siRNA target sequence for GA17 (NM_006360.2,107-125).
cgtgcttatctgaaatcta

SEQ ID NO: 335315 - DNA, 19 bp, Homo sapiens
  siRNA target sequence for GA17 (NM_006360.2,108-126).
gtgcttatctgaaatctaa

SEQ ID NO: 335316 - DNA, 19 bp, Homo sapiens
  siRNA target sequence for GA17 (NM_006360.2,249-267).
gtgtggtatccctactctt

SEQ ID NO: 335317 - DNA, 19 bp, Homo sapiens
  siRNA target sequence for GA17 (NM_006360.2,286-304).
gcaagaagctttgattgaa

SEQ ID NO: 335318 - DNA, 19 bp, Homo sapiens
  siRNA target sequence for GA17 (NM_006360.2,377-395).
cttttccacgggatggata

SEQ ID NO: 335319 - DNA, 19 bp, Homo sapiens
  siRNA target sequence for GA17 (NM_006360.2,382-400).
ccacgggatggataagaat

SEQ ID NO: 335320 - DNA, 19 bp, Homo sapiens
  siRNA target sequence for GA17 (NM_006360.2,383-401).
cacgggatggataagaata

SEQ ID NO: 335321 - DNA, 19 bp, Homo sapiens
  siRNA target sequence for GA17 (NM_006360.2,479-497).
gagctggatcaagttagaa

SEQ ID NO: 335322 - DNA, 19 bp, Homo sapiens
  siRNA target sequence for GA17 (NM_006360.2,535-553).
gcacacccttttaagacta

SEQ ID NO: 335323 - DNA, 19 bp, Homo sapiens
  siRNA target sequence for GA17 (NM_006360.2,538-556).
cacccttttaagactactt

SEQ ID NO: 335324 - DNA, 19 bp, Homo sapiens
  siRNA target sequence for GA17 (NM_006360.2,540-558).
cccttttaagactacttta

SEQ ID NO: 335325 - DNA, 19 bp, Homo sapiens
  siRNA target sequence for GA17 (NM_006360.2,541-559).
ccttttaagactactttat

SEQ ID NO: 335326 - DNA, 19 bp, Homo sapiens
  siRNA target sequence for GA17 (NM_006360.2,563-581).
gcacttgtggattgtaaga

SEQ ID NO: 335327 - DNA, 19 bp, Homo sapiens
  siRNA target sequence for GA17 (NM_006360.2,585-603).
gtgatgctgcttcaaaagt

SEQ ID NO: 335328 - DNA, 19 bp, Homo sapiens
  siRNA target sequence for GA17 (NM_006360.2,587-605).
gatgctgcttcaaaagtca

SEQ ID NO: 335329 - DNA, 19 bp, Homo sapiens
  siRNA target sequence for GA17 (NM_006360.2,611-629).
gaattgctcggaagttaca

SEQ ID NO: 335330 - DNA, 19 bp, Homo sapiens
  siRNA target sequence for GA17 (NM_006360.2,672-690).
gtattgtacgagcattgaa

SEQ ID NO: 335331 - DNA, 19 bp, Homo sapiens
  siRNA target sequence for GA17 (NM_006360.2,681-699).
gagcattgaaagatccaaa

SEQ ID NO: 335332 - DNA, 19 bp, Homo sapiens
  siRNA target sequence for GA17 (NM_006360.2,688-706).
gaaagatccaaatgcattt

SEQ ID NO: 335333 - DNA, 19 bp, Homo sapiens
  siRNA target sequence for GA17 (NM_006360.2,748-766).
ggaaggcgagcttattcat

SEQ ID NO: 335334 - DNA, 19 bp, Homo sapiens
  siRNA target sequence for GA17 (NM_006360.2,758-776).
cttattcatgatcttttaa

SEQ ID NO: 335335 - DNA, 19 bp, Homo sapiens
  siRNA target sequence for GA17 (NM_006360.2,764-782).
catgatcttttaaccattt

SEQ ID NO: 335336 - DNA, 19 bp, Homo sapiens
  siRNA target sequence for GA17 (NM_006360.2,789-807).
gtgctaaattggcatcata

SEQ ID NO: 335337 - DNA, 19 bp, Homo sapiens
  siRNA target sequence for GA17 (NM_006360.2,792-810).
ctaaattggcatcatatgt

SEQ ID NO: 335338 - DNA, 19 bp, Homo sapiens
  siRNA target sequence for GA17 (NM_006360.2,799-817).
ggcatcatatgtcaagttt

SEQ ID NO: 335339 - DNA, 19 bp, Homo sapiens
  siRNA target sequence for GA17 (NM_006360.2,874-892).
ggcaaaaatgagactactt

SEQ ID NO: 335340 - DNA, 19 bp, Homo sapiens
  siRNA target sequence for GA17 (NM_006360.2,902-920).
ggaatggcagtagaaaata

SEQ ID NO: 335341 - DNA, 19 bp, Homo sapiens
  siRNA target sequence for GA17 (NM_006360.2,937-955).
cacaatgcagcaagaactt

SEQ ID NO: 335342 - DNA, 19 bp, Homo sapiens
  siRNA target sequence for GA17 (NM_006360.2,943-961).
gcagcaagaacttcagatt

SEQ ID NO: 335343 - DNA, 19 bp, Homo sapiens
  siRNA target sequence for GA17 (NM_006360.2,958-976).
gattggagctgatgatgtt

SEQ ID NO: 335344 - DNA, 19 bp, Homo sapiens
  siRNA target sequence for GA17 (NM_006360.2,986-1004).
gttattgacgccgtaagaa

SEQ ID NO: 335345 - DNA, 19 bp, Homo sapiens
  siRNA target sequence for GA17 (NM_006360.2,996-1014).
ccgtaagaactaaaatggt

SEQ ID NO: 335346 - DNA, 19 bp, Homo sapiens
  siRNA target sequence for GA17 (NM_006360.2,1012-1030).
ggtctactgcaaaattgat

SEQ ID NO: 335347 - DNA, 19 bp, Homo sapiens
  siRNA target sequence for GA17 (NM_006360.2,1063-1081).
cacacatcggacatttgga

SEQ ID NO: 335348 - DNA, 19 bp, Homo sapiens
  siRNA target sequence for CROC4 (NM_006365.1,124-142).
ctgactgaggatctcataa

SEQ ID NO: 335349 - DNA, 19 bp, Homo sapiens
  siRNA target sequence for CROC4 (NM_006365.1,130-148).
gaggatctcataacattta

SEQ ID NO: 335350 - DNA, 19 bp, Homo sapiens
  siRNA target sequence for CROC4 (NM_006365.1,383-401).
ctcaagtccccgatgtgat

SEQ ID NO: 335351 - DNA, 19 bp, Homo sapiens
  siRNA target sequence for CROC4 (NM_006365.1,481-499).
gatctatatggctatagca

SEQ ID NO: 335352 - DNA, 19 bp, Homo sapiens
  siRNA target sequence for CROC4 (NM_006365.1,517-535).
ggcttggcatggctaagtt

SEQ ID NO: 335353 - DNA, 19 bp, Homo sapiens
  siRNA target sequence for CROC4 (NM_006365.1,529-547).
ctaagttgggagaccaaaa

SEQ ID NO: 335354 - DNA, 19 bp, Homo sapiens
  siRNA target sequence for MUF1 (NM_006369.3,509-527).
cctacctctgctcaatata

SEQ ID NO: 335355 - DNA, 19 bp, Homo sapiens
  siRNA target sequence for MUF1 (NM_006369.3,510-528).
ctacctctgctcaatatat

SEQ ID NO: 335356 - DNA, 19 bp, Homo sapiens
  siRNA target sequence for MUF1 (NM_006369.3,592-610).
gccgactctgggatgaact

SEQ ID NO: 335357 - DNA, 19 bp, Homo sapiens
  siRNA target sequence for MUF1 (NM_006369.3,649-667).
gttggcgagccaagtttat

SEQ ID NO: 335358 - DNA, 19 bp, Homo sapiens
  siRNA target sequence for MUF1 (NM_006369.3,652-670).
ggcgagccaagtttatgga

SEQ ID NO: 335359 - DNA, 19 bp, Homo sapiens
  siRNA target sequence for MUF1 (NM_006369.3,994-1012).
ctgagtcagcccttttcat

SEQ ID NO: 335360 - DNA, 19 bp, Homo sapiens
  siRNA target sequence for MUF1 (NM_006369.3,1113-1131).
gatgaagggtccctcttat

SEQ ID NO: 335361 - DNA, 19 bp, Homo sapiens
  siRNA target sequence for MUF1 (NM_006369.3,1510-1528).
ctgaagacctgtatgactt

SEQ ID NO: 335362 - DNA, 19 bp, Homo sapiens
  siRNA target sequence for MUF1 (NM_006369.3,1518-1536).
ctgtatgacttcgttttta

SEQ ID NO: 335363 - DNA, 19 bp, Homo sapiens
  siRNA target sequence for MUF1 (NM_006369.3,1586-1604).
ggcttgtggagctttggat

SEQ ID NO: 335364 - DNA, 19 bp, Homo sapiens
  siRNA target sequence for MUF1 (NM_006369.3,1776-1794).
ggcctgggctctaacatct

SEQ ID NO: 335365 - DNA, 19 bp, Homo sapiens
  siRNA target sequence for MUF1 (NM_006369.3,1777-1795).
gcctgggctctaacatctt

SEQ ID NO: 335366 - DNA, 19 bp, Homo sapiens
  siRNA target sequence for MUF1 (NM_006369.3,1928-1946).
gctacgggtcctctctatt

SEQ ID NO: 335367 - DNA, 19 bp, Homo sapiens
  siRNA target sequence for MUF1 (NM_006369.3,2224-2242).
gactgagcttccatgacat

SEQ ID NO: 335368 - DNA, 19 bp, Homo sapiens
  siRNA target sequence for MUF1 (NM_006369.3,2228-2246).
gagcttccatgacatgaat

SEQ ID NO: 335369 - DNA, 19 bp, Homo sapiens
  siRNA target sequence for MUF1 (NM_006369.3,2270-2288).
gctctttttgctacagaat

SEQ ID NO: 335370 - DNA, 19 bp, Homo sapiens
  siRNA target sequence for MUF1 (NM_006369.3,2289-2307).
ctgactctgcaagagatta

SEQ ID NO: 335371 - DNA, 19 bp, Homo sapiens
  siRNA target sequence for MUF1 (NM_006369.3,2293-2311).
ctctgcaagagattacctt

SEQ ID NO: 335372 - DNA, 19 bp, Homo sapiens
  siRNA target sequence for MUF1 (NM_006369.3,2333-2351).
gaagcgcccagcccaattt

SEQ ID NO: 335373 - DNA, 19 bp, Homo sapiens
  siRNA target sequence for MUF1 (NM_006369.3,2454-2472).
gttttctcagaggattcat

SEQ ID NO: 335374 - DNA, 19 bp, Homo sapiens
  siRNA target sequence for MUF1 (NM_006369.3,2577-2595).
cacctgcgcctcttccaaa

SEQ ID NO: 335375 - DNA, 19 bp, Homo sapiens
  siRNA target sequence for MUF1 (NM_006369.3,2686-2704).
cccaggccttcgcagatta

SEQ ID NO: 335376 - DNA, 19 bp, Homo sapiens
  siRNA target sequence for MUF1 (NM_006369.3,2690-2708).
ggccttcgcagattatgtt

SEQ ID NO: 335377 - DNA, 19 bp, Homo sapiens
  siRNA target sequence for MUF1 (NM_006369.3,2691-2709).
gccttcgcagattatgtta

SEQ ID NO: 335378 - DNA, 19 bp, Homo sapiens
  siRNA target sequence for SSSCA1 (NM_006396.1,127-145).
ggctcatgggcgactatct

SEQ ID NO: 335379 - DNA, 19 bp, Homo sapiens
  siRNA target sequence for SSSCA1 (NM_006396.1,194-212).
gatcctcctccaagacaaa

SEQ ID NO: 335380 - DNA, 19 bp, Homo sapiens
  siRNA target sequence for SSSCA1 (NM_006396.1,207-225).
gacaaacagcggaaaatct

SEQ ID NO: 335381 - DNA, 19 bp, Homo sapiens
  siRNA target sequence for SSSCA1 (NM_006396.1,248-266).
cgactcagacgtggataaa

SEQ ID NO: 335382 - DNA, 19 bp, Homo sapiens
  siRNA target sequence for SSSCA1 (NM_006396.1,445-463).
ctgtgcctccaaatacaga

SEQ ID NO: 335383 - DNA, 19 bp, Homo sapiens
  siRNA target sequence for SSSCA1 (NM_006396.1,451-469).
ctccaaatacagatgtcat

SEQ ID NO: 335384 - DNA, 19 bp, Homo sapiens
  siRNA target sequence for ANP32B (NM_006401.1,277-295).
gtcttggacaattgcaaat

SEQ ID NO: 335385 - DNA, 19 bp, Homo sapiens
  siRNA target sequence for ANP32B (NM_006401.1,282-300).
ggacaattgcaaatcaaat

SEQ ID NO: 335386 - DNA, 19 bp, Homo sapiens
  siRNA target sequence for HBXIP (NM_006402.2,165-183).
gacgttgcaccgtgatcaa

SEQ ID NO: 335387 - DNA, 19 bp, Homo sapiens
  siRNA target sequence for HBXIP (NM_006402.2,167-185).
cgttgcaccgtgatcaatt

SEQ ID NO: 335388 - DNA, 19 bp, Homo sapiens
  siRNA target sequence for HBXIP (NM_006402.2,168-186).
gttgcaccgtgatcaattt

SEQ ID NO: 335389 - DNA, 19 bp, Homo sapiens
  siRNA target sequence for HBXIP (NM_006402.2,472-490).
ctctgaccccactgatatt

SEQ ID NO: 335390 - DNA, 19 bp, Homo sapiens
  siRNA target sequence for HBXIP (NM_006402.2,491-509).
cctgtggtgtgtctagaat

SEQ ID NO: 335391 - DNA, 19 bp, Homo sapiens
  siRNA target sequence for HBXIP (NM_006402.2,499-517).
gtgtctagaatcagataat

SEQ ID NO: 335392 - DNA, 19 bp, Homo sapiens
  siRNA target sequence for HBXIP (NM_006402.2,512-530).
gataatgggaacattatga

SEQ ID NO: 335393 - DNA, 19 bp, Homo sapiens
  siRNA target sequence for JWA (NM_006407.2,315-333).
gtgttcacagggtttgtgt

SEQ ID NO: 335394 - DNA, 19 bp, Homo sapiens
  siRNA target sequence for JWA (NM_006407.2,330-348).
gtgtgggcagcccacaata

SEQ ID NO: 335395 - DNA, 19 bp, Homo sapiens
  siRNA target sequence for JWA (NM_006407.2,354-372).
gtccttcgccggatgaaga

SEQ ID NO: 335396 - DNA, 19 bp, Homo sapiens
  siRNA target sequence for JWA (NM_006407.2,402-420).
gtcatgttggcgagctatt

SEQ ID NO: 335397 - DNA, 19 bp, Homo sapiens
  siRNA target sequence for JWA (NM_006407.2,411-429).
gcgagctatttccttatct

SEQ ID NO: 335398 - DNA, 19 bp, Homo sapiens
  siRNA target sequence for JWA (NM_006407.2,439-457).
gaggagtcatggtctttgt

SEQ ID NO: 335399 - DNA, 19 bp, Homo sapiens
  siRNA target sequence for JWA (NM_006407.2,479-497).
gctgttgatgtttatccat

SEQ ID NO: 335400 - DNA, 19 bp, Homo sapiens
  siRNA target sequence for JWA (NM_006407.2,508-526).
gacttcggaacctcaagaa

SEQ ID NO: 335401 - DNA, 19 bp, Homo sapiens
  siRNA target sequence for JWA (NM_006407.2,510-528).
cttcggaacctcaagaaca

SEQ ID NO: 335402 - DNA, 19 bp, Homo sapiens
  siRNA target sequence for AGR2 (NM_006408.2,197-215).
gttggggtgaccaactcat

SEQ ID NO: 335403 - DNA, 19 bp, Homo sapiens
  siRNA target sequence for AGR2 (NM_006408.2,299-317).
gcccacacagtcaagcttt

SEQ ID NO: 335404 - DNA, 19 bp, Homo sapiens
  siRNA target sequence for AGR2 (NM_006408.2,300-318).
cccacacagtcaagcttta

SEQ ID NO: 335405 - DNA, 19 bp, Homo sapiens
  siRNA target sequence for AGR2 (NM_006408.2,301-319).
ccacacagtcaagctttaa

SEQ ID NO: 335406 - DNA, 19 bp, Homo sapiens
  siRNA target sequence for AGR2 (NM_006408.2,372-390).
cctcctcaatctggtttat

SEQ ID NO: 335407 - DNA, 19 bp, Homo sapiens
  siRNA target sequence for AGR2 (NM_006408.2,432-450).
ccccaggattatgtttgtt

SEQ ID NO: 335408 - DNA, 19 bp, Homo sapiens
  siRNA target sequence for AGR2 (NM_006408.2,453-471).
cccatctctgacagttaga

SEQ ID NO: 335409 - DNA, 19 bp, Homo sapiens
  siRNA target sequence for AGR2 (NM_006408.2,494-512).
caaatcgtctctatgctta

SEQ ID NO: 335410 - DNA, 19 bp, Homo sapiens
  siRNA target sequence for SLC35A1 (NM_006416.2,34-52).
gccccgagagacaatgtca

SEQ ID NO: 335411 - DNA, 19 bp, Homo sapiens
  siRNA target sequence for SLC35A1 (NM_006416.2,38-56).
cgagagacaatgtcacttt

SEQ ID NO: 335412 - DNA, 19 bp, Homo sapiens
  siRNA target sequence for SLC35A1 (NM_006416.2,39-57).
gagagacaatgtcacttta

SEQ ID NO: 335413 - DNA, 19 bp, Homo sapiens
  siRNA target sequence for SLC35A1 (NM_006416.2,41-59).
gagacaatgtcactttatt

SEQ ID NO: 335414 - DNA, 19 bp, Homo sapiens
  siRNA target sequence for SLC35A1 (NM_006416.2,51-69).
cactttattattcaagtta

SEQ ID NO: 335415 - DNA, 19 bp, Homo sapiens
  siRNA target sequence for SLC35A1 (NM_006416.2,91-109).
ctgatggctgcagtctata

SEQ ID NO: 335416 - DNA, 19 bp, Homo sapiens
  siRNA target sequence for SLC35A1 (NM_006416.2,100-118).
gcagtctataccatagctt

SEQ ID NO: 335417 - DNA, 19 bp, Homo sapiens
  siRNA target sequence for SLC35A1 (NM_006416.2,111-129).
catagctttaagatacaca

SEQ ID NO: 335418 - DNA, 19 bp, Homo sapiens
  siRNA target sequence for SLC35A1 (NM_006416.2,158-176).
caaccacagccgtgtgtat

SEQ ID NO: 335419 - DNA, 19 bp, Homo sapiens
  siRNA target sequence for SLC35A1 (NM_006416.2,162-180).
cacagccgtgtgtatcaca

SEQ ID NO: 335420 - DNA, 19 bp, Homo sapiens
  siRNA target sequence for SLC35A1 (NM_006416.2,168-186).
cgtgtgtatcacagaagtt

SEQ ID NO: 335421 - DNA, 19 bp, Homo sapiens
  siRNA target sequence for SLC35A1 (NM_006416.2,169-187).
gtgtgtatcacagaagtta

SEQ ID NO: 335422 - DNA, 19 bp, Homo sapiens
  siRNA target sequence for SLC35A1 (NM_006416.2,173-191).
gtatcacagaagttataaa

SEQ ID NO: 335423 - DNA, 19 bp, Homo sapiens
  siRNA target sequence for SLC35A1 (NM_006416.2,179-197).
cagaagttataaagttatt

SEQ ID NO: 335424 - DNA, 19 bp, Homo sapiens
  siRNA target sequence for SLC35A1 (NM_006416.2,198-216).
gctaagtgtgggaatttta

SEQ ID NO: 335425 - DNA, 19 bp, Homo sapiens
  siRNA target sequence for SLC35A1 (NM_006416.2,227-245).
ctggtagtctgggtagatt

SEQ ID NO: 335426 - DNA, 19 bp, Homo sapiens
  siRNA target sequence for SLC35A1 (NM_006416.2,229-247).
ggtagtctgggtagattca

SEQ ID NO: 335427 - DNA, 19 bp, Homo sapiens
  siRNA target sequence for SLC35A1 (NM_006416.2,230-248).
gtagtctgggtagattcaa

SEQ ID NO: 335428 - DNA, 19 bp, Homo sapiens
  siRNA target sequence for SLC35A1 (NM_006416.2,297-315).
gttaagtgtgccatcgtta

SEQ ID NO: 335429 - DNA, 19 bp, Homo sapiens
  siRNA target sequence for SLC35A1 (NM_006416.2,399-417).
gattccgtgtactgcttta

SEQ ID NO: 335430 - DNA, 19 bp, Homo sapiens
  siRNA target sequence for SLC35A1 (NM_006416.2,403-421).
ccgtgtactgctttatgca

SEQ ID NO: 335431 - DNA, 19 bp, Homo sapiens
  siRNA target sequence for SLC35A1 (NM_006416.2,412-430).
gctttatgcactgttttaa

SEQ ID NO: 335432 - DNA, 19 bp, Homo sapiens
  siRNA target sequence for SLC35A1 (NM_006416.2,413-431).
ctttatgcactgttttaat

SEQ ID NO: 335433 - DNA, 19 bp, Homo sapiens
  siRNA target sequence for SLC35A1 (NM_006416.2,438-456).
ccggacactcagcaaatta

SEQ ID NO: 335434 - DNA, 19 bp, Homo sapiens
  siRNA target sequence for SLC35A1 (NM_006416.2,461-479).
gggtttcagtttttatgct

SEQ ID NO: 335435 - DNA, 19 bp, Homo sapiens
  siRNA target sequence for SLC35A1 (NM_006416.2,556-574).
gggtttggcgctatagcta

SEQ ID NO: 335436 - DNA, 19 bp, Homo sapiens
  siRNA target sequence for SLC35A1 (NM_006416.2,557-575).
ggtttggcgctatagctat

SEQ ID NO: 335437 - DNA, 19 bp, Homo sapiens
  siRNA target sequence for SLC35A1 (NM_006416.2,558-576).
gtttggcgctatagctatt

SEQ ID NO: 335438 - DNA, 19 bp, Homo sapiens
  siRNA target sequence for SLC35A1 (NM_006416.2,592-610).
ggatttgcaggagtatatt

SEQ ID NO: 335439 - DNA, 19 bp, Homo sapiens
  siRNA target sequence for SLC35A1 (NM_006416.2,619-637).
gttttaaagagttcagata

SEQ ID NO: 335440 - DNA, 19 bp, Homo sapiens
  siRNA target sequence for SLC35A1 (NM_006416.2,653-671).
gaaacattcaaatgtatct

SEQ ID NO: 335441 - DNA, 19 bp, Homo sapiens
  siRNA target sequence for SLC35A1 (NM_006416.2,666-684).
gtatctatcagggattatt

SEQ ID NO: 335442 - DNA, 19 bp, Homo sapiens
  siRNA target sequence for SLC35A1 (NM_006416.2,689-707).
cattagctggcgtctactt

SEQ ID NO: 335443 - DNA, 19 bp, Homo sapiens
  siRNA target sequence for SLC35A1 (NM_006416.2,806-824).
cttctgttgtggttaagta

SEQ ID NO: 335444 - DNA, 19 bp, Homo sapiens
  siRNA target sequence for SLC35A1 (NM_006416.2,875-893).
ccaccattgcttcagtaat

SEQ ID NO: 335445 - DNA, 19 bp, Homo sapiens
  siRNA target sequence for SLC35A1 (NM_006416.2,878-896).
ccattgcttcagtaatgct

SEQ ID NO: 335446 - DNA, 19 bp, Homo sapiens
  siRNA target sequence for SLC35A1 (NM_006416.2,927-945).
cctgggtactcttcttgta

SEQ ID NO: 335447 - DNA, 19 bp, Homo sapiens
  siRNA target sequence for SLC35A1 (NM_006416.2,928-946).
ctgggtactcttcttgtat

SEQ ID NO: 335448 - DNA, 19 bp, Homo sapiens
  siRNA target sequence for SLC35A1 (NM_006416.2,930-948).
gggtactcttcttgtatgt

SEQ ID NO: 335449 - DNA, 19 bp, Homo sapiens
  siRNA target sequence for IFI44 (NM_006417.2,155-173).
gcggcttagccttctctat

SEQ ID NO: 335450 - DNA, 19 bp, Homo sapiens
  siRNA target sequence for IFI44 (NM_006417.2,156-174).
cggcttagccttctctata

SEQ ID NO: 335451 - DNA, 19 bp, Homo sapiens
  siRNA target sequence for IFI44 (NM_006417.2,190-208).
gattccgtaatggagtttt

SEQ ID NO: 335452 - DNA, 19 bp, Homo sapiens
  siRNA target sequence for IFI44 (NM_006417.2,194-212).
ccgtaatggagttttgctt

SEQ ID NO: 335453 - DNA, 19 bp, Homo sapiens
  siRNA target sequence for IFI44 (NM_006417.2,209-227).
gcttgacagatgttgtaat

SEQ ID NO: 335454 - DNA, 19 bp, Homo sapiens
  siRNA target sequence for IFI44 (NM_006417.2,233-251).
gcctactctaacagtgatt

SEQ ID NO: 335455 - DNA, 19 bp, Homo sapiens
  siRNA target sequence for IFI44 (NM_006417.2,330-348).
gcacttcaagatactaaaa

SEQ ID NO: 335456 - DNA, 19 bp, Homo sapiens
  siRNA target sequence for IFI44 (NM_006417.2,331-349).
cacttcaagatactaaaat

SEQ ID NO: 335457 - DNA, 19 bp, Homo sapiens
  siRNA target sequence for IFI44 (NM_006417.2,359-377).
gaaactaggactatgtaca

SEQ ID NO: 335458 - DNA, 19 bp, Homo sapiens
  siRNA target sequence for IFI44 (NM_006417.2,389-407).
gttttgttgtgatgttaca

SEQ ID NO: 335459 - DNA, 19 bp, Homo sapiens
  siRNA target sequence for IFI44 (NM_006417.2,399-417).
gatgttacaaaatataact

SEQ ID NO: 335460 - DNA, 19 bp, Homo sapiens
  siRNA target sequence for IFI44 (NM_006417.2,421-439).
caactaatttccagataga

SEQ ID NO: 335461 - DNA, 19 bp, Homo sapiens
  siRNA target sequence for IFI44 (NM_006417.2,492-510).
cttgctcaaaattgtacta

SEQ ID NO: 335462 - DNA, 19 bp, Homo sapiens
  siRNA target sequence for IFI44 (NM_006417.2,495-513).
gctcaaaattgtactatct

SEQ ID NO: 335463 - DNA, 19 bp, Homo sapiens
  siRNA target sequence for IFI44 (NM_006417.2,522-540).
gattatgaagtttttcgat

SEQ ID NO: 335464 - DNA, 19 bp, Homo sapiens
  siRNA target sequence for IFI44 (NM_006417.2,531-549).
gtttttcgatgcgaagatt

SEQ ID NO: 335465 - DNA, 19 bp, Homo sapiens
  siRNA target sequence for IFI44 (NM_006417.2,600-618).
ctgtctgccttgagaactt

SEQ ID NO: 335466 - DNA, 19 bp, Homo sapiens
  siRNA target sequence for IFI44 (NM_006417.2,630-648).
ggatccctggttcaacaaa

SEQ ID NO: 335467 - DNA, 19 bp, Homo sapiens
  siRNA target sequence for IFI44 (NM_006417.2,635-653).
cctggttcaacaaatacga

SEQ ID NO: 335468 - DNA, 19 bp, Homo sapiens
  siRNA target sequence for IFI44 (NM_006417.2,659-677).
gctgctgggtccaattgga

SEQ ID NO: 335469 - DNA, 19 bp, Homo sapiens
  siRNA target sequence for IFI44 (NM_006417.2,746-764).
ggtgggcactaatacaact

SEQ ID NO: 335470 - DNA, 19 bp, Homo sapiens
  siRNA target sequence for IFI44 (NM_006417.2,763-781).
ctgggatatctgagaagta

SEQ ID NO: 335471 - DNA, 19 bp, Homo sapiens
  siRNA target sequence for IFI44 (NM_006417.2,765-783).
gggatatctgagaagtata

SEQ ID NO: 335472 - DNA, 19 bp, Homo sapiens
  siRNA target sequence for IFI44 (NM_006417.2,774-792).
gagaagtataggacatact

SEQ ID NO: 335473 - DNA, 19 bp, Homo sapiens
  siRNA target sequence for IFI44 (NM_006417.2,776-794).
gaagtataggacatactct

SEQ ID NO: 335474 - DNA, 19 bp, Homo sapiens
  siRNA target sequence for IFI44 (NM_006417.2,784-802).
ggacatactctattagaga

SEQ ID NO: 335475 - DNA, 19 bp, Homo sapiens
  siRNA target sequence for IFI44 (NM_006417.2,877-895).
gcagggatgacatattcta

SEQ ID NO: 335476 - DNA, 19 bp, Homo sapiens
  siRNA target sequence for IFI44 (NM_006417.2,880-898).
gggatgacatattctatat

SEQ ID NO: 335477 - DNA, 19 bp, Homo sapiens
  siRNA target sequence for IFI44 (NM_006417.2,905-923).
cggtaacattcgtgataga

SEQ ID NO: 335478 - DNA, 19 bp, Homo sapiens
  siRNA target sequence for IFI44 (NM_006417.2,906-924).
ggtaacattcgtgatagat

SEQ ID NO: 335479 - DNA, 19 bp, Homo sapiens
  siRNA target sequence for IFI44 (NM_006417.2,907-925).
gtaacattcgtgatagata

SEQ ID NO: 335480 - DNA, 19 bp, Homo sapiens
  siRNA target sequence for IFI44 (NM_006417.2,915-933).
cgtgatagataccagttta

SEQ ID NO: 335481 - DNA, 19 bp, Homo sapiens
  siRNA target sequence for IFI44 (NM_006417.2,916-934).
gtgatagataccagtttaa

SEQ ID NO: 335482 - DNA, 19 bp, Homo sapiens
  siRNA target sequence for IFI44 (NM_006417.2,927-945).
cagtttaatcccatggaat

SEQ ID NO: 335483 - DNA, 19 bp, Homo sapiens
  siRNA target sequence for IFI44 (NM_006417.2,936-954).
cccatggaatcaatcaaat

SEQ ID NO: 335484 - DNA, 19 bp, Homo sapiens
  siRNA target sequence for IFI44 (NM_006417.2,938-956).
catggaatcaatcaaatta

SEQ ID NO: 335485 - DNA, 19 bp, Homo sapiens
  siRNA target sequence for IFI44 (NM_006417.2,1023-1041).
gatgccagctctattcaat

SEQ ID NO: 335486 - DNA, 19 bp, Homo sapiens
  siRNA target sequence for IFI44 (NM_006417.2,1026-1044).
gccagctctattcaatact

SEQ ID NO: 335487 - DNA, 19 bp, Homo sapiens
  siRNA target sequence for IFI44 (NM_006417.2,1046-1064).
ctcctctcagatgatagta

SEQ ID NO: 335488 - DNA, 19 bp, Homo sapiens
  siRNA target sequence for IFI44 (NM_006417.2,1131-1149).
gtggatagcatggatttga

SEQ ID NO: 335489 - DNA, 19 bp, Homo sapiens
  siRNA target sequence for IFI44 (NM_006417.2,1161-1179).
gaccttatagaaatagaga

SEQ ID NO: 335490 - DNA, 19 bp, Homo sapiens
  siRNA target sequence for IFI44 (NM_006417.2,1244-1262).
catctcggtggttagcaat

SEQ ID NO: 335491 - DNA, 19 bp, Homo sapiens
  siRNA target sequence for IFI44 (NM_006417.2,1247-1265).
ctcggtggttagcaattat

SEQ ID NO: 335492 - DNA, 19 bp, Homo sapiens
  siRNA target sequence for IFI44 (NM_006417.2,1251-1269).
gtggttagcaattattcct

SEQ ID NO: 335493 - DNA, 19 bp, Homo sapiens
  siRNA target sequence for IFI44 (NM_006417.2,1280-1298).
gctggaccctgtaaaggat

SEQ ID NO: 335494 - DNA, 19 bp, Homo sapiens
  siRNA target sequence for IFI44 (NM_006417.2,1314-1332).
gctctgagacgaatgctat

SEQ ID NO: 335495 - DNA, 19 bp, Homo sapiens
  siRNA target sequence for IFI44 (NM_006417.2,1368-1386).
gagcaaatagggaatctaa

SEQ ID NO: 335496 - DNA, 19 bp, Homo sapiens
  siRNA target sequence for GW112 (NM_006418.3,69-87).
ggatgtgggacctccaatt

SEQ ID NO: 335497 - DNA, 19 bp, Homo sapiens
  siRNA target sequence for GW112 (NM_006418.3,293-311).
gagtggaacgcttggaatt

SEQ ID NO: 335498 - DNA, 19 bp, Homo sapiens
  siRNA target sequence for GW112 (NM_006418.3,362-380).
gggaatatgtccaattaat

SEQ ID NO: 335499 - DNA, 19 bp, Homo sapiens
  siRNA target sequence for GW112 (NM_006418.3,363-381).
ggaatatgtccaattaatt

SEQ ID NO: 335500 - DNA, 19 bp, Homo sapiens
  siRNA target sequence for GW112 (NM_006418.3,364-382).
gaatatgtccaattaatta

SEQ ID NO: 335501 - DNA, 19 bp, Homo sapiens
  siRNA target sequence for GW112 (NM_006418.3,413-431).
ctgtccgaattgacatcat

SEQ ID NO: 335502 - DNA, 19 bp, Homo sapiens
  siRNA target sequence for GW112 (NM_006418.3,604-622).
gagacactagacaaaaaca

SEQ ID NO: 335503 - DNA, 19 bp, Homo sapiens
  siRNA target sequence for GW112 (NM_006418.3,606-624).
gacactagacaaaaacaat

SEQ ID NO: 335504 - DNA, 19 bp, Homo sapiens
  siRNA target sequence for GW112 (NM_006418.3,632-650).
ccattcgccgagaaatcgt

SEQ ID NO: 335505 - DNA, 19 bp, Homo sapiens
  siRNA target sequence for GW112 (NM_006418.3,679-697).
gaggcctctaaagatcaaa

SEQ ID NO: 335506 - DNA, 19 bp, Homo sapiens
  siRNA target sequence for GW112 (NM_006418.3,745-763).
ggtggtgtggtgaacatca

SEQ ID NO: 335507 - DNA, 19 bp, Homo sapiens
  siRNA target sequence for GW112 (NM_006418.3,817-835).
gcttggggtagggattact

SEQ ID NO: 335508 - DNA, 19 bp, Homo sapiens
  siRNA target sequence for GW112 (NM_006418.3,867-885).
ggtggcgccattgaataca

SEQ ID NO: 335509 - DNA, 19 bp, Homo sapiens
  siRNA target sequence for GW112 (NM_006418.3,870-888).
ggcgccattgaatacagat

SEQ ID NO: 335510 - DNA, 19 bp, Homo sapiens
  siRNA target sequence for GW112 (NM_006418.3,890-908).
ggagactgttggagtatta

SEQ ID NO: 335511 - DNA, 19 bp, Homo sapiens
  siRNA target sequence for GW112 (NM_006418.3,921-939).
cacactggatgatttgcta

SEQ ID NO: 335512 - DNA, 19 bp, Homo sapiens
  siRNA target sequence for GW112 (NM_006418.3,923-941).
cactggatgatttgctatt

SEQ ID NO: 335513 - DNA, 19 bp, Homo sapiens
  siRNA target sequence for GW112 (NM_006418.3,936-954).
gctattgtatataaatgct

SEQ ID NO: 335514 - DNA, 19 bp, Homo sapiens
  siRNA target sequence for GW112 (NM_006418.3,983-1001).
gtagtggtacagcagttta

SEQ ID NO: 335515 - DNA, 19 bp, Homo sapiens
  siRNA target sequence for GW112 (NM_006418.3,988-1006).
ggtacagcagtttacaaca

SEQ ID NO: 335516 - DNA, 19 bp, Homo sapiens
  siRNA target sequence for GW112 (NM_006418.3,994-1012).
gcagtttacaacaacaaca

SEQ ID NO: 335517 - DNA, 19 bp, Homo sapiens
  siRNA target sequence for GW112 (NM_006418.3,1026-1044).
gtacaacaccgggaatatt

SEQ ID NO: 335518 - DNA, 19 bp, Homo sapiens
  siRNA target sequence for GW112 (NM_006418.3,1036-1054).
gggaatattgccagagtta

SEQ ID NO: 335519 - DNA, 19 bp, Homo sapiens
  siRNA target sequence for GW112 (NM_006418.3,1037-1055).
ggaatattgccagagttaa

SEQ ID NO: 335520 - DNA, 19 bp, Homo sapiens
  siRNA target sequence for GW112 (NM_006418.3,1071-1089).
gattgctgtgactcaaact

SEQ ID NO: 335521 - DNA, 19 bp, Homo sapiens
  siRNA target sequence for GW112 (NM_006418.3,1092-1110).
ccctaatgctgcctataat

SEQ ID NO: 335522 - DNA, 19 bp, Homo sapiens
  siRNA target sequence for GW112 (NM_006418.3,1104-1122).
ctataataaccgcttttca

SEQ ID NO: 335523 - DNA, 19 bp, Homo sapiens
  siRNA target sequence for GW112 (NM_006418.3,1136-1154).
cttggcaagatattgactt

SEQ ID NO: 335524 - DNA, 19 bp, Homo sapiens
  siRNA target sequence for GW112 (NM_006418.3,1207-1225).
ggtaacatggtgattagta

SEQ ID NO: 335525 - DNA, 19 bp, Homo sapiens
  siRNA target sequence for GW112 (NM_006418.3,1243-1261).
cttcaggtgctaaacactt

SEQ ID NO: 335526 - DNA, 19 bp, Homo sapiens
  siRNA target sequence for GW112 (NM_006418.3,1262-1280).
ggtataccaagcagtataa

SEQ ID NO: 335527 - DNA, 19 bp, Homo sapiens
  siRNA target sequence for GW112 (NM_006418.3,1263-1281).
gtataccaagcagtataaa

SEQ ID NO: 335528 - DNA, 19 bp, Homo sapiens
  siRNA target sequence for GW112 (NM_006418.3,1305-1323).
ggtatgtggggttctgtat

SEQ ID NO: 335529 - DNA, 19 bp, Homo sapiens
  siRNA target sequence for GW112 (NM_006418.3,1365-1383).
ctattatgacacaaacaca

SEQ ID NO: 335530 - DNA, 19 bp, Homo sapiens
  siRNA target sequence for GW112 (NM_006418.3,1392-1410).
gggcaaactagacattgta

SEQ ID NO: 335531 - DNA, 19 bp, Homo sapiens
  siRNA target sequence for GW112 (NM_006418.3,1393-1411).
ggcaaactagacattgtaa

SEQ ID NO: 335532 - DNA, 19 bp, Homo sapiens
  siRNA target sequence for GW112 (NM_006418.3,1394-1412).
gcaaactagacattgtaat

SEQ ID NO: 335533 - DNA, 19 bp, Homo sapiens
  siRNA target sequence for GW112 (NM_006418.3,1452-1470).
cccttttgaccagaaactt

SEQ ID NO: 335534 - DNA, 19 bp, Homo sapiens
  siRNA target sequence for GW112 (NM_006418.3,1453-1471).
ccttttgaccagaaacttt

SEQ ID NO: 335535 - DNA, 19 bp, Homo sapiens
  siRNA target sequence for GW112 (NM_006418.3,1476-1494).
ctataacgatggttacctt

SEQ ID NO: 335536 - DNA, 19 bp, Homo sapiens
  siRNA target sequence for GW112 (NM_006418.3,1482-1500).
cgatggttaccttctgaat

SEQ ID NO: 335537 - DNA, 19 bp, Homo sapiens
  siRNA target sequence for GW112 (NM_006418.3,1483-1501).
gatggttaccttctgaatt

SEQ ID NO: 335538 - DNA, 19 bp, Homo sapiens
  siRNA target sequence for GW112 (NM_006418.3,1487-1505).
gttaccttctgaattatga

SEQ ID NO: 335539 - DNA, 19 bp, Homo sapiens
  siRNA target sequence for RABAC1 (NM_006423.1,246-264).
gtactaccagagcaactat

SEQ ID NO: 335540 - DNA, 19 bp, Homo sapiens
  siRNA target sequence for RABAC1 (NM_006423.1,347-365).
cctgttacattctctatct

SEQ ID NO: 335541 - DNA, 19 bp, Homo sapiens
  siRNA target sequence for MRPL28 (NM_006428.3,161-179).
cccactcccgtgcactata

SEQ ID NO: 335542 - DNA, 19 bp, Homo sapiens
  siRNA target sequence for MRPL28 (NM_006428.3,301-319).
ctggatcctgggccaaata

SEQ ID NO: 335543 - DNA, 19 bp, Homo sapiens
  siRNA target sequence for MRPL28 (NM_006428.3,303-321).
ggatcctgggccaaatata

SEQ ID NO: 335544 - DNA, 19 bp, Homo sapiens
  siRNA target sequence for MRPL28 (NM_006428.3,304-322).
gatcctgggccaaatatat

SEQ ID NO: 335545 - DNA, 19 bp, Homo sapiens
  siRNA target sequence for MRPL28 (NM_006428.3,461-479).
gcttatgggctcgactttt

SEQ ID NO: 335546 - DNA, 19 bp, Homo sapiens
  siRNA target sequence for MRPL28 (NM_006428.3,462-480).
cttatgggctcgactttta

SEQ ID NO: 335547 - DNA, 19 bp, Homo sapiens
  siRNA target sequence for MRPL28 (NM_006428.3,603-621).
cagccatctacgacaagta

SEQ ID NO: 335548 - DNA, 19 bp, Homo sapiens
  siRNA target sequence for MRPL28 (NM_006428.3,606-624).
ccatctacgacaagtacaa

SEQ ID NO: 335549 - DNA, 19 bp, Homo sapiens
  siRNA target sequence for MRPL28 (NM_006428.3,613-631).
cgacaagtacaaggaattt

SEQ ID NO: 335550 - DNA, 19 bp, Homo sapiens
  siRNA target sequence for MRPL28 (NM_006428.3,716-734).
cctgtacccctgttcaaga

SEQ ID NO: 335551 - DNA, 19 bp, Homo sapiens
  siRNA target sequence for MRPL28 (NM_006428.3,719-737).
gtacccctgttcaagatct

SEQ ID NO: 335552 - DNA, 19 bp, Homo sapiens
  siRNA target sequence for MRPL28 (NM_006428.3,723-741).
ccctgttcaagatctatgt

SEQ ID NO: 335553 - DNA, 19 bp, Homo sapiens
  siRNA target sequence for KEO4 (NM_006459.2,86-104).
cgcctccatccacaagatt

SEQ ID NO: 335554 - DNA, 19 bp, Homo sapiens
  siRNA target sequence for KEO4 (NM_006459.2,112-130).
gccatctggctgtgtacta

SEQ ID NO: 335555 - DNA, 19 bp, Homo sapiens
  siRNA target sequence for KEO4 (NM_006459.2,131-149).
caggggaggagctttacta

SEQ ID NO: 335556 - DNA, 19 bp, Homo sapiens
  siRNA target sequence for KEO4 (NM_006459.2,163-181).
gaccaggctatcatatcat

SEQ ID NO: 335557 - DNA, 19 bp, Homo sapiens
  siRNA target sequence for KEO4 (NM_006459.2,165-183).
ccaggctatcatatcatgt

SEQ ID NO: 335558 - DNA, 19 bp, Homo sapiens
  siRNA target sequence for KEO4 (NM_006459.2,210-228).
gtgcagacaacactacaaa

SEQ ID NO: 335559 - DNA, 19 bp, Homo sapiens
  siRNA target sequence for KEO4 (NM_006459.2,220-238).
cactacaaactgatgaagt

SEQ ID NO: 335560 - DNA, 19 bp, Homo sapiens
  siRNA target sequence for KEO4 (NM_006459.2,259-277).
caagtggtggggtcatgat

SEQ ID NO: 335561 - DNA, 19 bp, Homo sapiens
  siRNA target sequence for KEO4 (NM_006459.2,268-286).
gggtcatgatctatattga

SEQ ID NO: 335562 - DNA, 19 bp, Homo sapiens
  siRNA target sequence for KEO4 (NM_006459.2,278-296).
ctatattgaccgaatagaa

SEQ ID NO: 335563 - DNA, 19 bp, Homo sapiens
  siRNA target sequence for KEO4 (NM_006459.2,287-305).
ccgaatagaagtggttaat

SEQ ID NO: 335564 - DNA, 19 bp, Homo sapiens
  siRNA target sequence for KEO4 (NM_006459.2,311-329).
ggctccttatgcagtgttt

SEQ ID NO: 335565 - DNA, 19 bp, Homo sapiens
  siRNA target sequence for KEO4 (NM_006459.2,313-331).
ctccttatgcagtgtttga

SEQ ID NO: 335566 - DNA, 19 bp, Homo sapiens
  siRNA target sequence for KEO4 (NM_006459.2,340-358).
ggaactatactgcagatta

SEQ ID NO: 335567 - DNA, 19 bp, Homo sapiens
  siRNA target sequence for KEO4 (NM_006459.2,365-383).
gaccttaatcttcaataaa

SEQ ID NO: 335568 - DNA, 19 bp, Homo sapiens
  siRNA target sequence for KEO4 (NM_006459.2,421-439).
cacttcaggaagtttacat

SEQ ID NO: 335569 - DNA, 19 bp, Homo sapiens
  siRNA target sequence for KEO4 (NM_006459.2,505-523).
ccccaggtctcactataca

SEQ ID NO: 335570 - DNA, 19 bp, Homo sapiens
  siRNA target sequence for KEO4 (NM_006459.2,524-542).
ggctgtgcgtgttacaaaa

SEQ ID NO: 335571 - DNA, 19 bp, Homo sapiens
  siRNA target sequence for KEO4 (NM_006459.2,596-614).
gacaaaactccttatagct

SEQ ID NO: 335572 - DNA, 19 bp, Homo sapiens
  siRNA target sequence for KEO4 (NM_006459.2,605-623).
ccttatagctgcacagaaa

SEQ ID NO: 335573 - DNA, 19 bp, Homo sapiens
  siRNA target sequence for KEO4 (NM_006459.2,741-759).
gaaaagcgcatttctgaaa

SEQ ID NO: 335574 - DNA, 19 bp, Homo sapiens
  siRNA target sequence for KEO4 (NM_006459.2,746-764).
gcgcatttctgaaatcgaa

SEQ ID NO: 335575 - DNA, 19 bp, Homo sapiens
  siRNA target sequence for KEO4 (NM_006459.2,848-866).
caagttgaccccggaatat

SEQ ID NO: 335576 - DNA, 19 bp, Homo sapiens
  siRNA target sequence for KEO4 (NM_006459.2,894-912).
gcttctaacagtaagatct

SEQ ID NO: 335577 - DNA, 19 bp, Homo sapiens
  siRNA target sequence for KEO4 (NM_006459.2,895-913).
cttctaacagtaagatcta

SEQ ID NO: 335578 - DNA, 19 bp, Homo sapiens
  siRNA target sequence for KEO4 (NM_006459.2,922-940).
gcaacatccctaacatgtt

SEQ ID NO: 335579 - DNA, 19 bp, Homo sapiens
  siRNA target sequence for KEO4 (NM_006459.2,957-975).
gctttgaaatattcagata

SEQ ID NO: 335580 - DNA, 19 bp, Homo sapiens
  siRNA target sequence for KEO4 (NM_006459.2,958-976).
ctttgaaatattcagatat

SEQ ID NO: 335581 - DNA, 19 bp, Homo sapiens
  siRNA target sequence for KEO4 (NM_006459.2,1029-1047).
ggagagaacgtcatccaaa

SEQ ID NO: 335582 - DNA, 19 bp, Homo sapiens
  siRNA target sequence for KEO4 (NM_006459.2,1030-1048).
gagagaacgtcatccaaaa

SEQ ID NO: 335583 - DNA, 19 bp, Homo sapiens
  siRNA target sequence for HIS1 (NM_006460.1,696-714).
gagccattcttgtcagaat

SEQ ID NO: 335584 - DNA, 19 bp, Homo sapiens
  siRNA target sequence for HIS1 (NM_006460.1,698-716).
gccattcttgtcagaatat

SEQ ID NO: 335585 - DNA, 19 bp, Homo sapiens
  siRNA target sequence for HIS1 (NM_006460.1,717-735).
caacaccagcctcaaacta

SEQ ID NO: 335586 - DNA, 19 bp, Homo sapiens
  siRNA target sequence for HIS1 (NM_006460.1,726-744).
cctcaaactagcaactgta

SEQ ID NO: 335587 - DNA, 19 bp, Homo sapiens
  siRNA target sequence for HIS1 (NM_006460.1,918-936).
caggcctgtccagaatcta

SEQ ID NO: 335588 - DNA, 19 bp, Homo sapiens
  siRNA target sequence for HIS1 (NM_006460.1,1153-1171).
gacgcccgtccaagaagaa

SEQ ID NO: 335589 - DNA, 19 bp, Homo sapiens
  siRNA target sequence for HIS1 (NM_006460.1,1176-1194).
cattggaaaccgtactaca

SEQ ID NO: 335590 - DNA, 19 bp, Homo sapiens
  siRNA target sequence for HIS1 (NM_006460.1,1252-1270).
ggatccgagccgagatgtt

SEQ ID NO: 335591 - DNA, 19 bp, Homo sapiens
  siRNA target sequence for HIS1 (NM_006460.1,1334-1352).
ggaggagccggatctcaaa

SEQ ID NO: 335592 - DNA, 19 bp, Homo sapiens
  siRNA target sequence for HIS1 (NM_006460.1,1335-1353).
gaggagccggatctcaaaa

SEQ ID NO: 335593 - DNA, 19 bp, Homo sapiens
  siRNA target sequence for HIS1 (NM_006460.1,1459-1477).
gggacggcagcgagtttct

SEQ ID NO: 335594 - DNA, 19 bp, Homo sapiens
  siRNA target sequence for HIS1 (NM_006460.1,1588-1606).
gcatggaggacgagaacaa

SEQ ID NO: 335595 - DNA, 19 bp, Homo sapiens
  siRNA target sequence for SPAG5 (NM_006461.1,112-130).
ccccagacgggaaaaccat

SEQ ID NO: 335596 - DNA, 19 bp, Homo sapiens
  siRNA target sequence for SPAG5 (NM_006461.1,274-292).
gattttgtaaataacaaga

SEQ ID NO: 335597 - DNA, 19 bp, Homo sapiens
  siRNA target sequence for SPAG5 (NM_006461.1,340-358).
gaaacttgtcagcatgaat

SEQ ID NO: 335598 - DNA, 19 bp, Homo sapiens
  siRNA target sequence for SPAG5 (NM_006461.1,427-445).
gacccactgggcaattata

SEQ ID NO: 335599 - DNA, 19 bp, Homo sapiens
  siRNA target sequence for SPAG5 (NM_006461.1,431-449).
cactgggcaattatatggt

SEQ ID NO: 335600 - DNA, 19 bp, Homo sapiens
  siRNA target sequence for SPAG5 (NM_006461.1,433-451).
ctgggcaattatatggtta

SEQ ID NO: 335601 - DNA, 19 bp, Homo sapiens
  siRNA target sequence for SPAG5 (NM_006461.1,435-453).
gggcaattatatggttaaa

SEQ ID NO: 335602 - DNA, 19 bp, Homo sapiens
  siRNA target sequence for SPAG5 (NM_006461.1,483-501).
gcagcaacaagacatgata

SEQ ID NO: 335603 - DNA, 19 bp, Homo sapiens
  siRNA target sequence for SPAG5 (NM_006461.1,484-502).
cagcaacaagacatgatat

SEQ ID NO: 335604 - DNA, 19 bp, Homo sapiens
  siRNA target sequence for SPAG5 (NM_006461.1,486-504).
gcaacaagacatgatattt

SEQ ID NO: 335605 - DNA, 19 bp, Homo sapiens
  siRNA target sequence for SPAG5 (NM_006461.1,529-547).
gagacaaacagcatatctt

SEQ ID NO: 335606 - DNA, 19 bp, Homo sapiens
  siRNA target sequence for SPAG5 (NM_006461.1,695-713).
cctgttctgaacaactaca

SEQ ID NO: 335607 - DNA, 19 bp, Homo sapiens
  siRNA target sequence for SPAG5 (NM_006461.1,709-727).
ctacattgctccaaggaaa

SEQ ID NO: 335608 - DNA, 19 bp, Homo sapiens
  siRNA target sequence for SPAG5 (NM_006461.1,749-767).
ctgtgcgtgaggacttagt

SEQ ID NO: 335609 - DNA, 19 bp, Homo sapiens
  siRNA target sequence for SPAG5 (NM_006461.1,759-777).
ggacttagtaccttctgaa

SEQ ID NO: 335610 - DNA, 19 bp, Homo sapiens
  siRNA target sequence for SPAG5 (NM_006461.1,760-778).
gacttagtaccttctgaaa

SEQ ID NO: 335611 - DNA, 19 bp, Homo sapiens
  siRNA target sequence for SPAG5 (NM_006461.1,807-825).
ctggctttccccttcaact

SEQ ID NO: 335612 - DNA, 19 bp, Homo sapiens
  siRNA target sequence for SPAG5 (NM_006461.1,1125-1143).
ctccgtcatgctggaaaat

SEQ ID NO: 335613 - DNA, 19 bp, Homo sapiens
  siRNA target sequence for SPAG5 (NM_006461.1,1127-1145).
ccgtcatgctggaaaatct

SEQ ID NO: 335614 - DNA, 19 bp, Homo sapiens
  siRNA target sequence for SPAG5 (NM_006461.1,1173-1191).
gcttcgggatgctgcaatt

SEQ ID NO: 335615 - DNA, 19 bp, Homo sapiens
  siRNA target sequence for SPAG5 (NM_006461.1,1192-1210).
ggcactacccctttctcta

SEQ ID NO: 335616 - DNA, 19 bp, Homo sapiens
  siRNA target sequence for SPAG5 (NM_006461.1,1246-1264).
ccacaggaaaagagtacaa

SEQ ID NO: 335617 - DNA, 19 bp, Homo sapiens
  siRNA target sequence for SPAG5 (NM_006461.1,1352-1370).
ccttgtctcgacatgactt

SEQ ID NO: 335618 - DNA, 19 bp, Homo sapiens
  siRNA target sequence for SPAG5 (NM_006461.1,1383-1401).
gctgagctctcttgtcatt

SEQ ID NO: 335619 - DNA, 19 bp, Homo sapiens
  siRNA target sequence for SPAG5 (NM_006461.1,1496-1514).
ctcacagtgggataactaa

SEQ ID NO: 335620 - DNA, 19 bp, Homo sapiens
  siRNA target sequence for SPAG5 (NM_006461.1,1498-1516).
cacagtgggataactaata

SEQ ID NO: 335621 - DNA, 19 bp, Homo sapiens
  siRNA target sequence for SPAG5 (NM_006461.1,1502-1520).
gtgggataactaataaact

SEQ ID NO: 335622 - DNA, 19 bp, Homo sapiens
  siRNA target sequence for SPAG5 (NM_006461.1,1582-1600).
caatcatgggtgcttatct

SEQ ID NO: 335623 - DNA, 19 bp, Homo sapiens
  siRNA target sequence for SPAG5 (NM_006461.1,1589-1607).
gggtgcttatctctaaaga

SEQ ID NO: 335624 - DNA, 19 bp, Homo sapiens
  siRNA target sequence for SPAG5 (NM_006461.1,1624-1642).
cacctatccctgttgcatt

SEQ ID NO: 335625 - DNA, 19 bp, Homo sapiens
  siRNA target sequence for SPAG5 (NM_006461.1,1626-1644).
cctatccctgttgcattta

SEQ ID NO: 335626 - DNA, 19 bp, Homo sapiens
  siRNA target sequence for SPAG5 (NM_006461.1,1676-1694).
ctcggcgtgcagaaacatt

SEQ ID NO: 335627 - DNA, 19 bp, Homo sapiens
  siRNA target sequence for SPAG5 (NM_006461.1,1804-1822).
gatgcggcagagatagtgt

SEQ ID NO: 335628 - DNA, 19 bp, Homo sapiens
  siRNA target sequence for SPAG5 (NM_006461.1,1982-2000).
cttctaccttgcaacaaga

SEQ ID NO: 335629 - DNA, 19 bp, Homo sapiens
  siRNA target sequence for SPAG5 (NM_006461.1,2010-2028).
catgcaactggattataca

SEQ ID NO: 335630 - DNA, 19 bp, Homo sapiens
  siRNA target sequence for SPAG5 (NM_006461.1,2014-2032).
caactggattatacaacat

SEQ ID NO: 335631 - DNA, 19 bp, Homo sapiens
  siRNA target sequence for SPAG5 (NM_006461.1,2055-2073).
ccgacaactcacagagaaa

SEQ ID NO: 335632 - DNA, 19 bp, Homo sapiens
  siRNA target sequence for SPAG5 (NM_006461.1,2262-2280).
catggacagccagctaaaa

SEQ ID NO: 335633 - DNA, 19 bp, Homo sapiens
  siRNA target sequence for SPAG5 (NM_006461.1,2522-2540).
gtcaggttgagtgtcaatt

SEQ ID NO: 335634 - DNA, 19 bp, Homo sapiens
  siRNA target sequence for SPAG5 (NM_006461.1,2530-2548).
gagtgtcaattgaaaacca

SEQ ID NO: 335635 - DNA, 19 bp, Homo sapiens
  siRNA target sequence for SPAG5 (NM_006461.1,2596-2614).
gacactgtagagaacctaa

SEQ ID NO: 335636 - DNA, 19 bp, Homo sapiens
  siRNA target sequence for SPAG5 (NM_006461.1,2630-2648).
gcaccatagcagataacca

SEQ ID NO: 335637 - DNA, 19 bp, Homo sapiens
  siRNA target sequence for SPAG5 (NM_006461.1,2669-2687).
cacggcagtactctcaaaa

SEQ ID NO: 335638 - DNA, 19 bp, Homo sapiens
  siRNA target sequence for SPAG5 (NM_006461.1,2673-2691).
gcagtactctcaaaagcta

SEQ ID NO: 335639 - DNA, 19 bp, Homo sapiens
  siRNA target sequence for SPAG5 (NM_006461.1,2919-2937).
ccgagtagcatcaatggtt

SEQ ID NO: 335640 - DNA, 19 bp, Homo sapiens
  siRNA target sequence for SPAG5 (NM_006461.1,2975-2993).
gcctggcagaaatgagtat

SEQ ID NO: 335641 - DNA, 19 bp, Homo sapiens
  siRNA target sequence for SPAG5 (NM_006461.1,2976-2994).
cctggcagaaatgagtatt

SEQ ID NO: 335642 - DNA, 19 bp, Homo sapiens
  siRNA target sequence for SPAG5 (NM_006461.1,2977-2995).
ctggcagaaatgagtatta

SEQ ID NO: 335643 - DNA, 19 bp, Homo sapiens
  siRNA target sequence for SPAG5 (NM_006461.1,2980-2998).
gcagaaatgagtattatga

SEQ ID NO: 335644 - DNA, 19 bp, Homo sapiens
  siRNA target sequence for SPAG5 (NM_006461.1,3023-3041).
ccctgctacaagagtctaa

SEQ ID NO: 335645 - DNA, 19 bp, Homo sapiens
  siRNA target sequence for SPAG5 (NM_006461.1,3057-3075).
gactctgcagcgaaaaatt

SEQ ID NO: 335646 - DNA, 19 bp, Homo sapiens
  siRNA target sequence for SPAG5 (NM_006461.1,3173-3191).
gcttgcgctacaagaatga

SEQ ID NO: 335647 - DNA, 19 bp, Homo sapiens
  siRNA target sequence for SPAG5 (NM_006461.1,3174-3192).
cttgcgctacaagaatgaa

SEQ ID NO: 335648 - DNA, 19 bp, Homo sapiens
  siRNA target sequence for SPAG5 (NM_006461.1,3225-3243).
gaagatcctagaacagata

SEQ ID NO: 335649 - DNA, 19 bp, Homo sapiens
  siRNA target sequence for SPAG5 (NM_006461.1,3369-3387).
cagcctatggccaccaatt

SEQ ID NO: 335650 - DNA, 19 bp, Homo sapiens
  siRNA target sequence for SPAG5 (NM_006461.1,3372-3390).
cctatggccaccaattgga

SEQ ID NO: 335651 - DNA, 19 bp, Homo sapiens
  siRNA target sequence for SPAG5 (NM_006461.1,3373-3391).
ctatggccaccaattggat

SEQ ID NO: 335652 - DNA, 19 bp, Homo sapiens
  siRNA target sequence for EVI2B (NM_006495.2,123-141).
cccaaatatttcatcttaa

SEQ ID NO: 335653 - DNA, 19 bp, Homo sapiens
  siRNA target sequence for EVI2B (NM_006495.2,124-142).
ccaaatatttcatcttaat

SEQ ID NO: 335654 - DNA, 19 bp, Homo sapiens
  siRNA target sequence for EVI2B (NM_006495.2,206-224).
gcagtcacagcctacctta

SEQ ID NO: 335655 - DNA, 19 bp, Homo sapiens
  siRNA target sequence for EVI2B (NM_006495.2,207-225).
cagtcacagcctaccttat

SEQ ID NO: 335656 - DNA, 19 bp, Homo sapiens
  siRNA target sequence for EVI2B (NM_006495.2,213-231).
cagcctaccttattcacat

SEQ ID NO: 335657 - DNA, 19 bp, Homo sapiens
  siRNA target sequence for EVI2B (NM_006495.2,216-234).
cctaccttattcacatcat

SEQ ID NO: 335658 - DNA, 19 bp, Homo sapiens
  siRNA target sequence for EVI2B (NM_006495.2,245-263).
ggtattggctaattctcaa

SEQ ID NO: 335659 - DNA, 19 bp, Homo sapiens
  siRNA target sequence for EVI2B (NM_006495.2,246-264).
gtattggctaattctcaaa

SEQ ID NO: 335660 - DNA, 19 bp, Homo sapiens
  siRNA target sequence for EVI2B (NM_006495.2,285-303).
ggtcaaccaacacaattca

SEQ ID NO: 335661 - DNA, 19 bp, Homo sapiens
  siRNA target sequence for EVI2B (NM_006495.2,295-313).
cacaattcagcgacacttt

SEQ ID NO: 335662 - DNA, 19 bp, Homo sapiens
  siRNA target sequence for EVI2B (NM_006495.2,369-387).
gtctatacctcttctgaaa

SEQ ID NO: 335663 - DNA, 19 bp, Homo sapiens
  siRNA target sequence for EVI2B (NM_006495.2,414-432).
caaccacttgcctacaaca

SEQ ID NO: 335664 - DNA, 19 bp, Homo sapiens
  siRNA target sequence for EVI2B (NM_006495.2,528-546).
ccaccaaagtcatttgtct

SEQ ID NO: 335665 - DNA, 19 bp, Homo sapiens
  siRNA target sequence for EVI2B (NM_006495.2,573-591).
gtccagatcccttctagaa

SEQ ID NO: 335666 - DNA, 19 bp, Homo sapiens
  siRNA target sequence for EVI2B (NM_006495.2,652-670).
ggagtacaccaggatttat

SEQ ID NO: 335667 - DNA, 19 bp, Homo sapiens
  siRNA target sequence for EVI2B (NM_006495.2,655-673).
gtacaccaggatttatctt

SEQ ID NO: 335668 - DNA, 19 bp, Homo sapiens
  siRNA target sequence for EVI2B (NM_006495.2,663-681).
ggatttatcttagatacta

SEQ ID NO: 335669 - DNA, 19 bp, Homo sapiens
  siRNA target sequence for EVI2B (NM_006495.2,721-739).
caatagctgccatactaat

SEQ ID NO: 335670 - DNA, 19 bp, Homo sapiens
  siRNA target sequence for EVI2B (NM_006495.2,731-749).
catactaattggtgtactt

SEQ ID NO: 335671 - DNA, 19 bp, Homo sapiens
  siRNA target sequence for EVI2B (NM_006495.2,742-760).
gtgtacttctgacttctat

SEQ ID NO: 335672 - DNA, 19 bp, Homo sapiens
  siRNA target sequence for EVI2B (NM_006495.2,764-782).
ggtagctataatcatcatt

SEQ ID NO: 335673 - DNA, 19 bp, Homo sapiens
  siRNA target sequence for EVI2B (NM_006495.2,858-876).
gaaacccctgacatttgta

SEQ ID NO: 335674 - DNA, 19 bp, Homo sapiens
  siRNA target sequence for EVI2B (NM_006495.2,863-881).
ccctgacatttgtatggat

SEQ ID NO: 335675 - DNA, 19 bp, Homo sapiens
  siRNA target sequence for EVI2B (NM_006495.2,864-882).
cctgacatttgtatggata

SEQ ID NO: 335676 - DNA, 19 bp, Homo sapiens
  siRNA target sequence for EVI2B (NM_006495.2,867-885).
gacatttgtatggataaca

SEQ ID NO: 335677 - DNA, 19 bp, Homo sapiens
  siRNA target sequence for EVI2B (NM_006495.2,907-925).
caaaacgtacatcaatcat

SEQ ID NO: 335678 - DNA, 19 bp, Homo sapiens
  siRNA target sequence for EVI2B (NM_006495.2,913-931).
gtacatcaatcatttcact

SEQ ID NO: 335679 - DNA, 19 bp, Homo sapiens
  siRNA target sequence for EVI2B (NM_006495.2,1182-1200).
gacaaacccacaatgacaa

SEQ ID NO: 335680 - DNA, 19 bp, Homo sapiens
  siRNA target sequence for EVI2B (NM_006495.2,1184-1202).
caaacccacaatgacaatt

SEQ ID NO: 335681 - DNA, 19 bp, Homo sapiens
  siRNA target sequence for EVI2B (NM_006495.2,1188-1206).
cccacaatgacaattgtat

SEQ ID NO: 335682 - DNA, 19 bp, Homo sapiens
  siRNA target sequence for EVI2B (NM_006495.2,1272-1290).
gatcataaatctgagataa

SEQ ID NO: 335683 - DNA, 19 bp, Homo sapiens
  siRNA target sequence for EVI2B (NM_006495.2,1302-1320).
ccaccgcttgactcactta

SEQ ID NO: 335684 - DNA, 19 bp, Homo sapiens
  siRNA target sequence for EVI2B (NM_006495.2,1303-1321).
caccgcttgactcacttaa

SEQ ID NO: 335685 - DNA, 19 bp, Homo sapiens
  siRNA target sequence for EVI2B (NM_006495.2,1305-1323).
ccgcttgactcacttaact

SEQ ID NO: 335686 - DNA, 19 bp, Homo sapiens
  siRNA target sequence for EVI2B (NM_006495.2,1306-1324).
cgcttgactcacttaactt

SEQ ID NO: 335687 - DNA, 19 bp, Homo sapiens
  siRNA target sequence for EVI2B (NM_006495.2,1325-1343).
gcccctgccaccagtagat

SEQ ID NO: 335688 - DNA, 19 bp, Homo sapiens
  siRNA target sequence for EVI2B (NM_006495.2,1327-1345).
ccctgccaccagtagattt

SEQ ID NO: 335689 - DNA, 19 bp, Homo sapiens
  siRNA target sequence for EVI2B (NM_006495.2,1328-1346).
cctgccaccagtagatttt

SEQ ID NO: 335690 - DNA, 19 bp, Homo sapiens
  siRNA target sequence for EVI2B (NM_006495.2,1382-1400).
gtgtcaggagttctctatt

SEQ ID NO: 335691 - DNA, 19 bp, Homo sapiens
  siRNA target sequence for EVI2B (NM_006495.2,1402-1420).
ctcccaactctgatcaaga

SEQ ID NO: 335692 - DNA, 19 bp, Homo sapiens
  siRNA target sequence for EVI2B (NM_006495.2,1405-1423).
ccaactctgatcaagatct

SEQ ID NO: 335693 - DNA, 19 bp, Homo sapiens
  siRNA target sequence for EVI2B (NM_006495.2,1406-1424).
caactctgatcaagatctt

SEQ ID NO: 335694 - DNA, 19 bp, Homo sapiens
  siRNA target sequence for EVI2B (NM_006495.2,1409-1427).
ctctgatcaagatcttaat

SEQ ID NO: 335695 - DNA, 19 bp, Homo sapiens
  siRNA target sequence for HIC1 (NM_006497.1,386-404).
cgtggcgctgtgcaagaaa

SEQ ID NO: 335696 - DNA, 19 bp, Homo sapiens
  siRNA target sequence for HIC1 (NM_006497.1,2138-2156).
gaccatcgaccgtttctct

SEQ ID NO: 335697 - DNA, 19 bp, Homo sapiens
  siRNA target sequence for SETMAR (NM_006515.1,76-94).
cgtgcggccaggaaaactt

SEQ ID NO: 335698 - DNA, 19 bp, Homo sapiens
  siRNA target sequence for SETMAR (NM_006515.1,140-158).
gtacactcctgatcatgta

SEQ ID NO: 335699 - DNA, 19 bp, Homo sapiens
  siRNA target sequence for SETMAR (NM_006515.1,143-161).
cactcctgatcatgtagtt

SEQ ID NO: 335700 - DNA, 19 bp, Homo sapiens
  siRNA target sequence for SETMAR (NM_006515.1,174-192).
gacattgatcccactcaaa

SEQ ID NO: 335701 - DNA, 19 bp, Homo sapiens
  siRNA target sequence for SETMAR (NM_006515.1,176-194).
cattgatcccactcaaata

SEQ ID NO: 335702 - DNA, 19 bp, Homo sapiens
  siRNA target sequence for SETMAR (NM_006515.1,197-215).
ctttcccggatgcatttgt

SEQ ID NO: 335703 - DNA, 19 bp, Homo sapiens
  siRNA target sequence for SETMAR (NM_006515.1,203-221).
cggatgcatttgtgtcaaa

SEQ ID NO: 335704 - DNA, 19 bp, Homo sapiens
  siRNA target sequence for SETMAR (NM_006515.1,254-272).
ccgccatggagagaactat

SEQ ID NO: 335705 - DNA, 19 bp, Homo sapiens
  siRNA target sequence for SETMAR (NM_006515.1,411-429).
gtgttcaagacgcataaaa

SEQ ID NO: 335706 - DNA, 19 bp, Homo sapiens
  siRNA target sequence for SETMAR (NM_006515.1,413-431).
gttcaagacgcataaaaaa

SEQ ID NO: 335707 - DNA, 19 bp, Homo sapiens
  siRNA target sequence for SETMAR (NM_006515.1,439-457).
gacttcgtaccttggaatt

SEQ ID NO: 335708 - DNA, 19 bp, Homo sapiens
  siRNA target sequence for SETMAR (NM_006515.1,462-480).
ccgaaaggaaggtttgtct

SEQ ID NO: 335709 - DNA, 19 bp, Homo sapiens
  siRNA target sequence for SETMAR (NM_006515.1,468-486).
ggaaggtttgtctgtgaat

SEQ ID NO: 335710 - DNA, 19 bp, Homo sapiens
  siRNA target sequence for SETMAR (NM_006515.1,489-507).
gctggtgaggttttaggat

SEQ ID NO: 335711 - DNA, 19 bp, Homo sapiens
  siRNA target sequence for SETMAR (NM_006515.1,490-508).
ctggtgaggttttaggatt

SEQ ID NO: 335712 - DNA, 19 bp, Homo sapiens
  siRNA target sequence for SETMAR (NM_006515.1,516-534).
gttcagagaagaattcact

SEQ ID NO: 335713 - DNA, 19 bp, Homo sapiens
  siRNA target sequence for SETMAR (NM_006515.1,541-559).
caaaatccgactccaatta

SEQ ID NO: 335714 - DNA, 19 bp, Homo sapiens
  siRNA target sequence for SETMAR (NM_006515.1,547-565).
ccgactccaattacattat

SEQ ID NO: 335715 - DNA, 19 bp, Homo sapiens
  siRNA target sequence for SETMAR (NM_006515.1,548-566).
cgactccaattacattata

SEQ ID NO: 335716 - DNA, 19 bp, Homo sapiens
  siRNA target sequence for SETMAR (NM_006515.1,569-587).
catcagggaacatgtttat

SEQ ID NO: 335717 - DNA, 19 bp, Homo sapiens
  siRNA target sequence for SETMAR (NM_006515.1,596-614).
ggtaatggaaacatttgtt

SEQ ID NO: 335718 - DNA, 19 bp, Homo sapiens
  siRNA target sequence for SETMAR (NM_006515.1,607-625).
catttgttgaccctactta

SEQ ID NO: 335719 - DNA, 19 bp, Homo sapiens
  siRNA target sequence for SETMAR (NM_006515.1,615-633).
gaccctacttatataggaa

SEQ ID NO: 335720 - DNA, 19 bp, Homo sapiens
  siRNA target sequence for SETMAR (NM_006515.1,685-703).
ctgtccgaattgactcaat

SEQ ID NO: 335721 - DNA, 19 bp, Homo sapiens
  siRNA target sequence for SETMAR (NM_006515.1,689-707).
ccgaattgactcaatggta

SEQ ID NO: 335722 - DNA, 19 bp, Homo sapiens
  siRNA target sequence for SETMAR (NM_006515.1,750-768).
gaagaactctcttatgatt

SEQ ID NO: 335723 - DNA, 19 bp, Homo sapiens
  siRNA target sequence for SETMAR (NM_006515.1,772-790).
caggaagatatcttaatct

SEQ ID NO: 335724 - DNA, 19 bp, Homo sapiens
  siRNA target sequence for SETMAR (NM_006515.1,848-866).
ctgtggtgccaaatcatgt

SEQ ID NO: 335725 - DNA, 19 bp, Homo sapiens
  siRNA target sequence for SETMAR (NM_006515.1,894-912).
ctgtactgccccgtagaaa

SEQ ID NO: 335726 - DNA, 19 bp, Homo sapiens
  siRNA target sequence for SETMAR (NM_006515.1,906-924).
gtagaaaagtcgaacatca

SEQ ID NO: 335727 - DNA, 19 bp, Homo sapiens
  siRNA target sequence for SETMAR (NM_006515.1,909-927).
gaaaagtcgaacatcagtt

SEQ ID NO: 335728 - DNA, 19 bp, Homo sapiens
  siRNA target sequence for SETMAR (NM_006515.1,991-1009).
gattgacccttgagactat

SEQ ID NO: 335729 - DNA, 19 bp, Homo sapiens
  siRNA target sequence for SETMAR (NM_006515.1,1251-1269).
gctgatccccttacaacta

SEQ ID NO: 335730 - DNA, 19 bp, Homo sapiens
  siRNA target sequence for SETMAR (NM_006515.1,1429-1447).
gcaaccacaacgaaccatt

SEQ ID NO: 335731 - DNA, 19 bp, Homo sapiens
  siRNA target sequence for SETMAR (NM_006515.1,1673-1691).
cgatgagatgaaccaaaaa

SEQ ID NO: 335732 - DNA, 19 bp, Homo sapiens
  siRNA target sequence for NPR2L (NM_006545.3,160-178).
gctgccgcatcgaatgcat

SEQ ID NO: 335733 - DNA, 19 bp, Homo sapiens
  siRNA target sequence for NPR2L (NM_006545.3,161-179).
ctgccgcatcgaatgcata

SEQ ID NO: 335734 - DNA, 19 bp, Homo sapiens
  siRNA target sequence for NPR2L (NM_006545.3,163-181).
gccgcatcgaatgcatatt

SEQ ID NO: 335735 - DNA, 19 bp, Homo sapiens
  siRNA target sequence for NPR2L (NM_006545.3,165-183).
cgcatcgaatgcatattct

SEQ ID NO: 335736 - DNA, 19 bp, Homo sapiens
  siRNA target sequence for NPR2L (NM_006545.3,166-184).
gcatcgaatgcatattctt

SEQ ID NO: 335737 - DNA, 19 bp, Homo sapiens
  siRNA target sequence for NPR2L (NM_006545.3,299-317).
gcagaacaagcttatcact

SEQ ID NO: 335738 - DNA, 19 bp, Homo sapiens
  siRNA target sequence for NPR2L (NM_006545.3,352-370).
ctgtgtgcatcgaacacaa

SEQ ID NO: 335739 - DNA, 19 bp, Homo sapiens
  siRNA target sequence for NPR2L (NM_006545.3,437-455).
cgccctcgagcccattgtt

SEQ ID NO: 335740 - DNA, 19 bp, Homo sapiens
  siRNA target sequence for NPR2L (NM_006545.3,438-456).
gccctcgagcccattgtta

SEQ ID NO: 335741 - DNA, 19 bp, Homo sapiens
  siRNA target sequence for NPR2L (NM_006545.3,439-457).
ccctcgagcccattgttaa

SEQ ID NO: 335742 - DNA, 19 bp, Homo sapiens
  siRNA target sequence for NPR2L (NM_006545.3,440-458).
cctcgagcccattgttaaa

SEQ ID NO: 335743 - DNA, 19 bp, Homo sapiens
  siRNA target sequence for NPR2L (NM_006545.3,716-734).
ggacctcactacacaacaa

SEQ ID NO: 335744 - DNA, 19 bp, Homo sapiens
  siRNA target sequence for NPR2L (NM_006545.3,717-735).
gacctcactacacaacaaa

SEQ ID NO: 335745 - DNA, 19 bp, Homo sapiens
  siRNA target sequence for NPR2L (NM_006545.3,758-776).
ccgccacatccagaagatt

SEQ ID NO: 335746 - DNA, 19 bp, Homo sapiens
  siRNA target sequence for NPR2L (NM_006545.3,759-777).
cgccacatccagaagattt

SEQ ID NO: 335747 - DNA, 19 bp, Homo sapiens
  siRNA target sequence for NPR2L (NM_006545.3,863-881).
cctccagtactccaatgta

SEQ ID NO: 335748 - DNA, 19 bp, Homo sapiens
  siRNA target sequence for NPR2L (NM_006545.3,864-882).
ctccagtactccaatgtat

SEQ ID NO: 335749 - DNA, 19 bp, Homo sapiens
  siRNA target sequence for IMP-2 (NM_006548.3,240-258).
cgggtaaagtggaattgca

SEQ ID NO: 335750 - DNA, 19 bp, Homo sapiens
  siRNA target sequence for IMP-2 (NM_006548.3,262-280).
gaaaatcatggaagttgat

SEQ ID NO: 335751 - DNA, 19 bp, Homo sapiens
  siRNA target sequence for IMP-2 (NM_006548.3,417-435).
cagaaaccgccgttgtcaa

SEQ ID NO: 335752 - DNA, 19 bp, Homo sapiens
  siRNA target sequence for IMP-2 (NM_006548.3,426-444).
ccgttgtcaacgtcacata

SEQ ID NO: 335753 - DNA, 19 bp, Homo sapiens
  siRNA target sequence for IMP-2 (NM_006548.3,427-445).
cgttgtcaacgtcacatat

SEQ ID NO: 335754 - DNA, 19 bp, Homo sapiens
  siRNA target sequence for IMP-2 (NM_006548.3,431-449).
gtcaacgtcacatatgcaa

SEQ ID NO: 335755 - DNA, 19 bp, Homo sapiens
  siRNA target sequence for IMP-2 (NM_006548.3,486-504).
gcgggcatcagtttgagaa

SEQ ID NO: 335756 - DNA, 19 bp, Homo sapiens
  siRNA target sequence for IMP-2 (NM_006548.3,522-540).
cctacatcccggatgaaga

SEQ ID NO: 335757 - DNA, 19 bp, Homo sapiens
  siRNA target sequence for IMP-2 (NM_006548.3,626-644).
caggccagacagattgatt

SEQ ID NO: 335758 - DNA, 19 bp, Homo sapiens
  siRNA target sequence for IMP-2 (NM_006548.3,698-716).
gagggcttgaccataaaga

SEQ ID NO: 335759 - DNA, 19 bp, Homo sapiens
  siRNA target sequence for IMP-2 (NM_006548.3,701-719).
ggcttgaccataaagaaca

SEQ ID NO: 335760 - DNA, 19 bp, Homo sapiens
  siRNA target sequence for IMP-2 (NM_006548.3,740-758).
cgggtagatatccatagaa

SEQ ID NO: 335761 - DNA, 19 bp, Homo sapiens
  siRNA target sequence for IMP-2 (NM_006548.3,741-759).
gggtagatatccatagaaa

SEQ ID NO: 335762 - DNA, 19 bp, Homo sapiens
  siRNA target sequence for IMP-2 (NM_006548.3,742-760).
ggtagatatccatagaaaa

SEQ ID NO: 335763 - DNA, 19 bp, Homo sapiens
  siRNA target sequence for IMP-2 (NM_006548.3,825-843).
catgccgcatgattcttga

SEQ ID NO: 335764 - DNA, 19 bp, Homo sapiens
  siRNA target sequence for IMP-2 (NM_006548.3,828-846).
gccgcatgattcttgaaat

SEQ ID NO: 335765 - DNA, 19 bp, Homo sapiens
  siRNA target sequence for IMP-2 (NM_006548.3,870-888).
ccaaactagccgaagagat

SEQ ID NO: 335766 - DNA, 19 bp, Homo sapiens
  siRNA target sequence for IMP-2 (NM_006548.3,871-889).
caaactagccgaagagatt

SEQ ID NO: 335767 - DNA, 19 bp, Homo sapiens
  siRNA target sequence for IMP-2 (NM_006548.3,924-942).
gaagactgattggaaaaga

SEQ ID NO: 335768 - DNA, 19 bp, Homo sapiens
  siRNA target sequence for IMP-2 (NM_006548.3,1068-1086).
ccagtgctgagatagagat

SEQ ID NO: 335769 - DNA, 19 bp, Homo sapiens
  siRNA target sequence for IMP-2 (NM_006548.3,1069-1087).
cagtgctgagatagagatt

SEQ ID NO: 335770 - DNA, 19 bp, Homo sapiens
  siRNA target sequence for IMP-2 (NM_006548.3,1071-1089).
gtgctgagatagagattat

SEQ ID NO: 335771 - DNA, 19 bp, Homo sapiens
  siRNA target sequence for IMP-2 (NM_006548.3,1263-1281).
ctacccactccggatactt

SEQ ID NO: 335772 - DNA, 19 bp, Homo sapiens
  siRNA target sequence for IMP-2 (NM_006548.3,1318-1336).
cccgcatcatcactcttat

SEQ ID NO: 335773 - DNA, 19 bp, Homo sapiens
  siRNA target sequence for IMP-2 (NM_006548.3,1433-1451).
gccggagcctctatcaaga

SEQ ID NO: 335774 - DNA, 19 bp, Homo sapiens
  siRNA target sequence for IMP-2 (NM_006548.3,1479-1497).
gcgaaaggatggtcatcat

SEQ ID NO: 335775 - DNA, 19 bp, Homo sapiens
  siRNA target sequence for IMP-2 (NM_006548.3,1564-1582).
cttctttaaccccaaagaa

SEQ ID NO: 335776 - DNA, 19 bp, Homo sapiens
  siRNA target sequence for IMP-2 (NM_006548.3,1591-1609).
gctggaagcgcatatcaga

SEQ ID NO: 335777 - DNA, 19 bp, Homo sapiens
  siRNA target sequence for IMP-2 (NM_006548.3,1730-1748).
gaagtgatcgtcagaatta

SEQ ID NO: 335778 - DNA, 19 bp, Homo sapiens
  siRNA target sequence for IMP-2 (NM_006548.3,1743-1761).
gaattatcgggcacttctt

SEQ ID NO: 335779 - DNA, 19 bp, Homo sapiens
  siRNA target sequence for IMP-2 (NM_006548.3,1786-1804).
gatcagggaaattgtacaa

SEQ ID NO: 335780 - DNA, 19 bp, Homo sapiens
  siRNA target sequence for FSBP (NM_006550.1,121-139).
ctcgaagaacacactaata

SEQ ID NO: 335781 - DNA, 19 bp, Homo sapiens
  siRNA target sequence for FSBP (NM_006550.1,173-191).
gggatatcatagcagttaa

SEQ ID NO: 335782 - DNA, 19 bp, Homo sapiens
  siRNA target sequence for FSBP (NM_006550.1,175-193).
gatatcatagcagttaact

SEQ ID NO: 335783 - DNA, 19 bp, Homo sapiens
  siRNA target sequence for FSBP (NM_006550.1,180-198).
catagcagttaactataat

SEQ ID NO: 335784 - DNA, 19 bp, Homo sapiens
  siRNA target sequence for FSBP (NM_006550.1,234-252).
gggcctacgcaccctttat

SEQ ID NO: 335785 - DNA, 19 bp, Homo sapiens
  siRNA target sequence for FSBP (NM_006550.1,235-253).
ggcctacgcaccctttata

SEQ ID NO: 335786 - DNA, 19 bp, Homo sapiens
  siRNA target sequence for FSBP (NM_006550.1,236-254).
gcctacgcaccctttataa

SEQ ID NO: 335787 - DNA, 19 bp, Homo sapiens
  siRNA target sequence for FSBP (NM_006550.1,237-255).
cctacgcaccctttataaa

SEQ ID NO: 335788 - DNA, 19 bp, Homo sapiens
  siRNA target sequence for FSBP (NM_006550.1,238-256).
ctacgcaccctttataaaa

SEQ ID NO: 335789 - DNA, 19 bp, Homo sapiens
  siRNA target sequence for FSBP (NM_006550.1,272-290).
ccaaacaggagctattgca

SEQ ID NO: 335790 - DNA, 19 bp, Homo sapiens
  siRNA target sequence for FSBP (NM_006550.1,374-392).
gtttttgcctggtaagaga

SEQ ID NO: 335791 - DNA, 19 bp, Homo sapiens
  siRNA target sequence for FSBP (NM_006550.1,471-489).
ccatcctgttgctattaca

SEQ ID NO: 335792 - DNA, 19 bp, Homo sapiens
  siRNA target sequence for FSBP (NM_006550.1,703-721).
gaacactttaggtcactat

SEQ ID NO: 335793 - DNA, 19 bp, Homo sapiens
  siRNA target sequence for FSBP (NM_006550.1,736-754).
cagatcctgcaaatgttga

SEQ ID NO: 335794 - DNA, 19 bp, Homo sapiens
  siRNA target sequence for FSBP (NM_006550.1,759-777).
ggagcatcagataatttta

SEQ ID NO: 335795 - DNA, 19 bp, Homo sapiens
  siRNA target sequence for FSBP (NM_006550.1,905-923).
ggcatgatctacctgaata

SEQ ID NO: 335796 - DNA, 19 bp, Homo sapiens
  siRNA target sequence for FSBP (NM_006550.1,906-924).
gcatgatctacctgaatat

SEQ ID NO: 335797 - DNA, 19 bp, Homo sapiens
  siRNA target sequence for FSBP (NM_006550.1,907-925).
catgatctacctgaatata

SEQ ID NO: 335798 - DNA, 19 bp, Homo sapiens
  siRNA target sequence for HFL-EDDG1 (NM_006553.2,259-277).
ccagtaggacattgacata

SEQ ID NO: 335799 - DNA, 19 bp, Homo sapiens
  siRNA target sequence for HFL-EDDG1 (NM_006553.2,272-290).
gacatacatccgagaacat

SEQ ID NO: 335800 - DNA, 19 bp, Homo sapiens
  siRNA target sequence for HFL-EDDG1 (NM_006553.2,320-338).
ggaactttgttctaccaat

SEQ ID NO: 335801 - DNA, 19 bp, Homo sapiens
  siRNA target sequence for HFL-EDDG1 (NM_006553.2,321-339).
gaactttgttctaccaata

SEQ ID NO: 335802 - DNA, 19 bp, Homo sapiens
  siRNA target sequence for HFL-EDDG1 (NM_006553.2,324-342).
ctttgttctaccaatatca

SEQ ID NO: 335803 - DNA, 19 bp, Homo sapiens
  siRNA target sequence for HFL-EDDG1 (NM_006553.2,410-428).
gaccgtgctcacacaagaa

SEQ ID NO: 335804 - DNA, 19 bp, Homo sapiens
  siRNA target sequence for HFL-EDDG1 (NM_006553.2,449-467).
gattagccttggtagttat

SEQ ID NO: 335805 - DNA, 19 bp, Homo sapiens
  siRNA target sequence for HFL-EDDG1 (NM_006553.2,455-473).
ccttggtagttatttggaa

SEQ ID NO: 335806 - DNA, 19 bp, Homo sapiens
  siRNA target sequence for HFL-EDDG1 (NM_006553.2,475-493).
gtttaatggccaatacgat

SEQ ID NO: 335807 - DNA, 19 bp, Homo sapiens
  siRNA target sequence for HFL-EDDG1 (NM_006553.2,485-503).
caatacgatatcatccaat

SEQ ID NO: 335808 - DNA, 19 bp, Homo sapiens
  siRNA target sequence for HFL-EDDG1 (NM_006553.2,519-537).
gctgctatcgagtggataa

SEQ ID NO: 335809 - DNA, 19 bp, Homo sapiens
  siRNA target sequence for HFL-EDDG1 (NM_006553.2,520-538).
ctgctatcgagtggataat

SEQ ID NO: 335810 - DNA, 19 bp, Homo sapiens
  siRNA target sequence for HFL-EDDG1 (NM_006553.2,523-541).
ctatcgagtggataattga

SEQ ID NO: 335811 - DNA, 19 bp, Homo sapiens
  siRNA target sequence for TNRC5 (NM_006586.2,514-532).
gttcgcctgcccagcaaat

SEQ ID NO: 335812 - DNA, 19 bp, Homo sapiens
  siRNA target sequence for TNRC5 (NM_006586.2,533-551).
gcgaagtgtgtaaatatgt

SEQ ID NO: 335813 - DNA, 19 bp, Homo sapiens
  siRNA target sequence for TNRC5 (NM_006586.2,534-552).
cgaagtgtgtaaatatgtt

SEQ ID NO: 335814 - DNA, 19 bp, Homo sapiens
  siRNA target sequence for TNRC5 (NM_006586.2,663-681).
ggacttgcggttaatcgaa

SEQ ID NO: 335815 - DNA, 19 bp, Homo sapiens
  siRNA target sequence for TNRC5 (NM_006586.2,698-716).
gcaagaggctcctggatta

SEQ ID NO: 335816 - DNA, 19 bp, Homo sapiens
  siRNA target sequence for TNRC5 (NM_006586.2,734-752).
ggaccggcagcaatcgatt

SEQ ID NO: 335817 - DNA, 19 bp, Homo sapiens
  siRNA target sequence for TNRC5 (NM_006586.2,735-753).
gaccggcagcaatcgattt

SEQ ID NO: 335818 - DNA, 19 bp, Homo sapiens
  siRNA target sequence for SULT1C2 (NM_006588.2,385-403).
cgacatggaggattttaca

SEQ ID NO: 335819 - DNA, 19 bp, Homo sapiens
  siRNA target sequence for SULT1C2 (NM_006588.2,411-429).
gaacaaagcgcttaagtgt

SEQ ID NO: 335820 - DNA, 19 bp, Homo sapiens
  siRNA target sequence for SULT1C2 (NM_006588.2,433-451).
ctacgtgaagggaattctt

SEQ ID NO: 335821 - DNA, 19 bp, Homo sapiens
  siRNA target sequence for SULT1C2 (NM_006588.2,509-527).
gatgacctgcttatttcta

SEQ ID NO: 335822 - DNA, 19 bp, Homo sapiens
  siRNA target sequence for SULT1C2 (NM_006588.2,518-536).
cttatttctacctatccta

SEQ ID NO: 335823 - DNA, 19 bp, Homo sapiens
  siRNA target sequence for SULT1C2 (NM_006588.2,612-630).
caccgactcatcaacgatt

SEQ ID NO: 335824 - DNA, 19 bp, Homo sapiens
  siRNA target sequence for SULT1C2 (NM_006588.2,616-634).
gactcatcaacgatttcct

SEQ ID NO: 335825 - DNA, 19 bp, Homo sapiens
  siRNA target sequence for SULT1C2 (NM_006588.2,618-636).
ctcatcaacgatttccttt

SEQ ID NO: 335826 - DNA, 19 bp, Homo sapiens
  siRNA target sequence for SULT1C2 (NM_006588.2,627-645).
gatttcctttcctcgaaat

SEQ ID NO: 335827 - DNA, 19 bp, Homo sapiens
  siRNA target sequence for SULT1C2 (NM_006588.2,658-676).
cttaggatctggtttggaa

SEQ ID NO: 335828 - DNA, 19 bp, Homo sapiens
  siRNA target sequence for SULT1C2 (NM_006588.2,740-758).
ccatccttgctagagaaaa

SEQ ID NO: 335829 - DNA, 19 bp, Homo sapiens
  siRNA target sequence for SULT1C2 (NM_006588.2,944-962).
gacaaacaccgtattctct

SEQ ID NO: 335830 - DNA, 19 bp, Homo sapiens
  siRNA target sequence for SULT1C2 (NM_006588.2,946-964).
caaacaccgtattctctat

SEQ ID NO: 335831 - DNA, 19 bp, Homo sapiens
  siRNA target sequence for SULT1C2 (NM_006588.2,950-968).
caccgtattctctatctct

SEQ ID NO: 335832 - DNA, 19 bp, Homo sapiens
  siRNA target sequence for SULT1C2 (NM_006588.2,1077-1095).
cgtttgatgtcatgaaaca

SEQ ID NO: 335833 - DNA, 19 bp, Homo sapiens
  siRNA target sequence for SULT1C2 (NM_006588.2,1105-1123).
ggcaaactattcatcgatt

SEQ ID NO: 335834 - DNA, 19 bp, Homo sapiens
  siRNA target sequence for SULT1C2 (NM_006588.2,1119-1137).
cgattcctgctgaaatcat

SEQ ID NO: 335835 - DNA, 19 bp, Homo sapiens
  siRNA target sequence for SULT1C2 (NM_006588.2,1248-1266).
ctgataccagactaacttt

SEQ ID NO: 335836 - DNA, 19 bp, Homo sapiens
  siRNA target sequence for STAG2 (NM_006603.3,289-307).
cagattttgaagatatcga

SEQ ID NO: 335837 - DNA, 19 bp, Homo sapiens
  siRNA target sequence for STAG2 (NM_006603.3,516-534).
gattggatagaatcataca

SEQ ID NO: 335838 - DNA, 19 bp, Homo sapiens
  siRNA target sequence for STAG2 (NM_006603.3,533-551).
caagcatgaccgagatata

SEQ ID NO: 335839 - DNA, 19 bp, Homo sapiens
  siRNA target sequence for STAG2 (NM_006603.3,536-554).
gcatgaccgagatatagca

SEQ ID NO: 335840 - DNA, 19 bp, Homo sapiens
  siRNA target sequence for STAG2 (NM_006603.3,542-560).
ccgagatatagcacttctt

SEQ ID NO: 335841 - DNA, 19 bp, Homo sapiens
  siRNA target sequence for STAG2 (NM_006603.3,544-562).
gagatatagcacttcttga

SEQ ID NO: 335842 - DNA, 19 bp, Homo sapiens
  siRNA target sequence for STAG2 (NM_006603.3,552-570).
gcacttcttgaccttatca

SEQ ID NO: 335843 - DNA, 19 bp, Homo sapiens
  siRNA target sequence for STAG2 (NM_006603.3,584-602).
gtgttcaggctgtaaagga

SEQ ID NO: 335844 - DNA, 19 bp, Homo sapiens
  siRNA target sequence for STAG2 (NM_006603.3,635-653).
gaactctgagataattcga

SEQ ID NO: 335845 - DNA, 19 bp, Homo sapiens
  siRNA target sequence for STAG2 (NM_006603.3,758-776).
gttagtacggcaatgtcaa

SEQ ID NO: 335846 - DNA, 19 bp, Homo sapiens
  siRNA target sequence for STAG2 (NM_006603.3,762-780).
gtacggcaatgtcaatata

SEQ ID NO: 335847 - DNA, 19 bp, Homo sapiens
  siRNA target sequence for STAG2 (NM_006603.3,765-783).
cggcaatgtcaatatagta

SEQ ID NO: 335848 - DNA, 19 bp, Homo sapiens
  siRNA target sequence for STAG2 (NM_006603.3,768-786).
caatgtcaatatagtatca

SEQ ID NO: 335849 - DNA, 19 bp, Homo sapiens
  siRNA target sequence for STAG2 (NM_006603.3,781-799).
gtatcatatatgatgagta

SEQ ID NO: 335850 - DNA, 19 bp, Homo sapiens
  siRNA target sequence for STAG2 (NM_006603.3,842-860).
ctcacaagtcagagcattt

SEQ ID NO: 335851 - DNA, 19 bp, Homo sapiens
  siRNA target sequence for STAG2 (NM_006603.3,874-892).
ccctggcagctatgaagtt

SEQ ID NO: 335852 - DNA, 19 bp, Homo sapiens
  siRNA target sequence for STAG2 (NM_006603.3,908-926).
gaatgtggcactaaatctt

SEQ ID NO: 335853 - DNA, 19 bp, Homo sapiens
  siRNA target sequence for STAG2 (NM_006603.3,918-936).
ctaaatcttagcattaata

SEQ ID NO: 335854 - DNA, 19 bp, Homo sapiens
  siRNA target sequence for STAG2 (NM_006603.3,1005-1023).
ctagaactcctgctacaaa

SEQ ID NO: 335855 - DNA, 19 bp, Homo sapiens
  siRNA target sequence for STAG2 (NM_006603.3,1119-1137).
gctgaaattcgagctattt

SEQ ID NO: 335856 - DNA, 19 bp, Homo sapiens
  siRNA target sequence for STAG2 (NM_006603.3,1122-1140).
gaaattcgagctatttgca

SEQ ID NO: 335857 - DNA, 19 bp, Homo sapiens
  siRNA target sequence for STAG2 (NM_006603.3,1236-1254).
ggtgaagtaagactcaaat

SEQ ID NO: 335858 - DNA, 19 bp, Homo sapiens
  siRNA target sequence for STAG2 (NM_006603.3,1263-1281).
gctctacaagggctttatt

SEQ ID NO: 335859 - DNA, 19 bp, Homo sapiens
  siRNA target sequence for STAG2 (NM_006603.3,1269-1287).
caagggctttattataaca

SEQ ID NO: 335860 - DNA, 19 bp, Homo sapiens
  siRNA target sequence for STAG2 (NM_006603.3,1321-1339).
gtcggttcaaggatagaat

SEQ ID NO: 335861 - DNA, 19 bp, Homo sapiens
  siRNA target sequence for STAG2 (NM_006603.3,1332-1350).
gatagaattgtgtctatga

SEQ ID NO: 335862 - DNA, 19 bp, Homo sapiens
  siRNA target sequence for STAG2 (NM_006603.3,1343-1361).
gtctatgacccttgacaaa

SEQ ID NO: 335863 - DNA, 19 bp, Homo sapiens
  siRNA target sequence for STAG2 (NM_006603.3,1371-1389).
gttgcagtacaagcaataa

SEQ ID NO: 335864 - DNA, 19 bp, Homo sapiens
  siRNA target sequence for STAG2 (NM_006603.3,1454-1472).
ctatcatctggtttattca

SEQ ID NO: 335865 - DNA, 19 bp, Homo sapiens
  siRNA target sequence for STAG2 (NM_006603.3,1520-1538).
gctcttcagtcgtagagat

SEQ ID NO: 335866 - DNA, 19 bp, Homo sapiens
  siRNA target sequence for STAG2 (NM_006603.3,1581-1599).
ccaaatgccaaccttgtta

SEQ ID NO: 335867 - DNA, 19 bp, Homo sapiens
  siRNA target sequence for STAG2 (NM_006603.3,1582-1600).
caaatgccaaccttgttaa

SEQ ID NO: 335868 - DNA, 19 bp, Homo sapiens
  siRNA target sequence for STAG2 (NM_006603.3,1592-1610).
ccttgttaagacattggtt

SEQ ID NO: 335869 - DNA, 19 bp, Homo sapiens
  siRNA target sequence for STAG2 (NM_006603.3,1648-1666).
cataccttgtggatagcat

SEQ ID NO: 335870 - DNA, 19 bp, Homo sapiens
  siRNA target sequence for STAG2 (NM_006603.3,1705-1723).
gtatgaatagcttgttact

SEQ ID NO: 335871 - DNA, 19 bp, Homo sapiens
  siRNA target sequence for STAG2 (NM_006603.3,1741-1759).
gagaggaagcactaacaga

SEQ ID NO: 335872 - DNA, 19 bp, Homo sapiens
  siRNA target sequence for STAG2 (NM_006603.3,1743-1761).
gaggaagcactaacagata

SEQ ID NO: 335873 - DNA, 19 bp, Homo sapiens
  siRNA target sequence for STAG2 (NM_006603.3,1763-1781).
gcaagagagtgctctgatt

SEQ ID NO: 335874 - DNA, 19 bp, Homo sapiens
  siRNA target sequence for STAG2 (NM_006603.3,1776-1794).
ctgattgaaataatgcttt

SEQ ID NO: 335875 - DNA, 19 bp, Homo sapiens
  siRNA target sequence for STAG2 (NM_006603.3,1804-1822).
gacaagcggctgaatgtca

SEQ ID NO: 335876 - DNA, 19 bp, Homo sapiens
  siRNA target sequence for STAG2 (NM_006603.3,1919-1937).
cgtggcccttcctcagtta

SEQ ID NO: 335877 - DNA, 19 bp, Homo sapiens
  siRNA target sequence for STAG2 (NM_006603.3,1925-1943).
ccttcctcagttattagca

SEQ ID NO: 335878 - DNA, 19 bp, Homo sapiens
  siRNA target sequence for STAG2 (NM_006603.3,1926-1944).
cttcctcagttattagcaa

SEQ ID NO: 335879 - DNA, 19 bp, Homo sapiens
  siRNA target sequence for STAG2 (NM_006603.3,1990-2008).
ctcagtactttgatttgga

SEQ ID NO: 335880 - DNA, 19 bp, Homo sapiens
  siRNA target sequence for STAG2 (NM_006603.3,2017-2035).
ccactggacgattagaaaa

SEQ ID NO: 335881 - DNA, 19 bp, Homo sapiens
  siRNA target sequence for STAG2 (NM_006603.3,2020-2038).
ctggacgattagaaaagca

SEQ ID NO: 335882 - DNA, 19 bp, Homo sapiens
  siRNA target sequence for STAG2 (NM_006603.3,2022-2040).
ggacgattagaaaagcatt

SEQ ID NO: 335883 - DNA, 19 bp, Homo sapiens
  siRNA target sequence for STAG2 (NM_006603.3,2023-2041).
gacgattagaaaagcattt

SEQ ID NO: 335884 - DNA, 19 bp, Homo sapiens
  siRNA target sequence for STAG2 (NM_006603.3,2097-2115).
gttttggaagcatgttcta

SEQ ID NO: 335885 - DNA, 19 bp, Homo sapiens
  siRNA target sequence for STAG2 (NM_006603.3,2102-2120).
ggaagcatgttctaaaact

SEQ ID NO: 335886 - DNA, 19 bp, Homo sapiens
  siRNA target sequence for STAG2 (NM_006603.3,2103-2121).
gaagcatgttctaaaactt

SEQ ID NO: 335887 - DNA, 19 bp, Homo sapiens
  siRNA target sequence for STAG2 (NM_006603.3,2128-2146).
cactctgtaatgaagagtt

SEQ ID NO: 335888 - DNA, 19 bp, Homo sapiens
  siRNA target sequence for STAG2 (NM_006603.3,2139-2157).
gaagagttcacaatcttca

SEQ ID NO: 335889 - DNA, 19 bp, Homo sapiens
  siRNA target sequence for STAG2 (NM_006603.3,2173-2191).
caagaagtcaactgataga

SEQ ID NO: 335890 - DNA, 19 bp, Homo sapiens
  siRNA target sequence for STAG2 (NM_006603.3,2213-2231).
ccggcttcttgaagatttt

SEQ ID NO: 335891 - DNA, 19 bp, Homo sapiens
  siRNA target sequence for STAG2 (NM_006603.3,2240-2258).
gggtgaagaacctgatgaa

SEQ ID NO: 335892 - DNA, 19 bp, Homo sapiens
  siRNA target sequence for STAG2 (NM_006603.3,2262-2280).
gatgcatatcaggtattgt

SEQ ID NO: 335893 - DNA, 19 bp, Homo sapiens
  siRNA target sequence for STAG2 (NM_006603.3,2265-2283).
gcatatcaggtattgtcaa

SEQ ID NO: 335894 - DNA, 19 bp, Homo sapiens
  siRNA target sequence for STAG2 (NM_006603.3,2313-2331).
gcccatgacctttcaaagt

SEQ ID NO: 335895 - DNA, 19 bp, Homo sapiens
  siRNA target sequence for STAG2 (NM_006603.3,2321-2339).
cctttcaaagtgggattta

SEQ ID NO: 335896 - DNA, 19 bp, Homo sapiens
  siRNA target sequence for STAG2 (NM_006603.3,2322-2340).
ctttcaaagtgggatttat

SEQ ID NO: 335897 - DNA, 19 bp, Homo sapiens
  siRNA target sequence for STAG2 (NM_006603.3,2344-2362).
cttgtaattacaaactctt

SEQ ID NO: 335898 - DNA, 19 bp, Homo sapiens
  siRNA target sequence for STAG2 (NM_006603.3,2347-2365).
gtaattacaaactcttgaa

SEQ ID NO: 335899 - DNA, 19 bp, Homo sapiens
  siRNA target sequence for STAG2 (NM_006603.3,2392-2410).
ctgagcagattgttattca

SEQ ID NO: 335900 - DNA, 19 bp, Homo sapiens
  siRNA target sequence for STAG2 (NM_006603.3,2417-2435).
gcagtgtactcactatgta

SEQ ID NO: 335901 - DNA, 19 bp, Homo sapiens
  siRNA target sequence for STAG2 (NM_006603.3,2418-2436).
cagtgtactcactatgtaa

SEQ ID NO: 335902 - DNA, 19 bp, Homo sapiens
  siRNA target sequence for STAG2 (NM_006603.3,2422-2440).
gtactcactatgtaatcct

SEQ ID NO: 335903 - DNA, 19 bp, Homo sapiens
  siRNA target sequence for STAG2 (NM_006603.3,2481-2499).
gaggacttgctgcgtttaa

SEQ ID NO: 335904 - DNA, 19 bp, Homo sapiens
  siRNA target sequence for STAG2 (NM_006603.3,2543-2561).
gaccaacgtgaatactact

SEQ ID NO: 335905 - DNA, 19 bp, Homo sapiens
  siRNA target sequence for STAG2 (NM_006603.3,2546-2564).
caacgtgaatactactgtt

SEQ ID NO: 335906 - DNA, 19 bp, Homo sapiens
  siRNA target sequence for STAG2 (NM_006603.3,2609-2627).
cagccatcagattatgtca

SEQ ID NO: 335907 - DNA, 19 bp, Homo sapiens
  siRNA target sequence for STAG2 (NM_006603.3,2629-2647).
gagggcgtgacatgttaga

SEQ ID NO: 335908 - DNA, 19 bp, Homo sapiens
  siRNA target sequence for STAG2 (NM_006603.3,2655-2673).
gtgtatacccctgattctt

SEQ ID NO: 335909 - DNA, 19 bp, Homo sapiens
  siRNA target sequence for STAG2 (NM_006603.3,2657-2675).
gtatacccctgattcttca

SEQ ID NO: 335910 - DNA, 19 bp, Homo sapiens
  siRNA target sequence for STAG2 (NM_006603.3,2811-2829).
gcagcattttgtaagctaa

SEQ ID NO: 335911 - DNA, 19 bp, Homo sapiens
  siRNA target sequence for STAG2 (NM_006603.3,2898-2916).
gactatggagatatcatca

SEQ ID NO: 335912 - DNA, 19 bp, Homo sapiens
  siRNA target sequence for STAG2 (NM_006603.3,2957-2975).
gtgtgctaagacccttatt

SEQ ID NO: 335913 - DNA, 19 bp, Homo sapiens
  siRNA target sequence for STAG2 (NM_006603.3,2959-2977).
gtgctaagacccttattct

SEQ ID NO: 335914 - DNA, 19 bp, Homo sapiens
  siRNA target sequence for STAG2 (NM_006603.3,2961-2979).
gctaagacccttattctca

SEQ ID NO: 335915 - DNA, 19 bp, Homo sapiens
  siRNA target sequence for STAG2 (NM_006603.3,3018-3036).
ggctataattttgatagat

SEQ ID NO: 335916 - DNA, 19 bp, Homo sapiens
  siRNA target sequence for STAG2 (NM_006603.3,3066-3084).
cttgctcgacgttttgctt

SEQ ID NO: 335917 - DNA, 19 bp, Homo sapiens
  siRNA target sequence for STAG2 (NM_006603.3,3069-3087).
gctcgacgttttgctttaa

SEQ ID NO: 335918 - DNA, 19 bp, Homo sapiens
  siRNA target sequence for STAG2 (NM_006603.3,3073-3091).
gacgttttgctttaacttt

SEQ ID NO: 335919 - DNA, 19 bp, Homo sapiens
  siRNA target sequence for STAG2 (NM_006603.3,3096-3114).
cttgatcagttgaaaacaa

SEQ ID NO: 335920 - DNA, 19 bp, Homo sapiens
  siRNA target sequence for STAG2 (NM_006603.3,3121-3139).
ccattgccatgctacacaa

SEQ ID NO: 335921 - DNA, 19 bp, Homo sapiens
  siRNA target sequence for STAG2 (NM_006603.3,3183-3201).
gagagccatccacctttaa

SEQ ID NO: 335922 - DNA, 19 bp, Homo sapiens
  siRNA target sequence for STAG2 (NM_006603.3,3216-3234).
gatattctgagtgaatttt

SEQ ID NO: 335923 - DNA, 19 bp, Homo sapiens
  siRNA target sequence for STAG2 (NM_006603.3,3246-3264).
cttcgacaagacaaaagaa

SEQ ID NO: 335924 - DNA, 19 bp, Homo sapiens
  siRNA target sequence for STAG2 (NM_006603.3,3328-3346).
ggcttccactgatgtctta

SEQ ID NO: 335925 - DNA, 19 bp, Homo sapiens
  siRNA target sequence for STAG2 (NM_006603.3,3338-3356).
gatgtcttaccgaaattct

SEQ ID NO: 335926 - DNA, 19 bp, Homo sapiens
  siRNA target sequence for STAG2 (NM_006603.3,3359-3377).
gctagctggtggtgatgat

SEQ ID NO: 335927 - DNA, 19 bp, Homo sapiens
  siRNA target sequence for STAG2 (NM_006603.3,3416-3434).
gtcaacagtacggagtaaa

SEQ ID NO: 335928 - DNA, 19 bp, Homo sapiens
  siRNA target sequence for STAG2 (NM_006603.3,3418-3436).
caacagtacggagtaaaaa

SEQ ID NO: 335929 - DNA, 19 bp, Homo sapiens
  siRNA target sequence for STAG2 (NM_006603.3,3513-3531).
gacagtatgtggttaagca

SEQ ID NO: 335930 - DNA, 19 bp, Homo sapiens
  siRNA target sequence for STAG2 (NM_006603.3,3543-3561).
ctgcacacccctgttatga

SEQ ID NO: 335931 - DNA, 19 bp, Homo sapiens
  siRNA target sequence for STAG2 (NM_006603.3,3576-3594).
ctcacctccactattatga

SEQ ID NO: 335932 - DNA, 19 bp, Homo sapiens
  siRNA target sequence for STAG2 (NM_006603.3,3578-3596).
cacctccactattatgaga

SEQ ID NO: 335933 - DNA, 19 bp, Homo sapiens
  siRNA target sequence for STAG2 (NM_006603.3,3615-3633).
cctgaggatagcttcatga

SEQ ID NO: 335934 - DNA, 19 bp, Homo sapiens
  siRNA target sequence for STAG2 (NM_006603.3,3626-3644).
cttcatgagtgtttatcca

SEQ ID NO: 335935 - DNA, 19 bp, Homo sapiens
  siRNA target sequence for STAG2 (NM_006603.3,3753-3771).
gggaggattgaggatctta

SEQ ID NO: 335936 - DNA, 19 bp, Homo sapiens
  siRNA target sequence for STAG2 (NM_006603.3,3754-3772).
ggaggattgaggatcttaa

SEQ ID NO: 335937 - DNA, 19 bp, Homo sapiens
  siRNA target sequence for STAG2 (NM_006603.3,3783-3801).
gattttgacaccatggata

SEQ ID NO: 335938 - DNA, 19 bp, Homo sapiens
  siRNA target sequence for STAG2 (NM_006603.3,3789-3807).
gacaccatggatatagatt

SEQ ID NO: 335939 - DNA, 19 bp, Homo sapiens
  siRNA target sequence for STAG2 (NM_006603.3,3857-3875).
ctttgatccagcttcaatt

SEQ ID NO: 335940 - DNA, 19 bp, Homo sapiens
  siRNA target sequence for STAG2 (NM_006603.3,3867-3885).
gcttcaattatggatgaat

SEQ ID NO: 335941 - DNA, 19 bp, Homo sapiens
  siRNA target sequence for STAG2 (NM_006603.3,3891-3909).
cttggagtgtcaatgtttt

SEQ ID NO: 335942 - DNA, 19 bp, Homo sapiens
  siRNA target sequence for NES (NM_006617.1,149-167).
ggggaggagtcgtttcaga

SEQ ID NO: 335943 - DNA, 19 bp, Homo sapiens
  siRNA target sequence for NES (NM_006617.1,150-168).
gggaggagtcgtttcagat

SEQ ID NO: 335944 - DNA, 19 bp, Homo sapiens
  siRNA target sequence for NES (NM_006617.1,890-908).
cggctgcgggctactgaaa

SEQ ID NO: 335945 - DNA, 19 bp, Homo sapiens
  siRNA target sequence for NES (NM_006617.1,891-909).
ggctgcgggctactgaaaa

SEQ ID NO: 335946 - DNA, 19 bp, Homo sapiens
  siRNA target sequence for NES (NM_006617.1,893-911).
ctgcgggctactgaaaagt

SEQ ID NO: 335947 - DNA, 19 bp, Homo sapiens
  siRNA target sequence for NES (NM_006617.1,995-1013).
ctggcgcacctcaagatgt

SEQ ID NO: 335948 - DNA, 19 bp, Homo sapiens
  siRNA target sequence for NES (NM_006617.1,1082-1100).
ggcggtggctccaagactt

SEQ ID NO: 335949 - DNA, 19 bp, Homo sapiens
  siRNA target sequence for NES (NM_006617.1,1546-1564).
ccctgaccactccagttta

SEQ ID NO: 335950 - DNA, 19 bp, Homo sapiens
  siRNA target sequence for NES (NM_006617.1,1558-1576).
cagtttagaggctaaggat

SEQ ID NO: 335951 - DNA, 19 bp, Homo sapiens
  siRNA target sequence for NES (NM_006617.1,1640-1658).
gggttggtagagaaagaaa

SEQ ID NO: 335952 - DNA, 19 bp, Homo sapiens
  siRNA target sequence for NES (NM_006617.1,1833-1851).
cactagaaagggagaatca

SEQ ID NO: 335953 - DNA, 19 bp, Homo sapiens
  siRNA target sequence for NES (NM_006617.1,1857-1875).
gtccgaggtctttagaaga

SEQ ID NO: 335954 - DNA, 19 bp, Homo sapiens
  siRNA target sequence for NES (NM_006617.1,1864-1882).
gtctttagaagaagactta

SEQ ID NO: 335955 - DNA, 19 bp, Homo sapiens
  siRNA target sequence for NES (NM_006617.1,1936-1954).
ggtagtgagacctctagaa

SEQ ID NO: 335956 - DNA, 19 bp, Homo sapiens
  siRNA target sequence for NES (NM_006617.1,1958-1976).
gaggctgtaggccaactta

SEQ ID NO: 335957 - DNA, 19 bp, Homo sapiens
  siRNA target sequence for NES (NM_006617.1,2046-2064).
ctcttgaaggtaatctaga

SEQ ID NO: 335958 - DNA, 19 bp, Homo sapiens
  siRNA target sequence for NES (NM_006617.1,2054-2072).
ggtaatctagagacatttt

SEQ ID NO: 335959 - DNA, 19 bp, Homo sapiens
  siRNA target sequence for NES (NM_006617.1,2079-2097).
caggaacggaaaatcaaga

SEQ ID NO: 335960 - DNA, 19 bp, Homo sapiens
  siRNA target sequence for NES (NM_006617.1,2082-2100).
gaacggaaaatcaagaatt

SEQ ID NO: 335961 - DNA, 19 bp, Homo sapiens
  siRNA target sequence for NES (NM_006617.1,2085-2103).
cggaaaatcaagaattagt

SEQ ID NO: 335962 - DNA, 19 bp, Homo sapiens
  siRNA target sequence for NES (NM_006617.1,2109-2127).
ctctgcaagagaacttaga

SEQ ID NO: 335963 - DNA, 19 bp, Homo sapiens
  siRNA target sequence for NES (NM_006617.1,2196-2214).
cactgagacctctgacaaa

SEQ ID NO: 335964 - DNA, 19 bp, Homo sapiens
  siRNA target sequence for NES (NM_006617.1,2260-2278).
ggcctttagatctctagaa

SEQ ID NO: 335965 - DNA, 19 bp, Homo sapiens
  siRNA target sequence for NES (NM_006617.1,2261-2279).
gcctttagatctctagaaa

SEQ ID NO: 335966 - DNA, 19 bp, Homo sapiens
  siRNA target sequence for NES (NM_006617.1,2392-2410).
gacattgagaactcttgaa

SEQ ID NO: 335967 - DNA, 19 bp, Homo sapiens
  siRNA target sequence for NES (NM_006617.1,2394-2412).
cattgagaactcttgaaaa

SEQ ID NO: 335968 - DNA, 19 bp, Homo sapiens
  siRNA target sequence for NES (NM_006617.1,2504-2522).
cttgaccaggagatagcta

SEQ ID NO: 335969 - DNA, 19 bp, Homo sapiens
  siRNA target sequence for NES (NM_006617.1,2515-2533).
gatagctagacctcttgaa

SEQ ID NO: 335970 - DNA, 19 bp, Homo sapiens
  siRNA target sequence for NES (NM_006617.1,2548-2566).
gttcttaaagtcactcaaa

SEQ ID NO: 335971 - DNA, 19 bp, Homo sapiens
  siRNA target sequence for NES (NM_006617.1,2572-2590).
gagcgtagaggcagtaaaa

SEQ ID NO: 335972 - DNA, 19 bp, Homo sapiens
  siRNA target sequence for NES (NM_006617.1,2575-2593).
cgtagaggcagtaaaatct

SEQ ID NO: 335973 - DNA, 19 bp, Homo sapiens
  siRNA target sequence for NES (NM_006617.1,2576-2594).
gtagaggcagtaaaatctt

SEQ ID NO: 335974 - DNA, 19 bp, Homo sapiens
  siRNA target sequence for NES (NM_006617.1,2708-2726).
gcaatgaatcctctagaaa

SEQ ID NO: 335975 - DNA, 19 bp, Homo sapiens
  siRNA target sequence for NES (NM_006617.1,2789-2807).
gaggagaatcaggaatcat

SEQ ID NO: 335976 - DNA, 19 bp, Homo sapiens
  siRNA target sequence for NES (NM_006617.1,2794-2812).
gaatcaggaatcattgaga

SEQ ID NO: 335977 - DNA, 19 bp, Homo sapiens
  siRNA target sequence for NES (NM_006617.1,3540-3558).
gcttggaagggcctagaaa

SEQ ID NO: 335978 - DNA, 19 bp, Homo sapiens
  siRNA target sequence for NES (NM_006617.1,4252-4270).
gactgaggcaccttttctt

SEQ ID NO: 335979 - DNA, 19 bp, Homo sapiens
  siRNA target sequence for NES (NM_006617.1,4499-4517).
gaattcctggagtctgatt

SEQ ID NO: 335980 - DNA, 19 bp, Homo sapiens
  siRNA target sequence for SDCCAG8 (NM_006642.1,158-176).
gcaccagtgtgggaaatga

SEQ ID NO: 335981 - DNA, 19 bp, Homo sapiens
  siRNA target sequence for SDCCAG8 (NM_006642.1,191-209).
cctggcccgaattacaaca

SEQ ID NO: 335982 - DNA, 19 bp, Homo sapiens
  siRNA target sequence for SDCCAG8 (NM_006642.1,299-317).
cccccttgaggtcattaga

SEQ ID NO: 335983 - DNA, 19 bp, Homo sapiens
  siRNA target sequence for SDCCAG8 (NM_006642.1,300-318).
ccccttgaggtcattagaa

SEQ ID NO: 335984 - DNA, 19 bp, Homo sapiens
  siRNA target sequence for SDCCAG8 (NM_006642.1,302-320).
ccttgaggtcattagaaca

SEQ ID NO: 335985 - DNA, 19 bp, Homo sapiens
  siRNA target sequence for SDCCAG8 (NM_006642.1,341-359).
ctatgcacgaccttgttca

SEQ ID NO: 335986 - DNA, 19 bp, Homo sapiens
  siRNA target sequence for SDCCAG8 (NM_006642.1,345-363).
gcacgaccttgttcatact

SEQ ID NO: 335987 - DNA, 19 bp, Homo sapiens
  siRNA target sequence for SDCCAG8 (NM_006642.1,346-364).
cacgaccttgttcatacta

SEQ ID NO: 335988 - DNA, 19 bp, Homo sapiens
  siRNA target sequence for SDCCAG8 (NM_006642.1,348-366).
cgaccttgttcatactatt

SEQ ID NO: 335989 - DNA, 19 bp, Homo sapiens
  siRNA target sequence for SDCCAG8 (NM_006642.1,349-367).
gaccttgttcatactatta

SEQ ID NO: 335990 - DNA, 19 bp, Homo sapiens
  siRNA target sequence for SDCCAG8 (NM_006642.1,391-409).
catttagaggcagaagtta

SEQ ID NO: 335991 - DNA, 19 bp, Homo sapiens
  siRNA target sequence for SDCCAG8 (NM_006642.1,483-501).
gcaacagctaaaatctcaa

SEQ ID NO: 335992 - DNA, 19 bp, Homo sapiens
  siRNA target sequence for SDCCAG8 (NM_006642.1,489-507).
gctaaaatctcaaagacaa

SEQ ID NO: 335993 - DNA, 19 bp, Homo sapiens
  siRNA target sequence for SDCCAG8 (NM_006642.1,592-610).
gtgggcgaaacctccaaaa

SEQ ID NO: 335994 - DNA, 19 bp, Homo sapiens
  siRNA target sequence for SDCCAG8 (NM_006642.1,611-629).
gaccattttcccatgacaa

SEQ ID NO: 335995 - DNA, 19 bp, Homo sapiens
  siRNA target sequence for SDCCAG8 (NM_006642.1,675-693).
ggagaagctaaaacttact

SEQ ID NO: 335996 - DNA, 19 bp, Homo sapiens
  siRNA target sequence for SDCCAG8 (NM_006642.1,688-706).
cttacttatgaggaaaagt

SEQ ID NO: 335997 - DNA, 19 bp, Homo sapiens
  siRNA target sequence for SDCCAG8 (NM_006642.1,740-758).
ggaacgacttagctgaata

SEQ ID NO: 335998 - DNA, 19 bp, Homo sapiens
  siRNA target sequence for SDCCAG8 (NM_006642.1,741-759).
gaacgacttagctgaatat

SEQ ID NO: 335999 - DNA, 19 bp, Homo sapiens
  siRNA target sequence for SDCCAG8 (NM_006642.1,808-826).
cttctggctgctaatactt

SEQ ID NO: 336000 - DNA, 19 bp, Homo sapiens
  siRNA target sequence for SDCCAG8 (NM_006642.1,811-829).
ctggctgctaatacttgta

SEQ ID NO: 336001 - DNA, 19 bp, Homo sapiens
  siRNA target sequence for SDCCAG8 (NM_006642.1,835-853).
gttggtggtctttgtttga

SEQ ID NO: 336002 - DNA, 19 bp, Homo sapiens
  siRNA target sequence for SDCCAG8 (NM_006642.1,882-900).
ccaaacccatactaatgtt

SEQ ID NO: 336003 - DNA, 19 bp, Homo sapiens
  siRNA target sequence for SDCCAG8 (NM_006642.1,911-929).
ccatcgaaagactggttaa

SEQ ID NO: 336004 - DNA, 19 bp, Homo sapiens
  siRNA target sequence for SDCCAG8 (NM_006642.1,912-930).
catcgaaagactggttaaa

SEQ ID NO: 336005 - DNA, 19 bp, Homo sapiens
  siRNA target sequence for SDCCAG8 (NM_006642.1,980-998).
cagatacgcagcaaagaga

SEQ ID NO: 336006 - DNA, 19 bp, Homo sapiens
  siRNA target sequence for SDCCAG8 (NM_006642.1,1007-1025).
cttatgaacaggtgaaaca

SEQ ID NO: 336007 - DNA, 19 bp, Homo sapiens
  siRNA target sequence for SDCCAG8 (NM_006642.1,1040-1058).
ctgaggaagccaattttga

SEQ ID NO: 336008 - DNA, 19 bp, Homo sapiens
  siRNA target sequence for SDCCAG8 (NM_006642.1,1115-1133).
cggagcgacttgaaaaaga

SEQ ID NO: 336009 - DNA, 19 bp, Homo sapiens
  siRNA target sequence for SDCCAG8 (NM_006642.1,1119-1137).
gcgacttgaaaaagaactt

SEQ ID NO: 336010 - DNA, 19 bp, Homo sapiens
  siRNA target sequence for SDCCAG8 (NM_006642.1,1202-1220).
gggagtacatgggatcaaa

SEQ ID NO: 336011 - DNA, 19 bp, Homo sapiens
  siRNA target sequence for SDCCAG8 (NM_006642.1,1204-1222).
gagtacatgggatcaaaga

SEQ ID NO: 336012 - DNA, 19 bp, Homo sapiens
  siRNA target sequence for SDCCAG8 (NM_006642.1,1227-1245).
gatcttgtctcagaatatt

SEQ ID NO: 336013 - DNA, 19 bp, Homo sapiens
  siRNA target sequence for SDCCAG8 (NM_006642.1,1329-1347).
ggcttctcgggaaatggat

SEQ ID NO: 336014 - DNA, 19 bp, Homo sapiens
  siRNA target sequence for SDCCAG8 (NM_006642.1,1555-1573).
gaggagtgcctgagactaa

SEQ ID NO: 336015 - DNA, 19 bp, Homo sapiens
  siRNA target sequence for SDCCAG8 (NM_006642.1,1557-1575).
ggagtgcctgagactaaca

SEQ ID NO: 336016 - DNA, 19 bp, Homo sapiens
  siRNA target sequence for SDCCAG8 (NM_006642.1,1767-1785).
gacctcccagaatacattt

SEQ ID NO: 336017 - DNA, 19 bp, Homo sapiens
  siRNA target sequence for SDCCAG8 (NM_006642.1,1811-1829).
gtacattagccaagaaact

SEQ ID NO: 336018 - DNA, 19 bp, Homo sapiens
  siRNA target sequence for SDCCAG8 (NM_006642.1,1864-1882).
gctcaactcagtcaagaaa

SEQ ID NO: 336019 - DNA, 19 bp, Homo sapiens
  siRNA target sequence for SDCCAG8 (NM_006642.1,1865-1883).
ctcaactcagtcaagaaaa

SEQ ID NO: 336020 - DNA, 19 bp, Homo sapiens
  siRNA target sequence for SDCCAG8 (NM_006642.1,1950-1968).
ccagcatgggagagtacat

SEQ ID NO: 336021 - DNA, 19 bp, Homo sapiens
  siRNA target sequence for SDCCAG8 (NM_006642.1,1966-1984).
catgagacgatgaagcaaa

SEQ ID NO: 336022 - DNA, 19 bp, Homo sapiens
  siRNA target sequence for SDCCAG8 (NM_006642.1,2117-2135).
ccagcatgccacaatctga

SEQ ID NO: 336023 - DNA, 19 bp, Homo sapiens
  siRNA target sequence for SDCCAG8 (NM_006642.1,2118-2136).
cagcatgccacaatctgat

SEQ ID NO: 336024 - DNA, 19 bp, Homo sapiens
  siRNA target sequence for STARD10 (NM_006645.1,733-751).
gtcctacacgacattgagt

SEQ ID NO: 336025 - DNA, 19 bp, Homo sapiens
  siRNA target sequence for STARD10 (NM_006645.1,744-762).
cattgagtaccgcaagaaa

SEQ ID NO: 336026 - DNA, 19 bp, Homo sapiens
  siRNA target sequence for STARD10 (NM_006645.1,764-782).
gggacagcaacgtcattga

SEQ ID NO: 336027 - DNA, 19 bp, Homo sapiens
  siRNA target sequence for STARD10 (NM_006645.1,770-788).
gcaacgtcattgagacttt

SEQ ID NO: 336028 - DNA, 19 bp, Homo sapiens
  siRNA target sequence for STARD10 (NM_006645.1,771-789).
caacgtcattgagactttt

SEQ ID NO: 336029 - DNA, 19 bp, Homo sapiens
  siRNA target sequence for STARD10 (NM_006645.1,814-832).
gctgacgtgggctattact

SEQ ID NO: 336030 - DNA, 19 bp, Homo sapiens
  siRNA target sequence for STARD10 (NM_006645.1,893-911).
ccatgggcgctgattacat

SEQ ID NO: 336031 - DNA, 19 bp, Homo sapiens
  siRNA target sequence for STARD10 (NM_006645.1,897-915).
gggcgctgattacatcatt

SEQ ID NO: 336032 - DNA, 19 bp, Homo sapiens
  siRNA target sequence for STARD10 (NM_006645.1,901-919).
gctgattacatcattatga

SEQ ID NO: 336033 - DNA, 19 bp, Homo sapiens
  siRNA target sequence for STARD10 (NM_006645.1,918-936).
gaactactcagtcaaacat

SEQ ID NO: 336034 - DNA, 19 bp, Homo sapiens
  siRNA target sequence for STARD10 (NM_006645.1,1066-1084).
cccaagtgggtggtgaata

SEQ ID NO: 336035 - DNA, 19 bp, Homo sapiens
  siRNA target sequence for STARD10 (NM_006645.1,1067-1085).
ccaagtgggtggtgaataa

SEQ ID NO: 336036 - DNA, 19 bp, Homo sapiens
  siRNA target sequence for STARD10 (NM_006645.1,1074-1092).
ggtggtgaataaatcttct

SEQ ID NO: 336037 - DNA, 19 bp, Homo sapiens
  siRNA target sequence for SDCCAG16 (NM_006649.2,1229-1247).
gcccatggagtttctgaaa

SEQ ID NO: 336038 - DNA, 19 bp, Homo sapiens
  siRNA target sequence for SDCCAG16 (NM_006649.2,1399-1417).
gtctgaattgagagtacta

SEQ ID NO: 336039 - DNA, 19 bp, Homo sapiens
  siRNA target sequence for SDCCAG16 (NM_006649.2,1717-1735).
cctcctaaccacacaatct

SEQ ID NO: 336040 - DNA, 19 bp, Homo sapiens
  siRNA target sequence for CRA (NM_006697.1,367-385).
ggcctggaaccagaattgt

SEQ ID NO: 336041 - DNA, 19 bp, Homo sapiens
  siRNA target sequence for CRA (NM_006697.1,455-473).
ctcccttgaacagtgaata

SEQ ID NO: 336042 - DNA, 19 bp, Homo sapiens
  siRNA target sequence for CRA (NM_006697.1,462-480).
gaacagtgaatacgatttt

SEQ ID NO: 336043 - DNA, 19 bp, Homo sapiens
  siRNA target sequence for CRA (NM_006697.1,486-504).
ggtcaacattggacgatta

SEQ ID NO: 336044 - DNA, 19 bp, Homo sapiens
  siRNA target sequence for CRA (NM_006697.1,542-560).
gtccagggtccctgcataa

SEQ ID NO: 336045 - DNA, 19 bp, Homo sapiens
  siRNA target sequence for CRA (NM_006697.1,545-563).
cagggtccctgcataaatt

SEQ ID NO: 336046 - DNA, 19 bp, Homo sapiens
  siRNA target sequence for CRA (NM_006697.1,547-565).
gggtccctgcataaattta

SEQ ID NO: 336047 - DNA, 19 bp, Homo sapiens
  siRNA target sequence for CRA (NM_006697.1,548-566).
ggtccctgcataaatttat

SEQ ID NO: 336048 - DNA, 19 bp, Homo sapiens
  siRNA target sequence for CRA (NM_006697.1,689-707).
gcaatcaagcccaacagta

SEQ ID NO: 336049 - DNA, 19 bp, Homo sapiens
  siRNA target sequence for CRA (NM_006697.1,690-708).
caatcaagcccaacagtat

SEQ ID NO: 336050 - DNA, 19 bp, Homo sapiens
  siRNA target sequence for CRA (NM_006697.1,917-935).
gcagtttccagctgatttt

SEQ ID NO: 336051 - DNA, 19 bp, Homo sapiens
  siRNA target sequence for MAN1A2 (NM_006699.2,743-761).
cctctctggacgtaggata

SEQ ID NO: 336052 - DNA, 19 bp, Homo sapiens
  siRNA target sequence for MAN1A2 (NM_006699.2,803-821).
ggctaccttgagactttct

SEQ ID NO: 336053 - DNA, 19 bp, Homo sapiens
  siRNA target sequence for MAN1A2 (NM_006699.2,923-941).
gggtttagaagatgtgtta

SEQ ID NO: 336054 - DNA, 19 bp, Homo sapiens
  siRNA target sequence for MAN1A2 (NM_006699.2,957-975).
gccggtaaaggggctaaaa

SEQ ID NO: 336055 - DNA, 19 bp, Homo sapiens
  siRNA target sequence for MAN1A2 (NM_006699.2,958-976).
ccggtaaaggggctaaaaa

SEQ ID NO: 336056 - DNA, 19 bp, Homo sapiens
  siRNA target sequence for MAN1A2 (NM_006699.2,1000-1018).
gacccgatgaacatagaca

SEQ ID NO: 336057 - DNA, 19 bp, Homo sapiens
  siRNA target sequence for MAN1A2 (NM_006699.2,1103-1121).
gtcaagagaggaaattcga

SEQ ID NO: 336058 - DNA, 19 bp, Homo sapiens
  siRNA target sequence for MAN1A2 (NM_006699.2,1112-1130).
ggaaattcgagcagaaatt

SEQ ID NO: 336059 - DNA, 19 bp, Homo sapiens
  siRNA target sequence for MAN1A2 (NM_006699.2,1205-1223).
caaccttgtaggaatacgt

SEQ ID NO: 336060 - DNA, 19 bp, Homo sapiens
  siRNA target sequence for MAN1A2 (NM_006699.2,1290-1308).
gcttgggataactatagga

SEQ ID NO: 336061 - DNA, 19 bp, Homo sapiens
  siRNA target sequence for MAN1A2 (NM_006699.2,1295-1313).
ggataactataggacatat

SEQ ID NO: 336062 - DNA, 19 bp, Homo sapiens
  siRNA target sequence for MAN1A2 (NM_006699.2,1353-1371).
ggacactcccctaacatat

SEQ ID NO: 336063 - DNA, 19 bp, Homo sapiens
  siRNA target sequence for MAN1A2 (NM_006699.2,1354-1372).
gacactcccctaacatatt

SEQ ID NO: 336064 - DNA, 19 bp, Homo sapiens
  siRNA target sequence for MAN1A2 (NM_006699.2,1358-1376).
ctcccctaacatatttgga

SEQ ID NO: 336065 - DNA, 19 bp, Homo sapiens
  siRNA target sequence for MAN1A2 (NM_006699.2,1388-1406).
gggtgctaccatagtagat

SEQ ID NO: 336066 - DNA, 19 bp, Homo sapiens
  siRNA target sequence for MAN1A2 (NM_006699.2,1393-1411).
ctaccatagtagatgcttt

SEQ ID NO: 336067 - DNA, 19 bp, Homo sapiens
  siRNA target sequence for MAN1A2 (NM_006699.2,1427-1445).
catgggacttcatgatgaa

SEQ ID NO: 336068 - DNA, 19 bp, Homo sapiens
  siRNA target sequence for MAN1A2 (NM_006699.2,1515-1533).
gaagtcaacattcgattta

SEQ ID NO: 336069 - DNA, 19 bp, Homo sapiens
  siRNA target sequence for MAN1A2 (NM_006699.2,1560-1578).
ctatcaggagaggagatat

SEQ ID NO: 336070 - DNA, 19 bp, Homo sapiens
  siRNA target sequence for MAN1A2 (NM_006699.2,1571-1589).
ggagatattcaagattaaa

SEQ ID NO: 336071 - DNA, 19 bp, Homo sapiens
  siRNA target sequence for MAN1A2 (NM_006699.2,1649-1667).
ggcaatggtgaatttgaaa

SEQ ID NO: 336072 - DNA, 19 bp, Homo sapiens
  siRNA target sequence for MAN1A2 (NM_006699.2,1712-1730).
cattctggctgaatttggt

SEQ ID NO: 336073 - DNA, 19 bp, Homo sapiens
  siRNA target sequence for MAN1A2 (NM_006699.2,1718-1736).
ggctgaatttggtacacta

SEQ ID NO: 336074 - DNA, 19 bp, Homo sapiens
  siRNA target sequence for MAN1A2 (NM_006699.2,1732-1750).
cactacatatggagttcat

SEQ ID NO: 336075 - DNA, 19 bp, Homo sapiens
  siRNA target sequence for MAN1A2 (NM_006699.2,1770-1788).
ggggacctgacttactaca

SEQ ID NO: 336076 - DNA, 19 bp, Homo sapiens
  siRNA target sequence for MAN1A2 (NM_006699.2,1771-1789).
gggacctgacttactacaa

SEQ ID NO: 336077 - DNA, 19 bp, Homo sapiens
  siRNA target sequence for MAN1A2 (NM_006699.2,1772-1790).
ggacctgacttactacaaa

SEQ ID NO: 336078 - DNA, 19 bp, Homo sapiens
  siRNA target sequence for MAN1A2 (NM_006699.2,1773-1791).
gacctgacttactacaaaa

SEQ ID NO: 336079 - DNA, 19 bp, Homo sapiens
  siRNA target sequence for MAN1A2 (NM_006699.2,1778-1796).
gacttactacaaaaaggtt

SEQ ID NO: 336080 - DNA, 19 bp, Homo sapiens
  siRNA target sequence for MAN1A2 (NM_006699.2,1780-1798).
cttactacaaaaaggttat

SEQ ID NO: 336081 - DNA, 19 bp, Homo sapiens
  siRNA target sequence for MAN1A2 (NM_006699.2,1799-1817).
gcacattcggaaactactt

SEQ ID NO: 336082 - DNA, 19 bp, Homo sapiens
  siRNA target sequence for MAN1A2 (NM_006699.2,1820-1838).
gaaaatggatcgtccaaat

SEQ ID NO: 336083 - DNA, 19 bp, Homo sapiens
  siRNA target sequence for MAN1A2 (NM_006699.2,1873-1891).
ggcgctggggtcagtatca

SEQ ID NO: 336084 - DNA, 19 bp, Homo sapiens
  siRNA target sequence for MAN1A2 (NM_006699.2,1874-1892).
gcgctggggtcagtatcat

SEQ ID NO: 336085 - DNA, 19 bp, Homo sapiens
  siRNA target sequence for MAN1A2 (NM_006699.2,1875-1893).
cgctggggtcagtatcata

SEQ ID NO: 336086 - DNA, 19 bp, Homo sapiens
  siRNA target sequence for MAN1A2 (NM_006699.2,1880-1898).
gggtcagtatcatacatct

SEQ ID NO: 336087 - DNA, 19 bp, Homo sapiens
  siRNA target sequence for MAN1A2 (NM_006699.2,1906-1924).
gcctgggagacagttttta

SEQ ID NO: 336088 - DNA, 19 bp, Homo sapiens
  siRNA target sequence for MAN1A2 (NM_006699.2,1941-1959).
gcatggttgatgtcagata

SEQ ID NO: 336089 - DNA, 19 bp, Homo sapiens
  siRNA target sequence for MAN1A2 (NM_006699.2,1942-1960).
catggttgatgtcagataa

SEQ ID NO: 336090 - DNA, 19 bp, Homo sapiens
  siRNA target sequence for MAN1A2 (NM_006699.2,2003-2021).
ggctatagaaaaacatctt

SEQ ID NO: 336091 - DNA, 19 bp, Homo sapiens
  siRNA target sequence for MAN1A2 (NM_006699.2,2032-2050).
ctcgtggaggtcttacctt

SEQ ID NO: 336092 - DNA, 19 bp, Homo sapiens
  siRNA target sequence for MAN1A2 (NM_006699.2,2034-2052).
cgtggaggtcttaccttta

SEQ ID NO: 336093 - DNA, 19 bp, Homo sapiens
  siRNA target sequence for MAN1A2 (NM_006699.2,2151-2169).
gataaagctggtcattatt

SEQ ID NO: 336094 - DNA, 19 bp, Homo sapiens
  siRNA target sequence for MAN1A2 (NM_006699.2,2174-2192).
gctaggggcagaaattgca

SEQ ID NO: 336095 - DNA, 19 bp, Homo sapiens
  siRNA target sequence for MAN1A2 (NM_006699.2,2216-2234).
cagaactgcattaaagcta

SEQ ID NO: 336096 - DNA, 19 bp, Homo sapiens
  siRNA target sequence for MAN1A2 (NM_006699.2,2232-2250).
ctaggtcctgaatcattca

SEQ ID NO: 336097 - DNA, 19 bp, Homo sapiens
  siRNA target sequence for MAN1A2 (NM_006699.2,2278-2296).
ctgtccggcaggctgaaaa

SEQ ID NO: 336098 - DNA, 19 bp, Homo sapiens
  siRNA target sequence for MAN1A2 (NM_006699.2,2280-2298).
gtccggcaggctgaaaagt

SEQ ID NO: 336099 - DNA, 19 bp, Homo sapiens
  siRNA target sequence for MAN1A2 (NM_006699.2,2306-2324).
cctccgtccagaagtaatt

SEQ ID NO: 336100 - DNA, 19 bp, Homo sapiens
  siRNA target sequence for MAN1A2 (NM_006699.2,2310-2328).
cgtccagaagtaattgaaa

SEQ ID NO: 336101 - DNA, 19 bp, Homo sapiens
  siRNA target sequence for MAN1A2 (NM_006699.2,2325-2343).
gaaacctattggtacctat

SEQ ID NO: 336102 - DNA, 19 bp, Homo sapiens
  siRNA target sequence for MAN1A2 (NM_006699.2,2336-2354).
gtacctatggcgattcact

SEQ ID NO: 336103 - DNA, 19 bp, Homo sapiens
  siRNA target sequence for MAN1A2 (NM_006699.2,2408-2426).
gtattgccgagttaatggt

SEQ ID NO: 336104 - DNA, 19 bp, Homo sapiens
  siRNA target sequence for MAN1A2 (NM_006699.2,2429-2447).
gttttctggagtcaaagat

SEQ ID NO: 336105 - DNA, 19 bp, Homo sapiens
  siRNA target sequence for MAN1A2 (NM_006699.2,2434-2452).
ctggagtcaaagatgtata

SEQ ID NO: 336106 - DNA, 19 bp, Homo sapiens
  siRNA target sequence for MAN1A2 (NM_006699.2,2464-2482).
ctacacatgatgatgtaca

SEQ ID NO: 336107 - DNA, 19 bp, Homo sapiens
  siRNA target sequence for MAN1A2 (NM_006699.2,2531-2549).
ctccggtgatgacctttta

SEQ ID NO: 336108 - DNA, 19 bp, Homo sapiens
  siRNA target sequence for MAN1A2 (NM_006699.2,2556-2574).
gaccactgggtgtttaata

SEQ ID NO: 336109 - DNA, 19 bp, Homo sapiens
  siRNA target sequence for MAN1A2 (NM_006699.2,2558-2576).
ccactgggtgtttaataca

SEQ ID NO: 336110 - DNA, 19 bp, Homo sapiens
  siRNA target sequence for MAN1A2 (NM_006699.2,2612-2630).
caccacactttcaggtaat

SEQ ID NO: 336111 - DNA, 19 bp, Homo sapiens
  siRNA target sequence for FLN29 (NM_006700.1,109-127).
gaaattcctgtgtttaact

SEQ ID NO: 336112 - DNA, 19 bp, Homo sapiens
  siRNA target sequence for FLN29 (NM_006700.1,136-154).
catgagatccactgtcaaa

SEQ ID NO: 336113 - DNA, 19 bp, Homo sapiens
  siRNA target sequence for FLN29 (NM_006700.1,149-167).
gtcaaaggaacattggtat

SEQ ID NO: 336114 - DNA, 19 bp, Homo sapiens
  siRNA target sequence for FLN29 (NM_006700.1,173-191).
ctacctgtaaggaaccatt

SEQ ID NO: 336115 - DNA, 19 bp, Homo sapiens
  siRNA target sequence for FLN29 (NM_006700.1,235-253).
caggtgacctgcaaatgta

SEQ ID NO: 336116 - DNA, 19 bp, Homo sapiens
  siRNA target sequence for FLN29 (NM_006700.1,238-256).
gtgacctgcaaatgtaaca

SEQ ID NO: 336117 - DNA, 19 bp, Homo sapiens
  siRNA target sequence for FLN29 (NM_006700.1,323-341).
gccagcactgtgatttaga

SEQ ID NO: 336118 - DNA, 19 bp, Homo sapiens
  siRNA target sequence for FLN29 (NM_006700.1,324-342).
ccagcactgtgatttagaa

SEQ ID NO: 336119 - DNA, 19 bp, Homo sapiens
  siRNA target sequence for FLN29 (NM_006700.1,343-361).
ctttccattctcaaactga

SEQ ID NO: 336120 - DNA, 19 bp, Homo sapiens
  siRNA target sequence for FLN29 (NM_006700.1,382-400).
ggtgcccggacggaactat

SEQ ID NO: 336121 - DNA, 19 bp, Homo sapiens
  siRNA target sequence for FLN29 (NM_006700.1,413-431).
gtcgcaatgtccttgtgaa

SEQ ID NO: 336122 - DNA, 19 bp, Homo sapiens
  siRNA target sequence for FLN29 (NM_006700.1,489-507).
ggttgccatacctcctaat

SEQ ID NO: 336123 - DNA, 19 bp, Homo sapiens
  siRNA target sequence for FLN29 (NM_006700.1,493-511).
gccatacctcctaatgcat

SEQ ID NO: 336124 - DNA, 19 bp, Homo sapiens
  siRNA target sequence for FLN29 (NM_006700.1,494-512).
ccatacctcctaatgcata

SEQ ID NO: 336125 - DNA, 19 bp, Homo sapiens
  siRNA target sequence for FLN29 (NM_006700.1,495-513).
catacctcctaatgcatat

SEQ ID NO: 336126 - DNA, 19 bp, Homo sapiens
  siRNA target sequence for FLN29 (NM_006700.1,500-518).
ctcctaatgcatatgatga

SEQ ID NO: 336127 - DNA, 19 bp, Homo sapiens
  siRNA target sequence for FLN29 (NM_006700.1,532-550).
gatggaatctggattgcat

SEQ ID NO: 336128 - DNA, 19 bp, Homo sapiens
  siRNA target sequence for FLN29 (NM_006700.1,552-570).
ccaactcctcagacaaatt

SEQ ID NO: 336129 - DNA, 19 bp, Homo sapiens
  siRNA target sequence for FLN29 (NM_006700.1,609-627).
cctgagagcctttgaatca

SEQ ID NO: 336130 - DNA, 19 bp, Homo sapiens
  siRNA target sequence for FLN29 (NM_006700.1,616-634).
gcctttgaatcagatgttt

SEQ ID NO: 336131 - DNA, 19 bp, Homo sapiens
  siRNA target sequence for FLN29 (NM_006700.1,631-649).
gttttccacaatagaacta

SEQ ID NO: 336132 - DNA, 19 bp, Homo sapiens
  siRNA target sequence for FLN29 (NM_006700.1,755-773).
gtgaagagagtgcaaactt

SEQ ID NO: 336133 - DNA, 19 bp, Homo sapiens
  siRNA target sequence for FLN29 (NM_006700.1,764-782).
gtgcaaacttggacttcat

SEQ ID NO: 336134 - DNA, 19 bp, Homo sapiens
  siRNA target sequence for FLN29 (NM_006700.1,884-902).
ggtctctcagtgacataaa

SEQ ID NO: 336135 - DNA, 19 bp, Homo sapiens
  siRNA target sequence for FLN29 (NM_006700.1,994-1012).
ccttcacgtgccttacctt

SEQ ID NO: 336136 - DNA, 19 bp, Homo sapiens
  siRNA target sequence for FLN29 (NM_006700.1,1003-1021).
gccttaccttcactcaata

SEQ ID NO: 336137 - DNA, 19 bp, Homo sapiens
  siRNA target sequence for FLN29 (NM_006700.1,1005-1023).
cttaccttcactcaatact

SEQ ID NO: 336138 - DNA, 19 bp, Homo sapiens
  siRNA target sequence for FLN29 (NM_006700.1,1088-1106).
ctgcaagtaaccagttaga

SEQ ID NO: 336139 - DNA, 19 bp, Homo sapiens
  siRNA target sequence for FLN29 (NM_006700.1,1348-1366).
ggttacctggatgatacta

SEQ ID NO: 336140 - DNA, 19 bp, Homo sapiens
  siRNA target sequence for FLN29 (NM_006700.1,1403-1421).
ctcccagccgacccattaa

SEQ ID NO: 336141 - DNA, 19 bp, Homo sapiens
  siRNA target sequence for FLN29 (NM_006700.1,1406-1424).
ccagccgacccattaacaa

SEQ ID NO: 336142 - DNA, 19 bp, Homo sapiens
  siRNA target sequence for FLN29 (NM_006700.1,1407-1425).
cagccgacccattaacaat

SEQ ID NO: 336143 - DNA, 19 bp, Homo sapiens
  siRNA target sequence for FLN29 (NM_006700.1,1409-1427).
gccgacccattaacaatat

SEQ ID NO: 336144 - DNA, 19 bp, Homo sapiens
  siRNA target sequence for FLN29 (NM_006700.1,1411-1429).
cgacccattaacaatatga

SEQ ID NO: 336145 - DNA, 19 bp, Homo sapiens
  siRNA target sequence for FLN29 (NM_006700.1,1422-1440).
caatatgacagctacctat

SEQ ID NO: 336146 - DNA, 19 bp, Homo sapiens
  siRNA target sequence for FLN29 (NM_006700.1,1443-1461).
ccagctatcgagatcaaca

SEQ ID NO: 336147 - DNA, 19 bp, Homo sapiens
  siRNA target sequence for FLN29 (NM_006700.1,1444-1462).
cagctatcgagatcaacat

SEQ ID NO: 336148 - DNA, 19 bp, Homo sapiens
  siRNA target sequence for FLN29 (NM_006700.1,1446-1464).
gctatcgagatcaacatca

SEQ ID NO: 336149 - DNA, 19 bp, Homo sapiens
  siRNA target sequence for FLN29 (NM_006700.1,1574-1592).
cccctgggcacgtttcagt

SEQ ID NO: 336150 - DNA, 19 bp, Homo sapiens
  siRNA target sequence for FLN29 (NM_006700.1,1597-1615).
cgccctcctcaaaatctct

SEQ ID NO: 336151 - DNA, 19 bp, Homo sapiens
  siRNA target sequence for HIVEP2 (NM_006734.2,143-161).
caggggaactagcacttaa

SEQ ID NO: 336152 - DNA, 19 bp, Homo sapiens
  siRNA target sequence for HIVEP2 (NM_006734.2,154-172).
gcacttaagaccttgtgta

SEQ ID NO: 336153 - DNA, 19 bp, Homo sapiens
  siRNA target sequence for HIVEP2 (NM_006734.2,155-173).
cacttaagaccttgtgtaa

SEQ ID NO: 336154 - DNA, 19 bp, Homo sapiens
  siRNA target sequence for HIVEP2 (NM_006734.2,157-175).
cttaagaccttgtgtaaca

SEQ ID NO: 336155 - DNA, 19 bp, Homo sapiens
  siRNA target sequence for HIVEP2 (NM_006734.2,196-214).
gctctaggacaaaaagcta

SEQ ID NO: 336156 - DNA, 19 bp, Homo sapiens
  siRNA target sequence for HIVEP2 (NM_006734.2,216-234).
ctcaaggtctggagaaact

SEQ ID NO: 336157 - DNA, 19 bp, Homo sapiens
  siRNA target sequence for HIVEP2 (NM_006734.2,261-279).
ggaacaatcagctgttatt

SEQ ID NO: 336158 - DNA, 19 bp, Homo sapiens
  siRNA target sequence for HIVEP2 (NM_006734.2,414-432).
cgcagagaagcaatatcca

SEQ ID NO: 336159 - DNA, 19 bp, Homo sapiens
  siRNA target sequence for HIVEP2 (NM_006734.2,439-457).
cgtccgagtccttactcat

SEQ ID NO: 336160 - DNA, 19 bp, Homo sapiens
  siRNA target sequence for HIVEP2 (NM_006734.2,574-592).
gttgcctctgaggacttat

SEQ ID NO: 336161 - DNA, 19 bp, Homo sapiens
  siRNA target sequence for HIVEP2 (NM_006734.2,612-630).
ccacagtggtggttatcct

SEQ ID NO: 336162 - DNA, 19 bp, Homo sapiens
  siRNA target sequence for HIVEP2 (NM_006734.2,617-635).
gtggtggttatcctagaaa

SEQ ID NO: 336163 - DNA, 19 bp, Homo sapiens
  siRNA target sequence for HIVEP2 (NM_006734.2,620-638).
gtggttatcctagaaaaaa

SEQ ID NO: 336164 - DNA, 19 bp, Homo sapiens
  siRNA target sequence for HIVEP2 (NM_006734.2,623-641).
gttatcctagaaaaaagat

SEQ ID NO: 336165 - DNA, 19 bp, Homo sapiens
  siRNA target sequence for HIVEP2 (NM_006734.2,672-690).
ctcccagaaaagtattgaa

SEQ ID NO: 336166 - DNA, 19 bp, Homo sapiens
  siRNA target sequence for HIVEP2 (NM_006734.2,768-786).
gtgtgccaaacctagtgta

SEQ ID NO: 336167 - DNA, 19 bp, Homo sapiens
  siRNA target sequence for HIVEP2 (NM_006734.2,773-791).
ccaaacctagtgtactgaa

SEQ ID NO: 336168 - DNA, 19 bp, Homo sapiens
  siRNA target sequence for HIVEP2 (NM_006734.2,774-792).
caaacctagtgtactgaaa

SEQ ID NO: 336169 - DNA, 19 bp, Homo sapiens
  siRNA target sequence for HIVEP2 (NM_006734.2,819-837).
gcggccatatccatgtata

SEQ ID NO: 336170 - DNA, 19 bp, Homo sapiens
  siRNA target sequence for HIVEP2 (NM_006734.2,822-840).
gccatatccatgtatacct

SEQ ID NO: 336171 - DNA, 19 bp, Homo sapiens
  siRNA target sequence for HIVEP2 (NM_006734.2,844-862).
ggtttctctttcaagacaa

SEQ ID NO: 336172 - DNA, 19 bp, Homo sapiens
  siRNA target sequence for HIVEP2 (NM_006734.2,888-906).
gtcacatgcccatgcaatt

SEQ ID NO: 336173 - DNA, 19 bp, Homo sapiens
  siRNA target sequence for HIVEP2 (NM_006734.2,890-908).
cacatgcccatgcaattaa

SEQ ID NO: 336174 - DNA, 19 bp, Homo sapiens
  siRNA target sequence for HIVEP2 (NM_006734.2,929-947).
cagagtcagctgtatctaa

SEQ ID NO: 336175 - DNA, 19 bp, Homo sapiens
  siRNA target sequence for HIVEP2 (NM_006734.2,931-949).
gagtcagctgtatctaaat

SEQ ID NO: 336176 - DNA, 19 bp, Homo sapiens
  siRNA target sequence for HIVEP2 (NM_006734.2,951-969).
ggacctagaggctggtttt

SEQ ID NO: 336177 - DNA, 19 bp, Homo sapiens
  siRNA target sequence for HIVEP2 (NM_006734.2,954-972).
cctagaggctggttttatt

SEQ ID NO: 336178 - DNA, 19 bp, Homo sapiens
  siRNA target sequence for HIVEP2 (NM_006734.2,960-978).
ggctggttttattgatgta

SEQ ID NO: 336179 - DNA, 19 bp, Homo sapiens
  siRNA target sequence for HIVEP2 (NM_006734.2,962-980).
ctggttttattgatgtaga

SEQ ID NO: 336180 - DNA, 19 bp, Homo sapiens
  siRNA target sequence for HIVEP2 (NM_006734.2,1043-1061).
ccgaggcttctgacaaaat

SEQ ID NO: 336181 - DNA, 19 bp, Homo sapiens
  siRNA target sequence for HIVEP2 (NM_006734.2,1095-1113).
cagcagaggcggctatcat

SEQ ID NO: 336182 - DNA, 19 bp, Homo sapiens
  siRNA target sequence for HIVEP2 (NM_006734.2,1107-1125).
ctatcatgggtcattggaa

SEQ ID NO: 336183 - DNA, 19 bp, Homo sapiens
  siRNA target sequence for HIVEP2 (NM_006734.2,1142-1160).
caatgaaggtgccgatttt

SEQ ID NO: 336184 - DNA, 19 bp, Homo sapiens
  siRNA target sequence for HIVEP2 (NM_006734.2,1341-1359).
gagcccgcacagtaaagga

SEQ ID NO: 336185 - DNA, 19 bp, Homo sapiens
  siRNA target sequence for HIVEP2 (NM_006734.2,1377-1395).
cttttctcgctcagaaagt

SEQ ID NO: 336186 - DNA, 19 bp, Homo sapiens
  siRNA target sequence for HIVEP2 (NM_006734.2,1470-1488).
gcttagtccgagaaatgca

SEQ ID NO: 336187 - DNA, 19 bp, Homo sapiens
  siRNA target sequence for HIVEP2 (NM_006734.2,1529-1547).
gtaggaagggcataatgga

SEQ ID NO: 336188 - DNA, 19 bp, Homo sapiens
  siRNA target sequence for HIVEP2 (NM_006734.2,1536-1554).
gggcataatggaaccatta

SEQ ID NO: 336189 - DNA, 19 bp, Homo sapiens
  siRNA target sequence for HIVEP2 (NM_006734.2,1549-1567).
ccattacctcacgttaaca

SEQ ID NO: 336190 - DNA, 19 bp, Homo sapiens
  siRNA target sequence for HIVEP2 (NM_006734.2,1571-1589).
ggttagatgtcaagatgtt

SEQ ID NO: 336191 - DNA, 19 bp, Homo sapiens
  siRNA target sequence for HIVEP2 (NM_006734.2,1572-1590).
gttagatgtcaagatgttt

SEQ ID NO: 336192 - DNA, 19 bp, Homo sapiens
  siRNA target sequence for HIVEP2 (NM_006734.2,1627-1645).
gatgtcgaccccagtcaaa

SEQ ID NO: 336193 - DNA, 19 bp, Homo sapiens
  siRNA target sequence for HIVEP2 (NM_006734.2,1642-1660).
caaacgagcatgctgaaat

SEQ ID NO: 336194 - DNA, 19 bp, Homo sapiens
  siRNA target sequence for HIVEP2 (NM_006734.2,1715-1733).
ggaacgaaggaaaacttta

SEQ ID NO: 336195 - DNA, 19 bp, Homo sapiens
  siRNA target sequence for HIVEP2 (NM_006734.2,1751-1769).
gcagcaacccggttctctt

SEQ ID NO: 336196 - DNA, 19 bp, Homo sapiens
  siRNA target sequence for HIVEP2 (NM_006734.2,1754-1772).
gcaacccggttctcttaga

SEQ ID NO: 336197 - DNA, 19 bp, Homo sapiens
  siRNA target sequence for HIVEP2 (NM_006734.2,1755-1773).
caacccggttctcttagaa

SEQ ID NO: 336198 - DNA, 19 bp, Homo sapiens
  siRNA target sequence for HIVEP2 (NM_006734.2,1783-1801).
gactcttcaccccttatta

SEQ ID NO: 336199 - DNA, 19 bp, Homo sapiens
  siRNA target sequence for HIVEP2 (NM_006734.2,1826-1844).
cagcaactaatctaactat

SEQ ID NO: 336200 - DNA, 19 bp, Homo sapiens
  siRNA target sequence for HIVEP2 (NM_006734.2,1889-1907).
ctggttccgacgatgtatt

SEQ ID NO: 336201 - DNA, 19 bp, Homo sapiens
  siRNA target sequence for HIVEP2 (NM_006734.2,1892-1910).
gttccgacgatgtattcta

SEQ ID NO: 336202 - DNA, 19 bp, Homo sapiens
  siRNA target sequence for HIVEP2 (NM_006734.2,1930-1948).
ccccctcagcgcatgctaa

SEQ ID NO: 336203 - DNA, 19 bp, Homo sapiens
  siRNA target sequence for HIVEP2 (NM_006734.2,1933-1951).
cctcagcgcatgctaagaa

SEQ ID NO: 336204 - DNA, 19 bp, Homo sapiens
  siRNA target sequence for HIVEP2 (NM_006734.2,1949-1967).
gaagacaagcggcatttga

SEQ ID NO: 336205 - DNA, 19 bp, Homo sapiens
  siRNA target sequence for HIVEP2 (NM_006734.2,2005-2023).
caccatggcaggatgttga

SEQ ID NO: 336206 - DNA, 19 bp, Homo sapiens
  siRNA target sequence for HIVEP2 (NM_006734.2,2036-2054).
gttcatccctgaaggaaaa

SEQ ID NO: 336207 - DNA, 19 bp, Homo sapiens
  siRNA target sequence for HIVEP2 (NM_006734.2,2075-2093).
gggttgggtatgactatga

SEQ ID NO: 336208 - DNA, 19 bp, Homo sapiens
  siRNA target sequence for HIVEP2 (NM_006734.2,2099-2117).
gtcggaaaccctataagaa

SEQ ID NO: 336209 - DNA, 19 bp, Homo sapiens
  siRNA target sequence for HIVEP2 (NM_006734.2,2155-2173).
gacatttcctgcttgagtt

SEQ ID NO: 336210 - DNA, 19 bp, Homo sapiens
  siRNA target sequence for HIVEP2 (NM_006734.2,2165-2183).
gcttgagttctttaaagca

SEQ ID NO: 336211 - DNA, 19 bp, Homo sapiens
  siRNA target sequence for HIVEP2 (NM_006734.2,2223-2241).
gggagtaccaagcatgttt

SEQ ID NO: 336212 - DNA, 19 bp, Homo sapiens
  siRNA target sequence for HIVEP2 (NM_006734.2,2227-2245).
gtaccaagcatgtttggaa

SEQ ID NO: 336213 - DNA, 19 bp, Homo sapiens
  siRNA target sequence for HIVEP2 (NM_006734.2,2261-2279).
ggaaacgccggaaagagaa

SEQ ID NO: 336214 - DNA, 19 bp, Homo sapiens
  siRNA target sequence for HIVEP2 (NM_006734.2,2343-2361).
catcatggcttccgattat

SEQ ID NO: 336215 - DNA, 19 bp, Homo sapiens
  siRNA target sequence for HIVEP2 (NM_006734.2,2405-2423).
ccatggctggacacgaaaa

SEQ ID NO: 336216 - DNA, 19 bp, Homo sapiens
  siRNA target sequence for HIVEP2 (NM_006734.2,2409-2427).
ggctggacacgaaaacctt

SEQ ID NO: 336217 - DNA, 19 bp, Homo sapiens
  siRNA target sequence for HIVEP2 (NM_006734.2,2410-2428).
gctggacacgaaaaccttt

SEQ ID NO: 336218 - DNA, 19 bp, Homo sapiens
  siRNA target sequence for HIVEP2 (NM_006734.2,2505-2523).
gtcaccttcagccattgat

SEQ ID NO: 336219 - DNA, 19 bp, Homo sapiens
  siRNA target sequence for HIVEP2 (NM_006734.2,2599-2617).
ctgagccgacccaattcat

SEQ ID NO: 336220 - DNA, 19 bp, Homo sapiens
  siRNA target sequence for HIVEP2 (NM_006734.2,2603-2621).
gccgacccaattcatttga

SEQ ID NO: 336221 - DNA, 19 bp, Homo sapiens
  siRNA target sequence for HIVEP2 (NM_006734.2,2604-2622).
ccgacccaattcatttgaa

SEQ ID NO: 336222 - DNA, 19 bp, Homo sapiens
  siRNA target sequence for HIVEP2 (NM_006734.2,2605-2623).
cgacccaattcatttgaaa

SEQ ID NO: 336223 - DNA, 19 bp, Homo sapiens
  siRNA target sequence for HIVEP2 (NM_006734.2,2627-2645).
ctgagtcagccgaacttgt

SEQ ID NO: 336224 - DNA, 19 bp, Homo sapiens
  siRNA target sequence for HIVEP2 (NM_006734.2,2813-2831).
ggctagttcggcaacacaa

SEQ ID NO: 336225 - DNA, 19 bp, Homo sapiens
  siRNA target sequence for HIVEP2 (NM_006734.2,2856-2874).
gaccgaggagcctgataaa

SEQ ID NO: 336226 - DNA, 19 bp, Homo sapiens
  siRNA target sequence for HIVEP2 (NM_006734.2,2999-3017).
gtctgcgacttgcagatat

SEQ ID NO: 336227 - DNA, 19 bp, Homo sapiens
  siRNA target sequence for HIVEP2 (NM_006734.2,3110-3128).
gtttctccatgtcttttga

SEQ ID NO: 336228 - DNA, 19 bp, Homo sapiens
  siRNA target sequence for HIVEP2 (NM_006734.2,3208-3226).
gctggttcatactcattgt

SEQ ID NO: 336229 - DNA, 19 bp, Homo sapiens
  siRNA target sequence for HIVEP2 (NM_006734.2,3310-3328).
gaagttcggagcaaatcat

SEQ ID NO: 336230 - DNA, 19 bp, Homo sapiens
  siRNA target sequence for HIVEP2 (NM_006734.2,3661-3679).
gacagtcaggaatctttga

SEQ ID NO: 336231 - DNA, 19 bp, Homo sapiens
  siRNA target sequence for HIVEP2 (NM_006734.2,3690-3708).
gatccaaccaacatcctat

SEQ ID NO: 336232 - DNA, 19 bp, Homo sapiens
  siRNA target sequence for HIVEP2 (NM_006734.2,3694-3712).
caaccaacatcctatatga

SEQ ID NO: 336233 - DNA, 19 bp, Homo sapiens
  siRNA target sequence for HIVEP2 (NM_006734.2,3697-3715).
ccaacatcctatatgacaa

SEQ ID NO: 336234 - DNA, 19 bp, Homo sapiens
  siRNA target sequence for HIVEP2 (NM_006734.2,3727-3745).
cctgaacagccacacttat

SEQ ID NO: 336235 - DNA, 19 bp, Homo sapiens
  siRNA target sequence for HIVEP2 (NM_006734.2,3728-3746).
ctgaacagccacacttatt

SEQ ID NO: 336236 - DNA, 19 bp, Homo sapiens
  siRNA target sequence for HIVEP2 (NM_006734.2,4008-4026).
gacctacccatgttattca

SEQ ID NO: 336237 - DNA, 19 bp, Homo sapiens
  siRNA target sequence for HIVEP2 (NM_006734.2,4075-4093).
gaccagagcagtaagtcaa

SEQ ID NO: 336238 - DNA, 19 bp, Homo sapiens
  siRNA target sequence for HIVEP2 (NM_006734.2,4104-4122).
ctctgagcaggttcttcaa

SEQ ID NO: 336239 - DNA, 19 bp, Homo sapiens
  siRNA target sequence for HIVEP2 (NM_006734.2,4194-4212).
gacgcacgtaccatcctat

SEQ ID NO: 336240 - DNA, 19 bp, Homo sapiens
  siRNA target sequence for HIVEP2 (NM_006734.2,4198-4216).
cacgtaccatcctatggaa

SEQ ID NO: 336241 - DNA, 19 bp, Homo sapiens
  siRNA target sequence for HIVEP2 (NM_006734.2,4221-4239).
catgtacacaagcatttct

SEQ ID NO: 336242 - DNA, 19 bp, Homo sapiens
  siRNA target sequence for HIVEP2 (NM_006734.2,4381-4399).
gagaagtaccccatttgga

SEQ ID NO: 336243 - DNA, 19 bp, Homo sapiens
  siRNA target sequence for HIVEP2 (NM_006734.2,4397-4415).
ggaaagcacctcagacttt

SEQ ID NO: 336244 - DNA, 19 bp, Homo sapiens
  siRNA target sequence for HIVEP2 (NM_006734.2,4731-4749).
gtcgccctcctcatctcaa

SEQ ID NO: 336245 - DNA, 19 bp, Homo sapiens
  siRNA target sequence for HIVEP2 (NM_006734.2,4920-4938).
cccacagagttcttcatta

SEQ ID NO: 336246 - DNA, 19 bp, Homo sapiens
  siRNA target sequence for HIVEP2 (NM_006734.2,5031-5049).
cgtggcagactcaactctt

SEQ ID NO: 336247 - DNA, 19 bp, Homo sapiens
  siRNA target sequence for HIVEP2 (NM_006734.2,5057-5075).
cggacatggcagatttcca

SEQ ID NO: 336248 - DNA, 19 bp, Homo sapiens
  siRNA target sequence for HIVEP2 (NM_006734.2,5196-5214).
gtgcattagttcctgtaat

SEQ ID NO: 336249 - DNA, 19 bp, Homo sapiens
  siRNA target sequence for HIVEP2 (NM_006734.2,5199-5217).
cattagttcctgtaatcca

SEQ ID NO: 336250 - DNA, 19 bp, Homo sapiens
  siRNA target sequence for HIVEP2 (NM_006734.2,5216-5234).
caaacccatcaggattgaa

SEQ ID NO: 336251 - DNA, 19 bp, Homo sapiens
  siRNA target sequence for HIVEP2 (NM_006734.2,5262-5280).
gtccaagcaaaaaatcact

SEQ ID NO: 336252 - DNA, 19 bp, Homo sapiens
  siRNA target sequence for HIVEP2 (NM_006734.2,5317-5335).
ggaaccggcaagcttacat

SEQ ID NO: 336253 - DNA, 19 bp, Homo sapiens
  siRNA target sequence for HIVEP2 (NM_006734.2,5322-5340).
cggcaagcttacatcatca

SEQ ID NO: 336254 - DNA, 19 bp, Homo sapiens
  siRNA target sequence for HIVEP2 (NM_006734.2,5345-5363).
cttggaagcagtttactca

SEQ ID NO: 336255 - DNA, 19 bp, Homo sapiens
  siRNA target sequence for HIVEP2 (NM_006734.2,5413-5431).
ctagtgggaaatatcttaa

SEQ ID NO: 336256 - DNA, 19 bp, Homo sapiens
  siRNA target sequence for HIVEP2 (NM_006734.2,5458-5476).
ggagataaagatattggat

SEQ ID NO: 336257 - DNA, 19 bp, Homo sapiens
  siRNA target sequence for HIVEP2 (NM_006734.2,5467-5485).
gatattggatccaaacaaa

SEQ ID NO: 336258 - DNA, 19 bp, Homo sapiens
  siRNA target sequence for HIVEP2 (NM_006734.2,5486-5504).
ctgagccaatccgaattaa

SEQ ID NO: 336259 - DNA, 19 bp, Homo sapiens
  siRNA target sequence for HIVEP2 (NM_006734.2,5488-5506).
gagccaatccgaattaaaa

SEQ ID NO: 336260 - DNA, 19 bp, Homo sapiens
  siRNA target sequence for HIVEP2 (NM_006734.2,5492-5510).
caatccgaattaaaatatt

SEQ ID NO: 336261 - DNA, 19 bp, Homo sapiens
  siRNA target sequence for HIVEP2 (NM_006734.2,5496-5514).
ccgaattaaaatatttgaa

SEQ ID NO: 336262 - DNA, 19 bp, Homo sapiens
  siRNA target sequence for HIVEP2 (NM_006734.2,5607-5625).
gccaagcatgctcaaaaaa

SEQ ID NO: 336263 - DNA, 19 bp, Homo sapiens
  siRNA target sequence for HIVEP2 (NM_006734.2,5628-5646).
catccgtacccatactgat

SEQ ID NO: 336264 - DNA, 19 bp, Homo sapiens
  siRNA target sequence for HIVEP2 (NM_006734.2,5631-5649).
ccgtacccatactgatgtt

SEQ ID NO: 336265 - DNA, 19 bp, Homo sapiens
  siRNA target sequence for HIVEP2 (NM_006734.2,5642-5660).
ctgatgttcggccttatgt

SEQ ID NO: 336266 - DNA, 19 bp, Homo sapiens
  siRNA target sequence for HIVEP2 (NM_006734.2,5644-5662).
gatgttcggccttatgtat

SEQ ID NO: 336267 - DNA, 19 bp, Homo sapiens
  siRNA target sequence for HIVEP2 (NM_006734.2,5652-5670).
gccttatgtatgcaagtta

SEQ ID NO: 336268 - DNA, 19 bp, Homo sapiens
  siRNA target sequence for HIVEP2 (NM_006734.2,5690-5708).
cgaaaggaaacctaacgaa

SEQ ID NO: 336269 - DNA, 19 bp, Homo sapiens
  siRNA target sequence for HIVEP2 (NM_006734.2,5695-5713).
ggaaacctaacgaagcata

SEQ ID NO: 336270 - DNA, 19 bp, Homo sapiens
  siRNA target sequence for HIVEP2 (NM_006734.2,5696-5714).
gaaacctaacgaagcatat

SEQ ID NO: 336271 - DNA, 19 bp, Homo sapiens
  siRNA target sequence for HIVEP2 (NM_006734.2,5700-5718).
cctaacgaagcatatgaaa

SEQ ID NO: 336272 - DNA, 19 bp, Homo sapiens
  siRNA target sequence for HIVEP2 (NM_006734.2,5705-5723).
cgaagcatatgaaatctaa

SEQ ID NO: 336273 - DNA, 19 bp, Homo sapiens
  siRNA target sequence for HIVEP2 (NM_006734.2,5763-5781).
gacatcggtggatgataca

SEQ ID NO: 336274 - DNA, 19 bp, Homo sapiens
  siRNA target sequence for HIVEP2 (NM_006734.2,5765-5783).
catcggtggatgatacaga

SEQ ID NO: 336275 - DNA, 19 bp, Homo sapiens
  siRNA target sequence for HIVEP2 (NM_006734.2,5941-5959).
gacgaccagggagatttaa

SEQ ID NO: 336276 - DNA, 19 bp, Homo sapiens
  siRNA target sequence for HIVEP2 (NM_006734.2,5943-5961).
cgaccagggagatttaaca

SEQ ID NO: 336277 - DNA, 19 bp, Homo sapiens
  siRNA target sequence for HIVEP2 (NM_006734.2,6039-6057).
ccacggggttccttcagat

SEQ ID NO: 336278 - DNA, 19 bp, Homo sapiens
  siRNA target sequence for HIVEP2 (NM_006734.2,6040-6058).
cacggggttccttcagata

SEQ ID NO: 336279 - DNA, 19 bp, Homo sapiens
  siRNA target sequence for HIVEP2 (NM_006734.2,6042-6060).
cggggttccttcagatagt

SEQ ID NO: 336280 - DNA, 19 bp, Homo sapiens
  siRNA target sequence for HIVEP2 (NM_006734.2,6043-6061).
ggggttccttcagatagtt

SEQ ID NO: 336281 - DNA, 19 bp, Homo sapiens
  siRNA target sequence for HIVEP2 (NM_006734.2,6067-6085).
ggacattcttcgttgatca

SEQ ID NO: 336282 - DNA, 19 bp, Homo sapiens
  siRNA target sequence for HIVEP2 (NM_006734.2,6074-6092).
cttcgttgatcagctattt

SEQ ID NO: 336283 - DNA, 19 bp, Homo sapiens
  siRNA target sequence for HIVEP2 (NM_006734.2,6102-6120).
gccaagtattcgagttact

SEQ ID NO: 336284 - DNA, 19 bp, Homo sapiens
  siRNA target sequence for HIVEP2 (NM_006734.2,6104-6122).
caagtattcgagttactca

SEQ ID NO: 336285 - DNA, 19 bp, Homo sapiens
  siRNA target sequence for HIVEP2 (NM_006734.2,6129-6147).
gacacccagtgattcatgt

SEQ ID NO: 336286 - DNA, 19 bp, Homo sapiens
  siRNA target sequence for HIVEP2 (NM_006734.2,6155-6173).
cccagatgacagaatacca

SEQ ID NO: 336287 - DNA, 19 bp, Homo sapiens
  siRNA target sequence for HIVEP2 (NM_006734.2,6177-6195).
gctattccagagcaaaagt

SEQ ID NO: 336288 - DNA, 19 bp, Homo sapiens
  siRNA target sequence for HIVEP2 (NM_006734.2,6228-6246).
catacctagttgtatggat

SEQ ID NO: 336289 - DNA, 19 bp, Homo sapiens
  siRNA target sequence for HIVEP2 (NM_006734.2,6369-6387).
gatacccaaaggagattta

SEQ ID NO: 336290 - DNA, 19 bp, Homo sapiens
  siRNA target sequence for HIVEP2 (NM_006734.2,6423-6441).
gtcacccatgagacatctt

SEQ ID NO: 336291 - DNA, 19 bp, Homo sapiens
  siRNA target sequence for HIVEP2 (NM_006734.2,6617-6635).
gaagggctttataccataa

SEQ ID NO: 336292 - DNA, 19 bp, Homo sapiens
  siRNA target sequence for HIVEP2 (NM_006734.2,6647-6665).
ccatgggacagtatttgca

SEQ ID NO: 336293 - DNA, 19 bp, Homo sapiens
  siRNA target sequence for HIVEP2 (NM_006734.2,6648-6666).
catgggacagtatttgcaa

SEQ ID NO: 336294 - DNA, 19 bp, Homo sapiens
  siRNA target sequence for HIVEP2 (NM_006734.2,6663-6681).
gcaagcagagccaattgta

SEQ ID NO: 336295 - DNA, 19 bp, Homo sapiens
  siRNA target sequence for HIVEP2 (NM_006734.2,6679-6697).
gtattggggcctcctaatt

SEQ ID NO: 336296 - DNA, 19 bp, Homo sapiens
  siRNA target sequence for HIVEP2 (NM_006734.2,6707-6725).
gattacctcaggttcctta

SEQ ID NO: 336297 - DNA, 19 bp, Homo sapiens
  siRNA target sequence for HIVEP2 (NM_006734.2,6785-6803).
ctgagggtcctaatgacta

SEQ ID NO: 336298 - DNA, 19 bp, Homo sapiens
  siRNA target sequence for HIVEP2 (NM_006734.2,6791-6809).
gtcctaatgactatgtctt

SEQ ID NO: 336299 - DNA, 19 bp, Homo sapiens
  siRNA target sequence for HIVEP2 (NM_006734.2,6997-7015).
gacccctatgtgctttcta

SEQ ID NO: 336300 - DNA, 19 bp, Homo sapiens
  siRNA target sequence for HIVEP2 (NM_006734.2,7134-7152).
gcgggaacaggaggaaaat

SEQ ID NO: 336301 - DNA, 19 bp, Homo sapiens
  siRNA target sequence for HIVEP2 (NM_006734.2,7276-7294).
gttagcattagacacttta

SEQ ID NO: 336302 - DNA, 19 bp, Homo sapiens
  siRNA target sequence for HIVEP2 (NM_006734.2,7281-7299).
cattagacactttagtaga

SEQ ID NO: 336303 - DNA, 19 bp, Homo sapiens
  siRNA target sequence for HIVEP2 (NM_006734.2,7354-7372).
gaaaaggacaattttggta

SEQ ID NO: 336304 - DNA, 19 bp, Homo sapiens
  siRNA target sequence for HIVEP2 (NM_006734.2,7359-7377).
ggacaattttggtacatca

SEQ ID NO: 336305 - DNA, 19 bp, Homo sapiens
  siRNA target sequence for HIVEP2 (NM_006734.2,7390-7408).
gctcactccacgttttaca

SEQ ID NO: 336306 - DNA, 19 bp, Homo sapiens
  siRNA target sequence for LZTR1 (NM_006767.1,1058-1076).
gagcgggttggcttcaaga

SEQ ID NO: 336307 - DNA, 19 bp, Homo sapiens
  siRNA target sequence for LZTR1 (NM_006767.1,1061-1079).
cgggttggcttcaagaagt

SEQ ID NO: 336308 - DNA, 19 bp, Homo sapiens
  siRNA target sequence for LZTR1 (NM_006767.1,1075-1093).
gaagtcccgagatgtgttt

SEQ ID NO: 336309 - DNA, 19 bp, Homo sapiens
  siRNA target sequence for LZTR1 (NM_006767.1,1188-1206).
cggacgccatgtacatctt

SEQ ID NO: 336310 - DNA, 19 bp, Homo sapiens
  siRNA target sequence for LZTR1 (NM_006767.1,1232-1250).
cgcagcggggagatgtaca

SEQ ID NO: 336311 - DNA, 19 bp, Homo sapiens
  siRNA target sequence for LZTR1 (NM_006767.1,1370-1388).
ggccacgtagccattgtca

SEQ ID NO: 336312 - DNA, 19 bp, Homo sapiens
  siRNA target sequence for LZTR1 (NM_006767.1,1582-1600).
ctacaccgacaagatcaaa

SEQ ID NO: 336313 - DNA, 19 bp, Homo sapiens
  siRNA target sequence for LZTR1 (NM_006767.1,1791-1809).
gcctgaacttcgtggtaaa

SEQ ID NO: 336314 - DNA, 19 bp, Homo sapiens
  siRNA target sequence for LZTR1 (NM_006767.1,2209-2227).
ggactcgctctacttgttt

SEQ ID NO: 336315 - DNA, 19 bp, Homo sapiens
  siRNA target sequence for LZTR1 (NM_006767.1,2346-2364).
cgcaggcactggacatgaa

SEQ ID NO: 336316 - DNA, 19 bp, Homo sapiens
  siRNA target sequence for LZTR1 (NM_006767.1,2367-2385).
ggcactgcctgcacatcat

SEQ ID NO: 336317 - DNA, 19 bp, Homo sapiens
  siRNA target sequence for LZTR1 (NM_006767.1,2368-2386).
gcactgcctgcacatcatt

SEQ ID NO: 336318 - DNA, 19 bp, Homo sapiens
  siRNA target sequence for KRTHA8 (NM_006771.3,672-690).
ccacattcctggcaacatt

SEQ ID NO: 336319 - DNA, 19 bp, Homo sapiens
  siRNA target sequence for KRTHA8 (NM_006771.3,700-718).
ggggcctatggtgaaaaca

SEQ ID NO: 336320 - DNA, 19 bp, Homo sapiens
  siRNA target sequence for C6orf10 (NM_006781.2,256-274).
cacgacgtaagcaaagtga

SEQ ID NO: 336321 - DNA, 19 bp, Homo sapiens
  siRNA target sequence for C6orf10 (NM_006781.2,258-276).
cgacgtaagcaaagtgaaa

SEQ ID NO: 336322 - DNA, 19 bp, Homo sapiens
  siRNA target sequence for C6orf10 (NM_006781.2,337-355).
gaggatcccgacatgcata

SEQ ID NO: 336323 - DNA, 19 bp, Homo sapiens
  siRNA target sequence for C6orf10 (NM_006781.2,339-357).
ggatcccgacatgcatatt

SEQ ID NO: 336324 - DNA, 19 bp, Homo sapiens
  siRNA target sequence for C6orf10 (NM_006781.2,344-362).
ccgacatgcatattcaaca

SEQ ID NO: 336325 - DNA, 19 bp, Homo sapiens
  siRNA target sequence for C6orf10 (NM_006781.2,432-450).
gtgtctatggcatctaagt

SEQ ID NO: 336326 - DNA, 19 bp, Homo sapiens
  siRNA target sequence for C6orf10 (NM_006781.2,449-467).
gttctccctgggacaaaca

SEQ ID NO: 336327 - DNA, 19 bp, Homo sapiens
  siRNA target sequence for C6orf10 (NM_006781.2,485-503).
gatgtgttttattttagca

SEQ ID NO: 336328 - DNA, 19 bp, Homo sapiens
  siRNA target sequence for C6orf10 (NM_006781.2,501-519).
gcactgtctcgatcaagta

SEQ ID NO: 336329 - DNA, 19 bp, Homo sapiens
  siRNA target sequence for C6orf10 (NM_006781.2,502-520).
cactgtctcgatcaagtat

SEQ ID NO: 336330 - DNA, 19 bp, Homo sapiens
  siRNA target sequence for C6orf10 (NM_006781.2,506-524).
gtctcgatcaagtattggt

SEQ ID NO: 336331 - DNA, 19 bp, Homo sapiens
  siRNA target sequence for C6orf10 (NM_006781.2,511-529).
gatcaagtattggtagtat

SEQ ID NO: 336332 - DNA, 19 bp, Homo sapiens
  siRNA target sequence for C6orf10 (NM_006781.2,514-532).
caagtattggtagtataaa

SEQ ID NO: 336333 - DNA, 19 bp, Homo sapiens
  siRNA target sequence for C6orf10 (NM_006781.2,607-625).
gagctacaggacctatcaa

SEQ ID NO: 336334 - DNA, 19 bp, Homo sapiens
  siRNA target sequence for C6orf10 (NM_006781.2,626-644).
gctctctcaaaaaaccatt

SEQ ID NO: 336335 - DNA, 19 bp, Homo sapiens
  siRNA target sequence for C6orf10 (NM_006781.2,654-672).
ccaggacctattgtacaat

SEQ ID NO: 336336 - DNA, 19 bp, Homo sapiens
  siRNA target sequence for C6orf10 (NM_006781.2,655-673).
caggacctattgtacaata

SEQ ID NO: 336337 - DNA, 19 bp, Homo sapiens
  siRNA target sequence for C6orf10 (NM_006781.2,715-733).
cacccatggcacccataat

SEQ ID NO: 336338 - DNA, 19 bp, Homo sapiens
  siRNA target sequence for C6orf10 (NM_006781.2,717-735).
cccatggcacccataataa

SEQ ID NO: 336339 - DNA, 19 bp, Homo sapiens
  siRNA target sequence for C6orf10 (NM_006781.2,718-736).
ccatggcacccataataat

SEQ ID NO: 336340 - DNA, 19 bp, Homo sapiens
  siRNA target sequence for C6orf10 (NM_006781.2,722-740).
ggcacccataataatttca

SEQ ID NO: 336341 - DNA, 19 bp, Homo sapiens
  siRNA target sequence for C6orf10 (NM_006781.2,749-767).
cgcaagaatacctcaagtt

SEQ ID NO: 336342 - DNA, 19 bp, Homo sapiens
  siRNA target sequence for C6orf10 (NM_006781.2,887-905).
cactgcaaggtctcagaat

SEQ ID NO: 336343 - DNA, 19 bp, Homo sapiens
  siRNA target sequence for C6orf10 (NM_006781.2,939-957).
gacatcatatttacgaatt

SEQ ID NO: 336344 - DNA, 19 bp, Homo sapiens
  siRNA target sequence for C6orf10 (NM_006781.2,941-959).
catcatatttacgaattct

SEQ ID NO: 336345 - DNA, 19 bp, Homo sapiens
  siRNA target sequence for C6orf10 (NM_006781.2,944-962).
catatttacgaattctgta

SEQ ID NO: 336346 - DNA, 19 bp, Homo sapiens
  siRNA target sequence for C6orf10 (NM_006781.2,952-970).
cgaattctgtagaatcctt

SEQ ID NO: 336347 - DNA, 19 bp, Homo sapiens
  siRNA target sequence for C6orf10 (NM_006781.2,968-986).
cttgaaatcagcacacata

SEQ ID NO: 336348 - DNA, 19 bp, Homo sapiens
  siRNA target sequence for C6orf10 (NM_006781.2,1006-1024).
gaaaaggcactgatttaga

SEQ ID NO: 336349 - DNA, 19 bp, Homo sapiens
  siRNA target sequence for C6orf10 (NM_006781.2,1060-1078).
gtgacgctggaataccaaa

SEQ ID NO: 336350 - DNA, 19 bp, Homo sapiens
  siRNA target sequence for C6orf10 (NM_006781.2,1062-1080).
gacgctggaataccaaaaa

SEQ ID NO: 336351 - DNA, 19 bp, Homo sapiens
  siRNA target sequence for C6orf10 (NM_006781.2,1064-1082).
cgctggaataccaaaaaga

SEQ ID NO: 336352 - DNA, 19 bp, Homo sapiens
  siRNA target sequence for C6orf10 (NM_006781.2,1376-1394).
ggagtcagttgtactgaaa

SEQ ID NO: 336353 - DNA, 19 bp, Homo sapiens
  siRNA target sequence for C6orf10 (NM_006781.2,1837-1855).
ggaagtacaacaaaaaagt

SEQ ID NO: 336354 - DNA, 19 bp, Homo sapiens
  siRNA target sequence for GJB6 (NM_006783.2,259-277).
ggacgctgcacactttcat

SEQ ID NO: 336355 - DNA, 19 bp, Homo sapiens
  siRNA target sequence for GJB6 (NM_006783.2,414-432).
ctgcaaccgggatgcaaaa

SEQ ID NO: 336356 - DNA, 19 bp, Homo sapiens
  siRNA target sequence for GJB6 (NM_006783.2,416-434).
gcaaccgggatgcaaaaat

SEQ ID NO: 336357 - DNA, 19 bp, Homo sapiens
  siRNA target sequence for GJB6 (NM_006783.2,435-453).
gtgtgctatgaccactttt

SEQ ID NO: 336358 - DNA, 19 bp, Homo sapiens
  siRNA target sequence for GJB6 (NM_006783.2,549-567).
gaaaccactcgcaagttca

SEQ ID NO: 336359 - DNA, 19 bp, Homo sapiens
  siRNA target sequence for GJB6 (NM_006783.2,597-615).
gacatagaggacattaaaa

SEQ ID NO: 336360 - DNA, 19 bp, Homo sapiens
  siRNA target sequence for GJB6 (NM_006783.2,705-723).
gtgttttacttcctttaca

SEQ ID NO: 336361 - DNA, 19 bp, Homo sapiens
  siRNA target sequence for GJB6 (NM_006783.2,809-827).
gaagaccgtgtttaccatt

SEQ ID NO: 336362 - DNA, 19 bp, Homo sapiens
  siRNA target sequence for GJB6 (NM_006783.2,812-830).
gaccgtgtttaccattttt

SEQ ID NO: 336363 - DNA, 19 bp, Homo sapiens
  siRNA target sequence for GJB6 (NM_006783.2,838-856).
ctgcgtctgtgatttgcat

SEQ ID NO: 336364 - DNA, 19 bp, Homo sapiens
  siRNA target sequence for GJB6 (NM_006783.2,943-961).
ccaatcatgccctaaagga

SEQ ID NO: 336365 - DNA, 19 bp, Homo sapiens
  siRNA target sequence for MSL3L1 (NM_006800.2,901-919).
ggtgacttcgtctaaattt

SEQ ID NO: 336366 - DNA, 19 bp, Homo sapiens
  siRNA target sequence for MSL3L1 (NM_006800.2,902-920).
gtgacttcgtctaaatttt

SEQ ID NO: 336367 - DNA, 19 bp, Homo sapiens
  siRNA target sequence for MSL3L1 (NM_006800.2,977-995).
cccagtccgcctttgttga

SEQ ID NO: 336368 - DNA, 19 bp, Homo sapiens
  siRNA target sequence for MSL3L1 (NM_006800.2,978-996).
ccagtccgcctttgttgaa

SEQ ID NO: 336369 - DNA, 19 bp, Homo sapiens
  siRNA target sequence for MSL3L1 (NM_006800.2,979-997).
cagtccgcctttgttgaat

SEQ ID NO: 336370 - DNA, 19 bp, Homo sapiens
  siRNA target sequence for C1orf29 (NM_006820.1,256-274).
cagccgtcagggatgtact

SEQ ID NO: 336371 - DNA, 19 bp, Homo sapiens
  siRNA target sequence for C1orf29 (NM_006820.1,258-276).
gccgtcagggatgtactat

SEQ ID NO: 336372 - DNA, 19 bp, Homo sapiens
  siRNA target sequence for C1orf29 (NM_006820.1,259-277).
ccgtcagggatgtactata

SEQ ID NO: 336373 - DNA, 19 bp, Homo sapiens
  siRNA target sequence for C1orf29 (NM_006820.1,260-278).
cgtcagggatgtactataa

SEQ ID NO: 336374 - DNA, 19 bp, Homo sapiens
  siRNA target sequence for C1orf29 (NM_006820.1,263-281).
cagggatgtactataacaa

SEQ ID NO: 336375 - DNA, 19 bp, Homo sapiens
  siRNA target sequence for C1orf29 (NM_006820.1,304-322).
gattgtagcctttatgctt

SEQ ID NO: 336376 - DNA, 19 bp, Homo sapiens
  siRNA target sequence for C1orf29 (NM_006820.1,312-330).
cctttatgcttggaaatta

SEQ ID NO: 336377 - DNA, 19 bp, Homo sapiens
  siRNA target sequence for C1orf29 (NM_006820.1,370-388).
cctatggttttcacttcaa

SEQ ID NO: 336378 - DNA, 19 bp, Homo sapiens
  siRNA target sequence for C1orf29 (NM_006820.1,375-393).
ggttttcacttcaaaagaa

SEQ ID NO: 336379 - DNA, 19 bp, Homo sapiens
  siRNA target sequence for C1orf29 (NM_006820.1,455-473).
caactggtgtgtcgtttat

SEQ ID NO: 336380 - DNA, 19 bp, Homo sapiens
  siRNA target sequence for C1orf29 (NM_006820.1,458-476).
ctggtgtgtcgtttatcga

SEQ ID NO: 336381 - DNA, 19 bp, Homo sapiens
  siRNA target sequence for C1orf29 (NM_006820.1,460-478).
ggtgtgtcgtttatcgaaa

SEQ ID NO: 336382 - DNA, 19 bp, Homo sapiens
  siRNA target sequence for C1orf29 (NM_006820.1,461-479).
gtgtgtcgtttatcgaaaa

SEQ ID NO: 336383 - DNA, 19 bp, Homo sapiens
  siRNA target sequence for C1orf29 (NM_006820.1,474-492).
cgaaaacggatattttcat

SEQ ID NO: 336384 - DNA, 19 bp, Homo sapiens
  siRNA target sequence for C1orf29 (NM_006820.1,562-580).
ccaccgtcagtatttggaa

SEQ ID NO: 336385 - DNA, 19 bp, Homo sapiens
  siRNA target sequence for C1orf29 (NM_006820.1,611-629).
gataacctagacgacataa

SEQ ID NO: 336386 - DNA, 19 bp, Homo sapiens
  siRNA target sequence for C1orf29 (NM_006820.1,620-638).
gacgacataaagaggataa

SEQ ID NO: 336387 - DNA, 19 bp, Homo sapiens
  siRNA target sequence for C1orf29 (NM_006820.1,622-640).
cgacataaagaggataatt

SEQ ID NO: 336388 - DNA, 19 bp, Homo sapiens
  siRNA target sequence for C1orf29 (NM_006820.1,809-827).
gccgtagtggggtctgata

SEQ ID NO: 336389 - DNA, 19 bp, Homo sapiens
  siRNA target sequence for C1orf29 (NM_006820.1,840-858).
ccgagcggtataggatata

SEQ ID NO: 336390 - DNA, 19 bp, Homo sapiens
  siRNA target sequence for C1orf29 (NM_006820.1,841-859).
cgagcggtataggatatat

SEQ ID NO: 336391 - DNA, 19 bp, Homo sapiens
  siRNA target sequence for C1orf29 (NM_006820.1,842-860).
gagcggtataggatatatt

SEQ ID NO: 336392 - DNA, 19 bp, Homo sapiens
  siRNA target sequence for C1orf29 (NM_006820.1,844-862).
gcggtataggatatattct

SEQ ID NO: 336393 - DNA, 19 bp, Homo sapiens
  siRNA target sequence for C1orf29 (NM_006820.1,846-864).
ggtataggatatattctgt

SEQ ID NO: 336394 - DNA, 19 bp, Homo sapiens
  siRNA target sequence for C1orf29 (NM_006820.1,956-974).
gacattccccacatcttaa

SEQ ID NO: 336395 - DNA, 19 bp, Homo sapiens
  siRNA target sequence for C1orf29 (NM_006820.1,987-1005).
cagacagatatcagtttaa

SEQ ID NO: 336396 - DNA, 19 bp, Homo sapiens
  siRNA target sequence for C1orf29 (NM_006820.1,989-1007).
gacagatatcagtttaatt

SEQ ID NO: 336397 - DNA, 19 bp, Homo sapiens
  siRNA target sequence for C1orf29 (NM_006820.1,1000-1018).
gtttaattcccgtaaacca

SEQ ID NO: 336398 - DNA, 19 bp, Homo sapiens
  siRNA target sequence for C1orf29 (NM_006820.1,1079-1097).
gtggcttatgtcttagaca

SEQ ID NO: 336399 - DNA, 19 bp, Homo sapiens
  siRNA target sequence for C1orf29 (NM_006820.1,1083-1101).
cttatgtcttagacatcaa

SEQ ID NO: 336400 - DNA, 19 bp, Homo sapiens
  siRNA target sequence for C1orf29 (NM_006820.1,1090-1108).
cttagacatcaactctatt

SEQ ID NO: 336401 - DNA, 19 bp, Homo sapiens
  siRNA target sequence for C1orf29 (NM_006820.1,1215-1233).
gtgaggttcttcaagacaa

SEQ ID NO: 336402 - DNA, 19 bp, Homo sapiens
  siRNA target sequence for C1orf29 (NM_006820.1,1219-1237).
ggttcttcaagacaacttt

SEQ ID NO: 336403 - DNA, 19 bp, Homo sapiens
  siRNA target sequence for C1orf29 (NM_006820.1,1263-1281).
ctcaaagccgggtcatgaa

SEQ ID NO: 336404 - DNA, 19 bp, Homo sapiens
  siRNA target sequence for C1orf29 (NM_006820.1,1272-1290).
gggtcatgaatgtccataa

SEQ ID NO: 336405 - DNA, 19 bp, Homo sapiens
  siRNA target sequence for C1orf29 (NM_006820.1,1273-1291).
ggtcatgaatgtccataaa

SEQ ID NO: 336406 - DNA, 19 bp, Homo sapiens
  siRNA target sequence for C1orf29 (NM_006820.1,1295-1313).
ctaggcattcctatttcca

SEQ ID NO: 336407 - DNA, 19 bp, Homo sapiens
  siRNA target sequence for C1orf29 (NM_006820.1,1298-1316).
ggcattcctatttccaata

SEQ ID NO: 336408 - DNA, 19 bp, Homo sapiens
  siRNA target sequence for C1orf29 (NM_006820.1,1300-1318).
cattcctatttccaatatt

SEQ ID NO: 336409 - DNA, 19 bp, Homo sapiens
  siRNA target sequence for C1orf29 (NM_006820.1,1354-1372).
ggaccccatgaaggatatt

SEQ ID NO: 336410 - DNA, 19 bp, Homo sapiens
  siRNA target sequence for C1orf29 (NM_006820.1,1402-1420).
gcgggctgcagatgatttt

SEQ ID NO: 336411 - DNA, 19 bp, Homo sapiens
  siRNA target sequence for C1orf29 (NM_006820.1,1403-1421).
cgggctgcagatgattttt

SEQ ID NO: 336412 - DNA, 19 bp, Homo sapiens
  siRNA target sequence for C1orf29 (NM_006820.1,1463-1481).
gcgttacagccctgcattt

SEQ ID NO: 336413 - DNA, 19 bp, Homo sapiens
  siRNA target sequence for IMMT (NM_006839.1,177-195).
ccatgccgcagatactcta

SEQ ID NO: 336414 - DNA, 19 bp, Homo sapiens
  siRNA target sequence for IMMT (NM_006839.1,182-200).
ccgcagatactctacttca

SEQ ID NO: 336415 - DNA, 19 bp, Homo sapiens
  siRNA target sequence for IMMT (NM_006839.1,211-229).
ggttgactactggcaaaat

SEQ ID NO: 336416 - DNA, 19 bp, Homo sapiens
  siRNA target sequence for IMMT (NM_006839.1,212-230).
gttgactactggcaaaatt

SEQ ID NO: 336417 - DNA, 19 bp, Homo sapiens
  siRNA target sequence for IMMT (NM_006839.1,215-233).
gactactggcaaaattgct

SEQ ID NO: 336418 - DNA, 19 bp, Homo sapiens
  siRNA target sequence for IMMT (NM_006839.1,235-253).
gagctggccttttgtttgt

SEQ ID NO: 336419 - DNA, 19 bp, Homo sapiens
  siRNA target sequence for IMMT (NM_006839.1,248-266).
gtttgttggtggaggtatt

SEQ ID NO: 336420 - DNA, 19 bp, Homo sapiens
  siRNA target sequence for IMMT (NM_006839.1,298-316).
cccatttccgggaaagtgt

SEQ ID NO: 336421 - DNA, 19 bp, Homo sapiens
  siRNA target sequence for IMMT (NM_006839.1,299-317).
ccatttccgggaaagtgta

SEQ ID NO: 336422 - DNA, 19 bp, Homo sapiens
  siRNA target sequence for IMMT (NM_006839.1,360-378).
cttggtcctgcagcttata

SEQ ID NO: 336423 - DNA, 19 bp, Homo sapiens
  siRNA target sequence for IMMT (NM_006839.1,364-382).
gtcctgcagcttataatgt

SEQ ID NO: 336424 - DNA, 19 bp, Homo sapiens
  siRNA target sequence for IMMT (NM_006839.1,370-388).
cagcttataatgttccatt

SEQ ID NO: 336425 - DNA, 19 bp, Homo sapiens
  siRNA target sequence for IMMT (NM_006839.1,390-408).
ccaaagaaatcgattcagt

SEQ ID NO: 336426 - DNA, 19 bp, Homo sapiens
  siRNA target sequence for IMMT (NM_006839.1,405-423).
cagtcgggtccactaaaaa

SEQ ID NO: 336427 - DNA, 19 bp, Homo sapiens
  siRNA target sequence for IMMT (NM_006839.1,410-428).
gggtccactaaaaatctct

SEQ ID NO: 336428 - DNA, 19 bp, Homo sapiens
  siRNA target sequence for IMMT (NM_006839.1,411-429).
ggtccactaaaaatctcta

SEQ ID NO: 336429 - DNA, 19 bp, Homo sapiens
  siRNA target sequence for IMMT (NM_006839.1,425-443).
ctctagtgtatcagaagta

SEQ ID NO: 336430 - DNA, 19 bp, Homo sapiens
  siRNA target sequence for IMMT (NM_006839.1,427-445).
ctagtgtatcagaagtaat

SEQ ID NO: 336431 - DNA, 19 bp, Homo sapiens
  siRNA target sequence for IMMT (NM_006839.1,517-535).
ctacagaagcggctcaaat

SEQ ID NO: 336432 - DNA, 19 bp, Homo sapiens
  siRNA target sequence for IMMT (NM_006839.1,520-538).
cagaagcggctcaaattat

SEQ ID NO: 336433 - DNA, 19 bp, Homo sapiens
  siRNA target sequence for IMMT (NM_006839.1,522-540).
gaagcggctcaaattattt

SEQ ID NO: 336434 - DNA, 19 bp, Homo sapiens
  siRNA target sequence for IMMT (NM_006839.1,579-597).
gttcagcctgaggaatctt

SEQ ID NO: 336435 - DNA, 19 bp, Homo sapiens
  siRNA target sequence for IMMT (NM_006839.1,651-669).
gaagaagcatcctcatctt

SEQ ID NO: 336436 - DNA, 19 bp, Homo sapiens
  siRNA target sequence for IMMT (NM_006839.1,654-672).
gaagcatcctcatcttcta

SEQ ID NO: 336437 - DNA, 19 bp, Homo sapiens
  siRNA target sequence for IMMT (NM_006839.1,803-821).
ggctattgcagctcagaat

SEQ ID NO: 336438 - DNA, 19 bp, Homo sapiens
  siRNA target sequence for IMMT (NM_006839.1,844-862).
cacactccaacatattgaa

SEQ ID NO: 336439 - DNA, 19 bp, Homo sapiens
  siRNA target sequence for IMMT (NM_006839.1,919-937).
cagtggagggtgcattgaa

SEQ ID NO: 336440 - DNA, 19 bp, Homo sapiens
  siRNA target sequence for IMMT (NM_006839.1,1047-1065).
ggggccaagcctcatataa

SEQ ID NO: 336441 - DNA, 19 bp, Homo sapiens
  siRNA target sequence for IMMT (NM_006839.1,1077-1095).
ggtaaacttcacaacatga

SEQ ID NO: 336442 - DNA, 19 bp, Homo sapiens
  siRNA target sequence for IMMT (NM_006839.1,1078-1096).
gtaaacttcacaacatgat

SEQ ID NO: 336443 - DNA, 19 bp, Homo sapiens
  siRNA target sequence for IMMT (NM_006839.1,1151-1169).
ggttgtatctcagtatcat

SEQ ID NO: 336444 - DNA, 19 bp, Homo sapiens
  siRNA target sequence for IMMT (NM_006839.1,1182-1200).
caagctcgggatgacttta

SEQ ID NO: 336445 - DNA, 19 bp, Homo sapiens
  siRNA target sequence for IMMT (NM_006839.1,1315-1333).
cacatcgtcgtattgatca

SEQ ID NO: 336446 - DNA, 19 bp, Homo sapiens
  siRNA target sequence for IMMT (NM_006839.1,1503-1521).
gtcagagatgccatggaaa

SEQ ID NO: 336447 - DNA, 19 bp, Homo sapiens
  siRNA target sequence for IMMT (NM_006839.1,1555-1573).
ctgcccacactgatcactt

SEQ ID NO: 336448 - DNA, 19 bp, Homo sapiens
  siRNA target sequence for IMMT (NM_006839.1,1643-1661).
ctctgaacaagaattacaa

SEQ ID NO: 336449 - DNA, 19 bp, Homo sapiens
  siRNA target sequence for IMMT (NM_006839.1,1680-1698).
gagcaagttgacaacttta

SEQ ID NO: 336450 - DNA, 19 bp, Homo sapiens
  siRNA target sequence for IMMT (NM_006839.1,1682-1700).
gcaagttgacaactttact

SEQ ID NO: 336451 - DNA, 19 bp, Homo sapiens
  siRNA target sequence for IMMT (NM_006839.1,1691-1709).
caactttactctggatata

SEQ ID NO: 336452 - DNA, 19 bp, Homo sapiens
  siRNA target sequence for IMMT (NM_006839.1,1724-1742).
cagactcagaggaatcgaa

SEQ ID NO: 336453 - DNA, 19 bp, Homo sapiens
  siRNA target sequence for IMMT (NM_006839.1,1803-1821).
ctttcagtggaggcattaa

SEQ ID NO: 336454 - DNA, 19 bp, Homo sapiens
  siRNA target sequence for IMMT (NM_006839.1,1843-1861).
ctgcagaaacacctactat

SEQ ID NO: 336455 - DNA, 19 bp, Homo sapiens
  siRNA target sequence for IMMT (NM_006839.1,1889-1907).
caaagccaactgttctgat

SEQ ID NO: 336456 - DNA, 19 bp, Homo sapiens
  siRNA target sequence for IMMT (NM_006839.1,1894-1912).
ccaactgttctgataatga

SEQ ID NO: 336457 - DNA, 19 bp, Homo sapiens
  siRNA target sequence for IMMT (NM_006839.1,1982-2000).
ccttagagcccgtttctat

SEQ ID NO: 336458 - DNA, 19 bp, Homo sapiens
  siRNA target sequence for IMMT (NM_006839.1,1991-2009).
ccgtttctatgctgttcaa

SEQ ID NO: 336459 - DNA, 19 bp, Homo sapiens
  siRNA target sequence for IMMT (NM_006839.1,2129-2147).
gctctgccctgaggatata

SEQ ID NO: 336460 - DNA, 19 bp, Homo sapiens
  siRNA target sequence for IMMT (NM_006839.1,2139-2157).
gaggatataaacacattta

SEQ ID NO: 336461 - DNA, 19 bp, Homo sapiens
  siRNA target sequence for IMMT (NM_006839.1,2209-2227).
cagcaaagtttgtcaatca

SEQ ID NO: 336462 - DNA, 19 bp, Homo sapiens
  siRNA target sequence for IMMT (NM_006839.1,2274-2292).
gcccgaatgaccctagaaa

SEQ ID NO: 336463 - DNA, 19 bp, Homo sapiens
  siRNA target sequence for IMMT (NM_006839.1,2278-2296).
gaatgaccctagaaacgaa

SEQ ID NO: 336464 - DNA, 19 bp, Homo sapiens
  siRNA target sequence for IMMT (NM_006839.1,2284-2302).
ccctagaaacgaaacagat

SEQ ID NO: 336465 - DNA, 19 bp, Homo sapiens
  siRNA target sequence for IMMT (NM_006839.1,2285-2303).
cctagaaacgaaacagata

SEQ ID NO: 336466 - DNA, 19 bp, Homo sapiens
  siRNA target sequence for IMMT (NM_006839.1,2306-2324).
ggaaatcctgacagcatat

SEQ ID NO: 336467 - DNA, 19 bp, Homo sapiens
  siRNA target sequence for IMMT (NM_006839.1,2327-2345).
cagcgccgtaggaatagga

SEQ ID NO: 336468 - DNA, 19 bp, Homo sapiens
  siRNA target sequence for LILRB5 (NM_006840.2,325-343).
ccatccacggtgtatgaca

SEQ ID NO: 336469 - DNA, 19 bp, Homo sapiens
  siRNA target sequence for LILRB5 (NM_006840.2,513-531).
cggacttctcacgtttgtt

SEQ ID NO: 336470 - DNA, 19 bp, Homo sapiens
  siRNA target sequence for LILRB5 (NM_006840.2,1109-1127).
ggcatcagatagacacttt

SEQ ID NO: 336471 - DNA, 19 bp, Homo sapiens
  siRNA target sequence for LILRB5 (NM_006840.2,1513-1531).
cggcatcagagcaaacaca

SEQ ID NO: 336472 - DNA, 19 bp, Homo sapiens
  siRNA target sequence for LILRB5 (NM_006840.2,1532-1550).
ggacatcggcccatttcta

SEQ ID NO: 336473 - DNA, 19 bp, Homo sapiens
  siRNA target sequence for LILRB5 (NM_006840.2,1626-1644).
ccaggaggaaattctcaat

SEQ ID NO: 336474 - DNA, 19 bp, Homo sapiens
  siRNA target sequence for TLK2 (NM_006852.1,373-391).
gcactcctaggggacataa

SEQ ID NO: 336475 - DNA, 19 bp, Homo sapiens
  siRNA target sequence for TLK2 (NM_006852.1,374-392).
cactcctaggggacataaa

SEQ ID NO: 336476 - DNA, 19 bp, Homo sapiens
  siRNA target sequence for TLK2 (NM_006852.1,500-518).
cttaccgcgacgagtagaa

SEQ ID NO: 336477 - DNA, 19 bp, Homo sapiens
  siRNA target sequence for TLK2 (NM_006852.1,1055-1073).
cggagcctcatttactgaa

SEQ ID NO: 336478 - DNA, 19 bp, Homo sapiens
  siRNA target sequence for TLK2 (NM_006852.1,1962-1980).
gatggcatggagctaacat

SEQ ID NO: 336479 - DNA, 19 bp, Homo sapiens
  siRNA target sequence for TLK2 (NM_006852.1,1983-2001).
caaggtgctggtacttatt

SEQ ID NO: 336480 - DNA, 19 bp, Homo sapiens
  siRNA target sequence for TLK2 (NM_006852.1,1986-2004).
ggtgctggtacttattggt

SEQ ID NO: 336481 - DNA, 19 bp, Homo sapiens
  siRNA target sequence for TLK2 (NM_006852.1,1987-2005).
gtgctggtacttattggta

SEQ ID NO: 336482 - DNA, 19 bp, Homo sapiens
  siRNA target sequence for TLK2 (NM_006852.1,1989-2007).
gctggtacttattggtatt

SEQ ID NO: 336483 - DNA, 19 bp, Homo sapiens
  siRNA target sequence for TLK2 (NM_006852.1,2048-2066).
gatctcaaataaagttgat

SEQ ID NO: 336484 - DNA, 19 bp, Homo sapiens
  siRNA target sequence for TLK2 (NM_006852.1,2071-2089).
ggtcggtgggtgtgatctt

SEQ ID NO: 336485 - DNA, 19 bp, Homo sapiens
  siRNA target sequence for TLK2 (NM_006852.1,2189-2207).
cccgccaaagccagtagta

SEQ ID NO: 336486 - DNA, 19 bp, Homo sapiens
  siRNA target sequence for TLK2 (NM_006852.1,2190-2208).
ccgccaaagccagtagtaa

SEQ ID NO: 336487 - DNA, 19 bp, Homo sapiens
  siRNA target sequence for TLK2 (NM_006852.1,2192-2210).
gccaaagccagtagtaaca

SEQ ID NO: 336488 - DNA, 19 bp, Homo sapiens
  siRNA target sequence for TLK2 (NM_006852.1,2303-2321).
gcctcacatccgaaagtca

SEQ ID NO: 336489 - DNA, 19 bp, Homo sapiens
  siRNA target sequence for TLK2 (NM_006852.1,2362-2380).
cctctggggcgtccaataa

SEQ ID NO: 336490 - DNA, 19 bp, Homo sapiens
  siRNA target sequence for TLK2 (NM_006852.1,2367-2385).
ggggcgtccaataacagtt

SEQ ID NO: 336491 - DNA, 19 bp, Homo sapiens
  siRNA target sequence for TLK2 (NM_006852.1,2370-2388).
gcgtccaataacagttctt

SEQ ID NO: 336492 - DNA, 19 bp, Homo sapiens
  siRNA target sequence for LILRB3 (NM_006864.1,452-470).
gcctcaggggggaatatga

SEQ ID NO: 336493 - DNA, 19 bp, Homo sapiens
  siRNA target sequence for LILRA2 (NM_006866.1,250-268).
gctgaggagtaccatctat

SEQ ID NO: 336494 - DNA, 19 bp, Homo sapiens
  siRNA target sequence for LILRA2 (NM_006866.1,291-309).
ctgggttagacggatacaa

SEQ ID NO: 336495 - DNA, 19 bp, Homo sapiens
  siRNA target sequence for LILRA2 (NM_006866.1,293-311).
gggttagacggatacaaga

SEQ ID NO: 336496 - DNA, 19 bp, Homo sapiens
  siRNA target sequence for LILRA2 (NM_006866.1,368-386).
ggtatcactgtcagtacta

SEQ ID NO: 336497 - DNA, 19 bp, Homo sapiens
  siRNA target sequence for LILRA2 (NM_006866.1,1352-1370).
gccaacacccccaggatta

SEQ ID NO: 336498 - DNA, 19 bp, Homo sapiens
  siRNA target sequence for LILRA2 (NM_006866.1,1454-1472).
gccagagaagcctacaaga

SEQ ID NO: 336499 - DNA, 19 bp, Homo sapiens
  siRNA target sequence for RIPK3 (NM_006871.2,280-298).
gtggcggtcaagatcgtaa

SEQ ID NO: 336500 - DNA, 19 bp, Homo sapiens
  siRNA target sequence for RIPK3 (NM_006871.2,283-301).
gcggtcaagatcgtaaact

SEQ ID NO: 336501 - DNA, 19 bp, Homo sapiens
  siRNA target sequence for RIPK3 (NM_006871.2,329-347).
ccatggcaagtctggataa

SEQ ID NO: 336502 - DNA, 19 bp, Homo sapiens
  siRNA target sequence for RIPK3 (NM_006871.2,335-353).
caagtctggataacgaatt

SEQ ID NO: 336503 - DNA, 19 bp, Homo sapiens
  siRNA target sequence for RIPK3 (NM_006871.2,362-380).
gcctagaaggggttatcga

SEQ ID NO: 336504 - DNA, 19 bp, Homo sapiens
  siRNA target sequence for RIPK3 (NM_006871.2,409-427).
ccggctctggtgactaaat

SEQ ID NO: 336505 - DNA, 19 bp, Homo sapiens
  siRNA target sequence for RIPK3 (NM_006871.2,511-529).
gtggtgcttgggatgtttt

SEQ ID NO: 336506 - DNA, 19 bp, Homo sapiens
  siRNA target sequence for RIPK3 (NM_006871.2,700-718).
gccccagaactgtttgtta

SEQ ID NO: 336507 - DNA, 19 bp, Homo sapiens
  siRNA target sequence for RIPK3 (NM_006871.2,969-987).
ccaggaatgcctaccaaaa

SEQ ID NO: 336508 - DNA, 19 bp, Homo sapiens
  siRNA target sequence for RIPK3 (NM_006871.2,972-990).
ggaatgcctaccaaaaact

SEQ ID NO: 336509 - DNA, 19 bp, Homo sapiens
  siRNA target sequence for RIPK3 (NM_006871.2,1033-1051).
gtctccacggtaaaggatt

SEQ ID NO: 336510 - DNA, 19 bp, Homo sapiens
  siRNA target sequence for RIPK3 (NM_006871.2,1068-1086).
gagcagcaataggagattt

SEQ ID NO: 336511 - DNA, 19 bp, Homo sapiens
  siRNA target sequence for RIPK3 (NM_006871.2,1117-1135).
gaaatggatggctttagga

SEQ ID NO: 336512 - DNA, 19 bp, Homo sapiens
  siRNA target sequence for RIPK3 (NM_006871.2,1133-1151).
ggagaaccatagaaaacca

SEQ ID NO: 336513 - DNA, 19 bp, Homo sapiens
  siRNA target sequence for RIPK3 (NM_006871.2,1149-1167).
ccagcactctcgtaatgat

SEQ ID NO: 336514 - DNA, 19 bp, Homo sapiens
  siRNA target sequence for RIPK3 (NM_006871.2,1159-1177).
cgtaatgatgtcatggttt

SEQ ID NO: 336515 - DNA, 19 bp, Homo sapiens
  siRNA target sequence for RIPK3 (NM_006871.2,1178-1196).
ctgagtggctaaacaaact

SEQ ID NO: 336516 - DNA, 19 bp, Homo sapiens
  siRNA target sequence for RIPK3 (NM_006871.2,1184-1202).
ggctaaacaaactgaatct

SEQ ID NO: 336517 - DNA, 19 bp, Homo sapiens
  siRNA target sequence for RIPK3 (NM_006871.2,1185-1203).
gctaaacaaactgaatcta

SEQ ID NO: 336518 - DNA, 19 bp, Homo sapiens
  siRNA target sequence for RIPK3 (NM_006871.2,1215-1233).
cagctctgttcctaaaaaa

SEQ ID NO: 336519 - DNA, 19 bp, Homo sapiens
  siRNA target sequence for RIPK3 (NM_006871.2,1475-1493).
cagggcgaccgctcgttaa

SEQ ID NO: 336520 - DNA, 19 bp, Homo sapiens
  siRNA target sequence for RIPK3 (NM_006871.2,1477-1495).
gggcgaccgctcgttaaca

SEQ ID NO: 336521 - DNA, 19 bp, Homo sapiens
  siRNA target sequence for RIPK3 (NM_006871.2,1478-1496).
ggcgaccgctcgttaacat

SEQ ID NO: 336522 - DNA, 19 bp, Homo sapiens
  siRNA target sequence for RIPK3 (NM_006871.2,1479-1497).
gcgaccgctcgttaacata

SEQ ID NO: 336523 - DNA, 19 bp, Homo sapiens
  siRNA target sequence for RIPK3 (NM_006871.2,1480-1498).
cgaccgctcgttaacatat

SEQ ID NO: 336524 - DNA, 19 bp, Homo sapiens
  siRNA target sequence for RIPK3 (NM_006871.2,1481-1499).
gaccgctcgttaacatata

SEQ ID NO: 336525 - DNA, 19 bp, Homo sapiens
  siRNA target sequence for RIPK3 (NM_006871.2,1483-1501).
ccgctcgttaacatataca

SEQ ID NO: 336526 - DNA, 19 bp, Homo sapiens
  siRNA target sequence for RIPK3 (NM_006871.2,1484-1502).
cgctcgttaacatatacaa

SEQ ID NO: 336527 - DNA, 19 bp, Homo sapiens
  siRNA target sequence for RIPK3 (NM_006871.2,1486-1504).
ctcgttaacatatacaact

SEQ ID NO: 336528 - DNA, 19 bp, Homo sapiens
  siRNA target sequence for RIPK3 (NM_006871.2,1516-1534).
caagttggagacaacaact

SEQ ID NO: 336529 - DNA, 19 bp, Homo sapiens
  siRNA target sequence for RIPK3 (NM_006871.2,1522-1540).
ggagacaacaactacttga

SEQ ID NO: 336530 - DNA, 19 bp, Homo sapiens
  siRNA target sequence for RIPK3 (NM_006871.2,1525-1543).
gacaacaactacttgacta

SEQ ID NO: 336531 - DNA, 19 bp, Homo sapiens
  siRNA target sequence for RIPK3 (NM_006871.2,1530-1548).
caactacttgactatgcaa

SEQ ID NO: 336532 - DNA, 19 bp, Homo sapiens
  siRNA target sequence for RIPK3 (NM_006871.2,1662-1680).
caggccacagggttggtat

SEQ ID NO: 336533 - DNA, 19 bp, Homo sapiens
  siRNA target sequence for RIPK3 (NM_006871.2,1664-1682).
ggccacagggttggtataa

SEQ ID NO: 336534 - DNA, 19 bp, Homo sapiens
  siRNA target sequence for RIPK3 (NM_006871.2,1665-1683).
gccacagggttggtataat

SEQ ID NO: 336535 - DNA, 19 bp, Homo sapiens
  siRNA target sequence for RIPK3 (NM_006871.2,1669-1687).
cagggttggtataatcata

SEQ ID NO: 336536 - DNA, 19 bp, Homo sapiens
  siRNA target sequence for SFRS5 (NM_006925.2,188-206).
gtggctgtcgggtattcat

SEQ ID NO: 336537 - DNA, 19 bp, Homo sapiens
  siRNA target sequence for SFRS5 (NM_006925.2,199-217).
gtattcatcgggagactaa

SEQ ID NO: 336538 - DNA, 19 bp, Homo sapiens
  siRNA target sequence for SFRS5 (NM_006925.2,204-222).
catcgggagactaaatcca

SEQ ID NO: 336539 - DNA, 19 bp, Homo sapiens
  siRNA target sequence for SFRS5 (NM_006925.2,258-276).
gggatatggacggataaga

SEQ ID NO: 336540 - DNA, 19 bp, Homo sapiens
  siRNA target sequence for SFRS5 (NM_006925.2,266-284).
gacggataagagatattga

SEQ ID NO: 336541 - DNA, 19 bp, Homo sapiens
  siRNA target sequence for SFRS5 (NM_006925.2,269-287).
ggataagagatattgatct

SEQ ID NO: 336542 - DNA, 19 bp, Homo sapiens
  siRNA target sequence for SFRS5 (NM_006925.2,433-451).
cgatactctgaccgtttta

SEQ ID NO: 336543 - DNA, 19 bp, Homo sapiens
  siRNA target sequence for SFRS5 (NM_006925.2,438-456).
ctctgaccgttttagtagt

SEQ ID NO: 336544 - DNA, 19 bp, Homo sapiens
  siRNA target sequence for SFRS5 (NM_006925.2,455-473).
gtcgcagacctcgaaatga

SEQ ID NO: 336545 - DNA, 19 bp, Homo sapiens
  siRNA target sequence for SFRS5 (NM_006925.2,457-475).
cgcagacctcgaaatgata

SEQ ID NO: 336546 - DNA, 19 bp, Homo sapiens
  siRNA target sequence for SFRS5 (NM_006925.2,459-477).
cagacctcgaaatgataga

SEQ ID NO: 336547 - DNA, 19 bp, Homo sapiens
  siRNA target sequence for SLC5A3 (NM_006933.1,32-50).
ccatagtggccctgtattt

SEQ ID NO: 336548 - DNA, 19 bp, Homo sapiens
  siRNA target sequence for SLC5A3 (NM_006933.1,33-51).
catagtggccctgtatttt

SEQ ID NO: 336549 - DNA, 19 bp, Homo sapiens
  siRNA target sequence for SLC5A3 (NM_006933.1,55-73).
ctggtcatgtgcattggtt

SEQ ID NO: 336550 - DNA, 19 bp, Homo sapiens
  siRNA target sequence for SLC5A3 (NM_006933.1,101-119).
gcaccgtgagtggatactt

SEQ ID NO: 336551 - DNA, 19 bp, Homo sapiens
  siRNA target sequence for SLC5A3 (NM_006933.1,138-156).
gacctgggtaacaattggt

SEQ ID NO: 336552 - DNA, 19 bp, Homo sapiens
  siRNA target sequence for SLC5A3 (NM_006933.1,235-253).
gtgggcgcatgggaattca

SEQ ID NO: 336553 - DNA, 19 bp, Homo sapiens
  siRNA target sequence for SLC5A3 (NM_006933.1,237-255).
gggcgcatgggaattcaat

SEQ ID NO: 336554 - DNA, 19 bp, Homo sapiens
  siRNA target sequence for SLC5A3 (NM_006933.1,257-275).
ccttactgcttttacaact

SEQ ID NO: 336555 - DNA, 19 bp, Homo sapiens
  siRNA target sequence for SLC5A3 (NM_006933.1,284-302).
gggttttcatcccaattta

SEQ ID NO: 336556 - DNA, 19 bp, Homo sapiens
  siRNA target sequence for SLC5A3 (NM_006933.1,303-321).
catccggtcaggggtatat

SEQ ID NO: 336557 - DNA, 19 bp, Homo sapiens
  siRNA target sequence for SLC5A3 (NM_006933.1,307-325).
cggtcaggggtatatacca

SEQ ID NO: 336558 - DNA, 19 bp, Homo sapiens
  siRNA target sequence for SLC5A3 (NM_006933.1,308-326).
ggtcaggggtatataccat

SEQ ID NO: 336559 - DNA, 19 bp, Homo sapiens
  siRNA target sequence for SLC5A3 (NM_006933.1,336-354).
cttgtccaagcgatttggt

SEQ ID NO: 336560 - DNA, 19 bp, Homo sapiens
  siRNA target sequence for SLC5A3 (NM_006933.1,358-376).
cataggattcaggtctatt

SEQ ID NO: 336561 - DNA, 19 bp, Homo sapiens
  siRNA target sequence for SLC5A3 (NM_006933.1,415-433).
ctctcggtggatctgtatt

SEQ ID NO: 336562 - DNA, 19 bp, Homo sapiens
  siRNA target sequence for SLC5A3 (NM_006933.1,429-447).
gtattcgggtgcccttttt

SEQ ID NO: 336563 - DNA, 19 bp, Homo sapiens
  siRNA target sequence for SLC5A3 (NM_006933.1,532-550).
cttgttgcagtgatctaca

SEQ ID NO: 336564 - DNA, 19 bp, Homo sapiens
  siRNA target sequence for SLC5A3 (NM_006933.1,562-580).
caggctctgctcatgatca

SEQ ID NO: 336565 - DNA, 19 bp, Homo sapiens
  siRNA target sequence for SLC5A3 (NM_006933.1,564-582).
ggctctgctcatgatcatt

SEQ ID NO: 336566 - DNA, 19 bp, Homo sapiens
  siRNA target sequence for SLC5A3 (NM_006933.1,576-594).
gatcattggggcacttaca

SEQ ID NO: 336567 - DNA, 19 bp, Homo sapiens
  siRNA target sequence for SLC5A3 (NM_006933.1,579-597).
cattggggcacttacactt

SEQ ID NO: 336568 - DNA, 19 bp, Homo sapiens
  siRNA target sequence for SLC5A3 (NM_006933.1,583-601).
ggggcacttacacttatga

SEQ ID NO: 336569 - DNA, 19 bp, Homo sapiens
  siRNA target sequence for SLC5A3 (NM_006933.1,584-602).
gggcacttacacttatgat

SEQ ID NO: 336570 - DNA, 19 bp, Homo sapiens
  siRNA target sequence for SLC5A3 (NM_006933.1,622-640).
ggcgggtttgaggaagtta

SEQ ID NO: 336571 - DNA, 19 bp, Homo sapiens
  siRNA target sequence for SLC5A3 (NM_006933.1,667-685).
gatgtcacttccatcttat

SEQ ID NO: 336572 - DNA, 19 bp, Homo sapiens
  siRNA target sequence for SLC5A3 (NM_006933.1,670-688).
gtcacttccatcttattga

SEQ ID NO: 336573 - DNA, 19 bp, Homo sapiens
  siRNA target sequence for SLC5A3 (NM_006933.1,697-715).
ctttccaacacaaattctt

SEQ ID NO: 336574 - DNA, 19 bp, Homo sapiens
  siRNA target sequence for SLC5A3 (NM_006933.1,716-734).
gtaatgtctcccctaagaa

SEQ ID NO: 336575 - DNA, 19 bp, Homo sapiens
  siRNA target sequence for SLC5A3 (NM_006933.1,750-768).
gctgcggaatccaacagat

SEQ ID NO: 336576 - DNA, 19 bp, Homo sapiens
  siRNA target sequence for SLC5A3 (NM_006933.1,753-771).
gcggaatccaacagatgaa

SEQ ID NO: 336577 - DNA, 19 bp, Homo sapiens
  siRNA target sequence for SLC5A3 (NM_006933.1,755-773).
ggaatccaacagatgaaga

SEQ ID NO: 336578 - DNA, 19 bp, Homo sapiens
  siRNA target sequence for SLC5A3 (NM_006933.1,883-901).
gccaaaggctctactctta

SEQ ID NO: 336579 - DNA, 19 bp, Homo sapiens
  siRNA target sequence for SLC5A3 (NM_006933.1,884-902).
ccaaaggctctactcttat

SEQ ID NO: 336580 - DNA, 19 bp, Homo sapiens
  siRNA target sequence for SLC5A3 (NM_006933.1,898-916).
cttatggctggcttcttaa

SEQ ID NO: 336581 - DNA, 19 bp, Homo sapiens
  siRNA target sequence for SLC5A3 (NM_006933.1,921-939).
cctgccaatgtttatcata

SEQ ID NO: 336582 - DNA, 19 bp, Homo sapiens
  siRNA target sequence for SLC5A3 (NM_006933.1,924-942).
gccaatgtttatcatagtt

SEQ ID NO: 336583 - DNA, 19 bp, Homo sapiens
  siRNA target sequence for SLC5A3 (NM_006933.1,940-958).
gttgtcccaggaatgattt

SEQ ID NO: 336584 - DNA, 19 bp, Homo sapiens
  siRNA target sequence for SLC5A3 (NM_006933.1,959-977).
ccaggatactgtttactga

SEQ ID NO: 336585 - DNA, 19 bp, Homo sapiens
  siRNA target sequence for SLC5A3 (NM_006933.1,960-978).
caggatactgtttactgat

SEQ ID NO: 336586 - DNA, 19 bp, Homo sapiens
  siRNA target sequence for SLC5A3 (NM_006933.1,1033-1051).
ggttgctccaatattgctt

SEQ ID NO: 336587 - DNA, 19 bp, Homo sapiens
  siRNA target sequence for SLC5A3 (NM_006933.1,1034-1052).
gttgctccaatattgctta

SEQ ID NO: 336588 - DNA, 19 bp, Homo sapiens
  siRNA target sequence for SLC5A3 (NM_006933.1,1084-1102).
ggccttcggggtttaatga

SEQ ID NO: 336589 - DNA, 19 bp, Homo sapiens
  siRNA target sequence for SLC5A3 (NM_006933.1,1085-1103).
gccttcggggtttaatgat

SEQ ID NO: 336590 - DNA, 19 bp, Homo sapiens
  siRNA target sequence for SLC5A3 (NM_006933.1,1174-1192).
ctcgatgtgtacaaactta

SEQ ID NO: 336591 - DNA, 19 bp, Homo sapiens
  siRNA target sequence for SLC5A3 (NM_006933.1,1204-1222).
gcaagctcccgggagttaa

SEQ ID NO: 336592 - DNA, 19 bp, Homo sapiens
  siRNA target sequence for SLC5A3 (NM_006933.1,1205-1223).
caagctcccgggagttaat

SEQ ID NO: 336593 - DNA, 19 bp, Homo sapiens
  siRNA target sequence for SLC5A3 (NM_006933.1,1208-1226).
gctcccgggagttaatgat

SEQ ID NO: 336594 - DNA, 19 bp, Homo sapiens
  siRNA target sequence for SLC5A3 (NM_006933.1,1209-1227).
ctcccgggagttaatgatt

SEQ ID NO: 336595 - DNA, 19 bp, Homo sapiens
  siRNA target sequence for SLC5A3 (NM_006933.1,1211-1229).
cccgggagttaatgattgt

SEQ ID NO: 336596 - DNA, 19 bp, Homo sapiens
  siRNA target sequence for SLC5A3 (NM_006933.1,1224-1242).
gattgtggggaggatattt

SEQ ID NO: 336597 - DNA, 19 bp, Homo sapiens
  siRNA target sequence for SLC5A3 (NM_006933.1,1255-1273).
gtggtgatcagcatagcat

SEQ ID NO: 336598 - DNA, 19 bp, Homo sapiens
  siRNA target sequence for SLC5A3 (NM_006933.1,1300-1318).
ggaggccagatgtaccttt

SEQ ID NO: 336599 - DNA, 19 bp, Homo sapiens
  siRNA target sequence for SLC5A3 (NM_006933.1,1301-1319).
gaggccagatgtaccttta

SEQ ID NO: 336600 - DNA, 19 bp, Homo sapiens
  siRNA target sequence for SLC5A3 (NM_006933.1,1383-1401).
ctggaagcgctgcaatgaa

SEQ ID NO: 336601 - DNA, 19 bp, Homo sapiens
  siRNA target sequence for SLC5A3 (NM_006933.1,1386-1404).
gaagcgctgcaatgaacaa

SEQ ID NO: 336602 - DNA, 19 bp, Homo sapiens
  siRNA target sequence for SLC5A3 (NM_006933.1,1442-1460).
gagcagtccgtttgatact

SEQ ID NO: 336603 - DNA, 19 bp, Homo sapiens
  siRNA target sequence for SLC5A3 (NM_006933.1,1560-1578).
ggtcacgggactcattact

SEQ ID NO: 336604 - DNA, 19 bp, Homo sapiens
  siRNA target sequence for SLC5A3 (NM_006933.1,1563-1581).
cacgggactcattactgta

SEQ ID NO: 336605 - DNA, 19 bp, Homo sapiens
  siRNA target sequence for SLC5A3 (NM_006933.1,1565-1583).
cgggactcattactgtaat

SEQ ID NO: 336606 - DNA, 19 bp, Homo sapiens
  siRNA target sequence for SLC5A3 (NM_006933.1,1566-1584).
gggactcattactgtaatt

SEQ ID NO: 336607 - DNA, 19 bp, Homo sapiens
  siRNA target sequence for SLC5A3 (NM_006933.1,1568-1586).
gactcattactgtaattgt

SEQ ID NO: 336608 - DNA, 19 bp, Homo sapiens
  siRNA target sequence for SLC5A3 (NM_006933.1,1624-1642).
cgaaccaccaccttttggt

SEQ ID NO: 336609 - DNA, 19 bp, Homo sapiens
  siRNA target sequence for SLC5A3 (NM_006933.1,1721-1739).
gatgcagtgagaataatga

SEQ ID NO: 336610 - DNA, 19 bp, Homo sapiens
  siRNA target sequence for SLC5A3 (NM_006933.1,1740-1758).
gaccatcaaccacatcatt

SEQ ID NO: 336611 - DNA, 19 bp, Homo sapiens
  siRNA target sequence for SLC5A3 (NM_006933.1,1755-1773).
cattcccaacgggaaatct

SEQ ID NO: 336612 - DNA, 19 bp, Homo sapiens
  siRNA target sequence for SLC5A3 (NM_006933.1,1848-1866).
ggcatccttaggtcattca

SEQ ID NO: 336613 - DNA, 19 bp, Homo sapiens
  siRNA target sequence for SLC5A3 (NM_006933.1,1954-1972).
ggtcggtactggaagttca

SEQ ID NO: 336614 - DNA, 19 bp, Homo sapiens
  siRNA target sequence for SLC5A3 (NM_006933.1,1955-1973).
gtcggtactggaagttcat

SEQ ID NO: 336615 - DNA, 19 bp, Homo sapiens
  siRNA target sequence for SLC5A3 (NM_006933.1,1958-1976).
ggtactggaagttcataga

SEQ ID NO: 336616 - DNA, 19 bp, Homo sapiens
  siRNA target sequence for SLC5A3 (NM_006933.1,2065-2083).
gaagagactcggcaagtta

SEQ ID NO: 336617 - DNA, 19 bp, Homo sapiens
  siRNA target sequence for SLC5A3 (NM_006933.1,2072-2090).
ctcggcaagttaaagtaat

SEQ ID NO: 336618 - DNA, 19 bp, Homo sapiens
  siRNA target sequence for SMT3H1 (NM_006936.1,118-136).
gggtgtgaagacagagaat

SEQ ID NO: 336619 - DNA, 19 bp, Homo sapiens
  siRNA target sequence for SMT3H1 (NM_006936.1,386-404).
ctggcagggcacagtttct

SEQ ID NO: 336620 - DNA, 19 bp, Homo sapiens
  siRNA target sequence for SYN1 (NM_006950.2,151-169).
cctgtcggacagcaacttt

SEQ ID NO: 336621 - DNA, 19 bp, Homo sapiens
  siRNA target sequence for SYN1 (NM_006950.2,179-197).
ctgccaaatgggtacatga

SEQ ID NO: 336622 - DNA, 19 bp, Homo sapiens
  siRNA target sequence for SYN1 (NM_006950.2,497-515).
cacaccgactgggcaaaat

SEQ ID NO: 336623 - DNA, 19 bp, Homo sapiens
  siRNA target sequence for SYN1 (NM_006950.2,567-585).
ccgaattctctgatctcaa

SEQ ID NO: 336624 - DNA, 19 bp, Homo sapiens
  siRNA target sequence for SYN1 (NM_006950.2,606-624).
gtggattctctgtggatat

SEQ ID NO: 336625 - DNA, 19 bp, Homo sapiens
  siRNA target sequence for SYN1 (NM_006950.2,609-627).
gattctctgtggatatgga

SEQ ID NO: 336626 - DNA, 19 bp, Homo sapiens
  siRNA target sequence for SYN1 (NM_006950.2,660-678).
ctctgaagccggattttgt

SEQ ID NO: 336627 - DNA, 19 bp, Homo sapiens
  siRNA target sequence for SYN1 (NM_006950.2,752-770).
gctggaatccccagtgtta

SEQ ID NO: 336628 - DNA, 19 bp, Homo sapiens
  siRNA target sequence for SYN1 (NM_006950.2,755-773).
ggaatccccagtgttaact

SEQ ID NO: 336629 - DNA, 19 bp, Homo sapiens
  siRNA target sequence for SYN1 (NM_006950.2,779-797).
cattctgtctacaacttct

SEQ ID NO: 336630 - DNA, 19 bp, Homo sapiens
  siRNA target sequence for SYN1 (NM_006950.2,879-897).
ccttctaccccaatcacaa

SEQ ID NO: 336631 - DNA, 19 bp, Homo sapiens
  siRNA target sequence for SYN1 (NM_006950.2,899-917).
gaaatgctcagcagtacaa

SEQ ID NO: 336632 - DNA, 19 bp, Homo sapiens
  siRNA target sequence for SYN1 (NM_006950.2,1047-1065).
ccttcatcgatgccaaata

SEQ ID NO: 336633 - DNA, 19 bp, Homo sapiens
  siRNA target sequence for SYN1 (NM_006950.2,1201-1219).
ggacacgtgctcagagatt

SEQ ID NO: 336634 - DNA, 19 bp, Homo sapiens
  siRNA target sequence for SYN1 (NM_006950.2,1202-1220).
gacacgtgctcagagattt

SEQ ID NO: 336635 - DNA, 19 bp, Homo sapiens
  siRNA target sequence for SYN1 (NM_006950.2,1204-1222).
cacgtgctcagagattttt

SEQ ID NO: 336636 - DNA, 19 bp, Homo sapiens
  siRNA target sequence for SYN1 (NM_006950.2,1267-1285).
cggaagggatcacatcatt

SEQ ID NO: 336637 - DNA, 19 bp, Homo sapiens
  siRNA target sequence for SYN1 (NM_006950.2,1269-1287).
gaagggatcacatcattga

SEQ ID NO: 336638 - DNA, 19 bp, Homo sapiens
  siRNA target sequence for SYN1 (NM_006950.2,1352-1370).
gagctcgtggtcaacaaga

SEQ ID NO: 336639 - DNA, 19 bp, Homo sapiens
  siRNA target sequence for ZNF46 (NM_006977.2,225-243).
gaacatgcagcgagaattt

SEQ ID NO: 336640 - DNA, 19 bp, Homo sapiens
  siRNA target sequence for ZNF46 (NM_006977.2,307-325).
cttgctgctttttctaact

SEQ ID NO: 336641 - DNA, 19 bp, Homo sapiens
  siRNA target sequence for ZNF46 (NM_006977.2,349-367).
caaacaagtgaatgcataa

SEQ ID NO: 336642 - DNA, 19 bp, Homo sapiens
  siRNA target sequence for ZNF46 (NM_006977.2,382-400).
gacatccaacctgacatat

SEQ ID NO: 336643 - DNA, 19 bp, Homo sapiens
  siRNA target sequence for ZNF46 (NM_006977.2,391-409).
cctgacatattcagctatt

SEQ ID NO: 336644 - DNA, 19 bp, Homo sapiens
  siRNA target sequence for ZNF46 (NM_006977.2,392-410).
ctgacatattcagctattt

SEQ ID NO: 336645 - DNA, 19 bp, Homo sapiens
  siRNA target sequence for ZNF46 (NM_006977.2,431-449).
ggaaagggccaaaacagat

SEQ ID NO: 336646 - DNA, 19 bp, Homo sapiens
  siRNA target sequence for ZNF46 (NM_006977.2,487-505).
cttcacgccgactaccttt

SEQ ID NO: 336647 - DNA, 19 bp, Homo sapiens
  siRNA target sequence for ZNF46 (NM_006977.2,495-513).
cgactacctttctcacatt

SEQ ID NO: 336648 - DNA, 19 bp, Homo sapiens
  siRNA target sequence for ZNF46 (NM_006977.2,546-564).
gactgtgcagtcctcaaat

SEQ ID NO: 336649 - DNA, 19 bp, Homo sapiens
  siRNA target sequence for ZNF46 (NM_006977.2,550-568).
gtgcagtcctcaaatttat

SEQ ID NO: 336650 - DNA, 19 bp, Homo sapiens
  siRNA target sequence for ZNF46 (NM_006977.2,579-597).
gatctcaacaacccaaaaa

SEQ ID NO: 336651 - DNA, 19 bp, Homo sapiens
  siRNA target sequence for ZNF46 (NM_006977.2,628-646).
gaagctccttccagtaaca

SEQ ID NO: 336652 - DNA, 19 bp, Homo sapiens
  siRNA target sequence for ZNF46 (NM_006977.2,687-705).
gcagttgtctcttgctatt

SEQ ID NO: 336653 - DNA, 19 bp, Homo sapiens
  siRNA target sequence for ZNF46 (NM_006977.2,865-883).
cccacttttactgaaaaca

SEQ ID NO: 336654 - DNA, 19 bp, Homo sapiens
  siRNA target sequence for ZNF46 (NM_006977.2,909-927).
ctgtggggaacgttttgat

SEQ ID NO: 336655 - DNA, 19 bp, Homo sapiens
  siRNA target sequence for ZNF46 (NM_006977.2,998-1016).
ccattctggaaagtaatga

SEQ ID NO: 336656 - DNA, 19 bp, Homo sapiens
  siRNA target sequence for ZNF46 (NM_006977.2,1027-1045).
gtgcatccccttaatgaaa

SEQ ID NO: 336657 - DNA, 19 bp, Homo sapiens
  siRNA target sequence for ZNF46 (NM_006977.2,1030-1048).
catccccttaatgaaaaca

SEQ ID NO: 336658 - DNA, 19 bp, Homo sapiens
  siRNA target sequence for ZNF46 (NM_006977.2,1070-1088).
ggctcagctccttcattgt

SEQ ID NO: 336659 - DNA, 19 bp, Homo sapiens
  siRNA target sequence for ZNF46 (NM_006977.2,1071-1089).
gctcagctccttcattgtt

SEQ ID NO: 336660 - DNA, 19 bp, Homo sapiens
  siRNA target sequence for ZNF46 (NM_006977.2,1072-1090).
ctcagctccttcattgtta

SEQ ID NO: 336661 - DNA, 19 bp, Homo sapiens
  siRNA target sequence for ZNF46 (NM_006977.2,1143-1161).
gcagatcagtcaagtatct

SEQ ID NO: 336662 - DNA, 19 bp, Homo sapiens
  siRNA target sequence for ZNF46 (NM_006977.2,1144-1162).
cagatcagtcaagtatctt

SEQ ID NO: 336663 - DNA, 19 bp, Homo sapiens
  siRNA target sequence for ZNF46 (NM_006977.2,1178-1196).
cagagccagtagaattaaa

SEQ ID NO: 336664 - DNA, 19 bp, Homo sapiens
  siRNA target sequence for ZNF46 (NM_006977.2,1180-1198).
gagccagtagaattaaact

SEQ ID NO: 336665 - DNA, 19 bp, Homo sapiens
  siRNA target sequence for ZNF46 (NM_006977.2,1182-1200).
gccagtagaattaaactgt

SEQ ID NO: 336666 - DNA, 19 bp, Homo sapiens
  siRNA target sequence for ZNF46 (NM_006977.2,1235-1253).
gtaccatctgtggtcataa

SEQ ID NO: 336667 - DNA, 19 bp, Homo sapiens
  siRNA target sequence for ZNF46 (NM_006977.2,1258-1276).
cctcgaaagagccaattgt

SEQ ID NO: 336668 - DNA, 19 bp, Homo sapiens
  siRNA target sequence for ZNF46 (NM_006977.2,1259-1277).
ctcgaaagagccaattgtt

SEQ ID NO: 336669 - DNA, 19 bp, Homo sapiens
  siRNA target sequence for ZNF46 (NM_006977.2,1268-1286).
gccaattgttggaacacat

SEQ ID NO: 336670 - DNA, 19 bp, Homo sapiens
  siRNA target sequence for ZNF46 (NM_006977.2,1275-1293).
gttggaacacatgtataca

SEQ ID NO: 336671 - DNA, 19 bp, Homo sapiens
  siRNA target sequence for ZNF46 (NM_006977.2,1287-1305).
gtatacacacaaaggtaaa

SEQ ID NO: 336672 - DNA, 19 bp, Homo sapiens
  siRNA target sequence for MAGED1 (NM_006986.2,203-221).
gaagacagcgccttgctta

SEQ ID NO: 336673 - DNA, 19 bp, Homo sapiens
  siRNA target sequence for MAGED1 (NM_006986.2,361-379).
gcctaagtcagcctttaaa

SEQ ID NO: 336674 - DNA, 19 bp, Homo sapiens
  siRNA target sequence for MAGED1 (NM_006986.2,394-412).
cacaaaaggcccaaatggt

SEQ ID NO: 336675 - DNA, 19 bp, Homo sapiens
  siRNA target sequence for MAGED1 (NM_006986.2,402-420).
gcccaaatggtgtctatga

SEQ ID NO: 336676 - DNA, 19 bp, Homo sapiens
  siRNA target sequence for MAGED1 (NM_006986.2,403-421).
cccaaatggtgtctatgat

SEQ ID NO: 336677 - DNA, 19 bp, Homo sapiens
  siRNA target sequence for MAGED1 (NM_006986.2,548-566).
gagttagctgctaacaagt

SEQ ID NO: 336678 - DNA, 19 bp, Homo sapiens
  siRNA target sequence for MAGED1 (NM_006986.2,611-629).
ccaaatgccacctacaatt

SEQ ID NO: 336679 - DNA, 19 bp, Homo sapiens
  siRNA target sequence for MAGED1 (NM_006986.2,612-630).
caaatgccacctacaattt

SEQ ID NO: 336680 - DNA, 19 bp, Homo sapiens
  siRNA target sequence for MAGED1 (NM_006986.2,669-687).
ggcctaagacccctttcaa

SEQ ID NO: 336681 - DNA, 19 bp, Homo sapiens
  siRNA target sequence for MAGED1 (NM_006986.2,762-780).
cttcccaggctgacataga

SEQ ID NO: 336682 - DNA, 19 bp, Homo sapiens
  siRNA target sequence for MAGED1 (NM_006986.2,781-799).
gaccgacccaggtatctct

SEQ ID NO: 336683 - DNA, 19 bp, Homo sapiens
  siRNA target sequence for MAGED1 (NM_006986.2,854-872).
ctggagtcccggacaataa

SEQ ID NO: 336684 - DNA, 19 bp, Homo sapiens
  siRNA target sequence for MAGED1 (NM_006986.2,856-874).
ggagtcccggacaataatt

SEQ ID NO: 336685 - DNA, 19 bp, Homo sapiens
  siRNA target sequence for MAGED1 (NM_006986.2,883-901).
gaggacccgcaagattaat

SEQ ID NO: 336686 - DNA, 19 bp, Homo sapiens
  siRNA target sequence for MAGED1 (NM_006986.2,885-903).
ggacccgcaagattaataa

SEQ ID NO: 336687 - DNA, 19 bp, Homo sapiens
  siRNA target sequence for MAGED1 (NM_006986.2,888-906).
cccgcaagattaataactt

SEQ ID NO: 336688 - DNA, 19 bp, Homo sapiens
  siRNA target sequence for MAGED1 (NM_006986.2,890-908).
cgcaagattaataacttga

SEQ ID NO: 336689 - DNA, 19 bp, Homo sapiens
  siRNA target sequence for MAGED1 (NM_006986.2,1432-1450).
cgctgattggccaattcca

SEQ ID NO: 336690 - DNA, 19 bp, Homo sapiens
  siRNA target sequence for MAGED1 (NM_006986.2,1577-1595).
gtcaagtacttgatgctta

SEQ ID NO: 336691 - DNA, 19 bp, Homo sapiens
  siRNA target sequence for MAGED1 (NM_006986.2,1628-1646).
gaaatgctgagagatatca

SEQ ID NO: 336692 - DNA, 19 bp, Homo sapiens
  siRNA target sequence for MAGED1 (NM_006986.2,1638-1656).
gagatatcatccgtgaata

SEQ ID NO: 336693 - DNA, 19 bp, Homo sapiens
  siRNA target sequence for MAGED1 (NM_006986.2,1648-1666).
ccgtgaatacactgatgtt

SEQ ID NO: 336694 - DNA, 19 bp, Homo sapiens
  siRNA target sequence for MAGED1 (NM_006986.2,1649-1667).
cgtgaatacactgatgttt

SEQ ID NO: 336695 - DNA, 19 bp, Homo sapiens
  siRNA target sequence for MAGED1 (NM_006986.2,1650-1668).
gtgaatacactgatgttta

SEQ ID NO: 336696 - DNA, 19 bp, Homo sapiens
  siRNA target sequence for MAGED1 (NM_006986.2,1678-1696).
cattgaacgtgcatgcttt

SEQ ID NO: 336697 - DNA, 19 bp, Homo sapiens
  siRNA target sequence for MAGED1 (NM_006986.2,1934-1952).
cccctccttggagatctaa

SEQ ID NO: 336698 - DNA, 19 bp, Homo sapiens
  siRNA target sequence for MAGED1 (NM_006986.2,2388-2406).
cctttgccggtcccattat

SEQ ID NO: 336699 - DNA, 19 bp, Homo sapiens
  siRNA target sequence for MAGED1 (NM_006986.2,2389-2407).
ctttgccggtcccattatt

SEQ ID NO: 336700 - DNA, 19 bp, Homo sapiens
  siRNA target sequence for BTN3A3 (NM_006994.3,1111-1129).
gaactcaagtggaggaaaa

SEQ ID NO: 336701 - DNA, 19 bp, Homo sapiens
  siRNA target sequence for BTN3A3 (NM_006994.3,1152-1170).
gaagtctttggcctatcat

SEQ ID NO: 336702 - DNA, 19 bp, Homo sapiens
  siRNA target sequence for BTN3A3 (NM_006994.3,1401-1419).
gcatattggggtatgtagt

SEQ ID NO: 336703 - DNA, 19 bp, Homo sapiens
  siRNA target sequence for BTN3A3 (NM_006994.3,1488-1506).
gactgatgggaataagtat

SEQ ID NO: 336704 - DNA, 19 bp, Homo sapiens
  siRNA target sequence for BTN3A3 (NM_006994.3,1753-1771).
gacctagtgcctgatcatt

SEQ ID NO: 336705 - DNA, 19 bp, Homo sapiens
  siRNA target sequence for BTN3A3 (NM_006994.3,1794-1812).
gggcttagctaatgaaagt

SEQ ID NO: 336706 - DNA, 19 bp, Homo sapiens
  siRNA target sequence for BTN3A3 (NM_006994.3,1875-1893).
cccttctgcaacaaccaat

SEQ ID NO: 336707 - DNA, 19 bp, Homo sapiens
  siRNA target sequence for BTN3A3 (NM_006994.3,1890-1908).
caatcagaaccataagcta

SEQ ID NO: 336708 - DNA, 19 bp, Homo sapiens
  siRNA target sequence for BTN3A3 (NM_006994.3,1915-1933).
cgcactgaagcactttact

SEQ ID NO: 336709 - DNA, 19 bp, Homo sapiens
  siRNA target sequence for BTN2A2 (NM_006995.3,535-553).
ggtctaagcccctcattga

SEQ ID NO: 336710 - DNA, 19 bp, Homo sapiens
  siRNA target sequence for BTN2A2 (NM_006995.3,536-554).
gtctaagcccctcattgaa

SEQ ID NO: 336711 - DNA, 19 bp, Homo sapiens
  siRNA target sequence for BTN2A2 (NM_006995.3,935-953).
ctgttgcatcaagaaactt

SEQ ID NO: 336712 - DNA, 19 bp, Homo sapiens
  siRNA target sequence for ZPBP (NM_007009.1,147-165).
gcgggtgccctcatcagtt

SEQ ID NO: 336713 - DNA, 19 bp, Homo sapiens
  siRNA target sequence for ZPBP (NM_007009.1,197-215).
gcttgaccaaagattcagt

SEQ ID NO: 336714 - DNA, 19 bp, Homo sapiens
  siRNA target sequence for ZPBP (NM_007009.1,216-234).
gaaaatagtgggatcaaca

SEQ ID NO: 336715 - DNA, 19 bp, Homo sapiens
  siRNA target sequence for ZPBP (NM_007009.1,225-243).
gggatcaacaagttttcca

SEQ ID NO: 336716 - DNA, 19 bp, Homo sapiens
  siRNA target sequence for ZPBP (NM_007009.1,241-259).
ccagtgaaagcgtatgtca

SEQ ID NO: 336717 - DNA, 19 bp, Homo sapiens
  siRNA target sequence for ZPBP (NM_007009.1,273-291).
gagtccacacgtgttatgt

SEQ ID NO: 336718 - DNA, 19 bp, Homo sapiens
  siRNA target sequence for ZPBP (NM_007009.1,277-295).
ccacacgtgttatgtgtaa

SEQ ID NO: 336719 - DNA, 19 bp, Homo sapiens
  siRNA target sequence for ZPBP (NM_007009.1,297-315).
gcaacaactgcgaaatgct

SEQ ID NO: 336720 - DNA, 19 bp, Homo sapiens
  siRNA target sequence for ZPBP (NM_007009.1,321-339).
gatagacccatcattccaa

SEQ ID NO: 336721 - DNA, 19 bp, Homo sapiens
  siRNA target sequence for ZPBP (NM_007009.1,349-367).
cctaaaggaaaagttgttt

SEQ ID NO: 336722 - DNA, 19 bp, Homo sapiens
  siRNA target sequence for ZPBP (NM_007009.1,378-396).
ccgcactgcacaaataaca

SEQ ID NO: 336723 - DNA, 19 bp, Homo sapiens
  siRNA target sequence for ZPBP (NM_007009.1,379-397).
cgcactgcacaaataacat

SEQ ID NO: 336724 - DNA, 19 bp, Homo sapiens
  siRNA target sequence for ZPBP (NM_007009.1,403-421).
ggaagccttgtattccaaa

SEQ ID NO: 336725 - DNA, 19 bp, Homo sapiens
  siRNA target sequence for ZPBP (NM_007009.1,404-422).
gaagccttgtattccaaaa

SEQ ID NO: 336726 - DNA, 19 bp, Homo sapiens
  siRNA target sequence for ZPBP (NM_007009.1,524-542).
cttatcgtgagcctcatta

SEQ ID NO: 336727 - DNA, 19 bp, Homo sapiens
  siRNA target sequence for ZPBP (NM_007009.1,529-547).
cgtgagcctcattattatt

SEQ ID NO: 336728 - DNA, 19 bp, Homo sapiens
  siRNA target sequence for ZPBP (NM_007009.1,578-596).
cctgcaatagcatttataa

SEQ ID NO: 336729 - DNA, 19 bp, Homo sapiens
  siRNA target sequence for ZPBP (NM_007009.1,579-597).
ctgcaatagcatttataat

SEQ ID NO: 336730 - DNA, 19 bp, Homo sapiens
  siRNA target sequence for ZPBP (NM_007009.1,679-697).
gaatgccatcgcgttaaaa

SEQ ID NO: 336731 - DNA, 19 bp, Homo sapiens
  siRNA target sequence for ZPBP (NM_007009.1,683-701).
gccatcgcgttaaaatgca

SEQ ID NO: 336732 - DNA, 19 bp, Homo sapiens
  siRNA target sequence for ZPBP (NM_007009.1,684-702).
ccatcgcgttaaaatgcaa

SEQ ID NO: 336733 - DNA, 19 bp, Homo sapiens
  siRNA target sequence for ZPBP (NM_007009.1,685-703).
catcgcgttaaaatgcaaa

SEQ ID NO: 336734 - DNA, 19 bp, Homo sapiens
  siRNA target sequence for ZPBP (NM_007009.1,699-717).
gcaaagagctggtttgcaa

SEQ ID NO: 336735 - DNA, 19 bp, Homo sapiens
  siRNA target sequence for ZPBP (NM_007009.1,775-793).
cgatgtacagaccataact

SEQ ID NO: 336736 - DNA, 19 bp, Homo sapiens
  siRNA target sequence for ZPBP (NM_007009.1,794-812).
gtgaaccttacaaaagact

SEQ ID NO: 336737 - DNA, 19 bp, Homo sapiens
  siRNA target sequence for ZPBP (NM_007009.1,1023-1041).
cccccgtgatggaattcat

SEQ ID NO: 336738 - DNA, 19 bp, Homo sapiens
  siRNA target sequence for ZPBP (NM_007009.1,1024-1042).
ccccgtgatggaattcatt

SEQ ID NO: 336739 - DNA, 19 bp, Homo sapiens
  siRNA target sequence for ZPBP (NM_007009.1,1063-1081).
ctggtgtatggagcaaaaa

SEQ ID NO: 336740 - DNA, 19 bp, Homo sapiens
  siRNA target sequence for ZPBP (NM_007009.1,1066-1084).
gtgtatggagcaaaaacgt

SEQ ID NO: 336741 - DNA, 19 bp, Homo sapiens
  siRNA target sequence for ZPBP (NM_007009.1,1072-1090).
ggagcaaaaacgtgcttat

SEQ ID NO: 336742 - DNA, 19 bp, Homo sapiens
  siRNA target sequence for WWP2 (NM_007014.3,118-136).
gagtggccctgccttttga

SEQ ID NO: 336743 - DNA, 19 bp, Homo sapiens
  siRNA target sequence for WWP2 (NM_007014.3,173-191).
gcccaaggtgcataatcgt

SEQ ID NO: 336744 - DNA, 19 bp, Homo sapiens
  siRNA target sequence for WWP2 (NM_007014.3,189-207).
cgtcaacctcgaattaact

SEQ ID NO: 336745 - DNA, 19 bp, Homo sapiens
  siRNA target sequence for WWP2 (NM_007014.3,312-330).
gtcacggcacagagtcatt

SEQ ID NO: 336746 - DNA, 19 bp, Homo sapiens
  siRNA target sequence for WWP2 (NM_007014.3,316-334).
cggcacagagtcatttaga

SEQ ID NO: 336747 - DNA, 19 bp, Homo sapiens
  siRNA target sequence for WWP2 (NM_007014.3,396-414).
ctctccaacgtcttgaaga

SEQ ID NO: 336748 - DNA, 19 bp, Homo sapiens
  siRNA target sequence for WWP2 (NM_007014.3,489-507).
ggcggagagctgacaattt

SEQ ID NO: 336749 - DNA, 19 bp, Homo sapiens
  siRNA target sequence for WWP2 (NM_007014.3,509-527).
cctggacgggccaactgtt

SEQ ID NO: 336750 - DNA, 19 bp, Homo sapiens
  siRNA target sequence for WWP2 (NM_007014.3,512-530).
ggacgggccaactgttgat

SEQ ID NO: 336751 - DNA, 19 bp, Homo sapiens
  siRNA target sequence for WWP2 (NM_007014.3,681-699).
ggtgcttcagccagaacaa

SEQ ID NO: 336752 - DNA, 19 bp, Homo sapiens
  siRNA target sequence for WWP2 (NM_007014.3,744-762).
cgccagcccgtcaagaact

SEQ ID NO: 336753 - DNA, 19 bp, Homo sapiens
  siRNA target sequence for WWP2 (NM_007014.3,1022-1040).
gcccaacggacgtgtctat

SEQ ID NO: 336754 - DNA, 19 bp, Homo sapiens
  siRNA target sequence for WWP2 (NM_007014.3,1023-1041).
cccaacggacgtgtctatt

SEQ ID NO: 336755 - DNA, 19 bp, Homo sapiens
  siRNA target sequence for WWP2 (NM_007014.3,1024-1042).
ccaacggacgtgtctatta

SEQ ID NO: 336756 - DNA, 19 bp, Homo sapiens
  siRNA target sequence for WWP2 (NM_007014.3,1025-1043).
caacggacgtgtctattat

SEQ ID NO: 336757 - DNA, 19 bp, Homo sapiens
  siRNA target sequence for WWP2 (NM_007014.3,1028-1046).
cggacgtgtctattatgtt

SEQ ID NO: 336758 - DNA, 19 bp, Homo sapiens
  siRNA target sequence for WWP2 (NM_007014.3,1114-1132).
cccgaggcaggttttacta

SEQ ID NO: 336759 - DNA, 19 bp, Homo sapiens
  siRNA target sequence for WWP2 (NM_007014.3,1115-1133).
ccgaggcaggttttactat

SEQ ID NO: 336760 - DNA, 19 bp, Homo sapiens
  siRNA target sequence for WWP2 (NM_007014.3,1178-1196).
ggagtacgtgcgcaactat

SEQ ID NO: 336761 - DNA, 19 bp, Homo sapiens
  siRNA target sequence for WWP2 (NM_007014.3,1335-1353).
gacaatggacgggtgtatt

SEQ ID NO: 336762 - DNA, 19 bp, Homo sapiens
  siRNA target sequence for WWP2 (NM_007014.3,1347-1365).
gtgtattacgtgaaccata

SEQ ID NO: 336763 - DNA, 19 bp, Homo sapiens
  siRNA target sequence for WWP2 (NM_007014.3,1456-1474).
gcgagggggtgcgatactt

SEQ ID NO: 336764 - DNA, 19 bp, Homo sapiens
  siRNA target sequence for WWP2 (NM_007014.3,1457-1475).
cgagggggtgcgatacttt

SEQ ID NO: 336765 - DNA, 19 bp, Homo sapiens
  siRNA target sequence for WWP2 (NM_007014.3,1568-1586).
cagttttcggtggaagtat

SEQ ID NO: 336766 - DNA, 19 bp, Homo sapiens
  siRNA target sequence for WWP2 (NM_007014.3,1623-1641).
cctagccacgtgaagatca

SEQ ID NO: 336767 - DNA, 19 bp, Homo sapiens
  siRNA target sequence for WWP2 (NM_007014.3,1648-1666).
ccaggcagacgcttttcga

SEQ ID NO: 336768 - DNA, 19 bp, Homo sapiens
  siRNA target sequence for WWP2 (NM_007014.3,1649-1667).
caggcagacgcttttcgaa

SEQ ID NO: 336769 - DNA, 19 bp, Homo sapiens
  siRNA target sequence for WWP2 (NM_007014.3,1657-1675).
cgcttttcgaagattcctt

SEQ ID NO: 336770 - DNA, 19 bp, Homo sapiens
  siRNA target sequence for WWP2 (NM_007014.3,1672-1690).
ccttccaacagatcatgaa

SEQ ID NO: 336771 - DNA, 19 bp, Homo sapiens
  siRNA target sequence for WWP2 (NM_007014.3,1827-1845).
gaatatgccggaaagaaca

SEQ ID NO: 336772 - DNA, 19 bp, Homo sapiens
  siRNA target sequence for WWP2 (NM_007014.3,1833-1851).
gccggaaagaacaattact

SEQ ID NO: 336773 - DNA, 19 bp, Homo sapiens
  siRNA target sequence for WWP2 (NM_007014.3,1895-1913).
cacctactttcgctttata

SEQ ID NO: 336774 - DNA, 19 bp, Homo sapiens
  siRNA target sequence for WWP2 (NM_007014.3,1905-1923).
cgctttataggcagattca

SEQ ID NO: 336775 - DNA, 19 bp, Homo sapiens
  siRNA target sequence for WWP2 (NM_007014.3,1906-1924).
gctttataggcagattcat

SEQ ID NO: 336776 - DNA, 19 bp, Homo sapiens
  siRNA target sequence for WWP2 (NM_007014.3,1933-1951).
cgctgtaccatggaaagtt

SEQ ID NO: 336777 - DNA, 19 bp, Homo sapiens
  siRNA target sequence for WWP2 (NM_007014.3,1935-1953).
ctgtaccatggaaagttca

SEQ ID NO: 336778 - DNA, 19 bp, Homo sapiens
  siRNA target sequence for WWP2 (NM_007014.3,2026-2044).
ccattgaccctgagttcta

SEQ ID NO: 336779 - DNA, 19 bp, Homo sapiens
  siRNA target sequence for WWP2 (NM_007014.3,2050-2068).
ccattgtctggatcaaaga

SEQ ID NO: 336780 - DNA, 19 bp, Homo sapiens
  siRNA target sequence for WWP2 (NM_007014.3,2291-2309).
ggagtggctgcgctacttt

SEQ ID NO: 336781 - DNA, 19 bp, Homo sapiens
  siRNA target sequence for WWP2 (NM_007014.3,2302-2320).
gctactttgacgagaaaga

SEQ ID NO: 336782 - DNA, 19 bp, Homo sapiens
  siRNA target sequence for WWP2 (NM_007014.3,2340-2358).
ggcatgcaggagatagaca

SEQ ID NO: 336783 - DNA, 19 bp, Homo sapiens
  siRNA target sequence for WWP2 (NM_007014.3,2534-2552).
caacggaccacagaagttt

SEQ ID NO: 336784 - DNA, 19 bp, Homo sapiens
  siRNA target sequence for CGEF2 (NM_007023.1,118-136).
gcgcacgctgcccattctt

SEQ ID NO: 336785 - DNA, 19 bp, Homo sapiens
  siRNA target sequence for CGEF2 (NM_007023.1,152-170).
ggatcgcctgcctggataa

SEQ ID NO: 336786 - DNA, 19 bp, Homo sapiens
  siRNA target sequence for CGEF2 (NM_007023.1,153-171).
gatcgcctgcctggataaa

SEQ ID NO: 336787 - DNA, 19 bp, Homo sapiens
  siRNA target sequence for CGEF2 (NM_007023.1,156-174).
cgcctgcctggataaaaga

SEQ ID NO: 336788 - DNA, 19 bp, Homo sapiens
  siRNA target sequence for CGEF2 (NM_007023.1,188-206).
ccagcgaagatgtggatat

SEQ ID NO: 336789 - DNA, 19 bp, Homo sapiens
  siRNA target sequence for CGEF2 (NM_007023.1,191-209).
gcgaagatgtggatataat

SEQ ID NO: 336790 - DNA, 19 bp, Homo sapiens
  siRNA target sequence for CGEF2 (NM_007023.1,193-211).
gaagatgtggatataatct

SEQ ID NO: 336791 - DNA, 19 bp, Homo sapiens
  siRNA target sequence for CGEF2 (NM_007023.1,213-231).
cactcgactgaaagaagtt

SEQ ID NO: 336792 - DNA, 19 bp, Homo sapiens
  siRNA target sequence for CGEF2 (NM_007023.1,229-247).
gttaaagcttttgagaaat

SEQ ID NO: 336793 - DNA, 19 bp, Homo sapiens
  siRNA target sequence for CGEF2 (NM_007023.1,275-293).
gcttatgtggttattatga

SEQ ID NO: 336794 - DNA, 19 bp, Homo sapiens
  siRNA target sequence for CGEF2 (NM_007023.1,300-318).
ggaaaagggaataacatta

SEQ ID NO: 336795 - DNA, 19 bp, Homo sapiens
  siRNA target sequence for CGEF2 (NM_007023.1,322-340).
cgccagggtgatattggaa

SEQ ID NO: 336796 - DNA, 19 bp, Homo sapiens
  siRNA target sequence for CGEF2 (NM_007023.1,362-380).
cagggtctttggatgttaa

SEQ ID NO: 336797 - DNA, 19 bp, Homo sapiens
  siRNA target sequence for CGEF2 (NM_007023.1,365-383).
ggtctttggatgttaaagt

SEQ ID NO: 336798 - DNA, 19 bp, Homo sapiens
  siRNA target sequence for CGEF2 (NM_007023.1,475-493).
cgccatgcaaccatcgtta

SEQ ID NO: 336799 - DNA, 19 bp, Homo sapiens
  siRNA target sequence for CGEF2 (NM_007023.1,540-558).
ggcactatgggagaaatat

SEQ ID NO: 336800 - DNA, 19 bp, Homo sapiens
  siRNA target sequence for CGEF2 (NM_007023.1,603-621).
ggaaacgggctctaacaat

SEQ ID NO: 336801 - DNA, 19 bp, Homo sapiens
  siRNA target sequence for CGEF2 (NM_007023.1,676-694).
cgtcctgctaacaccatta

SEQ ID NO: 336802 - DNA, 19 bp, Homo sapiens
  siRNA target sequence for CGEF2 (NM_007023.1,720-738).
cagagctggaaaaatttta

SEQ ID NO: 336803 - DNA, 19 bp, Homo sapiens
  siRNA target sequence for CGEF2 (NM_007023.1,755-773).
ctcgagcacctcacatgat

SEQ ID NO: 336804 - DNA, 19 bp, Homo sapiens
  siRNA target sequence for CGEF2 (NM_007023.1,757-775).
cgagcacctcacatgataa

SEQ ID NO: 336805 - DNA, 19 bp, Homo sapiens
  siRNA target sequence for CGEF2 (NM_007023.1,761-779).
cacctcacatgataagaga

SEQ ID NO: 336806 - DNA, 19 bp, Homo sapiens
  siRNA target sequence for CGEF2 (NM_007023.1,763-781).
cctcacatgataagagata

SEQ ID NO: 336807 - DNA, 19 bp, Homo sapiens
  siRNA target sequence for CGEF2 (NM_007023.1,766-784).
cacatgataagagatagaa

SEQ ID NO: 336808 - DNA, 19 bp, Homo sapiens
  siRNA target sequence for CGEF2 (NM_007023.1,893-911).
ggcaagtcctgttagaaga

SEQ ID NO: 336809 - DNA, 19 bp, Homo sapiens
  siRNA target sequence for CGEF2 (NM_007023.1,894-912).
gcaagtcctgttagaagat

SEQ ID NO: 336810 - DNA, 19 bp, Homo sapiens
  siRNA target sequence for CGEF2 (NM_007023.1,933-951).
ccaggagcaccatttccaa

SEQ ID NO: 336811 - DNA, 19 bp, Homo sapiens
  siRNA target sequence for CGEF2 (NM_007023.1,1129-1147).
gtggatgacctagagatta

SEQ ID NO: 336812 - DNA, 19 bp, Homo sapiens
  siRNA target sequence for CGEF2 (NM_007023.1,1174-1192).
gccttatcccatctttcta

SEQ ID NO: 336813 - DNA, 19 bp, Homo sapiens
  siRNA target sequence for CGEF2 (NM_007023.1,1250-1268).
ggactgtgttgtttaacca

SEQ ID NO: 336814 - DNA, 19 bp, Homo sapiens
  siRNA target sequence for CGEF2 (NM_007023.1,1279-1297).
ggtacctcctggtacatta

SEQ ID NO: 336815 - DNA, 19 bp, Homo sapiens
  siRNA target sequence for CGEF2 (NM_007023.1,1307-1325).
gatcagtgaatgtagtcat

SEQ ID NO: 336816 - DNA, 19 bp, Homo sapiens
  siRNA target sequence for CGEF2 (NM_007023.1,1373-1391).
gcaagttagcactagtgaa

SEQ ID NO: 336817 - DNA, 19 bp, Homo sapiens
  siRNA target sequence for CGEF2 (NM_007023.1,1374-1392).
caagttagcactagtgaat

SEQ ID NO: 336818 - DNA, 19 bp, Homo sapiens
  siRNA target sequence for CGEF2 (NM_007023.1,1417-1435).
gtcttacgagaagataact

SEQ ID NO: 336819 - DNA, 19 bp, Homo sapiens
  siRNA target sequence for CGEF2 (NM_007023.1,1429-1447).
gataactgccatttcttaa

SEQ ID NO: 336820 - DNA, 19 bp, Homo sapiens
  siRNA target sequence for CGEF2 (NM_007023.1,1482-1500).
ggacgtggaggcgaataca

SEQ ID NO: 336821 - DNA, 19 bp, Homo sapiens
  siRNA target sequence for CGEF2 (NM_007023.1,1492-1510).
gcgaatacagtcagactta

SEQ ID NO: 336822 - DNA, 19 bp, Homo sapiens
  siRNA target sequence for CGEF2 (NM_007023.1,1493-1511).
cgaatacagtcagacttaa

SEQ ID NO: 336823 - DNA, 19 bp, Homo sapiens
  siRNA target sequence for CGEF2 (NM_007023.1,1494-1512).
gaatacagtcagacttaaa

SEQ ID NO: 336824 - DNA, 19 bp, Homo sapiens
  siRNA target sequence for CGEF2 (NM_007023.1,1587-1605).
gcctcagcaaaagtatact

SEQ ID NO: 336825 - DNA, 19 bp, Homo sapiens
  siRNA target sequence for CGEF2 (NM_007023.1,1589-1607).
ctcagcaaaagtatactgt

SEQ ID NO: 336826 - DNA, 19 bp, Homo sapiens
  siRNA target sequence for CGEF2 (NM_007023.1,1779-1797).
gccttcacaaggtacagaa

SEQ ID NO: 336827 - DNA, 19 bp, Homo sapiens
  siRNA target sequence for CGEF2 (NM_007023.1,1809-1827).
ggattatgccctcaacaat

SEQ ID NO: 336828 - DNA, 19 bp, Homo sapiens
  siRNA target sequence for CGEF2 (NM_007023.1,1810-1828).
gattatgccctcaacaata

SEQ ID NO: 336829 - DNA, 19 bp, Homo sapiens
  siRNA target sequence for CGEF2 (NM_007023.1,1911-1929).
cctggaggagttttatgta

SEQ ID NO: 336830 - DNA, 19 bp, Homo sapiens
  siRNA target sequence for CGEF2 (NM_007023.1,1914-1932).
ggaggagttttatgtatct

SEQ ID NO: 336831 - DNA, 19 bp, Homo sapiens
  siRNA target sequence for CGEF2 (NM_007023.1,1920-1938).
gttttatgtatctgtatca

SEQ ID NO: 336832 - DNA, 19 bp, Homo sapiens
  siRNA target sequence for CGEF2 (NM_007023.1,2047-2065).
cttttgcaacagttcaata

SEQ ID NO: 336833 - DNA, 19 bp, Homo sapiens
  siRNA target sequence for CGEF2 (NM_007023.1,2222-2240).
ccggggagggcctgatcat

SEQ ID NO: 336834 - DNA, 19 bp, Homo sapiens
  siRNA target sequence for CGEF2 (NM_007023.1,2223-2241).
cggggagggcctgatcata

SEQ ID NO: 336835 - DNA, 19 bp, Homo sapiens
  siRNA target sequence for CGEF2 (NM_007023.1,2225-2243).
gggagggcctgatcatagt

SEQ ID NO: 336836 - DNA, 19 bp, Homo sapiens
  siRNA target sequence for CGEF2 (NM_007023.1,2252-2270).
gttccggaggagaaaaggt

SEQ ID NO: 336837 - DNA, 19 bp, Homo sapiens
  siRNA target sequence for CGEF2 (NM_007023.1,2268-2286).
ggtggtgctcaaacctaat

SEQ ID NO: 336838 - DNA, 19 bp, Homo sapiens
  siRNA target sequence for CGEF2 (NM_007023.1,2271-2289).
ggtgctcaaacctaatgat

SEQ ID NO: 336839 - DNA, 19 bp, Homo sapiens
  siRNA target sequence for CGEF2 (NM_007023.1,2274-2292).
gctcaaacctaatgatgtt

SEQ ID NO: 336840 - DNA, 19 bp, Homo sapiens
  siRNA target sequence for CGEF2 (NM_007023.1,2275-2293).
ctcaaacctaatgatgttt

SEQ ID NO: 336841 - DNA, 19 bp, Homo sapiens
  siRNA target sequence for CGEF2 (NM_007023.1,2304-2322).
gacgctcaccattaatgga

SEQ ID NO: 336842 - DNA, 19 bp, Homo sapiens
  siRNA target sequence for CGEF2 (NM_007023.1,2342-2360).
gagagcaattcgattcact

SEQ ID NO: 336843 - DNA, 19 bp, Homo sapiens
  siRNA target sequence for CGEF2 (NM_007023.1,2418-2436).
gatgagctccaaagattta

SEQ ID NO: 336844 - DNA, 19 bp, Homo sapiens
  siRNA target sequence for CGEF2 (NM_007023.1,2421-2439).
gagctccaaagatttagca

SEQ ID NO: 336845 - DNA, 19 bp, Homo sapiens
  siRNA target sequence for CGEF2 (NM_007023.1,2423-2441).
gctccaaagatttagcata

SEQ ID NO: 336846 - DNA, 19 bp, Homo sapiens
  siRNA target sequence for CGEF2 (NM_007023.1,2442-2460).
ccagatgacaatttatgat

SEQ ID NO: 336847 - DNA, 19 bp, Homo sapiens
  siRNA target sequence for CGEF2 (NM_007023.1,2482-2500).
catgagctggagctaatct

SEQ ID NO: 336848 - DNA, 19 bp, Homo sapiens
  siRNA target sequence for CGEF2 (NM_007023.1,2488-2506).
ctggagctaatctatcaca

SEQ ID NO: 336849 - DNA, 19 bp, Homo sapiens
  siRNA target sequence for CGEF2 (NM_007023.1,2505-2523).
cacatttggaaggcataat

SEQ ID NO: 336850 - DNA, 19 bp, Homo sapiens
  siRNA target sequence for CGEF2 (NM_007023.1,2507-2525).
catttggaaggcataattt

SEQ ID NO: 336851 - DNA, 19 bp, Homo sapiens
  siRNA target sequence for CGEF2 (NM_007023.1,2537-2555).
cagcaaacttggatttgtt

SEQ ID NO: 336852 - DNA, 19 bp, Homo sapiens
  siRNA target sequence for CGEF2 (NM_007023.1,2553-2571).
gttcctgaggagatttaat

SEQ ID NO: 336853 - DNA, 19 bp, Homo sapiens
  siRNA target sequence for CGEF2 (NM_007023.1,2556-2574).
cctgaggagatttaatgaa

SEQ ID NO: 336854 - DNA, 19 bp, Homo sapiens
  siRNA target sequence for CGEF2 (NM_007023.1,2621-2639).
gcaagcgtgttcagctatt

SEQ ID NO: 336855 - DNA, 19 bp, Homo sapiens
  siRNA target sequence for CGEF2 (NM_007023.1,2622-2640).
caagcgtgttcagctatta

SEQ ID NO: 336856 - DNA, 19 bp, Homo sapiens
  siRNA target sequence for CGEF2 (NM_007023.1,2625-2643).
gcgtgttcagctattaaaa

SEQ ID NO: 336857 - DNA, 19 bp, Homo sapiens
  siRNA target sequence for CGEF2 (NM_007023.1,2626-2644).
cgtgttcagctattaaaaa

SEQ ID NO: 336858 - DNA, 19 bp, Homo sapiens
  siRNA target sequence for CGEF2 (NM_007023.1,2662-2680).
gcccactgtaaggagtata

SEQ ID NO: 336859 - DNA, 19 bp, Homo sapiens
  siRNA target sequence for CGEF2 (NM_007023.1,2663-2681).
cccactgtaaggagtataa

SEQ ID NO: 336860 - DNA, 19 bp, Homo sapiens
  siRNA target sequence for CGEF2 (NM_007023.1,2744-2762).
cactaacgtgggagaaact

SEQ ID NO: 336861 - DNA, 19 bp, Homo sapiens
  siRNA target sequence for CGEF2 (NM_007023.1,2764-2782).
ccaagcaagttcaagaagt

SEQ ID NO: 336862 - DNA, 19 bp, Homo sapiens
  siRNA target sequence for CGEF2 (NM_007023.1,2768-2786).
gcaagttcaagaagttcta

SEQ ID NO: 336863 - DNA, 19 bp, Homo sapiens
  siRNA target sequence for CGEF2 (NM_007023.1,2769-2787).
caagttcaagaagttctat

SEQ ID NO: 336864 - DNA, 19 bp, Homo sapiens
  siRNA target sequence for CGEF2 (NM_007023.1,2781-2799).
gttctatgcggagtttgaa

SEQ ID NO: 336865 - DNA, 19 bp, Homo sapiens
  siRNA target sequence for CGEF2 (NM_007023.1,2784-2802).
ctatgcggagtttgaaagt

SEQ ID NO: 336866 - DNA, 19 bp, Homo sapiens
  siRNA target sequence for CGEF2 (NM_007023.1,2916-2934).
ggggaacaagacgttcatt

SEQ ID NO: 336867 - DNA, 19 bp, Homo sapiens
  siRNA target sequence for CGEF2 (NM_007023.1,2918-2936).
ggaacaagacgttcattga

SEQ ID NO: 336868 - DNA, 19 bp, Homo sapiens
  siRNA target sequence for CGEF2 (NM_007023.1,2922-2940).
caagacgttcattgacaat

SEQ ID NO: 336869 - DNA, 19 bp, Homo sapiens
  siRNA target sequence for CGEF2 (NM_007023.1,2925-2943).
gacgttcattgacaatcta

SEQ ID NO: 336870 - DNA, 19 bp, Homo sapiens
  siRNA target sequence for CGEF2 (NM_007023.1,2927-2945).
cgttcattgacaatctagt

SEQ ID NO: 336871 - DNA, 19 bp, Homo sapiens
  siRNA target sequence for CGEF2 (NM_007023.1,2928-2946).
gttcattgacaatctagta

SEQ ID NO: 336872 - DNA, 19 bp, Homo sapiens
  siRNA target sequence for CGEF2 (NM_007023.1,2978-2996).
cggccagaacagtgagata

SEQ ID NO: 336873 - DNA, 19 bp, Homo sapiens
  siRNA target sequence for CGEF2 (NM_007023.1,2980-2998).
gccagaacagtgagatact

SEQ ID NO: 336874 - DNA, 19 bp, Homo sapiens
  siRNA target sequence for CGEF2 (NM_007023.1,3022-3040).
gatgcagctcaagctaata

SEQ ID NO: 336875 - DNA, 19 bp, Homo sapiens
  siRNA target sequence for CGEF2 (NM_007023.1,3025-3043).
gcagctcaagctaataaga

SEQ ID NO: 336876 - DNA, 19 bp, Homo sapiens
  siRNA target sequence for CGEF2 (NM_007023.1,3051-3069).
ggatgtccggagttatgta

SEQ ID NO: 336877 - DNA, 19 bp, Homo sapiens
  siRNA target sequence for CGEF2 (NM_007023.1,3060-3078).
gagttatgtacggcaatta

SEQ ID NO: 336878 - DNA, 19 bp, Homo sapiens
  siRNA target sequence for CGEF2 (NM_007023.1,3062-3080).
gttatgtacggcaattaaa

SEQ ID NO: 336879 - DNA, 19 bp, Homo sapiens
  siRNA target sequence for p25 (NM_007030.1,327-345).
cgtcttcagcaagatcaaa

SEQ ID NO: 336880 - DNA, 19 bp, Homo sapiens
  siRNA target sequence for p25 (NM_007030.1,402-420).
cgccaagaagcgattcaaa

SEQ ID NO: 336881 - DNA, 19 bp, Homo sapiens
  siRNA target sequence for p25 (NM_007030.1,622-640).
gacgagtcaggctatgtgt

SEQ ID NO: 336882 - DNA, 19 bp, Homo sapiens
  siRNA target sequence for HHLA3 (NM_007071.1,129-147).
cggtgcatgttataaacaa

SEQ ID NO: 336883 - DNA, 19 bp, Homo sapiens
  siRNA target sequence for HHLA3 (NM_007071.1,271-289).
cttcgtgccgtcttgtcaa

SEQ ID NO: 336884 - DNA, 19 bp, Homo sapiens
  siRNA target sequence for BVES (NM_007073.2,135-153).
gttttacacctgagttaga

SEQ ID NO: 336885 - DNA, 19 bp, Homo sapiens
  siRNA target sequence for BVES (NM_007073.2,141-159).
cacctgagttagaaagtat

SEQ ID NO: 336886 - DNA, 19 bp, Homo sapiens
  siRNA target sequence for BVES (NM_007073.2,160-178).
catacctgtgccttccaat

SEQ ID NO: 336887 - DNA, 19 bp, Homo sapiens
  siRNA target sequence for BVES (NM_007073.2,217-235).
ggtttttcatgtagcaaat

SEQ ID NO: 336888 - DNA, 19 bp, Homo sapiens
  siRNA target sequence for BVES (NM_007073.2,256-274).
ggttattccaactactctt

SEQ ID NO: 336889 - DNA, 19 bp, Homo sapiens
  siRNA target sequence for BVES (NM_007073.2,267-285).
ctactcttcaccttcatat

SEQ ID NO: 336890 - DNA, 19 bp, Homo sapiens
  siRNA target sequence for BVES (NM_007073.2,278-296).
cttcatatgatatttctta

SEQ ID NO: 336891 - DNA, 19 bp, Homo sapiens
  siRNA target sequence for BVES (NM_007073.2,311-329).
ctaggatgtaccctttata

SEQ ID NO: 336892 - DNA, 19 bp, Homo sapiens
  siRNA target sequence for BVES (NM_007073.2,315-333).
gatgtaccctttatatcgt

SEQ ID NO: 336893 - DNA, 19 bp, Homo sapiens
  siRNA target sequence for BVES (NM_007073.2,349-367).
ccgatgtgccttggatata

SEQ ID NO: 336894 - DNA, 19 bp, Homo sapiens
  siRNA target sequence for BVES (NM_007073.2,354-372).
gtgccttggatataatgat

SEQ ID NO: 336895 - DNA, 19 bp, Homo sapiens
  siRNA target sequence for BVES (NM_007073.2,356-374).
gccttggatataatgatct

SEQ ID NO: 336896 - DNA, 19 bp, Homo sapiens
  siRNA target sequence for BVES (NM_007073.2,385-403).
gttcttgggtgtcaacatt

SEQ ID NO: 336897 - DNA, 19 bp, Homo sapiens
  siRNA target sequence for BVES (NM_007073.2,391-409).
gggtgtcaacattttgcat

SEQ ID NO: 336898 - DNA, 19 bp, Homo sapiens
  siRNA target sequence for BVES (NM_007073.2,407-425).
catctgtcgtatcttttat

SEQ ID NO: 336899 - DNA, 19 bp, Homo sapiens
  siRNA target sequence for BVES (NM_007073.2,414-432).
cgtatcttttatacaagaa

SEQ ID NO: 336900 - DNA, 19 bp, Homo sapiens
  siRNA target sequence for BVES (NM_007073.2,430-448).
gaagagaccggtaaagatt

SEQ ID NO: 336901 - DNA, 19 bp, Homo sapiens
  siRNA target sequence for BVES (NM_007073.2,433-451).
gagaccggtaaagattgaa

SEQ ID NO: 336902 - DNA, 19 bp, Homo sapiens
  siRNA target sequence for BVES (NM_007073.2,438-456).
cggtaaagattgaaaagga

SEQ ID NO: 336903 - DNA, 19 bp, Homo sapiens
  siRNA target sequence for BVES (NM_007073.2,465-483).
gcatgtaccggcgattgtt

SEQ ID NO: 336904 - DNA, 19 bp, Homo sapiens
  siRNA target sequence for BVES (NM_007073.2,466-484).
catgtaccggcgattgttt

SEQ ID NO: 336905 - DNA, 19 bp, Homo sapiens
  siRNA target sequence for BVES (NM_007073.2,469-487).
gtaccggcgattgtttgaa

SEQ ID NO: 336906 - DNA, 19 bp, Homo sapiens
  siRNA target sequence for BVES (NM_007073.2,494-512).
cgtgtgcctccagatttgt

SEQ ID NO: 336907 - DNA, 19 bp, Homo sapiens
  siRNA target sequence for BVES (NM_007073.2,495-513).
gtgtgcctccagatttgtt

SEQ ID NO: 336908 - DNA, 19 bp, Homo sapiens
  siRNA target sequence for BVES (NM_007073.2,506-524).
gatttgttcagaagactaa

SEQ ID NO: 336909 - DNA, 19 bp, Homo sapiens
  siRNA target sequence for BVES (NM_007073.2,572-590).
gctgcagaggataaaacct

SEQ ID NO: 336910 - DNA, 19 bp, Homo sapiens
  siRNA target sequence for BVES (NM_007073.2,580-598).
ggataaaacctcagttgat

SEQ ID NO: 336911 - DNA, 19 bp, Homo sapiens
  siRNA target sequence for BVES (NM_007073.2,599-617).
gaccgtctgagtattctct

SEQ ID NO: 336912 - DNA, 19 bp, Homo sapiens
  siRNA target sequence for BVES (NM_007073.2,637-655).
ctcctatcgaggacatttt

SEQ ID NO: 336913 - DNA, 19 bp, Homo sapiens
  siRNA target sequence for BVES (NM_007073.2,639-657).
cctatcgaggacattttct

SEQ ID NO: 336914 - DNA, 19 bp, Homo sapiens
  siRNA target sequence for BVES (NM_007073.2,647-665).
ggacattttctgcataaca

SEQ ID NO: 336915 - DNA, 19 bp, Homo sapiens
  siRNA target sequence for BVES (NM_007073.2,648-666).
gacattttctgcataacat

SEQ ID NO: 336916 - DNA, 19 bp, Homo sapiens
  siRNA target sequence for BVES (NM_007073.2,671-689).
ccctgtgcctttatagatt

SEQ ID NO: 336917 - DNA, 19 bp, Homo sapiens
  siRNA target sequence for BVES (NM_007073.2,712-730).
gatgcacaaaggtgaaaaa

SEQ ID NO: 336918 - DNA, 19 bp, Homo sapiens
  siRNA target sequence for BVES (NM_007073.2,733-751).
ccaggtcaccattattgca

SEQ ID NO: 336919 - DNA, 19 bp, Homo sapiens
  siRNA target sequence for BVES (NM_007073.2,739-757).
caccattattgcagatgat

SEQ ID NO: 336920 - DNA, 19 bp, Homo sapiens
  siRNA target sequence for BVES (NM_007073.2,741-759).
ccattattgcagatgataa

SEQ ID NO: 336921 - DNA, 19 bp, Homo sapiens
  siRNA target sequence for BVES (NM_007073.2,795-813).
catactttctggaatcaga

SEQ ID NO: 336922 - DNA, 19 bp, Homo sapiens
  siRNA target sequence for BVES (NM_007073.2,806-824).
gaatcagaacctttcttgt

SEQ ID NO: 336923 - DNA, 19 bp, Homo sapiens
  siRNA target sequence for BVES (NM_007073.2,810-828).
cagaacctttcttgtatga

SEQ ID NO: 336924 - DNA, 19 bp, Homo sapiens
  siRNA target sequence for BVES (NM_007073.2,827-845).
gaaatctttaggtatctta

SEQ ID NO: 336925 - DNA, 19 bp, Homo sapiens
  siRNA target sequence for BVES (NM_007073.2,880-898).
gaatgatcccaccttaaat

SEQ ID NO: 336926 - DNA, 19 bp, Homo sapiens
  siRNA target sequence for BVES (NM_007073.2,884-902).
gatcccaccttaaatgata

SEQ ID NO: 336927 - DNA, 19 bp, Homo sapiens
  siRNA target sequence for BVES (NM_007073.2,1078-1096).
caagatgaaaccgatagaa

SEQ ID NO: 336928 - DNA, 19 bp, Homo sapiens
  siRNA target sequence for BVES (NM_007073.2,1127-1145).
gaaccggcatctccaaata

SEQ ID NO: 336929 - DNA, 19 bp, Homo sapiens
  siRNA target sequence for BVES (NM_007073.2,1130-1148).
ccggcatctccaaatacat

SEQ ID NO: 336930 - DNA, 19 bp, Homo sapiens
  siRNA target sequence for JM5 (NM_007075.1,208-226).
caggtgtgcgcatctacaa

SEQ ID NO: 336931 - DNA, 19 bp, Homo sapiens
  siRNA target sequence for JM5 (NM_007075.1,333-351).
ggtagtagtcccaagttct

SEQ ID NO: 336932 - DNA, 19 bp, Homo sapiens
  siRNA target sequence for JM5 (NM_007075.1,454-472).
gcatgcgccatgacaagat

SEQ ID NO: 336933 - DNA, 19 bp, Homo sapiens
  siRNA target sequence for JM5 (NM_007075.1,522-540).
ccccgaaagctgtttgagt

SEQ ID NO: 336934 - DNA, 19 bp, Homo sapiens
  siRNA target sequence for JM5 (NM_007075.1,523-541).
cccgaaagctgtttgagtt

SEQ ID NO: 336935 - DNA, 19 bp, Homo sapiens
  siRNA target sequence for JM5 (NM_007075.1,625-643).
gtgggagtctgcaacttgt

SEQ ID NO: 336936 - DNA, 19 bp, Homo sapiens
  siRNA target sequence for JM5 (NM_007075.1,772-790).
cccttattcgcctctttga

SEQ ID NO: 336937 - DNA, 19 bp, Homo sapiens
  siRNA target sequence for JM5 (NM_007075.1,780-798).
cgcctctttgacacacaat

SEQ ID NO: 336938 - DNA, 19 bp, Homo sapiens
  siRNA target sequence for JM5 (NM_007075.1,840-858).
gccaccctctactgcatta

SEQ ID NO: 336939 - DNA, 19 bp, Homo sapiens
  siRNA target sequence for JM5 (NM_007075.1,841-859).
ccaccctctactgcattaa

SEQ ID NO: 336940 - DNA, 19 bp, Homo sapiens
  siRNA target sequence for JM5 (NM_007075.1,846-864).
ctctactgcattaacttca

SEQ ID NO: 336941 - DNA, 19 bp, Homo sapiens
  siRNA target sequence for JM5 (NM_007075.1,902-920).
gggtactgtccatatcttt

SEQ ID NO: 336942 - DNA, 19 bp, Homo sapiens
  siRNA target sequence for JM5 (NM_007075.1,1058-1076).
cgccttcggtcgcaatact

SEQ ID NO: 336943 - DNA, 19 bp, Homo sapiens
  siRNA target sequence for JM5 (NM_007075.1,1059-1077).
gccttcggtcgcaatactt

SEQ ID NO: 336944 - DNA, 19 bp, Homo sapiens
  siRNA target sequence for UBL3 (NM_007106.2,557-575).
cctgttttctcctaacgat

SEQ ID NO: 336945 - DNA, 19 bp, Homo sapiens
  siRNA target sequence for UBL3 (NM_007106.2,696-714).
gtcacattaggagcattaa

SEQ ID NO: 336946 - DNA, 19 bp, Homo sapiens
  siRNA target sequence for UBL3 (NM_007106.2,752-770).
ggccagagagacattacca

SEQ ID NO: 336947 - DNA, 19 bp, Homo sapiens
  siRNA target sequence for UBL3 (NM_007106.2,806-824).
gactggagagagtaattgt

SEQ ID NO: 336948 - DNA, 19 bp, Homo sapiens
  siRNA target sequence for UBL3 (NM_007106.2,817-835).
gtaattgttgtgtaatcct

SEQ ID NO: 336949 - DNA, 19 bp, Homo sapiens
  siRNA target sequence for THH (NM_007113.1,384-402).
ctaagacggtagatctgat

SEQ ID NO: 336950 - DNA, 19 bp, Homo sapiens
  siRNA target sequence for THH (NM_007113.1,426-444).
gtaatgggcgtgtcgattt

SEQ ID NO: 336951 - DNA, 19 bp, Homo sapiens
  siRNA target sequence for THH (NM_007113.1,434-452).
cgtgtcgatttcaacgaat

SEQ ID NO: 336952 - DNA, 19 bp, Homo sapiens
  siRNA target sequence for THH (NM_007113.1,435-453).
gtgtcgatttcaacgaatt

SEQ ID NO: 336953 - DNA, 19 bp, Homo sapiens
  siRNA target sequence for THH (NM_007113.1,448-466).
cgaattcctcctatttatt

SEQ ID NO: 336954 - DNA, 19 bp, Homo sapiens
  siRNA target sequence for THH (NM_007113.1,475-493).
ggctcaagcttgttactat

SEQ ID NO: 336955 - DNA, 19 bp, Homo sapiens
  siRNA target sequence for THH (NM_007113.1,819-837).
gcaaaggtcacgaaactga

SEQ ID NO: 336956 - DNA, 19 bp, Homo sapiens
  siRNA target sequence for THH (NM_007113.1,1888-1906).
gagcgagcaacaactaaga

SEQ ID NO: 336957 - DNA, 19 bp, Homo sapiens
  siRNA target sequence for THH (NM_007113.1,2425-2443).
cgacgcacggcaaagcaaa

SEQ ID NO: 336958 - DNA, 19 bp, Homo sapiens
  siRNA target sequence for THH (NM_007113.1,2429-2447).
gcacggcaaagcaaagtct

SEQ ID NO: 336959 - DNA, 19 bp, Homo sapiens
  siRNA target sequence for THH (NM_007113.1,3158-3176).
caatatcggaaggataaga

SEQ ID NO: 336960 - DNA, 19 bp, Homo sapiens
  siRNA target sequence for THH (NM_007113.1,3336-3354).
ggcagtaccgcaaaaaaga

SEQ ID NO: 336961 - DNA, 19 bp, Homo sapiens
  siRNA target sequence for THH (NM_007113.1,3716-3734).
gagcttcagcgccagaaaa

SEQ ID NO: 336962 - DNA, 19 bp, Homo sapiens
  siRNA target sequence for THH (NM_007113.1,3761-3779).
cagcgcagtgatctgaaat

SEQ ID NO: 336963 - DNA, 19 bp, Homo sapiens
  siRNA target sequence for THH (NM_007113.1,3780-3798).
ggcagtgggaaccagaaaa

SEQ ID NO: 336964 - DNA, 19 bp, Homo sapiens
  siRNA target sequence for THH (NM_007113.1,3809-3827).
gttcgtgataacaaggttt

SEQ ID NO: 336965 - DNA, 19 bp, Homo sapiens
  siRNA target sequence for THH (NM_007113.1,3812-3830).
cgtgataacaaggtttact

SEQ ID NO: 336966 - DNA, 19 bp, Homo sapiens
  siRNA target sequence for THH (NM_007113.1,3831-3849).
gcaaaggcagagagaatga

SEQ ID NO: 336967 - DNA, 19 bp, Homo sapiens
  siRNA target sequence for THH (NM_007113.1,4843-4861).
ccgtttagaggaacagaaa

SEQ ID NO: 336968 - DNA, 19 bp, Homo sapiens
  siRNA target sequence for THH (NM_007113.1,5321-5339).
cgccaagaacgctacagaa

SEQ ID NO: 336969 - DNA, 19 bp, Homo sapiens
  siRNA target sequence for THH (NM_007113.1,5323-5341).
ccaagaacgctacagaaaa

SEQ ID NO: 336970 - DNA, 19 bp, Homo sapiens
  siRNA target sequence for THH (NM_007113.1,5324-5342).
caagaacgctacagaaaaa

SEQ ID NO: 336971 - DNA, 19 bp, Homo sapiens
  siRNA target sequence for THH (NM_007113.1,5670-5688).
gtcgtgaggaacaagaact

SEQ ID NO: 336972 - DNA, 19 bp, Homo sapiens
  siRNA target sequence for THH (NM_007113.1,5672-5690).
cgtgaggaacaagaactat

SEQ ID NO: 336973 - DNA, 19 bp, Homo sapiens
  siRNA target sequence for THH (NM_007113.1,5730-5748).
ggaaattacgggaagaaca

SEQ ID NO: 336974 - DNA, 19 bp, Homo sapiens
  siRNA target sequence for THH (NM_007113.1,5872-5890).
gcgctccagccctctctat

SEQ ID NO: 336975 - DNA, 19 bp, Homo sapiens
  siRNA target sequence for THH (NM_007113.1,5877-5895).
ccagccctctctatgagta

SEQ ID NO: 336976 - DNA, 19 bp, Homo sapiens
  siRNA target sequence for THH (NM_007113.1,5880-5898).
gccctctctatgagtacat

SEQ ID NO: 336977 - DNA, 19 bp, Homo sapiens
  siRNA target sequence for UGT1A4 (NM_007120.1,314-332).
ctacactcaagggttcttt

SEQ ID NO: 336978 - DNA, 19 bp, Homo sapiens
  siRNA target sequence for UGT1A4 (NM_007120.1,348-366).
ctgaagagatattctagaa

SEQ ID NO: 336979 - DNA, 19 bp, Homo sapiens
  siRNA target sequence for UGT1A4 (NM_007120.1,350-368).
gaagagatattctagaagt

SEQ ID NO: 336980 - DNA, 19 bp, Homo sapiens
  siRNA target sequence for UGT1A4 (NM_007120.1,387-405).
gtatctttggcccttcata

SEQ ID NO: 336981 - DNA, 19 bp, Homo sapiens
  siRNA target sequence for POMT1 (NM_007171.2,297-315).
gtggtttttgacgaagtat

SEQ ID NO: 336982 - DNA, 19 bp, Homo sapiens
  siRNA target sequence for POMT1 (NM_007171.2,299-317).
ggtttttgacgaagtatat

SEQ ID NO: 336983 - DNA, 19 bp, Homo sapiens
  siRNA target sequence for POMT1 (NM_007171.2,300-318).
gtttttgacgaagtatatt

SEQ ID NO: 336984 - DNA, 19 bp, Homo sapiens
  siRNA target sequence for POMT1 (NM_007171.2,321-339).
gggcagtacatctcttttt

SEQ ID NO: 336985 - DNA, 19 bp, Homo sapiens
  siRNA target sequence for POMT1 (NM_007171.2,322-340).
ggcagtacatctcttttta

SEQ ID NO: 336986 - DNA, 19 bp, Homo sapiens
  siRNA target sequence for POMT1 (NM_007171.2,529-547).
ccatggcctaccagatagt

SEQ ID NO: 336987 - DNA, 19 bp, Homo sapiens
  siRNA target sequence for POMT1 (NM_007171.2,586-604).
ctgctctgttgatgcttat

SEQ ID NO: 336988 - DNA, 19 bp, Homo sapiens
  siRNA target sequence for POMT1 (NM_007171.2,628-646).
caaggctaatgcttttgga

SEQ ID NO: 336989 - DNA, 19 bp, Homo sapiens
  siRNA target sequence for POMT1 (NM_007171.2,778-796).
cagtgggcatcaagtacat

SEQ ID NO: 336990 - DNA, 19 bp, Homo sapiens
  siRNA target sequence for POMT1 (NM_007171.2,995-1013).
cccggtcgtcctgtactta

SEQ ID NO: 336991 - DNA, 19 bp, Homo sapiens
  siRNA target sequence for POMT1 (NM_007171.2,997-1015).
cggtcgtcctgtacttact

SEQ ID NO: 336992 - DNA, 19 bp, Homo sapiens
  siRNA target sequence for POMT1 (NM_007171.2,999-1017).
gtcgtcctgtacttactgt

SEQ ID NO: 336993 - DNA, 19 bp, Homo sapiens
  siRNA target sequence for POMT1 (NM_007171.2,1019-1037).
cttctacgtccacttgatt

SEQ ID NO: 336994 - DNA, 19 bp, Homo sapiens
  siRNA target sequence for POMT1 (NM_007171.2,1022-1040).
ctacgtccacttgattcta

SEQ ID NO: 336995 - DNA, 19 bp, Homo sapiens
  siRNA target sequence for POMT1 (NM_007171.2,1056-1074).
ccccacgaccaaatcatgt

SEQ ID NO: 336996 - DNA, 19 bp, Homo sapiens
  siRNA target sequence for POMT1 (NM_007171.2,1214-1232).
ggacacctaccccatgata

SEQ ID NO: 336997 - DNA, 19 bp, Homo sapiens
  siRNA target sequence for POMT1 (NM_007171.2,1215-1233).
gacacctaccccatgatat

SEQ ID NO: 336998 - DNA, 19 bp, Homo sapiens
  siRNA target sequence for POMT1 (NM_007171.2,1295-1313).
caataactggtggattgta

SEQ ID NO: 336999 - DNA, 19 bp, Homo sapiens
  siRNA target sequence for POMT1 (NM_007171.2,1412-1430).
cctgaacacgcatgatgtt

SEQ ID NO: 337000 - DNA, 19 bp, Homo sapiens
  siRNA target sequence for POMT1 (NM_007171.2,1465-1483).
cctgctacattgactataa

SEQ ID NO: 337001 - DNA, 19 bp, Homo sapiens
  siRNA target sequence for POMT1 (NM_007171.2,1589-1607).
gaacacttccgctgtctta

SEQ ID NO: 337002 - DNA, 19 bp, Homo sapiens
  siRNA target sequence for POMT1 (NM_007171.2,1594-1612).
cttccgctgtcttaaagct

SEQ ID NO: 337003 - DNA, 19 bp, Homo sapiens
  siRNA target sequence for POMT1 (NM_007171.2,1838-1856).
gctggcgctgagaagtgat

SEQ ID NO: 337004 - DNA, 19 bp, Homo sapiens
  siRNA target sequence for POMT1 (NM_007171.2,1857-1875).
gactcggaacacaagtaca

SEQ ID NO: 337005 - DNA, 19 bp, Homo sapiens
  siRNA target sequence for POMT1 (NM_007171.2,1896-1914).
gtcaccctggacaccaata

SEQ ID NO: 337006 - DNA, 19 bp, Homo sapiens
  siRNA target sequence for POMT1 (NM_007171.2,1898-1916).
caccctggacaccaatatt

SEQ ID NO: 337007 - DNA, 19 bp, Homo sapiens
  siRNA target sequence for POMT1 (NM_007171.2,1952-1970).
ccacctacttggaaacata

SEQ ID NO: 337008 - DNA, 19 bp, Homo sapiens
  siRNA target sequence for POMT1 (NM_007171.2,1956-1974).
ctacttggaaacatagtga

SEQ ID NO: 337009 - DNA, 19 bp, Homo sapiens
  siRNA target sequence for POMT1 (NM_007171.2,2351-2369).
gtcactctcgccacatgaa

SEQ ID NO: 337010 - DNA, 19 bp, Homo sapiens
  siRNA target sequence for POMT1 (NM_007171.2,2353-2371).
cactctcgccacatgaact

SEQ ID NO: 337011 - DNA, 19 bp, Homo sapiens
  siRNA target sequence for POMT1 (NM_007171.2,2376-2394).
gcccttcgctggaaagaca

SEQ ID NO: 337012 - DNA, 19 bp, Homo sapiens
  siRNA target sequence for UNRIP (NM_007178.2,337-355).
cgcgacccgtggttgattt

SEQ ID NO: 337013 - DNA, 19 bp, Homo sapiens
  siRNA target sequence for UNRIP (NM_007178.2,487-505).
gtgcaacactgaataagga

SEQ ID NO: 337014 - DNA, 19 bp, Homo sapiens
  siRNA target sequence for UNRIP (NM_007178.2,850-868).
ctgttagtagtatggaata

SEQ ID NO: 337015 - DNA, 19 bp, Homo sapiens
  siRNA target sequence for AKAP2 (NM_007203.3,270-288).
gcttgacgagcagatactt

SEQ ID NO: 337016 - DNA, 19 bp, Homo sapiens
  siRNA target sequence for AKAP2 (NM_007203.3,405-423).
cagagtcaagcaacttgaa

SEQ ID NO: 337017 - DNA, 19 bp, Homo sapiens
  siRNA target sequence for AKAP2 (NM_007203.3,407-425).
gagtcaagcaacttgaaga

SEQ ID NO: 337018 - DNA, 19 bp, Homo sapiens
  siRNA target sequence for AKAP2 (NM_007203.3,437-455).
ggctggagcaagaaataca

SEQ ID NO: 337019 - DNA, 19 bp, Homo sapiens
  siRNA target sequence for AKAP2 (NM_007203.3,448-466).
gaaatacaaacgctagaaa

SEQ ID NO: 337020 - DNA, 19 bp, Homo sapiens
  siRNA target sequence for AKAP2 (NM_007203.3,566-584).
cggatggagatgcagtaaa

SEQ ID NO: 337021 - DNA, 19 bp, Homo sapiens
  siRNA target sequence for AKAP2 (NM_007203.3,677-695).
gagtcgggtgggagaatgt

SEQ ID NO: 337022 - DNA, 19 bp, Homo sapiens
  siRNA target sequence for AKAP2 (NM_007203.3,718-736).
gcctcgaacgccacagaaa

SEQ ID NO: 337023 - DNA, 19 bp, Homo sapiens
  siRNA target sequence for AKAP2 (NM_007203.3,720-738).
ctcgaacgccacagaaaca

SEQ ID NO: 337024 - DNA, 19 bp, Homo sapiens
  siRNA target sequence for AKAP2 (NM_007203.3,743-761).
gcccagacatgactatcaa

SEQ ID NO: 337025 - DNA, 19 bp, Homo sapiens
  siRNA target sequence for AKAP2 (NM_007203.3,804-822).
cgagggagacaactatagt

SEQ ID NO: 337026 - DNA, 19 bp, Homo sapiens
  siRNA target sequence for AKAP2 (NM_007203.3,885-903).
ggtgtctgttgcagaatgt

SEQ ID NO: 337027 - DNA, 19 bp, Homo sapiens
  siRNA target sequence for AKAP2 (NM_007203.3,945-963).
ccatccctccgctttctat

SEQ ID NO: 337028 - DNA, 19 bp, Homo sapiens
  siRNA target sequence for AKAP2 (NM_007203.3,999-1017).
cgaatccctggataatgat

SEQ ID NO: 337029 - DNA, 19 bp, Homo sapiens
  siRNA target sequence for AKAP2 (NM_007203.3,1023-1041).
cagagagatccgctatcta

SEQ ID NO: 337030 - DNA, 19 bp, Homo sapiens
  siRNA target sequence for AKAP2 (NM_007203.3,1025-1043).
gagagatccgctatctaga

SEQ ID NO: 337031 - DNA, 19 bp, Homo sapiens
  siRNA target sequence for AKAP2 (NM_007203.3,1081-1099).
gatggaacgtacaatggaa

SEQ ID NO: 337032 - DNA, 19 bp, Homo sapiens
  siRNA target sequence for AKAP2 (NM_007203.3,1211-1229).
ctcacatcgagctcagtaa

SEQ ID NO: 337033 - DNA, 19 bp, Homo sapiens
  siRNA target sequence for AKAP2 (NM_007203.3,1213-1231).
cacatcgagctcagtaata

SEQ ID NO: 337034 - DNA, 19 bp, Homo sapiens
  siRNA target sequence for AKAP2 (NM_007203.3,1377-1395).
cactctcaccacactgaaa

SEQ ID NO: 337035 - DNA, 19 bp, Homo sapiens
  siRNA target sequence for AKAP2 (NM_007203.3,1553-1571).
gcagccaggccgtcaagaa

SEQ ID NO: 337036 - DNA, 19 bp, Homo sapiens
  siRNA target sequence for AKAP2 (NM_007203.3,1645-1663).
catctggagtcgcacaaaa

SEQ ID NO: 337037 - DNA, 19 bp, Homo sapiens
  siRNA target sequence for AKAP2 (NM_007203.3,1648-1666).
ctggagtcgcacaaaaagt

SEQ ID NO: 337038 - DNA, 19 bp, Homo sapiens
  siRNA target sequence for AKAP2 (NM_007203.3,1651-1669).
gagtcgcacaaaaagtaca

SEQ ID NO: 337039 - DNA, 19 bp, Homo sapiens
  siRNA target sequence for AKAP2 (NM_007203.3,1786-1804).
cgcgcaagcatgattgaca

SEQ ID NO: 337040 - DNA, 19 bp, Homo sapiens
  siRNA target sequence for AKAP2 (NM_007203.3,1787-1805).
gcgcaagcatgattgacaa

SEQ ID NO: 337041 - DNA, 19 bp, Homo sapiens
  siRNA target sequence for AKAP2 (NM_007203.3,1822-1840).
gtcacagagcagatagatt

SEQ ID NO: 337042 - DNA, 19 bp, Homo sapiens
  siRNA target sequence for AKAP2 (NM_007203.3,1844-1862).
ctgctgctcgcaaacaatt

SEQ ID NO: 337043 - DNA, 19 bp, Homo sapiens
  siRNA target sequence for AKAP2 (NM_007203.3,1964-1982).
cagacaagccactgactaa

SEQ ID NO: 337044 - DNA, 19 bp, Homo sapiens
  siRNA target sequence for AKAP2 (NM_007203.3,2123-2141).
cctacagcgagccttctaa

SEQ ID NO: 337045 - DNA, 19 bp, Homo sapiens
  siRNA target sequence for AKAP2 (NM_007203.3,2124-2142).
ctacagcgagccttctaaa

SEQ ID NO: 337046 - DNA, 19 bp, Homo sapiens
  siRNA target sequence for AKAP2 (NM_007203.3,2144-2162).
gtgggcccttatctaaact

SEQ ID NO: 337047 - DNA, 19 bp, Homo sapiens
  siRNA target sequence for AKAP2 (NM_007203.3,2146-2164).
gggcccttatctaaactgt

SEQ ID NO: 337048 - DNA, 19 bp, Homo sapiens
  siRNA target sequence for AKAP2 (NM_007203.3,2238-2256).
ggatcagttctcaagatct

SEQ ID NO: 337049 - DNA, 19 bp, Homo sapiens
  siRNA target sequence for AKAP2 (NM_007203.3,2337-2355).
ggagaccctatccaatgat

SEQ ID NO: 337050 - DNA, 19 bp, Homo sapiens
  siRNA target sequence for AKAP2 (NM_007203.3,2338-2356).
gagaccctatccaatgatt

SEQ ID NO: 337051 - DNA, 19 bp, Homo sapiens
  siRNA target sequence for AKAP2 (NM_007203.3,2403-2421).
caatgccctccaggaaaat

SEQ ID NO: 337052 - DNA, 19 bp, Homo sapiens
  siRNA target sequence for AKAP2 (NM_007203.3,2442-2460).
gccccagacaccacaaact

SEQ ID NO: 337053 - DNA, 19 bp, Homo sapiens
  siRNA target sequence for AKAP2 (NM_007203.3,2444-2462).
cccagacaccacaaactga

SEQ ID NO: 337054 - DNA, 19 bp, Homo sapiens
  siRNA target sequence for AKAP2 (NM_007203.3,2488-2506).
ggcgtctccaagtcattta

SEQ ID NO: 337055 - DNA, 19 bp, Homo sapiens
  siRNA target sequence for AKAP2 (NM_007203.3,2490-2508).
cgtctccaagtcatttagt

SEQ ID NO: 337056 - DNA, 19 bp, Homo sapiens
  siRNA target sequence for AKAP2 (NM_007203.3,2622-2640).
cgagcaggtggataaagct

SEQ ID NO: 337057 - DNA, 19 bp, Homo sapiens
  siRNA target sequence for AKAP2 (NM_007203.3,2710-2728).
gcggctttcggctcagaaa

SEQ ID NO: 337058 - DNA, 19 bp, Homo sapiens
  siRNA target sequence for AKAP2 (NM_007203.3,2757-2775).
ggtgtcttctcctgttcaa

SEQ ID NO: 337059 - DNA, 19 bp, Homo sapiens
  siRNA target sequence for AKAP2 (NM_007203.3,2778-2796).
gaaaagggatgtattacca

SEQ ID NO: 337060 - DNA, 19 bp, Homo sapiens
  siRNA target sequence for AKAP2 (NM_007203.3,2867-2885).
ccagtggcccgattaacat

SEQ ID NO: 337061 - DNA, 19 bp, Homo sapiens
  siRNA target sequence for AKAP2 (NM_007203.3,2895-2913).
caggcccgaaggaagctat

SEQ ID NO: 337062 - DNA, 19 bp, Homo sapiens
  siRNA target sequence for AKAP2 (NM_007203.3,2897-2915).
ggcccgaaggaagctattt

SEQ ID NO: 337063 - DNA, 19 bp, Homo sapiens
  siRNA target sequence for AKAP2 (NM_007203.3,2899-2917).
cccgaaggaagctatttca

SEQ ID NO: 337064 - DNA, 19 bp, Homo sapiens
  siRNA target sequence for AKAP2 (NM_007203.3,3021-3039).
gcggactttgtccatgatt

SEQ ID NO: 337065 - DNA, 19 bp, Homo sapiens
  siRNA target sequence for AKAP2 (NM_007203.3,3167-3185).
ctgctccagggaaaataga

SEQ ID NO: 337066 - DNA, 19 bp, Homo sapiens
  siRNA target sequence for AKAP2 (NM_007203.3,3170-3188).
ctccagggaaaatagagaa

SEQ ID NO: 337067 - DNA, 19 bp, Homo sapiens
  siRNA target sequence for AKAP2 (NM_007203.3,3225-3243).
cagcttgcagcctgactta

SEQ ID NO: 337068 - DNA, 19 bp, Homo sapiens
  siRNA target sequence for AKAP2 (NM_007203.3,3291-3309).
gaccctcatggaagactat

SEQ ID NO: 337069 - DNA, 19 bp, Homo sapiens
  siRNA target sequence for AKAP2 (NM_007203.3,3304-3322).
gactatgagacacacaaat

SEQ ID NO: 337070 - DNA, 19 bp, Homo sapiens
  siRNA target sequence for AKAP2 (NM_007203.3,3323-3341).
ctaaaaggcgcgagagaat

SEQ ID NO: 337071 - DNA, 19 bp, Homo sapiens
  siRNA target sequence for AKAP2 (NM_007203.3,3331-3349).
cgcgagagaatggatgata

SEQ ID NO: 337072 - DNA, 19 bp, Homo sapiens
  siRNA target sequence for AKAP2 (NM_007203.3,3333-3351).
cgagagaatggatgatagt

SEQ ID NO: 337073 - DNA, 19 bp, Homo sapiens
  siRNA target sequence for AKAP2 (NM_007203.3,3353-3371).
gttacacttctaagttact

SEQ ID NO: 337074 - DNA, 19 bp, Homo sapiens
  siRNA target sequence for AKAP2 (NM_007203.3,3399-3417).
cgaggccacacgggttaat

SEQ ID NO: 337075 - DNA, 19 bp, Homo sapiens
  siRNA target sequence for AKAP2 (NM_007203.3,3402-3420).
ggccacacgggttaatcga

SEQ ID NO: 337076 - DNA, 19 bp, Homo sapiens
  siRNA target sequence for AKAP2 (NM_007203.3,3403-3421).
gccacacgggttaatcgaa

SEQ ID NO: 337077 - DNA, 19 bp, Homo sapiens
  siRNA target sequence for AKAP2 (NM_007203.3,3409-3427).
cgggttaatcgaagaaaga

SEQ ID NO: 337078 - DNA, 19 bp, Homo sapiens
  siRNA target sequence for RNF2 (NM_007212.2,247-265).
gcagacaaacggaactcaa

SEQ ID NO: 337079 - DNA, 19 bp, Homo sapiens
  siRNA target sequence for RNF2 (NM_007212.2,252-270).
caaacggaactcaaccatt

SEQ ID NO: 337080 - DNA, 19 bp, Homo sapiens
  siRNA target sequence for RNF2 (NM_007212.2,257-275).
ggaactcaaccattaagca

SEQ ID NO: 337081 - DNA, 19 bp, Homo sapiens
  siRNA target sequence for RNF2 (NM_007212.2,359-377).
cgaagtctacacagtgaat

SEQ ID NO: 337082 - DNA, 19 bp, Homo sapiens
  siRNA target sequence for RNF2 (NM_007212.2,382-400).
gtgcccaatttgtttggat

SEQ ID NO: 337083 - DNA, 19 bp, Homo sapiens
  siRNA target sequence for RNF2 (NM_007212.2,384-402).
gcccaatttgtttggatat

SEQ ID NO: 337084 - DNA, 19 bp, Homo sapiens
  siRNA target sequence for RNF2 (NM_007212.2,427-445).
ggagtgtttacatcgtttt

SEQ ID NO: 337085 - DNA, 19 bp, Homo sapiens
  siRNA target sequence for RNF2 (NM_007212.2,428-446).
gagtgtttacatcgttttt

SEQ ID NO: 337086 - DNA, 19 bp, Homo sapiens
  siRNA target sequence for RNF2 (NM_007212.2,460-478).
catcacagcccttagaagt

SEQ ID NO: 337087 - DNA, 19 bp, Homo sapiens
  siRNA target sequence for RNF2 (NM_007212.2,492-510).
gtcctacctgtcggaaaaa

SEQ ID NO: 337088 - DNA, 19 bp, Homo sapiens
  siRNA target sequence for RNF2 (NM_007212.2,495-513).
ctacctgtcggaaaaaact

SEQ ID NO: 337089 - DNA, 19 bp, Homo sapiens
  siRNA target sequence for RNF2 (NM_007212.2,498-516).
cctgtcggaaaaaactagt

SEQ ID NO: 337090 - DNA, 19 bp, Homo sapiens
  siRNA target sequence for RNF2 (NM_007212.2,576-594).
caagtcgtgatgagtatga

SEQ ID NO: 337091 - DNA, 19 bp, Homo sapiens
  siRNA target sequence for RNF2 (NM_007212.2,597-615).
ctcatcaagagagagtatt

SEQ ID NO: 337092 - DNA, 19 bp, Homo sapiens
  siRNA target sequence for RNF2 (NM_007212.2,797-815).
gaagcaggccctagtaaca

SEQ ID NO: 337093 - DNA, 19 bp, Homo sapiens
  siRNA target sequence for RNF2 (NM_007212.2,820-838).
gaccaaaacatctgatgat

SEQ ID NO: 337094 - DNA, 19 bp, Homo sapiens
  siRNA target sequence for RNF2 (NM_007212.2,840-858).
ctgggctagagcttgataa

SEQ ID NO: 337095 - DNA, 19 bp, Homo sapiens
  siRNA target sequence for RNF2 (NM_007212.2,843-861).
ggctagagcttgataataa

SEQ ID NO: 337096 - DNA, 19 bp, Homo sapiens
  siRNA target sequence for RNF2 (NM_007212.2,845-863).
ctagagcttgataataaca

SEQ ID NO: 337097 - DNA, 19 bp, Homo sapiens
  siRNA target sequence for RNF2 (NM_007212.2,876-894).
caattgatccagtaatgga

SEQ ID NO: 337098 - DNA, 19 bp, Homo sapiens
  siRNA target sequence for RNF2 (NM_007212.2,896-914).
ggtgctagtgaaattgaat

SEQ ID NO: 337099 - DNA, 19 bp, Homo sapiens
  siRNA target sequence for RNF2 (NM_007212.2,927-945).
ctcatcccacacttatgga

SEQ ID NO: 337100 - DNA, 19 bp, Homo sapiens
  siRNA target sequence for RNF2 (NM_007212.2,957-975).
gtgcacagacgagatacat

SEQ ID NO: 337101 - DNA, 19 bp, Homo sapiens
  siRNA target sequence for RNF2 (NM_007212.2,959-977).
gcacagacgagatacataa

SEQ ID NO: 337102 - DNA, 19 bp, Homo sapiens
  siRNA target sequence for RNF2 (NM_007212.2,960-978).
cacagacgagatacataaa

SEQ ID NO: 337103 - DNA, 19 bp, Homo sapiens
  siRNA target sequence for RNF2 (NM_007212.2,962-980).
cagacgagatacataaaga

SEQ ID NO: 337104 - DNA, 19 bp, Homo sapiens
  siRNA target sequence for RNF2 (NM_007212.2,964-982).
gacgagatacataaagact

SEQ ID NO: 337105 - DNA, 19 bp, Homo sapiens
  siRNA target sequence for RNF2 (NM_007212.2,987-1005).
gtaacgccactgttgatca

SEQ ID NO: 337106 - DNA, 19 bp, Homo sapiens
  siRNA target sequence for RNF2 (NM_007212.2,991-1009).
cgccactgttgatcactta

SEQ ID NO: 337107 - DNA, 19 bp, Homo sapiens
  siRNA target sequence for RNF2 (NM_007212.2,992-1010).
gccactgttgatcacttat

SEQ ID NO: 337108 - DNA, 19 bp, Homo sapiens
  siRNA target sequence for RNF2 (NM_007212.2,1019-1037).
ctggctgtgaggttagctt

SEQ ID NO: 337109 - DNA, 19 bp, Homo sapiens
  siRNA target sequence for RNF2 (NM_007212.2,1023-1041).
ctgtgaggttagctttaga

SEQ ID NO: 337110 - DNA, 19 bp, Homo sapiens
  siRNA target sequence for RNF2 (NM_007212.2,1094-1112).
gagaagcagtataccattt

SEQ ID NO: 337111 - DNA, 19 bp, Homo sapiens
  siRNA target sequence for RNF2 (NM_007212.2,1096-1114).
gaagcagtataccatttat

SEQ ID NO: 337112 - DNA, 19 bp, Homo sapiens
  siRNA target sequence for RNF2 (NM_007212.2,1128-1146).
gtggccagttcactgtatt

SEQ ID NO: 337113 - DNA, 19 bp, Homo sapiens
  siRNA target sequence for RNF2 (NM_007212.2,1198-1216).
caaacccatggaactttat

SEQ ID NO: 337114 - DNA, 19 bp, Homo sapiens
  siRNA target sequence for RNF2 (NM_007212.2,1223-1241).
cctacaaaggagcacaaat

SEQ ID NO: 337115 - DNA, 19 bp, Homo sapiens
  siRNA target sequence for JM4 (NM_007213.1,48-66).
ccctggacgactttgttct

SEQ ID NO: 337116 - DNA, 19 bp, Homo sapiens
  siRNA target sequence for JM4 (NM_007213.1,114-132).
ggtgccaccgcgtcatcaa

SEQ ID NO: 337117 - DNA, 19 bp, Homo sapiens
  siRNA target sequence for JM4 (NM_007213.1,196-214).
gtacgtgcggccacttcat

SEQ ID NO: 337118 - DNA, 19 bp, Homo sapiens
  siRNA target sequence for JM4 (NM_007213.1,437-455).
cgcctgcgcaaccttaaga

SEQ ID NO: 337119 - DNA, 19 bp, Homo sapiens
  siRNA target sequence for JM4 (NM_007213.1,501-519).
caatgggcctgctactaga

SEQ ID NO: 337120 - DNA, 19 bp, Homo sapiens
  siRNA target sequence for HPS5 (NM_007216.3,508-526).
ctgctgggatacagctatt

SEQ ID NO: 337121 - DNA, 19 bp, Homo sapiens
  siRNA target sequence for HPS5 (NM_007216.3,514-532).
ggatacagctattcttaga

SEQ ID NO: 337122 - DNA, 19 bp, Homo sapiens
  siRNA target sequence for HPS5 (NM_007216.3,545-563).
gatcatgctgggaaggttt

SEQ ID NO: 337123 - DNA, 19 bp, Homo sapiens
  siRNA target sequence for HPS5 (NM_007216.3,566-584).
gctatcaaactcaatactt

SEQ ID NO: 337124 - DNA, 19 bp, Homo sapiens
  siRNA target sequence for HPS5 (NM_007216.3,623-641).
cctgttcagacaatcacaa

SEQ ID NO: 337125 - DNA, 19 bp, Homo sapiens
  siRNA target sequence for HPS5 (NM_007216.3,649-667).
ctcctgtgttgtacagtta

SEQ ID NO: 337126 - DNA, 19 bp, Homo sapiens
  siRNA target sequence for HPS5 (NM_007216.3,654-672).
gtgttgtacagttagatta

SEQ ID NO: 337127 - DNA, 19 bp, Homo sapiens
  siRNA target sequence for HPS5 (NM_007216.3,676-694).
ggatggaaggctacttata

SEQ ID NO: 337128 - DNA, 19 bp, Homo sapiens
  siRNA target sequence for HPS5 (NM_007216.3,677-695).
gatggaaggctacttatat

SEQ ID NO: 337129 - DNA, 19 bp, Homo sapiens
  siRNA target sequence for HPS5 (NM_007216.3,686-704).
ctacttatatcttcactta

SEQ ID NO: 337130 - DNA, 19 bp, Homo sapiens
  siRNA target sequence for HPS5 (NM_007216.3,701-719).
cttactcgatccttcttgt

SEQ ID NO: 337131 - DNA, 19 bp, Homo sapiens
  siRNA target sequence for HPS5 (NM_007216.3,813-831).
gccagcaacctctgatata

SEQ ID NO: 337132 - DNA, 19 bp, Homo sapiens
  siRNA target sequence for HPS5 (NM_007216.3,852-870).
ggatgtgggaagtgaactt

SEQ ID NO: 337133 - DNA, 19 bp, Homo sapiens
  siRNA target sequence for HPS5 (NM_007216.3,856-874).
gtgggaagtgaactttgat

SEQ ID NO: 337134 - DNA, 19 bp, Homo sapiens
  siRNA target sequence for HPS5 (NM_007216.3,888-906).
gtacacatcagttcaagaa

SEQ ID NO: 337135 - DNA, 19 bp, Homo sapiens
  siRNA target sequence for HPS5 (NM_007216.3,920-938).
ccacctctccctgtgatta

SEQ ID NO: 337136 - DNA, 19 bp, Homo sapiens
  siRNA target sequence for HPS5 (NM_007216.3,945-963).
gatcagaacctcagtatga

SEQ ID NO: 337137 - DNA, 19 bp, Homo sapiens
  siRNA target sequence for HPS5 (NM_007216.3,1030-1048).
gctgacttggacagaaaga

SEQ ID NO: 337138 - DNA, 19 bp, Homo sapiens
  siRNA target sequence for HPS5 (NM_007216.3,1124-1142).
gtctgtaggaatgaattgt

SEQ ID NO: 337139 - DNA, 19 bp, Homo sapiens
  siRNA target sequence for HPS5 (NM_007216.3,1151-1169).
cacctaaatgggaaagtct

SEQ ID NO: 337140 - DNA, 19 bp, Homo sapiens
  siRNA target sequence for HPS5 (NM_007216.3,1202-1220).
gtggaacgcctgctaagaa

SEQ ID NO: 337141 - DNA, 19 bp, Homo sapiens
  siRNA target sequence for HPS5 (NM_007216.3,1204-1222).
ggaacgcctgctaagaaga

SEQ ID NO: 337142 - DNA, 19 bp, Homo sapiens
  siRNA target sequence for HPS5 (NM_007216.3,1241-1259).
gctcgtacatgctgtcttt

SEQ ID NO: 337143 - DNA, 19 bp, Homo sapiens
  siRNA target sequence for HPS5 (NM_007216.3,1242-1260).
ctcgtacatgctgtctttt

SEQ ID NO: 337144 - DNA, 19 bp, Homo sapiens
  siRNA target sequence for HPS5 (NM_007216.3,1344-1362).
gcacctacaatgatctaat

SEQ ID NO: 337145 - DNA, 19 bp, Homo sapiens
  siRNA target sequence for HPS5 (NM_007216.3,1345-1363).
cacctacaatgatctaatt

SEQ ID NO: 337146 - DNA, 19 bp, Homo sapiens
  siRNA target sequence for HPS5 (NM_007216.3,1456-1474).
catcttggactctggtatt

SEQ ID NO: 337147 - DNA, 19 bp, Homo sapiens
  siRNA target sequence for HPS5 (NM_007216.3,1463-1481).
gactctggtatttatcgta

SEQ ID NO: 337148 - DNA, 19 bp, Homo sapiens
  siRNA target sequence for HPS5 (NM_007216.3,1478-1496).
cgtatcattagtagtagaa

SEQ ID NO: 337149 - DNA, 19 bp, Homo sapiens
  siRNA target sequence for HPS5 (NM_007216.3,1611-1629).
gtggctcacacggaaatga

SEQ ID NO: 337150 - DNA, 19 bp, Homo sapiens
  siRNA target sequence for HPS5 (NM_007216.3,1614-1632).
gctcacacggaaatgaaga

SEQ ID NO: 337151 - DNA, 19 bp, Homo sapiens
  siRNA target sequence for HPS5 (NM_007216.3,1617-1635).
cacacggaaatgaagacaa

SEQ ID NO: 337152 - DNA, 19 bp, Homo sapiens
  siRNA target sequence for HPS5 (NM_007216.3,1652-1670).
gtgatgtttgagacagata

SEQ ID NO: 337153 - DNA, 19 bp, Homo sapiens
  siRNA target sequence for HPS5 (NM_007216.3,1685-1703).
ctcccgttcggcattccat

SEQ ID NO: 337154 - DNA, 19 bp, Homo sapiens
  siRNA target sequence for HPS5 (NM_007216.3,1687-1705).
cccgttcggcattccatta

SEQ ID NO: 337155 - DNA, 19 bp, Homo sapiens
  siRNA target sequence for HPS5 (NM_007216.3,1690-1708).
gttcggcattccattacca

SEQ ID NO: 337156 - DNA, 19 bp, Homo sapiens
  siRNA target sequence for HPS5 (NM_007216.3,1696-1714).
cattccattaccatttcgt

SEQ ID NO: 337157 - DNA, 19 bp, Homo sapiens
  siRNA target sequence for HPS5 (NM_007216.3,1765-1783).
ctttgtgcgtaaaactact

SEQ ID NO: 337158 - DNA, 19 bp, Homo sapiens
  siRNA target sequence for HPS5 (NM_007216.3,1840-1858).
gggtgatgagcaatcatgt

SEQ ID NO: 337159 - DNA, 19 bp, Homo sapiens
  siRNA target sequence for HPS5 (NM_007216.3,1862-1880).
gaggatgtgagttcagata

SEQ ID NO: 337160 - DNA, 19 bp, Homo sapiens
  siRNA target sequence for HPS5 (NM_007216.3,1948-1966).
gttccaggagcttaaagta

SEQ ID NO: 337161 - DNA, 19 bp, Homo sapiens
  siRNA target sequence for HPS5 (NM_007216.3,1994-2012).
caggaccctctggttttat

SEQ ID NO: 337162 - DNA, 19 bp, Homo sapiens
  siRNA target sequence for HPS5 (NM_007216.3,2020-2038).
cgagtctctgagaatggtt

SEQ ID NO: 337163 - DNA, 19 bp, Homo sapiens
  siRNA target sequence for HPS5 (NM_007216.3,2021-2039).
gagtctctgagaatggttt

SEQ ID NO: 337164 - DNA, 19 bp, Homo sapiens
  siRNA target sequence for HPS5 (NM_007216.3,2023-2041).
gtctctgagaatggtttta

SEQ ID NO: 337165 - DNA, 19 bp, Homo sapiens
  siRNA target sequence for HPS5 (NM_007216.3,2042-2060).
caggagtggctttcacatt

SEQ ID NO: 337166 - DNA, 19 bp, Homo sapiens
  siRNA target sequence for HPS5 (NM_007216.3,2044-2062).
ggagtggctttcacattta

SEQ ID NO: 337167 - DNA, 19 bp, Homo sapiens
  siRNA target sequence for HPS5 (NM_007216.3,2132-2150).
caggatgtgctattagtta

SEQ ID NO: 337168 - DNA, 19 bp, Homo sapiens
  siRNA target sequence for HPS5 (NM_007216.3,2134-2152).
ggatgtgctattagttaat

SEQ ID NO: 337169 - DNA, 19 bp, Homo sapiens
  siRNA target sequence for HPS5 (NM_007216.3,2138-2156).
gtgctattagttaatgaat

SEQ ID NO: 337170 - DNA, 19 bp, Homo sapiens
  siRNA target sequence for HPS5 (NM_007216.3,2140-2158).
gctattagttaatgaatca

SEQ ID NO: 337171 - DNA, 19 bp, Homo sapiens
  siRNA target sequence for HPS5 (NM_007216.3,2164-2182).
gggaatattagatgaagat

SEQ ID NO: 337172 - DNA, 19 bp, Homo sapiens
  siRNA target sequence for HPS5 (NM_007216.3,2165-2183).
ggaatattagatgaagata

SEQ ID NO: 337173 - DNA, 19 bp, Homo sapiens
  siRNA target sequence for HPS5 (NM_007216.3,2200-2218).
ggactctttaggcaatgaa

SEQ ID NO: 337174 - DNA, 19 bp, Homo sapiens
  siRNA target sequence for HPS5 (NM_007216.3,2228-2246).
gataaaacagcatgtgaat

SEQ ID NO: 337175 - DNA, 19 bp, Homo sapiens
  siRNA target sequence for HPS5 (NM_007216.3,2276-2294).
gacctgtttcaaatatgtt

SEQ ID NO: 337176 - DNA, 19 bp, Homo sapiens
  siRNA target sequence for HPS5 (NM_007216.3,2322-2340).
ggaacgacctggctgaatt

SEQ ID NO: 337177 - DNA, 19 bp, Homo sapiens
  siRNA target sequence for HPS5 (NM_007216.3,2326-2344).
cgacctggctgaattgaca

SEQ ID NO: 337178 - DNA, 19 bp, Homo sapiens
  siRNA target sequence for HPS5 (NM_007216.3,2330-2348).
ctggctgaattgacaacat

SEQ ID NO: 337179 - DNA, 19 bp, Homo sapiens
  siRNA target sequence for HPS5 (NM_007216.3,2332-2350).
ggctgaattgacaacatta

SEQ ID NO: 337180 - DNA, 19 bp, Homo sapiens
  siRNA target sequence for HPS5 (NM_007216.3,2357-2375).
gagttgaatgtattgaatt

SEQ ID NO: 337181 - DNA, 19 bp, Homo sapiens
  siRNA target sequence for HPS5 (NM_007216.3,2359-2377).
gttgaatgtattgaattct

SEQ ID NO: 337182 - DNA, 19 bp, Homo sapiens
  siRNA target sequence for HPS5 (NM_007216.3,2397-2415).
gacatgtggaccacacttt

SEQ ID NO: 337183 - DNA, 19 bp, Homo sapiens
  siRNA target sequence for HPS5 (NM_007216.3,2449-2467).
gttcctgaagaagtacttt

SEQ ID NO: 337184 - DNA, 19 bp, Homo sapiens
  siRNA target sequence for HPS5 (NM_007216.3,2487-2505).
gagcgaaggagagtatcaa

SEQ ID NO: 337185 - DNA, 19 bp, Homo sapiens
  siRNA target sequence for HPS5 (NM_007216.3,2525-2543).
ccttctgtttgggatactt

SEQ ID NO: 337186 - DNA, 19 bp, Homo sapiens
  siRNA target sequence for HPS5 (NM_007216.3,2606-2624).
gatctaccaacaaggttaa

SEQ ID NO: 337187 - DNA, 19 bp, Homo sapiens
  siRNA target sequence for HPS5 (NM_007216.3,2616-2634).
caaggttaaagttactaga

SEQ ID NO: 337188 - DNA, 19 bp, Homo sapiens
  siRNA target sequence for HPS5 (NM_007216.3,2619-2637).
ggttaaagttactagatga

SEQ ID NO: 337189 - DNA, 19 bp, Homo sapiens
  siRNA target sequence for HPS5 (NM_007216.3,2675-2693).
gctacccggttgtatgaaa

SEQ ID NO: 337190 - DNA, 19 bp, Homo sapiens
  siRNA target sequence for HPS5 (NM_007216.3,2676-2694).
ctacccggttgtatgaaaa

SEQ ID NO: 337191 - DNA, 19 bp, Homo sapiens
  siRNA target sequence for HPS5 (NM_007216.3,2704-2722).
gtctgctcttcgatcctta

SEQ ID NO: 337192 - DNA, 19 bp, Homo sapiens
  siRNA target sequence for HPS5 (NM_007216.3,2711-2729).
cttcgatccttaatcaagt

SEQ ID NO: 337193 - DNA, 19 bp, Homo sapiens
  siRNA target sequence for HPS5 (NM_007216.3,2725-2743).
caagttctttccatccatt

SEQ ID NO: 337194 - DNA, 19 bp, Homo sapiens
  siRNA target sequence for HPS5 (NM_007216.3,2746-2764).
gccatcggatatcatacaa

SEQ ID NO: 337195 - DNA, 19 bp, Homo sapiens
  siRNA target sequence for HPS5 (NM_007216.3,2748-2766).
catcggatatcatacaact

SEQ ID NO: 337196 - DNA, 19 bp, Homo sapiens
  siRNA target sequence for HPS5 (NM_007216.3,2752-2770).
ggatatcatacaactttgt

SEQ ID NO: 337197 - DNA, 19 bp, Homo sapiens
  siRNA target sequence for HPS5 (NM_007216.3,2758-2776).
catacaactttgtcatcat

SEQ ID NO: 337198 - DNA, 19 bp, Homo sapiens
  siRNA target sequence for HPS5 (NM_007216.3,2804-2822).
gacagtctggtgaaatcaa

SEQ ID NO: 337199 - DNA, 19 bp, Homo sapiens
  siRNA target sequence for HPS5 (NM_007216.3,2928-2946).
ccagcacaatggatgatga

SEQ ID NO: 337200 - DNA, 19 bp, Homo sapiens
  siRNA target sequence for HPS5 (NM_007216.3,3001-3019).
ccttcatctaattaaactt

SEQ ID NO: 337201 - DNA, 19 bp, Homo sapiens
  siRNA target sequence for HPS5 (NM_007216.3,3072-3090).
gtttctggcctggatatct

SEQ ID NO: 337202 - DNA, 19 bp, Homo sapiens
  siRNA target sequence for HPS5 (NM_007216.3,3132-3150).
ccaatattgtgtatctgaa

SEQ ID NO: 337203 - DNA, 19 bp, Homo sapiens
  siRNA target sequence for HPS5 (NM_007216.3,3133-3151).
caatattgtgtatctgaat

SEQ ID NO: 337204 - DNA, 19 bp, Homo sapiens
  siRNA target sequence for HPS5 (NM_007216.3,3211-3229).
gcttctccttcatctcata

SEQ ID NO: 337205 - DNA, 19 bp, Homo sapiens
  siRNA target sequence for HPS5 (NM_007216.3,3288-3306).
ggccttcccccatcaatgt

SEQ ID NO: 337206 - DNA, 19 bp, Homo sapiens
  siRNA target sequence for HPS5 (NM_007216.3,3408-3426).
ccagaacctgcgatatcct

SEQ ID NO: 337207 - DNA, 19 bp, Homo sapiens
  siRNA target sequence for HPS5 (NM_007216.3,3445-3463).
gcagagggccttgatacaa

SEQ ID NO: 337208 - DNA, 19 bp, Homo sapiens
  siRNA target sequence for HPS5 (NM_007216.3,3450-3468).
gggccttgatacaaagcat

SEQ ID NO: 337209 - DNA, 19 bp, Homo sapiens
  siRNA target sequence for PDCD10 (NM_007217.3,473-491).
catgtatcctgtgtttaat

SEQ ID NO: 337210 - DNA, 19 bp, Homo sapiens
  siRNA target sequence for PDCD10 (NM_007217.3,565-583).
caggtctcacacaagacat

SEQ ID NO: 337211 - DNA, 19 bp, Homo sapiens
  siRNA target sequence for PDCD10 (NM_007217.3,576-594).
caagacatcattatgaaaa

SEQ ID NO: 337212 - DNA, 19 bp, Homo sapiens
  siRNA target sequence for PDCD10 (NM_007217.3,628-646).
cggagtcccttcttcgtat

SEQ ID NO: 337213 - DNA, 19 bp, Homo sapiens
  siRNA target sequence for PDCD10 (NM_007217.3,643-661).
gtatggcagctgatgatgt

SEQ ID NO: 337214 - DNA, 19 bp, Homo sapiens
  siRNA target sequence for PDCD10 (NM_007217.3,716-734).
ggcacgagcacttaaacaa

SEQ ID NO: 337215 - DNA, 19 bp, Homo sapiens
  siRNA target sequence for PDCD10 (NM_007217.3,717-735).
gcacgagcacttaaacaaa

SEQ ID NO: 337216 - DNA, 19 bp, Homo sapiens
  siRNA target sequence for PDCD10 (NM_007217.3,742-760).
gtaagatcccagatgagat

SEQ ID NO: 337217 - DNA, 19 bp, Homo sapiens
  siRNA target sequence for PDCD10 (NM_007217.3,746-764).
gatcccagatgagatcaat

SEQ ID NO: 337218 - DNA, 19 bp, Homo sapiens
  siRNA target sequence for PDCD10 (NM_007217.3,794-812).
ggatatagctagtgcaata

SEQ ID NO: 337219 - DNA, 19 bp, Homo sapiens
  siRNA target sequence for PDCD10 (NM_007217.3,795-813).
gatatagctagtgcaataa

SEQ ID NO: 337220 - DNA, 19 bp, Homo sapiens
  siRNA target sequence for PDCD10 (NM_007217.3,802-820).
ctagtgcaataaaagaact

SEQ ID NO: 337221 - DNA, 19 bp, Homo sapiens
  siRNA target sequence for PDCD10 (NM_007217.3,805-823).
gtgcaataaaagaacttct

SEQ ID NO: 337222 - DNA, 19 bp, Homo sapiens
  siRNA target sequence for PDCD10 (NM_007217.3,840-858).
gtcttcaagaaatatcaat

SEQ ID NO: 337223 - DNA, 19 bp, Homo sapiens
  siRNA target sequence for PDCD10 (NM_007217.3,873-891).
gcacttgaacaccaaaaga

SEQ ID NO: 337224 - DNA, 19 bp, Homo sapiens
  siRNA target sequence for PDCD10 (NM_007217.3,900-918).
gtaaagtactccaaaagtt

SEQ ID NO: 337225 - DNA, 19 bp, Homo sapiens
  siRNA target sequence for PDCD10 (NM_007217.3,905-923).
gtactccaaaagtttcagt

SEQ ID NO: 337226 - DNA, 19 bp, Homo sapiens
  siRNA target sequence for PDCD10 (NM_007217.3,922-940).
gtgatactctgaaaacgta

SEQ ID NO: 337227 - DNA, 19 bp, Homo sapiens
  siRNA target sequence for PDCD10 (NM_007217.3,924-942).
gatactctgaaaacgtatt

SEQ ID NO: 337228 - DNA, 19 bp, Homo sapiens
  siRNA target sequence for PDCD10 (NM_007217.3,976-994).
gtgccaaccgactaattca

SEQ ID NO: 337229 - DNA, 19 bp, Homo sapiens
  siRNA target sequence for PDCD10 (NM_007217.3,979-997).
ccaaccgactaattcatca

SEQ ID NO: 337230 - DNA, 19 bp, Homo sapiens
  siRNA target sequence for PDCD10 (NM_007217.3,980-998).
caaccgactaattcatcaa

SEQ ID NO: 337231 - DNA, 19 bp, Homo sapiens
  siRNA target sequence for PDCD10 (NM_007217.3,985-1003).
gactaattcatcaaaccaa

SEQ ID NO: 337232 - DNA, 19 bp, Homo sapiens
  siRNA target sequence for RNF24 (NM_007219.2,257-275).
gctcggatttcccacatta

SEQ ID NO: 337233 - DNA, 19 bp, Homo sapiens
  siRNA target sequence for RNF24 (NM_007219.2,260-278).
cggatttcccacattacaa

SEQ ID NO: 337234 - DNA, 19 bp, Homo sapiens
  siRNA target sequence for RNF24 (NM_007219.2,282-300).
caggatgcctaatattgga

SEQ ID NO: 337235 - DNA, 19 bp, Homo sapiens
  siRNA target sequence for RNF24 (NM_007219.2,310-328).
ctgcctctcaacatatata

SEQ ID NO: 337236 - DNA, 19 bp, Homo sapiens
  siRNA target sequence for RNF24 (NM_007219.2,312-330).
gcctctcaacatatatatt

SEQ ID NO: 337237 - DNA, 19 bp, Homo sapiens
  siRNA target sequence for RNF24 (NM_007219.2,333-351).
ggtttttggtactgctata

SEQ ID NO: 337238 - DNA, 19 bp, Homo sapiens
  siRNA target sequence for RNF24 (NM_007219.2,387-405).
cttgattaggctaagacat

SEQ ID NO: 337239 - DNA, 19 bp, Homo sapiens
  siRNA target sequence for RNF24 (NM_007219.2,488-506).
cagtgtgcctagaagactt

SEQ ID NO: 337240 - DNA, 19 bp, Homo sapiens
  siRNA target sequence for RNF24 (NM_007219.2,544-562).
cacgccttccacagaaagt

SEQ ID NO: 337241 - DNA, 19 bp, Homo sapiens
  siRNA target sequence for RNF24 (NM_007219.2,553-571).
cacagaaagtgccttatta

SEQ ID NO: 337242 - DNA, 19 bp, Homo sapiens
  siRNA target sequence for RNF24 (NM_007219.2,573-591).
gtggctggaggttcgtaaa

SEQ ID NO: 337243 - DNA, 19 bp, Homo sapiens
  siRNA target sequence for RNF24 (NM_007219.2,575-593).
ggctggaggttcgtaaagt

SEQ ID NO: 337244 - DNA, 19 bp, Homo sapiens
  siRNA target sequence for RNF24 (NM_007219.2,577-595).
ctggaggttcgtaaagtgt

SEQ ID NO: 337245 - DNA, 19 bp, Homo sapiens
  siRNA target sequence for RNF24 (NM_007219.2,603-621).
gtgcaacatgccagttcta

SEQ ID NO: 337246 - DNA, 19 bp, Homo sapiens
  siRNA target sequence for RNF24 (NM_007219.2,679-697).
ggggcagagaacattgtat

SEQ ID NO: 337247 - DNA, 19 bp, Homo sapiens
  siRNA target sequence for XPOT (NM_007235.3,429-447).
ggatgaacaggctctatta

SEQ ID NO: 337248 - DNA, 19 bp, Homo sapiens
  siRNA target sequence for XPOT (NM_007235.3,438-456).
ggctctattagggctaaat

SEQ ID NO: 337249 - DNA, 19 bp, Homo sapiens
  siRNA target sequence for XPOT (NM_007235.3,442-460).
ctattagggctaaatccaa

SEQ ID NO: 337250 - DNA, 19 bp, Homo sapiens
  siRNA target sequence for XPOT (NM_007235.3,485-503).
gggccctggcctattttga

SEQ ID NO: 337251 - DNA, 19 bp, Homo sapiens
  siRNA target sequence for XPOT (NM_007235.3,550-568).
ctagcccagaggacataca

SEQ ID NO: 337252 - DNA, 19 bp, Homo sapiens
  siRNA target sequence for XPOT (NM_007235.3,558-576).
gaggacatacagtgatgat

SEQ ID NO: 337253 - DNA, 19 bp, Homo sapiens
  siRNA target sequence for XPOT (NM_007235.3,561-579).
gacatacagtgatgatcat

SEQ ID NO: 337254 - DNA, 19 bp, Homo sapiens
  siRNA target sequence for XPOT (NM_007235.3,569-587).
gtgatgatcatgtgaagtt

SEQ ID NO: 337255 - DNA, 19 bp, Homo sapiens
  siRNA target sequence for XPOT (NM_007235.3,604-622).
ctggaacatcaagttaaat

SEQ ID NO: 337256 - DNA, 19 bp, Homo sapiens
  siRNA target sequence for XPOT (NM_007235.3,613-631).
caagttaaatacaaatact

SEQ ID NO: 337257 - DNA, 19 bp, Homo sapiens
  siRNA target sequence for XPOT (NM_007235.3,715-733).
gagaagacctttatacgaa

SEQ ID NO: 337258 - DNA, 19 bp, Homo sapiens
  siRNA target sequence for XPOT (NM_007235.3,717-735).
gaagacctttatacgaaat

SEQ ID NO: 337259 - DNA, 19 bp, Homo sapiens
  siRNA target sequence for XPOT (NM_007235.3,745-763).
caagtcttcgccttgcttt

SEQ ID NO: 337260 - DNA, 19 bp, Homo sapiens
  siRNA target sequence for XPOT (NM_007235.3,750-768).
cttcgccttgctttttgtt

SEQ ID NO: 337261 - DNA, 19 bp, Homo sapiens
  siRNA target sequence for XPOT (NM_007235.3,753-771).
cgccttgctttttgttaca

SEQ ID NO: 337262 - DNA, 19 bp, Homo sapiens
  siRNA target sequence for XPOT (NM_007235.3,759-777).
gctttttgttacagagtat

SEQ ID NO: 337263 - DNA, 19 bp, Homo sapiens
  siRNA target sequence for XPOT (NM_007235.3,780-798).
cactaagtggcccaagttt

SEQ ID NO: 337264 - DNA, 19 bp, Homo sapiens
  siRNA target sequence for XPOT (NM_007235.3,813-831).
ctcagtagtggacctaaat

SEQ ID NO: 337265 - DNA, 19 bp, Homo sapiens
  siRNA target sequence for XPOT (NM_007235.3,861-879).
cctcatggctattgattca

SEQ ID NO: 337266 - DNA, 19 bp, Homo sapiens
  siRNA target sequence for XPOT (NM_007235.3,892-910).
cgtgatgtggtgcatacat

SEQ ID NO: 337267 - DNA, 19 bp, Homo sapiens
  siRNA target sequence for XPOT (NM_007235.3,922-940).
cgtaggaatactctcataa

SEQ ID NO: 337268 - DNA, 19 bp, Homo sapiens
  siRNA target sequence for XPOT (NM_007235.3,927-945).
gaatactctcataaaagat

SEQ ID NO: 337269 - DNA, 19 bp, Homo sapiens
  siRNA target sequence for XPOT (NM_007235.3,976-994).
gtggaatcatggtaccaaa

SEQ ID NO: 337270 - DNA, 19 bp, Homo sapiens
  siRNA target sequence for XPOT (NM_007235.3,979-997).
gaatcatggtaccaaatat

SEQ ID NO: 337271 - DNA, 19 bp, Homo sapiens
  siRNA target sequence for XPOT (NM_007235.3,1032-1050).
gtgtcagtgccttgaagta

SEQ ID NO: 337272 - DNA, 19 bp, Homo sapiens
  siRNA target sequence for XPOT (NM_007235.3,1063-1081).
gtctcttggatagacttat

SEQ ID NO: 337273 - DNA, 19 bp, Homo sapiens
  siRNA target sequence for XPOT (NM_007235.3,1071-1089).
gatagacttatcccttata

SEQ ID NO: 337274 - DNA, 19 bp, Homo sapiens
  siRNA target sequence for XPOT (NM_007235.3,1121-1139).
gtcatatgtcaatagaagt

SEQ ID NO: 337275 - DNA, 19 bp, Homo sapiens
  siRNA target sequence for XPOT (NM_007235.3,1157-1175).
gtgactgtttatttgaagt

SEQ ID NO: 337276 - DNA, 19 bp, Homo sapiens
  siRNA target sequence for XPOT (NM_007235.3,1187-1205).
gaatggaccctgttgataa

SEQ ID NO: 337277 - DNA, 19 bp, Homo sapiens
  siRNA target sequence for XPOT (NM_007235.3,1301-1319).
ctaagttggtaaatggaat

SEQ ID NO: 337278 - DNA, 19 bp, Homo sapiens
  siRNA target sequence for XPOT (NM_007235.3,1332-1350).
gatagttagttggagtaaa

SEQ ID NO: 337279 - DNA, 19 bp, Homo sapiens
  siRNA target sequence for XPOT (NM_007235.3,1336-1354).
gttagttggagtaaattaa

SEQ ID NO: 337280 - DNA, 19 bp, Homo sapiens
  siRNA target sequence for XPOT (NM_007235.3,1390-1408).
ctacaagctattgaaacaa

SEQ ID NO: 337281 - DNA, 19 bp, Homo sapiens
  siRNA target sequence for XPOT (NM_007235.3,1417-1435).
ctgatgttgcagctactaa

SEQ ID NO: 337282 - DNA, 19 bp, Homo sapiens
  siRNA target sequence for XPOT (NM_007235.3,1472-1490).
gattttgttacgattatct

SEQ ID NO: 337283 - DNA, 19 bp, Homo sapiens
  siRNA target sequence for XPOT (NM_007235.3,1478-1496).
gttacgattatcttcatat

SEQ ID NO: 337284 - DNA, 19 bp, Homo sapiens
  siRNA target sequence for XPOT (NM_007235.3,1535-1553).
ctaatgtagaggcaatcat

SEQ ID NO: 337285 - DNA, 19 bp, Homo sapiens
  siRNA target sequence for XPOT (NM_007235.3,1551-1569).
catgttggccgttatgaaa

SEQ ID NO: 337286 - DNA, 19 bp, Homo sapiens
  siRNA target sequence for XPOT (NM_007235.3,1554-1572).
gttggccgttatgaaaaaa

SEQ ID NO: 337287 - DNA, 19 bp, Homo sapiens
  siRNA target sequence for XPOT (NM_007235.3,1558-1576).
gccgttatgaaaaaattga

SEQ ID NO: 337288 - DNA, 19 bp, Homo sapiens
  siRNA target sequence for XPOT (NM_007235.3,1575-1593).
gacttacgatgaagaatat

SEQ ID NO: 337289 - DNA, 19 bp, Homo sapiens
  siRNA target sequence for XPOT (NM_007235.3,1577-1595).
cttacgatgaagaatataa

SEQ ID NO: 337290 - DNA, 19 bp, Homo sapiens
  siRNA target sequence for XPOT (NM_007235.3,1581-1599).
cgatgaagaatataacttt

SEQ ID NO: 337291 - DNA, 19 bp, Homo sapiens
  siRNA target sequence for XPOT (NM_007235.3,1699-1717).
gcctctgttcgcagagttt

SEQ ID NO: 337292 - DNA, 19 bp, Homo sapiens
  siRNA target sequence for XPOT (NM_007235.3,1701-1719).
ctctgttcgcagagttttt

SEQ ID NO: 337293 - DNA, 19 bp, Homo sapiens
  siRNA target sequence for XPOT (NM_007235.3,1710-1728).
cagagtttttagttctaca

SEQ ID NO: 337294 - DNA, 19 bp, Homo sapiens
  siRNA target sequence for XPOT (NM_007235.3,1739-1757).
ggcagactacacggtttat

SEQ ID NO: 337295 - DNA, 19 bp, Homo sapiens
  siRNA target sequence for XPOT (NM_007235.3,1751-1769).
ggtttatggaagttgaagt

SEQ ID NO: 337296 - DNA, 19 bp, Homo sapiens
  siRNA target sequence for XPOT (NM_007235.3,1827-1845).
cttctcaggtgatgtttca

SEQ ID NO: 337297 - DNA, 19 bp, Homo sapiens
  siRNA target sequence for XPOT (NM_007235.3,1830-1848).
ctcaggtgatgtttcaaaa

SEQ ID NO: 337298 - DNA, 19 bp, Homo sapiens
  siRNA target sequence for XPOT (NM_007235.3,1834-1852).
ggtgatgtttcaaaagcta

SEQ ID NO: 337299 - DNA, 19 bp, Homo sapiens
  siRNA target sequence for XPOT (NM_007235.3,1850-1868).
ctagtgctttgcaggatat

SEQ ID NO: 337300 - DNA, 19 bp, Homo sapiens
  siRNA target sequence for XPOT (NM_007235.3,1872-1890).
gcgaactctggtaacatca

SEQ ID NO: 337301 - DNA, 19 bp, Homo sapiens
  siRNA target sequence for XPOT (NM_007235.3,1932-1950).
cttcgaaactgttgttaga

SEQ ID NO: 337302 - DNA, 19 bp, Homo sapiens
  siRNA target sequence for XPOT (NM_007235.3,1935-1953).
cgaaactgttgttagatat

SEQ ID NO: 337303 - DNA, 19 bp, Homo sapiens
  siRNA target sequence for XPOT (NM_007235.3,1945-1963).
gttagatatgaaaagtttt

SEQ ID NO: 337304 - DNA, 19 bp, Homo sapiens
  siRNA target sequence for XPOT (NM_007235.3,1972-1990).
gaacctcagcacattccat

SEQ ID NO: 337305 - DNA, 19 bp, Homo sapiens
  siRNA target sequence for XPOT (NM_007235.3,1980-1998).
gcacattccatgtgtacta

SEQ ID NO: 337306 - DNA, 19 bp, Homo sapiens
  siRNA target sequence for XPOT (NM_007235.3,2072-2090).
ctagatttgtcaaatctct

SEQ ID NO: 337307 - DNA, 19 bp, Homo sapiens
  siRNA target sequence for XPOT (NM_007235.3,2118-2136).
ggatattttgaatagaata

SEQ ID NO: 337308 - DNA, 19 bp, Homo sapiens
  siRNA target sequence for XPOT (NM_007235.3,2187-2205).
gagcagcgatgatcaactt

SEQ ID NO: 337309 - DNA, 19 bp, Homo sapiens
  siRNA target sequence for XPOT (NM_007235.3,2189-2207).
gcagcgatgatcaactttt

SEQ ID NO: 337310 - DNA, 19 bp, Homo sapiens
  siRNA target sequence for XPOT (NM_007235.3,2221-2239).
gctggagtgctgattgtta

SEQ ID NO: 337311 - DNA, 19 bp, Homo sapiens
  siRNA target sequence for XPOT (NM_007235.3,2229-2247).
gctgattgttaatagtgaa

SEQ ID NO: 337312 - DNA, 19 bp, Homo sapiens
  siRNA target sequence for XPOT (NM_007235.3,2269-2287).
gccttaatgaggaatctgt

SEQ ID NO: 337313 - DNA, 19 bp, Homo sapiens
  siRNA target sequence for XPOT (NM_007235.3,2291-2309).
ctccactaatggagaagtt

SEQ ID NO: 337314 - DNA, 19 bp, Homo sapiens
  siRNA target sequence for XPOT (NM_007235.3,2293-2311).
ccactaatggagaagttta

SEQ ID NO: 337315 - DNA, 19 bp, Homo sapiens
  siRNA target sequence for XPOT (NM_007235.3,3253-3271).
cagcctgatgctaaagttt

SEQ ID NO: 337316 - DNA, 19 bp, Homo sapiens
  siRNA target sequence for XPOT (NM_007235.3,3256-3274).
cctgatgctaaagttttta

SEQ ID NO: 337317 - DNA, 19 bp, Homo sapiens
  siRNA target sequence for XPOT (NM_007235.3,3257-3275).
ctgatgctaaagtttttaa

SEQ ID NO: 337318 - DNA, 19 bp, Homo sapiens
  siRNA target sequence for KLF8 (NM_007250.2,444-462).
cgatatggataaactcata

SEQ ID NO: 337319 - DNA, 19 bp, Homo sapiens
  siRNA target sequence for KLF8 (NM_007250.2,468-486).
cttggaggtccaacttaat

SEQ ID NO: 337320 - DNA, 19 bp, Homo sapiens
  siRNA target sequence for KLF8 (NM_007250.2,474-492).
ggtccaacttaattcagaa

SEQ ID NO: 337321 - DNA, 19 bp, Homo sapiens
  siRNA target sequence for KLF8 (NM_007250.2,494-512).
gtggctcaatgcaggtatt

SEQ ID NO: 337322 - DNA, 19 bp, Homo sapiens
  siRNA target sequence for KLF8 (NM_007250.2,496-514).
ggctcaatgcaggtattca

SEQ ID NO: 337323 - DNA, 19 bp, Homo sapiens
  siRNA target sequence for KLF8 (NM_007250.2,497-515).
gctcaatgcaggtattcaa

SEQ ID NO: 337324 - DNA, 19 bp, Homo sapiens
  siRNA target sequence for KLF8 (NM_007250.2,540-558).
cagagatccccctgagata

SEQ ID NO: 337325 - DNA, 19 bp, Homo sapiens
  siRNA target sequence for KLF8 (NM_007250.2,547-565).
ccccctgagatagaataca

SEQ ID NO: 337326 - DNA, 19 bp, Homo sapiens
  siRNA target sequence for KLF8 (NM_007250.2,617-635).
cagcactgtttaatgacat

SEQ ID NO: 337327 - DNA, 19 bp, Homo sapiens
  siRNA target sequence for KLF8 (NM_007250.2,655-673).
gaacttttggctagtgatt

SEQ ID NO: 337328 - DNA, 19 bp, Homo sapiens
  siRNA target sequence for KLF8 (NM_007250.2,744-762).
catgctacaagctccaata

SEQ ID NO: 337329 - DNA, 19 bp, Homo sapiens
  siRNA target sequence for KLF8 (NM_007250.2,747-765).
gctacaagctccaatacgt

SEQ ID NO: 337330 - DNA, 19 bp, Homo sapiens
  siRNA target sequence for KLF8 (NM_007250.2,799-817).
gtggtgtccacgtcaacat

SEQ ID NO: 337331 - DNA, 19 bp, Homo sapiens
  siRNA target sequence for KLF8 (NM_007250.2,896-914).
gccagcagatcttacatgt

SEQ ID NO: 337332 - DNA, 19 bp, Homo sapiens
  siRNA target sequence for KLF8 (NM_007250.2,991-1009).
ctgcccatggtgtatacta

SEQ ID NO: 337333 - DNA, 19 bp, Homo sapiens
  siRNA target sequence for KLF8 (NM_007250.2,994-1012).
cccatggtgtatactactt

SEQ ID NO: 337334 - DNA, 19 bp, Homo sapiens
  siRNA target sequence for KLF8 (NM_007250.2,1038-1056).
cattacagtcccactcatt

SEQ ID NO: 337335 - DNA, 19 bp, Homo sapiens
  siRNA target sequence for KLF8 (NM_007250.2,1133-1151).
gtgaggagagtacaattga

SEQ ID NO: 337336 - DNA, 19 bp, Homo sapiens
  siRNA target sequence for KLF8 (NM_007250.2,1135-1153).
gaggagagtacaattgaga

SEQ ID NO: 337337 - DNA, 19 bp, Homo sapiens
  siRNA target sequence for KLF8 (NM_007250.2,1228-1246).
gagtcgcttgacttgaaga

SEQ ID NO: 337338 - DNA, 19 bp, Homo sapiens
  siRNA target sequence for KLF8 (NM_007250.2,1250-1268).
gacggattcaccaatgtga

SEQ ID NO: 337339 - DNA, 19 bp, Homo sapiens
  siRNA target sequence for KLF8 (NM_007250.2,1254-1272).
gattcaccaatgtgacttt

SEQ ID NO: 337340 - DNA, 19 bp, Homo sapiens
  siRNA target sequence for KLF8 (NM_007250.2,1450-1468).
gactgcaaccgcagctttt

SEQ ID NO: 337341 - DNA, 19 bp, Homo sapiens
  siRNA target sequence for KLF8 (NM_007250.2,1452-1470).
ctgcaaccgcagcttttct

SEQ ID NO: 337342 - DNA, 19 bp, Homo sapiens
  siRNA target sequence for PNMA2 (NM_007257.3,196-214).
gaggactggtgcaggataa

SEQ ID NO: 337343 - DNA, 19 bp, Homo sapiens
  siRNA target sequence for PNMA2 (NM_007257.3,288-306).
ggtccttcaggagacttta

SEQ ID NO: 337344 - DNA, 19 bp, Homo sapiens
  siRNA target sequence for PNMA2 (NM_007257.3,311-329).
ctctgggcaggtatagact

SEQ ID NO: 337345 - DNA, 19 bp, Homo sapiens
  siRNA target sequence for PNMA2 (NM_007257.3,326-344).
gactgcttggcaagatatt

SEQ ID NO: 337346 - DNA, 19 bp, Homo sapiens
  siRNA target sequence for PNMA2 (NM_007257.3,439-457).
gtctggaaggtgatcttta

SEQ ID NO: 337347 - DNA, 19 bp, Homo sapiens
  siRNA target sequence for PNMA2 (NM_007257.3,581-599).
cctgcatctcaccagaatt

SEQ ID NO: 337348 - DNA, 19 bp, Homo sapiens
  siRNA target sequence for PNMA2 (NM_007257.3,584-602).
gcatctcaccagaattact

SEQ ID NO: 337349 - DNA, 19 bp, Homo sapiens
  siRNA target sequence for PNMA2 (NM_007257.3,595-613).
gaattactggcccatttgt

SEQ ID NO: 337350 - DNA, 19 bp, Homo sapiens
  siRNA target sequence for PNMA2 (NM_007257.3,643-661).
cccctgctacccatgagat

SEQ ID NO: 337351 - DNA, 19 bp, Homo sapiens
  siRNA target sequence for PNMA2 (NM_007257.3,644-662).
ccctgctacccatgagata

SEQ ID NO: 337352 - DNA, 19 bp, Homo sapiens
  siRNA target sequence for PNMA2 (NM_007257.3,664-682).
cggaaactgcgagtattct

SEQ ID NO: 337353 - DNA, 19 bp, Homo sapiens
  siRNA target sequence for PNMA2 (NM_007257.3,666-684).
gaaactgcgagtattctca

SEQ ID NO: 337354 - DNA, 19 bp, Homo sapiens
  siRNA target sequence for PNMA2 (NM_007257.3,738-756).
ggccacggagatagtcaaa

SEQ ID NO: 337355 - DNA, 19 bp, Homo sapiens
  siRNA target sequence for PNMA2 (NM_007257.3,925-943).
gcccaggtgaggtatctga

SEQ ID NO: 337356 - DNA, 19 bp, Homo sapiens
  siRNA target sequence for PNMA2 (NM_007257.3,1076-1094).
ctggggccactcttaacca

SEQ ID NO: 337357 - DNA, 19 bp, Homo sapiens
  siRNA target sequence for PNMA2 (NM_007257.3,1145-1163).
gcttccttgagctaatgaa

SEQ ID NO: 337358 - DNA, 19 bp, Homo sapiens
  siRNA target sequence for PNMA2 (NM_007257.3,1150-1168).
cttgagctaatgaaggtaa

SEQ ID NO: 337359 - DNA, 19 bp, Homo sapiens
  siRNA target sequence for CMRF-35H (NM_007261.1,492-510).
gccaagacctcaacaatca

SEQ ID NO: 337360 - DNA, 19 bp, Homo sapiens
  siRNA target sequence for CMRF-35H (NM_007261.1,675-693).
gcctggaggatgtttcaga

SEQ ID NO: 337361 - DNA, 19 bp, Homo sapiens
  siRNA target sequence for CMRF-35H (NM_007261.1,888-906).
gcctcggtggtgtttgatt

SEQ ID NO: 337362 - DNA, 19 bp, Homo sapiens
  siRNA target sequence for CMRF-35H (NM_007261.1,890-908).
ctcggtggtgtttgattct

SEQ ID NO: 337363 - DNA, 19 bp, Homo sapiens
  siRNA target sequence for CMRF-35H (NM_007261.1,892-910).
cggtggtgtttgattctaa

SEQ ID NO: 337364 - DNA, 19 bp, Homo sapiens
  siRNA target sequence for CMRF-35H (NM_007261.1,894-912).
gtggtgtttgattctaaca

SEQ ID NO: 337365 - DNA, 19 bp, Homo sapiens
  siRNA target sequence for CMRF-35H (NM_007261.1,948-966).
gaaccagattcagattaca

SEQ ID NO: 337366 - DNA, 19 bp, Homo sapiens
  siRNA target sequence for Z39IG (NM_007268.1,81-99).
cctaacagtggacacttat

SEQ ID NO: 337367 - DNA, 19 bp, Homo sapiens
  siRNA target sequence for Z39IG (NM_007268.1,418-436).
gtcgtgagagataagatta

SEQ ID NO: 337368 - DNA, 19 bp, Homo sapiens
  siRNA target sequence for Z39IG (NM_007268.1,556-574).
cctcccatcagttatattt

SEQ ID NO: 337369 - DNA, 19 bp, Homo sapiens
  siRNA target sequence for Z39IG (NM_007268.1,559-577).
cccatcagttatatttggt

SEQ ID NO: 337370 - DNA, 19 bp, Homo sapiens
  siRNA target sequence for Z39IG (NM_007268.1,575-593).
ggtataagcaacagactaa

SEQ ID NO: 337371 - DNA, 19 bp, Homo sapiens
  siRNA target sequence for Z39IG (NM_007268.1,576-594).
gtataagcaacagactaat

SEQ ID NO: 337372 - DNA, 19 bp, Homo sapiens
  siRNA target sequence for Z39IG (NM_007268.1,620-638).
ccctaagtaccttactctt

SEQ ID NO: 337373 - DNA, 19 bp, Homo sapiens
  siRNA target sequence for Z39IG (NM_007268.1,655-673).
gccgactcaggctcctatt

SEQ ID NO: 337374 - DNA, 19 bp, Homo sapiens
  siRNA target sequence for Z39IG (NM_007268.1,656-674).
ccgactcaggctcctattt

SEQ ID NO: 337375 - DNA, 19 bp, Homo sapiens
  siRNA target sequence for Z39IG (NM_007268.1,706-724).
cagcacagcgacattgtga

SEQ ID NO: 337376 - DNA, 19 bp, Homo sapiens
  siRNA target sequence for Z39IG (NM_007268.1,735-753).
caaagactcctcaaagcta

SEQ ID NO: 337377 - DNA, 19 bp, Homo sapiens
  siRNA target sequence for Z39IG (NM_007268.1,772-790).
gcacctacaaccatgacat

SEQ ID NO: 337378 - DNA, 19 bp, Homo sapiens
  siRNA target sequence for Z39IG (NM_007268.1,929-947).
gtatggtggtttttaccat

SEQ ID NO: 337379 - DNA, 19 bp, Homo sapiens
  siRNA target sequence for Z39IG (NM_007268.1,968-986).
ggaagacatcccaacaaga

SEQ ID NO: 337380 - DNA, 19 bp, Homo sapiens
  siRNA target sequence for Z39IG (NM_007268.1,977-995).
cccaacaagagcatgtcta

SEQ ID NO: 337381 - DNA, 19 bp, Homo sapiens
  siRNA target sequence for Z39IG (NM_007268.1,1191-1209).
cacagttcctctggattat

SEQ ID NO: 337382 - DNA, 19 bp, Homo sapiens
  siRNA target sequence for Z39IG (NM_007268.1,1193-1211).
cagttcctctggattatga

SEQ ID NO: 337383 - DNA, 19 bp, Homo sapiens
  siRNA target sequence for Z39IG (NM_007268.1,1220-1238).
ccactgagggcaaaagtgt

SEQ ID NO: 337384 - DNA, 19 bp, Homo sapiens
  siRNA target sequence for PTK9L (NM_007284.3,410-428).
gcctggtcgcctgataact

SEQ ID NO: 337385 - DNA, 19 bp, Homo sapiens
  siRNA target sequence for PTK9L (NM_007284.3,429-447).
cccccgtgcggctgaagat

SEQ ID NO: 337386 - DNA, 19 bp, Homo sapiens
  siRNA target sequence for PTK9L (NM_007284.3,769-787).
cctagagcgggaaaccatt

SEQ ID NO: 337387 - DNA, 19 bp, Homo sapiens
  siRNA target sequence for SYNPO (NM_007286.3,578-596).
ggtaccactggtggtttat

SEQ ID NO: 337388 - DNA, 19 bp, Homo sapiens
  siRNA target sequence for SYNPO (NM_007286.3,582-600).
ccactggtggtttatctaa

SEQ ID NO: 337389 - DNA, 19 bp, Homo sapiens
  siRNA target sequence for SYNPO (NM_007286.3,583-601).
cactggtggtttatctaaa

SEQ ID NO: 337390 - DNA, 19 bp, Homo sapiens
  siRNA target sequence for SYNPO (NM_007286.3,705-723).
gctgcagatgtcaaccaaa

SEQ ID NO: 337391 - DNA, 19 bp, Homo sapiens
  siRNA target sequence for SYNPO (NM_007286.3,706-724).
ctgcagatgtcaaccaaaa

SEQ ID NO: 337392 - DNA, 19 bp, Homo sapiens
  siRNA target sequence for SYNPO (NM_007286.3,781-799).
cgccagccaccgatgtcaa

SEQ ID NO: 337393 - DNA, 19 bp, Homo sapiens
  siRNA target sequence for SYNPO (NM_007286.3,782-800).
gccagccaccgatgtcaat

SEQ ID NO: 337394 - DNA, 19 bp, Homo sapiens
  siRNA target sequence for SYNPO (NM_007286.3,784-802).
cagccaccgatgtcaatca

SEQ ID NO: 337395 - DNA, 19 bp, Homo sapiens
  siRNA target sequence for SYNPO (NM_007286.3,786-804).
gccaccgatgtcaatcaga

SEQ ID NO: 337396 - DNA, 19 bp, Homo sapiens
  siRNA target sequence for SYNPO (NM_007286.3,803-821).
gaacccaccggcaactgtt

SEQ ID NO: 337397 - DNA, 19 bp, Homo sapiens
  siRNA target sequence for SYNPO (NM_007286.3,961-979).
gatgcagcacactcctaat

SEQ ID NO: 337398 - DNA, 19 bp, Homo sapiens
  siRNA target sequence for SYNPO (NM_007286.3,967-985).
gcacactcctaattgacaa

SEQ ID NO: 337399 - DNA, 19 bp, Homo sapiens
  siRNA target sequence for SYNPO (NM_007286.3,972-990).
ctcctaattgacaaggtat

SEQ ID NO: 337400 - DNA, 19 bp, Homo sapiens
  siRNA target sequence for SYNPO (NM_007286.3,975-993).
ctaattgacaaggtatcaa

SEQ ID NO: 337401 - DNA, 19 bp, Homo sapiens
  siRNA target sequence for SYNPO (NM_007286.3,1286-1304).
gctagagagacgacatttt

SEQ ID NO: 337402 - DNA, 19 bp, Homo sapiens
  siRNA target sequence for SYNPO (NM_007286.3,1437-1455).
cgccccttggggaacttca

SEQ ID NO: 337403 - DNA, 19 bp, Homo sapiens
  siRNA target sequence for SYNPO (NM_007286.3,1550-1568).
cgaccccaagtcttctcat

SEQ ID NO: 337404 - DNA, 19 bp, Homo sapiens
  siRNA target sequence for SYNPO (NM_007286.3,1637-1655).
ccgcaaatccatgtttact

SEQ ID NO: 337405 - DNA, 19 bp, Homo sapiens
  siRNA target sequence for SYNPO (NM_007286.3,1638-1656).
cgcaaatccatgtttactt

SEQ ID NO: 337406 - DNA, 19 bp, Homo sapiens
  siRNA target sequence for SYNPO (NM_007286.3,1975-1993).
cacggatggagaaatatgt

SEQ ID NO: 337407 - DNA, 19 bp, Homo sapiens
  siRNA target sequence for SYNPO (NM_007286.3,2773-2791).
cgcttctggcgcgaaacat

SEQ ID NO: 337408 - DNA, 19 bp, Homo sapiens
  siRNA target sequence for SYNPO (NM_007286.3,2775-2793).
cttctggcgcgaaacatca

SEQ ID NO: 337409 - DNA, 19 bp, Homo sapiens
  siRNA target sequence for SYNPO (NM_007286.3,2778-2796).
ctggcgcgaaacatcatca

SEQ ID NO: 337410 - DNA, 19 bp, Homo sapiens
  siRNA target sequence for SYNPO (NM_007286.3,2780-2798).
ggcgcgaaacatcatcaat

SEQ ID NO: 337411 - DNA, 19 bp, Homo sapiens
  siRNA target sequence for SYNPO (NM_007286.3,3127-3145).
gcatcctgggctacaatat

SEQ ID NO: 337412 - DNA, 19 bp, Homo sapiens
  siRNA target sequence for SYNPO (NM_007286.3,3131-3149).
cctgggctacaatatctgt

SEQ ID NO: 337413 - DNA, 19 bp, Homo sapiens
  siRNA target sequence for TTF1 (NM_007344.2,130-148).
ggaaagacctcagaaacat

SEQ ID NO: 337414 - DNA, 19 bp, Homo sapiens
  siRNA target sequence for TTF1 (NM_007344.2,142-160).
gaaacattcccacgaaatt

SEQ ID NO: 337415 - DNA, 19 bp, Homo sapiens
  siRNA target sequence for TTF1 (NM_007344.2,146-164).
cattcccacgaaattttca

SEQ ID NO: 337416 - DNA, 19 bp, Homo sapiens
  siRNA target sequence for TTF1 (NM_007344.2,171-189).
cctccctggtgaatgaaca

SEQ ID NO: 337417 - DNA, 19 bp, Homo sapiens
  siRNA target sequence for TTF1 (NM_007344.2,185-203).
gaacagtctcaaataacta

SEQ ID NO: 337418 - DNA, 19 bp, Homo sapiens
  siRNA target sequence for TTF1 (NM_007344.2,656-674).
ggtccagggggtgaaatta

SEQ ID NO: 337419 - DNA, 19 bp, Homo sapiens
  siRNA target sequence for TTF1 (NM_007344.2,727-745).
gtccagtaaccgggaatat

SEQ ID NO: 337420 - DNA, 19 bp, Homo sapiens
  siRNA target sequence for TTF1 (NM_007344.2,729-747).
ccagtaaccgggaatatga

SEQ ID NO: 337421 - DNA, 19 bp, Homo sapiens
  siRNA target sequence for TTF1 (NM_007344.2,851-869).
ctaggacctactcacaaaa

SEQ ID NO: 337422 - DNA, 19 bp, Homo sapiens
  siRNA target sequence for TTF1 (NM_007344.2,1228-1246).
gaagcttacgtctgtcaaa

SEQ ID NO: 337423 - DNA, 19 bp, Homo sapiens
  siRNA target sequence for TTF1 (NM_007344.2,1253-1271).
cgagtgtctggtgatgatt

SEQ ID NO: 337424 - DNA, 19 bp, Homo sapiens
  siRNA target sequence for TTF1 (NM_007344.2,1299-1317).
gcacactctttgattcagt

SEQ ID NO: 337425 - DNA, 19 bp, Homo sapiens
  siRNA target sequence for TTF1 (NM_007344.2,1405-1423).
gcaagaggcgccaaggtta

SEQ ID NO: 337426 - DNA, 19 bp, Homo sapiens
  siRNA target sequence for TTF1 (NM_007344.2,1420-1438).
gttagaacctgcaaatgaa

SEQ ID NO: 337427 - DNA, 19 bp, Homo sapiens
  siRNA target sequence for TTF1 (NM_007344.2,1457-1475).
gctgaagattccgaaataa

SEQ ID NO: 337428 - DNA, 19 bp, Homo sapiens
  siRNA target sequence for TTF1 (NM_007344.2,1463-1481).
gattccgaaataagatact

SEQ ID NO: 337429 - DNA, 19 bp, Homo sapiens
  siRNA target sequence for TTF1 (NM_007344.2,1612-1630).
cttggaacggtttaaggaa

SEQ ID NO: 337430 - DNA, 19 bp, Homo sapiens
  siRNA target sequence for TTF1 (NM_007344.2,1616-1634).
gaacggtttaaggaattta

SEQ ID NO: 337431 - DNA, 19 bp, Homo sapiens
  siRNA target sequence for TTF1 (NM_007344.2,1637-1655).
gcacaaggtgtcgctatta

SEQ ID NO: 337432 - DNA, 19 bp, Homo sapiens
  siRNA target sequence for TTF1 (NM_007344.2,1638-1656).
cacaaggtgtcgctattaa

SEQ ID NO: 337433 - DNA, 19 bp, Homo sapiens
  siRNA target sequence for TTF1 (NM_007344.2,1640-1658).
caaggtgtcgctattaaat

SEQ ID NO: 337434 - DNA, 19 bp, Homo sapiens
  siRNA target sequence for TTF1 (NM_007344.2,1750-1768).
gctgtacacggacagatat

SEQ ID NO: 337435 - DNA, 19 bp, Homo sapiens
  siRNA target sequence for TTF1 (NM_007344.2,1782-1800).
ctgtgatcaccaacttaaa

SEQ ID NO: 337436 - DNA, 19 bp, Homo sapiens
  siRNA target sequence for TTF1 (NM_007344.2,1804-1822).
gagatactcgtttagatta

SEQ ID NO: 337437 - DNA, 19 bp, Homo sapiens
  siRNA target sequence for TTF1 (NM_007344.2,1806-1824).
gatactcgtttagattaca

SEQ ID NO: 337438 - DNA, 19 bp, Homo sapiens
  siRNA target sequence for TTF1 (NM_007344.2,1810-1828).
ctcgtttagattacacatt

SEQ ID NO: 337439 - DNA, 19 bp, Homo sapiens
  siRNA target sequence for TTF1 (NM_007344.2,1879-1897).
gatgttcgatgtcaacaat

SEQ ID NO: 337440 - DNA, 19 bp, Homo sapiens
  siRNA target sequence for TTF1 (NM_007344.2,1909-1927).
gtatagcgaaggagatact

SEQ ID NO: 337441 - DNA, 19 bp, Homo sapiens
  siRNA target sequence for TTF1 (NM_007344.2,2032-2050).
cagcagtcaaagaaatcgt

SEQ ID NO: 337442 - DNA, 19 bp, Homo sapiens
  siRNA target sequence for TTF1 (NM_007344.2,2048-2066).
cgtggtgcttggagtaagt

SEQ ID NO: 337443 - DNA, 19 bp, Homo sapiens
  siRNA target sequence for TTF1 (NM_007344.2,2054-2072).
gcttggagtaagtctgaaa

SEQ ID NO: 337444 - DNA, 19 bp, Homo sapiens
  siRNA target sequence for TTF1 (NM_007344.2,2065-2083).
gtctgaaacccggaaacta

SEQ ID NO: 337445 - DNA, 19 bp, Homo sapiens
  siRNA target sequence for TTF1 (NM_007344.2,2067-2085).
ctgaaacccggaaactaat

SEQ ID NO: 337446 - DNA, 19 bp, Homo sapiens
  siRNA target sequence for TTF1 (NM_007344.2,2089-2107).
ggctgtcgaagaagtgatt

SEQ ID NO: 337447 - DNA, 19 bp, Homo sapiens
  siRNA target sequence for TTF1 (NM_007344.2,2093-2111).
gtcgaagaagtgattctga

SEQ ID NO: 337448 - DNA, 19 bp, Homo sapiens
  siRNA target sequence for TTF1 (NM_007344.2,2181-2199).
caattgttcgggaaaaact

SEQ ID NO: 337449 - DNA, 19 bp, Homo sapiens
  siRNA target sequence for TTF1 (NM_007344.2,2198-2216).
ctctacaagggcatatctt

SEQ ID NO: 337450 - DNA, 19 bp, Homo sapiens
  siRNA target sequence for TTF1 (NM_007344.2,2208-2226).
gcatatcttgggtagaagt

SEQ ID NO: 337451 - DNA, 19 bp, Homo sapiens
  siRNA target sequence for TTF1 (NM_007344.2,2209-2227).
catatcttgggtagaagta

SEQ ID NO: 337452 - DNA, 19 bp, Homo sapiens
  siRNA target sequence for TTF1 (NM_007344.2,2274-2292).
ggacagaaattctaaccaa

SEQ ID NO: 337453 - DNA, 19 bp, Homo sapiens
  siRNA target sequence for TTF1 (NM_007344.2,2285-2303).
ctaaccaagaggatgacta

SEQ ID NO: 337454 - DNA, 19 bp, Homo sapiens
  siRNA target sequence for TTF1 (NM_007344.2,2290-2308).
caagaggatgactaatggt

SEQ ID NO: 337455 - DNA, 19 bp, Homo sapiens
  siRNA target sequence for TTF1 (NM_007344.2,2301-2319).
ctaatggtcggcgtatcta

SEQ ID NO: 337456 - DNA, 19 bp, Homo sapiens
  siRNA target sequence for TTF1 (NM_007344.2,2353-2371).
ccttattgaaaggttgtat

SEQ ID NO: 337457 - DNA, 19 bp, Homo sapiens
  siRNA target sequence for TTF1 (NM_007344.2,2387-2405).
gatactaatgaaatagact

SEQ ID NO: 337458 - DNA, 19 bp, Homo sapiens
  siRNA target sequence for TTF1 (NM_007344.2,2445-2463).
cttacgttcaaactaaatt

SEQ ID NO: 337459 - DNA, 19 bp, Homo sapiens
  siRNA target sequence for TTF1 (NM_007344.2,2516-2534).
gagatcatcgactaccttt

SEQ ID NO: 337460 - DNA, 19 bp, Homo sapiens
  siRNA target sequence for TTF1 (NM_007344.2,2518-2536).
gatcatcgactacctttat

SEQ ID NO: 337461 - DNA, 19 bp, Homo sapiens
  siRNA target sequence for TTF1 (NM_007344.2,2581-2599).
ggagaaaaaaggcactaaa

SEQ ID NO: 337462 - DNA, 19 bp, Homo sapiens
  siRNA target sequence for TTF1 (NM_007344.2,2612-2630).
gcagcacccaagcaagttt

SEQ ID NO: 337463 - DNA, 19 bp, Homo sapiens
  siRNA target sequence for TTF1 (NM_007344.2,2613-2631).
cagcacccaagcaagtttt

SEQ ID NO: 337464 - DNA, 19 bp, Homo sapiens
  siRNA target sequence for TTF1 (NM_007344.2,2623-2641).
gcaagttttcccatttcga

SEQ ID NO: 337465 - DNA, 19 bp, Homo sapiens
  siRNA target sequence for TTF1 (NM_007344.2,2632-2650).
cccatttcgagacatcttt

SEQ ID NO: 337466 - DNA, 19 bp, Homo sapiens
  siRNA target sequence for TTF1 (NM_007344.2,2633-2651).
ccatttcgagacatctttt

SEQ ID NO: 337467 - DNA, 19 bp, Homo sapiens
  siRNA target sequence for GR6 (NM_007354.1,1181-1199).
cacccactaccatttgaca

SEQ ID NO: 337468 - DNA, 19 bp, Homo sapiens
  siRNA target sequence for C10orf8 (NM_012071.1,132-150).
cggacgaggccgtgttaga

SEQ ID NO: 337469 - DNA, 19 bp, Homo sapiens
  siRNA target sequence for C10orf8 (NM_012071.1,133-151).
ggacgaggccgtgttagat

SEQ ID NO: 337470 - DNA, 19 bp, Homo sapiens
  siRNA target sequence for C10orf8 (NM_012071.1,136-154).
cgaggccgtgttagatcat

SEQ ID NO: 337471 - DNA, 19 bp, Homo sapiens
  siRNA target sequence for C10orf8 (NM_012071.1,201-219).
cagcagctgcaacttacat

SEQ ID NO: 337472 - DNA, 19 bp, Homo sapiens
  siRNA target sequence for C10orf8 (NM_012071.1,204-222).
cagctgcaacttacatact

SEQ ID NO: 337473 - DNA, 19 bp, Homo sapiens
  siRNA target sequence for C10orf8 (NM_012071.1,242-260).
gctgacaagtcaactctaa

SEQ ID NO: 337474 - DNA, 19 bp, Homo sapiens
  siRNA target sequence for C10orf8 (NM_012071.1,250-268).
gtcaactctaagcacttat

SEQ ID NO: 337475 - DNA, 19 bp, Homo sapiens
  siRNA target sequence for C10orf8 (NM_012071.1,255-273).
ctctaagcacttatctaga

SEQ ID NO: 337476 - DNA, 19 bp, Homo sapiens
  siRNA target sequence for C10orf8 (NM_012071.1,293-311).
gagcgaatagaactgtttt

SEQ ID NO: 337477 - DNA, 19 bp, Homo sapiens
  siRNA target sequence for C10orf8 (NM_012071.1,296-314).
cgaatagaactgttttgca

SEQ ID NO: 337478 - DNA, 19 bp, Homo sapiens
  siRNA target sequence for C10orf8 (NM_012071.1,313-331).
cacggaatatcagaataat

SEQ ID NO: 337479 - DNA, 19 bp, Homo sapiens
  siRNA target sequence for C10orf8 (NM_012071.1,366-384).
gcagatctctccctcatat

SEQ ID NO: 337480 - DNA, 19 bp, Homo sapiens
  siRNA target sequence for C10orf8 (NM_012071.1,367-385).
cagatctctccctcatata

SEQ ID NO: 337481 - DNA, 19 bp, Homo sapiens
  siRNA target sequence for C10orf8 (NM_012071.1,392-410).
gtttcttggcgcttggaat

SEQ ID NO: 337482 - DNA, 19 bp, Homo sapiens
  siRNA target sequence for C10orf8 (NM_012071.1,399-417).
ggcgcttggaatatcagat

SEQ ID NO: 337483 - DNA, 19 bp, Homo sapiens
  siRNA target sequence for C10orf8 (NM_012071.1,400-418).
gcgcttggaatatcagata

SEQ ID NO: 337484 - DNA, 19 bp, Homo sapiens
  siRNA target sequence for C10orf8 (NM_012071.1,401-419).
cgcttggaatatcagataa

SEQ ID NO: 337485 - DNA, 19 bp, Homo sapiens
  siRNA target sequence for C10orf8 (NM_012071.1,423-441).
ccaatcaacttcataggat

SEQ ID NO: 337486 - DNA, 19 bp, Homo sapiens
  siRNA target sequence for C10orf8 (NM_012071.1,428-446).
caacttcataggatgtaca

SEQ ID NO: 337487 - DNA, 19 bp, Homo sapiens
  siRNA target sequence for C10orf8 (NM_012071.1,452-470).
gcatatttggtgaccttaa

SEQ ID NO: 337488 - DNA, 19 bp, Homo sapiens
  siRNA target sequence for C10orf8 (NM_012071.1,491-509).
ccatcctatccagagatta

SEQ ID NO: 337489 - DNA, 19 bp, Homo sapiens
  siRNA target sequence for C10orf8 (NM_012071.1,516-534).
gttgcagcatggaacaatt

SEQ ID NO: 337490 - DNA, 19 bp, Homo sapiens
  siRNA target sequence for C10orf8 (NM_012071.1,538-556).
ggacttggtggggaaactt

SEQ ID NO: 337491 - DNA, 19 bp, Homo sapiens
  siRNA target sequence for C10orf8 (NM_012071.1,539-557).
gacttggtggggaaactta

SEQ ID NO: 337492 - DNA, 19 bp, Homo sapiens
  siRNA target sequence for C10orf8 (NM_012071.1,541-559).
cttggtggggaaacttaaa

SEQ ID NO: 337493 - DNA, 19 bp, Homo sapiens
  siRNA target sequence for C10orf8 (NM_012071.1,544-562).
ggtggggaaacttaaagat

SEQ ID NO: 337494 - DNA, 19 bp, Homo sapiens
  siRNA target sequence for BP75 (NM_012107.1,246-264).
gaccctggagttcttatgt

SEQ ID NO: 337495 - DNA, 19 bp, Homo sapiens
  siRNA target sequence for AHSA1 (NM_012111.1,239-257).
cacggataagctgaaaaca

SEQ ID NO: 337496 - DNA, 19 bp, Homo sapiens
  siRNA target sequence for AHSA1 (NM_012111.1,241-259).
cggataagctgaaaacact

SEQ ID NO: 337497 - DNA, 19 bp, Homo sapiens
  siRNA target sequence for AHSA1 (NM_012111.1,305-323).
gacggaagtgagtaagctt

SEQ ID NO: 337498 - DNA, 19 bp, Homo sapiens
  siRNA target sequence for AHSA1 (NM_012111.1,324-342).
gatggagaggcatccatta

SEQ ID NO: 337499 - DNA, 19 bp, Homo sapiens
  siRNA target sequence for AHSA1 (NM_012111.1,328-346).
gagaggcatccattaacaa

SEQ ID NO: 337500 - DNA, 19 bp, Homo sapiens
  siRNA target sequence for AHSA1 (NM_012111.1,375-393).
gaatggagcgtcaaactaa

SEQ ID NO: 337501 - DNA, 19 bp, Homo sapiens
  siRNA target sequence for AHSA1 (NM_012111.1,440-458).
ggagatccccaatttgtct

SEQ ID NO: 337502 - DNA, 19 bp, Homo sapiens
  siRNA target sequence for AHSA1 (NM_012111.1,546-564).
gaaggggtgaaacttctaa

SEQ ID NO: 337503 - DNA, 19 bp, Homo sapiens
  siRNA target sequence for AHSA1 (NM_012111.1,565-583).
gagaagcaatgggaattta

SEQ ID NO: 337504 - DNA, 19 bp, Homo sapiens
  siRNA target sequence for AHSA1 (NM_012111.1,612-630).
cagggcatgatcttaccta

SEQ ID NO: 337505 - DNA, 19 bp, Homo sapiens
  siRNA target sequence for AHSA1 (NM_012111.1,659-677).
ggggcagccagcactgaaa

SEQ ID NO: 337506 - DNA, 19 bp, Homo sapiens
  siRNA target sequence for AHSA1 (NM_012111.1,660-678).
gggcagccagcactgaaaa

SEQ ID NO: 337507 - DNA, 19 bp, Homo sapiens
  siRNA target sequence for AHSA1 (NM_012111.1,735-753).
gtcaaaatccccacttgta

SEQ ID NO: 337508 - DNA, 19 bp, Homo sapiens
  siRNA target sequence for AHSA1 (NM_012111.1,748-766).
cttgtaagatcactcttaa

SEQ ID NO: 337509 - DNA, 19 bp, Homo sapiens
  siRNA target sequence for AHSA1 (NM_012111.1,751-769).
gtaagatcactcttaagga

SEQ ID NO: 337510 - DNA, 19 bp, Homo sapiens
  siRNA target sequence for AHSA1 (NM_012111.1,791-809).
ggagctctatagagtgttt

SEQ ID NO: 337511 - DNA, 19 bp, Homo sapiens
  siRNA target sequence for AHSA1 (NM_012111.1,795-813).
ctctatagagtgtttacca

SEQ ID NO: 337512 - DNA, 19 bp, Homo sapiens
  siRNA target sequence for AHSA1 (NM_012111.1,899-917).
cgtctctggggaatttact

SEQ ID NO: 337513 - DNA, 19 bp, Homo sapiens
  siRNA target sequence for AHSA1 (NM_012111.1,902-920).
ctctggggaatttactgat

SEQ ID NO: 337514 - DNA, 19 bp, Homo sapiens
  siRNA target sequence for AHSA1 (NM_012111.1,923-941).
ggtccctgagaaacatatt

SEQ ID NO: 337515 - DNA, 19 bp, Homo sapiens
  siRNA target sequence for AHSA1 (NM_012111.1,1083-1101).
ggctggcagcggtactact

SEQ ID NO: 337516 - DNA, 19 bp, Homo sapiens
  siRNA target sequence for AHSA1 (NM_012111.1,1084-1102).
gctggcagcggtactactt

SEQ ID NO: 337517 - DNA, 19 bp, Homo sapiens
  siRNA target sequence for AHSA1 (NM_012111.1,1085-1103).
ctggcagcggtactacttt

SEQ ID NO: 337518 - DNA, 19 bp, Homo sapiens
  siRNA target sequence for AHSA1 (NM_012111.1,1087-1105).
ggcagcggtactactttga

SEQ ID NO: 337519 - DNA, 19 bp, Homo sapiens
  siRNA target sequence for AHSA1 (NM_012111.1,1126-1144).
gctatggcgcacgcttatt

SEQ ID NO: 337520 - DNA, 19 bp, Homo sapiens
  siRNA target sequence for AHSA1 (NM_012111.1,1127-1145).
ctatggcgcacgcttattt

SEQ ID NO: 337521 - DNA, 19 bp, Homo sapiens
  siRNA target sequence for CASP8AP2 (NM_012115.2,219-237).
gtgatggaacaagtttatt

SEQ ID NO: 337522 - DNA, 19 bp, Homo sapiens
  siRNA target sequence for CASP8AP2 (NM_012115.2,251-269).
gcttctcctcttaagaaca

SEQ ID NO: 337523 - DNA, 19 bp, Homo sapiens
  siRNA target sequence for CASP8AP2 (NM_012115.2,255-273).
ctcctcttaagaacaatga

SEQ ID NO: 337524 - DNA, 19 bp, Homo sapiens
  siRNA target sequence for CASP8AP2 (NM_012115.2,258-276).
ctcttaagaacaatgatga

SEQ ID NO: 337525 - DNA, 19 bp, Homo sapiens
  siRNA target sequence for CASP8AP2 (NM_012115.2,275-293).
gaaggctcactggacatat

SEQ ID NO: 337526 - DNA, 19 bp, Homo sapiens
  siRNA target sequence for CASP8AP2 (NM_012115.2,398-416).
gcaaaggaggcaacatata

SEQ ID NO: 337527 - DNA, 19 bp, Homo sapiens
  siRNA target sequence for CASP8AP2 (NM_012115.2,408-426).
caacatataatgatttgca

SEQ ID NO: 337528 - DNA, 19 bp, Homo sapiens
  siRNA target sequence for CASP8AP2 (NM_012115.2,504-522).
gcttaataaacgaaaacca

SEQ ID NO: 337529 - DNA, 19 bp, Homo sapiens
  siRNA target sequence for CASP8AP2 (NM_012115.2,558-576).
ctgccagagtggaaataaa

SEQ ID NO: 337530 - DNA, 19 bp, Homo sapiens
  siRNA target sequence for CASP8AP2 (NM_012115.2,597-615).
gtaatcttcaccaaagatt

SEQ ID NO: 337531 - DNA, 19 bp, Homo sapiens
  siRNA target sequence for CASP8AP2 (NM_012115.2,654-672).
caaggacatttgatacagt

SEQ ID NO: 337532 - DNA, 19 bp, Homo sapiens
  siRNA target sequence for CASP8AP2 (NM_012115.2,657-675).
ggacatttgatacagttaa

SEQ ID NO: 337533 - DNA, 19 bp, Homo sapiens
  siRNA target sequence for CASP8AP2 (NM_012115.2,658-676).
gacatttgatacagttaaa

SEQ ID NO: 337534 - DNA, 19 bp, Homo sapiens
  siRNA target sequence for CASP8AP2 (NM_012115.2,693-711).
ctagatctccacatttgga

SEQ ID NO: 337535 - DNA, 19 bp, Homo sapiens
  siRNA target sequence for CASP8AP2 (NM_012115.2,709-727).
ggatgattgttcaaagact

SEQ ID NO: 337536 - DNA, 19 bp, Homo sapiens
  siRNA target sequence for CASP8AP2 (NM_012115.2,724-742).
gactgatcacagagctaaa

SEQ ID NO: 337537 - DNA, 19 bp, Homo sapiens
  siRNA target sequence for CASP8AP2 (NM_012115.2,872-890).
gtttggtcacgttctcatt

SEQ ID NO: 337538 - DNA, 19 bp, Homo sapiens
  siRNA target sequence for CASP8AP2 (NM_012115.2,876-894).
ggtcacgttctcattatca

SEQ ID NO: 337539 - DNA, 19 bp, Homo sapiens
  siRNA target sequence for CASP8AP2 (NM_012115.2,900-918).
gcgagggtagctcaaatga

SEQ ID NO: 337540 - DNA, 19 bp, Homo sapiens
  siRNA target sequence for CASP8AP2 (NM_012115.2,910-928).
ctcaaatgaggatagtaga

SEQ ID NO: 337541 - DNA, 19 bp, Homo sapiens
  siRNA target sequence for CASP8AP2 (NM_012115.2,980-998).
gtacgaaaagacttaagta

SEQ ID NO: 337542 - DNA, 19 bp, Homo sapiens
  siRNA target sequence for CASP8AP2 (NM_012115.2,1010-1028).
gatggtgaaccaaggatat

SEQ ID NO: 337543 - DNA, 19 bp, Homo sapiens
  siRNA target sequence for CASP8AP2 (NM_012115.2,1014-1032).
gtgaaccaaggatattgga

SEQ ID NO: 337544 - DNA, 19 bp, Homo sapiens
  siRNA target sequence for CASP8AP2 (NM_012115.2,1024-1042).
gatattggaggctagtcaa

SEQ ID NO: 337545 - DNA, 19 bp, Homo sapiens
  siRNA target sequence for CASP8AP2 (NM_012115.2,1095-1113).
gcaaaagttcgaagtttaa

SEQ ID NO: 337546 - DNA, 19 bp, Homo sapiens
  siRNA target sequence for CASP8AP2 (NM_012115.2,1096-1114).
caaaagttcgaagtttaaa

SEQ ID NO: 337547 - DNA, 19 bp, Homo sapiens
  siRNA target sequence for CASP8AP2 (NM_012115.2,1139-1157).
ggtgaacgcattaactctt

SEQ ID NO: 337548 - DNA, 19 bp, Homo sapiens
  siRNA target sequence for CASP8AP2 (NM_012115.2,1142-1160).
gaacgcattaactcttctt

SEQ ID NO: 337549 - DNA, 19 bp, Homo sapiens
  siRNA target sequence for CASP8AP2 (NM_012115.2,1232-1250).
caaagtgaaagatcacaaa

SEQ ID NO: 337550 - DNA, 19 bp, Homo sapiens
  siRNA target sequence for CASP8AP2 (NM_012115.2,1459-1477).
gagtgtaaacagtcatagt

SEQ ID NO: 337551 - DNA, 19 bp, Homo sapiens
  siRNA target sequence for CASP8AP2 (NM_012115.2,1461-1479).
gtgtaaacagtcatagttt

SEQ ID NO: 337552 - DNA, 19 bp, Homo sapiens
  siRNA target sequence for CASP8AP2 (NM_012115.2,1566-1584).
gggaaaatacacctttaaa

SEQ ID NO: 337553 - DNA, 19 bp, Homo sapiens
  siRNA target sequence for CASP8AP2 (NM_012115.2,1711-1729).
gaaaaccactactgattta

SEQ ID NO: 337554 - DNA, 19 bp, Homo sapiens
  siRNA target sequence for CASP8AP2 (NM_012115.2,1825-1843).
gagtggtccaaatgaaaca

SEQ ID NO: 337555 - DNA, 19 bp, Homo sapiens
  siRNA target sequence for CASP8AP2 (NM_012115.2,1849-1867).
caaggacctaaaattgagt

SEQ ID NO: 337556 - DNA, 19 bp, Homo sapiens
  siRNA target sequence for CASP8AP2 (NM_012115.2,1853-1871).
gacctaaaattgagtttta

SEQ ID NO: 337557 - DNA, 19 bp, Homo sapiens
  siRNA target sequence for CASP8AP2 (NM_012115.2,1954-1972).
caagtccagtggtgtatgt

SEQ ID NO: 337558 - DNA, 19 bp, Homo sapiens
  siRNA target sequence for CASP8AP2 (NM_012115.2,1960-1978).
cagtggtgtatgtgattca

SEQ ID NO: 337559 - DNA, 19 bp, Homo sapiens
  siRNA target sequence for CASP8AP2 (NM_012115.2,1971-1989).
gtgattcagagtcttcaat

SEQ ID NO: 337560 - DNA, 19 bp, Homo sapiens
  siRNA target sequence for CASP8AP2 (NM_012115.2,1981-1999).
gtcttcaatgcaagttaaa

SEQ ID NO: 337561 - DNA, 19 bp, Homo sapiens
  siRNA target sequence for CASP8AP2 (NM_012115.2,2006-2024).
gcatatgttccctccataa

SEQ ID NO: 337562 - DNA, 19 bp, Homo sapiens
  siRNA target sequence for CASP8AP2 (NM_012115.2,2015-2033).
ccctccataagtgaacata

SEQ ID NO: 337563 - DNA, 19 bp, Homo sapiens
  siRNA target sequence for CASP8AP2 (NM_012115.2,2016-2034).
cctccataagtgaacatat

SEQ ID NO: 337564 - DNA, 19 bp, Homo sapiens
  siRNA target sequence for CASP8AP2 (NM_012115.2,2045-2063).
gcagctgtcagtgaacata

SEQ ID NO: 337565 - DNA, 19 bp, Homo sapiens
  siRNA target sequence for CASP8AP2 (NM_012115.2,2049-2067).
ctgtcagtgaacataccat

SEQ ID NO: 337566 - DNA, 19 bp, Homo sapiens
  siRNA target sequence for CASP8AP2 (NM_012115.2,2076-2094).
ccaagtcaacgttattgga

SEQ ID NO: 337567 - DNA, 19 bp, Homo sapiens
  siRNA target sequence for CASP8AP2 (NM_012115.2,2077-2095).
caagtcaacgttattggaa

SEQ ID NO: 337568 - DNA, 19 bp, Homo sapiens
  siRNA target sequence for CASP8AP2 (NM_012115.2,2086-2104).
gttattggaaccaaaggtt

SEQ ID NO: 337569 - DNA, 19 bp, Homo sapiens
  siRNA target sequence for CASP8AP2 (NM_012115.2,2156-2174).
gaagacgaaaatagtttgt

SEQ ID NO: 337570 - DNA, 19 bp, Homo sapiens
  siRNA target sequence for CASP8AP2 (NM_012115.2,2177-2195).
gttaggtctgttgacaata

SEQ ID NO: 337571 - DNA, 19 bp, Homo sapiens
  siRNA target sequence for CASP8AP2 (NM_012115.2,2181-2199).
ggtctgttgacaatactat

SEQ ID NO: 337572 - DNA, 19 bp, Homo sapiens
  siRNA target sequence for CASP8AP2 (NM_012115.2,2191-2209).
caatactatgcattgtgaa

SEQ ID NO: 337573 - DNA, 19 bp, Homo sapiens
  siRNA target sequence for CASP8AP2 (NM_012115.2,2239-2257).
cccatctcctatggaaata

SEQ ID NO: 337574 - DNA, 19 bp, Homo sapiens
  siRNA target sequence for CASP8AP2 (NM_012115.2,2293-2311).
gaaacaaaccattaataat

SEQ ID NO: 337575 - DNA, 19 bp, Homo sapiens
  siRNA target sequence for CASP8AP2 (NM_012115.2,2332-2350).
ggtaatggatgtattacaa

SEQ ID NO: 337576 - DNA, 19 bp, Homo sapiens
  siRNA target sequence for CASP8AP2 (NM_012115.2,2333-2351).
gtaatggatgtattacaaa

SEQ ID NO: 337577 - DNA, 19 bp, Homo sapiens
  siRNA target sequence for CASP8AP2 (NM_012115.2,2338-2356).
ggatgtattacaaacagat

SEQ ID NO: 337578 - DNA, 19 bp, Homo sapiens
  siRNA target sequence for CASP8AP2 (NM_012115.2,2363-2381).
caaaactttggcttggaat

SEQ ID NO: 337579 - DNA, 19 bp, Homo sapiens
  siRNA target sequence for CASP8AP2 (NM_012115.2,2377-2395).
ggaattggataccaaaaga

SEQ ID NO: 337580 - DNA, 19 bp, Homo sapiens
  siRNA target sequence for CASP8AP2 (NM_012115.2,2518-2536).
gccaataatgctttcagaa

SEQ ID NO: 337581 - DNA, 19 bp, Homo sapiens
  siRNA target sequence for CASP8AP2 (NM_012115.2,2557-2575).
gccttctgttatagttaca

SEQ ID NO: 337582 - DNA, 19 bp, Homo sapiens
  siRNA target sequence for CASP8AP2 (NM_012115.2,2576-2594).
ccactggttgagagtaagt

SEQ ID NO: 337583 - DNA, 19 bp, Homo sapiens
  siRNA target sequence for CASP8AP2 (NM_012115.2,2605-2623).
ggagccttgcttacctaaa

SEQ ID NO: 337584 - DNA, 19 bp, Homo sapiens
  siRNA target sequence for CASP8AP2 (NM_012115.2,2609-2627).
ccttgcttacctaaagaga

SEQ ID NO: 337585 - DNA, 19 bp, Homo sapiens
  siRNA target sequence for CASP8AP2 (NM_012115.2,2688-2706).
caaactcagtatatcatga

SEQ ID NO: 337586 - DNA, 19 bp, Homo sapiens
  siRNA target sequence for CASP8AP2 (NM_012115.2,2692-2710).
ctcagtatatcatgatgat

SEQ ID NO: 337587 - DNA, 19 bp, Homo sapiens
  siRNA target sequence for CASP8AP2 (NM_012115.2,2708-2726).
gatgataactcggttttga

SEQ ID NO: 337588 - DNA, 19 bp, Homo sapiens
  siRNA target sequence for CASP8AP2 (NM_012115.2,2762-2780).
gccatcagtcctctgaata

SEQ ID NO: 337589 - DNA, 19 bp, Homo sapiens
  siRNA target sequence for CASP8AP2 (NM_012115.2,2764-2782).
catcagtcctctgaatagt

SEQ ID NO: 337590 - DNA, 19 bp, Homo sapiens
  siRNA target sequence for CASP8AP2 (NM_012115.2,2788-2806).
gagacctgtagcaaaagtt

SEQ ID NO: 337591 - DNA, 19 bp, Homo sapiens
  siRNA target sequence for CASP8AP2 (NM_012115.2,2837-2855).
gtgtataataacagtcata

SEQ ID NO: 337592 - DNA, 19 bp, Homo sapiens
  siRNA target sequence for CASP8AP2 (NM_012115.2,2879-2897).
gctcattctacctctaaga

SEQ ID NO: 337593 - DNA, 19 bp, Homo sapiens
  siRNA target sequence for CASP8AP2 (NM_012115.2,2896-2914).
gagtcagtctgatctcaat

SEQ ID NO: 337594 - DNA, 19 bp, Homo sapiens
  siRNA target sequence for CASP8AP2 (NM_012115.2,3002-3020).
ggagaaattagaagtgata

SEQ ID NO: 337595 - DNA, 19 bp, Homo sapiens
  siRNA target sequence for CASP8AP2 (NM_012115.2,3015-3033).
gtgatagtgaaacatctaa

SEQ ID NO: 337596 - DNA, 19 bp, Homo sapiens
  siRNA target sequence for CASP8AP2 (NM_012115.2,3077-3095).
gctgatgtgcggaagtcaa

SEQ ID NO: 337597 - DNA, 19 bp, Homo sapiens
  siRNA target sequence for CASP8AP2 (NM_012115.2,3078-3096).
ctgatgtgcggaagtcaaa

SEQ ID NO: 337598 - DNA, 19 bp, Homo sapiens
  siRNA target sequence for CASP8AP2 (NM_012115.2,3080-3098).
gatgtgcggaagtcaaaga

SEQ ID NO: 337599 - DNA, 19 bp, Homo sapiens
  siRNA target sequence for CASP8AP2 (NM_012115.2,3083-3101).
gtgcggaagtcaaagacta

SEQ ID NO: 337600 - DNA, 19 bp, Homo sapiens
  siRNA target sequence for CASP8AP2 (NM_012115.2,3103-3121).
cccacgacgtgggaaaagt

SEQ ID NO: 337601 - DNA, 19 bp, Homo sapiens
  siRNA target sequence for CASP8AP2 (NM_012115.2,3104-3122).
ccacgacgtgggaaaagta

SEQ ID NO: 337602 - DNA, 19 bp, Homo sapiens
  siRNA target sequence for CASP8AP2 (NM_012115.2,3162-3180).
gaatccatcagaccaataa

SEQ ID NO: 337603 - DNA, 19 bp, Homo sapiens
  siRNA target sequence for CASP8AP2 (NM_012115.2,3172-3190).
gaccaataacaaatggaat

SEQ ID NO: 337604 - DNA, 19 bp, Homo sapiens
  siRNA target sequence for CASP8AP2 (NM_012115.2,3200-3218).
gataaatctagcagatctt

SEQ ID NO: 337605 - DNA, 19 bp, Homo sapiens
  siRNA target sequence for CASP8AP2 (NM_012115.2,3291-3309).
cctcttctgaacaagagat

SEQ ID NO: 337606 - DNA, 19 bp, Homo sapiens
  siRNA target sequence for CASP8AP2 (NM_012115.2,3294-3312).
cttctgaacaagagatcat

SEQ ID NO: 337607 - DNA, 19 bp, Homo sapiens
  siRNA target sequence for CASP8AP2 (NM_012115.2,3313-3331).
gcacatgttacgaatgata

SEQ ID NO: 337608 - DNA, 19 bp, Homo sapiens
  siRNA target sequence for CASP8AP2 (NM_012115.2,3314-3332).
cacatgttacgaatgataa

SEQ ID NO: 337609 - DNA, 19 bp, Homo sapiens
  siRNA target sequence for CASP8AP2 (NM_012115.2,3429-3447).
ctttaattaaacatctcaa

SEQ ID NO: 337610 - DNA, 19 bp, Homo sapiens
  siRNA target sequence for CASP8AP2 (NM_012115.2,3443-3461).
ctcaacttacacaaaatct

SEQ ID NO: 337611 - DNA, 19 bp, Homo sapiens
  siRNA target sequence for CASP8AP2 (NM_012115.2,3468-3486).
cagtgactaccttacagaa

SEQ ID NO: 337612 - DNA, 19 bp, Homo sapiens
  siRNA target sequence for CASP8AP2 (NM_012115.2,3536-3554).
ggcatagttgatcgtttat

SEQ ID NO: 337613 - DNA, 19 bp, Homo sapiens
  siRNA target sequence for CASP8AP2 (NM_012115.2,3537-3555).
gcatagttgatcgtttatt

SEQ ID NO: 337614 - DNA, 19 bp, Homo sapiens
  siRNA target sequence for CASP8AP2 (NM_012115.2,3563-3581).
caactaccagatatgaaaa

SEQ ID NO: 337615 - DNA, 19 bp, Homo sapiens
  siRNA target sequence for CASP8AP2 (NM_012115.2,3599-3617).
gtagatgaccaacttgatt

SEQ ID NO: 337616 - DNA, 19 bp, Homo sapiens
  siRNA target sequence for CASP8AP2 (NM_012115.2,3602-3620).
gatgaccaacttgattatt

SEQ ID NO: 337617 - DNA, 19 bp, Homo sapiens
  siRNA target sequence for CASP8AP2 (NM_012115.2,3605-3623).
gaccaacttgattatttgt

SEQ ID NO: 337618 - DNA, 19 bp, Homo sapiens
  siRNA target sequence for CASP8AP2 (NM_012115.2,3717-3735).
cacagtattcaaatagtca

SEQ ID NO: 337619 - DNA, 19 bp, Homo sapiens
  siRNA target sequence for CASP8AP2 (NM_012115.2,3792-3810).
cagaagaccctgttcatta

SEQ ID NO: 337620 - DNA, 19 bp, Homo sapiens
  siRNA target sequence for CASP8AP2 (NM_012115.2,3794-3812).
gaagaccctgttcattata

SEQ ID NO: 337621 - DNA, 19 bp, Homo sapiens
  siRNA target sequence for CASP8AP2 (NM_012115.2,3797-3815).
gaccctgttcattataagt

SEQ ID NO: 337622 - DNA, 19 bp, Homo sapiens
  siRNA target sequence for CASP8AP2 (NM_012115.2,3800-3818).
cctgttcattataagtctt

SEQ ID NO: 337623 - DNA, 19 bp, Homo sapiens
  siRNA target sequence for CASP8AP2 (NM_012115.2,3816-3834).
ctttagtgggatgtaaaaa

SEQ ID NO: 337624 - DNA, 19 bp, Homo sapiens
  siRNA target sequence for CASP8AP2 (NM_012115.2,3837-3855).
ctgaggaaaattatcaaga

SEQ ID NO: 337625 - DNA, 19 bp, Homo sapiens
  siRNA target sequence for CASP8AP2 (NM_012115.2,3857-3875).
caaaataactccagtatta

SEQ ID NO: 337626 - DNA, 19 bp, Homo sapiens
  siRNA target sequence for CASP8AP2 (NM_012115.2,3867-3885).
ccagtattaacactgtaaa

SEQ ID NO: 337627 - DNA, 19 bp, Homo sapiens
  siRNA target sequence for CASP8AP2 (NM_012115.2,3870-3888).
gtattaacactgtaaagca

SEQ ID NO: 337628 - DNA, 19 bp, Homo sapiens
  siRNA target sequence for CASP8AP2 (NM_012115.2,3910-3928).
catctgctttgataatata

SEQ ID NO: 337629 - DNA, 19 bp, Homo sapiens
  siRNA target sequence for CASP8AP2 (NM_012115.2,4026-4044).
catcccagcatgcaacttt

SEQ ID NO: 337630 - DNA, 19 bp, Homo sapiens
  siRNA target sequence for CASP8AP2 (NM_012115.2,4085-4103).
gcatcgagccttactttta

SEQ ID NO: 337631 - DNA, 19 bp, Homo sapiens
  siRNA target sequence for CASP8AP2 (NM_012115.2,4086-4104).
catcgagccttacttttaa

SEQ ID NO: 337632 - DNA, 19 bp, Homo sapiens
  siRNA target sequence for CASP8AP2 (NM_012115.2,4118-4136).
gcacaaatgggtgaaatat

SEQ ID NO: 337633 - DNA, 19 bp, Homo sapiens
  siRNA target sequence for CASP8AP2 (NM_012115.2,4147-4165).
gttgcaaggttctgatctt

SEQ ID NO: 337634 - DNA, 19 bp, Homo sapiens
  siRNA target sequence for CASP8AP2 (NM_012115.2,4154-4172).
ggttctgatcttttagaca

SEQ ID NO: 337635 - DNA, 19 bp, Homo sapiens
  siRNA target sequence for CASP8AP2 (NM_012115.2,4229-4247).
ctgctagagactcttaagt

SEQ ID NO: 337636 - DNA, 19 bp, Homo sapiens
  siRNA target sequence for CASP8AP2 (NM_012115.2,4239-4257).
ctcttaagtgcgagtctat

SEQ ID NO: 337637 - DNA, 19 bp, Homo sapiens
  siRNA target sequence for CASP8AP2 (NM_012115.2,4252-4270).
gtctataccagcttgtaca

SEQ ID NO: 337638 - DNA, 19 bp, Homo sapiens
  siRNA target sequence for CASP8AP2 (NM_012115.2,4301-4319).
ccatgtcctaaaatgatta

SEQ ID NO: 337639 - DNA, 19 bp, Homo sapiens
  siRNA target sequence for CASP8AP2 (NM_012115.2,4305-4323).
gtcctaaaatgattagtga

SEQ ID NO: 337640 - DNA, 19 bp, Homo sapiens
  siRNA target sequence for CASP8AP2 (NM_012115.2,4333-4351).
gtcattattatcatctgaa

SEQ ID NO: 337641 - DNA, 19 bp, Homo sapiens
  siRNA target sequence for CASP8AP2 (NM_012115.2,4386-4404).
cggttcatcctgatgtgtt

SEQ ID NO: 337642 - DNA, 19 bp, Homo sapiens
  siRNA target sequence for CASP8AP2 (NM_012115.2,4400-4418).
gtgttggatgaaagttgta

SEQ ID NO: 337643 - DNA, 19 bp, Homo sapiens
  siRNA target sequence for CASP8AP2 (NM_012115.2,4429-4447).
gtctactaacctaccttta

SEQ ID NO: 337644 - DNA, 19 bp, Homo sapiens
  siRNA target sequence for CASP8AP2 (NM_012115.2,4434-4452).
ctaacctacctttaagtaa

SEQ ID NO: 337645 - DNA, 19 bp, Homo sapiens
  siRNA target sequence for CASP8AP2 (NM_012115.2,4438-4456).
cctacctttaagtaaagat

SEQ ID NO: 337646 - DNA, 19 bp, Homo sapiens
  siRNA target sequence for CASP8AP2 (NM_012115.2,4488-4506).
gcgtttcttccatacttct

SEQ ID NO: 337647 - DNA, 19 bp, Homo sapiens
  siRNA target sequence for CASP8AP2 (NM_012115.2,4580-4598).
gatatgtcgtccagttcaa

SEQ ID NO: 337648 - DNA, 19 bp, Homo sapiens
  siRNA target sequence for CASP8AP2 (NM_012115.2,4612-4630).
cattagtgctcattttagt

SEQ ID NO: 337649 - DNA, 19 bp, Homo sapiens
  siRNA target sequence for CASP8AP2 (NM_012115.2,4729-4747).
ctggacaagccgatctgtt

SEQ ID NO: 337650 - DNA, 19 bp, Homo sapiens
  siRNA target sequence for CASP8AP2 (NM_012115.2,4778-4796).
cctatgcatgccgtcataa

SEQ ID NO: 337651 - DNA, 19 bp, Homo sapiens
  siRNA target sequence for CASP8AP2 (NM_012115.2,4783-4801).
gcatgccgtcataatggaa

SEQ ID NO: 337652 - DNA, 19 bp, Homo sapiens
  siRNA target sequence for CASP8AP2 (NM_012115.2,4784-4802).
catgccgtcataatggaaa

SEQ ID NO: 337653 - DNA, 19 bp, Homo sapiens
  siRNA target sequence for CASP8AP2 (NM_012115.2,4806-4824).
ccaatgatcatttcattgt

SEQ ID NO: 337654 - DNA, 19 bp, Homo sapiens
  siRNA target sequence for CASP8AP2 (NM_012115.2,4857-4875).
ctggccttaaacagagtat

SEQ ID NO: 337655 - DNA, 19 bp, Homo sapiens
  siRNA target sequence for CASP8AP2 (NM_012115.2,4872-4890).
gtatgatgcctgatgaatt

SEQ ID NO: 337656 - DNA, 19 bp, Homo sapiens
  siRNA target sequence for CASP8AP2 (NM_012115.2,4879-4897).
gcctgatgaattattgaca

SEQ ID NO: 337657 - DNA, 19 bp, Homo sapiens
  siRNA target sequence for CASP8AP2 (NM_012115.2,4883-4901).
gatgaattattgacatctt

SEQ ID NO: 337658 - DNA, 19 bp, Homo sapiens
  siRNA target sequence for CASP8AP2 (NM_012115.2,4931-4949).
ggaccagagaaagaatata

SEQ ID NO: 337659 - DNA, 19 bp, Homo sapiens
  siRNA target sequence for CASP8AP2 (NM_012115.2,4956-4974).
gtcagaacacagtttttaa

SEQ ID NO: 337660 - DNA, 19 bp, Homo sapiens
  siRNA target sequence for CASP8AP2 (NM_012115.2,5009-5027).
gttgatggcagcaagtcaa

SEQ ID NO: 337661 - DNA, 19 bp, Homo sapiens
  siRNA target sequence for CASP8AP2 (NM_012115.2,5058-5076).
cacaggttcctgatatata

SEQ ID NO: 337662 - DNA, 19 bp, Homo sapiens
  siRNA target sequence for CASP8AP2 (NM_012115.2,5067-5085).
ctgatatatatgaatttct

SEQ ID NO: 337663 - DNA, 19 bp, Homo sapiens
  siRNA target sequence for CASP8AP2 (NM_012115.2,5104-5122).
gatgggtcatagtgatgaa

SEQ ID NO: 337664 - DNA, 19 bp, Homo sapiens
  siRNA target sequence for CASP8AP2 (NM_012115.2,5123-5141).
gtggctgatgaatgtttca

SEQ ID NO: 337665 - DNA, 19 bp, Homo sapiens
  siRNA target sequence for CASP8AP2 (NM_012115.2,5125-5143).
ggctgatgaatgtttcaaa

SEQ ID NO: 337666 - DNA, 19 bp, Homo sapiens
  siRNA target sequence for CASP8AP2 (NM_012115.2,5127-5145).
ctgatgaatgtttcaaatt

SEQ ID NO: 337667 - DNA, 19 bp, Homo sapiens
  siRNA target sequence for CASP8AP2 (NM_012115.2,5225-5243).
gaacatcttccaaacacat

SEQ ID NO: 337668 - DNA, 19 bp, Homo sapiens
  siRNA target sequence for CASP8AP2 (NM_012115.2,5245-5263).
cgtagatctaacgaaagat

SEQ ID NO: 337669 - DNA, 19 bp, Homo sapiens
  siRNA target sequence for CASP8AP2 (NM_012115.2,5300-5318).
gaagtaacagttttacata

SEQ ID NO: 337670 - DNA, 19 bp, Homo sapiens
  siRNA target sequence for CASP8AP2 (NM_012115.2,5390-5408).
gatactgtaggtgctttta

SEQ ID NO: 337671 - DNA, 19 bp, Homo sapiens
  siRNA target sequence for CASP8AP2 (NM_012115.2,5416-5434).
gacacaagatgcttcaagt

SEQ ID NO: 337672 - DNA, 19 bp, Homo sapiens
  siRNA target sequence for CASP8AP2 (NM_012115.2,5426-5444).
gcttcaagtgaggctaaaa

SEQ ID NO: 337673 - DNA, 19 bp, Homo sapiens
  siRNA target sequence for CASP8AP2 (NM_012115.2,5430-5448).
caagtgaggctaaaagtga

SEQ ID NO: 337674 - DNA, 19 bp, Homo sapiens
  siRNA target sequence for CASP8AP2 (NM_012115.2,5463-5481).
cattagctgtggaagactt

SEQ ID NO: 337675 - DNA, 19 bp, Homo sapiens
  siRNA target sequence for CASP8AP2 (NM_012115.2,5500-5518).
ggtagatgaagataattgt

SEQ ID NO: 337676 - DNA, 19 bp, Homo sapiens
  siRNA target sequence for CASP8AP2 (NM_012115.2,5537-5555).
gtggcaaacaggcctttaa

SEQ ID NO: 337677 - DNA, 19 bp, Homo sapiens
  siRNA target sequence for CASP8AP2 (NM_012115.2,5560-5578).
cattgttgaggaaacctat

SEQ ID NO: 337678 - DNA, 19 bp, Homo sapiens
  siRNA target sequence for CASP8AP2 (NM_012115.2,5600-5618).
cccagttcatgtgaagtaa

SEQ ID NO: 337679 - DNA, 19 bp, Homo sapiens
  siRNA target sequence for CASP8AP2 (NM_012115.2,5641-5659).
gccaggatcaaattgtgat

SEQ ID NO: 337680 - DNA, 19 bp, Homo sapiens
  siRNA target sequence for CASP8AP2 (NM_012115.2,5645-5663).
ggatcaaattgtgataact

SEQ ID NO: 337681 - DNA, 19 bp, Homo sapiens
  siRNA target sequence for CASP8AP2 (NM_012115.2,5668-5686).
gttgcctgggactttgcat

SEQ ID NO: 337682 - DNA, 19 bp, Homo sapiens
  siRNA target sequence for CASP8AP2 (NM_012115.2,5676-5694).
ggactttgcataattctca

SEQ ID NO: 337683 - DNA, 19 bp, Homo sapiens
  siRNA target sequence for CASP8AP2 (NM_012115.2,5720-5738).
ctaaatcatcctcataaaa

SEQ ID NO: 337684 - DNA, 19 bp, Homo sapiens
  siRNA target sequence for CASP8AP2 (NM_012115.2,5749-5767).
ggaaacagacttaactaat

SEQ ID NO: 337685 - DNA, 19 bp, Homo sapiens
  siRNA target sequence for CASP8AP2 (NM_012115.2,5750-5768).
gaaacagacttaactaata

SEQ ID NO: 337686 - DNA, 19 bp, Homo sapiens
  siRNA target sequence for CASP8AP2 (NM_012115.2,5782-5800).
gaaacctacccaagattct

SEQ ID NO: 337687 - DNA, 19 bp, Homo sapiens
  siRNA target sequence for CASP8AP2 (NM_012115.2,5792-5810).
caagattcttgtgagaata

SEQ ID NO: 337688 - DNA, 19 bp, Homo sapiens
  siRNA target sequence for CASP8AP2 (NM_012115.2,5859-5877).
ctaaagatccctcatcatt

SEQ ID NO: 337689 - DNA, 19 bp, Homo sapiens
  siRNA target sequence for CASP8AP2 (NM_012115.2,5920-5938).
cacttctacaagtctttct

SEQ ID NO: 337690 - DNA, 19 bp, Homo sapiens
  siRNA target sequence for CASP8AP2 (NM_012115.2,5993-6011).
gatgaccgggaaattttat

SEQ ID NO: 337691 - DNA, 19 bp, Homo sapiens
  siRNA target sequence for D6S2654E (NM_012135.1,255-273).
ggttctcggcgcattacga

SEQ ID NO: 337692 - DNA, 19 bp, Homo sapiens
  siRNA target sequence for D6S2654E (NM_012135.1,444-462).
gcgagcgcaagcgtaagat

SEQ ID NO: 337693 - DNA, 19 bp, Homo sapiens
  siRNA target sequence for D6S2654E (NM_012135.1,446-464).
gagcgcaagcgtaagatct

SEQ ID NO: 337694 - DNA, 19 bp, Homo sapiens
  siRNA target sequence for CCNDBP1 (NM_012142.2,281-299).
gagaccaccgaggagttta

SEQ ID NO: 337695 - DNA, 19 bp, Homo sapiens
  siRNA target sequence for CCNDBP1 (NM_012142.2,283-301).
gaccaccgaggagtttaat

SEQ ID NO: 337696 - DNA, 19 bp, Homo sapiens
  siRNA target sequence for CCNDBP1 (NM_012142.2,286-304).
caccgaggagtttaatcga

SEQ ID NO: 337697 - DNA, 19 bp, Homo sapiens
  siRNA target sequence for CCNDBP1 (NM_012142.2,442-460).
catcaaggcatttattgca

SEQ ID NO: 337698 - DNA, 19 bp, Homo sapiens
  siRNA target sequence for CCNDBP1 (NM_012142.2,450-468).
catttattgcagtgtacta

SEQ ID NO: 337699 - DNA, 19 bp, Homo sapiens
  siRNA target sequence for CCNDBP1 (NM_012142.2,546-564).
ctcagctcatggaagtact

SEQ ID NO: 337700 - DNA, 19 bp, Homo sapiens
  siRNA target sequence for CCNDBP1 (NM_012142.2,765-783).
gcctcttgaatgatactga

SEQ ID NO: 337701 - DNA, 19 bp, Homo sapiens
  siRNA target sequence for CCNDBP1 (NM_012142.2,834-852).
ccagcaatcaggacttgta

SEQ ID NO: 337702 - DNA, 19 bp, Homo sapiens
  siRNA target sequence for CCNDBP1 (NM_012142.2,863-881).
gacgatcaagagctcataa

SEQ ID NO: 337703 - DNA, 19 bp, Homo sapiens
  siRNA target sequence for CCNDBP1 (NM_012142.2,1025-1043).
gatttggctctgagcatat

SEQ ID NO: 337704 - DNA, 19 bp, Homo sapiens
  siRNA target sequence for CCNDBP1 (NM_012142.2,1060-1078).
cctgaccgtgcgaatcaat

SEQ ID NO: 337705 - DNA, 19 bp, Homo sapiens
  siRNA target sequence for CCNDBP1 (NM_012142.2,1061-1079).
ctgaccgtgcgaatcaatt

SEQ ID NO: 337706 - DNA, 19 bp, Homo sapiens
  siRNA target sequence for CCNDBP1 (NM_012142.2,1063-1081).
gaccgtgcgaatcaattct

SEQ ID NO: 337707 - DNA, 19 bp, Homo sapiens
  siRNA target sequence for CCNDBP1 (NM_012142.2,1080-1098).
ctgcgaaacttgtatctgt

SEQ ID NO: 337708 - DNA, 19 bp, Homo sapiens
  siRNA target sequence for CCNDBP1 (NM_012142.2,1082-1100).
gcgaaacttgtatctgttt

SEQ ID NO: 337709 - DNA, 19 bp, Homo sapiens
  siRNA target sequence for CCNDBP1 (NM_012142.2,1083-1101).
cgaaacttgtatctgtttt

SEQ ID NO: 337710 - DNA, 19 bp, Homo sapiens
  siRNA target sequence for CCNDBP1 (NM_012142.2,1162-1180).
gatccctttacttattaat

SEQ ID NO: 337711 - DNA, 19 bp, Homo sapiens
  siRNA target sequence for CCNDBP1 (NM_012142.2,1213-1231).
gctcactcagagtgaactt

SEQ ID NO: 337712 - DNA, 19 bp, Homo sapiens
  siRNA target sequence for F8A (NM_012151.2,131-149).
gctaccggctggtatcgaa

SEQ ID NO: 337713 - DNA, 19 bp, Homo sapiens
  siRNA target sequence for FBXL9 (NM_012163.1,829-847).
cgtgccctggcatcaacat

SEQ ID NO: 337714 - DNA, 19 bp, Homo sapiens
  siRNA target sequence for FBXW3 (NM_012165.1,907-925).
ggccttggtaagattcaca

SEQ ID NO: 337715 - DNA, 19 bp, Homo sapiens
  siRNA target sequence for FBXW3 (NM_012165.1,981-999).
caaagggggcatcatatca

SEQ ID NO: 337716 - DNA, 19 bp, Homo sapiens
  siRNA target sequence for FBXO22 (NM_012170.2,161-179).
gcaccttcgtgttgagtaa

SEQ ID NO: 337717 - DNA, 19 bp, Homo sapiens
  siRNA target sequence for FBXO22 (NM_012170.2,392-410).
gcatcttaccacatacagt

SEQ ID NO: 337718 - DNA, 19 bp, Homo sapiens
  siRNA target sequence for FBXO22 (NM_012170.2,393-411).
catcttaccacatacagtt

SEQ ID NO: 337719 - DNA, 19 bp, Homo sapiens
  siRNA target sequence for FBXO22 (NM_012170.2,396-414).
cttaccacatacagttctt

SEQ ID NO: 337720 - DNA, 19 bp, Homo sapiens
  siRNA target sequence for FBXO22 (NM_012170.2,428-446).
cagaaactttcattagtct

SEQ ID NO: 337721 - DNA, 19 bp, Homo sapiens
  siRNA target sequence for FBXO22 (NM_012170.2,451-469).
gagtgtcgtggccataaga

SEQ ID NO: 337722 - DNA, 19 bp, Homo sapiens
  siRNA target sequence for FBXO22 (NM_012170.2,453-471).
gtgtcgtggccataagaga

SEQ ID NO: 337723 - DNA, 19 bp, Homo sapiens
  siRNA target sequence for FBXO22 (NM_012170.2,497-515).
cagcacttgcccttgagaa

SEQ ID NO: 337724 - DNA, 19 bp, Homo sapiens
  siRNA target sequence for FBXO22 (NM_012170.2,502-520).
cttgcccttgagaagctat

SEQ ID NO: 337725 - DNA, 19 bp, Homo sapiens
  siRNA target sequence for FBXO22 (NM_012170.2,590-608).
gcaatcgacctcaggaaat

SEQ ID NO: 337726 - DNA, 19 bp, Homo sapiens
  siRNA target sequence for FBXO22 (NM_012170.2,591-609).
caatcgacctcaggaaata

SEQ ID NO: 337727 - DNA, 19 bp, Homo sapiens
  siRNA target sequence for FBXO22 (NM_012170.2,595-613).
cgacctcaggaaatagaaa

SEQ ID NO: 337728 - DNA, 19 bp, Homo sapiens
  siRNA target sequence for FBXO22 (NM_012170.2,632-650).
ctttattattccctcaaat

SEQ ID NO: 337729 - DNA, 19 bp, Homo sapiens
  siRNA target sequence for FBXO22 (NM_012170.2,692-710).
caaagaatttaacattaga

SEQ ID NO: 337730 - DNA, 19 bp, Homo sapiens
  siRNA target sequence for FBXO22 (NM_012170.2,696-714).
gaatttaacattagaaaga

SEQ ID NO: 337731 - DNA, 19 bp, Homo sapiens
  siRNA target sequence for FBXO22 (NM_012170.2,723-741).
cactgaagtaggtctttta

SEQ ID NO: 337732 - DNA, 19 bp, Homo sapiens
  siRNA target sequence for FBXO25 (NM_012173.3,594-612).
caaactgttgcagctaatt

SEQ ID NO: 337733 - DNA, 19 bp, Homo sapiens
  siRNA target sequence for FBXO25 (NM_012173.3,598-616).
ctgttgcagctaattgcaa

SEQ ID NO: 337734 - DNA, 19 bp, Homo sapiens
  siRNA target sequence for FBXO25 (NM_012173.3,600-618).
gttgcagctaattgcaaaa

SEQ ID NO: 337735 - DNA, 19 bp, Homo sapiens
  siRNA target sequence for FBXO25 (NM_012173.3,638-656).
gtggcgtggcacagaagaa

SEQ ID NO: 337736 - DNA, 19 bp, Homo sapiens
  siRNA target sequence for FBXO25 (NM_012173.3,640-658).
ggcgtggcacagaagaatt

SEQ ID NO: 337737 - DNA, 19 bp, Homo sapiens
  siRNA target sequence for FBXO25 (NM_012173.3,641-659).
gcgtggcacagaagaatta

SEQ ID NO: 337738 - DNA, 19 bp, Homo sapiens
  siRNA target sequence for FBXO25 (NM_012173.3,666-684).
cattttggataaaatcgtt

SEQ ID NO: 337739 - DNA, 19 bp, Homo sapiens
  siRNA target sequence for FBXO25 (NM_012173.3,706-724).
cacaatcctcgcttaatca

SEQ ID NO: 337740 - DNA, 19 bp, Homo sapiens
  siRNA target sequence for FBXO25 (NM_012173.3,708-726).
caatcctcgcttaatcaaa

SEQ ID NO: 337741 - DNA, 19 bp, Homo sapiens
  siRNA target sequence for FBXO25 (NM_012173.3,772-790).
ggagtagggaagtctgtat

SEQ ID NO: 337742 - DNA, 19 bp, Homo sapiens
  siRNA target sequence for FBXO25 (NM_012173.3,773-791).
gagtagggaagtctgtatt

SEQ ID NO: 337743 - DNA, 19 bp, Homo sapiens
  siRNA target sequence for FBXO25 (NM_012173.3,813-831).
gatttgccgattagaaact

SEQ ID NO: 337744 - DNA, 19 bp, Homo sapiens
  siRNA target sequence for FBXO25 (NM_012173.3,818-836).
gccgattagaaactattct

SEQ ID NO: 337745 - DNA, 19 bp, Homo sapiens
  siRNA target sequence for FBXO25 (NM_012173.3,870-888).
gactaagcaagtgaacaat

SEQ ID NO: 337746 - DNA, 19 bp, Homo sapiens
  siRNA target sequence for FBXO25 (NM_012173.3,978-996).
ggtgacccccacgttgtat

SEQ ID NO: 337747 - DNA, 19 bp, Homo sapiens
  siRNA target sequence for FBXO25 (NM_012173.3,983-1001).
cccccacgttgtatatgct

SEQ ID NO: 337748 - DNA, 19 bp, Homo sapiens
  siRNA target sequence for FBXO25 (NM_012173.3,984-1002).
ccccacgttgtatatgctt

SEQ ID NO: 337749 - DNA, 19 bp, Homo sapiens
  siRNA target sequence for FBXO25 (NM_012173.3,985-1003).
cccacgttgtatatgctta

SEQ ID NO: 337750 - DNA, 19 bp, Homo sapiens
  siRNA target sequence for FBXO25 (NM_012173.3,989-1007).
cgttgtatatgcttagtga

SEQ ID NO: 337751 - DNA, 19 bp, Homo sapiens
  siRNA target sequence for FBXO25 (NM_012173.3,990-1008).
gttgtatatgcttagtgaa

SEQ ID NO: 337752 - DNA, 19 bp, Homo sapiens
  siRNA target sequence for FBXO25 (NM_012173.3,1179-1197).
gcactgcagcattctcttt

SEQ ID NO: 337753 - DNA, 19 bp, Homo sapiens
  siRNA target sequence for FBXW8 (NM_012174.1,243-261).
cttacgaattggcaatcaa

SEQ ID NO: 337754 - DNA, 19 bp, Homo sapiens
  siRNA target sequence for FBXW8 (NM_012174.1,247-265).
cgaattggcaatcaatata

SEQ ID NO: 337755 - DNA, 19 bp, Homo sapiens
  siRNA target sequence for FBXW8 (NM_012174.1,506-524).
gttcctgacacagttttgt

SEQ ID NO: 337756 - DNA, 19 bp, Homo sapiens
  siRNA target sequence for FBXW8 (NM_012174.1,548-566).
gtggtcattgcgggatata

SEQ ID NO: 337757 - DNA, 19 bp, Homo sapiens
  siRNA target sequence for FBXW8 (NM_012174.1,550-568).
ggtcattgcgggatataca

SEQ ID NO: 337758 - DNA, 19 bp, Homo sapiens
  siRNA target sequence for FBXW8 (NM_012174.1,553-571).
cattgcgggatatacatca

SEQ ID NO: 337759 - DNA, 19 bp, Homo sapiens
  siRNA target sequence for FBXW8 (NM_012174.1,651-669).
ctggaatgcagccaaatgt

SEQ ID NO: 337760 - DNA, 19 bp, Homo sapiens
  siRNA target sequence for FBXW8 (NM_012174.1,668-686).
gtctcctttgtgaggataa

SEQ ID NO: 337761 - DNA, 19 bp, Homo sapiens
  siRNA target sequence for FBXW8 (NM_012174.1,713-731).
gaggatgggtttcttaata

SEQ ID NO: 337762 - DNA, 19 bp, Homo sapiens
  siRNA target sequence for FBXW8 (NM_012174.1,748-766).
cggaaagtaccctgttcat

SEQ ID NO: 337763 - DNA, 19 bp, Homo sapiens
  siRNA target sequence for FBXW8 (NM_012174.1,883-901).
gcagatagctgcggaattt

SEQ ID NO: 337764 - DNA, 19 bp, Homo sapiens
  siRNA target sequence for FBXW8 (NM_012174.1,886-904).
gatagctgcggaatttgaa

SEQ ID NO: 337765 - DNA, 19 bp, Homo sapiens
  siRNA target sequence for FBXW8 (NM_012174.1,1011-1029).
ccgccagaaccctccttta

SEQ ID NO: 337766 - DNA, 19 bp, Homo sapiens
  siRNA target sequence for FBXW8 (NM_012174.1,1065-1083).
cggccaaccaagttgcttt

SEQ ID NO: 337767 - DNA, 19 bp, Homo sapiens
  siRNA target sequence for FBXW8 (NM_012174.1,1066-1084).
ggccaaccaagttgctttt

SEQ ID NO: 337768 - DNA, 19 bp, Homo sapiens
  siRNA target sequence for FBXW8 (NM_012174.1,1159-1177).
cttgaagctgggtaacgtt

SEQ ID NO: 337769 - DNA, 19 bp, Homo sapiens
  siRNA target sequence for FBXW8 (NM_012174.1,1430-1448).
ccggtgcagcacatctcat

SEQ ID NO: 337770 - DNA, 19 bp, Homo sapiens
  siRNA target sequence for FBXW8 (NM_012174.1,1431-1449).
cggtgcagcacatctcatt

SEQ ID NO: 337771 - DNA, 19 bp, Homo sapiens
  siRNA target sequence for FBXW8 (NM_012174.1,1626-1644).
ccatggccactcactacta

SEQ ID NO: 337772 - DNA, 19 bp, Homo sapiens
  siRNA target sequence for FBXW8 (NM_012174.1,1653-1671).
cactggcctttccctataa

SEQ ID NO: 337773 - DNA, 19 bp, Homo sapiens
  siRNA target sequence for FUS2 (NM_012191.1,435-453).
gtgctgacctcatcaatga

SEQ ID NO: 337774 - DNA, 19 bp, Homo sapiens
  siRNA target sequence for FUS2 (NM_012191.1,743-761).
gaccaggtgcacttctata

SEQ ID NO: 337775 - DNA, 19 bp, Homo sapiens
  siRNA target sequence for FUS2 (NM_012191.1,823-841).
gcctgccaccctgcttaat

SEQ ID NO: 337776 - DNA, 19 bp, Homo sapiens
  siRNA target sequence for FUS2 (NM_012191.1,1006-1024).
cctgctggagacacaatat

SEQ ID NO: 337777 - DNA, 19 bp, Homo sapiens
  siRNA target sequence for MLYCD (NM_012213.1,495-513).
ccggacgtccgggaaatga

SEQ ID NO: 337778 - DNA, 19 bp, Homo sapiens
  siRNA target sequence for MLYCD (NM_012213.1,496-514).
cggacgtccgggaaatgaa

SEQ ID NO: 337779 - DNA, 19 bp, Homo sapiens
  siRNA target sequence for MLYCD (NM_012213.1,497-515).
ggacgtccgggaaatgaat

SEQ ID NO: 337780 - DNA, 19 bp, Homo sapiens
  siRNA target sequence for MLYCD (NM_012213.1,529-547).
gaatgctctcagaatggtt

SEQ ID NO: 337781 - DNA, 19 bp, Homo sapiens
  siRNA target sequence for MLYCD (NM_012213.1,627-645).
gctgtgcatcctgtaaaaa

SEQ ID NO: 337782 - DNA, 19 bp, Homo sapiens
  siRNA target sequence for MLYCD (NM_012213.1,630-648).
gtgcatcctgtaaaaaact

SEQ ID NO: 337783 - DNA, 19 bp, Homo sapiens
  siRNA target sequence for MLYCD (NM_012213.1,789-807).
gaacatcctccatcagaaa

SEQ ID NO: 337784 - DNA, 19 bp, Homo sapiens
  siRNA target sequence for MLYCD (NM_012213.1,831-849).
gctgcgatcttttattcca

SEQ ID NO: 337785 - DNA, 19 bp, Homo sapiens
  siRNA target sequence for MLYCD (NM_012213.1,885-903).
ctgggaacattcctcataa

SEQ ID NO: 337786 - DNA, 19 bp, Homo sapiens
  siRNA target sequence for MLYCD (NM_012213.1,939-957).
caccttggggtgttttcaa

SEQ ID NO: 337787 - DNA, 19 bp, Homo sapiens
  siRNA target sequence for MLYCD (NM_012213.1,1026-1044).
gggaggaatgaactcttta

SEQ ID NO: 337788 - DNA, 19 bp, Homo sapiens
  siRNA target sequence for MLYCD (NM_012213.1,1078-1096).
caggtggccccattaacga

SEQ ID NO: 337789 - DNA, 19 bp, Homo sapiens
  siRNA target sequence for MLYCD (NM_012213.1,1263-1281).
gtgctgtggcgcatcaact

SEQ ID NO: 337790 - DNA, 19 bp, Homo sapiens
  siRNA target sequence for MLYCD (NM_012213.1,1425-1443).
ctagtggcccagtttcaaa

SEQ ID NO: 337791 - DNA, 19 bp, Homo sapiens
  siRNA target sequence for MLYCD (NM_012213.1,1428-1446).
gtggcccagtttcaaaaga

SEQ ID NO: 337792 - DNA, 19 bp, Homo sapiens
  siRNA target sequence for PTRF (NM_012232.1,424-442).
gaggaccccacgctctata

SEQ ID NO: 337793 - DNA, 19 bp, Homo sapiens
  siRNA target sequence for PTRF (NM_012232.1,426-444).
ggaccccacgctctatatt

SEQ ID NO: 337794 - DNA, 19 bp, Homo sapiens
  siRNA target sequence for PTRF (NM_012232.1,587-605).
gcctcctggacaaaatcat

SEQ ID NO: 337795 - DNA, 19 bp, Homo sapiens
  siRNA target sequence for HYPB (NM_012271.1,478-496).
gcaagtattcttcaaaact

SEQ ID NO: 337796 - DNA, 19 bp, Homo sapiens
  siRNA target sequence for HYPB (NM_012271.1,544-562).
gttgttctccccctaatga

SEQ ID NO: 337797 - DNA, 19 bp, Homo sapiens
  siRNA target sequence for HYPB (NM_012271.1,572-590).
ccgacgagggtcatcatat

SEQ ID NO: 337798 - DNA, 19 bp, Homo sapiens
  siRNA target sequence for HYPB (NM_012271.1,576-594).
cgagggtcatcatattcta

SEQ ID NO: 337799 - DNA, 19 bp, Homo sapiens
  siRNA target sequence for HYPB (NM_012271.1,581-599).
gtcatcatattctaagcat

SEQ ID NO: 337800 - DNA, 19 bp, Homo sapiens
  siRNA target sequence for HYPB (NM_012271.1,604-622).
gtagtgcttcccgttataa

SEQ ID NO: 337801 - DNA, 19 bp, Homo sapiens
  siRNA target sequence for HYPB (NM_012271.1,609-627).
gcttcccgttataaatcta

SEQ ID NO: 337802 - DNA, 19 bp, Homo sapiens
  siRNA target sequence for HYPB (NM_012271.1,639-657).
cctatacccaagtctgata

SEQ ID NO: 337803 - DNA, 19 bp, Homo sapiens
  siRNA target sequence for HYPB (NM_012271.1,640-658).
ctatacccaagtctgataa

SEQ ID NO: 337804 - DNA, 19 bp, Homo sapiens
  siRNA target sequence for HYPB (NM_012271.1,798-816).
ccagctccatcaaatcgat

SEQ ID NO: 337805 - DNA, 19 bp, Homo sapiens
  siRNA target sequence for HYPB (NM_012271.1,799-817).
cagctccatcaaatcgatt

SEQ ID NO: 337806 - DNA, 19 bp, Homo sapiens
  siRNA target sequence for HYPB (NM_012271.1,801-819).
gctccatcaaatcgattaa

SEQ ID NO: 337807 - DNA, 19 bp, Homo sapiens
  siRNA target sequence for HYPB (NM_012271.1,802-820).
ctccatcaaatcgattaaa

SEQ ID NO: 337808 - DNA, 19 bp, Homo sapiens
  siRNA target sequence for HYPB (NM_012271.1,805-823).
catcaaatcgattaaatga

SEQ ID NO: 337809 - DNA, 19 bp, Homo sapiens
  siRNA target sequence for HYPB (NM_012271.1,866-884).
gtccgaatttataacacat

SEQ ID NO: 337810 - DNA, 19 bp, Homo sapiens
  siRNA target sequence for HYPB (NM_012271.1,882-900).
catgatagccatgatagta

SEQ ID NO: 337811 - DNA, 19 bp, Homo sapiens
  siRNA target sequence for HYPB (NM_012271.1,885-903).
gatagccatgatagtatta

SEQ ID NO: 337812 - DNA, 19 bp, Homo sapiens
  siRNA target sequence for HYPB (NM_012271.1,889-907).
gccatgatagtattaagga

SEQ ID NO: 337813 - DNA, 19 bp, Homo sapiens
  siRNA target sequence for HYPB (NM_012271.1,906-924).
gaattagactctttatcta

SEQ ID NO: 337814 - DNA, 19 bp, Homo sapiens
  siRNA target sequence for HYPB (NM_012271.1,936-954).
gatcaattaagaagttttt

SEQ ID NO: 337815 - DNA, 19 bp, Homo sapiens
  siRNA target sequence for HYPB (NM_012271.1,1005-1023).
gcaacattttgcacttcta

SEQ ID NO: 337816 - DNA, 19 bp, Homo sapiens
  siRNA target sequence for HYPB (NM_012271.1,1006-1024).
caacattttgcacttctaa

SEQ ID NO: 337817 - DNA, 19 bp, Homo sapiens
  siRNA target sequence for HYPB (NM_012271.1,1059-1077).
gtgactggatcggaattat

SEQ ID NO: 337818 - DNA, 19 bp, Homo sapiens
  siRNA target sequence for HYPB (NM_012271.1,1113-1131).
ggatttcagaatattagta

SEQ ID NO: 337819 - DNA, 19 bp, Homo sapiens
  siRNA target sequence for HYPB (NM_012271.1,1167-1185).
ctgcataagaagtcagaaa

SEQ ID NO: 337820 - DNA, 19 bp, Homo sapiens
  siRNA target sequence for HYPB (NM_012271.1,1180-1198).
cagaaagcccatttagaga

SEQ ID NO: 337821 - DNA, 19 bp, Homo sapiens
  siRNA target sequence for HYPB (NM_012271.1,1182-1200).
gaaagcccatttagagaaa

SEQ ID NO: 337822 - DNA, 19 bp, Homo sapiens
  siRNA target sequence for HYPB (NM_012271.1,1259-1277).
ggattattccaaaacagta

SEQ ID NO: 337823 - DNA, 19 bp, Homo sapiens
  siRNA target sequence for HYPB (NM_012271.1,1267-1285).
ccaaaacagtagttaaaga

SEQ ID NO: 337824 - DNA, 19 bp, Homo sapiens
  siRNA target sequence for HYPB (NM_012271.1,1278-1296).
gttaaagaaccagttgata

SEQ ID NO: 337825 - DNA, 19 bp, Homo sapiens
  siRNA target sequence for HYPB (NM_012271.1,1290-1308).
gttgatacgagggtttctt

SEQ ID NO: 337826 - DNA, 19 bp, Homo sapiens
  siRNA target sequence for HYPB (NM_012271.1,1327-1345).
cagacatatactgtacttt

SEQ ID NO: 337827 - DNA, 19 bp, Homo sapiens
  siRNA target sequence for HYPB (NM_012271.1,1394-1412).
gccttcagttatgaagatt

SEQ ID NO: 337828 - DNA, 19 bp, Homo sapiens
  siRNA target sequence for HYPB (NM_012271.1,1455-1473).
gttatatgtgatagtagaa

SEQ ID NO: 337829 - DNA, 19 bp, Homo sapiens
  siRNA target sequence for HYPB (NM_012271.1,1478-1496).
gacagatcactcaaaattt

SEQ ID NO: 337830 - DNA, 19 bp, Homo sapiens
  siRNA target sequence for HYPB (NM_012271.1,1520-1538).
catcggtagcactagttca

SEQ ID NO: 337831 - DNA, 19 bp, Homo sapiens
  siRNA target sequence for HYPB (NM_012271.1,1531-1549).
ctagttcagcttctgttaa

SEQ ID NO: 337832 - DNA, 19 bp, Homo sapiens
  siRNA target sequence for HYPB (NM_012271.1,1534-1552).
gttcagcttctgttaatca

SEQ ID NO: 337833 - DNA, 19 bp, Homo sapiens
  siRNA target sequence for HYPB (NM_012271.1,1679-1697).
ggatgcagtgctaaagagt

SEQ ID NO: 337834 - DNA, 19 bp, Homo sapiens
  siRNA target sequence for HYPB (NM_012271.1,1680-1698).
gatgcagtgctaaagagta

SEQ ID NO: 337835 - DNA, 19 bp, Homo sapiens
  siRNA target sequence for HYPB (NM_012271.1,1688-1706).
gctaaagagtaaaaaaagt

SEQ ID NO: 337836 - DNA, 19 bp, Homo sapiens
  siRNA target sequence for HYPB (NM_012271.1,1792-1810).
gggagaacaggcgtaataa

SEQ ID NO: 337837 - DNA, 19 bp, Homo sapiens
  siRNA target sequence for HYPB (NM_012271.1,1793-1811).
ggagaacaggcgtaataat

SEQ ID NO: 337838 - DNA, 19 bp, Homo sapiens
  siRNA target sequence for HYPB (NM_012271.1,1802-1820).
gcgtaataatgggttatct

SEQ ID NO: 337839 - DNA, 19 bp, Homo sapiens
  siRNA target sequence for HYPB (NM_012271.1,1914-1932).
ggaggacatgtgcatactt

SEQ ID NO: 337840 - DNA, 19 bp, Homo sapiens
  siRNA target sequence for HYPB (NM_012271.1,1992-2010).
gatggtgtaacttatgcat

SEQ ID NO: 337841 - DNA, 19 bp, Homo sapiens
  siRNA target sequence for HYPB (NM_012271.1,1995-2013).
ggtgtaacttatgcattaa

SEQ ID NO: 337842 - DNA, 19 bp, Homo sapiens
  siRNA target sequence for HYPB (NM_012271.1,1996-2014).
gtgtaacttatgcattaaa

SEQ ID NO: 337843 - DNA, 19 bp, Homo sapiens
  siRNA target sequence for HYPB (NM_012271.1,2218-2236).
ctcggagcagtcaaagtta

SEQ ID NO: 337844 - DNA, 19 bp, Homo sapiens
  siRNA target sequence for HYPB (NM_012271.1,2220-2238).
cggagcagtcaaagttata

SEQ ID NO: 337845 - DNA, 19 bp, Homo sapiens
  siRNA target sequence for HYPB (NM_012271.1,2248-2266).
ctgaccattgggaagatga

SEQ ID NO: 337846 - DNA, 19 bp, Homo sapiens
  siRNA target sequence for HYPB (NM_012271.1,2329-2347).
gtcctcaaactgataagtt

SEQ ID NO: 337847 - DNA, 19 bp, Homo sapiens
  siRNA target sequence for HYPB (NM_012271.1,2331-2349).
cctcaaactgataagtttt

SEQ ID NO: 337848 - DNA, 19 bp, Homo sapiens
  siRNA target sequence for HYPB (NM_012271.1,2377-2395).
cggaaatttcttttacaca

SEQ ID NO: 337849 - DNA, 19 bp, Homo sapiens
  siRNA target sequence for HYPB (NM_012271.1,2445-2463).
cagagtgatggggttgata

SEQ ID NO: 337850 - DNA, 19 bp, Homo sapiens
  siRNA target sequence for HYPB (NM_012271.1,2447-2465).
gagtgatggggttgatagt

SEQ ID NO: 337851 - DNA, 19 bp, Homo sapiens
  siRNA target sequence for HYPB (NM_012271.1,2457-2475).
gttgatagtacaagtcata

SEQ ID NO: 337852 - DNA, 19 bp, Homo sapiens
  siRNA target sequence for HYPB (NM_012271.1,2523-2541).
gtgaaagccaaaatacctt

SEQ ID NO: 337853 - DNA, 19 bp, Homo sapiens
  siRNA target sequence for HYPB (NM_012271.1,2561-2579).
gccaatttattcttctgat

SEQ ID NO: 337854 - DNA, 19 bp, Homo sapiens
  siRNA target sequence for HYPB (NM_012271.1,2606-2624).
gcaacagaccactttccaa

SEQ ID NO: 337855 - DNA, 19 bp, Homo sapiens
  siRNA target sequence for HYPB (NM_012271.1,2622-2640).
caaaacaggccagatagta

SEQ ID NO: 337856 - DNA, 19 bp, Homo sapiens
  siRNA target sequence for HYPB (NM_012271.1,2771-2789).
gcaacctgacagtagctat

SEQ ID NO: 337857 - DNA, 19 bp, Homo sapiens
  siRNA target sequence for HYPB (NM_012271.1,2794-2812).
cttgtggtggacacaagta

SEQ ID NO: 337858 - DNA, 19 bp, Homo sapiens
  siRNA target sequence for HYPB (NM_012271.1,2835-2853).
ggtgggacacgtgattact

SEQ ID NO: 337859 - DNA, 19 bp, Homo sapiens
  siRNA target sequence for HYPB (NM_012271.1,2896-2914).
ctggaactggggttgtgta

SEQ ID NO: 337860 - DNA, 19 bp, Homo sapiens
  siRNA target sequence for HYPB (NM_012271.1,2899-2917).
gaactggggttgtgtatga

SEQ ID NO: 337861 - DNA, 19 bp, Homo sapiens
  siRNA target sequence for HYPB (NM_012271.1,3008-3026).
ccagtccgataaatttctt

SEQ ID NO: 337862 - DNA, 19 bp, Homo sapiens
  siRNA target sequence for HYPB (NM_012271.1,3011-3029).
gtccgataaatttcttcta

SEQ ID NO: 337863 - DNA, 19 bp, Homo sapiens
  siRNA target sequence for HYPB (NM_012271.1,3083-3101).
cattaaggacactttagct

SEQ ID NO: 337864 - DNA, 19 bp, Homo sapiens
  siRNA target sequence for HYPB (NM_012271.1,3153-3171).
gatagagggcctcttaaaa

SEQ ID NO: 337865 - DNA, 19 bp, Homo sapiens
  siRNA target sequence for HYPB (NM_012271.1,3324-3342).
ccacagcgatggaaggaat

SEQ ID NO: 337866 - DNA, 19 bp, Homo sapiens
  siRNA target sequence for HYPB (NM_012271.1,3355-3373).
ggaaaatgccatgttactt

SEQ ID NO: 337867 - DNA, 19 bp, Homo sapiens
  siRNA target sequence for HYPB (NM_012271.1,3362-3380).
gccatgttactttgatctt

SEQ ID NO: 337868 - DNA, 19 bp, Homo sapiens
  siRNA target sequence for HYPB (NM_012271.1,3367-3385).
gttactttgatcttattga

SEQ ID NO: 337869 - DNA, 19 bp, Homo sapiens
  siRNA target sequence for HYPB (NM_012271.1,3483-3501).
gctcaaggtgaaatagcat

SEQ ID NO: 337870 - DNA, 19 bp, Homo sapiens
  siRNA target sequence for HYPB (NM_012271.1,3506-3524).
ggaagattgtcttaatcgt

SEQ ID NO: 337871 - DNA, 19 bp, Homo sapiens
  siRNA target sequence for HYPB (NM_012271.1,3514-3532).
gtcttaatcgtcttctcat

SEQ ID NO: 337872 - DNA, 19 bp, Homo sapiens
  siRNA target sequence for HYPB (NM_012271.1,3522-3540).
cgtcttctcatgattgaat

SEQ ID NO: 337873 - DNA, 19 bp, Homo sapiens
  siRNA target sequence for HYPB (NM_012271.1,3555-3573).
ccaaatggggattattgtt

SEQ ID NO: 337874 - DNA, 19 bp, Homo sapiens
  siRNA target sequence for HYPB (NM_012271.1,3561-3579).
ggggattattgttccaata

SEQ ID NO: 337875 - DNA, 19 bp, Homo sapiens
  siRNA target sequence for HYPB (NM_012271.1,3563-3581).
ggattattgttccaataga

SEQ ID NO: 337876 - DNA, 19 bp, Homo sapiens
  siRNA target sequence for HYPB (NM_012271.1,3606-3624).
gatgtggaagtcatactca

SEQ ID NO: 337877 - DNA, 19 bp, Homo sapiens
  siRNA target sequence for HYPB (NM_012271.1,3674-3692).
cacctttgtcctagaatat

SEQ ID NO: 337878 - DNA, 19 bp, Homo sapiens
  siRNA target sequence for HYPB (NM_012271.1,3696-3714).
ggagaggtactcgatcata

SEQ ID NO: 337879 - DNA, 19 bp, Homo sapiens
  siRNA target sequence for HYPB (NM_012271.1,3697-3715).
gagaggtactcgatcataa

SEQ ID NO: 337880 - DNA, 19 bp, Homo sapiens
  siRNA target sequence for HYPB (NM_012271.1,3702-3720).
gtactcgatcataaagagt

SEQ ID NO: 337881 - DNA, 19 bp, Homo sapiens
  siRNA target sequence for HYPB (NM_012271.1,3705-3723).
ctcgatcataaagagttta

SEQ ID NO: 337882 - DNA, 19 bp, Homo sapiens
  siRNA target sequence for HYPB (NM_012271.1,3738-3756).
gagtatgcacgaaacaaaa

SEQ ID NO: 337883 - DNA, 19 bp, Homo sapiens
  siRNA target sequence for HYPB (NM_012271.1,3817-3835).
gaaattgctctcgtttcat

SEQ ID NO: 337884 - DNA, 19 bp, Homo sapiens
  siRNA target sequence for HYPB (NM_012271.1,3934-3952).
cagagttaacgtttgacta

SEQ ID NO: 337885 - DNA, 19 bp, Homo sapiens
  siRNA target sequence for HYPB (NM_012271.1,4081-4099).
ctcgtaagaaggattcagt

SEQ ID NO: 337886 - DNA, 19 bp, Homo sapiens
  siRNA target sequence for HYPB (NM_012271.1,4131-4149).
ggtgagggtctctctgata

SEQ ID NO: 337887 - DNA, 19 bp, Homo sapiens
  siRNA target sequence for HYPB (NM_012271.1,4132-4150).
gtgagggtctctctgataa

SEQ ID NO: 337888 - DNA, 19 bp, Homo sapiens
  siRNA target sequence for HYPB (NM_012271.1,4138-4156).
gtctctctgataaaaacca

SEQ ID NO: 337889 - DNA, 19 bp, Homo sapiens
  siRNA target sequence for HYPB (NM_012271.1,4166-4184).
cttatcccggctaatggtt

SEQ ID NO: 337890 - DNA, 19 bp, Homo sapiens
  siRNA target sequence for HYPB (NM_012271.1,4171-4189).
cccggctaatggttagaat

SEQ ID NO: 337891 - DNA, 19 bp, Homo sapiens
  siRNA target sequence for HYPB (NM_012271.1,4172-4190).
ccggctaatggttagaatt

SEQ ID NO: 337892 - DNA, 19 bp, Homo sapiens
  siRNA target sequence for HYPB (NM_012271.1,4213-4231).
cctgtctggaactcataca

SEQ ID NO: 337893 - DNA, 19 bp, Homo sapiens
  siRNA target sequence for HYPB (NM_012271.1,4272-4290).
cgtcatgggctgtctttgt

SEQ ID NO: 337894 - DNA, 19 bp, Homo sapiens
  siRNA target sequence for HYPB (NM_012271.1,4346-4364).
ggaagagattataaagact

SEQ ID NO: 337895 - DNA, 19 bp, Homo sapiens
  siRNA target sequence for HYPB (NM_012271.1,4368-4386).
gaacacttgcccattccta

SEQ ID NO: 337896 - DNA, 19 bp, Homo sapiens
  siRNA target sequence for HYPB (NM_012271.1,4373-4391).
cttgcccattcctactaaa

SEQ ID NO: 337897 - DNA, 19 bp, Homo sapiens
  siRNA target sequence for HYPB (NM_012271.1,4400-4418).
ggaggaaagcaaagtactt

SEQ ID NO: 337898 - DNA, 19 bp, Homo sapiens
  siRNA target sequence for HYPB (NM_012271.1,4408-4426).
gcaaagtacttccaattat

SEQ ID NO: 337899 - DNA, 19 bp, Homo sapiens
  siRNA target sequence for HYPB (NM_012271.1,4409-4427).
caaagtacttccaattatt

SEQ ID NO: 337900 - DNA, 19 bp, Homo sapiens
  siRNA target sequence for HYPB (NM_012271.1,4431-4449).
cgctggtctcagactaaga

SEQ ID NO: 337901 - DNA, 19 bp, Homo sapiens
  siRNA target sequence for HYPB (NM_012271.1,4433-4451).
ctggtctcagactaagact

SEQ ID NO: 337902 - DNA, 19 bp, Homo sapiens
  siRNA target sequence for HYPB (NM_012271.1,4481-4499).
gtattctagtgagaataca

SEQ ID NO: 337903 - DNA, 19 bp, Homo sapiens
  siRNA target sequence for HYPB (NM_012271.1,4669-4687).
gcaaagaggatcttgatca

SEQ ID NO: 337904 - DNA, 19 bp, Homo sapiens
  siRNA target sequence for HYPB (NM_012271.1,4670-4688).
caaagaggatcttgatcaa

SEQ ID NO: 337905 - DNA, 19 bp, Homo sapiens
  siRNA target sequence for HYPB (NM_012271.1,4676-4694).
ggatcttgatcaattagaa

SEQ ID NO: 337906 - DNA, 19 bp, Homo sapiens
  siRNA target sequence for HYPB (NM_012271.1,4751-4769).
gctgcctgaatgcaaagtt

SEQ ID NO: 337907 - DNA, 19 bp, Homo sapiens
  siRNA target sequence for HYPB (NM_012271.1,4754-4772).
gcctgaatgcaaagttgat

SEQ ID NO: 337908 - DNA, 19 bp, Homo sapiens
  siRNA target sequence for HYPB (NM_012271.1,4780-4798).
ccaacatagaagctagtaa

SEQ ID NO: 337909 - DNA, 19 bp, Homo sapiens
  siRNA target sequence for HYPB (NM_012271.1,4784-4802).
catagaagctagtaagcta

SEQ ID NO: 337910 - DNA, 19 bp, Homo sapiens
  siRNA target sequence for HYPB (NM_012271.1,4847-4865).
gagcaacggcacaaaacta

SEQ ID NO: 337911 - DNA, 19 bp, Homo sapiens
  siRNA target sequence for HYPB (NM_012271.1,4849-4867).
gcaacggcacaaaactaga

SEQ ID NO: 337912 - DNA, 19 bp, Homo sapiens
  siRNA target sequence for HYPB (NM_012271.1,4850-4868).
caacggcacaaaactagaa

SEQ ID NO: 337913 - DNA, 19 bp, Homo sapiens
  siRNA target sequence for HYPB (NM_012271.1,4951-4969).
cagataaaacagtggatat

SEQ ID NO: 337914 - DNA, 19 bp, Homo sapiens
  siRNA target sequence for HYPB (NM_012271.1,4953-4971).
gataaaacagtggatataa

SEQ ID NO: 337915 - DNA, 19 bp, Homo sapiens
  siRNA target sequence for HYPB (NM_012271.1,4960-4978).
cagtggatataagtgattt

SEQ ID NO: 337916 - DNA, 19 bp, Homo sapiens
  siRNA target sequence for HYPB (NM_012271.1,5009-5027).
cctaaaggaggtatatcga

SEQ ID NO: 337917 - DNA, 19 bp, Homo sapiens
  siRNA target sequence for HYPB (NM_012271.1,5010-5028).
ctaaaggaggtatatcgaa

SEQ ID NO: 337918 - DNA, 19 bp, Homo sapiens
  siRNA target sequence for HYPB (NM_012271.1,5015-5033).
ggaggtatatcgaattcca

SEQ ID NO: 337919 - DNA, 19 bp, Homo sapiens
  siRNA target sequence for HYPB (NM_012271.1,5016-5034).
gaggtatatcgaattccaa

SEQ ID NO: 337920 - DNA, 19 bp, Homo sapiens
  siRNA target sequence for HYPC (NM_012272.1,843-861).
ccagatgggcgcatctact

SEQ ID NO: 337921 - DNA, 19 bp, Homo sapiens
  siRNA target sequence for HYPC (NM_012272.1,939-957).
caatgtccctggaaagagt

SEQ ID NO: 337922 - DNA, 19 bp, Homo sapiens
  siRNA target sequence for HYPC (NM_012272.1,943-961).
gtccctggaaagagtacaa

SEQ ID NO: 337923 - DNA, 19 bp, Homo sapiens
  siRNA target sequence for HYPC (NM_012272.1,964-982).
cggacacaggcaaacctta

SEQ ID NO: 337924 - DNA, 19 bp, Homo sapiens
  siRNA target sequence for HYPC (NM_012272.1,970-988).
caggcaaaccttattacta

SEQ ID NO: 337925 - DNA, 19 bp, Homo sapiens
  siRNA target sequence for HYPC (NM_012272.1,1040-1058).
cctagaggttctagtcaaa

SEQ ID NO: 337926 - DNA, 19 bp, Homo sapiens
  siRNA target sequence for HYPC (NM_012272.1,1451-1469).
caccgacccccgttacagt

SEQ ID NO: 337927 - DNA, 19 bp, Homo sapiens
  siRNA target sequence for HYPC (NM_012272.1,1475-1493).
gcctaaactgagtgagaaa

SEQ ID NO: 337928 - DNA, 19 bp, Homo sapiens
  siRNA target sequence for HYPC (NM_012272.1,1679-1697).
ccctgagagggatcgaaaa

SEQ ID NO: 337929 - DNA, 19 bp, Homo sapiens
  siRNA target sequence for HYPC (NM_012272.1,1687-1705).
gggatcgaaaagaggttta

SEQ ID NO: 337930 - DNA, 19 bp, Homo sapiens
  siRNA target sequence for HYPC (NM_012272.1,1688-1706).
ggatcgaaaagaggtttat

SEQ ID NO: 337931 - DNA, 19 bp, Homo sapiens
  siRNA target sequence for HYPC (NM_012272.1,1801-1819).
ggatgagtagtgtcaactt

SEQ ID NO: 337932 - DNA, 19 bp, Homo sapiens
  siRNA target sequence for HYPC (NM_012272.1,2146-2164).
ccacccctctggacttatt

SEQ ID NO: 337933 - DNA, 19 bp, Homo sapiens
  siRNA target sequence for HYPC (NM_012272.1,2152-2170).
ctctggacttattcaagtt

SEQ ID NO: 337934 - DNA, 19 bp, Homo sapiens
  siRNA target sequence for HYPC (NM_012272.1,2154-2172).
ctggacttattcaagttct

SEQ ID NO: 337935 - DNA, 19 bp, Homo sapiens
  siRNA target sequence for HYPC (NM_012272.1,2156-2174).
ggacttattcaagttctat

SEQ ID NO: 337936 - DNA, 19 bp, Homo sapiens
  siRNA target sequence for HYPC (NM_012272.1,2183-2201).
gttgaaggcacgattccat

SEQ ID NO: 337937 - DNA, 19 bp, Homo sapiens
  siRNA target sequence for HYPC (NM_012272.1,2253-2271).
gacttcgcccacgtcataa

SEQ ID NO: 337938 - DNA, 19 bp, Homo sapiens
  siRNA target sequence for HYPC (NM_012272.1,2258-2276).
cgcccacgtcataagcttt

SEQ ID NO: 337939 - DNA, 19 bp, Homo sapiens
  siRNA target sequence for HYPC (NM_012272.1,2262-2280).
cacgtcataagctttgaca

SEQ ID NO: 337940 - DNA, 19 bp, Homo sapiens
  siRNA target sequence for HYPC (NM_012272.1,2295-2313).
ctggacgcaggcaacatca

SEQ ID NO: 337941 - DNA, 19 bp, Homo sapiens
  siRNA target sequence for HYPC (NM_012272.1,2469-2487).
gtccgtgagcgttttgtgt

SEQ ID NO: 337942 - DNA, 19 bp, Homo sapiens
  siRNA target sequence for HYPC (NM_012272.1,2588-2606).
caccaaaggccgaaagcat

SEQ ID NO: 337943 - DNA, 19 bp, Homo sapiens
  siRNA target sequence for HYPC (NM_012272.1,2753-2771).
ctcacttgattcagttgaa

SEQ ID NO: 337944 - DNA, 19 bp, Homo sapiens
  siRNA target sequence for HYPC (NM_012272.1,2837-2855).
ccttcggaaagccaagaaa

SEQ ID NO: 337945 - DNA, 19 bp, Homo sapiens
  siRNA target sequence for HYPC (NM_012272.1,3004-3022).
gttccccaggctttggaat

SEQ ID NO: 337946 - DNA, 19 bp, Homo sapiens
  siRNA target sequence for ILT7 (NM_012276.2,56-74).
cccgggtgcaggcagaaaa

SEQ ID NO: 337947 - DNA, 19 bp, Homo sapiens
  siRNA target sequence for ILT7 (NM_012276.2,197-215).
caatgtcgaggcacatatt

SEQ ID NO: 337948 - DNA, 19 bp, Homo sapiens
  siRNA target sequence for ILT7 (NM_012276.2,449-467).
gcaggttcactctgattga

SEQ ID NO: 337949 - DNA, 19 bp, Homo sapiens
  siRNA target sequence for ILT7 (NM_012276.2,579-597).
cagatgctacggctatgaa

SEQ ID NO: 337950 - DNA, 19 bp, Homo sapiens
  siRNA target sequence for ILT7 (NM_012276.2,581-599).
gatgctacggctatgaaaa

SEQ ID NO: 337951 - DNA, 19 bp, Homo sapiens
  siRNA target sequence for ILT7 (NM_012276.2,584-602).
gctacggctatgaaaacaa

SEQ ID NO: 337952 - DNA, 19 bp, Homo sapiens
  siRNA target sequence for ILT7 (NM_012276.2,744-762).
cggctacatcagatacact

SEQ ID NO: 337953 - DNA, 19 bp, Homo sapiens
  siRNA target sequence for ILT7 (NM_012276.2,1040-1058).
gggacccgatgttcacttt

SEQ ID NO: 337954 - DNA, 19 bp, Homo sapiens
  siRNA target sequence for ILT7 (NM_012276.2,1268-1286).
ccctcaatccagcacaaaa

SEQ ID NO: 337955 - DNA, 19 bp, Homo sapiens
  siRNA target sequence for GAB2 (NM_012296.2,254-272).
gatgcaggcctgaccttta

SEQ ID NO: 337956 - DNA, 19 bp, Homo sapiens
  siRNA target sequence for GAB2 (NM_012296.2,257-275).
gcaggcctgacctttaaca

SEQ ID NO: 337957 - DNA, 19 bp, Homo sapiens
  siRNA target sequence for GAB2 (NM_012296.2,258-276).
caggcctgacctttaacaa

SEQ ID NO: 337958 - DNA, 19 bp, Homo sapiens
  siRNA target sequence for GAB2 (NM_012296.2,261-279).
gcctgacctttaacaagaa

SEQ ID NO: 337959 - DNA, 19 bp, Homo sapiens
  siRNA target sequence for GAB2 (NM_012296.2,606-624).
gcgcacctcaggagtatct

SEQ ID NO: 337960 - DNA, 19 bp, Homo sapiens
  siRNA target sequence for GAB2 (NM_012296.2,718-736).
cacagctgtacaaaaactt

SEQ ID NO: 337961 - DNA, 19 bp, Homo sapiens
  siRNA target sequence for GAB2 (NM_012296.2,805-823).
gccgagccggcacaataca

SEQ ID NO: 337962 - DNA, 19 bp, Homo sapiens
  siRNA target sequence for GAB2 (NM_012296.2,807-825).
cgagccggcacaatacaga

SEQ ID NO: 337963 - DNA, 19 bp, Homo sapiens
  siRNA target sequence for GAB2 (NM_012296.2,894-912).
caggctccgagacagataa

SEQ ID NO: 337964 - DNA, 19 bp, Homo sapiens
  siRNA target sequence for GAB2 (NM_012296.2,897-915).
gctccgagacagataatga

SEQ ID NO: 337965 - DNA, 19 bp, Homo sapiens
  siRNA target sequence for GAB2 (NM_012296.2,967-985).
ggacctcctggtagacaat

SEQ ID NO: 337966 - DNA, 19 bp, Homo sapiens
  siRNA target sequence for GAB2 (NM_012296.2,1021-1039).
gatccctaggacattcact

SEQ ID NO: 337967 - DNA, 19 bp, Homo sapiens
  siRNA target sequence for GAB2 (NM_012296.2,1156-1174).
gcagagaccgccaatcagt

SEQ ID NO: 337968 - DNA, 19 bp, Homo sapiens
  siRNA target sequence for GAB2 (NM_012296.2,1163-1181).
ccgccaatcagtgaaaata

SEQ ID NO: 337969 - DNA, 19 bp, Homo sapiens
  siRNA target sequence for GAB2 (NM_012296.2,1370-1388).
cgatcggacagcaccaatt

SEQ ID NO: 337970 - DNA, 19 bp, Homo sapiens
  siRNA target sequence for GAB2 (NM_012296.2,1383-1401).
ccaattctgaagacaacta

SEQ ID NO: 337971 - DNA, 19 bp, Homo sapiens
  siRNA target sequence for GAB2 (NM_012296.2,1384-1402).
caattctgaagacaactat

SEQ ID NO: 337972 - DNA, 19 bp, Homo sapiens
  siRNA target sequence for GAB2 (NM_012296.2,1396-1414).
caactatgtgcccatgaat

SEQ ID NO: 337973 - DNA, 19 bp, Homo sapiens
  siRNA target sequence for GAB2 (NM_012296.2,1700-1718).
gccaaccacaccttcaact

SEQ ID NO: 337974 - DNA, 19 bp, Homo sapiens
  siRNA target sequence for GAB2 (NM_012296.2,1869-1887).
gcaccggcagcgttgatta

SEQ ID NO: 337975 - DNA, 19 bp, Homo sapiens
  siRNA target sequence for GAB2 (NM_012296.2,1870-1888).
caccggcagcgttgattat

SEQ ID NO: 337976 - DNA, 19 bp, Homo sapiens
  siRNA target sequence for GAB2 (NM_012296.2,1872-1890).
ccggcagcgttgattatct

SEQ ID NO: 337977 - DNA, 19 bp, Homo sapiens
  siRNA target sequence for GAB2 (NM_012296.2,1925-1943).
caccgcaagccatctactt

SEQ ID NO: 337978 - DNA, 19 bp, Homo sapiens
  siRNA target sequence for GAB2 (NM_012296.2,1927-1945).
ccgcaagccatctacttca

SEQ ID NO: 337979 - DNA, 19 bp, Homo sapiens
  siRNA target sequence for KIN (NM_012311.2,51-69).
ggggaagtcggattttctt

SEQ ID NO: 337980 - DNA, 19 bp, Homo sapiens
  siRNA target sequence for KIN (NM_012311.2,52-70).
gggaagtcggattttctta

SEQ ID NO: 337981 - DNA, 19 bp, Homo sapiens
  siRNA target sequence for KIN (NM_012311.2,54-72).
gaagtcggattttcttact

SEQ ID NO: 337982 - DNA, 19 bp, Homo sapiens
  siRNA target sequence for KIN (NM_012311.2,157-175).
gacgagaatggctttaagt

SEQ ID NO: 337983 - DNA, 19 bp, Homo sapiens
  siRNA target sequence for KIN (NM_012311.2,194-212).
ctcatcagagacaactatt

SEQ ID NO: 337984 - DNA, 19 bp, Homo sapiens
  siRNA target sequence for KIN (NM_012311.2,229-247).
cctcagcagtttatggatt

SEQ ID NO: 337985 - DNA, 19 bp, Homo sapiens
  siRNA target sequence for KIN (NM_012311.2,230-248).
ctcagcagtttatggatta

SEQ ID NO: 337986 - DNA, 19 bp, Homo sapiens
  siRNA target sequence for KIN (NM_012311.2,232-250).
cagcagtttatggattatt

SEQ ID NO: 337987 - DNA, 19 bp, Homo sapiens
  siRNA target sequence for KIN (NM_012311.2,256-274).
gaggaattccgaaatgact

SEQ ID NO: 337988 - DNA, 19 bp, Homo sapiens
  siRNA target sequence for KIN (NM_012311.2,264-282).
ccgaaatgactttctagaa

SEQ ID NO: 337989 - DNA, 19 bp, Homo sapiens
  siRNA target sequence for KIN (NM_012311.2,291-309).
gagacgctttggcactaaa

SEQ ID NO: 337990 - DNA, 19 bp, Homo sapiens
  siRNA target sequence for KIN (NM_012311.2,353-371).
gagagcacatccacatgaa

SEQ ID NO: 337991 - DNA, 19 bp, Homo sapiens
  siRNA target sequence for KIN (NM_012311.2,446-464).
caccaaaaggctggtatat

SEQ ID NO: 337992 - DNA, 19 bp, Homo sapiens
  siRNA target sequence for KIN (NM_012311.2,449-467).
caaaaggctggtatattca

SEQ ID NO: 337993 - DNA, 19 bp, Homo sapiens
  siRNA target sequence for KIN (NM_012311.2,455-473).
gctggtatattcagtacat

SEQ ID NO: 337994 - DNA, 19 bp, Homo sapiens
  siRNA target sequence for KIN (NM_012311.2,456-474).
ctggtatattcagtacata

SEQ ID NO: 337995 - DNA, 19 bp, Homo sapiens
  siRNA target sequence for KIN (NM_012311.2,458-476).
ggtatattcagtacataga

SEQ ID NO: 337996 - DNA, 19 bp, Homo sapiens
  siRNA target sequence for KIN (NM_012311.2,475-493).
gacagggacccagaaacta

SEQ ID NO: 337997 - DNA, 19 bp, Homo sapiens
  siRNA target sequence for KIN (NM_012311.2,604-622).
caggaggtccctactttta

SEQ ID NO: 337998 - DNA, 19 bp, Homo sapiens
  siRNA target sequence for KIN (NM_012311.2,612-630).
ccctacttttacggaatta

SEQ ID NO: 337999 - DNA, 19 bp, Homo sapiens
  siRNA target sequence for KIN (NM_012311.2,613-631).
cctacttttacggaattaa

SEQ ID NO: 338000 - DNA, 19 bp, Homo sapiens
  siRNA target sequence for KIN (NM_012311.2,655-673).
gtcacgtttaatttgagta

SEQ ID NO: 338001 - DNA, 19 bp, Homo sapiens
  siRNA target sequence for KIN (NM_012311.2,697-715).
gcaacatcttccaagtcaa

SEQ ID NO: 338002 - DNA, 19 bp, Homo sapiens
  siRNA target sequence for KIN (NM_012311.2,755-773).
cagcatcagtgaaacgaaa

SEQ ID NO: 338003 - DNA, 19 bp, Homo sapiens
  siRNA target sequence for KIN (NM_012311.2,788-806).
gctcaactcagtctaaaga

SEQ ID NO: 338004 - DNA, 19 bp, Homo sapiens
  siRNA target sequence for KIN (NM_012311.2,885-903).
ctggctacagcctgaaatt

SEQ ID NO: 338005 - DNA, 19 bp, Homo sapiens
  siRNA target sequence for KIN (NM_012311.2,887-905).
ggctacagcctgaaattat

SEQ ID NO: 338006 - DNA, 19 bp, Homo sapiens
  siRNA target sequence for KIN (NM_012311.2,892-910).
cagcctgaaattattgtga

SEQ ID NO: 338007 - DNA, 19 bp, Homo sapiens
  siRNA target sequence for KIN (NM_012311.2,928-946).
ctgggagagaaatatcata

SEQ ID NO: 338008 - DNA, 19 bp, Homo sapiens
  siRNA target sequence for KIN (NM_012311.2,955-973).
gctattgttaaggaagtaa

SEQ ID NO: 338009 - DNA, 19 bp, Homo sapiens
  siRNA target sequence for KIN (NM_012311.2,966-984).
ggaagtaattgacaaatat

SEQ ID NO: 338010 - DNA, 19 bp, Homo sapiens
  siRNA target sequence for KIN (NM_012311.2,967-985).
gaagtaattgacaaatata

SEQ ID NO: 338011 - DNA, 19 bp, Homo sapiens
  siRNA target sequence for KIN (NM_012311.2,991-1009).
gttgtgaagatgattgatt

SEQ ID NO: 338012 - DNA, 19 bp, Homo sapiens
  siRNA target sequence for KIN (NM_012311.2,1030-1048).
gaccagactcatttagaga

SEQ ID NO: 338013 - DNA, 19 bp, Homo sapiens
  siRNA target sequence for KIN (NM_012311.2,1037-1055).
ctcatttagagacagtaat

SEQ ID NO: 338014 - DNA, 19 bp, Homo sapiens
  siRNA target sequence for KIN (NM_012311.2,1145-1163).
cagctactatcgtcattga

SEQ ID NO: 338015 - DNA, 19 bp, Homo sapiens
  siRNA target sequence for KIN (NM_012311.2,1147-1165).
gctactatcgtcattgaaa

SEQ ID NO: 338016 - DNA, 19 bp, Homo sapiens
  siRNA target sequence for KIN (NM_012311.2,1187-1205).
gagttgaaggaattcaata

SEQ ID NO: 338017 - DNA, 19 bp, Homo sapiens
  siRNA target sequence for PIGN (NM_012327.3,325-343).
ctttgggattgcttataca

SEQ ID NO: 338018 - DNA, 19 bp, Homo sapiens
  siRNA target sequence for PIGN (NM_012327.3,329-347).
gggattgcttatacatttt

SEQ ID NO: 338019 - DNA, 19 bp, Homo sapiens
  siRNA target sequence for PIGN (NM_012327.3,361-379).
ccatctttgacatttattt

SEQ ID NO: 338020 - DNA, 19 bp, Homo sapiens
  siRNA target sequence for PIGN (NM_012327.3,427-445).
ctcctccagcgagaagatt

SEQ ID NO: 338021 - DNA, 19 bp, Homo sapiens
  siRNA target sequence for PIGN (NM_012327.3,430-448).
ctccagcgagaagattagt

SEQ ID NO: 338022 - DNA, 19 bp, Homo sapiens
  siRNA target sequence for PIGN (NM_012327.3,432-450).
ccagcgagaagattagtgt

SEQ ID NO: 338023 - DNA, 19 bp, Homo sapiens
  siRNA target sequence for PIGN (NM_012327.3,436-454).
cgagaagattagtgttgtt

SEQ ID NO: 338024 - DNA, 19 bp, Homo sapiens
  siRNA target sequence for PIGN (NM_012327.3,439-457).
gaagattagtgttgtttgt

SEQ ID NO: 338025 - DNA, 19 bp, Homo sapiens
  siRNA target sequence for PIGN (NM_012327.3,472-490).
gagcagatgcactttacga

SEQ ID NO: 338026 - DNA, 19 bp, Homo sapiens
  siRNA target sequence for PIGN (NM_012327.3,474-492).
gcagatgcactttacgaat

SEQ ID NO: 338027 - DNA, 19 bp, Homo sapiens
  siRNA target sequence for PIGN (NM_012327.3,475-493).
cagatgcactttacgaatt

SEQ ID NO: 338028 - DNA, 19 bp, Homo sapiens
  siRNA target sequence for PIGN (NM_012327.3,481-499).
cactttacgaattagatga

SEQ ID NO: 338029 - DNA, 19 bp, Homo sapiens
  siRNA target sequence for PIGN (NM_012327.3,483-501).
ctttacgaattagatgaaa

SEQ ID NO: 338030 - DNA, 19 bp, Homo sapiens
  siRNA target sequence for PIGN (NM_012327.3,519-537).
ccgtttattaggaatatca

SEQ ID NO: 338031 - DNA, 19 bp, Homo sapiens
  siRNA target sequence for PIGN (NM_012327.3,520-538).
cgtttattaggaatatcat

SEQ ID NO: 338032 - DNA, 19 bp, Homo sapiens
  siRNA target sequence for PIGN (NM_012327.3,607-625).
ctctgatagctgggtttta

SEQ ID NO: 338033 - DNA, 19 bp, Homo sapiens
  siRNA target sequence for PIGN (NM_012327.3,754-772).
ctagtggagaccacgttta

SEQ ID NO: 338034 - DNA, 19 bp, Homo sapiens
  siRNA target sequence for PIGN (NM_012327.3,759-777).
ggagaccacgtttatacat

SEQ ID NO: 338035 - DNA, 19 bp, Homo sapiens
  siRNA target sequence for PIGN (NM_012327.3,760-778).
gagaccacgtttatacata

SEQ ID NO: 338036 - DNA, 19 bp, Homo sapiens
  siRNA target sequence for PIGN (NM_012327.3,764-782).
ccacgtttatacatatagt

SEQ ID NO: 338037 - DNA, 19 bp, Homo sapiens
  siRNA target sequence for PIGN (NM_012327.3,765-783).
cacgtttatacatatagtt

SEQ ID NO: 338038 - DNA, 19 bp, Homo sapiens
  siRNA target sequence for PIGN (NM_012327.3,767-785).
cgtttatacatatagttat

SEQ ID NO: 338039 - DNA, 19 bp, Homo sapiens
  siRNA target sequence for PIGN (NM_012327.3,830-848).
ggatacgtgggtttttgat

SEQ ID NO: 338040 - DNA, 19 bp, Homo sapiens
  siRNA target sequence for PIGN (NM_012327.3,831-849).
gatacgtgggtttttgata

SEQ ID NO: 338041 - DNA, 19 bp, Homo sapiens
  siRNA target sequence for PIGN (NM_012327.3,874-892).
ccagaaacaaccagtcttt

SEQ ID NO: 338042 - DNA, 19 bp, Homo sapiens
  siRNA target sequence for PIGN (NM_012327.3,877-895).
gaaacaaccagtctttgtt

SEQ ID NO: 338043 - DNA, 19 bp, Homo sapiens
  siRNA target sequence for PIGN (NM_012327.3,929-947).
cttacatttattaggaata

SEQ ID NO: 338044 - DNA, 19 bp, Homo sapiens
  siRNA target sequence for PIGN (NM_012327.3,982-1000).
gagactacaagcacaatat

SEQ ID NO: 338045 - DNA, 19 bp, Homo sapiens
  siRNA target sequence for PIGN (NM_012327.3,1088-1106).
ctctgaccatggaatgaca

SEQ ID NO: 338046 - DNA, 19 bp, Homo sapiens
  siRNA target sequence for PIGN (NM_012327.3,1165-1183).
ggggagctggaatcaagta

SEQ ID NO: 338047 - DNA, 19 bp, Homo sapiens
  siRNA target sequence for PIGN (NM_012327.3,1178-1196).
caagtatccccaaagagta

SEQ ID NO: 338048 - DNA, 19 bp, Homo sapiens
  siRNA target sequence for PIGN (NM_012327.3,1275-1293).
gatattgcaccattgatga

SEQ ID NO: 338049 - DNA, 19 bp, Homo sapiens
  siRNA target sequence for PIGN (NM_012327.3,1341-1359).
cctgtggattatcttaaca

SEQ ID NO: 338050 - DNA, 19 bp, Homo sapiens
  siRNA target sequence for PIGN (NM_012327.3,1342-1360).
ctgtggattatcttaacaa

SEQ ID NO: 338051 - DNA, 19 bp, Homo sapiens
  siRNA target sequence for PIGN (NM_012327.3,1344-1362).
gtggattatcttaacaaca

SEQ ID NO: 338052 - DNA, 19 bp, Homo sapiens
  siRNA target sequence for PIGN (NM_012327.3,1377-1395).
gcagagagcatgtttacaa

SEQ ID NO: 338053 - DNA, 19 bp, Homo sapiens
  siRNA target sequence for PIGN (NM_012327.3,1382-1400).
gagcatgtttacaaatgca

SEQ ID NO: 338054 - DNA, 19 bp, Homo sapiens
  siRNA target sequence for PIGN (NM_012327.3,1418-1436).
gttcaaggtgaaaatgact

SEQ ID NO: 338055 - DNA, 19 bp, Homo sapiens
  siRNA target sequence for PIGN (NM_012327.3,1584-1602).
catcttgcattgaaaggat

SEQ ID NO: 338056 - DNA, 19 bp, Homo sapiens
  siRNA target sequence for PIGN (NM_012327.3,1595-1613).
gaaaggattgtcctattat

SEQ ID NO: 338057 - DNA, 19 bp, Homo sapiens
  siRNA target sequence for PIGN (NM_012327.3,1599-1617).
ggattgtcctattatcaca

SEQ ID NO: 338058 - DNA, 19 bp, Homo sapiens
  siRNA target sequence for PIGN (NM_012327.3,1604-1622).
gtcctattatcacacatat

SEQ ID NO: 338059 - DNA, 19 bp, Homo sapiens
  siRNA target sequence for PIGN (NM_012327.3,1631-1649).
ctttttgggcgtcaatgtt

SEQ ID NO: 338060 - DNA, 19 bp, Homo sapiens
  siRNA target sequence for PIGN (NM_012327.3,1637-1655).
gggcgtcaatgttgttatt

SEQ ID NO: 338061 - DNA, 19 bp, Homo sapiens
  siRNA target sequence for PIGN (NM_012327.3,1640-1658).
cgtcaatgttgttattggt

SEQ ID NO: 338062 - DNA, 19 bp, Homo sapiens
  siRNA target sequence for PIGN (NM_012327.3,1641-1659).
gtcaatgttgttattggtt

SEQ ID NO: 338063 - DNA, 19 bp, Homo sapiens
  siRNA target sequence for PIGN (NM_012327.3,1681-1699).
cctctttgttgatcatcaa

SEQ ID NO: 338064 - DNA, 19 bp, Homo sapiens
  siRNA target sequence for PIGN (NM_012327.3,1700-1718).
gtctcattccaaccttata

SEQ ID NO: 338065 - DNA, 19 bp, Homo sapiens
  siRNA target sequence for PIGN (NM_012327.3,1712-1730).
ccttataaaaggtgttagt

SEQ ID NO: 338066 - DNA, 19 bp, Homo sapiens
  siRNA target sequence for PIGN (NM_012327.3,1819-1837).
gtccctggacatattatgt

SEQ ID NO: 338067 - DNA, 19 bp, Homo sapiens
  siRNA target sequence for PIGN (NM_012327.3,1850-1868).
gccactgccaatatggtat

SEQ ID NO: 338068 - DNA, 19 bp, Homo sapiens
  siRNA target sequence for PIGN (NM_012327.3,1864-1882).
ggtatgcggttctaagaga

SEQ ID NO: 338069 - DNA, 19 bp, Homo sapiens
  siRNA target sequence for PIGN (NM_012327.3,1865-1883).
gtatgcggttctaagagaa

SEQ ID NO: 338070 - DNA, 19 bp, Homo sapiens
  siRNA target sequence for PIGN (NM_012327.3,1870-1888).
cggttctaagagaatttca

SEQ ID NO: 338071 - DNA, 19 bp, Homo sapiens
  siRNA target sequence for PIGN (NM_012327.3,1963-1981).
ccctgggaattgaagtatt

SEQ ID NO: 338072 - DNA, 19 bp, Homo sapiens
  siRNA target sequence for PIGN (NM_012327.3,1964-1982).
cctgggaattgaagtatta

SEQ ID NO: 338073 - DNA, 19 bp, Homo sapiens
  siRNA target sequence for PIGN (NM_012327.3,1967-1985).
gggaattgaagtattagtt

SEQ ID NO: 338074 - DNA, 19 bp, Homo sapiens
  siRNA target sequence for PIGN (NM_012327.3,1969-1987).
gaattgaagtattagttct

SEQ ID NO: 338075 - DNA, 19 bp, Homo sapiens
  siRNA target sequence for PIGN (NM_012327.3,1990-2008).
gttttttctaccgctatat

SEQ ID NO: 338076 - DNA, 19 bp, Homo sapiens
  siRNA target sequence for PIGN (NM_012327.3,2009-2027).
gcttaccgctggacttact

SEQ ID NO: 338077 - DNA, 19 bp, Homo sapiens
  siRNA target sequence for PIGN (NM_012327.3,2085-2103).
ctgagttggactttcttct

SEQ ID NO: 338078 - DNA, 19 bp, Homo sapiens
  siRNA target sequence for PIGN (NM_012327.3,2195-2213).
gttatccctgtgtgttgta

SEQ ID NO: 338079 - DNA, 19 bp, Homo sapiens
  siRNA target sequence for PIGN (NM_012327.3,2285-2303).
cacagtgctctccatgtat

SEQ ID NO: 338080 - DNA, 19 bp, Homo sapiens
  siRNA target sequence for PIGN (NM_012327.3,2287-2305).
cagtgctctccatgtatgt

SEQ ID NO: 338081 - DNA, 19 bp, Homo sapiens
  siRNA target sequence for PIGN (NM_012327.3,2349-2367).
cctctcatgaatcaaatta

SEQ ID NO: 338082 - DNA, 19 bp, Homo sapiens
  siRNA target sequence for PIGN (NM_012327.3,2432-2450).
gcgattgttcagcatactt

SEQ ID NO: 338083 - DNA, 19 bp, Homo sapiens
  siRNA target sequence for PIGN (NM_012327.3,2462-2480).
gtcaacctacctacttcta

SEQ ID NO: 338084 - DNA, 19 bp, Homo sapiens
  siRNA target sequence for PIGN (NM_012327.3,2528-2546).
gtttgtctggataaacata

SEQ ID NO: 338085 - DNA, 19 bp, Homo sapiens
  siRNA target sequence for PIGN (NM_012327.3,2603-2621).
ccagttctcttataatact

SEQ ID NO: 338086 - DNA, 19 bp, Homo sapiens
  siRNA target sequence for PIGN (NM_012327.3,2606-2624).
gttctcttataatactgat

SEQ ID NO: 338087 - DNA, 19 bp, Homo sapiens
  siRNA target sequence for PIGN (NM_012327.3,2629-2647).
ctcagtttcgacagctata

SEQ ID NO: 338088 - DNA, 19 bp, Homo sapiens
  siRNA target sequence for PIGN (NM_012327.3,2660-2678).
ccgtagggcctttttcctt

SEQ ID NO: 338089 - DNA, 19 bp, Homo sapiens
  siRNA target sequence for PIGN (NM_012327.3,2706-2724).
ggaactggaaatatagctt

SEQ ID NO: 338090 - DNA, 19 bp, Homo sapiens
  siRNA target sequence for PIGN (NM_012327.3,2725-2743).
ctattaacagctttgatct

SEQ ID NO: 338091 - DNA, 19 bp, Homo sapiens
  siRNA target sequence for PIGN (NM_012327.3,2847-2865).
gaagcagttcagttgacta

SEQ ID NO: 338092 - DNA, 19 bp, Homo sapiens
  siRNA target sequence for PIGN (NM_012327.3,2875-2893).
cgtcaaaaagcctttttct

SEQ ID NO: 338093 - DNA, 19 bp, Homo sapiens
  siRNA target sequence for PIGN (NM_012327.3,2892-2910).
ctcattgttctcgtcatat

SEQ ID NO: 338094 - DNA, 19 bp, Homo sapiens
  siRNA target sequence for PIGN (NM_012327.3,2894-2912).
cattgttctcgtcatatca

SEQ ID NO: 338095 - DNA, 19 bp, Homo sapiens
  siRNA target sequence for PIGN (NM_012327.3,2901-2919).
ctcgtcatatcagacatta

SEQ ID NO: 338096 - DNA, 19 bp, Homo sapiens
  siRNA target sequence for PIGN (NM_012327.3,2913-2931).
gacattatggctttgcatt

SEQ ID NO: 338097 - DNA, 19 bp, Homo sapiens
  siRNA target sequence for PIGN (NM_012327.3,2936-2954).
cttcttggtcaaggattat

SEQ ID NO: 338098 - DNA, 19 bp, Homo sapiens
  siRNA target sequence for PIGN (NM_012327.3,2981-2999).
catcagccactatgtgatt

SEQ ID NO: 338099 - DNA, 19 bp, Homo sapiens
  siRNA target sequence for PIGN (NM_012327.3,3047-3065).
gctgctcacaacgaagaaa

SEQ ID NO: 338100 - DNA, 19 bp, Homo sapiens
  siRNA target sequence for PIGN (NM_012327.3,3051-3069).
ctcacaacgaagaaactca

SEQ ID NO: 338101 - DNA, 19 bp, Homo sapiens
  siRNA target sequence for OR2F1 (NM_012369.1,757-775).
ggtgtggccattttcactt

SEQ ID NO: 338102 - DNA, 19 bp, Homo sapiens
  siRNA target sequence for OR2F1 (NM_012369.1,758-776).
gtgtggccattttcactta

SEQ ID NO: 338103 - DNA, 19 bp, Homo sapiens
  siRNA target sequence for OR2F1 (NM_012369.1,760-778).
gtggccattttcacttaca

SEQ ID NO: 338104 - DNA, 19 bp, Homo sapiens
  siRNA target sequence for OR2F1 (NM_012369.1,802-820).
gtccttcaggagaagttgt

SEQ ID NO: 338105 - DNA, 19 bp, Homo sapiens
  siRNA target sequence for OR3A3 (NM_012373.1,652-670).
gcacccttggtcttcatca

SEQ ID NO: 338106 - DNA, 19 bp, Homo sapiens
  siRNA target sequence for OR3A3 (NM_012373.1,811-829).
ctgggttcagtggaatctt

SEQ ID NO: 338107 - DNA, 19 bp, Homo sapiens
  siRNA target sequence for OR3A3 (NM_012373.1,844-862).
ggggttggggttttcatga

SEQ ID NO: 338108 - DNA, 19 bp, Homo sapiens
  siRNA target sequence for OR7C2 (NM_012377.1,246-264).
ggtgaatatccaaacacaa

SEQ ID NO: 338109 - DNA, 19 bp, Homo sapiens
  siRNA target sequence for OR7C2 (NM_012377.1,247-265).
gtgaatatccaaacacaaa

SEQ ID NO: 338110 - DNA, 19 bp, Homo sapiens
  siRNA target sequence for OR7C2 (NM_012377.1,496-514).
ctgtccttctgcacaaata

SEQ ID NO: 338111 - DNA, 19 bp, Homo sapiens
  siRNA target sequence for OR7C2 (NM_012377.1,666-684).
ctcctccgtcctaagagta

SEQ ID NO: 338112 - DNA, 19 bp, Homo sapiens
  siRNA target sequence for OR7C2 (NM_012377.1,669-687).
ctccgtcctaagagtatct

SEQ ID NO: 338113 - DNA, 19 bp, Homo sapiens
  siRNA target sequence for OSRF (NM_012382.1,214-232).
gcttcatgccattaaacgt

SEQ ID NO: 338114 - DNA, 19 bp, Homo sapiens
  siRNA target sequence for OSRF (NM_012382.1,215-233).
cttcatgccattaaacgta

SEQ ID NO: 338115 - DNA, 19 bp, Homo sapiens
  siRNA target sequence for OSRF (NM_012382.1,254-272).
ggctgtgctgagaaaagta

SEQ ID NO: 338116 - DNA, 19 bp, Homo sapiens
  siRNA target sequence for OSRF (NM_012382.1,291-309).
gagccagtttggctgaaaa

SEQ ID NO: 338117 - DNA, 19 bp, Homo sapiens
  siRNA target sequence for OSRF (NM_012382.1,315-333).
gatatcgggaggcaattca

SEQ ID NO: 338118 - DNA, 19 bp, Homo sapiens
  siRNA target sequence for OSRF (NM_012382.1,340-358).
ggatgaagcactacagtta

SEQ ID NO: 338119 - DNA, 19 bp, Homo sapiens
  siRNA target sequence for OSRF (NM_012382.1,372-390).
ctaccctatacgagatgaa

SEQ ID NO: 338120 - DNA, 19 bp, Homo sapiens
  siRNA target sequence for OSRF (NM_012382.1,376-394).
cctatacgagatgaaatca

SEQ ID NO: 338121 - DNA, 19 bp, Homo sapiens
  siRNA target sequence for OSRF (NM_012382.1,520-538).
gataatcctggcaattcga

SEQ ID NO: 338122 - DNA, 19 bp, Homo sapiens
  siRNA target sequence for OSRF (NM_012382.1,526-544).
cctggcaattcgaagtttt

SEQ ID NO: 338123 - DNA, 19 bp, Homo sapiens
  siRNA target sequence for OSRF (NM_012382.1,551-569).
gcccttcacatctatccaa

SEQ ID NO: 338124 - DNA, 19 bp, Homo sapiens
  siRNA target sequence for OSRF (NM_012382.1,566-584).
ccaatgaaccctgaaatat

SEQ ID NO: 338125 - DNA, 19 bp, Homo sapiens
  siRNA target sequence for OSRF (NM_012382.1,631-649).
ggtagcacagaggattaaa

SEQ ID NO: 338126 - DNA, 19 bp, Homo sapiens
  siRNA target sequence for OSRF (NM_012382.1,632-650).
gtagcacagaggattaaaa

SEQ ID NO: 338127 - DNA, 19 bp, Homo sapiens
  siRNA target sequence for OSRF (NM_012382.1,656-674).
gaagcaccagctgaagtaa

SEQ ID NO: 338128 - DNA, 19 bp, Homo sapiens
  siRNA target sequence for OSRF (NM_012382.1,660-678).
caccagctgaagtaacaca

SEQ ID NO: 338129 - DNA, 19 bp, Homo sapiens
  siRNA target sequence for OSRF (NM_012382.1,665-683).
gctgaagtaacacactttt

SEQ ID NO: 338130 - DNA, 19 bp, Homo sapiens
  siRNA target sequence for OSRF (NM_012382.1,800-818).
gcttctggggccatagaga

SEQ ID NO: 338131 - DNA, 19 bp, Homo sapiens
  siRNA target sequence for OSRF (NM_012382.1,806-824).
ggggccatagagactgtaa

SEQ ID NO: 338132 - DNA, 19 bp, Homo sapiens
  siRNA target sequence for PHLDA3 (NM_012396.1,615-633).
ccctaggcctggtcaagtt

SEQ ID NO: 338133 - DNA, 19 bp, Homo sapiens
  siRNA target sequence for PHLDA3 (NM_012396.1,617-635).
ctaggcctggtcaagttca

SEQ ID NO: 338134 - DNA, 19 bp, Homo sapiens
  siRNA target sequence for ANP32C (NM_012403.1,175-193).
gacttaccaaagttaaagt

SEQ ID NO: 338135 - DNA, 19 bp, Homo sapiens
  siRNA target sequence for ANP32C (NM_012403.1,195-213).
gagaaagcttgaactaaga

SEQ ID NO: 338136 - DNA, 19 bp, Homo sapiens
  siRNA target sequence for ANP32C (NM_012403.1,452-470).
ccccttactcagatattga

SEQ ID NO: 338137 - DNA, 19 bp, Homo sapiens
  siRNA target sequence for ANP32D (NM_012404.2,227-245).
cctcagtgggcctagaagt

SEQ ID NO: 338138 - DNA, 19 bp, Homo sapiens
  siRNA target sequence for PRND (NM_012409.2,153-171).
ggcatcaagcacagaatca

SEQ ID NO: 338139 - DNA, 19 bp, Homo sapiens
  siRNA target sequence for PRND (NM_012409.2,328-346).
ccgatggcatccactacaa

SEQ ID NO: 338140 - DNA, 19 bp, Homo sapiens
  siRNA target sequence for PRND (NM_012409.2,486-504).
ctctgctccctcaagcatt

SEQ ID NO: 338141 - DNA, 19 bp, Homo sapiens
  siRNA target sequence for PRND (NM_012409.2,495-513).
ctcaagcattgcgagtttt

SEQ ID NO: 338142 - DNA, 19 bp, Homo sapiens
  siRNA target sequence for H2AV (NM_012412.2,369-387).
gctggagctggcaggtaat

SEQ ID NO: 338143 - DNA, 19 bp, Homo sapiens
  siRNA target sequence for SF3B3 (NM_012426.2,331-349).
gtttcccgtgggaagatct

SEQ ID NO: 338144 - DNA, 19 bp, Homo sapiens
  siRNA target sequence for SF3B3 (NM_012426.2,372-390).
caacactggcaaagtacat

SEQ ID NO: 338145 - DNA, 19 bp, Homo sapiens
  siRNA target sequence for SF3B3 (NM_012426.2,394-412).
ctactcactgtggaagtat

SEQ ID NO: 338146 - DNA, 19 bp, Homo sapiens
  siRNA target sequence for SF3B3 (NM_012426.2,449-467).
caggtggcaccaaagacta

SEQ ID NO: 338147 - DNA, 19 bp, Homo sapiens
  siRNA target sequence for SF3B3 (NM_012426.2,480-498).
cagtgactctggtcgaatt

SEQ ID NO: 338148 - DNA, 19 bp, Homo sapiens
  siRNA target sequence for SF3B3 (NM_012426.2,482-500).
gtgactctggtcgaattgt

SEQ ID NO: 338149 - DNA, 19 bp, Homo sapiens
  siRNA target sequence for SF3B3 (NM_012426.2,484-502).
gactctggtcgaattgtta

SEQ ID NO: 338150 - DNA, 19 bp, Homo sapiens
  siRNA target sequence for SF3B3 (NM_012426.2,508-526).
gaataccagccatctaaga

SEQ ID NO: 338151 - DNA, 19 bp, Homo sapiens
  siRNA target sequence for SF3B3 (NM_012426.2,582-600).
cgttcctggccagttctta

SEQ ID NO: 338152 - DNA, 19 bp, Homo sapiens
  siRNA target sequence for SF3B3 (NM_012426.2,616-634).
gggcgagccgttatgatta

SEQ ID NO: 338153 - DNA, 19 bp, Homo sapiens
  siRNA target sequence for SF3B3 (NM_012426.2,618-636).
gcgagccgttatgattagt

SEQ ID NO: 338154 - DNA, 19 bp, Homo sapiens
  siRNA target sequence for SF3B3 (NM_012426.2,682-700).
gcagcccgacttaccattt

SEQ ID NO: 338155 - DNA, 19 bp, Homo sapiens
  siRNA target sequence for SF3B3 (NM_012426.2,685-703).
gcccgacttaccatttcat

SEQ ID NO: 338156 - DNA, 19 bp, Homo sapiens
  siRNA target sequence for SF3B3 (NM_012426.2,687-705).
ccgacttaccatttcatct

SEQ ID NO: 338157 - DNA, 19 bp, Homo sapiens
  siRNA target sequence for SF3B3 (NM_012426.2,729-747).
cactttagtgtatcatgta

SEQ ID NO: 338158 - DNA, 19 bp, Homo sapiens
  siRNA target sequence for SF3B3 (NM_012426.2,754-772).
gtagatgtcggatttgaaa

SEQ ID NO: 338159 - DNA, 19 bp, Homo sapiens
  siRNA target sequence for SF3B3 (NM_012426.2,760-778).
gtcggatttgaaaatccaa

SEQ ID NO: 338160 - DNA, 19 bp, Homo sapiens
  siRNA target sequence for SF3B3 (NM_012426.2,902-920).
gaaaatacagtgaaccttt

SEQ ID NO: 338161 - DNA, 19 bp, Homo sapiens
  siRNA target sequence for SF3B3 (NM_012426.2,925-943).
gaacacggcaacttcctta

SEQ ID NO: 338162 - DNA, 19 bp, Homo sapiens
  siRNA target sequence for SF3B3 (NM_012426.2,928-946).
cacggcaacttccttatta

SEQ ID NO: 338163 - DNA, 19 bp, Homo sapiens
  siRNA target sequence for SF3B3 (NM_012426.2,930-948).
cggcaacttccttattaca

SEQ ID NO: 338164 - DNA, 19 bp, Homo sapiens
  siRNA target sequence for SF3B3 (NM_012426.2,932-950).
gcaacttccttattacagt

SEQ ID NO: 338165 - DNA, 19 bp, Homo sapiens
  siRNA target sequence for SF3B3 (NM_012426.2,1068-1086).
cctggatgaccctgaaaga

SEQ ID NO: 338166 - DNA, 19 bp, Homo sapiens
  siRNA target sequence for SF3B3 (NM_012426.2,1112-1130).
cccataaaaccaaatcgat

SEQ ID NO: 338167 - DNA, 19 bp, Homo sapiens
  siRNA target sequence for SF3B3 (NM_012426.2,1159-1177).
ggagatatctttaagatca

SEQ ID NO: 338168 - DNA, 19 bp, Homo sapiens
  siRNA target sequence for SF3B3 (NM_012426.2,1162-1180).
gatatctttaagatcactt

SEQ ID NO: 338169 - DNA, 19 bp, Homo sapiens
  siRNA target sequence for SF3B3 (NM_012426.2,1205-1223).
ctgagatccggctcaaata

SEQ ID NO: 338170 - DNA, 19 bp, Homo sapiens
  siRNA target sequence for SF3B3 (NM_012426.2,1207-1225).
gagatccggctcaaatatt

SEQ ID NO: 338171 - DNA, 19 bp, Homo sapiens
  siRNA target sequence for SF3B3 (NM_012426.2,1298-1316).
gaaaccattacttatatca

SEQ ID NO: 338172 - DNA, 19 bp, Homo sapiens
  siRNA target sequence for SF3B3 (NM_012426.2,1302-1320).
ccattacttatatcaaatt

SEQ ID NO: 338173 - DNA, 19 bp, Homo sapiens
  siRNA target sequence for SF3B3 (NM_012426.2,1399-1417).
cagccaagaccacttaaaa

SEQ ID NO: 338174 - DNA, 19 bp, Homo sapiens
  siRNA target sequence for SF3B3 (NM_012426.2,1403-1421).
caagaccacttaaaaacct

SEQ ID NO: 338175 - DNA, 19 bp, Homo sapiens
  siRNA target sequence for SF3B3 (NM_012426.2,1619-1637).
cagtgcgtcgacacattga

SEQ ID NO: 338176 - DNA, 19 bp, Homo sapiens
  siRNA target sequence for SF3B3 (NM_012426.2,1623-1641).
gcgtcgacacattgaagat

SEQ ID NO: 338177 - DNA, 19 bp, Homo sapiens
  siRNA target sequence for SF3B3 (NM_012426.2,1692-1710).
gtccattggagaaactgta

SEQ ID NO: 338178 - DNA, 19 bp, Homo sapiens
  siRNA target sequence for SF3B3 (NM_012426.2,1755-1773).
gtcctgctccttattagga

SEQ ID NO: 338179 - DNA, 19 bp, Homo sapiens
  siRNA target sequence for SF3B3 (NM_012426.2,1844-1862).
ggaagacccctggaaagaa

SEQ ID NO: 338180 - DNA, 19 bp, Homo sapiens
  siRNA target sequence for SF3B3 (NM_012426.2,2108-2126).
gtttgcaacctctaagcat

SEQ ID NO: 338181 - DNA, 19 bp, Homo sapiens
  siRNA target sequence for SF3B3 (NM_012426.2,2143-2161).
cagcctgagtccttgtgta

SEQ ID NO: 338182 - DNA, 19 bp, Homo sapiens
  siRNA target sequence for SF3B3 (NM_012426.2,2153-2171).
ccttgtgtatcgtggaaat

SEQ ID NO: 338183 - DNA, 19 bp, Homo sapiens
  siRNA target sequence for SF3B3 (NM_012426.2,2209-2227).
ggctcgattggcttcctat

SEQ ID NO: 338184 - DNA, 19 bp, Homo sapiens
  siRNA target sequence for SF3B3 (NM_012426.2,2210-2228).
gctcgattggcttcctata

SEQ ID NO: 338185 - DNA, 19 bp, Homo sapiens
  siRNA target sequence for SF3B3 (NM_012426.2,2213-2231).
cgattggcttcctatacct

SEQ ID NO: 338186 - DNA, 19 bp, Homo sapiens
  siRNA target sequence for SF3B3 (NM_012426.2,2218-2236).
ggcttcctatacctgaata

SEQ ID NO: 338187 - DNA, 19 bp, Homo sapiens
  siRNA target sequence for SF3B3 (NM_012426.2,2220-2238).
cttcctatacctgaatatt

SEQ ID NO: 338188 - DNA, 19 bp, Homo sapiens
  siRNA target sequence for SF3B3 (NM_012426.2,2340-2358).
cttccgagtccgaatgcaa

SEQ ID NO: 338189 - DNA, 19 bp, Homo sapiens
  siRNA target sequence for SF3B3 (NM_012426.2,2389-2407).
cgctcatggttgagctatt

SEQ ID NO: 338190 - DNA, 19 bp, Homo sapiens
  siRNA target sequence for SF3B3 (NM_012426.2,2393-2411).
catggttgagctattctta

SEQ ID NO: 338191 - DNA, 19 bp, Homo sapiens
  siRNA target sequence for SF3B3 (NM_012426.2,2397-2415).
gttgagctattcttaccaa

SEQ ID NO: 338192 - DNA, 19 bp, Homo sapiens
  siRNA target sequence for SF3B3 (NM_012426.2,2441-2459).
cttacgagacactggaatt

SEQ ID NO: 338193 - DNA, 19 bp, Homo sapiens
  siRNA target sequence for SF3B3 (NM_012426.2,2513-2531).
ccaacaccctacggatttt

SEQ ID NO: 338194 - DNA, 19 bp, Homo sapiens
  siRNA target sequence for SF3B3 (NM_012426.2,2524-2542).
cggattttggcattagaga

SEQ ID NO: 338195 - DNA, 19 bp, Homo sapiens
  siRNA target sequence for SF3B3 (NM_012426.2,2544-2562).
gctcggtgctgtcttcaat

SEQ ID NO: 338196 - DNA, 19 bp, Homo sapiens
  siRNA target sequence for SF3B3 (NM_012426.2,2549-2567).
gtgctgtcttcaatcaagt

SEQ ID NO: 338197 - DNA, 19 bp, Homo sapiens
  siRNA target sequence for SF3B3 (NM_012426.2,2581-2599).
cagtacacacccaggaaat

SEQ ID NO: 338198 - DNA, 19 bp, Homo sapiens
  siRNA target sequence for SF3B3 (NM_012426.2,2583-2601).
gtacacacccaggaaattt

SEQ ID NO: 338199 - DNA, 19 bp, Homo sapiens
  siRNA target sequence for SF3B3 (NM_012426.2,2611-2629).
cctgagagtaacaacctta

SEQ ID NO: 338200 - DNA, 19 bp, Homo sapiens
  siRNA target sequence for SF3B3 (NM_012426.2,2618-2636).
gtaacaaccttattatcat

SEQ ID NO: 338201 - DNA, 19 bp, Homo sapiens
  siRNA target sequence for SF3B3 (NM_012426.2,2753-2771).
cagcagcattcctcaatga

SEQ ID NO: 338202 - DNA, 19 bp, Homo sapiens
  siRNA target sequence for SF3B3 (NM_012426.2,2828-2846).
ctgtgatccgagtgatgaa

SEQ ID NO: 338203 - DNA, 19 bp, Homo sapiens
  siRNA target sequence for SF3B3 (NM_012426.2,2912-2930).
ctgtgtgcaggttttccaa

SEQ ID NO: 338204 - DNA, 19 bp, Homo sapiens
  siRNA target sequence for SF3B3 (NM_012426.2,2965-2983).
gccaaggacctgatactaa

SEQ ID NO: 338205 - DNA, 19 bp, Homo sapiens
  siRNA target sequence for SF3B3 (NM_012426.2,3001-3019).
gggggcttcgtctatactt

SEQ ID NO: 338206 - DNA, 19 bp, Homo sapiens
  siRNA target sequence for SF3B3 (NM_012426.2,3004-3022).
ggcttcgtctatacttaca

SEQ ID NO: 338207 - DNA, 19 bp, Homo sapiens
  siRNA target sequence for SF3B3 (NM_012426.2,3005-3023).
gcttcgtctatacttacaa

SEQ ID NO: 338208 - DNA, 19 bp, Homo sapiens
  siRNA target sequence for SF3B3 (NM_012426.2,3102-3120).
ccaggggagggtgttgatt

SEQ ID NO: 338209 - DNA, 19 bp, Homo sapiens
  siRNA target sequence for SF3B3 (NM_012426.2,3129-3147).
gaagctgttgcgtgtctat

SEQ ID NO: 338210 - DNA, 19 bp, Homo sapiens
  siRNA target sequence for SF3B3 (NM_012426.2,3190-3208).
catattgccaattatatct

SEQ ID NO: 338211 - DNA, 19 bp, Homo sapiens
  siRNA target sequence for SF3B3 (NM_012426.2,3226-3244).
ggacatagggtaattgtat

SEQ ID NO: 338212 - DNA, 19 bp, Homo sapiens
  siRNA target sequence for SF3B3 (NM_012426.2,3274-3292).
cgctacaagcgtaatgaaa

SEQ ID NO: 338213 - DNA, 19 bp, Homo sapiens
  siRNA target sequence for SF3B3 (NM_012426.2,3275-3293).
gctacaagcgtaatgaaaa

SEQ ID NO: 338214 - DNA, 19 bp, Homo sapiens
  siRNA target sequence for SF3B3 (NM_012426.2,3379-3397).
gacaagtttggcaacatat

SEQ ID NO: 338215 - DNA, 19 bp, Homo sapiens
  siRNA target sequence for SF3B3 (NM_012426.2,3413-3431).
cacctaacaccaatgatga

SEQ ID NO: 338216 - DNA, 19 bp, Homo sapiens
  siRNA target sequence for SF3B3 (NM_012426.2,3502-3520).
gcagaggtgatcatgaact

SEQ ID NO: 338217 - DNA, 19 bp, Homo sapiens
  siRNA target sequence for SF3B3 (NM_012426.2,3580-3598).
gaatcacttgtctatacca

SEQ ID NO: 338218 - DNA, 19 bp, Homo sapiens
  siRNA target sequence for SF3B3 (NM_012426.2,3675-3693).
gcacctgcggtctgaacat

SEQ ID NO: 338219 - DNA, 19 bp, Homo sapiens
  siRNA target sequence for SF3B3 (NM_012426.2,3773-3791).
gtgagcagttcaattccat

SEQ ID NO: 338220 - DNA, 19 bp, Homo sapiens
  siRNA target sequence for SF3B3 (NM_012426.2,3851-3869).
ccaagaaactcgaggatat

SEQ ID NO: 338221 - DNA, 19 bp, Homo sapiens
  siRNA target sequence for TIC (NM_012455.1,512-530).
cgtccacacaggtagtgtt

SEQ ID NO: 338222 - DNA, 19 bp, Homo sapiens
  siRNA target sequence for TIC (NM_012455.1,984-1002).
ggacggcgctgctatcagt

SEQ ID NO: 338223 - DNA, 19 bp, Homo sapiens
  siRNA target sequence for TIC (NM_012455.1,994-1012).
gctatcagtgggcattgta

SEQ ID NO: 338224 - DNA, 19 bp, Homo sapiens
  siRNA target sequence for TIC (NM_012455.1,1154-1172).
cgtgtgtggacgaagcatt

SEQ ID NO: 338225 - DNA, 19 bp, Homo sapiens
  siRNA target sequence for TIC (NM_012455.1,1503-1521).
gcccaagtggacactagat

SEQ ID NO: 338226 - DNA, 19 bp, Homo sapiens
  siRNA target sequence for TIC (NM_012455.1,1891-1909).
ctgcagaagaacaatgact

SEQ ID NO: 338227 - DNA, 19 bp, Homo sapiens
  siRNA target sequence for TIC (NM_012455.1,2054-2072).
gacgcttccaccattgcaa

SEQ ID NO: 338228 - DNA, 19 bp, Homo sapiens
  siRNA target sequence for TIC (NM_012455.1,2085-2103).
cccctcagtagattctgta

SEQ ID NO: 338229 - DNA, 19 bp, Homo sapiens
  siRNA target sequence for TIC (NM_012455.1,2108-2126).
ccttgacatgtgcaatcat

SEQ ID NO: 338230 - DNA, 19 bp, Homo sapiens
  siRNA target sequence for TIC (NM_012455.1,2119-2137).
gcaatcatgctgcttaaca

SEQ ID NO: 338231 - DNA, 19 bp, Homo sapiens
  siRNA target sequence for TIC (NM_012455.1,2168-2186).
gcatgagctgccaggaatt

SEQ ID NO: 338232 - DNA, 19 bp, Homo sapiens
  siRNA target sequence for TIC (NM_012455.1,2172-2190).
gagctgccaggaattcata

SEQ ID NO: 338233 - DNA, 19 bp, Homo sapiens
  siRNA target sequence for TIC (NM_012455.1,2280-2298).
gtgggccgtggatgaagaa

SEQ ID NO: 338234 - DNA, 19 bp, Homo sapiens
  siRNA target sequence for TIC (NM_012455.1,2332-2350).
ctgccagctggcaagatga

SEQ ID NO: 338235 - DNA, 19 bp, Homo sapiens
  siRNA target sequence for TIC (NM_012455.1,3188-3206).
gaacctaccggaagatcat

SEQ ID NO: 338236 - DNA, 19 bp, Homo sapiens
  siRNA target sequence for TSLRP (NM_012472.3,79-97).
gctggatcacagaagatct

SEQ ID NO: 338237 - DNA, 19 bp, Homo sapiens
  siRNA target sequence for TSLRP (NM_012472.3,80-98).
ctggatcacagaagatctt

SEQ ID NO: 338238 - DNA, 19 bp, Homo sapiens
  siRNA target sequence for TSLRP (NM_012472.3,82-100).
ggatcacagaagatcttat

SEQ ID NO: 338239 - DNA, 19 bp, Homo sapiens
  siRNA target sequence for TSLRP (NM_012472.3,86-104).
cacagaagatcttattaga

SEQ ID NO: 338240 - DNA, 19 bp, Homo sapiens
  siRNA target sequence for TSLRP (NM_012472.3,103-121).
gacggaatgctgaacacaa

SEQ ID NO: 338241 - DNA, 19 bp, Homo sapiens
  siRNA target sequence for TSLRP (NM_012472.3,117-135).
cacaacgactgtgtcattt

SEQ ID NO: 338242 - DNA, 19 bp, Homo sapiens
  siRNA target sequence for TSLRP (NM_012472.3,119-137).
caacgactgtgtcattttt

SEQ ID NO: 338243 - DNA, 19 bp, Homo sapiens
  siRNA target sequence for TSLRP (NM_012472.3,154-172).
cgttgcatcagcaagaaat

SEQ ID NO: 338244 - DNA, 19 bp, Homo sapiens
  siRNA target sequence for TSLRP (NM_012472.3,180-198).
ctagaacacattgataaat

SEQ ID NO: 338245 - DNA, 19 bp, Homo sapiens
  siRNA target sequence for TSLRP (NM_012472.3,183-201).
gaacacattgataaatggt

SEQ ID NO: 338246 - DNA, 19 bp, Homo sapiens
  siRNA target sequence for TSLRP (NM_012472.3,199-217).
ggtgccgggatttaaaaat

SEQ ID NO: 338247 - DNA, 19 bp, Homo sapiens
  siRNA target sequence for TSLRP (NM_012472.3,473-491).
gttcgtggtagcaactctt

SEQ ID NO: 338248 - DNA, 19 bp, Homo sapiens
  siRNA target sequence for TSLRP (NM_012472.3,545-563).
ggcattgcaggactattca

SEQ ID NO: 338249 - DNA, 19 bp, Homo sapiens
  siRNA target sequence for TSLRP (NM_012472.3,591-609).
gaaaaagatcactgtctta

SEQ ID NO: 338250 - DNA, 19 bp, Homo sapiens
  siRNA target sequence for TSLRP (NM_012472.3,606-624).
cttaaacgagccaaactca

SEQ ID NO: 338251 - DNA, 19 bp, Homo sapiens
  siRNA target sequence for TSLRP (NM_012472.3,711-729).
gacatcaatgctactcttt

SEQ ID NO: 338252 - DNA, 19 bp, Homo sapiens
  siRNA target sequence for TSLRP (NM_012472.3,823-841).
ggaataagccctgtttgtt

SEQ ID NO: 338253 - DNA, 19 bp, Homo sapiens
  siRNA target sequence for TSLRP (NM_012472.3,856-874).
gattggaaactcttagaca

SEQ ID NO: 338254 - DNA, 19 bp, Homo sapiens
  siRNA target sequence for TSLRP (NM_012472.3,933-951).
ccacccaggactttgatca

SEQ ID NO: 338255 - DNA, 19 bp, Homo sapiens
  siRNA target sequence for TSLRP (NM_012472.3,998-1016).
ctctttgaaagataacgaa

SEQ ID NO: 338256 - DNA, 19 bp, Homo sapiens
  siRNA target sequence for TSLRP (NM_012472.3,1032-1050).
gaccttgctgtctataggt

SEQ ID NO: 338257 - DNA, 19 bp, Homo sapiens
  siRNA target sequence for TSLRP (NM_012472.3,1034-1052).
ccttgctgtctataggtat

SEQ ID NO: 338258 - DNA, 19 bp, Homo sapiens
  siRNA target sequence for TSLRP (NM_012472.3,1035-1053).
cttgctgtctataggtata

SEQ ID NO: 338259 - DNA, 19 bp, Homo sapiens
  siRNA target sequence for TSLRP (NM_012472.3,1041-1059).
gtctataggtatatggata

SEQ ID NO: 338260 - DNA, 19 bp, Homo sapiens
  siRNA target sequence for TSLRP (NM_012472.3,1055-1073).
ggatacctctttaatcgat

SEQ ID NO: 338261 - DNA, 19 bp, Homo sapiens
  siRNA target sequence for TSLRP (NM_012472.3,1060-1078).
cctctttaatcgatgttga

SEQ ID NO: 338262 - DNA, 19 bp, Homo sapiens
  siRNA target sequence for TSLRP (NM_012472.3,1061-1079).
ctctttaatcgatgttgat

SEQ ID NO: 338263 - DNA, 19 bp, Homo sapiens
  siRNA target sequence for TSLRP (NM_012472.3,1063-1081).
ctttaatcgatgttgatgt

SEQ ID NO: 338264 - DNA, 19 bp, Homo sapiens
  siRNA target sequence for TSLRP (NM_012472.3,1087-1105).
caacttacgtgcgagtaat

SEQ ID NO: 338265 - DNA, 19 bp, Homo sapiens
  siRNA target sequence for TSLRP (NM_012472.3,1090-1108).
cttacgtgcgagtaatgat

SEQ ID NO: 338266 - DNA, 19 bp, Homo sapiens
  siRNA target sequence for TSLRP (NM_012472.3,1094-1112).
cgtgcgagtaatgatcaaa

SEQ ID NO: 338267 - DNA, 19 bp, Homo sapiens
  siRNA target sequence for TSLRP (NM_012472.3,1098-1116).
cgagtaatgatcaaaggaa

SEQ ID NO: 338268 - DNA, 19 bp, Homo sapiens
  siRNA target sequence for TSLRP (NM_012472.3,1143-1161).
gaagtgaaacccgatagta

SEQ ID NO: 338269 - DNA, 19 bp, Homo sapiens
  siRNA target sequence for TSLRP (NM_012472.3,1146-1164).
gtgaaacccgatagtagtt

SEQ ID NO: 338270 - DNA, 19 bp, Homo sapiens
  siRNA target sequence for TSLRP (NM_012472.3,1148-1166).
gaaacccgatagtagttct

SEQ ID NO: 338271 - DNA, 19 bp, Homo sapiens
  siRNA target sequence for TSLRP (NM_012472.3,1154-1172).
cgatagtagttctgctaaa

SEQ ID NO: 338272 - DNA, 19 bp, Homo sapiens
  siRNA target sequence for TSLRP (NM_012472.3,1208-1226).
gcccaaggtaggagaagta

SEQ ID NO: 338273 - DNA, 19 bp, Homo sapiens
  siRNA target sequence for TSLRP (NM_012472.3,1236-1254).
ggtcagcgagcattcaaat

SEQ ID NO: 338274 - DNA, 19 bp, Homo sapiens
  siRNA target sequence for TSLRP (NM_012472.3,1239-1257).
cagcgagcattcaaatcta

SEQ ID NO: 338275 - DNA, 19 bp, Homo sapiens
  siRNA target sequence for TSLRP (NM_012472.3,1242-1260).
cgagcattcaaatctatga

SEQ ID NO: 338276 - DNA, 19 bp, Homo sapiens
  siRNA target sequence for TSLRP (NM_012472.3,1245-1263).
gcattcaaatctatgaaaa

SEQ ID NO: 338277 - DNA, 19 bp, Homo sapiens
  siRNA target sequence for TSLRP (NM_012472.3,1349-1367).
ccctgatgtgactaacata

SEQ ID NO: 338278 - DNA, 19 bp, Homo sapiens
  siRNA target sequence for TSLRP (NM_012472.3,1351-1369).
ctgatgtgactaacatagt

SEQ ID NO: 338279 - DNA, 19 bp, Homo sapiens
  siRNA target sequence for TSLRP (NM_012472.3,1396-1414).
gacgacctgaacccaaaat

SEQ ID NO: 338280 - DNA, 19 bp, Homo sapiens
  siRNA target sequence for TSLRP (NM_012472.3,1455-1473).
gaagtgcctccgctgattt

SEQ ID NO: 338281 - DNA, 19 bp, Homo sapiens
  siRNA target sequence for WBP2 (NM_012478.2,70-88).
ggagtgatcgtcaataaca

SEQ ID NO: 338282 - DNA, 19 bp, Homo sapiens
  siRNA target sequence for WBP2 (NM_012478.2,115-133).
cacgtggaactcacattca

SEQ ID NO: 338283 - DNA, 19 bp, Homo sapiens
  siRNA target sequence for WBP2 (NM_012478.2,117-135).
cgtggaactcacattcaat

SEQ ID NO: 338284 - DNA, 19 bp, Homo sapiens
  siRNA target sequence for WBP2 (NM_012478.2,147-165).
cgtgccagaagccttcaaa

SEQ ID NO: 338285 - DNA, 19 bp, Homo sapiens
  siRNA target sequence for WBP2 (NM_012478.2,232-250).
gccatgcagtccttcatga

SEQ ID NO: 338286 - DNA, 19 bp, Homo sapiens
  siRNA target sequence for WBP2 (NM_012478.2,252-270).
gccattttatctcatgaaa

SEQ ID NO: 338287 - DNA, 19 bp, Homo sapiens
  siRNA target sequence for WBP2 (NM_012478.2,282-300).
caagcagcccgtatttggt

SEQ ID NO: 338288 - DNA, 19 bp, Homo sapiens
  siRNA target sequence for WBP2 (NM_012478.2,290-308).
ccgtatttggtgcaaacta

SEQ ID NO: 338289 - DNA, 19 bp, Homo sapiens
  siRNA target sequence for WBP2 (NM_012478.2,458-476).
gagcctatggctactctta

SEQ ID NO: 338290 - DNA, 19 bp, Homo sapiens
  siRNA target sequence for WBP2 (NM_012478.2,506-524).
cgccagtcgccaatggaat

SEQ ID NO: 338291 - DNA, 19 bp, Homo sapiens
  siRNA target sequence for WBP2 (NM_012478.2,509-527).
cagtcgccaatggaatgta

SEQ ID NO: 338292 - DNA, 19 bp, Homo sapiens
  siRNA target sequence for WBP2 (NM_012478.2,715-733).
gccgccagcgcctattaca

SEQ ID NO: 338293 - DNA, 19 bp, Homo sapiens
  siRNA target sequence for WBP2 (NM_012478.2,716-734).
ccgccagcgcctattacaa

SEQ ID NO: 338294 - DNA, 19 bp, Homo sapiens
  siRNA target sequence for ZNF281 (NM_012482.3,677-695).
gcaccaccgtgacgtatta

SEQ ID NO: 338295 - DNA, 19 bp, Homo sapiens
  siRNA target sequence for ZNF281 (NM_012482.3,681-699).
caccgtgacgtattactca

SEQ ID NO: 338296 - DNA, 19 bp, Homo sapiens
  siRNA target sequence for ZNF281 (NM_012482.3,740-758).
gccaaagcaggacactaat

SEQ ID NO: 338297 - DNA, 19 bp, Homo sapiens
  siRNA target sequence for ZNF281 (NM_012482.3,746-764).
gcaggacactaatgtcaaa

SEQ ID NO: 338298 - DNA, 19 bp, Homo sapiens
  siRNA target sequence for ZNF281 (NM_012482.3,747-765).
caggacactaatgtcaaaa

SEQ ID NO: 338299 - DNA, 19 bp, Homo sapiens
  siRNA target sequence for ZNF281 (NM_012482.3,874-892).
caagtcagaaacctcatat

SEQ ID NO: 338300 - DNA, 19 bp, Homo sapiens
  siRNA target sequence for ZNF281 (NM_012482.3,988-1006).
gtagtatgggtttcattca

SEQ ID NO: 338301 - DNA, 19 bp, Homo sapiens
  siRNA target sequence for ZNF281 (NM_012482.3,1149-1167).
gacacttgccaacagtatt

SEQ ID NO: 338302 - DNA, 19 bp, Homo sapiens
  siRNA target sequence for ZNF281 (NM_012482.3,1174-1192).
ggactgatagattgttgaa

SEQ ID NO: 338303 - DNA, 19 bp, Homo sapiens
  siRNA target sequence for ZNF281 (NM_012482.3,1201-1219).
gcacatgtggtgaagtcat

SEQ ID NO: 338304 - DNA, 19 bp, Homo sapiens
  siRNA target sequence for ZNF281 (NM_012482.3,1204-1222).
catgtggtgaagtcatagt

SEQ ID NO: 338305 - DNA, 19 bp, Homo sapiens
  siRNA target sequence for ZNF281 (NM_012482.3,1245-1263).
cctgggtcatcaaaccata

SEQ ID NO: 338306 - DNA, 19 bp, Homo sapiens
  siRNA target sequence for ZNF281 (NM_012482.3,1249-1267).
ggtcatcaaaccataccaa

SEQ ID NO: 338307 - DNA, 19 bp, Homo sapiens
  siRNA target sequence for ZNF281 (NM_012482.3,1250-1268).
gtcatcaaaccataccaat

SEQ ID NO: 338308 - DNA, 19 bp, Homo sapiens
  siRNA target sequence for ZNF281 (NM_012482.3,1252-1270).
catcaaaccataccaatat

SEQ ID NO: 338309 - DNA, 19 bp, Homo sapiens
  siRNA target sequence for ZNF281 (NM_012482.3,1284-1302).
gtgttgtctcagggaaata

SEQ ID NO: 338310 - DNA, 19 bp, Homo sapiens
  siRNA target sequence for ZNF281 (NM_012482.3,1328-1346).
gtcaaaaagcatagctatt

SEQ ID NO: 338311 - DNA, 19 bp, Homo sapiens
  siRNA target sequence for ZNF281 (NM_012482.3,1330-1348).
caaaaagcatagctattga

SEQ ID NO: 338312 - DNA, 19 bp, Homo sapiens
  siRNA target sequence for ZNF281 (NM_012482.3,1409-1427).
gcagagttactcagtagaa

SEQ ID NO: 338313 - DNA, 19 bp, Homo sapiens
  siRNA target sequence for ZNF281 (NM_012482.3,1410-1428).
cagagttactcagtagaaa

SEQ ID NO: 338314 - DNA, 19 bp, Homo sapiens
  siRNA target sequence for ZNF281 (NM_012482.3,1454-1472).
cataattggcactggaata

SEQ ID NO: 338315 - DNA, 19 bp, Homo sapiens
  siRNA target sequence for ZNF281 (NM_012482.3,1533-1551).
gataaaaactaccttaact

SEQ ID NO: 338316 - DNA, 19 bp, Homo sapiens
  siRNA target sequence for ZNF281 (NM_012482.3,1556-1574).
gtcaccattaccagacata

SEQ ID NO: 338317 - DNA, 19 bp, Homo sapiens
  siRNA target sequence for ZNF281 (NM_012482.3,1558-1576).
caccattaccagacatagt

SEQ ID NO: 338318 - DNA, 19 bp, Homo sapiens
  siRNA target sequence for ZNF281 (NM_012482.3,1608-1626).
ggctcacttggcatagtat

SEQ ID NO: 338319 - DNA, 19 bp, Homo sapiens
  siRNA target sequence for ZNF281 (NM_012482.3,1610-1628).
ctcacttggcatagtatca

SEQ ID NO: 338320 - DNA, 19 bp, Homo sapiens
  siRNA target sequence for ZNF281 (NM_012482.3,1673-1691).
caaacaaggtcagataagt

SEQ ID NO: 338321 - DNA, 19 bp, Homo sapiens
  siRNA target sequence for ZNF281 (NM_012482.3,1680-1698).
ggtcagataagtagtaatt

SEQ ID NO: 338322 - DNA, 19 bp, Homo sapiens
  siRNA target sequence for ZNF281 (NM_012482.3,1685-1703).
gataagtagtaattatgat

SEQ ID NO: 338323 - DNA, 19 bp, Homo sapiens
  siRNA target sequence for ZNF281 (NM_012482.3,1754-1772).
caacagtgccttttctata

SEQ ID NO: 338324 - DNA, 19 bp, Homo sapiens
  siRNA target sequence for ZNF281 (NM_012482.3,1792-1810).
cccaacagtctgtcattca

SEQ ID NO: 338325 - DNA, 19 bp, Homo sapiens
  siRNA target sequence for ZNF281 (NM_012482.3,1794-1812).
caacagtctgtcattcagt

SEQ ID NO: 338326 - DNA, 19 bp, Homo sapiens
  siRNA target sequence for ZNF281 (NM_012482.3,1816-1834).
caggtgtcagtgttttgga

SEQ ID NO: 338327 - DNA, 19 bp, Homo sapiens
  siRNA target sequence for ZNF281 (NM_012482.3,1835-1853).
caatgaggcaccattgtca

SEQ ID NO: 338328 - DNA, 19 bp, Homo sapiens
  siRNA target sequence for ZNF281 (NM_012482.3,1839-1857).
gaggcaccattgtcactta

SEQ ID NO: 338329 - DNA, 19 bp, Homo sapiens
  siRNA target sequence for ZNF281 (NM_012482.3,1841-1859).
ggcaccattgtcacttatt

SEQ ID NO: 338330 - DNA, 19 bp, Homo sapiens
  siRNA target sequence for ZNF281 (NM_012482.3,1843-1861).
caccattgtcacttattga

SEQ ID NO: 338331 - DNA, 19 bp, Homo sapiens
  siRNA target sequence for ZNF281 (NM_012482.3,1869-1887).
gctctaaatgctgaaatta

SEQ ID NO: 338332 - DNA, 19 bp, Homo sapiens
  siRNA target sequence for ZNF281 (NM_012482.3,1970-1988).
gaaagaggatcctttcaat

SEQ ID NO: 338333 - DNA, 19 bp, Homo sapiens
  siRNA target sequence for ZNF281 (NM_012482.3,1976-1994).
ggatcctttcaatattgca

SEQ ID NO: 338334 - DNA, 19 bp, Homo sapiens
  siRNA target sequence for ZNF281 (NM_012482.3,2080-2098).
caaatgataaagcaagtat

SEQ ID NO: 338335 - DNA, 19 bp, Homo sapiens
  siRNA target sequence for ZNF281 (NM_012482.3,2163-2181).
cttggacacggtttccaat

SEQ ID NO: 338336 - DNA, 19 bp, Homo sapiens
  siRNA target sequence for ZNF281 (NM_012482.3,2167-2185).
gacacggtttccaatttgt

SEQ ID NO: 338337 - DNA, 19 bp, Homo sapiens
  siRNA target sequence for ZNF281 (NM_012482.3,2169-2187).
cacggtttccaatttgtca

SEQ ID NO: 338338 - DNA, 19 bp, Homo sapiens
  siRNA target sequence for ZNF281 (NM_012482.3,2200-2218).
ctctccacaaccacacttt

SEQ ID NO: 338339 - DNA, 19 bp, Homo sapiens
  siRNA target sequence for ZNF281 (NM_012482.3,2262-2280).
ggtttcggccaatctgtta

SEQ ID NO: 338340 - DNA, 19 bp, Homo sapiens
  siRNA target sequence for ZNF281 (NM_012482.3,2282-2300).
ctcagtgttgccatcttca

SEQ ID NO: 338341 - DNA, 19 bp, Homo sapiens
  siRNA target sequence for ZNF281 (NM_012482.3,2339-2357).
gccaggtctttatttgtct

SEQ ID NO: 338342 - DNA, 19 bp, Homo sapiens
  siRNA target sequence for ZNF281 (NM_012482.3,2400-2418).
ctggatgatctgatagatt

SEQ ID NO: 338343 - DNA, 19 bp, Homo sapiens
  siRNA target sequence for ZNF281 (NM_012482.3,2402-2420).
ggatgatctgatagattct

SEQ ID NO: 338344 - DNA, 19 bp, Homo sapiens
  siRNA target sequence for ZNF281 (NM_012482.3,2456-2474).
ctcatctcagaaattgact

SEQ ID NO: 338345 - DNA, 19 bp, Homo sapiens
  siRNA target sequence for ZNF281 (NM_012482.3,2543-2561).
ccagatagatcctcagaaa

SEQ ID NO: 338346 - DNA, 19 bp, Homo sapiens
  siRNA target sequence for ZNF281 (NM_012482.3,2571-2589).
cctagaacaacgtatcaga

SEQ ID NO: 338347 - DNA, 19 bp, Homo sapiens
  siRNA target sequence for ZNF281 (NM_012482.3,2572-2590).
ctagaacaacgtatcagat

SEQ ID NO: 338348 - DNA, 19 bp, Homo sapiens
  siRNA target sequence for ZNF281 (NM_012482.3,2575-2593).
gaacaacgtatcagattga

SEQ ID NO: 338349 - DNA, 19 bp, Homo sapiens
  siRNA target sequence for ZNF281 (NM_012482.3,2607-2625).
gcgtttggttctcagttta

SEQ ID NO: 338350 - DNA, 19 bp, Homo sapiens
  siRNA target sequence for ZNF281 (NM_012482.3,2638-2656).
gggtgccaatgacctttat

SEQ ID NO: 338351 - DNA, 19 bp, Homo sapiens
  siRNA target sequence for ZNF281 (NM_012482.3,2642-2660).
gccaatgacctttatcact

SEQ ID NO: 338352 - DNA, 19 bp, Homo sapiens
  siRNA target sequence for ZNF281 (NM_012482.3,2643-2661).
ccaatgacctttatcacta

SEQ ID NO: 338353 - DNA, 19 bp, Homo sapiens
  siRNA target sequence for ZNF281 (NM_012482.3,2644-2662).
caatgacctttatcactaa

SEQ ID NO: 338354 - DNA, 19 bp, Homo sapiens
  siRNA target sequence for ZNF281 (NM_012482.3,2650-2668).
cctttatcactaactctaa

SEQ ID NO: 338355 - DNA, 19 bp, Homo sapiens
  siRNA target sequence for ZNF281 (NM_012482.3,2692-2710).
ggacttcagtgtcagattt

SEQ ID NO: 338356 - DNA, 19 bp, Homo sapiens
  siRNA target sequence for ZNF281 (NM_012482.3,2706-2724).
gatttctcagggtatacaa

SEQ ID NO: 338357 - DNA, 19 bp, Homo sapiens
  siRNA target sequence for ZNF281 (NM_012482.3,2739-2757).
gtaagtgagccatgtagta

SEQ ID NO: 338358 - DNA, 19 bp, Homo sapiens
  siRNA target sequence for ZNF281 (NM_012482.3,2748-2766).
ccatgtagtacaagagtaa

SEQ ID NO: 338359 - DNA, 19 bp, Homo sapiens
  siRNA target sequence for ZNF281 (NM_012482.3,2749-2767).
catgtagtacaagagtaaa

SEQ ID NO: 338360 - DNA, 19 bp, Homo sapiens
  siRNA target sequence for DNAJD1 (NM_013238.1,446-464).
ctccagttggcgagagttt

SEQ ID NO: 338361 - DNA, 19 bp, Homo sapiens
  siRNA target sequence for DNAJD1 (NM_013238.1,527-545).
gactggtaagaagtttgat

SEQ ID NO: 338362 - DNA, 19 bp, Homo sapiens
  siRNA target sequence for DNAJD1 (NM_013238.1,600-618).
gatctggaaacctctagaa

SEQ ID NO: 338363 - DNA, 19 bp, Homo sapiens
  siRNA target sequence for DNAJD1 (NM_013238.1,679-697).
ggaggatttgaacagaaaa

SEQ ID NO: 338364 - DNA, 19 bp, Homo sapiens
  siRNA target sequence for DNAJD1 (NM_013238.1,682-700).
ggatttgaacagaaaatga

SEQ ID NO: 338365 - DNA, 19 bp, Homo sapiens
  siRNA target sequence for DNAJD1 (NM_013238.1,704-722).
ggcgagaagctggtcttat

SEQ ID NO: 338366 - DNA, 19 bp, Homo sapiens
  siRNA target sequence for DNAJD1 (NM_013238.1,705-723).
gcgagaagctggtcttatt

SEQ ID NO: 338367 - DNA, 19 bp, Homo sapiens
  siRNA target sequence for DNAJD1 (NM_013238.1,742-760).
gctggcaaggctaagatta

SEQ ID NO: 338368 - DNA, 19 bp, Homo sapiens
  siRNA target sequence for DNAJD1 (NM_013238.1,745-763).
ggcaaggctaagattagaa

SEQ ID NO: 338369 - DNA, 19 bp, Homo sapiens
  siRNA target sequence for DNAJD1 (NM_013238.1,767-785).
ctcataggagagtcatgat

SEQ ID NO: 338370 - DNA, 19 bp, Homo sapiens
  siRNA target sequence for DNAJD1 (NM_013238.1,769-787).
cataggagagtcatgattt

SEQ ID NO: 338371 - DNA, 19 bp, Homo sapiens
  siRNA target sequence for DNAJD1 (NM_013238.1,819-837).
cgtagcagccaaaataaat

SEQ ID NO: 338372 - DNA, 19 bp, Homo sapiens
  siRNA target sequence for SCG3 (NM_013243.2,420-438).
cgggaccggcacttggatt

SEQ ID NO: 338373 - DNA, 19 bp, Homo sapiens
  siRNA target sequence for SCG3 (NM_013243.2,444-462).
gttagtgctcccgattcaa

SEQ ID NO: 338374 - DNA, 19 bp, Homo sapiens
  siRNA target sequence for SCG3 (NM_013243.2,497-515).
ctctacataatagagaatt

SEQ ID NO: 338375 - DNA, 19 bp, Homo sapiens
  siRNA target sequence for SCG3 (NM_013243.2,499-517).
ctacataatagagaattaa

SEQ ID NO: 338376 - DNA, 19 bp, Homo sapiens
  siRNA target sequence for SCG3 (NM_013243.2,602-620).
gtcagagcaactattcttt

SEQ ID NO: 338377 - DNA, 19 bp, Homo sapiens
  siRNA target sequence for SCG3 (NM_013243.2,692-710).
gaagctccccacttgataa

SEQ ID NO: 338378 - DNA, 19 bp, Homo sapiens
  siRNA target sequence for SCG3 (NM_013243.2,700-718).
ccacttgataataagttga

SEQ ID NO: 338379 - DNA, 19 bp, Homo sapiens
  siRNA target sequence for SCG3 (NM_013243.2,733-751).
gattcaaccaagaatcgaa

SEQ ID NO: 338380 - DNA, 19 bp, Homo sapiens
  siRNA target sequence for SCG3 (NM_013243.2,748-766).
cgaaaactgatcgatgatt

SEQ ID NO: 338381 - DNA, 19 bp, Homo sapiens
  siRNA target sequence for SCG3 (NM_013243.2,754-772).
ctgatcgatgattatgact

SEQ ID NO: 338382 - DNA, 19 bp, Homo sapiens
  siRNA target sequence for SCG3 (NM_013243.2,760-778).
gatgattatgactctacta

SEQ ID NO: 338383 - DNA, 19 bp, Homo sapiens
  siRNA target sequence for SCG3 (NM_013243.2,782-800).
gtggattggatcataaatt

SEQ ID NO: 338384 - DNA, 19 bp, Homo sapiens
  siRNA target sequence for SCG3 (NM_013243.2,785-803).
gattggatcataaatttca

SEQ ID NO: 338385 - DNA, 19 bp, Homo sapiens
  siRNA target sequence for SCG3 (NM_013243.2,829-847).
ctagacgggactcctttaa

SEQ ID NO: 338386 - DNA, 19 bp, Homo sapiens
  siRNA target sequence for SCG3 (NM_013243.2,902-920).
gagccgtgtttgacaagat

SEQ ID NO: 338387 - DNA, 19 bp, Homo sapiens
  siRNA target sequence for SCG3 (NM_013243.2,906-924).
cgtgtttgacaagattgtt

SEQ ID NO: 338388 - DNA, 19 bp, Homo sapiens
  siRNA target sequence for SCG3 (NM_013243.2,918-936).
gattgtttctaaactactt

SEQ ID NO: 338389 - DNA, 19 bp, Homo sapiens
  siRNA target sequence for SCG3 (NM_013243.2,1100-1118).
ctccaatggcagcaattca

SEQ ID NO: 338390 - DNA, 19 bp, Homo sapiens
  siRNA target sequence for SCG3 (NM_013243.2,1103-1121).
caatggcagcaattcaaga

SEQ ID NO: 338391 - DNA, 19 bp, Homo sapiens
  siRNA target sequence for SCG3 (NM_013243.2,1124-1142).
gtcttgctaagggagaaaa

SEQ ID NO: 338392 - DNA, 19 bp, Homo sapiens
  siRNA target sequence for SCG3 (NM_013243.2,1144-1162).
gatgaaacagtatctaaca

SEQ ID NO: 338393 - DNA, 19 bp, Homo sapiens
  siRNA target sequence for SCG3 (NM_013243.2,1147-1165).
gaaacagtatctaacacat

SEQ ID NO: 338394 - DNA, 19 bp, Homo sapiens
  siRNA target sequence for SCG3 (NM_013243.2,1153-1171).
gtatctaacacattaacct

SEQ ID NO: 338395 - DNA, 19 bp, Homo sapiens
  siRNA target sequence for SCG3 (NM_013243.2,1180-1198).
ggcttggaaaggagaacta

SEQ ID NO: 338396 - DNA, 19 bp, Homo sapiens
  siRNA target sequence for SCG3 (NM_013243.2,1202-1220).
cctacagtgaagacaactt

SEQ ID NO: 338397 - DNA, 19 bp, Homo sapiens
  siRNA target sequence for SCG3 (NM_013243.2,1248-1266).
ctatgcgctactgaaaagt

SEQ ID NO: 338398 - DNA, 19 bp, Homo sapiens
  siRNA target sequence for SCG3 (NM_013243.2,1297-1315).
gaaacactgattactatca

SEQ ID NO: 338399 - DNA, 19 bp, Homo sapiens
  siRNA target sequence for SCG3 (NM_013243.2,1447-1465).
gctactgacaatataagca

SEQ ID NO: 338400 - DNA, 19 bp, Homo sapiens
  siRNA target sequence for SCG3 (NM_013243.2,1453-1471).
gacaatataagcaagcttt

SEQ ID NO: 338401 - DNA, 19 bp, Homo sapiens
  siRNA target sequence for SCG3 (NM_013243.2,1528-1546).
gctaagatggaaaaggaat

SEQ ID NO: 338402 - DNA, 19 bp, Homo sapiens
  siRNA target sequence for SCG3 (NM_013243.2,1557-1575).
gaaggattccacaaaagat

SEQ ID NO: 338403 - DNA, 19 bp, Homo sapiens
  siRNA target sequence for SCG3 (NM_013243.2,1696-1714).
gattatgacctttcaaaga

SEQ ID NO: 338404 - DNA, 19 bp, Homo sapiens
  siRNA target sequence for SCG3 (NM_013243.2,1785-1803).
ggccatcaagcgcatttat

SEQ ID NO: 338405 - DNA, 19 bp, Homo sapiens
  siRNA target sequence for SCG3 (NM_013243.2,1786-1804).
gccatcaagcgcatttata

SEQ ID NO: 338406 - DNA, 19 bp, Homo sapiens
  siRNA target sequence for MKLN1 (NM_013255.2,85-103).
cacaagtggagctcctttt

SEQ ID NO: 338407 - DNA, 19 bp, Homo sapiens
  siRNA target sequence for MKLN1 (NM_013255.2,110-128).
cctaccttcccgagaacat

SEQ ID NO: 338408 - DNA, 19 bp, Homo sapiens
  siRNA target sequence for MKLN1 (NM_013255.2,111-129).
ctaccttcccgagaacatt

SEQ ID NO: 338409 - DNA, 19 bp, Homo sapiens
  siRNA target sequence for MKLN1 (NM_013255.2,114-132).
ccttcccgagaacatttta

SEQ ID NO: 338410 - DNA, 19 bp, Homo sapiens
  siRNA target sequence for MKLN1 (NM_013255.2,187-205).
ccccagtacttgattctaa

SEQ ID NO: 338411 - DNA, 19 bp, Homo sapiens
  siRNA target sequence for MKLN1 (NM_013255.2,188-206).
cccagtacttgattctaaa

SEQ ID NO: 338412 - DNA, 19 bp, Homo sapiens
  siRNA target sequence for MKLN1 (NM_013255.2,207-225).
gctcgaaaggcctgctata

SEQ ID NO: 338413 - DNA, 19 bp, Homo sapiens
  siRNA target sequence for MKLN1 (NM_013255.2,217-235).
cctgctatagttcagaata

SEQ ID NO: 338414 - DNA, 19 bp, Homo sapiens
  siRNA target sequence for MKLN1 (NM_013255.2,218-236).
ctgctatagttcagaatat

SEQ ID NO: 338415 - DNA, 19 bp, Homo sapiens
  siRNA target sequence for MKLN1 (NM_013255.2,335-353).
gtggcttaaagaatgatta

SEQ ID NO: 338416 - DNA, 19 bp, Homo sapiens
  siRNA target sequence for MKLN1 (NM_013255.2,369-387).
caccttgaagcataaaatt

SEQ ID NO: 338417 - DNA, 19 bp, Homo sapiens
  siRNA target sequence for MKLN1 (NM_013255.2,402-420).
cccttgtcgattcattaaa

SEQ ID NO: 338418 - DNA, 19 bp, Homo sapiens
  siRNA target sequence for MKLN1 (NM_013255.2,403-421).
ccttgtcgattcattaaaa

SEQ ID NO: 338419 - DNA, 19 bp, Homo sapiens
  siRNA target sequence for MKLN1 (NM_013255.2,407-425).
gtcgattcattaaaatagt

SEQ ID NO: 338420 - DNA, 19 bp, Homo sapiens
  siRNA target sequence for MKLN1 (NM_013255.2,461-479).
gcatctggtatgttgaact

SEQ ID NO: 338421 - DNA, 19 bp, Homo sapiens
  siRNA target sequence for MKLN1 (NM_013255.2,462-480).
catctggtatgttgaactt

SEQ ID NO: 338422 - DNA, 19 bp, Homo sapiens
  siRNA target sequence for MKLN1 (NM_013255.2,485-503).
gcattgatgatcctgatat

SEQ ID NO: 338423 - DNA, 19 bp, Homo sapiens
  siRNA target sequence for MKLN1 (NM_013255.2,486-504).
cattgatgatcctgatata

SEQ ID NO: 338424 - DNA, 19 bp, Homo sapiens
  siRNA target sequence for MKLN1 (NM_013255.2,515-533).
gtctcaactggtatagcaa

SEQ ID NO: 338425 - DNA, 19 bp, Homo sapiens
  siRNA target sequence for MKLN1 (NM_013255.2,537-555).
ccgtgaacaggaagctatt

SEQ ID NO: 338426 - DNA, 19 bp, Homo sapiens
  siRNA target sequence for MKLN1 (NM_013255.2,556-574).
cgcctttgcctaaaacact

SEQ ID NO: 338427 - DNA, 19 bp, Homo sapiens
  siRNA target sequence for MKLN1 (NM_013255.2,557-575).
gcctttgcctaaaacactt

SEQ ID NO: 338428 - DNA, 19 bp, Homo sapiens
  siRNA target sequence for MKLN1 (NM_013255.2,578-596).
gacaacacaactatacaga

SEQ ID NO: 338429 - DNA, 19 bp, Homo sapiens
  siRNA target sequence for MKLN1 (NM_013255.2,634-652).
ctggaacatcccatgttaa

SEQ ID NO: 338430 - DNA, 19 bp, Homo sapiens
  siRNA target sequence for MKLN1 (NM_013255.2,727-745).
gatggcttgttcaatcagt

SEQ ID NO: 338431 - DNA, 19 bp, Homo sapiens
  siRNA target sequence for MKLN1 (NM_013255.2,731-749).
gcttgttcaatcagtatat

SEQ ID NO: 338432 - DNA, 19 bp, Homo sapiens
  siRNA target sequence for MKLN1 (NM_013255.2,735-753).
gttcaatcagtatatcagt

SEQ ID NO: 338433 - DNA, 19 bp, Homo sapiens
  siRNA target sequence for MKLN1 (NM_013255.2,769-787).
ccacgatggagtcaaatca

SEQ ID NO: 338434 - DNA, 19 bp, Homo sapiens
  siRNA target sequence for MKLN1 (NM_013255.2,770-788).
cacgatggagtcaaatcat

SEQ ID NO: 338435 - DNA, 19 bp, Homo sapiens
  siRNA target sequence for MKLN1 (NM_013255.2,838-856).
ggaggccatcagatggtta

SEQ ID NO: 338436 - DNA, 19 bp, Homo sapiens
  siRNA target sequence for MKLN1 (NM_013255.2,839-857).
gaggccatcagatggttat

SEQ ID NO: 338437 - DNA, 19 bp, Homo sapiens
  siRNA target sequence for MKLN1 (NM_013255.2,842-860).
gccatcagatggttattga

SEQ ID NO: 338438 - DNA, 19 bp, Homo sapiens
  siRNA target sequence for MKLN1 (NM_013255.2,849-867).
gatggttattgatgttcaa

SEQ ID NO: 338439 - DNA, 19 bp, Homo sapiens
  siRNA target sequence for MKLN1 (NM_013255.2,852-870).
ggttattgatgttcaaaca

SEQ ID NO: 338440 - DNA, 19 bp, Homo sapiens
  siRNA target sequence for MKLN1 (NM_013255.2,948-966).
ccagtggacatgtatctct

SEQ ID NO: 338441 - DNA, 19 bp, Homo sapiens
  siRNA target sequence for MKLN1 (NM_013255.2,949-967).
cagtggacatgtatctcta

SEQ ID NO: 338442 - DNA, 19 bp, Homo sapiens
  siRNA target sequence for MKLN1 (NM_013255.2,995-1013).
gtgccagatcgtgtcataa

SEQ ID NO: 338443 - DNA, 19 bp, Homo sapiens
  siRNA target sequence for MKLN1 (NM_013255.2,997-1015).
gccagatcgtgtcataaaa

SEQ ID NO: 338444 - DNA, 19 bp, Homo sapiens
  siRNA target sequence for MKLN1 (NM_013255.2,998-1016).
ccagatcgtgtcataaaat

SEQ ID NO: 338445 - DNA, 19 bp, Homo sapiens
  siRNA target sequence for MKLN1 (NM_013255.2,1030-1048).
caacggaggcaaatctaca

SEQ ID NO: 338446 - DNA, 19 bp, Homo sapiens
  siRNA target sequence for MKLN1 (NM_013255.2,1033-1051).
cggaggcaaatctacacat

SEQ ID NO: 338447 - DNA, 19 bp, Homo sapiens
  siRNA target sequence for MKLN1 (NM_013255.2,1034-1052).
ggaggcaaatctacacatt

SEQ ID NO: 338448 - DNA, 19 bp, Homo sapiens
  siRNA target sequence for MKLN1 (NM_013255.2,1100-1118).
gtgacttctatcgttatga

SEQ ID NO: 338449 - DNA, 19 bp, Homo sapiens
  siRNA target sequence for MKLN1 (NM_013255.2,1102-1120).
gacttctatcgttatgaca

SEQ ID NO: 338450 - DNA, 19 bp, Homo sapiens
  siRNA target sequence for MKLN1 (NM_013255.2,1104-1122).
cttctatcgttatgacatt

SEQ ID NO: 338451 - DNA, 19 bp, Homo sapiens
  siRNA target sequence for MKLN1 (NM_013255.2,1107-1125).
ctatcgttatgacattgat

SEQ ID NO: 338452 - DNA, 19 bp, Homo sapiens
  siRNA target sequence for MKLN1 (NM_013255.2,1111-1129).
cgttatgacattgatacaa

SEQ ID NO: 338453 - DNA, 19 bp, Homo sapiens
  siRNA target sequence for MKLN1 (NM_013255.2,1133-1151).
catggatgttactaagtga

SEQ ID NO: 338454 - DNA, 19 bp, Homo sapiens
  siRNA target sequence for MKLN1 (NM_013255.2,1163-1181).
ctgatggagggccgaaatt

SEQ ID NO: 338455 - DNA, 19 bp, Homo sapiens
  siRNA target sequence for MKLN1 (NM_013255.2,1172-1190).
ggccgaaattggtgtttga

SEQ ID NO: 338456 - DNA, 19 bp, Homo sapiens
  siRNA target sequence for MKLN1 (NM_013255.2,1173-1191).
gccgaaattggtgtttgat

SEQ ID NO: 338457 - DNA, 19 bp, Homo sapiens
  siRNA target sequence for MKLN1 (NM_013255.2,1213-1231).
gaaaaacatatgatctaca

SEQ ID NO: 338458 - DNA, 19 bp, Homo sapiens
  siRNA target sequence for MKLN1 (NM_013255.2,1241-1259).
gtagaattttgacttgtaa

SEQ ID NO: 338459 - DNA, 19 bp, Homo sapiens
  siRNA target sequence for MKLN1 (NM_013255.2,1256-1274).
gtaatggcagcgtagatga

SEQ ID NO: 338460 - DNA, 19 bp, Homo sapiens
  siRNA target sequence for MKLN1 (NM_013255.2,1328-1346).
gtcaaacctggaaacttct

SEQ ID NO: 338461 - DNA, 19 bp, Homo sapiens
  siRNA target sequence for MKLN1 (NM_013255.2,1418-1436).
caaaaaatcgttgcttata

SEQ ID NO: 338462 - DNA, 19 bp, Homo sapiens
  siRNA target sequence for MKLN1 (NM_013255.2,1444-1462).
ggtggccagcgatcaaaga

SEQ ID NO: 338463 - DNA, 19 bp, Homo sapiens
  siRNA target sequence for MKLN1 (NM_013255.2,1450-1468).
cagcgatcaaagacctatt

SEQ ID NO: 338464 - DNA, 19 bp, Homo sapiens
  siRNA target sequence for MKLN1 (NM_013255.2,1470-1488).
gaatgatttctttagttat

SEQ ID NO: 338465 - DNA, 19 bp, Homo sapiens
  siRNA target sequence for MKLN1 (NM_013255.2,1619-1637).
gactcagcaaagataagga

SEQ ID NO: 338466 - DNA, 19 bp, Homo sapiens
  siRNA target sequence for MKLN1 (NM_013255.2,1664-1682).
cattctggatttatgacat

SEQ ID NO: 338467 - DNA, 19 bp, Homo sapiens
  siRNA target sequence for MKLN1 (NM_013255.2,1678-1696).
gacattgtgaggaatagtt

SEQ ID NO: 338468 - DNA, 19 bp, Homo sapiens
  siRNA target sequence for MKLN1 (NM_013255.2,1697-1715).
ggtcttgtgtctataagaa

SEQ ID NO: 338469 - DNA, 19 bp, Homo sapiens
  siRNA target sequence for MKLN1 (NM_013255.2,1698-1716).
gtcttgtgtctataagaat

SEQ ID NO: 338470 - DNA, 19 bp, Homo sapiens
  siRNA target sequence for MKLN1 (NM_013255.2,1807-1825).
cacaaggttcattacttat

SEQ ID NO: 338471 - DNA, 19 bp, Homo sapiens
  siRNA target sequence for MKLN1 (NM_013255.2,1850-1868).
gctctccaaagatgagatt

SEQ ID NO: 338472 - DNA, 19 bp, Homo sapiens
  siRNA target sequence for MKLN1 (NM_013255.2,1853-1871).
ctccaaagatgagattaga

SEQ ID NO: 338473 - DNA, 19 bp, Homo sapiens
  siRNA target sequence for MKLN1 (NM_013255.2,1893-1911).
gtgtagaccttcaaaagat

SEQ ID NO: 338474 - DNA, 19 bp, Homo sapiens
  siRNA target sequence for MKLN1 (NM_013255.2,1898-1916).
gaccttcaaaagattattt

SEQ ID NO: 338475 - DNA, 19 bp, Homo sapiens
  siRNA target sequence for MKLN1 (NM_013255.2,1924-1942).
cattgcaagtacctcataa

SEQ ID NO: 338476 - DNA, 19 bp, Homo sapiens
  siRNA target sequence for MKLN1 (NM_013255.2,2067-2085).
ggcatcagctctattcaaa

SEQ ID NO: 338477 - DNA, 19 bp, Homo sapiens
  siRNA target sequence for MKLN1 (NM_013255.2,2068-2086).
gcatcagctctattcaaat

SEQ ID NO: 338478 - DNA, 19 bp, Homo sapiens
  siRNA target sequence for MKLN1 (NM_013255.2,2128-2146).
cacacctatgctcaaagaa

SEQ ID NO: 338479 - DNA, 19 bp, Homo sapiens
  siRNA target sequence for MKLN1 (NM_013255.2,2130-2148).
cacctatgctcaaagaact

SEQ ID NO: 338480 - DNA, 19 bp, Homo sapiens
  siRNA target sequence for MKLN1 (NM_013255.2,2154-2172).
ctttgacaccttagtaaat

SEQ ID NO: 338481 - DNA, 19 bp, Homo sapiens
  siRNA target sequence for MKLN1 (NM_013255.2,2160-2178).
caccttagtaaatttcttt

SEQ ID NO: 338482 - DNA, 19 bp, Homo sapiens
  siRNA target sequence for HCNGP (NM_013260.3,49-67).
gcagtttacgcggaagatt

SEQ ID NO: 338483 - DNA, 19 bp, Homo sapiens
  siRNA target sequence for HCNGP (NM_013260.3,123-141).
ggagaaaggcggattggta

SEQ ID NO: 338484 - DNA, 19 bp, Homo sapiens
  siRNA target sequence for HCNGP (NM_013260.3,221-239).
gtagacagtcggaagatga

SEQ ID NO: 338485 - DNA, 19 bp, Homo sapiens
  siRNA target sequence for HCNGP (NM_013260.3,265-283).
gctgatgacccaaaggata

SEQ ID NO: 338486 - DNA, 19 bp, Homo sapiens
  siRNA target sequence for HCNGP (NM_013260.3,313-331).
gaactcgtggcctcctttt

SEQ ID NO: 338487 - DNA, 19 bp, Homo sapiens
  siRNA target sequence for HCNGP (NM_013260.3,334-352).
gaaagagttcggaacatgt

SEQ ID NO: 338488 - DNA, 19 bp, Homo sapiens
  siRNA target sequence for HCNGP (NM_013260.3,383-401).
cccctggcagatgttcaaa

SEQ ID NO: 338489 - DNA, 19 bp, Homo sapiens
  siRNA target sequence for HCNGP (NM_013260.3,386-404).
ctggcagatgttcaaatca

SEQ ID NO: 338490 - DNA, 19 bp, Homo sapiens
  siRNA target sequence for HCNGP (NM_013260.3,414-432).
caagatccagaagctttat

SEQ ID NO: 338491 - DNA, 19 bp, Homo sapiens
  siRNA target sequence for HCNGP (NM_013260.3,426-444).
gctttatgaacgaaagata

SEQ ID NO: 338492 - DNA, 19 bp, Homo sapiens
  siRNA target sequence for HCNGP (NM_013260.3,427-445).
ctttatgaacgaaagataa

SEQ ID NO: 338493 - DNA, 19 bp, Homo sapiens
  siRNA target sequence for HCNGP (NM_013260.3,634-652).
gagatggacaaattggaaa

SEQ ID NO: 338494 - DNA, 19 bp, Homo sapiens
  siRNA target sequence for HCNGP (NM_013260.3,664-682).
gagcgaacaaaaattgagt

SEQ ID NO: 338495 - DNA, 19 bp, Homo sapiens
  siRNA target sequence for HCNGP (NM_013260.3,908-926).
ctgtgggcaccattgtgaa

SEQ ID NO: 338496 - DNA, 19 bp, Homo sapiens
  siRNA target sequence for VR22 (NM_013266.1,192-210).
caatcacattgaatatcga

SEQ ID NO: 338497 - DNA, 19 bp, Homo sapiens
  siRNA target sequence for VR22 (NM_013266.1,218-236).
gatctgcaggtccaaacat

SEQ ID NO: 338498 - DNA, 19 bp, Homo sapiens
  siRNA target sequence for VR22 (NM_013266.1,221-239).
ctgcaggtccaaacattca

SEQ ID NO: 338499 - DNA, 19 bp, Homo sapiens
  siRNA target sequence for VR22 (NM_013266.1,251-269).
ctactggagcctctcataa

SEQ ID NO: 338500 - DNA, 19 bp, Homo sapiens
  siRNA target sequence for VR22 (NM_013266.1,407-425).
caggaagctacagttttaa

SEQ ID NO: 338501 - DNA, 19 bp, Homo sapiens
  siRNA target sequence for VR22 (NM_013266.1,449-467).
gaggaagttcgcaaagaaa

SEQ ID NO: 338502 - DNA, 19 bp, Homo sapiens
  siRNA target sequence for VR22 (NM_013266.1,451-469).
ggaagttcgcaaagaaagt

SEQ ID NO: 338503 - DNA, 19 bp, Homo sapiens
  siRNA target sequence for VR22 (NM_013266.1,567-585).
cggtgacgagactccttat

SEQ ID NO: 338504 - DNA, 19 bp, Homo sapiens
  siRNA target sequence for VR22 (NM_013266.1,571-589).
gacgagactccttatcctt

SEQ ID NO: 338505 - DNA, 19 bp, Homo sapiens
  siRNA target sequence for VR22 (NM_013266.1,586-604).
ccttgcggacatgattgat

SEQ ID NO: 338506 - DNA, 19 bp, Homo sapiens
  siRNA target sequence for VR22 (NM_013266.1,591-609).
cggacatgattgatgtcat

SEQ ID NO: 338507 - DNA, 19 bp, Homo sapiens
  siRNA target sequence for VR22 (NM_013266.1,658-676).
caaaaatgttgccaacaaa

SEQ ID NO: 338508 - DNA, 19 bp, Homo sapiens
  siRNA target sequence for VR22 (NM_013266.1,746-764).
cgtcagcaggacttaaaat

SEQ ID NO: 338509 - DNA, 19 bp, Homo sapiens
  siRNA target sequence for VR22 (NM_013266.1,846-864).
cttgtttggagcattctga

SEQ ID NO: 338510 - DNA, 19 bp, Homo sapiens
  siRNA target sequence for VR22 (NM_013266.1,917-935).
gctctcaatgtaatttcaa

SEQ ID NO: 338511 - DNA, 19 bp, Homo sapiens
  siRNA target sequence for VR22 (NM_013266.1,1004-1022).
cttgatgagctggagaatt

SEQ ID NO: 338512 - DNA, 19 bp, Homo sapiens
  siRNA target sequence for VR22 (NM_013266.1,1031-1049).
ctgaatccactcacagtaa

SEQ ID NO: 338513 - DNA, 19 bp, Homo sapiens
  siRNA target sequence for VR22 (NM_013266.1,1033-1051).
gaatccactcacagtaact

SEQ ID NO: 338514 - DNA, 19 bp, Homo sapiens
  siRNA target sequence for VR22 (NM_013266.1,1057-1075).
ggaaatacgaccatcacta

SEQ ID NO: 338515 - DNA, 19 bp, Homo sapiens
  siRNA target sequence for VR22 (NM_013266.1,1109-1127).
gctctgctggcggattctt

SEQ ID NO: 338516 - DNA, 19 bp, Homo sapiens
  siRNA target sequence for VR22 (NM_013266.1,1114-1132).
gctggcggattcttcatgt

SEQ ID NO: 338517 - DNA, 19 bp, Homo sapiens
  siRNA target sequence for VR22 (NM_013266.1,1115-1133).
ctggcggattcttcatgta

SEQ ID NO: 338518 - DNA, 19 bp, Homo sapiens
  siRNA target sequence for VR22 (NM_013266.1,1155-1173).
ggattatcgcagaatgcaa

SEQ ID NO: 338519 - DNA, 19 bp, Homo sapiens
  siRNA target sequence for VR22 (NM_013266.1,1250-1268).
ctgaatattgctttagaca

SEQ ID NO: 338520 - DNA, 19 bp, Homo sapiens
  siRNA target sequence for VR22 (NM_013266.1,1259-1277).
gctttagacaacatgtgta

SEQ ID NO: 338521 - DNA, 19 bp, Homo sapiens
  siRNA target sequence for VR22 (NM_013266.1,1303-1321).
gctccgcaaggctattata

SEQ ID NO: 338522 - DNA, 19 bp, Homo sapiens
  siRNA target sequence for VR22 (NM_013266.1,1306-1324).
ccgcaaggctattatagat

SEQ ID NO: 338523 - DNA, 19 bp, Homo sapiens
  siRNA target sequence for VR22 (NM_013266.1,1473-1491).
gttccatgtcaacaaatga

SEQ ID NO: 338524 - DNA, 19 bp, Homo sapiens
  siRNA target sequence for VR22 (NM_013266.1,1510-1528).
caaaattgcagccaatcat

SEQ ID NO: 338525 - DNA, 19 bp, Homo sapiens
  siRNA target sequence for VR22 (NM_013266.1,1575-1593).
ctgcaagacccaaaagtca

SEQ ID NO: 338526 - DNA, 19 bp, Homo sapiens
  siRNA target sequence for VR22 (NM_013266.1,1624-1642).
gcgtacatgggagaatcat

SEQ ID NO: 338527 - DNA, 19 bp, Homo sapiens
  siRNA target sequence for VR22 (NM_013266.1,1625-1643).
cgtacatgggagaatcata

SEQ ID NO: 338528 - DNA, 19 bp, Homo sapiens
  siRNA target sequence for VR22 (NM_013266.1,1626-1644).
gtacatgggagaatcatat

SEQ ID NO: 338529 - DNA, 19 bp, Homo sapiens
  siRNA target sequence for VR22 (NM_013266.1,1632-1650).
gggagaatcatatacatgt

SEQ ID NO: 338530 - DNA, 19 bp, Homo sapiens
  siRNA target sequence for VR22 (NM_013266.1,1700-1718).
gtatctgaaagccatatct

SEQ ID NO: 338531 - DNA, 19 bp, Homo sapiens
  siRNA target sequence for VR22 (NM_013266.1,1737-1755).
gtatcatagccttaagaga

SEQ ID NO: 338532 - DNA, 19 bp, Homo sapiens
  siRNA target sequence for VR22 (NM_013266.1,1860-1878).
cttacacggaaggtgtaat

SEQ ID NO: 338533 - DNA, 19 bp, Homo sapiens
  siRNA target sequence for VR22 (NM_013266.1,1864-1882).
cacggaaggtgtaatgaga

SEQ ID NO: 338534 - DNA, 19 bp, Homo sapiens
  siRNA target sequence for VR22 (NM_013266.1,1866-1884).
cggaaggtgtaatgagaaa

SEQ ID NO: 338535 - DNA, 19 bp, Homo sapiens
  siRNA target sequence for VR22 (NM_013266.1,1871-1889).
ggtgtaatgagaaatgtta

SEQ ID NO: 338536 - DNA, 19 bp, Homo sapiens
  siRNA target sequence for VR22 (NM_013266.1,1973-1991).
gtgttggatgataatcaat

SEQ ID NO: 338537 - DNA, 19 bp, Homo sapiens
  siRNA target sequence for VR22 (NM_013266.1,1975-1993).
gttggatgataatcaattt

SEQ ID NO: 338538 - DNA, 19 bp, Homo sapiens
  siRNA target sequence for VR22 (NM_013266.1,2008-2026).
gaagatctatgatacaatt

SEQ ID NO: 338539 - DNA, 19 bp, Homo sapiens
  siRNA target sequence for VR22 (NM_013266.1,2014-2032).
ctatgatacaattcatgat

SEQ ID NO: 338540 - DNA, 19 bp, Homo sapiens
  siRNA target sequence for VR22 (NM_013266.1,2201-2219).
caagttgctgatttcaaga

SEQ ID NO: 338541 - DNA, 19 bp, Homo sapiens
  siRNA target sequence for VR22 (NM_013266.1,2265-2283).
caagcaacgacatcattgt

SEQ ID NO: 338542 - DNA, 19 bp, Homo sapiens
  siRNA target sequence for VR22 (NM_013266.1,2334-2352).
ggggcaaaggaccactaaa

SEQ ID NO: 338543 - DNA, 19 bp, Homo sapiens
  siRNA target sequence for VR22 (NM_013266.1,2338-2356).
caaaggaccactaaagcat

SEQ ID NO: 338544 - DNA, 19 bp, Homo sapiens
  siRNA target sequence for VR22 (NM_013266.1,2342-2360).
ggaccactaaagcatacaa

SEQ ID NO: 338545 - DNA, 19 bp, Homo sapiens
  siRNA target sequence for VR22 (NM_013266.1,2376-2394).
cagcgaaaatgatatcaga

SEQ ID NO: 338546 - DNA, 19 bp, Homo sapiens
  siRNA target sequence for VR22 (NM_013266.1,2378-2396).
gcgaaaatgatatcagaat

SEQ ID NO: 338547 - DNA, 19 bp, Homo sapiens
  siRNA target sequence for VR22 (NM_013266.1,2421-2439).
ctcggcagattgctaatca

SEQ ID NO: 338548 - DNA, 19 bp, Homo sapiens
  siRNA target sequence for VR22 (NM_013266.1,2423-2441).
cggcagattgctaatcagt

SEQ ID NO: 338549 - DNA, 19 bp, Homo sapiens
  siRNA target sequence for VR22 (NM_013266.1,2440-2458).
gtgcccagatccatcttgt

SEQ ID NO: 338550 - DNA, 19 bp, Homo sapiens
  siRNA target sequence for VR22 (NM_013266.1,2442-2460).
gcccagatccatcttgtaa

SEQ ID NO: 338551 - DNA, 19 bp, Homo sapiens
  siRNA target sequence for VR22 (NM_013266.1,2454-2472).
cttgtaaacaggacttgtt

SEQ ID NO: 338552 - DNA, 19 bp, Homo sapiens
  siRNA target sequence for VR22 (NM_013266.1,2473-2491).
ggcctacctggaacagatt

SEQ ID NO: 338553 - DNA, 19 bp, Homo sapiens
  siRNA target sequence for VR22 (NM_013266.1,2474-2492).
gcctacctggaacagatta

SEQ ID NO: 338554 - DNA, 19 bp, Homo sapiens
  siRNA target sequence for VR22 (NM_013266.1,2475-2493).
cctacctggaacagattaa

SEQ ID NO: 338555 - DNA, 19 bp, Homo sapiens
  siRNA target sequence for VR22 (NM_013266.1,2497-2515).
ctactcccaccaactgaaa

SEQ ID NO: 338556 - DNA, 19 bp, Homo sapiens
  siRNA target sequence for VR22 (NM_013266.1,2518-2536).
ctgcagtcaagttaaagct

SEQ ID NO: 338557 - DNA, 19 bp, Homo sapiens
  siRNA target sequence for VR22 (NM_013266.1,2825-2843).
caagtcatgagtgaattta

SEQ ID NO: 338558 - DNA, 19 bp, Homo sapiens
  siRNA target sequence for ANKRD11 (NM_013275.3,470-488).
gggtgggtgccctaaagca

SEQ ID NO: 338559 - DNA, 19 bp, Homo sapiens
  siRNA target sequence for ANKRD11 (NM_013275.3,1264-1282).
gcgagacgccgctgaaagt

SEQ ID NO: 338560 - DNA, 19 bp, Homo sapiens
  siRNA target sequence for ANKRD11 (NM_013275.3,1317-1335).
ggcaaaggcacttacactt

SEQ ID NO: 338561 - DNA, 19 bp, Homo sapiens
  siRNA target sequence for ANKRD11 (NM_013275.3,1420-1438).
cggactccgagttcgaaaa

SEQ ID NO: 338562 - DNA, 19 bp, Homo sapiens
  siRNA target sequence for ANKRD11 (NM_013275.3,1493-1511).
caaggacgagtatgagttt

SEQ ID NO: 338563 - DNA, 19 bp, Homo sapiens
  siRNA target sequence for ANKRD11 (NM_013275.3,1550-1568).
cgacaagcacctattgaaa

SEQ ID NO: 338564 - DNA, 19 bp, Homo sapiens
  siRNA target sequence for ANKRD11 (NM_013275.3,1594-1612).
ccaatagttttatctctat

SEQ ID NO: 338565 - DNA, 19 bp, Homo sapiens
  siRNA target sequence for ANKRD11 (NM_013275.3,1746-1764).
ctctcggcacatacgatat

SEQ ID NO: 338566 - DNA, 19 bp, Homo sapiens
  siRNA target sequence for ANKRD11 (NM_013275.3,1759-1777).
cgatattgcctggtagtaa

SEQ ID NO: 338567 - DNA, 19 bp, Homo sapiens
  siRNA target sequence for ANKRD11 (NM_013275.3,1778-1796).
gacacgagagccttctaat

SEQ ID NO: 338568 - DNA, 19 bp, Homo sapiens
  siRNA target sequence for ANKRD11 (NM_013275.3,1873-1891).
gaaagcggagcgacaagtt

SEQ ID NO: 338569 - DNA, 19 bp, Homo sapiens
  siRNA target sequence for ANKRD11 (NM_013275.3,2096-2114).
gcactggcggacagacaat

SEQ ID NO: 338570 - DNA, 19 bp, Homo sapiens
  siRNA target sequence for ANKRD11 (NM_013275.3,2097-2115).
cactggcggacagacaatt

SEQ ID NO: 338571 - DNA, 19 bp, Homo sapiens
  siRNA target sequence for ANKRD11 (NM_013275.3,2101-2119).
ggcggacagacaattggaa

SEQ ID NO: 338572 - DNA, 19 bp, Homo sapiens
  siRNA target sequence for ANKRD11 (NM_013275.3,2102-2120).
gcggacagacaattggaaa

SEQ ID NO: 338573 - DNA, 19 bp, Homo sapiens
  siRNA target sequence for ANKRD11 (NM_013275.3,2103-2121).
cggacagacaattggaaaa

SEQ ID NO: 338574 - DNA, 19 bp, Homo sapiens
  siRNA target sequence for ANKRD11 (NM_013275.3,2431-2449).
gttttacttacgaatatga

SEQ ID NO: 338575 - DNA, 19 bp, Homo sapiens
  siRNA target sequence for ANKRD11 (NM_013275.3,2455-2473).
ccaagcagaagtcagataa

SEQ ID NO: 338576 - DNA, 19 bp, Homo sapiens
  siRNA target sequence for ANKRD11 (NM_013275.3,2467-2485).
cagataaggctatactgtt

SEQ ID NO: 338577 - DNA, 19 bp, Homo sapiens
  siRNA target sequence for ANKRD11 (NM_013275.3,2474-2492).
ggctatactgttagagaat

SEQ ID NO: 338578 - DNA, 19 bp, Homo sapiens
  siRNA target sequence for ANKRD11 (NM_013275.3,2476-2494).
ctatactgttagagaatga

SEQ ID NO: 338579 - DNA, 19 bp, Homo sapiens
  siRNA target sequence for ANKRD11 (NM_013275.3,2531-2549).
cgatcgcgaccactttaaa

SEQ ID NO: 338580 - DNA, 19 bp, Homo sapiens
  siRNA target sequence for ANKRD11 (NM_013275.3,2532-2550).
gatcgcgaccactttaaaa

SEQ ID NO: 338581 - DNA, 19 bp, Homo sapiens
  siRNA target sequence for ANKRD11 (NM_013275.3,2583-2601).
gaaaaagaatggctcttta

SEQ ID NO: 338582 - DNA, 19 bp, Homo sapiens
  siRNA target sequence for ANKRD11 (NM_013275.3,2654-2672).
gtctttccgagaagagaaa

SEQ ID NO: 338583 - DNA, 19 bp, Homo sapiens
  siRNA target sequence for ANKRD11 (NM_013275.3,2667-2685).
gagaaagaccgttcgaata

SEQ ID NO: 338584 - DNA, 19 bp, Homo sapiens
  siRNA target sequence for ANKRD11 (NM_013275.3,2669-2687).
gaaagaccgttcgaataaa

SEQ ID NO: 338585 - DNA, 19 bp, Homo sapiens
  siRNA target sequence for ANKRD11 (NM_013275.3,2677-2695).
gttcgaataaagcagaaaa

SEQ ID NO: 338586 - DNA, 19 bp, Homo sapiens
  siRNA target sequence for ANKRD11 (NM_013275.3,2901-2919).
gcttttgacgaatattgta

SEQ ID NO: 338587 - DNA, 19 bp, Homo sapiens
  siRNA target sequence for ANKRD11 (NM_013275.3,2902-2920).
cttttgacgaatattgtaa

SEQ ID NO: 338588 - DNA, 19 bp, Homo sapiens
  siRNA target sequence for ANKRD11 (NM_013275.3,2907-2925).
gacgaatattgtaacaaaa

SEQ ID NO: 338589 - DNA, 19 bp, Homo sapiens
  siRNA target sequence for ANKRD11 (NM_013275.3,2973-2991).
cagcgagatcggtggtttt

SEQ ID NO: 338590 - DNA, 19 bp, Homo sapiens
  siRNA target sequence for ANKRD11 (NM_013275.3,2975-2993).
gcgagatcggtggttttct

SEQ ID NO: 338591 - DNA, 19 bp, Homo sapiens
  siRNA target sequence for ANKRD11 (NM_013275.3,2977-2995).
gagatcggtggttttctga

SEQ ID NO: 338592 - DNA, 19 bp, Homo sapiens
  siRNA target sequence for ANKRD11 (NM_013275.3,2996-3014).
cttgtccgattcatccttt

SEQ ID NO: 338593 - DNA, 19 bp, Homo sapiens
  siRNA target sequence for ANKRD11 (NM_013275.3,2999-3017).
gtccgattcatcctttgat

SEQ ID NO: 338594 - DNA, 19 bp, Homo sapiens
  siRNA target sequence for ANKRD11 (NM_013275.3,3259-3277).
gctacctttcggaaaagga

SEQ ID NO: 338595 - DNA, 19 bp, Homo sapiens
  siRNA target sequence for ANKRD11 (NM_013275.3,3586-3604).
caatcctggaaaaatgtca

SEQ ID NO: 338596 - DNA, 19 bp, Homo sapiens
  siRNA target sequence for ANKRD11 (NM_013275.3,4140-4158).
gtggactccacgcaagata

SEQ ID NO: 338597 - DNA, 19 bp, Homo sapiens
  siRNA target sequence for ANKRD11 (NM_013275.3,4143-4161).
gactccacgcaagataaga

SEQ ID NO: 338598 - DNA, 19 bp, Homo sapiens
  siRNA target sequence for ANKRD11 (NM_013275.3,4148-4166).
cacgcaagataagaaaaat

SEQ ID NO: 338599 - DNA, 19 bp, Homo sapiens
  siRNA target sequence for ANKRD11 (NM_013275.3,4206-4224).
gccgaagacaaggctaaaa

SEQ ID NO: 338600 - DNA, 19 bp, Homo sapiens
  siRNA target sequence for ANKRD11 (NM_013275.3,4238-4256).
gaagtcggacaaagaacat

SEQ ID NO: 338601 - DNA, 19 bp, Homo sapiens
  siRNA target sequence for ANKRD11 (NM_013275.3,4243-4261).
cggacaaagaacattccaa

SEQ ID NO: 338602 - DNA, 19 bp, Homo sapiens
  siRNA target sequence for ANKRD11 (NM_013275.3,4347-4365).
gactccaacgataaaatca

SEQ ID NO: 338603 - DNA, 19 bp, Homo sapiens
  siRNA target sequence for ANKRD11 (NM_013275.3,4587-4605).
gagaagggcgaagattaca

SEQ ID NO: 338604 - DNA, 19 bp, Homo sapiens
  siRNA target sequence for ANKRD11 (NM_013275.3,4626-4644).
gactccggccagtacgaaa

SEQ ID NO: 338605 - DNA, 19 bp, Homo sapiens
  siRNA target sequence for ANKRD11 (NM_013275.3,4661-4679).
ggatgcttacggagtttct

SEQ ID NO: 338606 - DNA, 19 bp, Homo sapiens
  siRNA target sequence for ANKRD11 (NM_013275.3,4665-4683).
gcttacggagtttcttaca

SEQ ID NO: 338607 - DNA, 19 bp, Homo sapiens
  siRNA target sequence for ANKRD11 (NM_013275.3,4666-4684).
cttacggagtttcttacaa

SEQ ID NO: 338608 - DNA, 19 bp, Homo sapiens
  siRNA target sequence for ANKRD11 (NM_013275.3,4671-4689).
ggagtttcttacaacatga

SEQ ID NO: 338609 - DNA, 19 bp, Homo sapiens
  siRNA target sequence for ANKRD11 (NM_013275.3,4672-4690).
gagtttcttacaacatgaa

SEQ ID NO: 338610 - DNA, 19 bp, Homo sapiens
  siRNA target sequence for ANKRD11 (NM_013275.3,4682-4700).
caacatgaaagctgacata

SEQ ID NO: 338611 - DNA, 19 bp, Homo sapiens
  siRNA target sequence for ANKRD11 (NM_013275.3,4809-4827).
ggatctagtgccatcaaca

SEQ ID NO: 338612 - DNA, 19 bp, Homo sapiens
  siRNA target sequence for ANKRD11 (NM_013275.3,4810-4828).
gatctagtgccatcaacat

SEQ ID NO: 338613 - DNA, 19 bp, Homo sapiens
  siRNA target sequence for ANKRD11 (NM_013275.3,5037-5055).
ctcggcgatgccaaactga

SEQ ID NO: 338614 - DNA, 19 bp, Homo sapiens
  siRNA target sequence for ANKRD11 (NM_013275.3,5105-5123).
gatgagcaacgggaatgat

SEQ ID NO: 338615 - DNA, 19 bp, Homo sapiens
  siRNA target sequence for ANKRD11 (NM_013275.3,5110-5128).
gcaacgggaatgataaggt

SEQ ID NO: 338616 - DNA, 19 bp, Homo sapiens
  siRNA target sequence for ANKRD11 (NM_013275.3,5111-5129).
caacgggaatgataaggta

SEQ ID NO: 338617 - DNA, 19 bp, Homo sapiens
  siRNA target sequence for ANKRD11 (NM_013275.3,5185-5203).
gggacggcgacctgatgat

SEQ ID NO: 338618 - DNA, 19 bp, Homo sapiens
  siRNA target sequence for ANKRD11 (NM_013275.3,5187-5205).
gacggcgacctgatgatga

SEQ ID NO: 338619 - DNA, 19 bp, Homo sapiens
  siRNA target sequence for ANKRD11 (NM_013275.3,5369-5387).
ggacattcctgctaagaaa

SEQ ID NO: 338620 - DNA, 19 bp, Homo sapiens
  siRNA target sequence for ANKRD11 (NM_013275.3,5394-5412).
gggctggaccctccattta

SEQ ID NO: 338621 - DNA, 19 bp, Homo sapiens
  siRNA target sequence for ANKRD11 (NM_013275.3,5395-5413).
ggctggaccctccatttaa

SEQ ID NO: 338622 - DNA, 19 bp, Homo sapiens
  siRNA target sequence for ANKRD11 (NM_013275.3,5396-5414).
gctggaccctccatttaaa

SEQ ID NO: 338623 - DNA, 19 bp, Homo sapiens
  siRNA target sequence for ANKRD11 (NM_013275.3,5504-5522).
ggcaggccctcacatgaaa

SEQ ID NO: 338624 - DNA, 19 bp, Homo sapiens
  siRNA target sequence for ANKRD11 (NM_013275.3,5641-5659).
cctgcagcgccgatgacta

SEQ ID NO: 338625 - DNA, 19 bp, Homo sapiens
  siRNA target sequence for ANKRD11 (NM_013275.3,5835-5853).
gtctctgtcgacattagga

SEQ ID NO: 338626 - DNA, 19 bp, Homo sapiens
  siRNA target sequence for ANKRD11 (NM_013275.3,5854-5872).
ggacccccgaggaagaatt

SEQ ID NO: 338627 - DNA, 19 bp, Homo sapiens
  siRNA target sequence for ANKRD11 (NM_013275.3,6011-6029).
gtactactccccagactat

SEQ ID NO: 338628 - DNA, 19 bp, Homo sapiens
  siRNA target sequence for ANKRD11 (NM_013275.3,6099-6117).
ccagagggcgtcttctcaa

SEQ ID NO: 338629 - DNA, 19 bp, Homo sapiens
  siRNA target sequence for ANKRD11 (NM_013275.3,6102-6120).
gagggcgtcttctcaagtt

SEQ ID NO: 338630 - DNA, 19 bp, Homo sapiens
  siRNA target sequence for ANKRD11 (NM_013275.3,6104-6122).
gggcgtcttctcaagttta

SEQ ID NO: 338631 - DNA, 19 bp, Homo sapiens
  siRNA target sequence for ANKRD11 (NM_013275.3,6107-6125).
cgtcttctcaagtttacaa

SEQ ID NO: 338632 - DNA, 19 bp, Homo sapiens
  siRNA target sequence for ANKRD11 (NM_013275.3,6921-6939).
gcggaacccgtggaagaaa

SEQ ID NO: 338633 - DNA, 19 bp, Homo sapiens
  siRNA target sequence for ANKRD11 (NM_013275.3,7100-7118).
gctggacgtggctctagaa

SEQ ID NO: 338634 - DNA, 19 bp, Homo sapiens
  siRNA target sequence for ANKRD11 (NM_013275.3,7399-7417).
cggaagccgcagaaccaaa

SEQ ID NO: 338635 - DNA, 19 bp, Homo sapiens
  siRNA target sequence for ANKRD11 (NM_013275.3,7767-7785).
gccaacccctacttcgaat

SEQ ID NO: 338636 - DNA, 19 bp, Homo sapiens
  siRNA target sequence for ANKRD11 (NM_013275.3,7768-7786).
ccaacccctacttcgaata

SEQ ID NO: 338637 - DNA, 19 bp, Homo sapiens
  siRNA target sequence for ANKRD11 (NM_013275.3,8194-8212).
cagtgcgcgaccgtttcaa

SEQ ID NO: 338638 - DNA, 19 bp, Homo sapiens
  siRNA target sequence for ANKRD11 (NM_013275.3,8240-8258).
ggacgtggatgacaagtat

SEQ ID NO: 338639 - DNA, 19 bp, Homo sapiens
  siRNA target sequence for ANKRD11 (NM_013275.3,8423-8441).
cgtcaacgacgactttgta

SEQ ID NO: 338640 - DNA, 19 bp, Homo sapiens
  siRNA target sequence for C11orf9 (NM_013279.1,78-96).
gagccctccaacatagaca

SEQ ID NO: 338641 - DNA, 19 bp, Homo sapiens
  siRNA target sequence for C11orf9 (NM_013279.1,612-630).
cagcgggatctgtacatga

SEQ ID NO: 338642 - DNA, 19 bp, Homo sapiens
  siRNA target sequence for C11orf9 (NM_013279.1,818-836).
gctgaatggaatgatcaaa

SEQ ID NO: 338643 - DNA, 19 bp, Homo sapiens
  siRNA target sequence for C11orf9 (NM_013279.1,1093-1111).
cgaccctgtacgatgctaa

SEQ ID NO: 338644 - DNA, 19 bp, Homo sapiens
  siRNA target sequence for C11orf9 (NM_013279.1,1096-1114).
ccctgtacgatgctaacta

SEQ ID NO: 338645 - DNA, 19 bp, Homo sapiens
  siRNA target sequence for C11orf9 (NM_013279.1,1098-1116).
ctgtacgatgctaactaca

SEQ ID NO: 338646 - DNA, 19 bp, Homo sapiens
  siRNA target sequence for C11orf9 (NM_013279.1,1149-1167).
gcggacaagggcttcaact

SEQ ID NO: 338647 - DNA, 19 bp, Homo sapiens
  siRNA target sequence for C11orf9 (NM_013279.1,1150-1168).
cggacaagggcttcaactt

SEQ ID NO: 338648 - DNA, 19 bp, Homo sapiens
  siRNA target sequence for C11orf9 (NM_013279.1,1176-1194).
ggcgacgacgcctttgtgt

SEQ ID NO: 338649 - DNA, 19 bp, Homo sapiens
  siRNA target sequence for C11orf9 (NM_013279.1,1282-1300).
ccctcgactgcttctatct

SEQ ID NO: 338650 - DNA, 19 bp, Homo sapiens
  siRNA target sequence for C11orf9 (NM_013279.1,1284-1302).
ctcgactgcttctatctga

SEQ ID NO: 338651 - DNA, 19 bp, Homo sapiens
  siRNA target sequence for C11orf9 (NM_013279.1,1453-1471).
gcgagaccaccgctaacaa

SEQ ID NO: 338652 - DNA, 19 bp, Homo sapiens
  siRNA target sequence for C11orf9 (NM_013279.1,1465-1483).
ctaacaacatgcgtaagaa

SEQ ID NO: 338653 - DNA, 19 bp, Homo sapiens
  siRNA target sequence for C11orf9 (NM_013279.1,1722-1740).
gttgtgcacgggaatgtca

SEQ ID NO: 338654 - DNA, 19 bp, Homo sapiens
  siRNA target sequence for C11orf9 (NM_013279.1,1803-1821).
gacaccaccgagcaattga

SEQ ID NO: 338655 - DNA, 19 bp, Homo sapiens
  siRNA target sequence for C11orf9 (NM_013279.1,1839-1857).
cggctggtgcactacagat

SEQ ID NO: 338656 - DNA, 19 bp, Homo sapiens
  siRNA target sequence for C11orf9 (NM_013279.1,1840-1858).
ggctggtgcactacagata

SEQ ID NO: 338657 - DNA, 19 bp, Homo sapiens
  siRNA target sequence for C11orf9 (NM_013279.1,1842-1860).
ctggtgcactacagataca

SEQ ID NO: 338658 - DNA, 19 bp, Homo sapiens
  siRNA target sequence for C11orf9 (NM_013279.1,1944-1962).
cctgaggctgtgaaagaca

SEQ ID NO: 338659 - DNA, 19 bp, Homo sapiens
  siRNA target sequence for C11orf9 (NM_013279.1,2081-2099).
cctggagacgcgcattgat

SEQ ID NO: 338660 - DNA, 19 bp, Homo sapiens
  siRNA target sequence for C11orf9 (NM_013279.1,2544-2562).
cgcaccttggacatgtgtt

SEQ ID NO: 338661 - DNA, 19 bp, Homo sapiens
  siRNA target sequence for C11orf9 (NM_013279.1,2744-2762).
ctggggtctttcagtcaat

SEQ ID NO: 338662 - DNA, 19 bp, Homo sapiens
  siRNA target sequence for C11orf9 (NM_013279.1,3225-3243).
caccggtggccaataacca

SEQ ID NO: 338663 - DNA, 19 bp, Homo sapiens
  siRNA target sequence for HUMAGCGB (NM_013286.2,542-560).
ccacgcgcaacctcttcat

SEQ ID NO: 338664 - DNA, 19 bp, Homo sapiens
  siRNA target sequence for HUMAGCGB (NM_013286.2,547-565).
cgcaacctcttcattggta

SEQ ID NO: 338665 - DNA, 19 bp, Homo sapiens
  siRNA target sequence for HUMAGCGB (NM_013286.2,598-616).
cgaagggccttcgagaaat

SEQ ID NO: 338666 - DNA, 19 bp, Homo sapiens
  siRNA target sequence for HUMAGCGB (NM_013286.2,599-617).
gaagggccttcgagaaata

SEQ ID NO: 338667 - DNA, 19 bp, Homo sapiens
  siRNA target sequence for HUMAGCGB (NM_013286.2,746-764).
gtcgcaaccccattaagat

SEQ ID NO: 338668 - DNA, 19 bp, Homo sapiens
  siRNA target sequence for HUMAGCGB (NM_013286.2,836-854).
ctctggcccgagagtttga

SEQ ID NO: 338669 - DNA, 19 bp, Homo sapiens
  siRNA target sequence for HUMAGCGB (NM_013286.2,864-882).
gagcattcggaccattgat

SEQ ID NO: 338670 - DNA, 19 bp, Homo sapiens
  siRNA target sequence for HUMAGCGB (NM_013286.2,866-884).
gcattcggaccattgatca

SEQ ID NO: 338671 - DNA, 19 bp, Homo sapiens
  siRNA target sequence for HUMAGCGB (NM_013286.2,885-903).
cgtcaaaggagatagcttt

SEQ ID NO: 338672 - DNA, 19 bp, Homo sapiens
  siRNA target sequence for HUMAGCGB (NM_013286.2,987-1005).
caggctccgcgtggatttt

SEQ ID NO: 338673 - DNA, 19 bp, Homo sapiens
  siRNA target sequence for HUMAGCGB (NM_013286.2,1156-1174).
gaccgagaccggacttttt

SEQ ID NO: 338674 - DNA, 19 bp, Homo sapiens
  siRNA target sequence for HUMAGCGB (NM_013286.2,1628-1646).
ctctggaagagccaaaaca

SEQ ID NO: 338675 - DNA, 19 bp, Homo sapiens
  siRNA target sequence for HUMAGCGB (NM_013286.2,1639-1657).
ccaaaacacgagaccaaaa

SEQ ID NO: 338676 - DNA, 19 bp, Homo sapiens
  siRNA target sequence for HUMAGCGB (NM_013286.2,1640-1658).
caaaacacgagaccaaaaa

SEQ ID NO: 338677 - DNA, 19 bp, Homo sapiens
  siRNA target sequence for HUMAGCGB (NM_013286.2,1734-1752).
cttccccacgtctatgcat

SEQ ID NO: 338678 - DNA, 19 bp, Homo sapiens
  siRNA target sequence for HUMAGCGB (NM_013286.2,1739-1757).
ccacgtctatgcatatcct

SEQ ID NO: 338679 - DNA, 19 bp, Homo sapiens
  siRNA target sequence for HUMAGCGB (NM_013286.2,1740-1758).
cacgtctatgcatatccta

SEQ ID NO: 338680 - DNA, 19 bp, Homo sapiens
  siRNA target sequence for HUMAGCGB (NM_013286.2,2011-2029).
gtctcctacttgaaacaga

SEQ ID NO: 338681 - DNA, 19 bp, Homo sapiens
  siRNA target sequence for HUMAGCGB (NM_013286.2,2173-2191).
gaacacatggtgatagtca

SEQ ID NO: 338682 - DNA, 19 bp, Homo sapiens
  siRNA target sequence for HSU79266 (NM_013299.1,971-989).
ccctgcatgaggttctaca

SEQ ID NO: 338683 - DNA, 19 bp, Homo sapiens
  siRNA target sequence for HSU79274 (NM_013300.1,557-575).
cggatcagctggatactct

SEQ ID NO: 338684 - DNA, 19 bp, Homo sapiens
  siRNA target sequence for HSU79274 (NM_013300.1,562-580).
cagctggatactcttgtta

SEQ ID NO: 338685 - DNA, 19 bp, Homo sapiens
  siRNA target sequence for HSU79274 (NM_013300.1,574-592).
cttgttaccagaattccaa

SEQ ID NO: 338686 - DNA, 19 bp, Homo sapiens
  siRNA target sequence for HSU79274 (NM_013300.1,639-657).
gctaagctgcaagagttat

SEQ ID NO: 338687 - DNA, 19 bp, Homo sapiens
  siRNA target sequence for HSU79274 (NM_013300.1,647-665).
gcaagagttatggaaaact

SEQ ID NO: 338688 - DNA, 19 bp, Homo sapiens
  siRNA target sequence for HSU79274 (NM_013300.1,761-779).
cagcattgctaaaatctat

SEQ ID NO: 338689 - DNA, 19 bp, Homo sapiens
  siRNA target sequence for HSU79274 (NM_013300.1,783-801).
gcaaactatctgaagatgt

SEQ ID NO: 338690 - DNA, 19 bp, Homo sapiens
  siRNA target sequence for HSU79274 (NM_013300.1,784-802).
caaactatctgaagatgtt

SEQ ID NO: 338691 - DNA, 19 bp, Homo sapiens
  siRNA target sequence for HSU79274 (NM_013300.1,878-896).
ccttagctcccgttactca

SEQ ID NO: 338692 - DNA, 19 bp, Homo sapiens
  siRNA target sequence for HSU79274 (NM_013300.1,884-902).
ctcccgttactcacagaaa

SEQ ID NO: 338693 - DNA, 19 bp, Homo sapiens
  siRNA target sequence for HSU79274 (NM_013300.1,886-904).
cccgttactcacagaaaca

SEQ ID NO: 338694 - DNA, 19 bp, Homo sapiens
  siRNA target sequence for HSU79274 (NM_013300.1,919-937).
ctacatggcgacatcaact

SEQ ID NO: 338695 - DNA, 19 bp, Homo sapiens
  siRNA target sequence for HSU79274 (NM_013300.1,948-966).
gactcggggtcttctgata

SEQ ID NO: 338696 - DNA, 19 bp, Homo sapiens
  siRNA target sequence for HSU79274 (NM_013300.1,1218-1236).
gaacatctgatgttaactt

SEQ ID NO: 338697 - DNA, 19 bp, Homo sapiens
  siRNA target sequence for HSU79303 (NM_013301.1,378-396).
cccacagatcttttacagt

SEQ ID NO: 338698 - DNA, 19 bp, Homo sapiens
  siRNA target sequence for HSU79303 (NM_013301.1,401-419).
gcccctctcggagaaactt

SEQ ID NO: 338699 - DNA, 19 bp, Homo sapiens
  siRNA target sequence for HSU79303 (NM_013301.1,557-575).
ggtgccagctggacaaatt

SEQ ID NO: 338700 - DNA, 19 bp, Homo sapiens
  siRNA target sequence for HSU79303 (NM_013301.1,560-578).
gccagctggacaaattcat

SEQ ID NO: 338701 - DNA, 19 bp, Homo sapiens
  siRNA target sequence for YPEL1 (NM_013313.3,549-567).
gcggttgccgacatctact

SEQ ID NO: 338702 - DNA, 19 bp, Homo sapiens
  siRNA target sequence for YPEL1 (NM_013313.3,583-601).
ccacgctcgggtggaaata

SEQ ID NO: 338703 - DNA, 19 bp, Homo sapiens
  siRNA target sequence for YPEL1 (NM_013313.3,586-604).
cgctcgggtggaaatacga

SEQ ID NO: 338704 - DNA, 19 bp, Homo sapiens
  siRNA target sequence for YPEL1 (NM_013313.3,654-672).
gagcttgctcatatgatca

SEQ ID NO: 338705 - DNA, 19 bp, Homo sapiens
  siRNA target sequence for APG4B (NM_013325.3,75-93).
ccggtttgctgagtttgaa

SEQ ID NO: 338706 - DNA, 19 bp, Homo sapiens
  siRNA target sequence for APG4B (NM_013325.3,154-172).
gaaaaggacgagatcttgt

SEQ ID NO: 338707 - DNA, 19 bp, Homo sapiens
  siRNA target sequence for APG4B (NM_013325.3,171-189).
gtctgatgtggcatctaga

SEQ ID NO: 338708 - DNA, 19 bp, Homo sapiens
  siRNA target sequence for APG4B (NM_013325.3,175-193).
gatgtggcatctagacttt

SEQ ID NO: 338709 - DNA, 19 bp, Homo sapiens
  siRNA target sequence for APG4B (NM_013325.3,181-199).
gcatctagactttggttta

SEQ ID NO: 338710 - DNA, 19 bp, Homo sapiens
  siRNA target sequence for APG4B (NM_013325.3,271-289).
cggtgtggacagatgatct

SEQ ID NO: 338711 - DNA, 19 bp, Homo sapiens
  siRNA target sequence for APG4B (NM_013325.3,371-389).
gcgtcctcaacgcattcat

SEQ ID NO: 338712 - DNA, 19 bp, Homo sapiens
  siRNA target sequence for APG4B (NM_013325.3,701-719).
gacccctggtacttctcat

SEQ ID NO: 338713 - DNA, 19 bp, Homo sapiens
  siRNA target sequence for APG4B (NM_013325.3,1037-1055).
ggtgccagcaagtcaaaaa

SEQ ID NO: 338714 - DNA, 19 bp, Homo sapiens
  siRNA target sequence for APG4B (NM_013325.3,1040-1058).
gccagcaagtcaaaaagct

SEQ ID NO: 338715 - DNA, 19 bp, Homo sapiens
  siRNA target sequence for APG4B (NM_013325.3,1073-1091).
gtgccctgcccatgtttga

SEQ ID NO: 338716 - DNA, 19 bp, Homo sapiens
  siRNA target sequence for APG4B (NM_013325.3,1137-1155).
gaacctgtccctagattct

SEQ ID NO: 338717 - DNA, 19 bp, Homo sapiens
  siRNA target sequence for APG4B (NM_013325.3,1140-1158).
cctgtccctagattcttct

SEQ ID NO: 338718 - DNA, 19 bp, Homo sapiens
  siRNA target sequence for APG4B (NM_013325.3,1162-1180).
gtagagcgactggaaagat

SEQ ID NO: 338719 - DNA, 19 bp, Homo sapiens
  siRNA target sequence for C18orf8 (NM_013326.2,115-133).
gcgaggaggactactatct

SEQ ID NO: 338720 - DNA, 19 bp, Homo sapiens
  siRNA target sequence for C18orf8 (NM_013326.2,175-193).
ctgtcaactgcgtcttctt

SEQ ID NO: 338721 - DNA, 19 bp, Homo sapiens
  siRNA target sequence for C18orf8 (NM_013326.2,237-255).
gctactggcgtggtagtta

SEQ ID NO: 338722 - DNA, 19 bp, Homo sapiens
  siRNA target sequence for C18orf8 (NM_013326.2,238-256).
ctactggcgtggtagttaa

SEQ ID NO: 338723 - DNA, 19 bp, Homo sapiens
  siRNA target sequence for C18orf8 (NM_013326.2,267-285).
gataggaatcccatctcat

SEQ ID NO: 338724 - DNA, 19 bp, Homo sapiens
  siRNA target sequence for C18orf8 (NM_013326.2,306-324).
gaagtgaagtgcattaagt

SEQ ID NO: 338725 - DNA, 19 bp, Homo sapiens
  siRNA target sequence for C18orf8 (NM_013326.2,317-335).
cattaagttttccttagaa

SEQ ID NO: 338726 - DNA, 19 bp, Homo sapiens
  siRNA target sequence for C18orf8 (NM_013326.2,361-379).
cctcaaagactgtggattt

SEQ ID NO: 338727 - DNA, 19 bp, Homo sapiens
  siRNA target sequence for C18orf8 (NM_013326.2,431-449).
gactaagaatgccaacatt

SEQ ID NO: 338728 - DNA, 19 bp, Homo sapiens
  siRNA target sequence for C18orf8 (NM_013326.2,433-451).
ctaagaatgccaacattct

SEQ ID NO: 338729 - DNA, 19 bp, Homo sapiens
  siRNA target sequence for C18orf8 (NM_013326.2,458-476).
ctgctggactagttcaact

SEQ ID NO: 338730 - DNA, 19 bp, Homo sapiens
  siRNA target sequence for C18orf8 (NM_013326.2,493-511).
cagatcaaggaatcgaatt

SEQ ID NO: 338731 - DNA, 19 bp, Homo sapiens
  siRNA target sequence for C18orf8 (NM_013326.2,495-513).
gatcaaggaatcgaatttt

SEQ ID NO: 338732 - DNA, 19 bp, Homo sapiens
  siRNA target sequence for C18orf8 (NM_013326.2,556-574).
gccacaatctcaatgtgaa

SEQ ID NO: 338733 - DNA, 19 bp, Homo sapiens
  siRNA target sequence for C18orf8 (NM_013326.2,570-588).
gtgaattggtacatgtact

SEQ ID NO: 338734 - DNA, 19 bp, Homo sapiens
  siRNA target sequence for C18orf8 (NM_013326.2,702-720).
ccagctgcgcctaagtcaa

SEQ ID NO: 338735 - DNA, 19 bp, Homo sapiens
  siRNA target sequence for C18orf8 (NM_013326.2,705-723).
gctgcgcctaagtcaacta

SEQ ID NO: 338736 - DNA, 19 bp, Homo sapiens
  siRNA target sequence for C18orf8 (NM_013326.2,706-724).
ctgcgcctaagtcaactaa

SEQ ID NO: 338737 - DNA, 19 bp, Homo sapiens
  siRNA target sequence for C18orf8 (NM_013326.2,746-764).
catcgcaatggctaccata

SEQ ID NO: 338738 - DNA, 19 bp, Homo sapiens
  siRNA target sequence for C18orf8 (NM_013326.2,785-803).
cttcttgaggcatcattct

SEQ ID NO: 338739 - DNA, 19 bp, Homo sapiens
  siRNA target sequence for C18orf8 (NM_013326.2,826-844).
cggaggtggtcctctatca

SEQ ID NO: 338740 - DNA, 19 bp, Homo sapiens
  siRNA target sequence for C18orf8 (NM_013326.2,827-845).
ggaggtggtcctctatcat

SEQ ID NO: 338741 - DNA, 19 bp, Homo sapiens
  siRNA target sequence for C18orf8 (NM_013326.2,830-848).
ggtggtcctctatcatcta

SEQ ID NO: 338742 - DNA, 19 bp, Homo sapiens
  siRNA target sequence for C18orf8 (NM_013326.2,955-973).
cagagacatcggtaatatt

SEQ ID NO: 338743 - DNA, 19 bp, Homo sapiens
  siRNA target sequence for C18orf8 (NM_013326.2,959-977).
gacatcggtaatattcgat

SEQ ID NO: 338744 - DNA, 19 bp, Homo sapiens
  siRNA target sequence for C18orf8 (NM_013326.2,961-979).
catcggtaatattcgatat

SEQ ID NO: 338745 - DNA, 19 bp, Homo sapiens
  siRNA target sequence for C18orf8 (NM_013326.2,964-982).
cggtaatattcgatatcaa

SEQ ID NO: 338746 - DNA, 19 bp, Homo sapiens
  siRNA target sequence for C18orf8 (NM_013326.2,966-984).
gtaatattcgatatcaagt

SEQ ID NO: 338747 - DNA, 19 bp, Homo sapiens
  siRNA target sequence for C18orf8 (NM_013326.2,980-998).
caagttacggggagagttt

SEQ ID NO: 338748 - DNA, 19 bp, Homo sapiens
  siRNA target sequence for C18orf8 (NM_013326.2,1094-1112).
gtctcctgttccatgtaaa

SEQ ID NO: 338749 - DNA, 19 bp, Homo sapiens
  siRNA target sequence for C18orf8 (NM_013326.2,1098-1116).
cctgttccatgtaaactct

SEQ ID NO: 338750 - DNA, 19 bp, Homo sapiens
  siRNA target sequence for C18orf8 (NM_013326.2,1099-1117).
ctgttccatgtaaactcta

SEQ ID NO: 338751 - DNA, 19 bp, Homo sapiens
  siRNA target sequence for C18orf8 (NM_013326.2,1101-1119).
gttccatgtaaactctatt

SEQ ID NO: 338752 - DNA, 19 bp, Homo sapiens
  siRNA target sequence for C18orf8 (NM_013326.2,1123-1141).
catcttggattgtctttca

SEQ ID NO: 338753 - DNA, 19 bp, Homo sapiens
  siRNA target sequence for C18orf8 (NM_013326.2,1136-1154).
ctttcaacctgacatcatt

SEQ ID NO: 338754 - DNA, 19 bp, Homo sapiens
  siRNA target sequence for C18orf8 (NM_013326.2,1200-1218).
gagcccatagtaaatctct

SEQ ID NO: 338755 - DNA, 19 bp, Homo sapiens
  siRNA target sequence for C18orf8 (NM_013326.2,1202-1220).
gcccatagtaaatctctta

SEQ ID NO: 338756 - DNA, 19 bp, Homo sapiens
  siRNA target sequence for C18orf8 (NM_013326.2,1287-1305).
gtctgttcacagatgttaa

SEQ ID NO: 338757 - DNA, 19 bp, Homo sapiens
  siRNA target sequence for C18orf8 (NM_013326.2,1329-1347).
cccgtgatagccactgttt

SEQ ID NO: 338758 - DNA, 19 bp, Homo sapiens
  siRNA target sequence for C18orf8 (NM_013326.2,1331-1349).
cgtgatagccactgttttt

SEQ ID NO: 338759 - DNA, 19 bp, Homo sapiens
  siRNA target sequence for C18orf8 (NM_013326.2,1382-1400).
ggatgccgagcagagttat

SEQ ID NO: 338760 - DNA, 19 bp, Homo sapiens
  siRNA target sequence for C18orf8 (NM_013326.2,1523-1541).
gaaggagatgcctcataaa

SEQ ID NO: 338761 - DNA, 19 bp, Homo sapiens
  siRNA target sequence for C18orf8 (NM_013326.2,1532-1550).
gcctcataaatttgtgata

SEQ ID NO: 338762 - DNA, 19 bp, Homo sapiens
  siRNA target sequence for C18orf8 (NM_013326.2,1552-1570).
ccgtgctgatggaatacat

SEQ ID NO: 338763 - DNA, 19 bp, Homo sapiens
  siRNA target sequence for C18orf8 (NM_013326.2,1553-1571).
cgtgctgatggaatacatt

SEQ ID NO: 338764 - DNA, 19 bp, Homo sapiens
  siRNA target sequence for C18orf8 (NM_013326.2,1557-1575).
ctgatggaatacattcgtt

SEQ ID NO: 338765 - DNA, 19 bp, Homo sapiens
  siRNA target sequence for C18orf8 (NM_013326.2,1604-1622).
gcattacctacatgaactt

SEQ ID NO: 338766 - DNA, 19 bp, Homo sapiens
  siRNA target sequence for C18orf8 (NM_013326.2,1689-1707).
ctcagcgactccaaacctt

SEQ ID NO: 338767 - DNA, 19 bp, Homo sapiens
  siRNA target sequence for C18orf8 (NM_013326.2,1747-1765).
ctgctcatcagctatctct

SEQ ID NO: 338768 - DNA, 19 bp, Homo sapiens
  siRNA target sequence for C18orf8 (NM_013326.2,1769-1787).
catgctgaagcgactttca

SEQ ID NO: 338769 - DNA, 19 bp, Homo sapiens
  siRNA target sequence for C18orf8 (NM_013326.2,1772-1790).
gctgaagcgactttcaaca

SEQ ID NO: 338770 - DNA, 19 bp, Homo sapiens
  siRNA target sequence for C18orf8 (NM_013326.2,1833-1851).
gtgttagctgccttaaggt

SEQ ID NO: 338771 - DNA, 19 bp, Homo sapiens
  siRNA target sequence for C18orf8 (NM_013326.2,1835-1853).
gttagctgccttaaggttt

SEQ ID NO: 338772 - DNA, 19 bp, Homo sapiens
  siRNA target sequence for C18orf8 (NM_013326.2,1861-1879).
gcattggtggccatgacaa

SEQ ID NO: 338773 - DNA, 19 bp, Homo sapiens
  siRNA target sequence for C18orf8 (NM_013326.2,1866-1884).
ggtggccatgacaacattt

SEQ ID NO: 338774 - DNA, 19 bp, Homo sapiens
  siRNA target sequence for C18orf8 (NM_013326.2,1928-1946).
catgcttttctatacaata

SEQ ID NO: 338775 - DNA, 19 bp, Homo sapiens
  siRNA target sequence for C18orf8 (NM_013326.2,2016-2034).
gaagaacatgttgcttttt

SEQ ID NO: 338776 - DNA, 19 bp, Homo sapiens
  siRNA target sequence for TFPT (NM_013342.1,360-378).
gttgcctcccctatttggt

SEQ ID NO: 338777 - DNA, 19 bp, Homo sapiens
  siRNA target sequence for TFPT (NM_013342.1,737-755).
caggcaatgcggagaatga

SEQ ID NO: 338778 - DNA, 19 bp, Homo sapiens
  siRNA target sequence for TFPT (NM_013342.1,983-1001).
ctcggggtccagacaaact

SEQ ID NO: 338779 - DNA, 19 bp, Homo sapiens
  siRNA target sequence for LOH3CR2A (NM_013343.1,603-621).
cacaataacgtgctacata

SEQ ID NO: 338780 - DNA, 19 bp, Homo sapiens
  siRNA target sequence for LOH3CR2A (NM_013343.1,614-632).
gctacatacccatcttgta

SEQ ID NO: 338781 - DNA, 19 bp, Homo sapiens
  siRNA target sequence for LOH3CR2A (NM_013343.1,667-685).
caaggggttccttcttaat

SEQ ID NO: 338782 - DNA, 19 bp, Homo sapiens
  siRNA target sequence for LOH3CR2A (NM_013343.1,713-731).
gtaccatcttagaacctta

SEQ ID NO: 338783 - DNA, 19 bp, Homo sapiens
  siRNA target sequence for LOH3CR2A (NM_013343.1,717-735).
catcttagaaccttaagga

SEQ ID NO: 338784 - DNA, 19 bp, Homo sapiens
  siRNA target sequence for LOH3CR2A (NM_013343.1,742-760).
cgaaccaagccaataagct

SEQ ID NO: 338785 - DNA, 19 bp, Homo sapiens
  siRNA target sequence for LOH3CR2A (NM_013343.1,763-781).
ccatgatgctgcttagagt

SEQ ID NO: 338786 - DNA, 19 bp, Homo sapiens
  siRNA target sequence for LOH3CR2A (NM_013343.1,764-782).
catgatgctgcttagagtt

SEQ ID NO: 338787 - DNA, 19 bp, Homo sapiens
  siRNA target sequence for HSU24186 (NM_013347.1,492-510).
gcaactcctgctattaaga

SEQ ID NO: 338788 - DNA, 19 bp, Homo sapiens
  siRNA target sequence for HSU24186 (NM_013347.1,517-535).
gacctaaggtccgaattca

SEQ ID NO: 338789 - DNA, 19 bp, Homo sapiens
  siRNA target sequence for HSU24186 (NM_013347.1,585-603).
gaccctgtgttcaaggtta

SEQ ID NO: 338790 - DNA, 19 bp, Homo sapiens
  siRNA target sequence for HSU24186 (NM_013347.1,599-617).
ggttaggggaattatagtt

SEQ ID NO: 338791 - DNA, 19 bp, Homo sapiens
  siRNA target sequence for HSU24186 (NM_013347.1,629-647).
catcgtgggggtaatcaga

SEQ ID NO: 338792 - DNA, 19 bp, Homo sapiens
  siRNA target sequence for HSU24186 (NM_013347.1,690-708).
gatatgaccgcgaaaccaa

SEQ ID NO: 338793 - DNA, 19 bp, Homo sapiens
  siRNA target sequence for HSU24186 (NM_013347.1,714-732).
gcccgacagtggtttggta

SEQ ID NO: 338794 - DNA, 19 bp, Homo sapiens
  siRNA target sequence for HSU24186 (NM_013347.1,757-775).
cattgtcagtcggagtata

SEQ ID NO: 338795 - DNA, 19 bp, Homo sapiens
  siRNA target sequence for HSU24186 (NM_013347.1,763-781).
cagtcggagtatatgtcaa

SEQ ID NO: 338796 - DNA, 19 bp, Homo sapiens
  siRNA target sequence for HSU24186 (NM_013347.1,768-786).
ggagtatatgtcaaagtgt

SEQ ID NO: 338797 - DNA, 19 bp, Homo sapiens
  siRNA target sequence for HSU24186 (NM_013347.1,785-803).
gtttggtatcctcaaatgt

SEQ ID NO: 338798 - DNA, 19 bp, Homo sapiens
  siRNA target sequence for HSU24186 (NM_013347.1,814-832).
caaagagccttgaggtatt

SEQ ID NO: 338799 - DNA, 19 bp, Homo sapiens
  siRNA target sequence for HSU24186 (NM_013347.1,818-836).
gagccttgaggtattgaaa

SEQ ID NO: 338800 - DNA, 19 bp, Homo sapiens
  siRNA target sequence for HSU24186 (NM_013347.1,921-939).
cgtgataccactgtagaaa

SEQ ID NO: 338801 - DNA, 19 bp, Homo sapiens
  siRNA target sequence for HSU24186 (NM_013347.1,950-968).
gtctccatcagaagtgaat

SEQ ID NO: 338802 - DNA, 19 bp, Homo sapiens
  siRNA target sequence for HSU24186 (NM_013347.1,952-970).
ctccatcagaagtgaatga

SEQ ID NO: 338803 - DNA, 19 bp, Homo sapiens
  siRNA target sequence for HSU24186 (NM_013347.1,987-1005).
gagagtcaccgcaatttca

SEQ ID NO: 338804 - DNA, 19 bp, Homo sapiens
  siRNA target sequence for HSU24186 (NM_013347.1,1132-1150).
ccgttgagggccacatcta

SEQ ID NO: 338805 - DNA, 19 bp, Homo sapiens
  siRNA target sequence for HSU24186 (NM_013347.1,1133-1151).
cgttgagggccacatctat

SEQ ID NO: 338806 - DNA, 19 bp, Homo sapiens
  siRNA target sequence for HSU24186 (NM_013347.1,1156-1174).
ctgtggatcgggagcattt

SEQ ID NO: 338807 - DNA, 19 bp, Homo sapiens
  siRNA target sequence for HSU24186 (NM_013347.1,1158-1176).
gtggatcgggagcatttta

SEQ ID NO: 338808 - DNA, 19 bp, Homo sapiens
  siRNA target sequence for HSU24186 (NM_013347.1,1161-1179).
gatcgggagcattttaagt

SEQ ID NO: 338809 - DNA, 19 bp, Homo sapiens
  siRNA target sequence for SPUF (NM_013349.3,184-202).
gaagatcagcccatctact

SEQ ID NO: 338810 - DNA, 19 bp, Homo sapiens
  siRNA target sequence for SPUF (NM_013349.3,237-255).
cggaaaggagttttatgga

SEQ ID NO: 338811 - DNA, 19 bp, Homo sapiens
  siRNA target sequence for SPUF (NM_013349.3,434-452).
ctgcccggagaattctcaa

SEQ ID NO: 338812 - DNA, 19 bp, Homo sapiens
  siRNA target sequence for SPUF (NM_013349.3,437-455).
cccggagaattctcaatga

SEQ ID NO: 338813 - DNA, 19 bp, Homo sapiens
  siRNA target sequence for pknbeta (NM_013355.2,487-505).
ctgctgcggatgaagatca

SEQ ID NO: 338814 - DNA, 19 bp, Homo sapiens
  siRNA target sequence for pknbeta (NM_013355.2,1300-1318).
caggaacgcatcttctcta

SEQ ID NO: 338815 - DNA, 19 bp, Homo sapiens
  siRNA target sequence for pknbeta (NM_013355.2,1302-1320).
ggaacgcatcttctctaaa

SEQ ID NO: 338816 - DNA, 19 bp, Homo sapiens
  siRNA target sequence for pknbeta (NM_013355.2,1484-1502).
ctgccactcccagtaattt

SEQ ID NO: 338817 - DNA, 19 bp, Homo sapiens
  siRNA target sequence for pknbeta (NM_013355.2,1604-1622).
ccaaacgtccccatatgga

SEQ ID NO: 338818 - DNA, 19 bp, Homo sapiens
  siRNA target sequence for pknbeta (NM_013355.2,2067-2085).
cctgaagttggataacctt

SEQ ID NO: 338819 - DNA, 19 bp, Homo sapiens
  siRNA target sequence for pknbeta (NM_013355.2,2363-2381).
cggtgcaagggcttgagtt

SEQ ID NO: 338820 - DNA, 19 bp, Homo sapiens
  siRNA target sequence for pknbeta (NM_013355.2,2644-2662).
cgggacttcgactttgtgt

SEQ ID NO: 338821 - DNA, 19 bp, Homo sapiens
  siRNA target sequence for PURG (NM_013357.2,223-241).
gaaaaagaggttttaccta

SEQ ID NO: 338822 - DNA, 19 bp, Homo sapiens
  siRNA target sequence for PURG (NM_013357.2,305-323).
cggcaggacaacatcagaa

SEQ ID NO: 338823 - DNA, 19 bp, Homo sapiens
  siRNA target sequence for PURG (NM_013357.2,527-545).
gtcctgaaaacagactata

SEQ ID NO: 338824 - DNA, 19 bp, Homo sapiens
  siRNA target sequence for PURG (NM_013357.2,552-570).
gggacaataggaaatatta

SEQ ID NO: 338825 - DNA, 19 bp, Homo sapiens
  siRNA target sequence for PURG (NM_013357.2,600-618).
gcttcctacggattagaca

SEQ ID NO: 338826 - DNA, 19 bp, Homo sapiens
  siRNA target sequence for PURG (NM_013357.2,601-619).
cttcctacggattagacaa

SEQ ID NO: 338827 - DNA, 19 bp, Homo sapiens
  siRNA target sequence for PURG (NM_013357.2,633-651).
ggactggcatgataggtta

SEQ ID NO: 338828 - DNA, 19 bp, Homo sapiens
  siRNA target sequence for PURG (NM_013357.2,634-652).
gactggcatgataggttat

SEQ ID NO: 338829 - DNA, 19 bp, Homo sapiens
  siRNA target sequence for PURG (NM_013357.2,667-685).
gggccaagaacagactatt

SEQ ID NO: 338830 - DNA, 19 bp, Homo sapiens
  siRNA target sequence for PURG (NM_013357.2,669-687).
gccaagaacagactattgt

SEQ ID NO: 338831 - DNA, 19 bp, Homo sapiens
  siRNA target sequence for PURG (NM_013357.2,693-711).
cagcacaaggaatgattga

SEQ ID NO: 338832 - DNA, 19 bp, Homo sapiens
  siRNA target sequence for PURG (NM_013357.2,745-763).
ctatggcgaaggagacata

SEQ ID NO: 338833 - DNA, 19 bp, Homo sapiens
  siRNA target sequence for PURG (NM_013357.2,822-840).
gagtggacaataaaaggtt

SEQ ID NO: 338834 - DNA, 19 bp, Homo sapiens
  siRNA target sequence for PURG (NM_013357.2,844-862).
ctttgatgtgggctctaat

SEQ ID NO: 338835 - DNA, 19 bp, Homo sapiens
  siRNA target sequence for PURG (NM_013357.2,853-871).
gggctctaataaatatgga

SEQ ID NO: 338836 - DNA, 19 bp, Homo sapiens
  siRNA target sequence for PURG (NM_013357.2,854-872).
ggctctaataaatatggaa

SEQ ID NO: 338837 - DNA, 19 bp, Homo sapiens
  siRNA target sequence for PURG (NM_013357.2,855-873).
gctctaataaatatggaat

SEQ ID NO: 338838 - DNA, 19 bp, Homo sapiens
  siRNA target sequence for PURG (NM_013357.2,856-874).
ctctaataaatatggaatt

SEQ ID NO: 338839 - DNA, 19 bp, Homo sapiens
  siRNA target sequence for PURG (NM_013357.2,899-917).
ccaccttaccgtaatacta

SEQ ID NO: 338840 - DNA, 19 bp, Homo sapiens
  siRNA target sequence for PURG (NM_013357.2,900-918).
caccttaccgtaatactat

SEQ ID NO: 338841 - DNA, 19 bp, Homo sapiens
  siRNA target sequence for PURG (NM_013357.2,902-920).
ccttaccgtaatactatta

SEQ ID NO: 338842 - DNA, 19 bp, Homo sapiens
  siRNA target sequence for PURG (NM_013357.2,907-925).
ccgtaatactattactgtt

SEQ ID NO: 338843 - DNA, 19 bp, Homo sapiens
  siRNA target sequence for PURG (NM_013357.2,915-933).
ctattactgttccattcaa

SEQ ID NO: 338844 - DNA, 19 bp, Homo sapiens
  siRNA target sequence for PURG (NM_013357.2,1030-1048).
ggccagtggtgaagaacaa

SEQ ID NO: 338845 - DNA, 19 bp, Homo sapiens
  siRNA target sequence for RBT1 (NM_013368.2,393-411).
ccgcatctccctagacaaa

SEQ ID NO: 338846 - DNA, 19 bp, Homo sapiens
  siRNA target sequence for RBT1 (NM_013368.2,452-470).
ggcatgtcctcatccataa

SEQ ID NO: 338847 - DNA, 19 bp, Homo sapiens
  siRNA target sequence for RBT1 (NM_013368.2,677-695).
ctgatccagtcttcttaga

SEQ ID NO: 338848 - DNA, 19 bp, Homo sapiens
  siRNA target sequence for RBT1 (NM_013368.2,754-772).
gacacatctgcggtagaaa

SEQ ID NO: 338849 - DNA, 19 bp, Homo sapiens
  siRNA target sequence for OKL38 (NM_013370.2,1150-1168).
gggacatcgcccactacta

SEQ ID NO: 338850 - DNA, 19 bp, Homo sapiens
  siRNA target sequence for OKL38 (NM_013370.2,1171-1189).
gggactacgtggtcaagaa

SEQ ID NO: 338851 - DNA, 19 bp, Homo sapiens
  siRNA target sequence for OKL38 (NM_013370.2,1190-1208).
gggtctggggcataacttt

SEQ ID NO: 338852 - DNA, 19 bp, Homo sapiens
  siRNA target sequence for OKL38 (NM_013370.2,1194-1212).
ctggggcataactttgtgt

SEQ ID NO: 338853 - DNA, 19 bp, Homo sapiens
  siRNA target sequence for DKFZp434B0417 (NM_013377.2,181-199).
gcaatttgtgcacttttca

SEQ ID NO: 338854 - DNA, 19 bp, Homo sapiens
  siRNA target sequence for DKFZp434B0417 (NM_013377.2,188-206).
gtgcacttttcagaaaaga

SEQ ID NO: 338855 - DNA, 19 bp, Homo sapiens
  siRNA target sequence for DKFZp434B0417 (NM_013377.2,218-236).
caaactgctgtatgaagtt

SEQ ID NO: 338856 - DNA, 19 bp, Homo sapiens
  siRNA target sequence for DKFZp434B0417 (NM_013377.2,335-353).
gcgaacacctcttagtaga

SEQ ID NO: 338857 - DNA, 19 bp, Homo sapiens
  siRNA target sequence for DKFZp434B0417 (NM_013377.2,359-377).
ctatgggatggcttcagaa

SEQ ID NO: 338858 - DNA, 19 bp, Homo sapiens
  siRNA target sequence for DKFZp434B0417 (NM_013377.2,370-388).
cttcagaagtgcagcttat

SEQ ID NO: 338859 - DNA, 19 bp, Homo sapiens
  siRNA target sequence for DKFZp434B0417 (NM_013377.2,540-558).
gacaatgagtatatttcca

SEQ ID NO: 338860 - DNA, 19 bp, Homo sapiens
  siRNA target sequence for DKFZp434B0417 (NM_013377.2,619-637).
gtgttagcagtcaagagaa

SEQ ID NO: 338861 - DNA, 19 bp, Homo sapiens
  siRNA target sequence for DKFZp434B0417 (NM_013377.2,653-671).
ctgttaccgaacagatgat

SEQ ID NO: 338862 - DNA, 19 bp, Homo sapiens
  siRNA target sequence for DKFZp434B0417 (NM_013377.2,655-673).
gttaccgaacagatgatga

SEQ ID NO: 338863 - DNA, 19 bp, Homo sapiens
  siRNA target sequence for DKFZp434B0417 (NM_013377.2,659-677).
ccgaacagatgatgaagaa

SEQ ID NO: 338864 - DNA, 19 bp, Homo sapiens
  siRNA target sequence for DKFZp434B0417 (NM_013377.2,678-696).
gacaccggcatttatgtca

SEQ ID NO: 338865 - DNA, 19 bp, Homo sapiens
  siRNA target sequence for DKFZp434B0417 (NM_013377.2,699-717).
gaggttgacccaaatagca

SEQ ID NO: 338866 - DNA, 19 bp, Homo sapiens
  siRNA target sequence for DKFZp434B0417 (NM_013377.2,701-719).
ggttgacccaaatagcatt

SEQ ID NO: 338867 - DNA, 19 bp, Homo sapiens
  siRNA target sequence for DKFZp434B0417 (NM_013377.2,742-760).
gagaaggggatcggatttt

SEQ ID NO: 338868 - DNA, 19 bp, Homo sapiens
  siRNA target sequence for DKFZp434B0417 (NM_013377.2,750-768).
gatcggattttgcaaataa

SEQ ID NO: 338869 - DNA, 19 bp, Homo sapiens
  siRNA target sequence for DKFZp434B0417 (NM_013377.2,803-821).
ggccttgctgtctaacgat

SEQ ID NO: 338870 - DNA, 19 bp, Homo sapiens
  siRNA target sequence for DKFZp434B0417 (NM_013377.2,1062-1080).
gtaggacgtacagatgaaa

SEQ ID NO: 338871 - DNA, 19 bp, Homo sapiens
  siRNA target sequence for DKFZp434B0417 (NM_013377.2,1066-1084).
gacgtacagatgaaagctt

SEQ ID NO: 338872 - DNA, 19 bp, Homo sapiens
  siRNA target sequence for DKFZp434B0417 (NM_013377.2,1119-1137).
gccgaggaccccaatagca

SEQ ID NO: 338873 - DNA, 19 bp, Homo sapiens
  siRNA target sequence for DKFZp434B0417 (NM_013377.2,1125-1143).
gaccccaatagcacatctt

SEQ ID NO: 338874 - DNA, 19 bp, Homo sapiens
  siRNA target sequence for DKFZp434B0417 (NM_013377.2,1128-1146).
cccaatagcacatctttga

SEQ ID NO: 338875 - DNA, 19 bp, Homo sapiens
  siRNA target sequence for DKFZp434B0417 (NM_013377.2,1180-1198).
ctctgggaagtgttgaact

SEQ ID NO: 338876 - DNA, 19 bp, Homo sapiens
  siRNA target sequence for DKFZp434B0417 (NM_013377.2,1189-1207).
gtgttgaacttcagtacaa

SEQ ID NO: 338877 - DNA, 19 bp, Homo sapiens
  siRNA target sequence for DKFZp434B0417 (NM_013377.2,1194-1212).
gaacttcagtacaatgaga

SEQ ID NO: 338878 - DNA, 19 bp, Homo sapiens
  siRNA target sequence for DKFZp434B0417 (NM_013377.2,1213-1231).
gcctcgtatctggtgaata

SEQ ID NO: 338879 - DNA, 19 bp, Homo sapiens
  siRNA target sequence for DKFZp434B0417 (NM_013377.2,1215-1233).
ctcgtatctggtgaataca

SEQ ID NO: 338880 - DNA, 19 bp, Homo sapiens
  siRNA target sequence for DKFZp434B0417 (NM_013377.2,1217-1235).
cgtatctggtgaatacatt

SEQ ID NO: 338881 - DNA, 19 bp, Homo sapiens
  siRNA target sequence for DKFZp434B0417 (NM_013377.2,1257-1275).
ccagatgaggactgtgaaa

SEQ ID NO: 338882 - DNA, 19 bp, Homo sapiens
  siRNA target sequence for DKFZp434B0417 (NM_013377.2,1320-1338).
ggagagtatgacctgtatt

SEQ ID NO: 338883 - DNA, 19 bp, Homo sapiens
  siRNA target sequence for DKFZp434B0417 (NM_013377.2,1321-1339).
gagagtatgacctgtatta

SEQ ID NO: 338884 - DNA, 19 bp, Homo sapiens
  siRNA target sequence for DKFZp434B0417 (NM_013377.2,1394-1412).
gctacagttgcttaatgaa

SEQ ID NO: 338885 - DNA, 19 bp, Homo sapiens
  siRNA target sequence for DKFZp434B0417 (NM_013377.2,1512-1530).
ggaggattccggaattata

SEQ ID NO: 338886 - DNA, 19 bp, Homo sapiens
  siRNA target sequence for DKFZp434B0417 (NM_013377.2,1515-1533).
ggattccggaattataaca

SEQ ID NO: 338887 - DNA, 19 bp, Homo sapiens
  siRNA target sequence for DKFZp434B0417 (NM_013377.2,1675-1693).
cccttccaagggtgatcaa

SEQ ID NO: 338888 - DNA, 19 bp, Homo sapiens
  siRNA target sequence for DKFZp434B0417 (NM_013377.2,1686-1704).
gtgatcaacctcaccaata

SEQ ID NO: 338889 - DNA, 19 bp, Homo sapiens
  siRNA target sequence for DKFZp434B0417 (NM_013377.2,1801-1819).
gttgtagcgctgaaagcaa

SEQ ID NO: 338890 - DNA, 19 bp, Homo sapiens
  siRNA target sequence for DKFZp434B0417 (NM_013377.2,1898-1916).
ccacagctcctcatataga

SEQ ID NO: 338891 - DNA, 19 bp, Homo sapiens
  siRNA target sequence for DKFZp434B0417 (NM_013377.2,1899-1917).
cacagctcctcatatagat

SEQ ID NO: 338892 - DNA, 19 bp, Homo sapiens
  siRNA target sequence for DKFZp434B0417 (NM_013377.2,1901-1919).
cagctcctcatatagatat

SEQ ID NO: 338893 - DNA, 19 bp, Homo sapiens
  siRNA target sequence for DKFZp434B0417 (NM_013377.2,1904-1922).
ctcctcatatagatatgca

SEQ ID NO: 338894 - DNA, 19 bp, Homo sapiens
  siRNA target sequence for DKFZp434B0417 (NM_013377.2,1954-1972).
gctacatgcagttaattca

SEQ ID NO: 338895 - DNA, 19 bp, Homo sapiens
  siRNA target sequence for DKFZp434B0417 (NM_013377.2,2088-2106).
gggacacggtacatcacaa

SEQ ID NO: 338896 - DNA, 19 bp, Homo sapiens
  siRNA target sequence for DKFZp434B0417 (NM_013377.2,2089-2107).
ggacacggtacatcacaaa

SEQ ID NO: 338897 - DNA, 19 bp, Homo sapiens
  siRNA target sequence for DKFZp434B0417 (NM_013377.2,2269-2287).
gccgtcgccgtgagttcat

SEQ ID NO: 338898 - DNA, 19 bp, Homo sapiens
  siRNA target sequence for DKFZp434B0417 (NM_013377.2,2271-2289).
cgtcgccgtgagttcatga

SEQ ID NO: 338899 - DNA, 19 bp, Homo sapiens
  siRNA target sequence for DKFZp434B0417 (NM_013377.2,2272-2290).
gtcgccgtgagttcatgat

SEQ ID NO: 338900 - DNA, 19 bp, Homo sapiens
  siRNA target sequence for C6orf49 (NM_013397.3,446-464).
ccctccgcaggacattgat

SEQ ID NO: 338901 - DNA, 19 bp, Homo sapiens
  siRNA target sequence for C6orf49 (NM_013397.3,709-727).
ccctgataaacctcatcta

SEQ ID NO: 338902 - DNA, 19 bp, Homo sapiens
  siRNA target sequence for C6orf49 (NM_013397.3,796-814).
cttgtgaccagctgatctt

SEQ ID NO: 338903 - DNA, 19 bp, Homo sapiens
  siRNA target sequence for C6orf49 (NM_013397.3,1268-1286).
ctcggaacctgaaggattt

SEQ ID NO: 338904 - DNA, 19 bp, Homo sapiens
  siRNA target sequence for C6orf49 (NM_013397.3,1272-1290).
gaacctgaaggatttttct

SEQ ID NO: 338905 - DNA, 19 bp, Homo sapiens
  siRNA target sequence for RAB3IL1 (NM_013401.2,1221-1239).
gacgcagagcccatgttct

SEQ ID NO: 338906 - DNA, 19 bp, Homo sapiens
  siRNA target sequence for NFKBIL2 (NM_013432.3,466-484).
ggacccgcctctatctcaa

SEQ ID NO: 338907 - DNA, 19 bp, Homo sapiens
  siRNA target sequence for NFKBIL2 (NM_013432.3,519-537).
gccctgtgcaacgattact

SEQ ID NO: 338908 - DNA, 19 bp, Homo sapiens
  siRNA target sequence for NFKBIL2 (NM_013432.3,520-538).
ccctgtgcaacgattactt

SEQ ID NO: 338909 - DNA, 19 bp, Homo sapiens
  siRNA target sequence for NFKBIL2 (NM_013432.3,522-540).
ctgtgcaacgattacttca

SEQ ID NO: 338910 - DNA, 19 bp, Homo sapiens
  siRNA target sequence for NFKBIL2 (NM_013432.3,709-727).
gcgagtgctgcgtggttat

SEQ ID NO: 338911 - DNA, 19 bp, Homo sapiens
  siRNA target sequence for NFKBIL2 (NM_013432.3,710-728).
cgagtgctgcgtggttatt

SEQ ID NO: 338912 - DNA, 19 bp, Homo sapiens
  siRNA target sequence for NFKBIL2 (NM_013432.3,713-731).
gtgctgcgtggttattgca

SEQ ID NO: 338913 - DNA, 19 bp, Homo sapiens
  siRNA target sequence for NFKBIL2 (NM_013432.3,740-758).
ccaagacctgggagacttt

SEQ ID NO: 338914 - DNA, 19 bp, Homo sapiens
  siRNA target sequence for NFKBIL2 (NM_013432.3,1154-1172).
caagacctggctgaacatt

SEQ ID NO: 338915 - DNA, 19 bp, Homo sapiens
  siRNA target sequence for NFKBIL2 (NM_013432.3,2029-2047).
caagcagccttctgtttga

SEQ ID NO: 338916 - DNA, 19 bp, Homo sapiens
  siRNA target sequence for NFKBIL2 (NM_013432.3,2082-2100).
gaacccccctctaatagca

SEQ ID NO: 338917 - DNA, 19 bp, Homo sapiens
  siRNA target sequence for NFKBIL2 (NM_013432.3,2641-2659).
gttgcagtgcgccagttaa

SEQ ID NO: 338918 - DNA, 19 bp, Homo sapiens
  siRNA target sequence for NFKBIL2 (NM_013432.3,2780-2798).
catccgggttcgagttcaa

SEQ ID NO: 338919 - DNA, 19 bp, Homo sapiens
  siRNA target sequence for NFKBIL2 (NM_013432.3,2783-2801).
ccgggttcgagttcaagtt

SEQ ID NO: 338920 - DNA, 19 bp, Homo sapiens
  siRNA target sequence for NFKBIL2 (NM_013432.3,3766-3784).
gggacaaggctgttagaga

SEQ ID NO: 338921 - DNA, 19 bp, Homo sapiens
  siRNA target sequence for NFKBIL2 (NM_013432.3,3956-3974).
gggcctgtgggacaagata

SEQ ID NO: 338922 - DNA, 19 bp, Homo sapiens
  siRNA target sequence for UBQLN1 (NM_013438.2,363-381).
cctccgcggagcccaaaat

SEQ ID NO: 338923 - DNA, 19 bp, Homo sapiens
  siRNA target sequence for UBQLN1 (NM_013438.2,366-384).
ccgcggagcccaaaatcat

SEQ ID NO: 338924 - DNA, 19 bp, Homo sapiens
  siRNA target sequence for UBQLN1 (NM_013438.2,368-386).
gcggagcccaaaatcatga

SEQ ID NO: 338925 - DNA, 19 bp, Homo sapiens
  siRNA target sequence for UBQLN1 (NM_013438.2,370-388).
ggagcccaaaatcatgaaa

SEQ ID NO: 338926 - DNA, 19 bp, Homo sapiens
  siRNA target sequence for UBQLN1 (NM_013438.2,486-504).
cacatactgaccaacttgt

SEQ ID NO: 338927 - DNA, 19 bp, Homo sapiens
  siRNA target sequence for UBQLN1 (NM_013438.2,494-512).
gaccaacttgtgttgatat

SEQ ID NO: 338928 - DNA, 19 bp, Homo sapiens
  siRNA target sequence for UBQLN1 (NM_013438.2,547-565).
gagtcagcatggaattcat

SEQ ID NO: 338929 - DNA, 19 bp, Homo sapiens
  siRNA target sequence for UBQLN1 (NM_013438.2,604-622).
caggcctcaggatcattca

SEQ ID NO: 338930 - DNA, 19 bp, Homo sapiens
  siRNA target sequence for UBQLN1 (NM_013438.2,702-720).
ctagcaacccttttggttt

SEQ ID NO: 338931 - DNA, 19 bp, Homo sapiens
  siRNA target sequence for UBQLN1 (NM_013438.2,799-817).
gcagcgacaacttttgtct

SEQ ID NO: 338932 - DNA, 19 bp, Homo sapiens
  siRNA target sequence for UBQLN1 (NM_013438.2,881-899).
gacctgatgagacagttaa

SEQ ID NO: 338933 - DNA, 19 bp, Homo sapiens
  siRNA target sequence for UBQLN1 (NM_013438.2,883-901).
cctgatgagacagttaatt

SEQ ID NO: 338934 - DNA, 19 bp, Homo sapiens
  siRNA target sequence for UBQLN1 (NM_013438.2,1046-1064).
gctttgagcaacctagaaa

SEQ ID NO: 338935 - DNA, 19 bp, Homo sapiens
  siRNA target sequence for UBQLN1 (NM_013438.2,1163-1181).
gcttccttggtgagcaata

SEQ ID NO: 338936 - DNA, 19 bp, Homo sapiens
  siRNA target sequence for UBQLN1 (NM_013438.2,1347-1365).
ctactgcgccaaatttggt

SEQ ID NO: 338937 - DNA, 19 bp, Homo sapiens
  siRNA target sequence for UBQLN1 (NM_013438.2,1411-1429).
cttgttgcaacaaataact

SEQ ID NO: 338938 - DNA, 19 bp, Homo sapiens
  siRNA target sequence for UBQLN1 (NM_013438.2,1436-1454).
ccacaactgatgcaaaaca

SEQ ID NO: 338939 - DNA, 19 bp, Homo sapiens
  siRNA target sequence for UBQLN1 (NM_013438.2,1528-1546).
gctgaataatcccctattt

SEQ ID NO: 338940 - DNA, 19 bp, Homo sapiens
  siRNA target sequence for UBQLN1 (NM_013438.2,1531-1549).
gaataatcccctatttgct

SEQ ID NO: 338941 - DNA, 19 bp, Homo sapiens
  siRNA target sequence for UBQLN1 (NM_013438.2,1578-1596).
gacaacagctcccaacttt

SEQ ID NO: 338942 - DNA, 19 bp, Homo sapiens
  siRNA target sequence for UBQLN1 (NM_013438.2,1654-1672).
gcaggccttgttacagatt

SEQ ID NO: 338943 - DNA, 19 bp, Homo sapiens
  siRNA target sequence for UBQLN1 (NM_013438.2,1733-1751).
ggcttgggggcattaggaa

SEQ ID NO: 338944 - DNA, 19 bp, Homo sapiens
  siRNA target sequence for UBQLN1 (NM_013438.2,1758-1776).
gaggctcttcgggaactaa

SEQ ID NO: 338945 - DNA, 19 bp, Homo sapiens
  siRNA target sequence for UBQLN1 (NM_013438.2,1787-1805).
gccacacctagtgaaaaca

SEQ ID NO: 338946 - DNA, 19 bp, Homo sapiens
  siRNA target sequence for UBQLN1 (NM_013438.2,1789-1807).
cacacctagtgaaaacaca

SEQ ID NO: 338947 - DNA, 19 bp, Homo sapiens
  siRNA target sequence for UBQLN2 (NM_013444.2,315-333).
cggctgagcctaaaatcat

SEQ ID NO: 338948 - DNA, 19 bp, Homo sapiens
  siRNA target sequence for UBQLN2 (NM_013444.2,415-433).
gatttcgaaacgcttcaaa

SEQ ID NO: 338949 - DNA, 19 bp, Homo sapiens
  siRNA target sequence for UBQLN2 (NM_013444.2,443-461).
gatcagctagtgctgattt

SEQ ID NO: 338950 - DNA, 19 bp, Homo sapiens
  siRNA target sequence for UBQLN2 (NM_013444.2,455-473).
ctgatttttgccggaaaaa

SEQ ID NO: 338951 - DNA, 19 bp, Homo sapiens
  siRNA target sequence for UBQLN2 (NM_013444.2,568-586).
gtccacgcagcctagcaat

SEQ ID NO: 338952 - DNA, 19 bp, Homo sapiens
  siRNA target sequence for UBQLN2 (NM_013444.2,625-643).
gagtaactccacacctatt

SEQ ID NO: 338953 - DNA, 19 bp, Homo sapiens
  siRNA target sequence for UBQLN2 (NM_013444.2,928-946).
gaggcagacactcgaaatt

SEQ ID NO: 338954 - DNA, 19 bp, Homo sapiens
  siRNA target sequence for UBQLN2 (NM_013444.2,967-985).
gcaagagatgatgagaaat

SEQ ID NO: 338955 - DNA, 19 bp, Homo sapiens
  siRNA target sequence for UBQLN2 (NM_013444.2,994-1012).
ggctcttagcaatctagaa

SEQ ID NO: 338956 - DNA, 19 bp, Homo sapiens
  siRNA target sequence for UBQLN2 (NM_013444.2,995-1013).
gctcttagcaatctagaaa

SEQ ID NO: 338957 - DNA, 19 bp, Homo sapiens
  siRNA target sequence for UBQLN2 (NM_013444.2,1045-1063).
catgtacactgacattcaa

SEQ ID NO: 338958 - DNA, 19 bp, Homo sapiens
  siRNA target sequence for UBQLN2 (NM_013444.2,1112-1130).
gcctccgtggggagtagtt

SEQ ID NO: 338959 - DNA, 19 bp, Homo sapiens
  siRNA target sequence for UBQLN2 (NM_013444.2,1293-1311).
ccgttgctgccgctaatta

SEQ ID NO: 338960 - DNA, 19 bp, Homo sapiens
  siRNA target sequence for UBQLN2 (NM_013444.2,1313-1331).
gtcgccagcatctttagta

SEQ ID NO: 338961 - DNA, 19 bp, Homo sapiens
  siRNA target sequence for UBQLN2 (NM_013444.2,1348-1366).
cctgctgcaacagataact

SEQ ID NO: 338962 - DNA, 19 bp, Homo sapiens
  siRNA target sequence for UBQLN2 (NM_013444.2,1468-1486).
gaatagcccgctgtttact

SEQ ID NO: 338963 - DNA, 19 bp, Homo sapiens
  siRNA target sequence for UBQLN2 (NM_013444.2,1584-1602).
gagcaatgcaggctttaat

SEQ ID NO: 338964 - DNA, 19 bp, Homo sapiens
  siRNA target sequence for UBQLN2 (NM_013444.2,1587-1605).
caatgcaggctttaatgca

SEQ ID NO: 338965 - DNA, 19 bp, Homo sapiens
  siRNA target sequence for UBQLN2 (NM_013444.2,1873-1891).
cacgagtcctacatcagaa

SEQ ID NO: 338966 - DNA, 19 bp, Homo sapiens
  siRNA target sequence for UBQLN2 (NM_013444.2,1876-1894).
gagtcctacatcagaatct

SEQ ID NO: 338967 - DNA, 19 bp, Homo sapiens
  siRNA target sequence for UBQLN2 (NM_013444.2,1896-1914).
gacccaaccagcagttcat

SEQ ID NO: 338968 - DNA, 19 bp, Homo sapiens
  siRNA target sequence for UBQLN2 (NM_013444.2,2002-2020).
caacgcaatggggttctta

SEQ ID NO: 338969 - DNA, 19 bp, Homo sapiens
  siRNA target sequence for OR12D2 (NM_013936.2,116-134).
ggaatggagccgttctgat

SEQ ID NO: 338970 - DNA, 19 bp, Homo sapiens
  siRNA target sequence for OR12D2 (NM_013936.2,122-140).
gagccgttctgatgattgt

SEQ ID NO: 338971 - DNA, 19 bp, Homo sapiens
  siRNA target sequence for OR12D2 (NM_013936.2,125-143).
ccgttctgatgattgtcat

SEQ ID NO: 338972 - DNA, 19 bp, Homo sapiens
  siRNA target sequence for OR12D2 (NM_013936.2,155-173).
gactccattcccttatgta

SEQ ID NO: 338973 - DNA, 19 bp, Homo sapiens
  siRNA target sequence for OR12D2 (NM_013936.2,192-210).
gtcctacctggatatctgt

SEQ ID NO: 338974 - DNA, 19 bp, Homo sapiens
  siRNA target sequence for OR12D2 (NM_013936.2,194-212).
cctacctggatatctgtta

SEQ ID NO: 338975 - DNA, 19 bp, Homo sapiens
  siRNA target sequence for OR12D2 (NM_013936.2,198-216).
cctggatatctgttactct

SEQ ID NO: 338976 - DNA, 19 bp, Homo sapiens
  siRNA target sequence for OR12D2 (NM_013936.2,199-217).
ctggatatctgttactcta

SEQ ID NO: 338977 - DNA, 19 bp, Homo sapiens
  siRNA target sequence for OR12D2 (NM_013936.2,250-268).
ctctctacacacaaagcaa

SEQ ID NO: 338978 - DNA, 19 bp, Homo sapiens
  siRNA target sequence for OR12D2 (NM_013936.2,463-481).
ctgctgcactccgtaatga

SEQ ID NO: 338979 - DNA, 19 bp, Homo sapiens
  siRNA target sequence for OR12D2 (NM_013936.2,511-529).
cgtatccatcattttctct

SEQ ID NO: 338980 - DNA, 19 bp, Homo sapiens
  siRNA target sequence for OR12D2 (NM_013936.2,563-581).
ggaacactgagcttaatca

SEQ ID NO: 338981 - DNA, 19 bp, Homo sapiens
  siRNA target sequence for OR12D2 (NM_013936.2,672-690).
cttcaagacccgttcttgt

SEQ ID NO: 338982 - DNA, 19 bp, Homo sapiens
  siRNA target sequence for OR12D2 (NM_013936.2,725-743).
cccacttcatggtagttat

SEQ ID NO: 338983 - DNA, 19 bp, Homo sapiens
  siRNA target sequence for OR12D2 (NM_013936.2,801-819).
ggaccaggaccggattgtt

SEQ ID NO: 338984 - DNA, 19 bp, Homo sapiens
  siRNA target sequence for OR12D2 (NM_013936.2,835-853).
gtggtcactcctgtactaa

SEQ ID NO: 338985 - DNA, 19 bp, Homo sapiens
  siRNA target sequence for PCDHGA8 (NM_014004.2,1229-1247).
gaggataaaggaaaactct

SEQ ID NO: 338986 - DNA, 19 bp, Homo sapiens
  siRNA target sequence for PCDHGA8 (NM_014004.2,1300-1318).
ggtcgaagatctagaagta

SEQ ID NO: 338987 - DNA, 19 bp, Homo sapiens
  siRNA target sequence for PCDHGA8 (NM_014004.2,1630-1648).
cccgatttaccgagtgaaa

SEQ ID NO: 338988 - DNA, 19 bp, Homo sapiens
  siRNA target sequence for PCDHGA8 (NM_014004.2,1675-1693).
gcggctgcttactgtaaca

SEQ ID NO: 338989 - DNA, 19 bp, Homo sapiens
  siRNA target sequence for PCDHGA8 (NM_014004.2,1877-1895).
cttctggggaggaccaaat

SEQ ID NO: 338990 - DNA, 19 bp, Homo sapiens
  siRNA target sequence for PCDHGA8 (NM_014004.2,1931-1949).
ccagaagtgatcattacgt

SEQ ID NO: 338991 - DNA, 19 bp, Homo sapiens
  siRNA target sequence for PCDHGA8 (NM_014004.2,2047-2065).
ctgttacacacgtgataat

SEQ ID NO: 338992 - DNA, 19 bp, Homo sapiens
  siRNA target sequence for PCDHGA8 (NM_014004.2,2049-2067).
gttacacacgtgataattt

SEQ ID NO: 338993 - DNA, 19 bp, Homo sapiens
  siRNA target sequence for PCDHGA8 (NM_014004.2,2141-2159).
gtctctatctacaatatca

SEQ ID NO: 338994 - DNA, 19 bp, Homo sapiens
  siRNA target sequence for PCDHGA8 (NM_014004.2,2262-2280).
cctcctactcagcgtatat

SEQ ID NO: 338995 - DNA, 19 bp, Homo sapiens
  siRNA target sequence for PCDHGA8 (NM_014004.2,2265-2283).
cctactcagcgtatatcct

SEQ ID NO: 338996 - DNA, 19 bp, Homo sapiens
  siRNA target sequence for PCDHGA8 (NM_014004.2,2266-2284).
ctactcagcgtatatccta

SEQ ID NO: 338997 - DNA, 19 bp, Homo sapiens
  siRNA target sequence for PCDHGA8 (NM_014004.2,2271-2289).
cagcgtatatcctagagaa

SEQ ID NO: 338998 - DNA, 19 bp, Homo sapiens
  siRNA target sequence for PCDHGA8 (NM_014004.2,3099-3117).
gcgtgcctgcctcacattt

SEQ ID NO: 338999 - DNA, 19 bp, Homo sapiens
  siRNA target sequence for PCDHGA8 (NM_014004.2,3318-3336).
gtcaggtgagtttagttct

SEQ ID NO: 339000 - DNA, 19 bp, Homo sapiens
  siRNA target sequence for PCDHA9 (NM_014005.3,1766-1784).
ccacagttgactatcaaaa

SEQ ID NO: 339001 - DNA, 19 bp, Homo sapiens
  siRNA target sequence for PCDHA9 (NM_014005.3,1785-1803).
cgctctcggttcctgtaaa

SEQ ID NO: 339002 - DNA, 19 bp, Homo sapiens
  siRNA target sequence for PCDHA9 (NM_014005.3,1811-1829).
gcacaactggggacagtta

SEQ ID NO: 339003 - DNA, 19 bp, Homo sapiens
  siRNA target sequence for PCDHA9 (NM_014005.3,1812-1830).
cacaactggggacagttat

SEQ ID NO: 339004 - DNA, 19 bp, Homo sapiens
  siRNA target sequence for PCDHA9 (NM_014005.3,3119-3137).
gtgggtttttctagcattt

SEQ ID NO: 339005 - DNA, 19 bp, Homo sapiens
  siRNA target sequence for PCDHA9 (NM_014005.3,3161-3179).
cttgaaagatattatcgat

SEQ ID NO: 339006 - DNA, 19 bp, Homo sapiens
  siRNA target sequence for PCDHA9 (NM_014005.3,3194-3212).
gttcaaatagttttattca

SEQ ID NO: 339007 - DNA, 19 bp, Homo sapiens
  siRNA target sequence for JM1 (NM_014008.1,99-117).
gaccgaatcctcatccatt

SEQ ID NO: 339008 - DNA, 19 bp, Homo sapiens
  siRNA target sequence for JM1 (NM_014008.1,175-193).
ccactgagctggttgtaga

SEQ ID NO: 339009 - DNA, 19 bp, Homo sapiens
  siRNA target sequence for JM1 (NM_014008.1,589-607).
ggctggtcgtgccagaatt

SEQ ID NO: 339010 - DNA, 19 bp, Homo sapiens
  siRNA target sequence for JM1 (NM_014008.1,593-611).
ggtcgtgccagaattgagt

SEQ ID NO: 339011 - DNA, 19 bp, Homo sapiens
  siRNA target sequence for JM1 (NM_014008.1,594-612).
gtcgtgccagaattgagtt

SEQ ID NO: 339012 - DNA, 19 bp, Homo sapiens
  siRNA target sequence for JM1 (NM_014008.1,1137-1155).
gttgaggccgacatgaaga

SEQ ID NO: 339013 - DNA, 19 bp, Homo sapiens
  siRNA target sequence for JM1 (NM_014008.1,1296-1314).
cagcttgtggtggagaata

SEQ ID NO: 339014 - DNA, 19 bp, Homo sapiens
  siRNA target sequence for JM1 (NM_014008.1,1298-1316).
gcttgtggtggagaatagt

SEQ ID NO: 339015 - DNA, 19 bp, Homo sapiens
  siRNA target sequence for JM1 (NM_014008.1,1741-1759).
ctgttcggaaggcctataa

SEQ ID NO: 339016 - DNA, 19 bp, Homo sapiens
  siRNA target sequence for JM1 (NM_014008.1,1743-1761).
gttcggaaggcctataagt

SEQ ID NO: 339017 - DNA, 19 bp, Homo sapiens
  siRNA target sequence for JM1 (NM_014008.1,1747-1765).
ggaaggcctataagtatct

SEQ ID NO: 339018 - DNA, 19 bp, Homo sapiens
  siRNA target sequence for ASTN2 (NM_014010.2,57-75).
gagaatggcaccttgtact

SEQ ID NO: 339019 - DNA, 19 bp, Homo sapiens
  siRNA target sequence for ASTN2 (NM_014010.2,134-152).
ggagccctcggagattgtt

SEQ ID NO: 339020 - DNA, 19 bp, Homo sapiens
  siRNA target sequence for ASTN2 (NM_014010.2,372-390).
cggctgcaaacccacaatt

SEQ ID NO: 339021 - DNA, 19 bp, Homo sapiens
  siRNA target sequence for ASTN2 (NM_014010.2,627-645).
gaaactcagctgacattct

SEQ ID NO: 339022 - DNA, 19 bp, Homo sapiens
  siRNA target sequence for ASTN2 (NM_014010.2,889-907).
ccaagctttccctgtatta

SEQ ID NO: 339023 - DNA, 19 bp, Homo sapiens
  siRNA target sequence for ASTN2 (NM_014010.2,898-916).
ccctgtattaccagatcaa

SEQ ID NO: 339024 - DNA, 19 bp, Homo sapiens
  siRNA target sequence for ASTN2 (NM_014010.2,899-917).
cctgtattaccagatcaat

SEQ ID NO: 339025 - DNA, 19 bp, Homo sapiens
  siRNA target sequence for ASTN2 (NM_014010.2,1129-1147).
gggagcaagcccctgaaaa

SEQ ID NO: 339026 - DNA, 19 bp, Homo sapiens
  siRNA target sequence for ASTN2 (NM_014010.2,1133-1151).
gcaagcccctgaaaagatt

SEQ ID NO: 339027 - DNA, 19 bp, Homo sapiens
  siRNA target sequence for ASTN2 (NM_014010.2,1137-1155).
gcccctgaaaagattctca

SEQ ID NO: 339028 - DNA, 19 bp, Homo sapiens
  siRNA target sequence for ASTN2 (NM_014010.2,1302-1320).
gcgatgctgtccacatact

SEQ ID NO: 339029 - DNA, 19 bp, Homo sapiens
  siRNA target sequence for ASTN2 (NM_014010.2,1307-1325).
gctgtccacatactttgaa

SEQ ID NO: 339030 - DNA, 19 bp, Homo sapiens
  siRNA target sequence for ASTN2 (NM_014010.2,1308-1326).
ctgtccacatactttgaaa

SEQ ID NO: 339031 - DNA, 19 bp, Homo sapiens
  siRNA target sequence for ASTN2 (NM_014010.2,1312-1330).
ccacatactttgaaaccat

SEQ ID NO: 339032 - DNA, 19 bp, Homo sapiens
  siRNA target sequence for ASTN2 (NM_014010.2,1387-1405).
gctgcactcgcaacttcaa

SEQ ID NO: 339033 - DNA, 19 bp, Homo sapiens
  siRNA target sequence for ASTN2 (NM_014010.2,1927-1945).
gagatatcaggtatgatga

SEQ ID NO: 339034 - DNA, 19 bp, Homo sapiens
  siRNA target sequence for ASTN2 (NM_014010.2,2022-2040).
ctcgcagcaggcttcacta

SEQ ID NO: 339035 - DNA, 19 bp, Homo sapiens
  siRNA target sequence for ASTN2 (NM_014010.2,2024-2042).
cgcagcaggcttcactaat

SEQ ID NO: 339036 - DNA, 19 bp, Homo sapiens
  siRNA target sequence for ASTN2 (NM_014010.2,2429-2447).
ccgtgtggtgccactttat

SEQ ID NO: 339037 - DNA, 19 bp, Homo sapiens
  siRNA target sequence for ASTN2 (NM_014010.2,2430-2448).
cgtgtggtgccactttata

SEQ ID NO: 339038 - DNA, 19 bp, Homo sapiens
  siRNA target sequence for ASTN2 (NM_014010.2,2692-2710).
ccaaggtctccgactatat

SEQ ID NO: 339039 - DNA, 19 bp, Homo sapiens
  siRNA target sequence for ASTN2 (NM_014010.2,2693-2711).
caaggtctccgactatatt

SEQ ID NO: 339040 - DNA, 19 bp, Homo sapiens
  siRNA target sequence for ASTN2 (NM_014010.2,2798-2816).
cctgggcacatcttgtgta

SEQ ID NO: 339041 - DNA, 19 bp, Homo sapiens
  siRNA target sequence for ASTN2 (NM_014010.2,2887-2905).
ccgacggtctctacaagtt

SEQ ID NO: 339042 - DNA, 19 bp, Homo sapiens
  siRNA target sequence for ASTN2 (NM_014010.2,2889-2907).
gacggtctctacaagttca

SEQ ID NO: 339043 - DNA, 19 bp, Homo sapiens
  siRNA target sequence for ASTN2 (NM_014010.2,2977-2995).
cactggtagatgacaacaa

SEQ ID NO: 339044 - DNA, 19 bp, Homo sapiens
  siRNA target sequence for ASTN2 (NM_014010.2,3027-3045).
ctgtacaatgggtacacaa

SEQ ID NO: 339045 - DNA, 19 bp, Homo sapiens
  siRNA target sequence for ASTN2 (NM_014010.2,3119-3137).
ccactacaactctcactat

SEQ ID NO: 339046 - DNA, 19 bp, Homo sapiens
  siRNA target sequence for ASTN2 (NM_014010.2,3122-3140).
ctacaactctcactatgaa

SEQ ID NO: 339047 - DNA, 19 bp, Homo sapiens
  siRNA target sequence for ASTN2 (NM_014010.2,3188-3206).
gaaggcccacctgattcta

SEQ ID NO: 339048 - DNA, 19 bp, Homo sapiens
  siRNA target sequence for ASTN2 (NM_014010.2,3321-3339).
gcaggcatggtgtggtata

SEQ ID NO: 339049 - DNA, 19 bp, Homo sapiens
  siRNA target sequence for ASTN2 (NM_014010.2,3324-3342).
ggcatggtgtggtatagca

SEQ ID NO: 339050 - DNA, 19 bp, Homo sapiens
  siRNA target sequence for ASTN2 (NM_014010.2,3325-3343).
gcatggtgtggtatagcat

SEQ ID NO: 339051 - DNA, 19 bp, Homo sapiens
  siRNA target sequence for U5-200KD (NM_014014.2,103-121).
cccgtagtctgcaatacga

SEQ ID NO: 339052 - DNA, 19 bp, Homo sapiens
  siRNA target sequence for U5-200KD (NM_014014.2,125-143).
caaggcgaactcgaatctt

SEQ ID NO: 339053 - DNA, 19 bp, Homo sapiens
  siRNA target sequence for U5-200KD (NM_014014.2,315-333).
gaccggcatgacatcaaca

SEQ ID NO: 339054 - DNA, 19 bp, Homo sapiens
  siRNA target sequence for U5-200KD (NM_014014.2,319-337).
ggcatgacatcaacaagat

SEQ ID NO: 339055 - DNA, 19 bp, Homo sapiens
  siRNA target sequence for U5-200KD (NM_014014.2,353-371).
gctgtcggagggcattgat

SEQ ID NO: 339056 - DNA, 19 bp, Homo sapiens
  siRNA target sequence for U5-200KD (NM_014014.2,460-478).
gggaccagccacgtgatat

SEQ ID NO: 339057 - DNA, 19 bp, Homo sapiens
  siRNA target sequence for U5-200KD (NM_014014.2,501-519).
gttctagctgttctaaaga

SEQ ID NO: 339058 - DNA, 19 bp, Homo sapiens
  siRNA target sequence for U5-200KD (NM_014014.2,507-525).
gctgttctaaagaatgaaa

SEQ ID NO: 339059 - DNA, 19 bp, Homo sapiens
  siRNA target sequence for U5-200KD (NM_014014.2,560-578).
cctgctgctgggtcaaaca

SEQ ID NO: 339060 - DNA, 19 bp, Homo sapiens
  siRNA target sequence for U5-200KD (NM_014014.2,563-581).
gctgctgggtcaaacagat

SEQ ID NO: 339061 - DNA, 19 bp, Homo sapiens
  siRNA target sequence for U5-200KD (NM_014014.2,566-584).
gctgggtcaaacagatgat

SEQ ID NO: 339062 - DNA, 19 bp, Homo sapiens
  siRNA target sequence for U5-200KD (NM_014014.2,625-643).
cagactatggtggagataa

SEQ ID NO: 339063 - DNA, 19 bp, Homo sapiens
  siRNA target sequence for U5-200KD (NM_014014.2,799-817).
gcaccctctcggctaatct

SEQ ID NO: 339064 - DNA, 19 bp, Homo sapiens
  siRNA target sequence for U5-200KD (NM_014014.2,865-883).
ctcgggatattgatgcatt

SEQ ID NO: 339065 - DNA, 19 bp, Homo sapiens
  siRNA target sequence for U5-200KD (NM_014014.2,895-913).
ggcagctcagtcgtttcta

SEQ ID NO: 339066 - DNA, 19 bp, Homo sapiens
  siRNA target sequence for U5-200KD (NM_014014.2,896-914).
gcagctcagtcgtttctat

SEQ ID NO: 339067 - DNA, 19 bp, Homo sapiens
  siRNA target sequence for U5-200KD (NM_014014.2,902-920).
cagtcgtttctatgatgat

SEQ ID NO: 339068 - DNA, 19 bp, Homo sapiens
  siRNA target sequence for U5-200KD (NM_014014.2,976-994).
gtgatgatcgggaatgtga

SEQ ID NO: 339069 - DNA, 19 bp, Homo sapiens
  siRNA target sequence for U5-200KD (NM_014014.2,978-996).
gatgatcgggaatgtgaaa

SEQ ID NO: 339070 - DNA, 19 bp, Homo sapiens
  siRNA target sequence for U5-200KD (NM_014014.2,1025-1043).
cacctttgatttcattaaa

SEQ ID NO: 339071 - DNA, 19 bp, Homo sapiens
  siRNA target sequence for U5-200KD (NM_014014.2,1052-1070).
gcagcacaggatgatgatt

SEQ ID NO: 339072 - DNA, 19 bp, Homo sapiens
  siRNA target sequence for U5-200KD (NM_014014.2,1085-1103).
gctggccagtgcacaaagt

SEQ ID NO: 339073 - DNA, 19 bp, Homo sapiens
  siRNA target sequence for U5-200KD (NM_014014.2,1183-1201).
ccgagaaggaggatctgat

SEQ ID NO: 339074 - DNA, 19 bp, Homo sapiens
  siRNA target sequence for U5-200KD (NM_014014.2,1346-1364).
ccactttatggccaataaa

SEQ ID NO: 339075 - DNA, 19 bp, Homo sapiens
  siRNA target sequence for U5-200KD (NM_014014.2,1506-1524).
gggtttgagggcttcaaaa

SEQ ID NO: 339076 - DNA, 19 bp, Homo sapiens
  siRNA target sequence for U5-200KD (NM_014014.2,1514-1532).
gggcttcaaaacactgaat

SEQ ID NO: 339077 - DNA, 19 bp, Homo sapiens
  siRNA target sequence for U5-200KD (NM_014014.2,1561-1579).
cccttgagacggatgagaa

SEQ ID NO: 339078 - DNA, 19 bp, Homo sapiens
  siRNA target sequence for U5-200KD (NM_014014.2,1562-1580).
ccttgagacggatgagaat

SEQ ID NO: 339079 - DNA, 19 bp, Homo sapiens
  siRNA target sequence for U5-200KD (NM_014014.2,1631-1649).
gtgcatgctccgagagatt

SEQ ID NO: 339080 - DNA, 19 bp, Homo sapiens
  siRNA target sequence for U5-200KD (NM_014014.2,1686-1704).
gatgacttcaagattatct

SEQ ID NO: 339081 - DNA, 19 bp, Homo sapiens
  siRNA target sequence for U5-200KD (NM_014014.2,1907-1925).
gctggtgcggctcatcatt

SEQ ID NO: 339082 - DNA, 19 bp, Homo sapiens
  siRNA target sequence for U5-200KD (NM_014014.2,1960-1978).
gtcctgtcttagaagcttt

SEQ ID NO: 339083 - DNA, 19 bp, Homo sapiens
  siRNA target sequence for U5-200KD (NM_014014.2,1985-2003).
cagggccatccgaaacatt

SEQ ID NO: 339084 - DNA, 19 bp, Homo sapiens
  siRNA target sequence for U5-200KD (NM_014014.2,1987-2005).
gggccatccgaaacattga

SEQ ID NO: 339085 - DNA, 19 bp, Homo sapiens
  siRNA target sequence for U5-200KD (NM_014014.2,1989-2007).
gccatccgaaacattgaga

SEQ ID NO: 339086 - DNA, 19 bp, Homo sapiens
  siRNA target sequence for U5-200KD (NM_014014.2,1990-2008).
ccatccgaaacattgagat

SEQ ID NO: 339087 - DNA, 19 bp, Homo sapiens
  siRNA target sequence for U5-200KD (NM_014014.2,2183-2201).
gcgtttccagatcatgaat

SEQ ID NO: 339088 - DNA, 19 bp, Homo sapiens
  siRNA target sequence for U5-200KD (NM_014014.2,2301-2319).
cgggacatgtgcctagaaa

SEQ ID NO: 339089 - DNA, 19 bp, Homo sapiens
  siRNA target sequence for U5-200KD (NM_014014.2,2321-2339).
ggacactctgggtctgttt

SEQ ID NO: 339090 - DNA, 19 bp, Homo sapiens
  siRNA target sequence for U5-200KD (NM_014014.2,2470-2488).
cactcgtggaggatctttt

SEQ ID NO: 339091 - DNA, 19 bp, Homo sapiens
  siRNA target sequence for U5-200KD (NM_014014.2,2474-2492).
cgtggaggatctttttgct

SEQ ID NO: 339092 - DNA, 19 bp, Homo sapiens
  siRNA target sequence for U5-200KD (NM_014014.2,2543-2561).
gaatctccctgcacataca

SEQ ID NO: 339093 - DNA, 19 bp, Homo sapiens
  siRNA target sequence for U5-200KD (NM_014014.2,2653-2671).
ccggaagaccccagtatga

SEQ ID NO: 339094 - DNA, 19 bp, Homo sapiens
  siRNA target sequence for U5-200KD (NM_014014.2,2701-2719).
ctcatggggagctacagta

SEQ ID NO: 339095 - DNA, 19 bp, Homo sapiens
  siRNA target sequence for U5-200KD (NM_014014.2,2728-2746).
ccctcctcaatcaacaact

SEQ ID NO: 339096 - DNA, 19 bp, Homo sapiens
  siRNA target sequence for U5-200KD (NM_014014.2,2847-2865).
ggctatgcctacctctata

SEQ ID NO: 339097 - DNA, 19 bp, Homo sapiens
  siRNA target sequence for U5-200KD (NM_014014.2,2848-2866).
gctatgcctacctctatat

SEQ ID NO: 339098 - DNA, 19 bp, Homo sapiens
  siRNA target sequence for U5-200KD (NM_014014.2,2933-2951).
ggaccagcgccgactagat

SEQ ID NO: 339099 - DNA, 19 bp, Homo sapiens
  siRNA target sequence for U5-200KD (NM_014014.2,2943-2961).
cgactagatctggttcata

SEQ ID NO: 339100 - DNA, 19 bp, Homo sapiens
  siRNA target sequence for U5-200KD (NM_014014.2,3043-3061).
gtatagccagccactacta

SEQ ID NO: 339101 - DNA, 19 bp, Homo sapiens
  siRNA target sequence for U5-200KD (NM_014014.2,3048-3066).
gccagccactactacatca

SEQ ID NO: 339102 - DNA, 19 bp, Homo sapiens
  siRNA target sequence for U5-200KD (NM_014014.2,3056-3074).
ctactacatcaccaatgat

SEQ ID NO: 339103 - DNA, 19 bp, Homo sapiens
  siRNA target sequence for U5-200KD (NM_014014.2,3142-3160).
cattgtcctctgagttcaa

SEQ ID NO: 339104 - DNA, 19 bp, Homo sapiens
  siRNA target sequence for U5-200KD (NM_014014.2,3256-3274).
ctaagatcaacgttcttct

SEQ ID NO: 339105 - DNA, 19 bp, Homo sapiens
  siRNA target sequence for U5-200KD (NM_014014.2,3355-3373).
ggttgatgcgagcgatatt

SEQ ID NO: 339106 - DNA, 19 bp, Homo sapiens
  siRNA target sequence for U5-200KD (NM_014014.2,3356-3374).
gttgatgcgagcgatattt

SEQ ID NO: 339107 - DNA, 19 bp, Homo sapiens
  siRNA target sequence for U5-200KD (NM_014014.2,3359-3377).
gatgcgagcgatatttgaa

SEQ ID NO: 339108 - DNA, 19 bp, Homo sapiens
  siRNA target sequence for U5-200KD (NM_014014.2,3362-3380).
gcgagcgatatttgaaatt

SEQ ID NO: 339109 - DNA, 19 bp, Homo sapiens
  siRNA target sequence for U5-200KD (NM_014014.2,3394-3412).
gttgggcacagcttacaga

SEQ ID NO: 339110 - DNA, 19 bp, Homo sapiens
  siRNA target sequence for U5-200KD (NM_014014.2,3420-3438).
ctgaacctctgcaagatga

SEQ ID NO: 339111 - DNA, 19 bp, Homo sapiens
  siRNA target sequence for U5-200KD (NM_014014.2,3543-3561).
ctgtacgacctgaatcata

SEQ ID NO: 339112 - DNA, 19 bp, Homo sapiens
  siRNA target sequence for U5-200KD (NM_014014.2,3545-3563).
gtacgacctgaatcataat

SEQ ID NO: 339113 - DNA, 19 bp, Homo sapiens
  siRNA target sequence for U5-200KD (NM_014014.2,3732-3750).
ggttcatccgaggcttttt

SEQ ID NO: 339114 - DNA, 19 bp, Homo sapiens
  siRNA target sequence for U5-200KD (NM_014014.2,3825-3843).
caggacgagcacctcatta

SEQ ID NO: 339115 - DNA, 19 bp, Homo sapiens
  siRNA target sequence for U5-200KD (NM_014014.2,3827-3845).
ggacgagcacctcattaca

SEQ ID NO: 339116 - DNA, 19 bp, Homo sapiens
  siRNA target sequence for U5-200KD (NM_014014.2,3828-3846).
gacgagcacctcattacat

SEQ ID NO: 339117 - DNA, 19 bp, Homo sapiens
  siRNA target sequence for U5-200KD (NM_014014.2,3940-3958).
ccttccggcacctgatctt

SEQ ID NO: 339118 - DNA, 19 bp, Homo sapiens
  siRNA target sequence for U5-200KD (NM_014014.2,3976-3994).
ctccaaccgaacttttgga

SEQ ID NO: 339119 - DNA, 19 bp, Homo sapiens
  siRNA target sequence for U5-200KD (NM_014014.2,4009-4027).
ccgtgtctgctctgagaaa

SEQ ID NO: 339120 - DNA, 19 bp, Homo sapiens
  siRNA target sequence for U5-200KD (NM_014014.2,4033-4051).
cctttgagagtctttacca

SEQ ID NO: 339121 - DNA, 19 bp, Homo sapiens
  siRNA target sequence for U5-200KD (NM_014014.2,4038-4056).
gagagtctttaccaagata

SEQ ID NO: 339122 - DNA, 19 bp, Homo sapiens
  siRNA target sequence for U5-200KD (NM_014014.2,4082-4100).
gacccaggtgtttaacact

SEQ ID NO: 339123 - DNA, 19 bp, Homo sapiens
  siRNA target sequence for U5-200KD (NM_014014.2,4111-4129).
gtgacgacaacgtgtttgt

SEQ ID NO: 339124 - DNA, 19 bp, Homo sapiens
  siRNA target sequence for U5-200KD (NM_014014.2,4142-4160).
gggcagcgggaagactatt

SEQ ID NO: 339125 - DNA, 19 bp, Homo sapiens
  siRNA target sequence for U5-200KD (NM_014014.2,4145-4163).
cagcgggaagactatttgt

SEQ ID NO: 339126 - DNA, 19 bp, Homo sapiens
  siRNA target sequence for U5-200KD (NM_014014.2,4154-4172).
gactatttgtgcagagttt

SEQ ID NO: 339127 - DNA, 19 bp, Homo sapiens
  siRNA target sequence for U5-200KD (NM_014014.2,4341-4359).
ctgggcaaagggaacatta

SEQ ID NO: 339128 - DNA, 19 bp, Homo sapiens
  siRNA target sequence for U5-200KD (NM_014014.2,4469-4487).
cgagaatgggcctgtctta

SEQ ID NO: 339129 - DNA, 19 bp, Homo sapiens
  siRNA target sequence for U5-200KD (NM_014014.2,4472-4490).
gaatgggcctgtcttagaa

SEQ ID NO: 339130 - DNA, 19 bp, Homo sapiens
  siRNA target sequence for U5-200KD (NM_014014.2,4676-4694).
caacatcagccatacacaa

SEQ ID NO: 339131 - DNA, 19 bp, Homo sapiens
  siRNA target sequence for U5-200KD (NM_014014.2,4748-4766).
gcccaagaagcctgtcatt

SEQ ID NO: 339132 - DNA, 19 bp, Homo sapiens
  siRNA target sequence for U5-200KD (NM_014014.2,4754-4772).
gaagcctgtcattgtcttt

SEQ ID NO: 339133 - DNA, 19 bp, Homo sapiens
  siRNA target sequence for U5-200KD (NM_014014.2,4861-4879).
gcaccgagaaggatctgat

SEQ ID NO: 339134 - DNA, 19 bp, Homo sapiens
  siRNA target sequence for U5-200KD (NM_014014.2,4862-4880).
caccgagaaggatctgatt

SEQ ID NO: 339135 - DNA, 19 bp, Homo sapiens
  siRNA target sequence for U5-200KD (NM_014014.2,5078-5096).
ggatacccagtactacaat

SEQ ID NO: 339136 - DNA, 19 bp, Homo sapiens
  siRNA target sequence for U5-200KD (NM_014014.2,5246-5264).
gccattgccagtagaatct

SEQ ID NO: 339137 - DNA, 19 bp, Homo sapiens
  siRNA target sequence for U5-200KD (NM_014014.2,5248-5266).
cattgccagtagaatctca

SEQ ID NO: 339138 - DNA, 19 bp, Homo sapiens
  siRNA target sequence for U5-200KD (NM_014014.2,5267-5285).
cctggaccactgtatgcat

SEQ ID NO: 339139 - DNA, 19 bp, Homo sapiens
  siRNA target sequence for U5-200KD (NM_014014.2,5278-5296).
gtatgcatgaccacttcaa

SEQ ID NO: 339140 - DNA, 19 bp, Homo sapiens
  siRNA target sequence for U5-200KD (NM_014014.2,5544-5562).
gcctactattacatcaact

SEQ ID NO: 339141 - DNA, 19 bp, Homo sapiens
  siRNA target sequence for U5-200KD (NM_014014.2,5545-5563).
cctactattacatcaacta

SEQ ID NO: 339142 - DNA, 19 bp, Homo sapiens
  siRNA target sequence for DEXI (NM_014015.3,490-508).
gcctgttcttcgtcaatgt

SEQ ID NO: 339143 - DNA, 19 bp, Homo sapiens
  siRNA target sequence for DEXI (NM_014015.3,623-641).
cggctcgggcctttacgat

SEQ ID NO: 339144 - DNA, 19 bp, Homo sapiens
  siRNA target sequence for DEXI (NM_014015.3,649-667).
cggagctcgacgtctttga

SEQ ID NO: 339145 - DNA, 19 bp, Homo sapiens
  siRNA target sequence for DEXI (NM_014015.3,650-668).
ggagctcgacgtctttgat

SEQ ID NO: 339146 - DNA, 19 bp, Homo sapiens
  siRNA target sequence for SACM1L (NM_014016.1,145-163).
ggagcagatgacgtactta

SEQ ID NO: 339147 - DNA, 19 bp, Homo sapiens
  siRNA target sequence for SACM1L (NM_014016.1,149-167).
cagatgacgtacttaccat

SEQ ID NO: 339148 - DNA, 19 bp, Homo sapiens
  siRNA target sequence for SACM1L (NM_014016.1,191-209).
cccttgcagtcaagaaaga

SEQ ID NO: 339149 - DNA, 19 bp, Homo sapiens
  siRNA target sequence for SACM1L (NM_014016.1,192-210).
ccttgcagtcaagaaagat

SEQ ID NO: 339150 - DNA, 19 bp, Homo sapiens
  siRNA target sequence for SACM1L (NM_014016.1,233-251).
gaccaatatttggtatact

SEQ ID NO: 339151 - DNA, 19 bp, Homo sapiens
  siRNA target sequence for SACM1L (NM_014016.1,261-279).
ccatctggtggcaggtaat

SEQ ID NO: 339152 - DNA, 19 bp, Homo sapiens
  siRNA target sequence for SACM1L (NM_014016.1,268-286).
gtggcaggtaattatctta

SEQ ID NO: 339153 - DNA, 19 bp, Homo sapiens
  siRNA target sequence for SACM1L (NM_014016.1,270-288).
ggcaggtaattatcttata

SEQ ID NO: 339154 - DNA, 19 bp, Homo sapiens
  siRNA target sequence for SACM1L (NM_014016.1,275-293).
gtaattatcttatagtcat

SEQ ID NO: 339155 - DNA, 19 bp, Homo sapiens
  siRNA target sequence for SACM1L (NM_014016.1,358-376).
gtcctttcttataagaaga

SEQ ID NO: 339156 - DNA, 19 bp, Homo sapiens
  siRNA target sequence for SACM1L (NM_014016.1,423-441).
cctagcgatgctaaaccat

SEQ ID NO: 339157 - DNA, 19 bp, Homo sapiens
  siRNA target sequence for SACM1L (NM_014016.1,428-446).
cgatgctaaaccatgtctt

SEQ ID NO: 339158 - DNA, 19 bp, Homo sapiens
  siRNA target sequence for SACM1L (NM_014016.1,499-517).
cagcggctatccaacacta

SEQ ID NO: 339159 - DNA, 19 bp, Homo sapiens
  siRNA target sequence for SACM1L (NM_014016.1,509-527).
ccaacactagtcctgaatt

SEQ ID NO: 339160 - DNA, 19 bp, Homo sapiens
  siRNA target sequence for SACM1L (NM_014016.1,513-531).
cactagtcctgaattccaa

SEQ ID NO: 339161 - DNA, 19 bp, Homo sapiens
  siRNA target sequence for SACM1L (NM_014016.1,518-536).
gtcctgaattccaagaaat

SEQ ID NO: 339162 - DNA, 19 bp, Homo sapiens
  siRNA target sequence for SACM1L (NM_014016.1,520-538).
cctgaattccaagaaatga

SEQ ID NO: 339163 - DNA, 19 bp, Homo sapiens
  siRNA target sequence for SACM1L (NM_014016.1,552-570).
ggcagatcagcggtttgta

SEQ ID NO: 339164 - DNA, 19 bp, Homo sapiens
  siRNA target sequence for SACM1L (NM_014016.1,553-571).
gcagatcagcggtttgtat

SEQ ID NO: 339165 - DNA, 19 bp, Homo sapiens
  siRNA target sequence for SACM1L (NM_014016.1,657-675).
gcattcatgttctattaat

SEQ ID NO: 339166 - DNA, 19 bp, Homo sapiens
  siRNA target sequence for SACM1L (NM_014016.1,722-740).
gagctggtgtgcgctatta

SEQ ID NO: 339167 - DNA, 19 bp, Homo sapiens
  siRNA target sequence for SACM1L (NM_014016.1,725-743).
ctggtgtgcgctattatgt

SEQ ID NO: 339168 - DNA, 19 bp, Homo sapiens
  siRNA target sequence for SACM1L (NM_014016.1,769-787).
gcagctaactttgtagaaa

SEQ ID NO: 339169 - DNA, 19 bp, Homo sapiens
  siRNA target sequence for SACM1L (NM_014016.1,834-852).
gactcgaggatcaatacct

SEQ ID NO: 339170 - DNA, 19 bp, Homo sapiens
  siRNA target sequence for SACM1L (NM_014016.1,894-912).
gccacagatcagcaaagta

SEQ ID NO: 339171 - DNA, 19 bp, Homo sapiens
  siRNA target sequence for SACM1L (NM_014016.1,919-937).
cacatggacggtttccaaa

SEQ ID NO: 339172 - DNA, 19 bp, Homo sapiens
  siRNA target sequence for SACM1L (NM_014016.1,967-985).
ggaaaacaagttataatca

SEQ ID NO: 339173 - DNA, 19 bp, Homo sapiens
  siRNA target sequence for SACM1L (NM_014016.1,973-991).
caagttataatcaatctga

SEQ ID NO: 339174 - DNA, 19 bp, Homo sapiens
  siRNA target sequence for SACM1L (NM_014016.1,976-994).
gttataatcaatctgatta

SEQ ID NO: 339175 - DNA, 19 bp, Homo sapiens
  siRNA target sequence for SACM1L (NM_014016.1,1055-1073).
gaagtggaatgatgagata

SEQ ID NO: 339176 - DNA, 19 bp, Homo sapiens
  siRNA target sequence for SACM1L (NM_014016.1,1058-1076).
gtggaatgatgagatacat

SEQ ID NO: 339177 - DNA, 19 bp, Homo sapiens
  siRNA target sequence for SACM1L (NM_014016.1,1084-1102).
gacttccataaggaatgta

SEQ ID NO: 339178 - DNA, 19 bp, Homo sapiens
  siRNA target sequence for SACM1L (NM_014016.1,1086-1104).
cttccataaggaatgtaaa

SEQ ID NO: 339179 - DNA, 19 bp, Homo sapiens
  siRNA target sequence for SACM1L (NM_014016.1,1110-1128).
gagatgggatcgactaagt

SEQ ID NO: 339180 - DNA, 19 bp, Homo sapiens
  siRNA target sequence for SACM1L (NM_014016.1,1112-1130).
gatgggatcgactaagtat

SEQ ID NO: 339181 - DNA, 19 bp, Homo sapiens
  siRNA target sequence for SACM1L (NM_014016.1,1115-1133).
gggatcgactaagtatttt

SEQ ID NO: 339182 - DNA, 19 bp, Homo sapiens
  siRNA target sequence for SACM1L (NM_014016.1,1116-1134).
ggatcgactaagtatttta

SEQ ID NO: 339183 - DNA, 19 bp, Homo sapiens
  siRNA target sequence for SACM1L (NM_014016.1,1117-1135).
gatcgactaagtattttat

SEQ ID NO: 339184 - DNA, 19 bp, Homo sapiens
  siRNA target sequence for SACM1L (NM_014016.1,1216-1234).
ggcgtgttccgaagcaatt

SEQ ID NO: 339185 - DNA, 19 bp, Homo sapiens
  siRNA target sequence for SACM1L (NM_014016.1,1219-1237).
gtgttccgaagcaattgca

SEQ ID NO: 339186 - DNA, 19 bp, Homo sapiens
  siRNA target sequence for SACM1L (NM_014016.1,1225-1243).
cgaagcaattgcatggatt

SEQ ID NO: 339187 - DNA, 19 bp, Homo sapiens
  siRNA target sequence for SACM1L (NM_014016.1,1229-1247).
gcaattgcatggattgtct

SEQ ID NO: 339188 - DNA, 19 bp, Homo sapiens
  siRNA target sequence for SACM1L (NM_014016.1,1246-1264).
ctagatagaaccaatgtga

SEQ ID NO: 339189 - DNA, 19 bp, Homo sapiens
  siRNA target sequence for SACM1L (NM_014016.1,1275-1293).
gttagctcgtcgttcactt

SEQ ID NO: 339190 - DNA, 19 bp, Homo sapiens
  siRNA target sequence for SACM1L (NM_014016.1,1308-1326).
gagactaggagttttgcat

SEQ ID NO: 339191 - DNA, 19 bp, Homo sapiens
  siRNA target sequence for SACM1L (NM_014016.1,1323-1341).
gcatgtgggacaaaagctt

SEQ ID NO: 339192 - DNA, 19 bp, Homo sapiens
  siRNA target sequence for SACM1L (NM_014016.1,1384-1402).
gctgacaacgcaaatgctt

SEQ ID NO: 339193 - DNA, 19 bp, Homo sapiens
  siRNA target sequence for SACM1L (NM_014016.1,1463-1481).
gaactcatttgggacttat

SEQ ID NO: 339194 - DNA, 19 bp, Homo sapiens
  siRNA target sequence for SACM1L (NM_014016.1,1466-1484).
ctcatttgggacttataat

SEQ ID NO: 339195 - DNA, 19 bp, Homo sapiens
  siRNA target sequence for SACM1L (NM_014016.1,1493-1511).
ggaactcaatgatacgata

SEQ ID NO: 339196 - DNA, 19 bp, Homo sapiens
  siRNA target sequence for SACM1L (NM_014016.1,1494-1512).
gaactcaatgatacgatat

SEQ ID NO: 339197 - DNA, 19 bp, Homo sapiens
  siRNA target sequence for SACM1L (NM_014016.1,1497-1515).
ctcaatgatacgatattat

SEQ ID NO: 339198 - DNA, 19 bp, Homo sapiens
  siRNA target sequence for SACM1L (NM_014016.1,1524-1542).
cttttccgatggatttaga

SEQ ID NO: 339199 - DNA, 19 bp, Homo sapiens
  siRNA target sequence for SACM1L (NM_014016.1,1530-1548).
cgatggatttagacaagat

SEQ ID NO: 339200 - DNA, 19 bp, Homo sapiens
  siRNA target sequence for SACM1L (NM_014016.1,1581-1599).
ggatgaattagaatctcat

SEQ ID NO: 339201 - DNA, 19 bp, Homo sapiens
  siRNA target sequence for SACM1L (NM_014016.1,1591-1609).
gaatctcatagtcctttaa

SEQ ID NO: 339202 - DNA, 19 bp, Homo sapiens
  siRNA target sequence for SACM1L (NM_014016.1,1612-1630).
gttccaagggactggaaat

SEQ ID NO: 339203 - DNA, 19 bp, Homo sapiens
  siRNA target sequence for SACM1L (NM_014016.1,1616-1634).
caagggactggaaattcct

SEQ ID NO: 339204 - DNA, 19 bp, Homo sapiens
  siRNA target sequence for SACM1L (NM_014016.1,1673-1691).
gcattatctgtttgcttat

SEQ ID NO: 339205 - DNA, 19 bp, Homo sapiens
  siRNA target sequence for HSPC009 (NM_014019.1,114-132).
ccgagcaactgcattccat

SEQ ID NO: 339206 - DNA, 19 bp, Homo sapiens
  siRNA target sequence for LR8 (NM_014020.2,293-311).
cgcaaaacacggtgattgt

SEQ ID NO: 339207 - DNA, 19 bp, Homo sapiens
  siRNA target sequence for LR8 (NM_014020.2,295-313).
caaaacacggtgattgtga

SEQ ID NO: 339208 - DNA, 19 bp, Homo sapiens
  siRNA target sequence for LR8 (NM_014020.2,455-473).
ccacagccaggattggtta

SEQ ID NO: 339209 - DNA, 19 bp, Homo sapiens
  siRNA target sequence for LR8 (NM_014020.2,456-474).
cacagccaggattggttat

SEQ ID NO: 339210 - DNA, 19 bp, Homo sapiens
  siRNA target sequence for LR8 (NM_014020.2,491-509).
gggtgactcagatattgct

SEQ ID NO: 339211 - DNA, 19 bp, Homo sapiens
  siRNA target sequence for LR8 (NM_014020.2,749-767).
ctgaaccctttttatacat

SEQ ID NO: 339212 - DNA, 19 bp, Homo sapiens
  siRNA target sequence for LR8 (NM_014020.2,829-847).
cgaagtcaagagaaccaat

SEQ ID NO: 339213 - DNA, 19 bp, Homo sapiens
  siRNA target sequence for LR8 (NM_014020.2,965-983).
gagtaggtcttcgaaactt

SEQ ID NO: 339214 - DNA, 19 bp, Homo sapiens
  siRNA target sequence for LR8 (NM_014020.2,967-985).
gtaggtcttcgaaacttgt

SEQ ID NO: 339215 - DNA, 19 bp, Homo sapiens
  siRNA target sequence for SSX2IP (NM_014021.1,378-396).
gctatgttcttcaatacct

SEQ ID NO: 339216 - DNA, 19 bp, Homo sapiens
  siRNA target sequence for SSX2IP (NM_014021.1,386-404).
cttcaatacctttatcgaa

SEQ ID NO: 339217 - DNA, 19 bp, Homo sapiens
  siRNA target sequence for SSX2IP (NM_014021.1,401-419).
cgaaaaatgtgcacagttt

SEQ ID NO: 339218 - DNA, 19 bp, Homo sapiens
  siRNA target sequence for SSX2IP (NM_014021.1,428-446).
ccttctgcacagaagataa

SEQ ID NO: 339219 - DNA, 19 bp, Homo sapiens
  siRNA target sequence for SSX2IP (NM_014021.1,464-482).
catatcttgatcaggaatt

SEQ ID NO: 339220 - DNA, 19 bp, Homo sapiens
  siRNA target sequence for SSX2IP (NM_014021.1,469-487).
cttgatcaggaattgacta

SEQ ID NO: 339221 - DNA, 19 bp, Homo sapiens
  siRNA target sequence for SSX2IP (NM_014021.1,472-490).
gatcaggaattgactactt

SEQ ID NO: 339222 - DNA, 19 bp, Homo sapiens
  siRNA target sequence for SSX2IP (NM_014021.1,477-495).
ggaattgactacttttggt

SEQ ID NO: 339223 - DNA, 19 bp, Homo sapiens
  siRNA target sequence for SSX2IP (NM_014021.1,494-512).
gttttccttcattatatga

SEQ ID NO: 339224 - DNA, 19 bp, Homo sapiens
  siRNA target sequence for SSX2IP (NM_014021.1,556-574).
gctgtactaaattgtatga

SEQ ID NO: 339225 - DNA, 19 bp, Homo sapiens
  siRNA target sequence for SSX2IP (NM_014021.1,557-575).
ctgtactaaattgtatgaa

SEQ ID NO: 339226 - DNA, 19 bp, Homo sapiens
  siRNA target sequence for SSX2IP (NM_014021.1,622-640).
gtggagacacagaatttga

SEQ ID NO: 339227 - DNA, 19 bp, Homo sapiens
  siRNA target sequence for SSX2IP (NM_014021.1,664-682).
ctacagagctgctactcaa

SEQ ID NO: 339228 - DNA, 19 bp, Homo sapiens
  siRNA target sequence for SSX2IP (NM_014021.1,674-692).
gctactcaaaacttaagga

SEQ ID NO: 339229 - DNA, 19 bp, Homo sapiens
  siRNA target sequence for SSX2IP (NM_014021.1,675-693).
ctactcaaaacttaaggaa

SEQ ID NO: 339230 - DNA, 19 bp, Homo sapiens
  siRNA target sequence for SSX2IP (NM_014021.1,830-848).
gtcgagctactcagtataa

SEQ ID NO: 339231 - DNA, 19 bp, Homo sapiens
  siRNA target sequence for SSX2IP (NM_014021.1,836-854).
ctactcagtataatcatga

SEQ ID NO: 339232 - DNA, 19 bp, Homo sapiens
  siRNA target sequence for SSX2IP (NM_014021.1,861-879).
gagaaaagagcgtgaatat

SEQ ID NO: 339233 - DNA, 19 bp, Homo sapiens
  siRNA target sequence for SSX2IP (NM_014021.1,871-889).
cgtgaatataataaactga

SEQ ID NO: 339234 - DNA, 19 bp, Homo sapiens
  siRNA target sequence for SSX2IP (NM_014021.1,888-906).
gaaggaacgtctacatcaa

SEQ ID NO: 339235 - DNA, 19 bp, Homo sapiens
  siRNA target sequence for SSX2IP (NM_014021.1,891-909).
ggaacgtctacatcaactt

SEQ ID NO: 339236 - DNA, 19 bp, Homo sapiens
  siRNA target sequence for SSX2IP (NM_014021.1,895-913).
cgtctacatcaacttgtta

SEQ ID NO: 339237 - DNA, 19 bp, Homo sapiens
  siRNA target sequence for SSX2IP (NM_014021.1,896-914).
gtctacatcaacttgttat

SEQ ID NO: 339238 - DNA, 19 bp, Homo sapiens
  siRNA target sequence for SSX2IP (NM_014021.1,904-922).
caacttgttatgaacaaga

SEQ ID NO: 339239 - DNA, 19 bp, Homo sapiens
  siRNA target sequence for SSX2IP (NM_014021.1,960-978).
cgggagagctgatggaaaa

SEQ ID NO: 339240 - DNA, 19 bp, Homo sapiens
  siRNA target sequence for SSX2IP (NM_014021.1,984-1002).
ctcctggaggactggtaaa

SEQ ID NO: 339241 - DNA, 19 bp, Homo sapiens
  siRNA target sequence for SSX2IP (NM_014021.1,1060-1078).
cgtcagaaacaaatcctaa

SEQ ID NO: 339242 - DNA, 19 bp, Homo sapiens
  siRNA target sequence for SSX2IP (NM_014021.1,1190-1208).
ctgttatttccgatgttga

SEQ ID NO: 339243 - DNA, 19 bp, Homo sapiens
  siRNA target sequence for SSX2IP (NM_014021.1,1245-1263).
ggacctttcctgtgaaact

SEQ ID NO: 339244 - DNA, 19 bp, Homo sapiens
  siRNA target sequence for SSX2IP (NM_014021.1,1264-1282).
gtgagagagcagcttacaa

SEQ ID NO: 339245 - DNA, 19 bp, Homo sapiens
  siRNA target sequence for SSX2IP (NM_014021.1,1318-1336).
catgtagaaaagcttgata

SEQ ID NO: 339246 - DNA, 19 bp, Homo sapiens
  siRNA target sequence for SSX2IP (NM_014021.1,1329-1347).
gcttgataaccaagtttca

SEQ ID NO: 339247 - DNA, 19 bp, Homo sapiens
  siRNA target sequence for SSX2IP (NM_014021.1,1330-1348).
cttgataaccaagtttcaa

SEQ ID NO: 339248 - DNA, 19 bp, Homo sapiens
  siRNA target sequence for SSX2IP (NM_014021.1,1356-1374).
cctggaaggttttaatgat

SEQ ID NO: 339249 - DNA, 19 bp, Homo sapiens
  siRNA target sequence for SSX2IP (NM_014021.1,1388-1406).
cacgacaagaccatgaaca

SEQ ID NO: 339250 - DNA, 19 bp, Homo sapiens
  siRNA target sequence for SSX2IP (NM_014021.1,1412-1430).
ctgaaaaactcgagttaga

SEQ ID NO: 339251 - DNA, 19 bp, Homo sapiens
  siRNA target sequence for SSX2IP (NM_014021.1,1414-1432).
gaaaaactcgagttagaaa

SEQ ID NO: 339252 - DNA, 19 bp, Homo sapiens
  siRNA target sequence for SSX2IP (NM_014021.1,1437-1455).
gcagtgtaaagaaatgatt

SEQ ID NO: 339253 - DNA, 19 bp, Homo sapiens
  siRNA target sequence for SSX2IP (NM_014021.1,1482-1500).
gcagctcgctactgcatat

SEQ ID NO: 339254 - DNA, 19 bp, Homo sapiens
  siRNA target sequence for SSX2IP (NM_014021.1,1485-1503).
gctcgctactgcatatgat

SEQ ID NO: 339255 - DNA, 19 bp, Homo sapiens
  siRNA target sequence for SSX2IP (NM_014021.1,1488-1506).
cgctactgcatatgatgat

SEQ ID NO: 339256 - DNA, 19 bp, Homo sapiens
  siRNA target sequence for SSX2IP (NM_014021.1,1504-1522).
gatgataccacttcactat

SEQ ID NO: 339257 - DNA, 19 bp, Homo sapiens
  siRNA target sequence for SSX2IP (NM_014021.1,1517-1535).
cactattacgagactgtta

SEQ ID NO: 339258 - DNA, 19 bp, Homo sapiens
  siRNA target sequence for SSX2IP (NM_014021.1,1519-1537).
ctattacgagactgttatt

SEQ ID NO: 339259 - DNA, 19 bp, Homo sapiens
  siRNA target sequence for SSX2IP (NM_014021.1,1608-1626).
ggagagacgaagctttaca

SEQ ID NO: 339260 - DNA, 19 bp, Homo sapiens
  siRNA target sequence for SSX2IP (NM_014021.1,1611-1629).
gagacgaagctttacagaa

SEQ ID NO: 339261 - DNA, 19 bp, Homo sapiens
  siRNA target sequence for SSX2IP (NM_014021.1,1676-1694).
gagccagttggttaaagca

SEQ ID NO: 339262 - DNA, 19 bp, Homo sapiens
  siRNA target sequence for SSX2IP (NM_014021.1,1769-1787).
gttctgattgggacaatct

SEQ ID NO: 339263 - DNA, 19 bp, Homo sapiens
  siRNA target sequence for SSX2IP (NM_014021.1,1799-1817).
cgaggcagccgcaaaagaa

SEQ ID NO: 339264 - DNA, 19 bp, Homo sapiens
  siRNA target sequence for SSX2IP (NM_014021.1,1818-1836).
gcctcacagtgtgtctaat

SEQ ID NO: 339265 - DNA, 19 bp, Homo sapiens
  siRNA target sequence for SSX2IP (NM_014021.1,1841-1859).
ctccagtttgcatgtctaa

SEQ ID NO: 339266 - DNA, 19 bp, Homo sapiens
  siRNA target sequence for SSX2IP (NM_014021.1,1844-1862).
cagtttgcatgtctaaact

SEQ ID NO: 339267 - DNA, 19 bp, Homo sapiens
  siRNA target sequence for SSX2IP (NM_014021.1,1850-1868).
gcatgtctaaacttactaa

SEQ ID NO: 339268 - DNA, 19 bp, Homo sapiens
  siRNA target sequence for SSX2IP (NM_014021.1,1851-1869).
catgtctaaacttactaaa

SEQ ID NO: 339269 - DNA, 19 bp, Homo sapiens
  siRNA target sequence for SSX2IP (NM_014021.1,1854-1872).
gtctaaacttactaaatct

SEQ ID NO: 339270 - DNA, 19 bp, Homo sapiens
  siRNA target sequence for SSX2IP (NM_014021.1,1910-1928).
cacgttcctgcatatctga

SEQ ID NO: 339271 - DNA, 19 bp, Homo sapiens
  siRNA target sequence for SSX2IP (NM_014021.1,1920-1938).
catatctgaacatagttca

SEQ ID NO: 339272 - DNA, 19 bp, Homo sapiens
  siRNA target sequence for SSX2IP (NM_014021.1,1925-1943).
ctgaacatagttcaatcaa

SEQ ID NO: 339273 - DNA, 19 bp, Homo sapiens
  siRNA target sequence for SSX2IP (NM_014021.1,1934-1952).
gttcaatcaatgtactgaa

SEQ ID NO: 339274 - DNA, 19 bp, Homo sapiens
  siRNA target sequence for SSX2IP (NM_014021.1,1950-1968).
gaatataactgctgaagaa

SEQ ID NO: 339275 - DNA, 19 bp, Homo sapiens
  siRNA target sequence for SSX2IP (NM_014021.1,2060-2078).
gctccttgagctacacaaa

SEQ ID NO: 339276 - DNA, 19 bp, Homo sapiens
  siRNA target sequence for SSX2IP (NM_014021.1,2061-2079).
ctccttgagctacacaaat

SEQ ID NO: 339277 - DNA, 19 bp, Homo sapiens
  siRNA target sequence for SSX2IP (NM_014021.1,2064-2082).
cttgagctacacaaattct

SEQ ID NO: 339278 - DNA, 19 bp, Homo sapiens
  siRNA target sequence for SSX2IP (NM_014021.1,2067-2085).
gagctacacaaattctcat

SEQ ID NO: 339279 - DNA, 19 bp, Homo sapiens
  siRNA target sequence for SSX2IP (NM_014021.1,2070-2088).
ctacacaaattctcatgta

SEQ ID NO: 339280 - DNA, 19 bp, Homo sapiens
  siRNA target sequence for KIAA0982 (NM_014023.1,150-168).
cacagaaagcgcaagttgt

SEQ ID NO: 339281 - DNA, 19 bp, Homo sapiens
  siRNA target sequence for KIAA0982 (NM_014023.1,170-188).
cgactgctcgccaaacaaa

SEQ ID NO: 339282 - DNA, 19 bp, Homo sapiens
  siRNA target sequence for KIAA0982 (NM_014023.1,171-189).
gactgctcgccaaacaaaa

SEQ ID NO: 339283 - DNA, 19 bp, Homo sapiens
  siRNA target sequence for KIAA0982 (NM_014023.1,175-193).
gctcgccaaacaaaacaga

SEQ ID NO: 339284 - DNA, 19 bp, Homo sapiens
  siRNA target sequence for KIAA0982 (NM_014023.1,204-222).
ccatagcctttctatacga

SEQ ID NO: 339285 - DNA, 19 bp, Homo sapiens
  siRNA target sequence for KIAA0982 (NM_014023.1,205-223).
catagcctttctatacgaa

SEQ ID NO: 339286 - DNA, 19 bp, Homo sapiens
  siRNA target sequence for KIAA0982 (NM_014023.1,210-228).
cctttctatacgaagaact

SEQ ID NO: 339287 - DNA, 19 bp, Homo sapiens
  siRNA target sequence for KIAA0982 (NM_014023.1,254-272).
gactgccaagagacatgtt

SEQ ID NO: 339288 - DNA, 19 bp, Homo sapiens
  siRNA target sequence for KIAA0982 (NM_014023.1,321-339).
ggaactgtttggtcaaata

SEQ ID NO: 339289 - DNA, 19 bp, Homo sapiens
  siRNA target sequence for KIAA0982 (NM_014023.1,331-349).
ggtcaaatagaaagagaat

SEQ ID NO: 339290 - DNA, 19 bp, Homo sapiens
  siRNA target sequence for KIAA0982 (NM_014023.1,357-375).
cctttatatcgaaaactta

SEQ ID NO: 339291 - DNA, 19 bp, Homo sapiens
  siRNA target sequence for KIAA0982 (NM_014023.1,366-384).
cgaaaacttagaattacgt

SEQ ID NO: 339292 - DNA, 19 bp, Homo sapiens
  siRNA target sequence for KIAA0982 (NM_014023.1,372-390).
cttagaattacgtagagaa

SEQ ID NO: 339293 - DNA, 19 bp, Homo sapiens
  siRNA target sequence for KIAA0982 (NM_014023.1,386-404).
gagaaatcgacactcttaa

SEQ ID NO: 339294 - DNA, 19 bp, Homo sapiens
  siRNA target sequence for KIAA0982 (NM_014023.1,456-474).
gggccaactcaaaacaaaa

SEQ ID NO: 339295 - DNA, 19 bp, Homo sapiens
  siRNA target sequence for KIAA0982 (NM_014023.1,527-545).
cttccaccagcaagattgt

SEQ ID NO: 339296 - DNA, 19 bp, Homo sapiens
  siRNA target sequence for KIAA0982 (NM_014023.1,707-725).
cagggaagtgcctagtcaa

SEQ ID NO: 339297 - DNA, 19 bp, Homo sapiens
  siRNA target sequence for KIAA0982 (NM_014023.1,733-751).
ggccacgtgggctcagtaa

SEQ ID NO: 339298 - DNA, 19 bp, Homo sapiens
  siRNA target sequence for KIAA0982 (NM_014023.1,735-753).
ccacgtgggctcagtaaat

SEQ ID NO: 339299 - DNA, 19 bp, Homo sapiens
  siRNA target sequence for KIAA0982 (NM_014023.1,736-754).
cacgtgggctcagtaaatt

SEQ ID NO: 339300 - DNA, 19 bp, Homo sapiens
  siRNA target sequence for KIAA0982 (NM_014023.1,742-760).
ggctcagtaaattctatca

SEQ ID NO: 339301 - DNA, 19 bp, Homo sapiens
  siRNA target sequence for KIAA0982 (NM_014023.1,800-818).
gagatcagactgctcatat

SEQ ID NO: 339302 - DNA, 19 bp, Homo sapiens
  siRNA target sequence for KIAA0982 (NM_014023.1,802-820).
gatcagactgctcatatct

SEQ ID NO: 339303 - DNA, 19 bp, Homo sapiens
  siRNA target sequence for KIAA0982 (NM_014023.1,854-872).
ctgttgctgacactagtat

SEQ ID NO: 339304 - DNA, 19 bp, Homo sapiens
  siRNA target sequence for KIAA0982 (NM_014023.1,1211-1229).
ccatccactcggtgaatgt

SEQ ID NO: 339305 - DNA, 19 bp, Homo sapiens
  siRNA target sequence for KIAA0982 (NM_014023.1,1212-1230).
catccactcggtgaatgtt

SEQ ID NO: 339306 - DNA, 19 bp, Homo sapiens
  siRNA target sequence for KIAA0982 (NM_014023.1,1303-1321).
gaccgcacggtgaaagtct

SEQ ID NO: 339307 - DNA, 19 bp, Homo sapiens
  siRNA target sequence for KIAA0982 (NM_014023.1,1323-1341).
ggacttgaaaaatatgaga

SEQ ID NO: 339308 - DNA, 19 bp, Homo sapiens
  siRNA target sequence for KIAA0982 (NM_014023.1,1340-1358).
gatcccccattgcaactat

SEQ ID NO: 339309 - DNA, 19 bp, Homo sapiens
  siRNA target sequence for KIAA0982 (NM_014023.1,1361-1379).
gcacggactctgccattaa

SEQ ID NO: 339310 - DNA, 19 bp, Homo sapiens
  siRNA target sequence for KIAA0982 (NM_014023.1,1390-1408).
gtatgtgtcggccaaaaaa

SEQ ID NO: 339311 - DNA, 19 bp, Homo sapiens
  siRNA target sequence for KIAA0982 (NM_014023.1,1394-1412).
gtgtcggccaaaaaatcat

SEQ ID NO: 339312 - DNA, 19 bp, Homo sapiens
  siRNA target sequence for KIAA0982 (NM_014023.1,1431-1449).
ccgacaagtgagactgttt

SEQ ID NO: 339313 - DNA, 19 bp, Homo sapiens
  siRNA target sequence for KIAA0982 (NM_014023.1,1497-1515).
gggccacaggagaatggta

SEQ ID NO: 339314 - DNA, 19 bp, Homo sapiens
  siRNA target sequence for KIAA0982 (NM_014023.1,1498-1516).
ggccacaggagaatggtat

SEQ ID NO: 339315 - DNA, 19 bp, Homo sapiens
  siRNA target sequence for KIAA0982 (NM_014023.1,1573-1591).
gaccggcaagccattggtt

SEQ ID NO: 339316 - DNA, 19 bp, Homo sapiens
  siRNA target sequence for KIAA0982 (NM_014023.1,1582-1600).
gccattggttggaacatca

SEQ ID NO: 339317 - DNA, 19 bp, Homo sapiens
  siRNA target sequence for KIAA0982 (NM_014023.1,1583-1601).
ccattggttggaacatcaa

SEQ ID NO: 339318 - DNA, 19 bp, Homo sapiens
  siRNA target sequence for KIAA0982 (NM_014023.1,1599-1617).
caacatccctgcattgcta

SEQ ID NO: 339319 - DNA, 19 bp, Homo sapiens
  siRNA target sequence for KIAA0982 (NM_014023.1,1609-1627).
gcattgctacaagaaaaat

SEQ ID NO: 339320 - DNA, 19 bp, Homo sapiens
  siRNA target sequence for OSTM1 (NM_014028.2,514-532).
ggcagatagaatgcaaata

SEQ ID NO: 339321 - DNA, 19 bp, Homo sapiens
  siRNA target sequence for OSTM1 (NM_014028.2,536-554).
gtgattctctcagaatttt

SEQ ID NO: 339322 - DNA, 19 bp, Homo sapiens
  siRNA target sequence for OSTM1 (NM_014028.2,538-556).
gattctctcagaatttttt

SEQ ID NO: 339323 - DNA, 19 bp, Homo sapiens
  siRNA target sequence for OSTM1 (NM_014028.2,542-560).
ctctcagaattttttaata

SEQ ID NO: 339324 - DNA, 19 bp, Homo sapiens
  siRNA target sequence for OSTM1 (NM_014028.2,655-673).
caccctgacctgctttgaa

SEQ ID NO: 339325 - DNA, 19 bp, Homo sapiens
  siRNA target sequence for OSTM1 (NM_014028.2,659-677).
ctgacctgctttgaacata

SEQ ID NO: 339326 - DNA, 19 bp, Homo sapiens
  siRNA target sequence for OSTM1 (NM_014028.2,685-703).
ggggaatgcacatagtctt

SEQ ID NO: 339327 - DNA, 19 bp, Homo sapiens
  siRNA target sequence for OSTM1 (NM_014028.2,687-705).
ggaatgcacatagtctttt

SEQ ID NO: 339328 - DNA, 19 bp, Homo sapiens
  siRNA target sequence for OSTM1 (NM_014028.2,692-710).
gcacatagtcttttacaga

SEQ ID NO: 339329 - DNA, 19 bp, Homo sapiens
  siRNA target sequence for OSTM1 (NM_014028.2,742-760).
ccgtgaagcatacaaaact

SEQ ID NO: 339330 - DNA, 19 bp, Homo sapiens
  siRNA target sequence for OSTM1 (NM_014028.2,768-786).
gtctgtacagtgaaatgca

SEQ ID NO: 339331 - DNA, 19 bp, Homo sapiens
  siRNA target sequence for OSTM1 (NM_014028.2,811-829).
ggctgaacctggaacacat

SEQ ID NO: 339332 - DNA, 19 bp, Homo sapiens
  siRNA target sequence for OSTM1 (NM_014028.2,872-890).
ctatggagtcgaactttca

SEQ ID NO: 339333 - DNA, 19 bp, Homo sapiens
  siRNA target sequence for OSTM1 (NM_014028.2,909-927).
gtgacacagtgcctgtaat

SEQ ID NO: 339334 - DNA, 19 bp, Homo sapiens
  siRNA target sequence for OSTM1 (NM_014028.2,1033-1051).
gtccagtaccagttttgca

SEQ ID NO: 339335 - DNA, 19 bp, Homo sapiens
  siRNA target sequence for DKFZP586A0522 (NM_014033.2,328-346).
gcagggtgacctgtattga

SEQ ID NO: 339336 - DNA, 19 bp, Homo sapiens
  siRNA target sequence for DKFZP586A0522 (NM_014033.2,353-371).
ccccaactttgagaagttt

SEQ ID NO: 339337 - DNA, 19 bp, Homo sapiens
  siRNA target sequence for DKFZP586A0522 (NM_014033.2,549-567).
ccgggaggggctttctatt

SEQ ID NO: 339338 - DNA, 19 bp, Homo sapiens
  siRNA target sequence for DKFZP586A0522 (NM_014033.2,550-568).
cgggaggggctttctattt

SEQ ID NO: 339339 - DNA, 19 bp, Homo sapiens
  siRNA target sequence for DKFZP586A0522 (NM_014033.2,592-610).
gttcgacttggaattactt

SEQ ID NO: 339340 - DNA, 19 bp, Homo sapiens
  siRNA target sequence for DKFZP586A0522 (NM_014033.2,752-770).
ggtgcgccctcatatctat

SEQ ID NO: 339341 - DNA, 19 bp, Homo sapiens
  siRNA target sequence for DKFZP586A0522 (NM_014033.2,756-774).
cgccctcatatctatggat

SEQ ID NO: 339342 - DNA, 19 bp, Homo sapiens
  siRNA target sequence for DKFZP586A0522 (NM_014033.2,757-775).
gccctcatatctatggata

SEQ ID NO: 339343 - DNA, 19 bp, Homo sapiens
  siRNA target sequence for DKFZP586A0522 (NM_014033.2,758-776).
ccctcatatctatggatat

SEQ ID NO: 339344 - DNA, 19 bp, Homo sapiens
  siRNA target sequence for PTD012 (NM_014039.2,202-220).
ggcttgtgctgagttttct

SEQ ID NO: 339345 - DNA, 19 bp, Homo sapiens
  siRNA target sequence for PTD012 (NM_014039.2,265-283).
ggggttaaaagataacttt

SEQ ID NO: 339346 - DNA, 19 bp, Homo sapiens
  siRNA target sequence for PTD012 (NM_014039.2,292-310).
ccaggtctctgtagttgat

SEQ ID NO: 339347 - DNA, 19 bp, Homo sapiens
  siRNA target sequence for PTD012 (NM_014039.2,293-311).
caggtctctgtagttgatt

SEQ ID NO: 339348 - DNA, 19 bp, Homo sapiens
  siRNA target sequence for PTD012 (NM_014039.2,308-326).
gattgccctgatttgacta

SEQ ID NO: 339349 - DNA, 19 bp, Homo sapiens
  siRNA target sequence for PTD012 (NM_014039.2,324-342).
ctaaggaaccctttacctt

SEQ ID NO: 339350 - DNA, 19 bp, Homo sapiens
  siRNA target sequence for PTD012 (NM_014039.2,333-351).
cctttacctttcctgtaaa

SEQ ID NO: 339351 - DNA, 19 bp, Homo sapiens
  siRNA target sequence for PTD012 (NM_014039.2,386-404).
ggaggtgtgccttacttat

SEQ ID NO: 339352 - DNA, 19 bp, Homo sapiens
  siRNA target sequence for PTD012 (NM_014039.2,508-526).
gactctcgggttcaattct

SEQ ID NO: 339353 - DNA, 19 bp, Homo sapiens
  siRNA target sequence for PTD012 (NM_014039.2,510-528).
ctctcgggttcaattctga

SEQ ID NO: 339354 - DNA, 19 bp, Homo sapiens
  siRNA target sequence for PTD012 (NM_014039.2,515-533).
gggttcaattctgagttta

SEQ ID NO: 339355 - DNA, 19 bp, Homo sapiens
  siRNA target sequence for PTD012 (NM_014039.2,516-534).
ggttcaattctgagtttat

SEQ ID NO: 339356 - DNA, 19 bp, Homo sapiens
  siRNA target sequence for PTD012 (NM_014039.2,570-588).
ctgtaaatggaagttactt

SEQ ID NO: 339357 - DNA, 19 bp, Homo sapiens
  siRNA target sequence for PTD012 (NM_014039.2,614-632).
gggtgcctactggagaaat

SEQ ID NO: 339358 - DNA, 19 bp, Homo sapiens
  siRNA target sequence for PTD012 (NM_014039.2,615-633).
ggtgcctactggagaaata

SEQ ID NO: 339359 - DNA, 19 bp, Homo sapiens
  siRNA target sequence for PTD012 (NM_014039.2,634-652).
cagtgagaaatgtcatgat

SEQ ID NO: 339360 - DNA, 19 bp, Homo sapiens
  siRNA target sequence for PTD012 (NM_014039.2,660-678).
gtgcattactggctaatct

SEQ ID NO: 339361 - DNA, 19 bp, Homo sapiens
  siRNA target sequence for PTD012 (NM_014039.2,662-680).
gcattactggctaatcttt

SEQ ID NO: 339362 - DNA, 19 bp, Homo sapiens
  siRNA target sequence for PTD012 (NM_014039.2,701-719).
ggcaagcctgcagaatttt

SEQ ID NO: 339363 - DNA, 19 bp, Homo sapiens
  siRNA target sequence for PTD012 (NM_014039.2,816-834).
gagacccagggtttgattt

SEQ ID NO: 339364 - DNA, 19 bp, Homo sapiens
  siRNA target sequence for PTD012 (NM_014039.2,836-854).
cgactggagcacactcatt

SEQ ID NO: 339365 - DNA, 19 bp, Homo sapiens
  siRNA target sequence for PTD012 (NM_014039.2,876-894).
gtggacactaccattatga

SEQ ID NO: 339366 - DNA, 19 bp, Homo sapiens
  siRNA target sequence for PTD012 (NM_014039.2,878-896).
ggacactaccattatgaca

SEQ ID NO: 339367 - DNA, 19 bp, Homo sapiens
  siRNA target sequence for PTD012 (NM_014039.2,943-961).
gtttctctatcgcattgat

SEQ ID NO: 339368 - DNA, 19 bp, Homo sapiens
  siRNA target sequence for PTD012 (NM_014039.2,954-972).
gcattgatcaaccaaaaga

SEQ ID NO: 339369 - DNA, 19 bp, Homo sapiens
  siRNA target sequence for PTD012 (NM_014039.2,965-983).
ccaaaagagacgcattcaa

SEQ ID NO: 339370 - DNA, 19 bp, Homo sapiens
  siRNA target sequence for PTD012 (NM_014039.2,966-984).
caaaagagacgcattcaat

SEQ ID NO: 339371 - DNA, 19 bp, Homo sapiens
  siRNA target sequence for DKFZP564M082 (NM_014042.1,264-282).
ctgagactctgtggtttaa

SEQ ID NO: 339372 - DNA, 19 bp, Homo sapiens
  siRNA target sequence for DKFZP564M082 (NM_014042.1,354-372).
gcatcgcggagaaagacaa

SEQ ID NO: 339373 - DNA, 19 bp, Homo sapiens
  siRNA target sequence for DKFZP564M082 (NM_014042.1,396-414).
cagcctcagagcactatga

SEQ ID NO: 339374 - DNA, 19 bp, Homo sapiens
  siRNA target sequence for DKFZP564M082 (NM_014042.1,496-514).
cgagatgaatgactacaat

SEQ ID NO: 339375 - DNA, 19 bp, Homo sapiens
  siRNA target sequence for DKFZP564O123 (NM_014043.2,143-161).
ggtacacagagggctataa

SEQ ID NO: 339376 - DNA, 19 bp, Homo sapiens
  siRNA target sequence for DKFZP564O123 (NM_014043.2,163-181).
cagagatcgagcagcttta

SEQ ID NO: 339377 - DNA, 19 bp, Homo sapiens
  siRNA target sequence for DKFZP564O123 (NM_014043.2,167-185).
gatcgagcagctttagaga

SEQ ID NO: 339378 - DNA, 19 bp, Homo sapiens
  siRNA target sequence for DKFZP564O123 (NM_014043.2,241-259).
ggaagcttgcaaagtttta

SEQ ID NO: 339379 - DNA, 19 bp, Homo sapiens
  siRNA target sequence for DKFZP564O123 (NM_014043.2,272-290).
gtgcatctacggaaacaga

SEQ ID NO: 339380 - DNA, 19 bp, Homo sapiens
  siRNA target sequence for DKFZP564O123 (NM_014043.2,295-313).
gagaacttttgctgtaagt

SEQ ID NO: 339381 - DNA, 19 bp, Homo sapiens
  siRNA target sequence for DKFZP564O123 (NM_014043.2,367-385).
gatggctggagcaatgtct

SEQ ID NO: 339382 - DNA, 19 bp, Homo sapiens
  siRNA target sequence for DKFZP564O123 (NM_014043.2,421-439).
gatggatccacaaaagaca

SEQ ID NO: 339383 - DNA, 19 bp, Homo sapiens
  siRNA target sequence for DKFZP564O123 (NM_014043.2,520-538).
catctttgacggttctgat

SEQ ID NO: 339384 - DNA, 19 bp, Homo sapiens
  siRNA target sequence for DKFZP564O123 (NM_014043.2,552-570).
gccaggatattgtgaatca

SEQ ID NO: 339385 - DNA, 19 bp, Homo sapiens
  siRNA target sequence for DKFZP564O123 (NM_014043.2,626-644).
gctgctcgaagcttaccat

SEQ ID NO: 339386 - DNA, 19 bp, Homo sapiens
  siRNA target sequence for DKFZP564O123 (NM_014043.2,661-679).
ggctacaatctcagatgaa

SEQ ID NO: 339387 - DNA, 19 bp, Homo sapiens
  siRNA target sequence for DKFZP564O123 (NM_014043.2,663-681).
ctacaatctcagatgaaga

SEQ ID NO: 339388 - DNA, 19 bp, Homo sapiens
  siRNA target sequence for GMH1 (NM_014044.4,1187-1205).
ccgagtacttcagtgaatt

SEQ ID NO: 339389 - DNA, 19 bp, Homo sapiens
  siRNA target sequence for GMH1 (NM_014044.4,1191-1209).
gtacttcagtgaattcctt

SEQ ID NO: 339390 - DNA, 19 bp, Homo sapiens
  siRNA target sequence for GMH1 (NM_014044.4,1266-1284).
cgaaacgctacaaatatct

SEQ ID NO: 339391 - DNA, 19 bp, Homo sapiens
  siRNA target sequence for GMH1 (NM_014044.4,1353-1371).
catccccacagagagttta

SEQ ID NO: 339392 - DNA, 19 bp, Homo sapiens
  siRNA target sequence for GMH1 (NM_014044.4,1453-1471).
gctctgtgtgtccactata

SEQ ID NO: 339393 - DNA, 19 bp, Homo sapiens
  siRNA target sequence for GMH1 (NM_014044.4,1495-1513).
gggattctttgagacaata

SEQ ID NO: 339394 - DNA, 19 bp, Homo sapiens
  siRNA target sequence for GMH1 (NM_014044.4,1496-1514).
ggattctttgagacaataa

SEQ ID NO: 339395 - DNA, 19 bp, Homo sapiens
  siRNA target sequence for GMH1 (NM_014044.4,1522-1540).
cctttgggttgtactcata

SEQ ID NO: 339396 - DNA, 19 bp, Homo sapiens
  siRNA target sequence for GMH1 (NM_014044.4,1528-1546).
ggttgtactcatagattgt

SEQ ID NO: 339397 - DNA, 19 bp, Homo sapiens
  siRNA target sequence for GMH1 (NM_014044.4,1557-1575).
gtcttctgatagcaacttt

SEQ ID NO: 339398 - DNA, 19 bp, Homo sapiens
  siRNA target sequence for GMH1 (NM_014044.4,1562-1580).
ctgatagcaactttaatgt

SEQ ID NO: 339399 - DNA, 19 bp, Homo sapiens
  siRNA target sequence for GMH1 (NM_014044.4,1581-1599).
ggttcatctctaacaagta

SEQ ID NO: 339400 - DNA, 19 bp, Homo sapiens
  siRNA target sequence for GMH1 (NM_014044.4,1582-1600).
gttcatctctaacaagtat

SEQ ID NO: 339401 - DNA, 19 bp, Homo sapiens
  siRNA target sequence for GMH1 (NM_014044.4,1590-1608).
ctaacaagtatttagtgaa

SEQ ID NO: 339402 - DNA, 19 bp, Homo sapiens
  siRNA target sequence for GMH1 (NM_014044.4,1638-1656).
ggggctatgcttttgatgt

SEQ ID NO: 339403 - DNA, 19 bp, Homo sapiens
  siRNA target sequence for GMH1 (NM_014044.4,1647-1665).
cttttgatgtgcatctcaa

SEQ ID NO: 339404 - DNA, 19 bp, Homo sapiens
  siRNA target sequence for GMH1 (NM_014044.4,1652-1670).
gatgtgcatctcaatgctt

SEQ ID NO: 339405 - DNA, 19 bp, Homo sapiens
  siRNA target sequence for GMH1 (NM_014044.4,1655-1673).
gtgcatctcaatgcttttt

SEQ ID NO: 339406 - DNA, 19 bp, Homo sapiens
  siRNA target sequence for GMH1 (NM_014044.4,1657-1675).
gcatctcaatgctttttat

SEQ ID NO: 339407 - DNA, 19 bp, Homo sapiens
  siRNA target sequence for GMH1 (NM_014044.4,1732-1750).
gacagacacatttattgga

SEQ ID NO: 339408 - DNA, 19 bp, Homo sapiens
  siRNA target sequence for GMH1 (NM_014044.4,1734-1752).
cagacacatttattggata

SEQ ID NO: 339409 - DNA, 19 bp, Homo sapiens
  siRNA target sequence for GMH1 (NM_014044.4,1757-1775).
gttggaaataccttatggt

SEQ ID NO: 339410 - DNA, 19 bp, Homo sapiens
  siRNA target sequence for GMH1 (NM_014044.4,1777-1795).
ggttgcagttggctattat

SEQ ID NO: 339411 - DNA, 19 bp, Homo sapiens
  siRNA target sequence for GMH1 (NM_014044.4,1778-1796).
gttgcagttggctattata

SEQ ID NO: 339412 - DNA, 19 bp, Homo sapiens
  siRNA target sequence for GMH1 (NM_014044.4,1781-1799).
gcagttggctattatatct

SEQ ID NO: 339413 - DNA, 19 bp, Homo sapiens
  siRNA target sequence for GMH1 (NM_014044.4,1782-1800).
cagttggctattatatcta

SEQ ID NO: 339414 - DNA, 19 bp, Homo sapiens
  siRNA target sequence for GMH1 (NM_014044.4,1939-1957).
ctataagtacagagtgaaa

SEQ ID NO: 339415 - DNA, 19 bp, Homo sapiens
  siRNA target sequence for HSPC023 (NM_014047.1,40-58).
cacaaacccgcaaagagta

SEQ ID NO: 339416 - DNA, 19 bp, Homo sapiens
  siRNA target sequence for HSPC023 (NM_014047.1,98-116).
gaaaaggcggtcgtgttat

SEQ ID NO: 339417 - DNA, 19 bp, Homo sapiens
  siRNA target sequence for CDV-1 (NM_014055.2,511-529).
gtgatcaaattaaattcat

SEQ ID NO: 339418 - DNA, 19 bp, Homo sapiens
  siRNA target sequence for CDV-1 (NM_014055.2,681-699).
gagcagacagccaaacgaa

SEQ ID NO: 339419 - DNA, 19 bp, Homo sapiens
  siRNA target sequence for CDV-1 (NM_014055.2,704-722).
gagccttcttggtattctt

SEQ ID NO: 339420 - DNA, 19 bp, Homo sapiens
  siRNA target sequence for CDV-1 (NM_014055.2,711-729).
cttggtattcttaagtaca

SEQ ID NO: 339421 - DNA, 19 bp, Homo sapiens
  siRNA target sequence for CDV-1 (NM_014055.2,746-764).
cacagatatgagtactttt

SEQ ID NO: 339422 - DNA, 19 bp, Homo sapiens
  siRNA target sequence for CDV-1 (NM_014055.2,772-790).
gtttggtgattggaagtaa

SEQ ID NO: 339423 - DNA, 19 bp, Homo sapiens
  siRNA target sequence for CDV-1 (NM_014055.2,776-794).
ggtgattggaagtaaacct

SEQ ID NO: 339424 - DNA, 19 bp, Homo sapiens
  siRNA target sequence for CDV-1 (NM_014055.2,852-870).
gcatatttagctcgttttt

SEQ ID NO: 339425 - DNA, 19 bp, Homo sapiens
  siRNA target sequence for CDV-1 (NM_014055.2,954-972).
gcctttaaaactttgcata

SEQ ID NO: 339426 - DNA, 19 bp, Homo sapiens
  siRNA target sequence for CDV-1 (NM_014055.2,1069-1087).
gagttgaacatttgaagaa

SEQ ID NO: 339427 - DNA, 19 bp, Homo sapiens
  siRNA target sequence for CDV-1 (NM_014055.2,1091-1109).
ggttgagacagctcagaat

SEQ ID NO: 339428 - DNA, 19 bp, Homo sapiens
  siRNA target sequence for CDV-1 (NM_014055.2,1302-1320).
ctagaggaggagataaaat

SEQ ID NO: 339429 - DNA, 19 bp, Homo sapiens
  siRNA target sequence for CDV-1 (NM_014055.2,1335-1353).
gtaactgaaaaatttccta

SEQ ID NO: 339430 - DNA, 19 bp, Homo sapiens
  siRNA target sequence for CDV-1 (NM_014055.2,1411-1429).
cagctatgggccattctga

SEQ ID NO: 339431 - DNA, 19 bp, Homo sapiens
  siRNA target sequence for CDV-1 (NM_014055.2,1521-1539).
ggcaaactctcactgtata

SEQ ID NO: 339432 - DNA, 19 bp, Homo sapiens
  siRNA target sequence for CDV-1 (NM_014055.2,1540-1558).
ggcaacaggcatctatcat

SEQ ID NO: 339433 - DNA, 19 bp, Homo sapiens
  siRNA target sequence for CDV-1 (NM_014055.2,1552-1570).
ctatcatttcccgtaaaaa

SEQ ID NO: 339434 - DNA, 19 bp, Homo sapiens
  siRNA target sequence for CDV-1 (NM_014055.2,1576-1594).
ccaaagctgaggaacttca

SEQ ID NO: 339435 - DNA, 19 bp, Homo sapiens
  siRNA target sequence for CDV-1 (NM_014055.2,1686-1704).
ggagatgagttcaaacgat

SEQ ID NO: 339436 - DNA, 19 bp, Homo sapiens
  siRNA target sequence for CDV-1 (NM_014055.2,1692-1710).
gagttcaaacgatatgtca

SEQ ID NO: 339437 - DNA, 19 bp, Homo sapiens
  siRNA target sequence for CDV-1 (NM_014055.2,1694-1712).
gttcaaacgatatgtcaat

SEQ ID NO: 339438 - DNA, 19 bp, Homo sapiens
  siRNA target sequence for CDV-1 (NM_014055.2,1745-1763).
gaagcatcagataatagct

SEQ ID NO: 339439 - DNA, 19 bp, Homo sapiens
  siRNA target sequence for CDV-1 (NM_014055.2,1774-1792).
ctgaattcggtcttttgca

SEQ ID NO: 339440 - DNA, 19 bp, Homo sapiens
  siRNA target sequence for CDV-1 (NM_014055.2,1790-1808).
gcagaggactgaagaactt

SEQ ID NO: 339441 - DNA, 19 bp, Homo sapiens
  siRNA target sequence for CDV-1 (NM_014055.2,1795-1813).
ggactgaagaacttcttaa

SEQ ID NO: 339442 - DNA, 19 bp, Homo sapiens
  siRNA target sequence for CDV-1 (NM_014055.2,1809-1827).
cttaagcaacgtcatgaaa

SEQ ID NO: 339443 - DNA, 19 bp, Homo sapiens
  siRNA target sequence for CDV-1 (NM_014055.2,1814-1832).
gcaacgtcatgaaaatatt

SEQ ID NO: 339444 - DNA, 19 bp, Homo sapiens
  siRNA target sequence for CDV-1 (NM_014055.2,1866-1884).
ggtatatctggatatagtt

SEQ ID NO: 339445 - DNA, 19 bp, Homo sapiens
  siRNA target sequence for CDV-1 (NM_014055.2,1867-1885).
gtatatctggatatagtta

SEQ ID NO: 339446 - DNA, 19 bp, Homo sapiens
  siRNA target sequence for CDV-1 (NM_014055.2,1944-1962).
ggacgaacattggatgata

SEQ ID NO: 339447 - DNA, 19 bp, Homo sapiens
  siRNA target sequence for CDV-1 (NM_014055.2,1947-1965).
cgaacattggatgatatgt

SEQ ID NO: 339448 - DNA, 19 bp, Homo sapiens
  siRNA target sequence for CDV-1 (NM_014055.2,2011-2029).
cagctcttgcctcagttat

SEQ ID NO: 339449 - DNA, 19 bp, Homo sapiens
  siRNA target sequence for CDV-1 (NM_014055.2,2013-2031).
gctcttgcctcagttataa

SEQ ID NO: 339450 - DNA, 19 bp, Homo sapiens
  siRNA target sequence for CDV-1 (NM_014055.2,2048-2066).
gcgtcaaaaatatcaagaa

SEQ ID NO: 339451 - DNA, 19 bp, Homo sapiens
  siRNA target sequence for CDV-1 (NM_014055.2,2124-2142).
gaaagcaatcggtccaaat

SEQ ID NO: 339452 - DNA, 19 bp, Homo sapiens
  siRNA target sequence for CDV-1 (NM_014055.2,2128-2146).
gcaatcggtccaaattaga

SEQ ID NO: 339453 - DNA, 19 bp, Homo sapiens
  siRNA target sequence for CDV-1 (NM_014055.2,2129-2147).
caatcggtccaaattagaa

SEQ ID NO: 339454 - DNA, 19 bp, Homo sapiens
  siRNA target sequence for CDV-1 (NM_014055.2,2161-2179).
gactccgtgaagaatgtct

SEQ ID NO: 339455 - DNA, 19 bp, Homo sapiens
  siRNA target sequence for CDV-1 (NM_014055.2,2191-2209).
gtagataccattatacaaa

SEQ ID NO: 339456 - DNA, 19 bp, Homo sapiens
  siRNA target sequence for CDV-1 (NM_014055.2,2222-2240).
gaacctagaagttcaactt

SEQ ID NO: 339457 - DNA, 19 bp, Homo sapiens
  siRNA target sequence for CDV-1 (NM_014055.2,2242-2260).
gtcgtgctactgatgagat

SEQ ID NO: 339458 - DNA, 19 bp, Homo sapiens
  siRNA target sequence for CDV-1 (NM_014055.2,2264-2282).
ggcatatatctcttctgat

SEQ ID NO: 339459 - DNA, 19 bp, Homo sapiens
  siRNA target sequence for CDV-1 (NM_014055.2,2300-2318).
ggcaattagggaacagtat

SEQ ID NO: 339460 - DNA, 19 bp, Homo sapiens
  siRNA target sequence for CDV-1 (NM_014055.2,2301-2319).
gcaattagggaacagtata

SEQ ID NO: 339461 - DNA, 19 bp, Homo sapiens
  siRNA target sequence for CDV-1 (NM_014055.2,2422-2440).
ggcgtgatttggaacaatt

SEQ ID NO: 339462 - DNA, 19 bp, Homo sapiens
  siRNA target sequence for CDV-1 (NM_014055.2,2423-2441).
gcgtgatttggaacaatta

SEQ ID NO: 339463 - DNA, 19 bp, Homo sapiens
  siRNA target sequence for CDV-1 (NM_014055.2,2485-2503).
cttccattggtcaggtaat

SEQ ID NO: 339464 - DNA, 19 bp, Homo sapiens
  siRNA target sequence for CDV-1 (NM_014055.2,2488-2506).
ccattggtcaggtaattca

SEQ ID NO: 339465 - DNA, 19 bp, Homo sapiens
  siRNA target sequence for CDV-1 (NM_014055.2,2517-2535).
gaggaccggctaatactgt

SEQ ID NO: 339466 - DNA, 19 bp, Homo sapiens
  siRNA target sequence for DESC1 (NM_014058.2,372-390).
gagtgttggctcatatgct

SEQ ID NO: 339467 - DNA, 19 bp, Homo sapiens
  siRNA target sequence for DESC1 (NM_014058.2,379-397).
ggctcatatgctgttgatt

SEQ ID NO: 339468 - DNA, 19 bp, Homo sapiens
  siRNA target sequence for DESC1 (NM_014058.2,383-401).
catatgctgttgatttgta

SEQ ID NO: 339469 - DNA, 19 bp, Homo sapiens
  siRNA target sequence for DESC1 (NM_014058.2,418-436).
ggatcctgaaactgtagat

SEQ ID NO: 339470 - DNA, 19 bp, Homo sapiens
  siRNA target sequence for DESC1 (NM_014058.2,477-495).
ctgtaggaccccctaaagt

SEQ ID NO: 339471 - DNA, 19 bp, Homo sapiens
  siRNA target sequence for DESC1 (NM_014058.2,494-512).
gtagatcctcactcagtta

SEQ ID NO: 339472 - DNA, 19 bp, Homo sapiens
  siRNA target sequence for DESC1 (NM_014058.2,497-515).
gatcctcactcagttaaaa

SEQ ID NO: 339473 - DNA, 19 bp, Homo sapiens
  siRNA target sequence for DESC1 (NM_014058.2,803-821).
cggggtctccggagaataa

SEQ ID NO: 339474 - DNA, 19 bp, Homo sapiens
  siRNA target sequence for DESC1 (NM_014058.2,804-822).
ggggtctccggagaataat

SEQ ID NO: 339475 - DNA, 19 bp, Homo sapiens
  siRNA target sequence for DESC1 (NM_014058.2,805-823).
gggtctccggagaataatt

SEQ ID NO: 339476 - DNA, 19 bp, Homo sapiens
  siRNA target sequence for DESC1 (NM_014058.2,844-862).
cccatcacatgactatgat

SEQ ID NO: 339477 - DNA, 19 bp, Homo sapiens
  siRNA target sequence for DESC1 (NM_014058.2,845-863).
ccatcacatgactatgata

SEQ ID NO: 339478 - DNA, 19 bp, Homo sapiens
  siRNA target sequence for DESC1 (NM_014058.2,846-864).
catcacatgactatgatat

SEQ ID NO: 339479 - DNA, 19 bp, Homo sapiens
  siRNA target sequence for DESC1 (NM_014058.2,926-944).
cctgatgcatcctatgagt

SEQ ID NO: 339480 - DNA, 19 bp, Homo sapiens
  siRNA target sequence for DESC1 (NM_014058.2,953-971).
ggtgatgtgatgtttgtga

SEQ ID NO: 339481 - DNA, 19 bp, Homo sapiens
  siRNA target sequence for DESC1 (NM_014058.2,999-1017).
gttacagtcaaaatcatct

SEQ ID NO: 339482 - DNA, 19 bp, Homo sapiens
  siRNA target sequence for DESC1 (NM_014058.2,1026-1044).
cacaggtgactctcataga

SEQ ID NO: 339483 - DNA, 19 bp, Homo sapiens
  siRNA target sequence for DESC1 (NM_014058.2,1037-1055).
ctcatagacgctacaactt

SEQ ID NO: 339484 - DNA, 19 bp, Homo sapiens
  siRNA target sequence for DESC1 (NM_014058.2,1045-1063).
cgctacaacttgcaatgaa

SEQ ID NO: 339485 - DNA, 19 bp, Homo sapiens
  siRNA target sequence for DESC1 (NM_014058.2,1056-1074).
gcaatgaacctcaagctta

SEQ ID NO: 339486 - DNA, 19 bp, Homo sapiens
  siRNA target sequence for DESC1 (NM_014058.2,1082-1100).
gccataactcctagaatgt

SEQ ID NO: 339487 - DNA, 19 bp, Homo sapiens
  siRNA target sequence for DESC1 (NM_014058.2,1244-1262).
ggtgtttatactagagtta

SEQ ID NO: 339488 - DNA, 19 bp, Homo sapiens
  siRNA target sequence for DESC1 (NM_014058.2,1265-1283).
gccttgcgggactggatta

SEQ ID NO: 339489 - DNA, 19 bp, Homo sapiens
  siRNA target sequence for DESC1 (NM_014058.2,1270-1288).
gcgggactggattacttca

SEQ ID NO: 339490 - DNA, 19 bp, Homo sapiens
  siRNA target sequence for DESC1 (NM_014058.2,1271-1289).
cgggactggattacttcaa

SEQ ID NO: 339491 - DNA, 19 bp, Homo sapiens
  siRNA target sequence for MAGEH1 (NM_014061.3,308-326).
cgagagccgcagaagagaa

SEQ ID NO: 339492 - DNA, 19 bp, Homo sapiens
  siRNA target sequence for MAGEH1 (NM_014061.3,479-497).
gcactgcccaagcacaaaa

SEQ ID NO: 339493 - DNA, 19 bp, Homo sapiens
  siRNA target sequence for MAGEH1 (NM_014061.3,551-569).
ctatattagcgctcatctt

SEQ ID NO: 339494 - DNA, 19 bp, Homo sapiens
  siRNA target sequence for MAGEH1 (NM_014061.3,672-690).
gatcgtcacagaagagttt

SEQ ID NO: 339495 - DNA, 19 bp, Homo sapiens
  siRNA target sequence for MAGEH1 (NM_014061.3,694-712).
cgcagagggtacctgattt

SEQ ID NO: 339496 - DNA, 19 bp, Homo sapiens
  siRNA target sequence for MAGEH1 (NM_014061.3,695-713).
gcagagggtacctgattta

SEQ ID NO: 339497 - DNA, 19 bp, Homo sapiens
  siRNA target sequence for MAGEH1 (NM_014061.3,731-749).
gcagtccggtggagtatga

SEQ ID NO: 339498 - DNA, 19 bp, Homo sapiens
  siRNA target sequence for MAGEH1 (NM_014061.3,734-752).
gtccggtggagtatgagtt

SEQ ID NO: 339499 - DNA, 19 bp, Homo sapiens
  siRNA target sequence for MAGEH1 (NM_014061.3,775-793).
gtggaatcgagcaaactga

SEQ ID NO: 339500 - DNA, 19 bp, Homo sapiens
  siRNA target sequence for MAGEH1 (NM_014061.3,777-795).
ggaatcgagcaaactgaaa

SEQ ID NO: 339501 - DNA, 19 bp, Homo sapiens
  siRNA target sequence for MAGEH1 (NM_014061.3,782-800).
cgagcaaactgaaagtcat

SEQ ID NO: 339502 - DNA, 19 bp, Homo sapiens
  siRNA target sequence for MAGEH1 (NM_014061.3,833-851).
ctaaagactggccttgtaa

SEQ ID NO: 339503 - DNA, 19 bp, Homo sapiens
  siRNA target sequence for MAGEH1 (NM_014061.3,883-901).
gttgaggctatcctcaatt

SEQ ID NO: 339504 - DNA, 19 bp, Homo sapiens
  siRNA target sequence for NOB1P (NM_014062.1,205-223).
gcggctggtgactgagttt

SEQ ID NO: 339505 - DNA, 19 bp, Homo sapiens
  siRNA target sequence for NOB1P (NM_014062.1,206-224).
cggctggtgactgagtttt

SEQ ID NO: 339506 - DNA, 19 bp, Homo sapiens
  siRNA target sequence for NOB1P (NM_014062.1,209-227).
ctggtgactgagttttcaa

SEQ ID NO: 339507 - DNA, 19 bp, Homo sapiens
  siRNA target sequence for NOB1P (NM_014062.1,312-330).
gggtgtctcacctaaaaca

SEQ ID NO: 339508 - DNA, 19 bp, Homo sapiens
  siRNA target sequence for NOB1P (NM_014062.1,313-331).
ggtgtctcacctaaaacaa

SEQ ID NO: 339509 - DNA, 19 bp, Homo sapiens
  siRNA target sequence for NOB1P (NM_014062.1,385-403).
gcacatttctggtttccat

SEQ ID NO: 339510 - DNA, 19 bp, Homo sapiens
  siRNA target sequence for HT002 (NM_014066.2,608-626).
cttggccagcgtggtattt

SEQ ID NO: 339511 - DNA, 19 bp, Homo sapiens
  siRNA target sequence for HT002 (NM_014066.2,703-721).
ggcgggtggatgtagcaat

SEQ ID NO: 339512 - DNA, 19 bp, Homo sapiens
  siRNA target sequence for LRP16 (NM_014067.2,336-354).
ggaaggaggcgaaatcctt

SEQ ID NO: 339513 - DNA, 19 bp, Homo sapiens
  siRNA target sequence for LRP16 (NM_014067.2,341-359).
gaggcgaaatcctttctga

SEQ ID NO: 339514 - DNA, 19 bp, Homo sapiens
  siRNA target sequence for LRP16 (NM_014067.2,377-395).
cagcgggaggaacattact

SEQ ID NO: 339515 - DNA, 19 bp, Homo sapiens
  siRNA target sequence for LRP16 (NM_014067.2,380-398).
cgggaggaacattacttct

SEQ ID NO: 339516 - DNA, 19 bp, Homo sapiens
  siRNA target sequence for LRP16 (NM_014067.2,598-616).
cgtggacggctgcattcat

SEQ ID NO: 339517 - DNA, 19 bp, Homo sapiens
  siRNA target sequence for LRP16 (NM_014067.2,999-1017).
gccggctcccccactactt

SEQ ID NO: 339518 - DNA, 19 bp, Homo sapiens
  siRNA target sequence for DKFZP586O0120 (NM_014077.1,138-156).
gcaatgggaacgagcaaaa

SEQ ID NO: 339519 - DNA, 19 bp, Homo sapiens
  siRNA target sequence for DKFZP586O0120 (NM_014077.1,139-157).
caatgggaacgagcaaaaa

SEQ ID NO: 339520 - DNA, 19 bp, Homo sapiens
  siRNA target sequence for DKFZP586O0120 (NM_014077.1,251-269).
cctaaagaaggcatccaaa

SEQ ID NO: 339521 - DNA, 19 bp, Homo sapiens
  siRNA target sequence for DKFZP586O0120 (NM_014077.1,313-331).
cactcacggagcattacga

SEQ ID NO: 339522 - DNA, 19 bp, Homo sapiens
  siRNA target sequence for PRO0297 (NM_014081.2,505-523).
gccttgccgtaggaaagta

SEQ ID NO: 339523 - DNA, 19 bp, Homo sapiens
  siRNA target sequence for PRO0297 (NM_014081.2,506-524).
ccttgccgtaggaaagtaa

SEQ ID NO: 339524 - DNA, 19 bp, Homo sapiens
  siRNA target sequence for PRO0297 (NM_014081.2,507-525).
cttgccgtaggaaagtaat

SEQ ID NO: 339525 - DNA, 19 bp, Homo sapiens
  siRNA target sequence for PRO0297 (NM_014081.2,510-528).
gccgtaggaaagtaattaa

SEQ ID NO: 339526 - DNA, 19 bp, Homo sapiens
  siRNA target sequence for PRO0297 (NM_014081.2,589-607).
gtatcctcaagtgagatta

SEQ ID NO: 339527 - DNA, 19 bp, Homo sapiens
  siRNA target sequence for PRO0297 (NM_014081.2,616-634).
gcaaacttcagccattgaa

SEQ ID NO: 339528 - DNA, 19 bp, Homo sapiens
  siRNA target sequence for PRO0297 (NM_014081.2,678-696).
ggagaaccactgttagcaa

SEQ ID NO: 339529 - DNA, 19 bp, Homo sapiens
  siRNA target sequence for PRO0297 (NM_014081.2,679-697).
gagaaccactgttagcaaa

SEQ ID NO: 339530 - DNA, 19 bp, Homo sapiens
  siRNA target sequence for PRO0297 (NM_014081.2,731-749).
gaacagatgcttcaacttt

SEQ ID NO: 339531 - DNA, 19 bp, Homo sapiens
  siRNA target sequence for PRO0297 (NM_014081.2,739-757).
gcttcaactttctcacaaa

SEQ ID NO: 339532 - DNA, 19 bp, Homo sapiens
  siRNA target sequence for PRO0297 (NM_014081.2,740-758).
cttcaactttctcacaaaa

SEQ ID NO: 339533 - DNA, 19 bp, Homo sapiens
  siRNA target sequence for NUPL1 (NM_014089.2,368-386).
ggaatagcaacaactataa

SEQ ID NO: 339534 - DNA, 19 bp, Homo sapiens
  siRNA target sequence for NUPL1 (NM_014089.2,404-422).
ggaacgccagccactacat

SEQ ID NO: 339535 - DNA, 19 bp, Homo sapiens
  siRNA target sequence for NUPL1 (NM_014089.2,438-456).
gcttcagtttaggattcaa

SEQ ID NO: 339536 - DNA, 19 bp, Homo sapiens
  siRNA target sequence for NUPL1 (NM_014089.2,439-457).
cttcagtttaggattcaat

SEQ ID NO: 339537 - DNA, 19 bp, Homo sapiens
  siRNA target sequence for NUPL1 (NM_014089.2,477-495).
caccatttgctctacctat

SEQ ID NO: 339538 - DNA, 19 bp, Homo sapiens
  siRNA target sequence for NUPL1 (NM_014089.2,479-497).
ccatttgctctacctatta

SEQ ID NO: 339539 - DNA, 19 bp, Homo sapiens
  siRNA target sequence for NUPL1 (NM_014089.2,509-527).
gctagcggtctgactcttt

SEQ ID NO: 339540 - DNA, 19 bp, Homo sapiens
  siRNA target sequence for NUPL1 (NM_014089.2,551-569).
gcagcatccacaggattta

SEQ ID NO: 339541 - DNA, 19 bp, Homo sapiens
  siRNA target sequence for NUPL1 (NM_014089.2,555-573).
catccacaggatttactct

SEQ ID NO: 339542 - DNA, 19 bp, Homo sapiens
  siRNA target sequence for NUPL1 (NM_014089.2,761-779).
ggccttggtggtatagatt

SEQ ID NO: 339543 - DNA, 19 bp, Homo sapiens
  siRNA target sequence for NUPL1 (NM_014089.2,767-785).
ggtggtatagatttcagta

SEQ ID NO: 339544 - DNA, 19 bp, Homo sapiens
  siRNA target sequence for NUPL1 (NM_014089.2,783-801).
gtagctcctcagataaaaa

SEQ ID NO: 339545 - DNA, 19 bp, Homo sapiens
  siRNA target sequence for NUPL1 (NM_014089.2,819-837).
caagaccagaggatagtaa

SEQ ID NO: 339546 - DNA, 19 bp, Homo sapiens
  siRNA target sequence for NUPL1 (NM_014089.2,868-886).
catctgccaggatgttgaa

SEQ ID NO: 339547 - DNA, 19 bp, Homo sapiens
  siRNA target sequence for NUPL1 (NM_014089.2,871-889).
ctgccaggatgttgaaaat

SEQ ID NO: 339548 - DNA, 19 bp, Homo sapiens
  siRNA target sequence for NUPL1 (NM_014089.2,907-925).
ggagcagaaacaagttcaa

SEQ ID NO: 339549 - DNA, 19 bp, Homo sapiens
  siRNA target sequence for NUPL1 (NM_014089.2,926-944).
gaagaaattagtagaatgt

SEQ ID NO: 339550 - DNA, 19 bp, Homo sapiens
  siRNA target sequence for NUPL1 (NM_014089.2,948-966).
caaaagcaatgcttaaggt

SEQ ID NO: 339551 - DNA, 19 bp, Homo sapiens
  siRNA target sequence for NUPL1 (NM_014089.2,954-972).
caatgcttaaggtacaaga

SEQ ID NO: 339552 - DNA, 19 bp, Homo sapiens
  siRNA target sequence for NUPL1 (NM_014089.2,1002-1020).
cgttggctgccaatggaat

SEQ ID NO: 339553 - DNA, 19 bp, Homo sapiens
  siRNA target sequence for NUPL1 (NM_014089.2,1003-1021).
gttggctgccaatggaata

SEQ ID NO: 339554 - DNA, 19 bp, Homo sapiens
  siRNA target sequence for NUPL1 (NM_014089.2,1007-1025).
gctgccaatggaatacaga

SEQ ID NO: 339555 - DNA, 19 bp, Homo sapiens
  siRNA target sequence for NUPL1 (NM_014089.2,1026-1044).
gaaacactctcaacattga

SEQ ID NO: 339556 - DNA, 19 bp, Homo sapiens
  siRNA target sequence for NUPL1 (NM_014089.2,1139-1157).
gctcctgctgactacttca

SEQ ID NO: 339557 - DNA, 19 bp, Homo sapiens
  siRNA target sequence for NUPL1 (NM_014089.2,1142-1160).
cctgctgactacttcagaa

SEQ ID NO: 339558 - DNA, 19 bp, Homo sapiens
  siRNA target sequence for NUPL1 (NM_014089.2,1158-1176).
gaatcttggttcagcaatt

SEQ ID NO: 339559 - DNA, 19 bp, Homo sapiens
  siRNA target sequence for NUPL1 (NM_014089.2,1195-1213).
gtacaggcagcagattgaa

SEQ ID NO: 339560 - DNA, 19 bp, Homo sapiens
  siRNA target sequence for NUPL1 (NM_014089.2,1229-1247).
cttgccactcaagcaaata

SEQ ID NO: 339561 - DNA, 19 bp, Homo sapiens
  siRNA target sequence for NUPL1 (NM_014089.2,1234-1252).
cactcaagcaaataattca

SEQ ID NO: 339562 - DNA, 19 bp, Homo sapiens
  siRNA target sequence for NUPL1 (NM_014089.2,1236-1254).
ctcaagcaaataattcaca

SEQ ID NO: 339563 - DNA, 19 bp, Homo sapiens
  siRNA target sequence for NUPL1 (NM_014089.2,1238-1256).
caagcaaataattcacata

SEQ ID NO: 339564 - DNA, 19 bp, Homo sapiens
  siRNA target sequence for NUPL1 (NM_014089.2,1260-1278).
cccctcaagatttgtcaat

SEQ ID NO: 339565 - DNA, 19 bp, Homo sapiens
  siRNA target sequence for NUPL1 (NM_014089.2,1311-1329).
ctttagcggcacaacttca

SEQ ID NO: 339566 - DNA, 19 bp, Homo sapiens
  siRNA target sequence for NUPL1 (NM_014089.2,1317-1335).
cggcacaacttcagtctat

SEQ ID NO: 339567 - DNA, 19 bp, Homo sapiens
  siRNA target sequence for NUPL1 (NM_014089.2,1318-1336).
ggcacaacttcagtctatt

SEQ ID NO: 339568 - DNA, 19 bp, Homo sapiens
  siRNA target sequence for NUPL1 (NM_014089.2,1332-1350).
ctattcatgaaaatgtaaa

SEQ ID NO: 339569 - DNA, 19 bp, Homo sapiens
  siRNA target sequence for NUPL1 (NM_014089.2,1445-1463).
cagaacacacccagagtta

SEQ ID NO: 339570 - DNA, 19 bp, Homo sapiens
  siRNA target sequence for NUPL1 (NM_014089.2,1450-1468).
cacacccagagttactact

SEQ ID NO: 339571 - DNA, 19 bp, Homo sapiens
  siRNA target sequence for NUPL1 (NM_014089.2,1513-1531).
catggctgcaacacttaca

SEQ ID NO: 339572 - DNA, 19 bp, Homo sapiens
  siRNA target sequence for NUPL1 (NM_014089.2,1561-1579).
gccatctctgggagttagt

SEQ ID NO: 339573 - DNA, 19 bp, Homo sapiens
  siRNA target sequence for NUPL1 (NM_014089.2,1563-1581).
catctctgggagttagttt

SEQ ID NO: 339574 - DNA, 19 bp, Homo sapiens
  siRNA target sequence for NUPL1 (NM_014089.2,1588-1606).
gccattcggctcaggtatt

SEQ ID NO: 339575 - DNA, 19 bp, Homo sapiens
  siRNA target sequence for NUPL1 (NM_014089.2,1609-1627).
cactggcttgcaatcaagt

SEQ ID NO: 339576 - DNA, 19 bp, Homo sapiens
  siRNA target sequence for NUPL1 (NM_014089.2,1619-1637).
caatcaagtggcttaggtt

SEQ ID NO: 339577 - DNA, 19 bp, Homo sapiens
  siRNA target sequence for NUPL1 (NM_014089.2,1626-1644).
gtggcttaggttcttcaaa

SEQ ID NO: 339578 - DNA, 19 bp, Homo sapiens
  siRNA target sequence for NUPL1 (NM_014089.2,1630-1648).
cttaggttcttcaaacctt

SEQ ID NO: 339579 - DNA, 19 bp, Homo sapiens
  siRNA target sequence for NUPL1 (NM_014089.2,1748-1766).
ggctttggcagctcaagta

SEQ ID NO: 339580 - DNA, 19 bp, Homo sapiens
  siRNA target sequence for NUPL1 (NM_014089.2,1750-1768).
ctttggcagctcaagtaca

SEQ ID NO: 339581 - DNA, 19 bp, Homo sapiens
  siRNA target sequence for NUPL1 (NM_014089.2,1802-1820).
gcatcagctggtttgactt

SEQ ID NO: 339582 - DNA, 19 bp, Homo sapiens
  siRNA target sequence for NUPL1 (NM_014089.2,1860-1878).
gaggacaactccttcagtt

SEQ ID NO: 339583 - DNA, 19 bp, Homo sapiens
  siRNA target sequence for NUPL1 (NM_014089.2,1865-1883).
caactccttcagttgaaga

SEQ ID NO: 339584 - DNA, 19 bp, Homo sapiens
  siRNA target sequence for PRO1914 (NM_014106.1,1236-1254).
gtaaattaaacccaagtta

SEQ ID NO: 339585 - DNA, 19 bp, Homo sapiens
  siRNA target sequence for PRO1914 (NM_014106.1,1288-1306).
gatcacccccacctactat

SEQ ID NO: 339586 - DNA, 19 bp, Homo sapiens
  siRNA target sequence for PRO1914 (NM_014106.1,1319-1337).
ccccctgtcaaaagaaagt

SEQ ID NO: 339587 - DNA, 19 bp, Homo sapiens
  siRNA target sequence for PRO1914 (NM_014106.1,1339-1357).
ctcagtttatgatgcaaaa

SEQ ID NO: 339588 - DNA, 19 bp, Homo sapiens
  siRNA target sequence for PRO1914 (NM_014106.1,1370-1388).
catttatccacattctcaa

SEQ ID NO: 339589 - DNA, 19 bp, Homo sapiens
  siRNA target sequence for PRO2086 (NM_014111.1,1254-1272).
gaattatgggagagaaata

SEQ ID NO: 339590 - DNA, 19 bp, Homo sapiens
  siRNA target sequence for PRO0132 (NM_014116.1,1647-1665).
ccacccttgtgcattggaa

SEQ ID NO: 339591 - DNA, 19 bp, Homo sapiens
  siRNA target sequence for PRO0132 (NM_014116.1,1722-1740).
cgtacatcacctctttcat

SEQ ID NO: 339592 - DNA, 19 bp, Homo sapiens
  siRNA target sequence for PRO0149 (NM_014117.2,649-667).
ccgccgtcaccaatctcta

SEQ ID NO: 339593 - DNA, 19 bp, Homo sapiens
  siRNA target sequence for PRO0149 (NM_014117.2,652-670).
ccgtcaccaatctctacaa

SEQ ID NO: 339594 - DNA, 19 bp, Homo sapiens
  siRNA target sequence for PRO0149 (NM_014117.2,653-671).
cgtcaccaatctctacaaa

SEQ ID NO: 339595 - DNA, 19 bp, Homo sapiens
  siRNA target sequence for PRO0149 (NM_014117.2,687-705).
catcaacgaagttttgata

SEQ ID NO: 339596 - DNA, 19 bp, Homo sapiens
  siRNA target sequence for PRO0149 (NM_014117.2,693-711).
cgaagttttgatattggaa

SEQ ID NO: 339597 - DNA, 19 bp, Homo sapiens
  siRNA target sequence for PRO0149 (NM_014117.2,697-715).
gttttgatattggaattca

SEQ ID NO: 339598 - DNA, 19 bp, Homo sapiens
  siRNA target sequence for PRO0149 (NM_014117.2,721-739).
gctatcagcgacgcaataa

SEQ ID NO: 339599 - DNA, 19 bp, Homo sapiens
  siRNA target sequence for PRO0149 (NM_014117.2,730-748).
gacgcaataaggatgtgtt

SEQ ID NO: 339600 - DNA, 19 bp, Homo sapiens
  siRNA target sequence for PRO0149 (NM_014117.2,775-793).
ctattcgtcgagaagattt

SEQ ID NO: 339601 - DNA, 19 bp, Homo sapiens
  siRNA target sequence for PRO0149 (NM_014117.2,780-798).
cgtcgagaagatttgatca

SEQ ID NO: 339602 - DNA, 19 bp, Homo sapiens
  siRNA target sequence for PRO0149 (NM_014117.2,866-884).
ccctaaccgagctacttca

SEQ ID NO: 339603 - DNA, 19 bp, Homo sapiens
  siRNA target sequence for PRO0149 (NM_014117.2,867-885).
cctaaccgagctacttcaa

SEQ ID NO: 339604 - DNA, 19 bp, Homo sapiens
  siRNA target sequence for PRO0149 (NM_014117.2,876-894).
gctacttcaacggaaacta

SEQ ID NO: 339605 - DNA, 19 bp, Homo sapiens
  siRNA target sequence for PRO0149 (NM_014117.2,887-905).
ggaaactagctcatctgta

SEQ ID NO: 339606 - DNA, 19 bp, Homo sapiens
  siRNA target sequence for PRO0149 (NM_014117.2,1048-1066).
gactccatgatgtcgattt

SEQ ID NO: 339607 - DNA, 19 bp, Homo sapiens
  siRNA target sequence for PRO0149 (NM_014117.2,1050-1068).
ctccatgatgtcgatttga

SEQ ID NO: 339608 - DNA, 19 bp, Homo sapiens
  siRNA target sequence for PRO0149 (NM_014117.2,1053-1071).
catgatgtcgatttgaaca

SEQ ID NO: 339609 - DNA, 19 bp, Homo sapiens
  siRNA target sequence for PRO0149 (NM_014117.2,1059-1077).
gtcgatttgaacactttca

SEQ ID NO: 339610 - DNA, 19 bp, Homo sapiens
  siRNA target sequence for PRO0149 (NM_014117.2,1103-1121).
ggacaatggtggaactaga

SEQ ID NO: 339611 - DNA, 19 bp, Homo sapiens
  siRNA target sequence for PRO0149 (NM_014117.2,1104-1122).
gacaatggtggaactagaa

SEQ ID NO: 339612 - DNA, 19 bp, Homo sapiens
  siRNA target sequence for PRO0149 (NM_014117.2,1139-1157).
gtgtggcgatgtcattaca

SEQ ID NO: 339613 - DNA, 19 bp, Homo sapiens
  siRNA target sequence for PRO0149 (NM_014117.2,1168-1186).
cccataaacgcaacagaat

SEQ ID NO: 339614 - DNA, 19 bp, Homo sapiens
  siRNA target sequence for PRO0149 (NM_014117.2,1170-1188).
cataaacgcaacagaatga

SEQ ID NO: 339615 - DNA, 19 bp, Homo sapiens
  siRNA target sequence for PRO0456 (NM_014127.1,686-704).
gttgtcagttcttctagat

SEQ ID NO: 339616 - DNA, 19 bp, Homo sapiens
  siRNA target sequence for PRO0456 (NM_014127.1,728-746).
gggtcatatggtaatttct

SEQ ID NO: 339617 - DNA, 19 bp, Homo sapiens
  siRNA target sequence for PRO0456 (NM_014127.1,730-748).
gtcatatggtaatttctct

SEQ ID NO: 339618 - DNA, 19 bp, Homo sapiens
  siRNA target sequence for PRO0456 (NM_014127.1,788-806).
gtggtggcaccatttgaca

SEQ ID NO: 339619 - DNA, 19 bp, Homo sapiens
  siRNA target sequence for PRO0456 (NM_014127.1,883-901).
ctaattgggaaaataagta

SEQ ID NO: 339620 - DNA, 19 bp, Homo sapiens
  siRNA target sequence for PRO0628 (NM_014134.1,566-584).
cctatactcacgcataact

SEQ ID NO: 339621 - DNA, 19 bp, Homo sapiens
  siRNA target sequence for PRO0628 (NM_014134.1,585-603).
gttaacacggcatttggta

SEQ ID NO: 339622 - DNA, 19 bp, Homo sapiens
  siRNA target sequence for PRO0628 (NM_014134.1,590-608).
cacggcatttggtactaaa

SEQ ID NO: 339623 - DNA, 19 bp, Homo sapiens
  siRNA target sequence for PRO0628 (NM_014134.1,592-610).
cggcatttggtactaaatt

SEQ ID NO: 339624 - DNA, 19 bp, Homo sapiens
  siRNA target sequence for PRO0628 (NM_014134.1,613-631).
cacacataagctttattat

SEQ ID NO: 339625 - DNA, 19 bp, Homo sapiens
  siRNA target sequence for PRO0628 (NM_014134.1,686-704).
ggtcactttaagcaactat

SEQ ID NO: 339626 - DNA, 19 bp, Homo sapiens
  siRNA target sequence for HSPC047 (NM_014147.1,217-235).
gagagccaagtttgcattt

SEQ ID NO: 339627 - DNA, 19 bp, Homo sapiens
  siRNA target sequence for HSPC049 (NM_014149.2,132-150).
gggttccgggtggataaga

SEQ ID NO: 339628 - DNA, 19 bp, Homo sapiens
  siRNA target sequence for HSPC049 (NM_014149.2,133-151).
ggttccgggtggataagat

SEQ ID NO: 339629 - DNA, 19 bp, Homo sapiens
  siRNA target sequence for HSPC049 (NM_014149.2,134-152).
gttccgggtggataagatt

SEQ ID NO: 339630 - DNA, 19 bp, Homo sapiens
  siRNA target sequence for HSPC049 (NM_014149.2,195-213).
gcccttcgggattattgga

SEQ ID NO: 339631 - DNA, 19 bp, Homo sapiens
  siRNA target sequence for HSPC049 (NM_014149.2,236-254).
cagccgcttggaggatata

SEQ ID NO: 339632 - DNA, 19 bp, Homo sapiens
  siRNA target sequence for HSPC049 (NM_014149.2,238-256).
gccgcttggaggatatata

SEQ ID NO: 339633 - DNA, 19 bp, Homo sapiens
  siRNA target sequence for HSPC049 (NM_014149.2,240-258).
cgcttggaggatatataca

SEQ ID NO: 339634 - DNA, 19 bp, Homo sapiens
  siRNA target sequence for HSPC049 (NM_014149.2,283-301).
ccagcctgtttcgatttta

SEQ ID NO: 339635 - DNA, 19 bp, Homo sapiens
  siRNA target sequence for HSPC049 (NM_014149.2,385-403).
ctgagtggaaggattggtt

SEQ ID NO: 339636 - DNA, 19 bp, Homo sapiens
  siRNA target sequence for HSPC049 (NM_014149.2,467-485).
gtgggctgacaccttcatt

SEQ ID NO: 339637 - DNA, 19 bp, Homo sapiens
  siRNA target sequence for HSPC049 (NM_014149.2,568-586).
ggactaaccaggttcaaga

SEQ ID NO: 339638 - DNA, 19 bp, Homo sapiens
  siRNA target sequence for HSPC049 (NM_014149.2,569-587).
gactaaccaggttcaagaa

SEQ ID NO: 339639 - DNA, 19 bp, Homo sapiens
  siRNA target sequence for HSPC049 (NM_014149.2,571-589).
ctaaccaggttcaagaaga

SEQ ID NO: 339640 - DNA, 19 bp, Homo sapiens
  siRNA target sequence for HSPC049 (NM_014149.2,597-615).
gttctgcgtcagaagcttt

SEQ ID NO: 339641 - DNA, 19 bp, Homo sapiens
  siRNA target sequence for HSPC049 (NM_014149.2,602-620).
gcgtcagaagctttttgca

SEQ ID NO: 339642 - DNA, 19 bp, Homo sapiens
  siRNA target sequence for HSPC049 (NM_014149.2,604-622).
gtcagaagctttttgcatt

SEQ ID NO: 339643 - DNA, 19 bp, Homo sapiens
  siRNA target sequence for HSPC049 (NM_014149.2,608-626).
gaagctttttgcattgcaa

SEQ ID NO: 339644 - DNA, 19 bp, Homo sapiens
  siRNA target sequence for HSPC049 (NM_014149.2,677-695).
ggccttggtccaacacaaa

SEQ ID NO: 339645 - DNA, 19 bp, Homo sapiens
  siRNA target sequence for HSPC049 (NM_014149.2,678-696).
gccttggtccaacacaaat

SEQ ID NO: 339646 - DNA, 19 bp, Homo sapiens
  siRNA target sequence for HSPC049 (NM_014149.2,749-767).
ggtgtgcagccaaaggaat

SEQ ID NO: 339647 - DNA, 19 bp, Homo sapiens
  siRNA target sequence for HSPC049 (NM_014149.2,808-826).
cgctgctgcctcagagtaa

SEQ ID NO: 339648 - DNA, 19 bp, Homo sapiens
  siRNA target sequence for HSPC049 (NM_014149.2,810-828).
ctgctgcctcagagtaaga

SEQ ID NO: 339649 - DNA, 19 bp, Homo sapiens
  siRNA target sequence for HSPC049 (NM_014149.2,1192-1210).
ccgagcagccctttattgt

SEQ ID NO: 339650 - DNA, 19 bp, Homo sapiens
  siRNA target sequence for HSPC049 (NM_014149.2,1298-1316).
cgtagatggggtcatcaaa

SEQ ID NO: 339651 - DNA, 19 bp, Homo sapiens
  siRNA target sequence for HSPC049 (NM_014149.2,1433-1451).
gggaacagtgcgtctctat

SEQ ID NO: 339652 - DNA, 19 bp, Homo sapiens
  siRNA target sequence for HSPC049 (NM_014149.2,1435-1453).
gaacagtgcgtctctatga

SEQ ID NO: 339653 - DNA, 19 bp, Homo sapiens
  siRNA target sequence for HSPC049 (NM_014149.2,1647-1665).
ctgtgggacacgaaaacca

SEQ ID NO: 339654 - DNA, 19 bp, Homo sapiens
  siRNA target sequence for HSPC049 (NM_014149.2,1692-1710).
gatccagaacccattgcta

SEQ ID NO: 339655 - DNA, 19 bp, Homo sapiens
  siRNA target sequence for HSPC049 (NM_014149.2,1698-1716).
gaacccattgctatcaact

SEQ ID NO: 339656 - DNA, 19 bp, Homo sapiens
  siRNA target sequence for HSPC049 (NM_014149.2,1701-1719).
cccattgctatcaactgta

SEQ ID NO: 339657 - DNA, 19 bp, Homo sapiens
  siRNA target sequence for HSPC049 (NM_014149.2,1768-1786).
gcgtcatccggctgtttga

SEQ ID NO: 339658 - DNA, 19 bp, Homo sapiens
  siRNA target sequence for HSPC049 (NM_014149.2,1884-1902).
ggcgaggacgggaagttca

SEQ ID NO: 339659 - DNA, 19 bp, Homo sapiens
  siRNA target sequence for HSPC049 (NM_014149.2,1885-1903).
gcgaggacgggaagttcat

SEQ ID NO: 339660 - DNA, 19 bp, Homo sapiens
  siRNA target sequence for HSPC049 (NM_014149.2,1996-2014).
gctacaagcaggttcaagt

SEQ ID NO: 339661 - DNA, 19 bp, Homo sapiens
  siRNA target sequence for HSPC049 (NM_014149.2,2023-2041).
gccgactcttcgcttttga

SEQ ID NO: 339662 - DNA, 19 bp, Homo sapiens
  siRNA target sequence for HSPC049 (NM_014149.2,2025-2043).
cgactcttcgcttttgact

SEQ ID NO: 339663 - DNA, 19 bp, Homo sapiens
  siRNA target sequence for HSPC056 (NM_014154.1,158-176).
ctagcagtcgccactatgt

SEQ ID NO: 339664 - DNA, 19 bp, Homo sapiens
  siRNA target sequence for HSPC056 (NM_014154.1,161-179).
gcagtcgccactatgttga

SEQ ID NO: 339665 - DNA, 19 bp, Homo sapiens
  siRNA target sequence for HSPC056 (NM_014154.1,171-189).
ctatgttgacaggctattt

SEQ ID NO: 339666 - DNA, 19 bp, Homo sapiens
  siRNA target sequence for HSPC056 (NM_014154.1,192-210).
ccctgatccccagaaagtt

SEQ ID NO: 339667 - DNA, 19 bp, Homo sapiens
  siRNA target sequence for HSPC056 (NM_014154.1,194-212).
ctgatccccagaaagttct

SEQ ID NO: 339668 - DNA, 19 bp, Homo sapiens
  siRNA target sequence for HSPC056 (NM_014154.1,211-229).
ctacaaggtgtcatagaca

SEQ ID NO: 339669 - DNA, 19 bp, Homo sapiens
  siRNA target sequence for HSPC056 (NM_014154.1,267-285).
caatctcattgttttagga

SEQ ID NO: 339670 - DNA, 19 bp, Homo sapiens
  siRNA target sequence for HSPC056 (NM_014154.1,283-301).
ggagctgttccaagattgt

SEQ ID NO: 339671 - DNA, 19 bp, Homo sapiens
  siRNA target sequence for HSPC056 (NM_014154.1,284-302).
gagctgttccaagattgtt

SEQ ID NO: 339672 - DNA, 19 bp, Homo sapiens
  siRNA target sequence for HSPC056 (NM_014154.1,403-421).
ctactggactgccatatta

SEQ ID NO: 339673 - DNA, 19 bp, Homo sapiens
  siRNA target sequence for HSPC056 (NM_014154.1,447-465).
gtccccagacctgaagttt

SEQ ID NO: 339674 - DNA, 19 bp, Homo sapiens
  siRNA target sequence for HSPC056 (NM_014154.1,449-467).
ccccagacctgaagtttat

SEQ ID NO: 339675 - DNA, 19 bp, Homo sapiens
  siRNA target sequence for HSPC056 (NM_014154.1,450-468).
cccagacctgaagtttatt

SEQ ID NO: 339676 - DNA, 19 bp, Homo sapiens
  siRNA target sequence for HSPC056 (NM_014154.1,520-538).
ccagaggagctactgtata

SEQ ID NO: 339677 - DNA, 19 bp, Homo sapiens
  siRNA target sequence for HSPC056 (NM_014154.1,525-543).
ggagctactgtatacagat

SEQ ID NO: 339678 - DNA, 19 bp, Homo sapiens
  siRNA target sequence for HSPC056 (NM_014154.1,587-605).
gctatacccaggagtacat

SEQ ID NO: 339679 - DNA, 19 bp, Homo sapiens
  siRNA target sequence for HSPC056 (NM_014154.1,635-653).
ggccagatcatcaaacaat

SEQ ID NO: 339680 - DNA, 19 bp, Homo sapiens
  siRNA target sequence for HSPC056 (NM_014154.1,773-791).
cgatgaccctggtaaatgt

SEQ ID NO: 339681 - DNA, 19 bp, Homo sapiens
  siRNA target sequence for HSPC056 (NM_014154.1,805-823).
gaattgttaccacagattt

SEQ ID NO: 339682 - DNA, 19 bp, Homo sapiens
  siRNA target sequence for HSPC056 (NM_014154.1,815-833).
cacagatttttgtgaagat

SEQ ID NO: 339683 - DNA, 19 bp, Homo sapiens
  siRNA target sequence for HSPC056 (NM_014154.1,864-882).
gctcacatcagcaaaatgt

SEQ ID NO: 339684 - DNA, 19 bp, Homo sapiens
  siRNA target sequence for HSPC056 (NM_014154.1,907-925).
gcaattcggacagatgata

SEQ ID NO: 339685 - DNA, 19 bp, Homo sapiens
  siRNA target sequence for HSPC056 (NM_014154.1,908-926).
caattcggacagatgataa

SEQ ID NO: 339686 - DNA, 19 bp, Homo sapiens
  siRNA target sequence for HSPC056 (NM_014154.1,913-931).
cggacagatgataactgta

SEQ ID NO: 339687 - DNA, 19 bp, Homo sapiens
  siRNA target sequence for HSPC056 (NM_014154.1,914-932).
ggacagatgataactgtat

SEQ ID NO: 339688 - DNA, 19 bp, Homo sapiens
  siRNA target sequence for HSPC056 (NM_014154.1,917-935).
cagatgataactgtattgt

SEQ ID NO: 339689 - DNA, 19 bp, Homo sapiens
  siRNA target sequence for HSPC063 (NM_014155.1,387-405).
gccactctatcaattaaca

SEQ ID NO: 339690 - DNA, 19 bp, Homo sapiens
  siRNA target sequence for HSPC063 (NM_014155.1,426-444).
ctagcagcagccagctata

SEQ ID NO: 339691 - DNA, 19 bp, Homo sapiens
  siRNA target sequence for HSPC063 (NM_014155.1,432-450).
gcagccagctatatgcaaa

SEQ ID NO: 339692 - DNA, 19 bp, Homo sapiens
  siRNA target sequence for HSPC063 (NM_014155.1,433-451).
cagccagctatatgcaaat

SEQ ID NO: 339693 - DNA, 19 bp, Homo sapiens
  siRNA target sequence for HSPC063 (NM_014155.1,435-453).
gccagctatatgcaaatgt

SEQ ID NO: 339694 - DNA, 19 bp, Homo sapiens
  siRNA target sequence for HSPC063 (NM_014155.1,436-454).
ccagctatatgcaaatgtt

SEQ ID NO: 339695 - DNA, 19 bp, Homo sapiens
  siRNA target sequence for HSPC063 (NM_014155.1,473-491).
ctcagagttcatgaaatca

SEQ ID NO: 339696 - DNA, 19 bp, Homo sapiens
  siRNA target sequence for HSPC063 (NM_014155.1,479-497).
gttcatgaaatcaagcatt

SEQ ID NO: 339697 - DNA, 19 bp, Homo sapiens
  siRNA target sequence for HSPC063 (NM_014155.1,662-680).
gcgcaaaagctacattgtt

SEQ ID NO: 339698 - DNA, 19 bp, Homo sapiens
  siRNA target sequence for HSPC063 (NM_014155.1,663-681).
cgcaaaagctacattgtta

SEQ ID NO: 339699 - DNA, 19 bp, Homo sapiens
  siRNA target sequence for HSPC063 (NM_014155.1,699-717).
gtaaagtgtggcacacaaa

SEQ ID NO: 339700 - DNA, 19 bp, Homo sapiens
  siRNA target sequence for HSPC063 (NM_014155.1,721-739).
gctcaccccaggtattgaa

SEQ ID NO: 339701 - DNA, 19 bp, Homo sapiens
  siRNA target sequence for HSPC063 (NM_014155.1,722-740).
ctcaccccaggtattgaat

SEQ ID NO: 339702 - DNA, 19 bp, Homo sapiens
  siRNA target sequence for HSPC063 (NM_014155.1,747-765).
gcttcctactcagaaaata

SEQ ID NO: 339703 - DNA, 19 bp, Homo sapiens
  siRNA target sequence for HSPC063 (NM_014155.1,866-884).
ccggactttagaattacct

SEQ ID NO: 339704 - DNA, 19 bp, Homo sapiens
  siRNA target sequence for HSPC063 (NM_014155.1,892-910).
ctgagaccggtagaagaat

SEQ ID NO: 339705 - DNA, 19 bp, Homo sapiens
  siRNA target sequence for HSPC063 (NM_014155.1,952-970).
ctttaggtaccgaagaaga

SEQ ID NO: 339706 - DNA, 19 bp, Homo sapiens
  siRNA target sequence for HSPC065 (NM_014157.2,146-164).
ggaggagctcagctatgta

SEQ ID NO: 339707 - DNA, 19 bp, Homo sapiens
  siRNA target sequence for HSPC065 (NM_014157.2,150-168).
gagctcagctatgtaaact

SEQ ID NO: 339708 - DNA, 19 bp, Homo sapiens
  siRNA target sequence for HSPC065 (NM_014157.2,162-180).
gtaaactctgctctcaaaa

SEQ ID NO: 339709 - DNA, 19 bp, Homo sapiens
  siRNA target sequence for HSPC065 (NM_014157.2,231-249).
cagcgacctccacgattat

SEQ ID NO: 339710 - DNA, 19 bp, Homo sapiens
  siRNA target sequence for HSPC065 (NM_014157.2,233-251).
gcgacctccacgattatca

SEQ ID NO: 339711 - DNA, 19 bp, Homo sapiens
  siRNA target sequence for HSPC065 (NM_014157.2,235-253).
gacctccacgattatcaga

SEQ ID NO: 339712 - DNA, 19 bp, Homo sapiens
  siRNA target sequence for HSPC065 (NM_014157.2,338-356).
cctgactgccgaccaaaaa

SEQ ID NO: 339713 - DNA, 19 bp, Homo sapiens
  siRNA target sequence for HSPC065 (NM_014157.2,341-359).
gactgccgaccaaaaactt

SEQ ID NO: 339714 - DNA, 19 bp, Homo sapiens
  siRNA target sequence for HSPC065 (NM_014157.2,437-455).
gcatcacgaggcgatcatt

SEQ ID NO: 339715 - DNA, 19 bp, Homo sapiens
  siRNA target sequence for HSPC065 (NM_014157.2,456-474).
gaggaggctgaaattcgat

SEQ ID NO: 339716 - DNA, 19 bp, Homo sapiens
  siRNA target sequence for HSPC065 (NM_014157.2,487-505).
cgagagaagtgcatgagtt

SEQ ID NO: 339717 - DNA, 19 bp, Homo sapiens
  siRNA target sequence for HSPC065 (NM_014157.2,490-508).
gagaagtgcatgagtttga

SEQ ID NO: 339718 - DNA, 19 bp, Homo sapiens
  siRNA target sequence for HSPC065 (NM_014157.2,701-719).
ggcccttcacgatgttgat

SEQ ID NO: 339719 - DNA, 19 bp, Homo sapiens
  siRNA target sequence for HSPC065 (NM_014157.2,702-720).
gcccttcacgatgttgatt

SEQ ID NO: 339720 - DNA, 19 bp, Homo sapiens
  siRNA target sequence for HSPC065 (NM_014157.2,703-721).
cccttcacgatgttgattt

SEQ ID NO: 339721 - DNA, 19 bp, Homo sapiens
  siRNA target sequence for HSPC065 (NM_014157.2,812-830).
cactctgcaggttctcaat

SEQ ID NO: 339722 - DNA, 19 bp, Homo sapiens
  siRNA target sequence for HSPC065 (NM_014157.2,849-867).
cacaaggcaatggaaatat

SEQ ID NO: 339723 - DNA, 19 bp, Homo sapiens
  siRNA target sequence for HSPC065 (NM_014157.2,896-914).
gagaaaagagctacttgaa

SEQ ID NO: 339724 - DNA, 19 bp, Homo sapiens
  siRNA target sequence for HSPC065 (NM_014157.2,956-974).
caaagccgaggcagtgaat

SEQ ID NO: 339725 - DNA, 19 bp, Homo sapiens
  siRNA target sequence for HSPC065 (NM_014157.2,960-978).
gccgaggcagtgaataaga

SEQ ID NO: 339726 - DNA, 19 bp, Homo sapiens
  siRNA target sequence for HSPC065 (NM_014157.2,1009-1027).
caccacaggtgatgactta

SEQ ID NO: 339727 - DNA, 19 bp, Homo sapiens
  siRNA target sequence for HSPC065 (NM_014157.2,1024-1042).
cttacgtccgggagaagat

SEQ ID NO: 339728 - DNA, 19 bp, Homo sapiens
  siRNA target sequence for HSPC065 (NM_014157.2,1028-1046).
cgtccgggagaagatctta

SEQ ID NO: 339729 - DNA, 19 bp, Homo sapiens
  siRNA target sequence for HSPC065 (NM_014157.2,1029-1047).
gtccgggagaagatcttaa

SEQ ID NO: 339730 - DNA, 19 bp, Homo sapiens
  siRNA target sequence for HSPC065 (NM_014157.2,1108-1126).
ccttaaaaggccatcgtaa

SEQ ID NO: 339731 - DNA, 19 bp, Homo sapiens
  siRNA target sequence for HSPC065 (NM_014157.2,1118-1136).
ccatcgtaaggcttggaat

SEQ ID NO: 339732 - DNA, 19 bp, Homo sapiens
  siRNA target sequence for HSPC065 (NM_014157.2,1122-1140).
cgtaaggcttggaatcgaa

SEQ ID NO: 339733 - DNA, 19 bp, Homo sapiens
  siRNA target sequence for HSPC065 (NM_014157.2,1123-1141).
gtaaggcttggaatcgaat

SEQ ID NO: 339734 - DNA, 19 bp, Homo sapiens
  siRNA target sequence for HSPC065 (NM_014157.2,1129-1147).
cttggaatcgaatgaaaat

SEQ ID NO: 339735 - DNA, 19 bp, Homo sapiens
  siRNA target sequence for HSPC065 (NM_014157.2,1160-1178).
gttgcaggcagattacctt

SEQ ID NO: 339736 - DNA, 19 bp, Homo sapiens
  siRNA target sequence for HYPB (NM_014159.3,5088-5106).
gttggcttcagagatcaaa

SEQ ID NO: 339737 - DNA, 19 bp, Homo sapiens
  siRNA target sequence for HYPB (NM_014159.3,5112-5130).
gccccgaagactcctaata

SEQ ID NO: 339738 - DNA, 19 bp, Homo sapiens
  siRNA target sequence for HYPB (NM_014159.3,5115-5133).
ccgaagactcctaataggt

SEQ ID NO: 339739 - DNA, 19 bp, Homo sapiens
  siRNA target sequence for HYPB (NM_014159.3,5147-5165).
cccagacaagcaaactcaa

SEQ ID NO: 339740 - DNA, 19 bp, Homo sapiens
  siRNA target sequence for HYPB (NM_014159.3,5216-5234).
ctatgagcggggaacaaaa

SEQ ID NO: 339741 - DNA, 19 bp, Homo sapiens
  siRNA target sequence for HYPB (NM_014159.3,5266-5284).
ctaaaaagaaagtacgaat

SEQ ID NO: 339742 - DNA, 19 bp, Homo sapiens
  siRNA target sequence for HYPB (NM_014159.3,5281-5299).
gaattaaagaccgcaataa

SEQ ID NO: 339743 - DNA, 19 bp, Homo sapiens
  siRNA target sequence for HYPB (NM_014159.3,5407-5425).
cctatgactctcttggtta

SEQ ID NO: 339744 - DNA, 19 bp, Homo sapiens
  siRNA target sequence for HYPB (NM_014159.3,5548-5566).
gttctcctgctccttatga

SEQ ID NO: 339745 - DNA, 19 bp, Homo sapiens
  siRNA target sequence for HYPB (NM_014159.3,5576-5594).
gcccttggtgggacattct

SEQ ID NO: 339746 - DNA, 19 bp, Homo sapiens
  siRNA target sequence for HYPB (NM_014159.3,5577-5595).
cccttggtgggacattcta

SEQ ID NO: 339747 - DNA, 19 bp, Homo sapiens
  siRNA target sequence for HYPB (NM_014159.3,5579-5597).
cttggtgggacattctaca

SEQ ID NO: 339748 - DNA, 19 bp, Homo sapiens
  siRNA target sequence for HYPB (NM_014159.3,5681-5699).
ccagagtgatggtgtagta

SEQ ID NO: 339749 - DNA, 19 bp, Homo sapiens
  siRNA target sequence for HYPB (NM_014159.3,5748-5766).
gttcagggacagaattata

SEQ ID NO: 339750 - DNA, 19 bp, Homo sapiens
  siRNA target sequence for HYPB (NM_014159.3,5823-5841).
cagtctcaagcaaccatat

SEQ ID NO: 339751 - DNA, 19 bp, Homo sapiens
  siRNA target sequence for HYPB (NM_014159.3,5825-5843).
gtctcaagcaaccatatat

SEQ ID NO: 339752 - DNA, 19 bp, Homo sapiens
  siRNA target sequence for HYPB (NM_014159.3,5827-5845).
ctcaagcaaccatatatta

SEQ ID NO: 339753 - DNA, 19 bp, Homo sapiens
  siRNA target sequence for HYPB (NM_014159.3,5874-5892).
ggtgtgacatcaccttatt

SEQ ID NO: 339754 - DNA, 19 bp, Homo sapiens
  siRNA target sequence for HYPB (NM_014159.3,5897-5915).
gacaactccaccaattgta

SEQ ID NO: 339755 - DNA, 19 bp, Homo sapiens
  siRNA target sequence for HYPB (NM_014159.3,5932-5950).
caagtcttcagtatatcca

SEQ ID NO: 339756 - DNA, 19 bp, Homo sapiens
  siRNA target sequence for HYPB (NM_014159.3,6063-6081).
gttgtgacaaataatctct

SEQ ID NO: 339757 - DNA, 19 bp, Homo sapiens
  siRNA target sequence for HYPB (NM_014159.3,6153-6171).
gatccagaagggaagattt

SEQ ID NO: 339758 - DNA, 19 bp, Homo sapiens
  siRNA target sequence for HYPB (NM_014159.3,6274-6292).
gaactccaacatatgatga

SEQ ID NO: 339759 - DNA, 19 bp, Homo sapiens
  siRNA target sequence for HYPB (NM_014159.3,6298-6316).
ccatgaaggcctcgaaaaa

SEQ ID NO: 339760 - DNA, 19 bp, Homo sapiens
  siRNA target sequence for HYPB (NM_014159.3,6340-6358).
cctccagtgaactagcaaa

SEQ ID NO: 339761 - DNA, 19 bp, Homo sapiens
  siRNA target sequence for HYPB (NM_014159.3,6491-6509).
gactcacggtgttatgaat

SEQ ID NO: 339762 - DNA, 19 bp, Homo sapiens
  siRNA target sequence for HYPB (NM_014159.3,6493-6511).
ctcacggtgttatgaataa

SEQ ID NO: 339763 - DNA, 19 bp, Homo sapiens
  siRNA target sequence for HYPB (NM_014159.3,6513-6531).
gagctgaagtactgtaaga

SEQ ID NO: 339764 - DNA, 19 bp, Homo sapiens
  siRNA target sequence for HYPB (NM_014159.3,6590-6608).
gaagtacatgcagaagttt

SEQ ID NO: 339765 - DNA, 19 bp, Homo sapiens
  siRNA target sequence for HYPB (NM_014159.3,6605-6623).
gtttggggctgtttacaaa

SEQ ID NO: 339766 - DNA, 19 bp, Homo sapiens
  siRNA target sequence for HSPC072 (NM_014162.1,370-388).
ggcaagacatcctacacaa

SEQ ID NO: 339767 - DNA, 19 bp, Homo sapiens
  siRNA target sequence for HSPC072 (NM_014162.1,381-399).
ctacacaagcacatttcaa

SEQ ID NO: 339768 - DNA, 19 bp, Homo sapiens
  siRNA target sequence for HSPC072 (NM_014162.1,446-464).
ggaacacaactggttcaaa

SEQ ID NO: 339769 - DNA, 19 bp, Homo sapiens
  siRNA target sequence for HSPC072 (NM_014162.1,447-465).
gaacacaactggttcaaat

SEQ ID NO: 339770 - DNA, 19 bp, Homo sapiens
  siRNA target sequence for HSPC072 (NM_014162.1,476-494).
ctccaaatatccagatcta

SEQ ID NO: 339771 - DNA, 19 bp, Homo sapiens
  siRNA target sequence for HSPC072 (NM_014162.1,602-620).
gatgggctctccacatctt

SEQ ID NO: 339772 - DNA, 19 bp, Homo sapiens
  siRNA target sequence for VDRIP (NM_014166.2,141-159).
gtcctgtctagggaactta

SEQ ID NO: 339773 - DNA, 19 bp, Homo sapiens
  siRNA target sequence for VDRIP (NM_014166.2,143-161).
cctgtctagggaacttata

SEQ ID NO: 339774 - DNA, 19 bp, Homo sapiens
  siRNA target sequence for VDRIP (NM_014166.2,181-199).
gaaaccaaaagttgttaca

SEQ ID NO: 339775 - DNA, 19 bp, Homo sapiens
  siRNA target sequence for VDRIP (NM_014166.2,239-257).
ccgagatggggaatttcaa

SEQ ID NO: 339776 - DNA, 19 bp, Homo sapiens
  siRNA target sequence for VDRIP (NM_014166.2,389-407).
ggcaacagctgtttaccaa

SEQ ID NO: 339777 - DNA, 19 bp, Homo sapiens
  siRNA target sequence for VDRIP (NM_014166.2,450-468).
gctatctcctctgaagaaa

SEQ ID NO: 339778 - DNA, 19 bp, Homo sapiens
  siRNA target sequence for VDRIP (NM_014166.2,451-469).
ctatctcctctgaagaaat

SEQ ID NO: 339779 - DNA, 19 bp, Homo sapiens
  siRNA target sequence for VDRIP (NM_014166.2,488-506).
gatcagtgcaagtaatgct

SEQ ID NO: 339780 - DNA, 19 bp, Homo sapiens
  siRNA target sequence for VDRIP (NM_014166.2,545-563).
gagaccctacccaactgat

SEQ ID NO: 339781 - DNA, 19 bp, Homo sapiens
  siRNA target sequence for VDRIP (NM_014166.2,547-565).
gaccctacccaactgattt

SEQ ID NO: 339782 - DNA, 19 bp, Homo sapiens
  siRNA target sequence for VDRIP (NM_014166.2,550-568).
cctacccaactgatttaga

SEQ ID NO: 339783 - DNA, 19 bp, Homo sapiens
  siRNA target sequence for VDRIP (NM_014166.2,617-635).
cgtgaatggccatttacca

SEQ ID NO: 339784 - DNA, 19 bp, Homo sapiens
  siRNA target sequence for VDRIP (NM_014166.2,683-701).
gtatccatggcagtcaaat

SEQ ID NO: 339785 - DNA, 19 bp, Homo sapiens
  siRNA target sequence for VDRIP (NM_014166.2,688-706).
catggcagtcaaatgacat

SEQ ID NO: 339786 - DNA, 19 bp, Homo sapiens
  siRNA target sequence for VDRIP (NM_014166.2,713-731).
gaatatgttaccaccaaat

SEQ ID NO: 339787 - DNA, 19 bp, Homo sapiens
  siRNA target sequence for VDRIP (NM_014166.2,719-737).
gttaccaccaaatcatagt

SEQ ID NO: 339788 - DNA, 19 bp, Homo sapiens
  siRNA target sequence for VDRIP (NM_014166.2,807-825).
gactcctcaagcagtagta

SEQ ID NO: 339789 - DNA, 19 bp, Homo sapiens
  siRNA target sequence for VDRIP (NM_014166.2,809-827).
ctcctcaagcagtagtagt

SEQ ID NO: 339790 - DNA, 19 bp, Homo sapiens
  siRNA target sequence for HSPC128 (NM_014167.1,89-107).
ctgtcgggtacaggaataa

SEQ ID NO: 339791 - DNA, 19 bp, Homo sapiens
  siRNA target sequence for HSPC128 (NM_014167.1,91-109).
gtcgggtacaggaataaga

SEQ ID NO: 339792 - DNA, 19 bp, Homo sapiens
  siRNA target sequence for HSPC128 (NM_014167.1,93-111).
cgggtacaggaataagaat

SEQ ID NO: 339793 - DNA, 19 bp, Homo sapiens
  siRNA target sequence for HSPC128 (NM_014167.1,95-113).
ggtacaggaataagaatgt

SEQ ID NO: 339794 - DNA, 19 bp, Homo sapiens
  siRNA target sequence for HSPC128 (NM_014167.1,184-202).
gcttttcgaagaaaactga

SEQ ID NO: 339795 - DNA, 19 bp, Homo sapiens
  siRNA target sequence for HSPC128 (NM_014167.1,254-272).
cgtcactggaatctcaatt

SEQ ID NO: 339796 - DNA, 19 bp, Homo sapiens
  siRNA target sequence for HSPC128 (NM_014167.1,266-284).
ctcaattcacagatcgata

SEQ ID NO: 339797 - DNA, 19 bp, Homo sapiens
  siRNA target sequence for HSPC128 (NM_014167.1,275-293).
cagatcgatacccagataa

SEQ ID NO: 339798 - DNA, 19 bp, Homo sapiens
  siRNA target sequence for HSPC128 (NM_014167.1,280-298).
cgatacccagataatctga

SEQ ID NO: 339799 - DNA, 19 bp, Homo sapiens
  siRNA target sequence for HSPC128 (NM_014167.1,297-315).
gaaacatctctatttagct

SEQ ID NO: 339800 - DNA, 19 bp, Homo sapiens
  siRNA target sequence for HSPC128 (NM_014167.1,378-396).
ccagccgttgcttgaagaa

SEQ ID NO: 339801 - DNA, 19 bp, Homo sapiens
  siRNA target sequence for HSPC128 (NM_014167.1,404-422).
gcattgacgagcctttatt

SEQ ID NO: 339802 - DNA, 19 bp, Homo sapiens
  siRNA target sequence for HSPC128 (NM_014167.1,463-481).
caatgtattaaaacagtaa

SEQ ID NO: 339803 - DNA, 19 bp, Homo sapiens
  siRNA target sequence for HSPC128 (NM_014167.1,560-578).
ccaaacgtgctgctaagaa

SEQ ID NO: 339804 - DNA, 19 bp, Homo sapiens
  siRNA target sequence for HSPC128 (NM_014167.1,561-579).
caaacgtgctgctaagaaa

SEQ ID NO: 339805 - DNA, 19 bp, Homo sapiens
  siRNA target sequence for HSPC128 (NM_014167.1,566-584).
gtgctgctaagaaacaaga

SEQ ID NO: 339806 - DNA, 19 bp, Homo sapiens
  siRNA target sequence for HSPC128 (NM_014167.1,681-699).
gggccaaccaaacttgaat

SEQ ID NO: 339807 - DNA, 19 bp, Homo sapiens
  siRNA target sequence for HSPC128 (NM_014167.1,684-702).
ccaaccaaacttgaatgta

SEQ ID NO: 339808 - DNA, 19 bp, Homo sapiens
  siRNA target sequence for HSPC135 (NM_014170.1,80-98).
gcgactgagccgctataat

SEQ ID NO: 339809 - DNA, 19 bp, Homo sapiens
  siRNA target sequence for HSPC135 (NM_014170.1,81-99).
cgactgagccgctataata

SEQ ID NO: 339810 - DNA, 19 bp, Homo sapiens
  siRNA target sequence for HSPC135 (NM_014170.1,84-102).
ctgagccgctataatagca

SEQ ID NO: 339811 - DNA, 19 bp, Homo sapiens
  siRNA target sequence for HSPC135 (NM_014170.1,101-119).
cacgtcccaagcttttgct

SEQ ID NO: 339812 - DNA, 19 bp, Homo sapiens
  siRNA target sequence for HSPC135 (NM_014170.1,417-435).
ccggctcgcggtgtgtttt

SEQ ID NO: 339813 - DNA, 19 bp, Homo sapiens
  siRNA target sequence for HSPC135 (NM_014170.1,418-436).
cggctcgcggtgtgtttta

SEQ ID NO: 339814 - DNA, 19 bp, Homo sapiens
  siRNA target sequence for HSPC135 (NM_014170.1,419-437).
ggctcgcggtgtgttttat

SEQ ID NO: 339815 - DNA, 19 bp, Homo sapiens
  siRNA target sequence for HSPC135 (NM_014170.1,420-438).
gctcgcggtgtgttttata

SEQ ID NO: 339816 - DNA, 19 bp, Homo sapiens
  siRNA target sequence for HSPC135 (NM_014170.1,572-590).
ggtggacatgccaggttat

SEQ ID NO: 339817 - DNA, 19 bp, Homo sapiens
  siRNA target sequence for HSPC135 (NM_014170.1,581-599).
gccaggttatggctttaga

SEQ ID NO: 339818 - DNA, 19 bp, Homo sapiens
  siRNA target sequence for HSPC135 (NM_014170.1,593-611).
ctttagagcacctgaagat

SEQ ID NO: 339819 - DNA, 19 bp, Homo sapiens
  siRNA target sequence for HSPC135 (NM_014170.1,623-641).
ggtagagacctatctaaaa

SEQ ID NO: 339820 - DNA, 19 bp, Homo sapiens
  siRNA target sequence for HSPC135 (NM_014170.1,677-695).
ggatagcgttgttggaatt

SEQ ID NO: 339821 - DNA, 19 bp, Homo sapiens
  siRNA target sequence for HSPC135 (NM_014170.1,750-768).
gtgattgtattaacaaaaa

SEQ ID NO: 339822 - DNA, 19 bp, Homo sapiens
  siRNA target sequence for HSPC135 (NM_014170.1,778-796).
cttccaagggacatctttt

SEQ ID NO: 339823 - DNA, 19 bp, Homo sapiens
  siRNA target sequence for HSPC135 (NM_014170.1,785-803).
gggacatcttttaaaacaa

SEQ ID NO: 339824 - DNA, 19 bp, Homo sapiens
  siRNA target sequence for HSPC135 (NM_014170.1,844-862).
gatgttttcctcagttgtt

SEQ ID NO: 339825 - DNA, 19 bp, Homo sapiens
  siRNA target sequence for HSPC135 (NM_014170.1,867-885).
gtaagtgctgtgacctttt

SEQ ID NO: 339826 - DNA, 19 bp, Homo sapiens
  siRNA target sequence for HSPC135 (NM_014170.1,888-906).
ggaatccacctgttgagat

SEQ ID NO: 339827 - DNA, 19 bp, Homo sapiens
  siRNA target sequence for HSPC135 (NM_014170.1,894-912).
cacctgttgagatgcttta

SEQ ID NO: 339828 - DNA, 19 bp, Homo sapiens
  siRNA target sequence for HSPC135 (NM_014170.1,896-914).
cctgttgagatgctttata

SEQ ID NO: 339829 - DNA, 19 bp, Homo sapiens
  siRNA target sequence for HSPC135 (NM_014170.1,917-935).
cagtgtaacaggaagtctt

SEQ ID NO: 339830 - DNA, 19 bp, Homo sapiens
  siRNA target sequence for CRIPT (NM_014171.2,132-150).
gaaagatggtgctaggaat

SEQ ID NO: 339831 - DNA, 19 bp, Homo sapiens
  siRNA target sequence for CRIPT (NM_014171.2,136-154).
gatggtgctaggaatacca

SEQ ID NO: 339832 - DNA, 19 bp, Homo sapiens
  siRNA target sequence for CRIPT (NM_014171.2,240-258).
ctccacttgtagaatttgt

SEQ ID NO: 339833 - DNA, 19 bp, Homo sapiens
  siRNA target sequence for CRIPT (NM_014171.2,242-260).
ccacttgtagaatttgtaa

SEQ ID NO: 339834 - DNA, 19 bp, Homo sapiens
  siRNA target sequence for CRIPT (NM_014171.2,270-288).
gcaccaaccaggttctcat

SEQ ID NO: 339835 - DNA, 19 bp, Homo sapiens
  siRNA target sequence for CRIPT (NM_014171.2,274-292).
caaccaggttctcattact

SEQ ID NO: 339836 - DNA, 19 bp, Homo sapiens
  siRNA target sequence for CRIPT (NM_014171.2,326-344).
cgatgtgtggaaaaaaggt

SEQ ID NO: 339837 - DNA, 19 bp, Homo sapiens
  siRNA target sequence for HSPC142 (NM_014173.1,304-322).
gatgggagcctcaacactt

SEQ ID NO: 339838 - DNA, 19 bp, Homo sapiens
  siRNA target sequence for HSPC142 (NM_014173.1,398-416).
gtccagagaaagtgattat

SEQ ID NO: 339839 - DNA, 19 bp, Homo sapiens
  siRNA target sequence for HSPC142 (NM_014173.1,513-531).
gatgttcgtgcggacaaaa

SEQ ID NO: 339840 - DNA, 19 bp, Homo sapiens
  siRNA target sequence for HSPC142 (NM_014173.1,624-642).
ctgtagctgcctctatgat

SEQ ID NO: 339841 - DNA, 19 bp, Homo sapiens
  siRNA target sequence for HSPC142 (NM_014173.1,690-708).
cctcatccagcagaaaact

SEQ ID NO: 339842 - DNA, 19 bp, Homo sapiens
  siRNA target sequence for HSPC142 (NM_014173.1,810-828).
gacggagcccatgaagaaa

SEQ ID NO: 339843 - DNA, 19 bp, Homo sapiens
  siRNA target sequence for HSPC142 (NM_014173.1,947-965).
gggtaccagctacaagtat

SEQ ID NO: 339844 - DNA, 19 bp, Homo sapiens
  siRNA target sequence for HSPC142 (NM_014173.1,1112-1130).
ctgaaccatccctgtacat

SEQ ID NO: 339845 - DNA, 19 bp, Homo sapiens
  siRNA target sequence for HSPC142 (NM_014173.1,1114-1132).
gaaccatccctgtacatct

SEQ ID NO: 339846 - DNA, 19 bp, Homo sapiens
  siRNA target sequence for THY28 (NM_014174.2,543-561).
gaaaacgcaccaaaactga

SEQ ID NO: 339847 - DNA, 19 bp, Homo sapiens
  siRNA target sequence for THY28 (NM_014174.2,565-583).
ctcaggtgaggcattagct

SEQ ID NO: 339848 - DNA, 19 bp, Homo sapiens
  siRNA target sequence for THY28 (NM_014174.2,570-588).
gtgaggcattagctaaagt

SEQ ID NO: 339849 - DNA, 19 bp, Homo sapiens
  siRNA target sequence for THY28 (NM_014174.2,617-635).
gccactaaaaactgtttga

SEQ ID NO: 339850 - DNA, 19 bp, Homo sapiens
  siRNA target sequence for THY28 (NM_014174.2,645-663).
gcagccactggctgatgaa

SEQ ID NO: 339851 - DNA, 19 bp, Homo sapiens
  siRNA target sequence for THY28 (NM_014174.2,682-700).
cctagagaaaggtgtagat

SEQ ID NO: 339852 - DNA, 19 bp, Homo sapiens
  siRNA target sequence for THY28 (NM_014174.2,812-830).
gaagccttcttctaccata

SEQ ID NO: 339853 - DNA, 19 bp, Homo sapiens
  siRNA target sequence for THY28 (NM_014174.2,816-834).
ccttcttctaccatagcaa

SEQ ID NO: 339854 - DNA, 19 bp, Homo sapiens
  siRNA target sequence for THY28 (NM_014174.2,849-867).
gcatcgcaggactcatgaa

SEQ ID NO: 339855 - DNA, 19 bp, Homo sapiens
  siRNA target sequence for THY28 (NM_014174.2,964-982).
ggtggatgtacagtttgtt

SEQ ID NO: 339856 - DNA, 19 bp, Homo sapiens
  siRNA target sequence for THY28 (NM_014174.2,976-994).
gtttgttcggatgatgaaa

SEQ ID NO: 339857 - DNA, 19 bp, Homo sapiens
  siRNA target sequence for THY28 (NM_014174.2,980-998).
gttcggatgatgaaacgtt

SEQ ID NO: 339858 - DNA, 19 bp, Homo sapiens
  siRNA target sequence for THY28 (NM_014174.2,985-1003).
gatgatgaaacgtttcatt

SEQ ID NO: 339859 - DNA, 19 bp, Homo sapiens
  siRNA target sequence for THY28 (NM_014174.2,1028-1046).
catcaagctcacaaagcta

SEQ ID NO: 339860 - DNA, 19 bp, Homo sapiens
  siRNA target sequence for THY28 (NM_014174.2,1044-1062).
ctactggtggccccttaaa

SEQ ID NO: 339861 - DNA, 19 bp, Homo sapiens
  siRNA target sequence for THY28 (NM_014174.2,1053-1071).
gccccttaaaaaatatggt

SEQ ID NO: 339862 - DNA, 19 bp, Homo sapiens
  siRNA target sequence for THY28 (NM_014174.2,1054-1072).
ccccttaaaaaatatggtt

SEQ ID NO: 339863 - DNA, 19 bp, Homo sapiens
  siRNA target sequence for THY28 (NM_014174.2,1075-1093).
cttcactcgccagagatta

SEQ ID NO: 339864 - DNA, 19 bp, Homo sapiens
  siRNA target sequence for HSPC154 (NM_014177.1,215-233).
ctacgagccgtacagtata

SEQ ID NO: 339865 - DNA, 19 bp, Homo sapiens
  siRNA target sequence for HSPC154 (NM_014177.1,253-271).
ctcggcaaagcgattgctt

SEQ ID NO: 339866 - DNA, 19 bp, Homo sapiens
  siRNA target sequence for HSPC154 (NM_014177.1,255-273).
cggcaaagcgattgctttt

SEQ ID NO: 339867 - DNA, 19 bp, Homo sapiens
  siRNA target sequence for HSPC154 (NM_014177.1,264-282).
gattgcttttgccatacat

SEQ ID NO: 339868 - DNA, 19 bp, Homo sapiens
  siRNA target sequence for HSPC154 (NM_014177.1,275-293).
ccatacatcgtgcttaaca

SEQ ID NO: 339869 - DNA, 19 bp, Homo sapiens
  siRNA target sequence for HSPC154 (NM_014177.1,351-369).
cgctgcgacctagatgtat

SEQ ID NO: 339870 - DNA, 19 bp, Homo sapiens
  siRNA target sequence for HSPC154 (NM_014177.1,352-370).
gctgcgacctagatgtatt

SEQ ID NO: 339871 - DNA, 19 bp, Homo sapiens
  siRNA target sequence for HSPC154 (NM_014177.1,355-373).
gcgacctagatgtattctt

SEQ ID NO: 339872 - DNA, 19 bp, Homo sapiens
  siRNA target sequence for HSPC154 (NM_014177.1,481-499).
cgtcccaacatcacaaaaa

SEQ ID NO: 339873 - DNA, 19 bp, Homo sapiens
  siRNA target sequence for HSPC154 (NM_014177.1,502-520).
gaaagaagccggaagagat

SEQ ID NO: 339874 - DNA, 19 bp, Homo sapiens
  siRNA target sequence for HSPC154 (NM_014177.1,506-524).
gaagccggaagagatttta

SEQ ID NO: 339875 - DNA, 19 bp, Homo sapiens
  siRNA target sequence for HSPC154 (NM_014177.1,509-527).
gccggaagagattttacct

SEQ ID NO: 339876 - DNA, 19 bp, Homo sapiens
  siRNA target sequence for HSPC154 (NM_014177.1,513-531).
gaagagattttacctattt

SEQ ID NO: 339877 - DNA, 19 bp, Homo sapiens
  siRNA target sequence for HSPC154 (NM_014177.1,566-584).
ggcttgttttacacgattt

SEQ ID NO: 339878 - DNA, 19 bp, Homo sapiens
  siRNA target sequence for HSPC154 (NM_014177.1,671-689).
gtctttggtgagtctgtta

SEQ ID NO: 339879 - DNA, 19 bp, Homo sapiens
  siRNA target sequence for HSPC154 (NM_014177.1,673-691).
ctttggtgagtctgttaaa

SEQ ID NO: 339880 - DNA, 19 bp, Homo sapiens
  siRNA target sequence for HSPC154 (NM_014177.1,733-751).
caggttcactgaatatgta

SEQ ID NO: 339881 - DNA, 19 bp, Homo sapiens
  siRNA target sequence for HSPC154 (NM_014177.1,763-781).
gaaacacacgtgtgtgaaa

SEQ ID NO: 339882 - DNA, 19 bp, Homo sapiens
  siRNA target sequence for HSPC154 (NM_014177.1,848-866).
ggaagtggtgaatatgatt

SEQ ID NO: 339883 - DNA, 19 bp, Homo sapiens
  siRNA target sequence for HSPC154 (NM_014177.1,854-872).
ggtgaatatgattttcgat

SEQ ID NO: 339884 - DNA, 19 bp, Homo sapiens
  siRNA target sequence for HSPC154 (NM_014177.1,855-873).
gtgaatatgattttcgata

SEQ ID NO: 339885 - DNA, 19 bp, Homo sapiens
  siRNA target sequence for HSPC154 (NM_014177.1,869-887).
cgatatatatttgtagaaa

SEQ ID NO: 339886 - DNA, 19 bp, Homo sapiens
  siRNA target sequence for HSPC154 (NM_014177.1,899-917).
cctagaagaactattatca

SEQ ID NO: 339887 - DNA, 19 bp, Homo sapiens
  siRNA target sequence for HSPC154 (NM_014177.1,900-918).
ctagaagaactattatcat

SEQ ID NO: 339888 - DNA, 19 bp, Homo sapiens
  siRNA target sequence for STXBP6 (NM_014178.5,380-398).
cacctcttgatgaaaggat

SEQ ID NO: 339889 - DNA, 19 bp, Homo sapiens
  siRNA target sequence for STXBP6 (NM_014178.5,457-475).
ggaggtcaaggcgaatatt

SEQ ID NO: 339890 - DNA, 19 bp, Homo sapiens
  siRNA target sequence for STXBP6 (NM_014178.5,458-476).
gaggtcaaggcgaatattt

SEQ ID NO: 339891 - DNA, 19 bp, Homo sapiens
  siRNA target sequence for STXBP6 (NM_014178.5,460-478).
ggtcaaggcgaatatttaa

SEQ ID NO: 339892 - DNA, 19 bp, Homo sapiens
  siRNA target sequence for STXBP6 (NM_014178.5,466-484).
ggcgaatatttaacttata

SEQ ID NO: 339893 - DNA, 19 bp, Homo sapiens
  siRNA target sequence for STXBP6 (NM_014178.5,515-533).
cacaggcgtccatcacaaa

SEQ ID NO: 339894 - DNA, 19 bp, Homo sapiens
  siRNA target sequence for STXBP6 (NM_014178.5,524-542).
ccatcacaaaggtcaaaca

SEQ ID NO: 339895 - DNA, 19 bp, Homo sapiens
  siRNA target sequence for STXBP6 (NM_014178.5,591-609).
gcagcttcgccaggttaat

SEQ ID NO: 339896 - DNA, 19 bp, Homo sapiens
  siRNA target sequence for STXBP6 (NM_014178.5,600-618).
ccaggttaatggtatcgat

SEQ ID NO: 339897 - DNA, 19 bp, Homo sapiens
  siRNA target sequence for STXBP6 (NM_014178.5,627-645).
ggattcggcagagtttgat

SEQ ID NO: 339898 - DNA, 19 bp, Homo sapiens
  siRNA target sequence for STXBP6 (NM_014178.5,628-646).
gattcggcagagtttgatt

SEQ ID NO: 339899 - DNA, 19 bp, Homo sapiens
  siRNA target sequence for STXBP6 (NM_014178.5,632-650).
cggcagagtttgatttgtt

SEQ ID NO: 339900 - DNA, 19 bp, Homo sapiens
  siRNA target sequence for STXBP6 (NM_014178.5,955-973).
gccatgaagcacaaatgtt

SEQ ID NO: 339901 - DNA, 19 bp, Homo sapiens
  siRNA target sequence for HSPC157 (NM_014179.1,567-585).
gaatcactggctaagtctt

SEQ ID NO: 339902 - DNA, 19 bp, Homo sapiens
  siRNA target sequence for HSPC157 (NM_014179.1,620-638).
gtcaaccaagcattctctt

SEQ ID NO: 339903 - DNA, 19 bp, Homo sapiens
  siRNA target sequence for HSPC157 (NM_014179.1,660-678).
ccatgggaaatctgaactt

SEQ ID NO: 339904 - DNA, 19 bp, Homo sapiens
  siRNA target sequence for HSPC157 (NM_014179.1,702-720).
ggttgtaataagaatccat

SEQ ID NO: 339905 - DNA, 19 bp, Homo sapiens
  siRNA target sequence for HSPC157 (NM_014179.1,751-769).
gaggcagctttatttccta

SEQ ID NO: 339906 - DNA, 19 bp, Homo sapiens
  siRNA target sequence for HSPC157 (NM_014179.1,784-802).
cctcttgttaggacaatca

SEQ ID NO: 339907 - DNA, 19 bp, Homo sapiens
  siRNA target sequence for HSPC157 (NM_014179.1,808-826).
ctgctttgggcttttccaa

SEQ ID NO: 339908 - DNA, 19 bp, Homo sapiens
  siRNA target sequence for HSPC157 (NM_014179.1,818-836).
cttttccaagagcctattt

SEQ ID NO: 339909 - DNA, 19 bp, Homo sapiens
  siRNA target sequence for HSPC157 (NM_014179.1,880-898).
gtgacatgctttaatatat

SEQ ID NO: 339910 - DNA, 19 bp, Homo sapiens
  siRNA target sequence for HSPC157 (NM_014179.1,910-928).
gtatccaaagaggtaatca

SEQ ID NO: 339911 - DNA, 19 bp, Homo sapiens
  siRNA target sequence for HSPC157 (NM_014179.1,914-932).
ccaaagaggtaatcaactt

SEQ ID NO: 339912 - DNA, 19 bp, Homo sapiens
  siRNA target sequence for HSPC157 (NM_014179.1,915-933).
caaagaggtaatcaacttt

SEQ ID NO: 339913 - DNA, 19 bp, Homo sapiens
  siRNA target sequence for HSPC157 (NM_014179.1,921-939).
ggtaatcaactttaacttt

SEQ ID NO: 339914 - DNA, 19 bp, Homo sapiens
  siRNA target sequence for HSPC159 (NM_014181.1,47-65).
gcgatgccgtggtgaaact

SEQ ID NO: 339915 - DNA, 19 bp, Homo sapiens
  siRNA target sequence for HSPC159 (NM_014181.1,48-66).
cgatgccgtggtgaaacta

SEQ ID NO: 339916 - DNA, 19 bp, Homo sapiens
  siRNA target sequence for HSPC159 (NM_014181.1,53-71).
ccgtggtgaaactagatga

SEQ ID NO: 339917 - DNA, 19 bp, Homo sapiens
  siRNA target sequence for HSPC159 (NM_014181.1,54-72).
cgtggtgaaactagatgat

SEQ ID NO: 339918 - DNA, 19 bp, Homo sapiens
  siRNA target sequence for HSPC159 (NM_014181.1,64-82).
ctagatgatggccatttaa

SEQ ID NO: 339919 - DNA, 19 bp, Homo sapiens
  siRNA target sequence for HSPC159 (NM_014181.1,67-85).
gatgatggccatttaaaca

SEQ ID NO: 339920 - DNA, 19 bp, Homo sapiens
  siRNA target sequence for HSPC159 (NM_014181.1,73-91).
ggccatttaaacaactctt

SEQ ID NO: 339921 - DNA, 19 bp, Homo sapiens
  siRNA target sequence for HSPC159 (NM_014181.1,74-92).
gccatttaaacaactcttt

SEQ ID NO: 339922 - DNA, 19 bp, Homo sapiens
  siRNA target sequence for HSPC159 (NM_014181.1,117-135).
gtacttcccacgactgata

SEQ ID NO: 339923 - DNA, 19 bp, Homo sapiens
  siRNA target sequence for HSPC159 (NM_014181.1,120-138).
cttcccacgactgatagtt

SEQ ID NO: 339924 - DNA, 19 bp, Homo sapiens
  siRNA target sequence for HSPC159 (NM_014181.1,125-143).
cacgactgatagttccatt

SEQ ID NO: 339925 - DNA, 19 bp, Homo sapiens
  siRNA target sequence for HSPC159 (NM_014181.1,127-145).
cgactgatagttccatttt

SEQ ID NO: 339926 - DNA, 19 bp, Homo sapiens
  siRNA target sequence for HSPC159 (NM_014181.1,139-157).
ccattttgtgggcacatta

SEQ ID NO: 339927 - DNA, 19 bp, Homo sapiens
  siRNA target sequence for HSPC159 (NM_014181.1,173-191).
caggcaagaaggtgttagt

SEQ ID NO: 339928 - DNA, 19 bp, Homo sapiens
  siRNA target sequence for HSPC159 (NM_014181.1,313-331).
ctcagaaattcttgtatat

SEQ ID NO: 339929 - DNA, 19 bp, Homo sapiens
  siRNA target sequence for HSPC159 (NM_014181.1,392-410).
cattcagggtggaaattct

SEQ ID NO: 339930 - DNA, 19 bp, Homo sapiens
  siRNA target sequence for HSPC159 (NM_014181.1,396-414).
cagggtggaaattctttgt

SEQ ID NO: 339931 - DNA, 19 bp, Homo sapiens
  siRNA target sequence for HSPC159 (NM_014181.1,420-438).
cccacgtttccgagtgttt

SEQ ID NO: 339932 - DNA, 19 bp, Homo sapiens
  siRNA target sequence for HSPC159 (NM_014181.1,422-440).
cacgtttccgagtgtttgt

SEQ ID NO: 339933 - DNA, 19 bp, Homo sapiens
  siRNA target sequence for HSPC159 (NM_014181.1,445-463).
ggacaccaactttttgatt

SEQ ID NO: 339934 - DNA, 19 bp, Homo sapiens
  siRNA target sequence for HSPC159 (NM_014181.1,446-464).
gacaccaactttttgattt

SEQ ID NO: 339935 - DNA, 19 bp, Homo sapiens
  siRNA target sequence for HSPC159 (NM_014181.1,468-486).
ccatcgcattcaaacgtta

SEQ ID NO: 339936 - DNA, 19 bp, Homo sapiens
  siRNA target sequence for HSPC159 (NM_014181.1,469-487).
catcgcattcaaacgttat

SEQ ID NO: 339937 - DNA, 19 bp, Homo sapiens
  siRNA target sequence for HSPC159 (NM_014181.1,488-506).
ctgcaattgacaccataaa

SEQ ID NO: 339938 - DNA, 19 bp, Homo sapiens
  siRNA target sequence for ORMDL2 (NM_014182.3,15-33).
gtggcacacagcgaagtaa

SEQ ID NO: 339939 - DNA, 19 bp, Homo sapiens
  siRNA target sequence for ORMDL2 (NM_014182.3,38-56).
caacacccgagtgatgaat

SEQ ID NO: 339940 - DNA, 19 bp, Homo sapiens
  siRNA target sequence for ORMDL2 (NM_014182.3,70-88).
ggctggcctacatcatctt

SEQ ID NO: 339941 - DNA, 19 bp, Homo sapiens
  siRNA target sequence for ORMDL2 (NM_014182.3,153-171).
ctgaccaacgtcatccata

SEQ ID NO: 339942 - DNA, 19 bp, Homo sapiens
  siRNA target sequence for ORMDL2 (NM_014182.3,167-185).
ccataacctggctacgtat

SEQ ID NO: 339943 - DNA, 19 bp, Homo sapiens
  siRNA target sequence for ORMDL2 (NM_014182.3,270-288).
gactatgggctccagttta

SEQ ID NO: 339944 - DNA, 19 bp, Homo sapiens
  siRNA target sequence for ORMDL2 (NM_014182.3,336-354).
ctggccagcttctatacca

SEQ ID NO: 339945 - DNA, 19 bp, Homo sapiens
  siRNA target sequence for ORMDL2 (NM_014182.3,341-359).
cagcttctataccaagtat

SEQ ID NO: 339946 - DNA, 19 bp, Homo sapiens
  siRNA target sequence for ORMDL2 (NM_014182.3,385-403).
cagcctcattgctaagtgt

SEQ ID NO: 339947 - DNA, 19 bp, Homo sapiens
  siRNA target sequence for RANGNRF (NM_014185.1,196-214).
gaccggtcccggacaatca

SEQ ID NO: 339948 - DNA, 19 bp, Homo sapiens
  siRNA target sequence for RANGNRF (NM_014185.1,199-217).
cggtcccggacaatcaaga

SEQ ID NO: 339949 - DNA, 19 bp, Homo sapiens
  siRNA target sequence for RANGNRF (NM_014185.1,200-218).
ggtcccggacaatcaagaa

SEQ ID NO: 339950 - DNA, 19 bp, Homo sapiens
  siRNA target sequence for RANGNRF (NM_014185.1,204-222).
ccggacaatcaagaagttt

SEQ ID NO: 339951 - DNA, 19 bp, Homo sapiens
  siRNA target sequence for RANGNRF (NM_014185.1,205-223).
cggacaatcaagaagtttt

SEQ ID NO: 339952 - DNA, 19 bp, Homo sapiens
  siRNA target sequence for RANGNRF (NM_014185.1,238-256).
cggaccagagcctgatagt

SEQ ID NO: 339953 - DNA, 19 bp, Homo sapiens
  siRNA target sequence for RANGNRF (NM_014185.1,247-265).
gcctgatagtggaacttct

SEQ ID NO: 339954 - DNA, 19 bp, Homo sapiens
  siRNA target sequence for RANGNRF (NM_014185.1,297-315).
ctgcgcggtaccactttga

SEQ ID NO: 339955 - DNA, 19 bp, Homo sapiens
  siRNA target sequence for RANGNRF (NM_014185.1,426-444).
ggcaagcagcagatagcta

SEQ ID NO: 339956 - DNA, 19 bp, Homo sapiens
  siRNA target sequence for RANGNRF (NM_014185.1,427-445).
gcaagcagcagatagctaa

SEQ ID NO: 339957 - DNA, 19 bp, Homo sapiens
  siRNA target sequence for RANGNRF (NM_014185.1,510-528).
cagactgatctcttgctta

SEQ ID NO: 339958 - DNA, 19 bp, Homo sapiens
  siRNA target sequence for RANGNRF (NM_014185.1,596-614).
gagcctgggtgactttgaa

SEQ ID NO: 339959 - DNA, 19 bp, Homo sapiens
  siRNA target sequence for RANGNRF (NM_014185.1,636-654).
cttcacgatcctaacatct

SEQ ID NO: 339960 - DNA, 19 bp, Homo sapiens
  siRNA target sequence for HSPC166 (NM_014186.1,30-48).
gacagcggagcattttgca

SEQ ID NO: 339961 - DNA, 19 bp, Homo sapiens
  siRNA target sequence for HSPC166 (NM_014186.1,66-84).
caaggcctcctcgaaagat

SEQ ID NO: 339962 - DNA, 19 bp, Homo sapiens
  siRNA target sequence for HSPC166 (NM_014186.1,69-87).
ggcctcctcgaaagatgtt

SEQ ID NO: 339963 - DNA, 19 bp, Homo sapiens
  siRNA target sequence for HSPC166 (NM_014186.1,248-266).
cctctgccgaggcaattct

SEQ ID NO: 339964 - DNA, 19 bp, Homo sapiens
  siRNA target sequence for HSPC166 (NM_014186.1,325-343).
ctagaacatgtgtctactt

SEQ ID NO: 339965 - DNA, 19 bp, Homo sapiens
  siRNA target sequence for HSPC166 (NM_014186.1,352-370).
gaagcccaggcaaatcaga

SEQ ID NO: 339966 - DNA, 19 bp, Homo sapiens
  siRNA target sequence for HSPC166 (NM_014186.1,397-415).
gactggagagtggatatca

SEQ ID NO: 339967 - DNA, 19 bp, Homo sapiens
  siRNA target sequence for HSPC166 (NM_014186.1,548-566).
cactggacaccatgttaga

SEQ ID NO: 339968 - DNA, 19 bp, Homo sapiens
  siRNA target sequence for HSPC171 (NM_014187.1,180-198).
gttctacctgcggatcata

SEQ ID NO: 339969 - DNA, 19 bp, Homo sapiens
  siRNA target sequence for C11orf5 (NM_014205.1,1079-1097).
cctggaccaacgaaaatga

SEQ ID NO: 339970 - DNA, 19 bp, Homo sapiens
  siRNA target sequence for C11orf10 (NM_014206.1,190-208).
gtacactcgtgatatctat

SEQ ID NO: 339971 - DNA, 19 bp, Homo sapiens
  siRNA target sequence for C11orf10 (NM_014206.1,193-211).
cactcgtgatatctataaa

SEQ ID NO: 339972 - DNA, 19 bp, Homo sapiens
  siRNA target sequence for PGA5 (NM_014224.1,88-106).
gtccccctcatcagaaaga

SEQ ID NO: 339973 - DNA, 19 bp, Homo sapiens
  siRNA target sequence for PGA5 (NM_014224.1,698-716).
gtggcagcgtggtgatctt

SEQ ID NO: 339974 - DNA, 19 bp, Homo sapiens
  siRNA target sequence for PGA5 (NM_014224.1,718-736).
ggtggcattgactcttctt

SEQ ID NO: 339975 - DNA, 19 bp, Homo sapiens
  siRNA target sequence for PGA5 (NM_014224.1,719-737).
gtggcattgactcttctta

SEQ ID NO: 339976 - DNA, 19 bp, Homo sapiens
  siRNA target sequence for PGA5 (NM_014224.1,987-1005).
catcgtcttcaccatcaat

SEQ ID NO: 339977 - DNA, 19 bp, Homo sapiens
  siRNA target sequence for UBL4 (NM_014235.2,172-190).
gaaacgactctcggattat

SEQ ID NO: 339978 - DNA, 19 bp, Homo sapiens
  siRNA target sequence for UBL4 (NM_014235.2,176-194).
cgactctcggattatagca

SEQ ID NO: 339979 - DNA, 19 bp, Homo sapiens
  siRNA target sequence for UBL4 (NM_014235.2,177-195).
gactctcggattatagcat

SEQ ID NO: 339980 - DNA, 19 bp, Homo sapiens
  siRNA target sequence for ZNF237 (NM_014242.1,243-261).
cataggggattcatttggt

SEQ ID NO: 339981 - DNA, 19 bp, Homo sapiens
  siRNA target sequence for ZNF237 (NM_014242.1,265-283).
ccagcttgtcctttagtca

SEQ ID NO: 339982 - DNA, 19 bp, Homo sapiens
  siRNA target sequence for ZNF237 (NM_014242.1,377-395).
caatagctgatcaaagaaa

SEQ ID NO: 339983 - DNA, 19 bp, Homo sapiens
  siRNA target sequence for ZNF237 (NM_014242.1,383-401).
ctgatcaaagaaacttcat

SEQ ID NO: 339984 - DNA, 19 bp, Homo sapiens
  siRNA target sequence for ZNF237 (NM_014242.1,430-448).
caaggaaattattctgtaa

SEQ ID NO: 339985 - DNA, 19 bp, Homo sapiens
  siRNA target sequence for ZNF237 (NM_014242.1,522-540).
ggacatagaaacaaatgga

SEQ ID NO: 339986 - DNA, 19 bp, Homo sapiens
  siRNA target sequence for ZNF237 (NM_014242.1,555-573).
gtcttcctgttttatcgaa

SEQ ID NO: 339987 - DNA, 19 bp, Homo sapiens
  siRNA target sequence for ZNF237 (NM_014242.1,597-615).
caaaaccaacgatttggat

SEQ ID NO: 339988 - DNA, 19 bp, Homo sapiens
  siRNA target sequence for ZNF237 (NM_014242.1,668-686).
gtggtatcactacagaatt

SEQ ID NO: 339989 - DNA, 19 bp, Homo sapiens
  siRNA target sequence for ZNF237 (NM_014242.1,670-688).
ggtatcactacagaattga

SEQ ID NO: 339990 - DNA, 19 bp, Homo sapiens
  siRNA target sequence for ZNF237 (NM_014242.1,680-698).
cagaattgactctgaaata

SEQ ID NO: 339991 - DNA, 19 bp, Homo sapiens
  siRNA target sequence for TRIF (NM_014261.1,579-597).
cagacgccactccaacttt

SEQ ID NO: 339992 - DNA, 19 bp, Homo sapiens
  siRNA target sequence for TRIF (NM_014261.1,581-599).
gacgccactccaactttct

SEQ ID NO: 339993 - DNA, 19 bp, Homo sapiens
  siRNA target sequence for TRIF (NM_014261.1,583-601).
cgccactccaactttctgt

SEQ ID NO: 339994 - DNA, 19 bp, Homo sapiens
  siRNA target sequence for TRIF (NM_014261.1,584-602).
gccactccaactttctgta

SEQ ID NO: 339995 - DNA, 19 bp, Homo sapiens
  siRNA target sequence for TRIF (NM_014261.1,793-811).
ccagggcagacgaacacat

SEQ ID NO: 339996 - DNA, 19 bp, Homo sapiens
  siRNA target sequence for TRIF (NM_014261.1,865-883).
ccttctgcgaggatttcca

SEQ ID NO: 339997 - DNA, 19 bp, Homo sapiens
  siRNA target sequence for TRIF (NM_014261.1,1530-1548).
gggctgcaacccctcatta

SEQ ID NO: 339998 - DNA, 19 bp, Homo sapiens
  siRNA target sequence for TRIF (NM_014261.1,1531-1549).
ggctgcaacccctcattat

SEQ ID NO: 339999 - DNA, 19 bp, Homo sapiens
  siRNA target sequence for ADAMTS7 (NM_014272.2,410-428).
ctgcgcaagcgggatgtat

SEQ ID NO: 340000 - DNA, 19 bp, Homo sapiens
  siRNA target sequence for ADAMTS7 (NM_014272.2,412-430).
gcgcaagcgggatgtatct

SEQ ID NO: 340001 - DNA, 19 bp, Homo sapiens
  siRNA target sequence for ADAMTS7 (NM_014272.2,414-432).
gcaagcgggatgtatctgt

SEQ ID NO: 340002 - DNA, 19 bp, Homo sapiens
  siRNA target sequence for ADAMTS7 (NM_014272.2,449-467).
gccttctacgagctacaat

SEQ ID NO: 340003 - DNA, 19 bp, Homo sapiens
  siRNA target sequence for ADAMTS7 (NM_014272.2,450-468).
ccttctacgagctacaata

SEQ ID NO: 340004 - DNA, 19 bp, Homo sapiens
  siRNA target sequence for ADAMTS7 (NM_014272.2,687-705).
ccaacgaggactacttcat

SEQ ID NO: 340005 - DNA, 19 bp, Homo sapiens
  siRNA target sequence for ADAMTS7 (NM_014272.2,918-936).
ggtcggtcagcaaagagaa

SEQ ID NO: 340006 - DNA, 19 bp, Homo sapiens
  siRNA target sequence for ADAMTS7 (NM_014272.2,1375-1393).
cgagctcgggcacagtttt

SEQ ID NO: 340007 - DNA, 19 bp, Homo sapiens
  siRNA target sequence for ADAMTS7 (NM_014272.2,1406-1424).
gacggaagcggcaatgact

SEQ ID NO: 340008 - DNA, 19 bp, Homo sapiens
  siRNA target sequence for ADAMTS7 (NM_014272.2,1437-1455).
ggaaacgacctttcatcat

SEQ ID NO: 340009 - DNA, 19 bp, Homo sapiens
  siRNA target sequence for ADAMTS7 (NM_014272.2,1602-1620).
ctggcgtcctctatgatgt

SEQ ID NO: 340010 - DNA, 19 bp, Homo sapiens
  siRNA target sequence for ADAMTS7 (NM_014272.2,1604-1622).
ggcgtcctctatgatgtaa

SEQ ID NO: 340011 - DNA, 19 bp, Homo sapiens
  siRNA target sequence for ADAMTS7 (NM_014272.2,1754-1772).
cggtgtggggagaataagt

SEQ ID NO: 340012 - DNA, 19 bp, Homo sapiens
  siRNA target sequence for ADAMTS7 (NM_014272.2,1908-1926).
cgcagcctacgcccaaata

SEQ ID NO: 340013 - DNA, 19 bp, Homo sapiens
  siRNA target sequence for ADAMTS7 (NM_014272.2,2501-2519).
gcagggaccaccttcacat

SEQ ID NO: 340014 - DNA, 19 bp, Homo sapiens
  siRNA target sequence for ADAMTS7 (NM_014272.2,3093-3111).
gcactcagcgccgaaatgt

SEQ ID NO: 340015 - DNA, 19 bp, Homo sapiens
  siRNA target sequence for HABP4 (NM_014282.1,714-732).
gcgagaatttgaaagatat

SEQ ID NO: 340016 - DNA, 19 bp, Homo sapiens
  siRNA target sequence for HABP4 (NM_014282.1,728-746).
gatatggtgggaatgacaa

SEQ ID NO: 340017 - DNA, 19 bp, Homo sapiens
  siRNA target sequence for HABP4 (NM_014282.1,795-813).
ctggggatcgggtaaagat

SEQ ID NO: 340018 - DNA, 19 bp, Homo sapiens
  siRNA target sequence for HABP4 (NM_014282.1,888-906).
ggagtctccagccaaagtt

SEQ ID NO: 340019 - DNA, 19 bp, Homo sapiens
  siRNA target sequence for HABP4 (NM_014282.1,988-1006).
ccaaagcctgagtttaaca

SEQ ID NO: 340020 - DNA, 19 bp, Homo sapiens
  siRNA target sequence for HABP4 (NM_014282.1,989-1007).
caaagcctgagtttaacat

SEQ ID NO: 340021 - DNA, 19 bp, Homo sapiens
  siRNA target sequence for HABP4 (NM_014282.1,1093-1111).
gaggacgattcccatgttt

SEQ ID NO: 340022 - DNA, 19 bp, Homo sapiens
  siRNA target sequence for HABP4 (NM_014282.1,1114-1132).
cggaaacccgccaatgaca

SEQ ID NO: 340023 - DNA, 19 bp, Homo sapiens
  siRNA target sequence for HABP4 (NM_014282.1,1115-1133).
ggaaacccgccaatgacat

SEQ ID NO: 340024 - DNA, 19 bp, Homo sapiens
  siRNA target sequence for HABP4 (NM_014282.1,1120-1138).
cccgccaatgacatcacat

SEQ ID NO: 340025 - DNA, 19 bp, Homo sapiens
  siRNA target sequence for C1orf9 (NM_014283.2,288-306).
cagctggcgtgtatgttgt

SEQ ID NO: 340026 - DNA, 19 bp, Homo sapiens
  siRNA target sequence for C1orf9 (NM_014283.2,290-308).
gctggcgtgtatgttgtaa

SEQ ID NO: 340027 - DNA, 19 bp, Homo sapiens
  siRNA target sequence for C1orf9 (NM_014283.2,293-311).
ggcgtgtatgttgtaaaga

SEQ ID NO: 340028 - DNA, 19 bp, Homo sapiens
  siRNA target sequence for C1orf9 (NM_014283.2,295-313).
cgtgtatgttgtaaagaga

SEQ ID NO: 340029 - DNA, 19 bp, Homo sapiens
  siRNA target sequence for C1orf9 (NM_014283.2,322-340).
gcttcagcgtcatcatatt

SEQ ID NO: 340030 - DNA, 19 bp, Homo sapiens
  siRNA target sequence for C1orf9 (NM_014283.2,323-341).
cttcagcgtcatcatatta

SEQ ID NO: 340031 - DNA, 19 bp, Homo sapiens
  siRNA target sequence for C1orf9 (NM_014283.2,352-370).
gacaactgcgcactagaaa

SEQ ID NO: 340032 - DNA, 19 bp, Homo sapiens
  siRNA target sequence for C1orf9 (NM_014283.2,357-375).
ctgcgcactagaaaatgaa

SEQ ID NO: 340033 - DNA, 19 bp, Homo sapiens
  siRNA target sequence for C1orf9 (NM_014283.2,412-430).
cctatcaatgccgaatcat

SEQ ID NO: 340034 - DNA, 19 bp, Homo sapiens
  siRNA target sequence for C1orf9 (NM_014283.2,421-439).
gccgaatcattgggaaaat

SEQ ID NO: 340035 - DNA, 19 bp, Homo sapiens
  siRNA target sequence for C1orf9 (NM_014283.2,423-441).
cgaatcattgggaaaatca

SEQ ID NO: 340036 - DNA, 19 bp, Homo sapiens
  siRNA target sequence for C1orf9 (NM_014283.2,491-509).
ctattgtggatgtacaaaa

SEQ ID NO: 340037 - DNA, 19 bp, Homo sapiens
  siRNA target sequence for C1orf9 (NM_014283.2,543-561).
ggagacactccctacagtt

SEQ ID NO: 340038 - DNA, 19 bp, Homo sapiens
  siRNA target sequence for C1orf9 (NM_014283.2,546-564).
gacactccctacagttgat

SEQ ID NO: 340039 - DNA, 19 bp, Homo sapiens
  siRNA target sequence for C1orf9 (NM_014283.2,548-566).
cactccctacagttgattt

SEQ ID NO: 340040 - DNA, 19 bp, Homo sapiens
  siRNA target sequence for C1orf9 (NM_014283.2,599-617).
gtgaaactgttgaaaatat

SEQ ID NO: 340041 - DNA, 19 bp, Homo sapiens
  siRNA target sequence for C1orf9 (NM_014283.2,637-655).
gaaatcactccaatctcaa

SEQ ID NO: 340042 - DNA, 19 bp, Homo sapiens
  siRNA target sequence for C1orf9 (NM_014283.2,642-660).
cactccaatctcaaagctt

SEQ ID NO: 340043 - DNA, 19 bp, Homo sapiens
  siRNA target sequence for C1orf9 (NM_014283.2,769-787).
gaacaaccttcctttgtca

SEQ ID NO: 340044 - DNA, 19 bp, Homo sapiens
  siRNA target sequence for C1orf9 (NM_014283.2,805-823).
gttggccagcatatagaaa

SEQ ID NO: 340045 - DNA, 19 bp, Homo sapiens
  siRNA target sequence for C1orf9 (NM_014283.2,919-937).
gcattgaatgcttcagata

SEQ ID NO: 340046 - DNA, 19 bp, Homo sapiens
  siRNA target sequence for C1orf9 (NM_014283.2,949-967).
gagagctctgattatacaa

SEQ ID NO: 340047 - DNA, 19 bp, Homo sapiens
  siRNA target sequence for C1orf9 (NM_014283.2,954-972).
ctctgattatacaaaacca

SEQ ID NO: 340048 - DNA, 19 bp, Homo sapiens
  siRNA target sequence for C1orf9 (NM_014283.2,1009-1027).
gatccagaagatataccaa

SEQ ID NO: 340049 - DNA, 19 bp, Homo sapiens
  siRNA target sequence for C1orf9 (NM_014283.2,1013-1031).
cagaagatataccaacatt

SEQ ID NO: 340050 - DNA, 19 bp, Homo sapiens
  siRNA target sequence for C1orf9 (NM_014283.2,1082-1100).
cgatgcatgcatcttctaa

SEQ ID NO: 340051 - DNA, 19 bp, Homo sapiens
  siRNA target sequence for C1orf9 (NM_014283.2,1083-1101).
gatgcatgcatcttctaat

SEQ ID NO: 340052 - DNA, 19 bp, Homo sapiens
  siRNA target sequence for C1orf9 (NM_014283.2,1170-1188).
caaaattctagcagctaat

SEQ ID NO: 340053 - DNA, 19 bp, Homo sapiens
  siRNA target sequence for C1orf9 (NM_014283.2,1197-1215).
caagagcacatctgctatt

SEQ ID NO: 340054 - DNA, 19 bp, Homo sapiens
  siRNA target sequence for C1orf9 (NM_014283.2,1202-1220).
gcacatctgctattcttat

SEQ ID NO: 340055 - DNA, 19 bp, Homo sapiens
  siRNA target sequence for C1orf9 (NM_014283.2,1203-1221).
cacatctgctattcttata

SEQ ID NO: 340056 - DNA, 19 bp, Homo sapiens
  siRNA target sequence for C1orf9 (NM_014283.2,1205-1223).
catctgctattcttataga

SEQ ID NO: 340057 - DNA, 19 bp, Homo sapiens
  siRNA target sequence for C1orf9 (NM_014283.2,1245-1263).
gaatccttgcagcactaaa

SEQ ID NO: 340058 - DNA, 19 bp, Homo sapiens
  siRNA target sequence for C1orf9 (NM_014283.2,1253-1271).
gcagcactaaaatttggtt

SEQ ID NO: 340059 - DNA, 19 bp, Homo sapiens
  siRNA target sequence for C1orf9 (NM_014283.2,1394-1412).
ggattaagctgggtacttt

SEQ ID NO: 340060 - DNA, 19 bp, Homo sapiens
  siRNA target sequence for C1orf9 (NM_014283.2,1395-1413).
gattaagctgggtactttt

SEQ ID NO: 340061 - DNA, 19 bp, Homo sapiens
  siRNA target sequence for C1orf9 (NM_014283.2,1421-1439).
gagatgagcggaatgtaca

SEQ ID NO: 340062 - DNA, 19 bp, Homo sapiens
  siRNA target sequence for C1orf9 (NM_014283.2,1448-1466).
ctttagatgaacagatgta

SEQ ID NO: 340063 - DNA, 19 bp, Homo sapiens
  siRNA target sequence for C1orf9 (NM_014283.2,1482-1500).
gatgttcatcaagtacata

SEQ ID NO: 340064 - DNA, 19 bp, Homo sapiens
  siRNA target sequence for C1orf9 (NM_014283.2,1504-1522).
gttgagttgctatcacatt

SEQ ID NO: 340065 - DNA, 19 bp, Homo sapiens
  siRNA target sequence for C1orf9 (NM_014283.2,1941-1959).
gagtcccattgtacagtta

SEQ ID NO: 340066 - DNA, 19 bp, Homo sapiens
  siRNA target sequence for C1orf9 (NM_014283.2,1946-1964).
ccattgtacagttagttca

SEQ ID NO: 340067 - DNA, 19 bp, Homo sapiens
  siRNA target sequence for C1orf9 (NM_014283.2,1947-1965).
cattgtacagttagttcaa

SEQ ID NO: 340068 - DNA, 19 bp, Homo sapiens
  siRNA target sequence for C1orf9 (NM_014283.2,2077-2095).
ctgaccacaatttgttgta

SEQ ID NO: 340069 - DNA, 19 bp, Homo sapiens
  siRNA target sequence for C1orf9 (NM_014283.2,2079-2097).
gaccacaatttgttgtatt

SEQ ID NO: 340070 - DNA, 19 bp, Homo sapiens
  siRNA target sequence for C1orf9 (NM_014283.2,2093-2111).
gtatttctagtttttcaga

SEQ ID NO: 340071 - DNA, 19 bp, Homo sapiens
  siRNA target sequence for C1orf9 (NM_014283.2,2160-2178).
cagccgaactgctttgagt

SEQ ID NO: 340072 - DNA, 19 bp, Homo sapiens
  siRNA target sequence for C1orf9 (NM_014283.2,2162-2180).
gccgaactgctttgagtaa

SEQ ID NO: 340073 - DNA, 19 bp, Homo sapiens
  siRNA target sequence for C1orf9 (NM_014283.2,2163-2181).
ccgaactgctttgagtaaa

SEQ ID NO: 340074 - DNA, 19 bp, Homo sapiens
  siRNA target sequence for C1orf9 (NM_014283.2,2204-2222).
ctcaaccacccttactact

SEQ ID NO: 340075 - DNA, 19 bp, Homo sapiens
  siRNA target sequence for C1orf9 (NM_014283.2,2225-2243).
ctgcggaatcagtagatgt

SEQ ID NO: 340076 - DNA, 19 bp, Homo sapiens
  siRNA target sequence for C1orf9 (NM_014283.2,2269-2287).
gaattggaaaatacgaata

SEQ ID NO: 340077 - DNA, 19 bp, Homo sapiens
  siRNA target sequence for C1orf9 (NM_014283.2,2316-2334).
gggtgatttaagtagtagt

SEQ ID NO: 340078 - DNA, 19 bp, Homo sapiens
  siRNA target sequence for C1orf9 (NM_014283.2,2317-2335).
ggtgatttaagtagtagta

SEQ ID NO: 340079 - DNA, 19 bp, Homo sapiens
  siRNA target sequence for C1orf9 (NM_014283.2,2344-2362).
gatgacttggtgaatcaca

SEQ ID NO: 340080 - DNA, 19 bp, Homo sapiens
  siRNA target sequence for C1orf9 (NM_014283.2,2387-2405).
caagccattctcaaactct

SEQ ID NO: 340081 - DNA, 19 bp, Homo sapiens
  siRNA target sequence for C1orf9 (NM_014283.2,2410-2428).
cagtctcttcttttagata

SEQ ID NO: 340082 - DNA, 19 bp, Homo sapiens
  siRNA target sequence for C1orf9 (NM_014283.2,2425-2443).
gatattaccccagaaatca

SEQ ID NO: 340083 - DNA, 19 bp, Homo sapiens
  siRNA target sequence for C1orf9 (NM_014283.2,2485-2503).
gaggcaggacatataccat

SEQ ID NO: 340084 - DNA, 19 bp, Homo sapiens
  siRNA target sequence for C1orf9 (NM_014283.2,2528-2546).
ctgttgagatcgataatga

SEQ ID NO: 340085 - DNA, 19 bp, Homo sapiens
  siRNA target sequence for C1orf9 (NM_014283.2,2530-2548).
gttgagatcgataatgaaa

SEQ ID NO: 340086 - DNA, 19 bp, Homo sapiens
  siRNA target sequence for C1orf9 (NM_014283.2,2554-2572).
caaaagtctgagagcttta

SEQ ID NO: 340087 - DNA, 19 bp, Homo sapiens
  siRNA target sequence for C1orf9 (NM_014283.2,2561-2579).
ctgagagctttagttctat

SEQ ID NO: 340088 - DNA, 19 bp, Homo sapiens
  siRNA target sequence for C1orf9 (NM_014283.2,2591-2609).
ctattacctatgaaacaaa

SEQ ID NO: 340089 - DNA, 19 bp, Homo sapiens
  siRNA target sequence for C1orf9 (NM_014283.2,2687-2705).
caatagtgccaccaataaa

SEQ ID NO: 340090 - DNA, 19 bp, Homo sapiens
  siRNA target sequence for C1orf9 (NM_014283.2,2711-2729).
ccactgtacccgacaatga

SEQ ID NO: 340091 - DNA, 19 bp, Homo sapiens
  siRNA target sequence for C1orf9 (NM_014283.2,2734-2752).
ggggaagccaaaatgaata

SEQ ID NO: 340092 - DNA, 19 bp, Homo sapiens
  siRNA target sequence for C1orf9 (NM_014283.2,2860-2878).
cagaggacagctacagatt

SEQ ID NO: 340093 - DNA, 19 bp, Homo sapiens
  siRNA target sequence for C1orf9 (NM_014283.2,2903-2921).
cagatctaggatatgctaa

SEQ ID NO: 340094 - DNA, 19 bp, Homo sapiens
  siRNA target sequence for C1orf9 (NM_014283.2,2912-2930).
gatatgctaatggaaatct

SEQ ID NO: 340095 - DNA, 19 bp, Homo sapiens
  siRNA target sequence for C1orf9 (NM_014283.2,2932-2950).
gtacatggatcaaaccaaa

SEQ ID NO: 340096 - DNA, 19 bp, Homo sapiens
  siRNA target sequence for C1orf9 (NM_014283.2,2969-2987).
gacttaataatcgtattaa

SEQ ID NO: 340097 - DNA, 19 bp, Homo sapiens
  siRNA target sequence for C1orf9 (NM_014283.2,2981-2999).
gtattaaagccttagaagt

SEQ ID NO: 340098 - DNA, 19 bp, Homo sapiens
  siRNA target sequence for C1orf9 (NM_014283.2,3039-3057).
ccaaaggtaccgaaaacaa

SEQ ID NO: 340099 - DNA, 19 bp, Homo sapiens
  siRNA target sequence for C1orf9 (NM_014283.2,3093-3111).
cgtgaaacttcagaatact

SEQ ID NO: 340100 - DNA, 19 bp, Homo sapiens
  siRNA target sequence for C1orf9 (NM_014283.2,3094-3112).
gtgaaacttcagaatactt

SEQ ID NO: 340101 - DNA, 19 bp, Homo sapiens
  siRNA target sequence for C1orf9 (NM_014283.2,3132-3150).
ggatcagcggcaaactgaa

SEQ ID NO: 340102 - DNA, 19 bp, Homo sapiens
  siRNA target sequence for C1orf9 (NM_014283.2,3183-3201).
catgacacagcttgtttca

SEQ ID NO: 340103 - DNA, 19 bp, Homo sapiens
  siRNA target sequence for C1orf9 (NM_014283.2,3190-3208).
cagcttgtttcaaatttat

SEQ ID NO: 340104 - DNA, 19 bp, Homo sapiens
  siRNA target sequence for C1orf9 (NM_014283.2,3192-3210).
gcttgtttcaaatttatca

SEQ ID NO: 340105 - DNA, 19 bp, Homo sapiens
  siRNA target sequence for C1orf9 (NM_014283.2,3212-3230).
caacagtagcagaattgaa

SEQ ID NO: 340106 - DNA, 19 bp, Homo sapiens
  siRNA target sequence for C1orf9 (NM_014283.2,3228-3246).
gaaacgggaggtttcagat

SEQ ID NO: 340107 - DNA, 19 bp, Homo sapiens
  siRNA target sequence for C1orf9 (NM_014283.2,3309-3327).
gcagcgttgtcgaaatact

SEQ ID NO: 340108 - DNA, 19 bp, Homo sapiens
  siRNA target sequence for C1orf9 (NM_014283.2,3310-3328).
cagcgttgtcgaaatactt

SEQ ID NO: 340109 - DNA, 19 bp, Homo sapiens
  siRNA target sequence for C1orf9 (NM_014283.2,3312-3330).
gcgttgtcgaaatacttct

SEQ ID NO: 340110 - DNA, 19 bp, Homo sapiens
  siRNA target sequence for C1orf9 (NM_014283.2,3317-3335).
gtcgaaatacttctcaatt

SEQ ID NO: 340111 - DNA, 19 bp, Homo sapiens
  siRNA target sequence for C1orf9 (NM_014283.2,3320-3338).
gaaatacttctcaatttga

SEQ ID NO: 340112 - DNA, 19 bp, Homo sapiens
  siRNA target sequence for C1orf9 (NM_014283.2,3456-3474).
caagtctctacagttaact

SEQ ID NO: 340113 - DNA, 19 bp, Homo sapiens
  siRNA target sequence for C1orf9 (NM_014283.2,3546-3564).
gcgctgcaagtacaaaatt

SEQ ID NO: 340114 - DNA, 19 bp, Homo sapiens
  siRNA target sequence for C1orf9 (NM_014283.2,3549-3567).
ctgcaagtacaaaattgaa

SEQ ID NO: 340115 - DNA, 19 bp, Homo sapiens
  siRNA target sequence for C1orf9 (NM_014283.2,3612-3630).
caatggcgacataaaagga

SEQ ID NO: 340116 - DNA, 19 bp, Homo sapiens
  siRNA target sequence for C1orf9 (NM_014283.2,3628-3646).
ggaagaaagccctttacga

SEQ ID NO: 340117 - DNA, 19 bp, Homo sapiens
  siRNA target sequence for C1orf9 (NM_014283.2,3900-3918).
gccgagcctgcatgacata

SEQ ID NO: 340118 - DNA, 19 bp, Homo sapiens
  siRNA target sequence for C1orf9 (NM_014283.2,3901-3919).
ccgagcctgcatgacataa

SEQ ID NO: 340119 - DNA, 19 bp, Homo sapiens
  siRNA target sequence for C1orf9 (NM_014283.2,3962-3980).
cagcagtctcgggacatat

SEQ ID NO: 340120 - DNA, 19 bp, Homo sapiens
  siRNA target sequence for C1orf9 (NM_014283.2,3964-3982).
gcagtctcgggacatatct

SEQ ID NO: 340121 - DNA, 19 bp, Homo sapiens
  siRNA target sequence for NCDN (NM_014284.1,499-517).
cctccgtgaggccaagaat

SEQ ID NO: 340122 - DNA, 19 bp, Homo sapiens
  siRNA target sequence for NCDN (NM_014284.1,745-763).
ccaagtcctgaacaagatt

SEQ ID NO: 340123 - DNA, 19 bp, Homo sapiens
  siRNA target sequence for NCDN (NM_014284.1,1128-1146).
ccgtgccccctgaatgcta

SEQ ID NO: 340124 - DNA, 19 bp, Homo sapiens
  siRNA target sequence for NCDN (NM_014284.1,1347-1365).
cgggcacggaggtgaaaga

SEQ ID NO: 340125 - DNA, 19 bp, Homo sapiens
  siRNA target sequence for NCDN (NM_014284.1,1425-1443).
gtgagcagtcactgcttaa

SEQ ID NO: 340126 - DNA, 19 bp, Homo sapiens
  siRNA target sequence for NCDN (NM_014284.1,1485-1503).
ccataggggctgttatcca

SEQ ID NO: 340127 - DNA, 19 bp, Homo sapiens
  siRNA target sequence for NCDN (NM_014284.1,1780-1798).
ccacctgaccgttgaagat

SEQ ID NO: 340128 - DNA, 19 bp, Homo sapiens
  siRNA target sequence for NCDN (NM_014284.1,1834-1852).
ctcgcttctgtgcaagtat

SEQ ID NO: 340129 - DNA, 19 bp, Homo sapiens
  siRNA target sequence for NCDN (NM_014284.1,1985-2003).
cgtgacgcctgcttcacat

SEQ ID NO: 340130 - DNA, 19 bp, Homo sapiens
  siRNA target sequence for NCDN (NM_014284.1,1991-2009).
gcctgcttcacatctctaa

SEQ ID NO: 340131 - DNA, 19 bp, Homo sapiens
  siRNA target sequence for NCDN (NM_014284.1,1992-2010).
cctgcttcacatctctaat

SEQ ID NO: 340132 - DNA, 19 bp, Homo sapiens
  siRNA target sequence for NCDN (NM_014284.1,2235-2253).
ccctgtcccctgagtatga

SEQ ID NO: 340133 - DNA, 19 bp, Homo sapiens
  siRNA target sequence for ETHE1 (NM_014297.2,202-220).
cccgggaggccgttctgat

SEQ ID NO: 340134 - DNA, 19 bp, Homo sapiens
  siRNA target sequence for ETHE1 (NM_014297.2,308-326).
ccacgcggaccacattaca

SEQ ID NO: 340135 - DNA, 19 bp, Homo sapiens
  siRNA target sequence for ETHE1 (NM_014297.2,392-410).
ccaggctgacttacacatt

SEQ ID NO: 340136 - DNA, 19 bp, Homo sapiens
  siRNA target sequence for ETHE1 (NM_014297.2,523-541).
ctggagatgccctgttgat

SEQ ID NO: 340137 - DNA, 19 bp, Homo sapiens
  siRNA target sequence for ETHE1 (NM_014297.2,598-616).
cggtccatgaaaagatctt

SEQ ID NO: 340138 - DNA, 19 bp, Homo sapiens
  siRNA target sequence for ETHE1 (NM_014297.2,600-618).
gtccatgaaaagatcttca

SEQ ID NO: 340139 - DNA, 19 bp, Homo sapiens
  siRNA target sequence for ETHE1 (NM_014297.2,625-643).
caggagactgtctgatcta

SEQ ID NO: 340140 - DNA, 19 bp, Homo sapiens
  siRNA target sequence for ETHE1 (NM_014297.2,644-662).
ccctgctcacgattaccat

SEQ ID NO: 340141 - DNA, 19 bp, Homo sapiens
  siRNA target sequence for CTXL (NM_014312.3,288-306).
cccatccaatcctgtactt

SEQ ID NO: 340142 - DNA, 19 bp, Homo sapiens
  siRNA target sequence for CTXL (NM_014312.3,290-308).
catccaatcctgtacttca

SEQ ID NO: 340143 - DNA, 19 bp, Homo sapiens
  siRNA target sequence for CTXL (NM_014312.3,307-325).
caccaatggccatctgtat

SEQ ID NO: 340144 - DNA, 19 bp, Homo sapiens
  siRNA target sequence for CTXL (NM_014312.3,348-366).
gggtcagcctgcttcagaa

SEQ ID NO: 340145 - DNA, 19 bp, Homo sapiens
  siRNA target sequence for CTXL (NM_014312.3,404-422).
gacgtccacccctcagata

SEQ ID NO: 340146 - DNA, 19 bp, Homo sapiens
  siRNA target sequence for CTXL (NM_014312.3,429-447).
cctacctctgccaagtcaa

SEQ ID NO: 340147 - DNA, 19 bp, Homo sapiens
  siRNA target sequence for CTXL (NM_014312.3,480-498).
ggctaatcaaccttactgt

SEQ ID NO: 340148 - DNA, 19 bp, Homo sapiens
  siRNA target sequence for CTXL (NM_014312.3,613-631).
ggtgcgtcttggaactttt

SEQ ID NO: 340149 - DNA, 19 bp, Homo sapiens
  siRNA target sequence for CTXL (NM_014312.3,617-635).
cgtcttggaacttttccta

SEQ ID NO: 340150 - DNA, 19 bp, Homo sapiens
  siRNA target sequence for KLHDC2 (NM_014315.1,460-478).
cggctacaagagtaatcaa

SEQ ID NO: 340151 - DNA, 19 bp, Homo sapiens
  siRNA target sequence for KLHDC2 (NM_014315.1,479-497).
gtcagaggattatatgact

SEQ ID NO: 340152 - DNA, 19 bp, Homo sapiens
  siRNA target sequence for KLHDC2 (NM_014315.1,481-499).
cagaggattatatgacttt

SEQ ID NO: 340153 - DNA, 19 bp, Homo sapiens
  siRNA target sequence for KLHDC2 (NM_014315.1,483-501).
gaggattatatgactttta

SEQ ID NO: 340154 - DNA, 19 bp, Homo sapiens
  siRNA target sequence for KLHDC2 (NM_014315.1,486-504).
gattatatgacttttatct

SEQ ID NO: 340155 - DNA, 19 bp, Homo sapiens
  siRNA target sequence for KLHDC2 (NM_014315.1,512-530).
gaagaactatggatctaca

SEQ ID NO: 340156 - DNA, 19 bp, Homo sapiens
  siRNA target sequence for KLHDC2 (NM_014315.1,515-533).
gaactatggatctacaaca

SEQ ID NO: 340157 - DNA, 19 bp, Homo sapiens
  siRNA target sequence for KLHDC2 (NM_014315.1,572-590).
gatgttcctccttctatgt

SEQ ID NO: 340158 - DNA, 19 bp, Homo sapiens
  siRNA target sequence for KLHDC2 (NM_014315.1,616-634).
cagggtgctgtacttgttt

SEQ ID NO: 340159 - DNA, 19 bp, Homo sapiens
  siRNA target sequence for KLHDC2 (NM_014315.1,651-669).
gaggcaataccaataagtt

SEQ ID NO: 340160 - DNA, 19 bp, Homo sapiens
  siRNA target sequence for KLHDC2 (NM_014315.1,653-671).
ggcaataccaataagttct

SEQ ID NO: 340161 - DNA, 19 bp, Homo sapiens
  siRNA target sequence for KLHDC2 (NM_014315.1,707-725).
cagtgggaaagaattgatt

SEQ ID NO: 340162 - DNA, 19 bp, Homo sapiens
  siRNA target sequence for KLHDC2 (NM_014315.1,761-779).
ggtgtctgggtatataaaa

SEQ ID NO: 340163 - DNA, 19 bp, Homo sapiens
  siRNA target sequence for KLHDC2 (NM_014315.1,762-780).
gtgtctgggtatataaaaa

SEQ ID NO: 340164 - DNA, 19 bp, Homo sapiens
  siRNA target sequence for KLHDC2 (NM_014315.1,832-850).
gggaacttttgaattcgat

SEQ ID NO: 340165 - DNA, 19 bp, Homo sapiens
  siRNA target sequence for KLHDC2 (NM_014315.1,882-900).
gaggatggaatgatcatgt

SEQ ID NO: 340166 - DNA, 19 bp, Homo sapiens
  siRNA target sequence for KLHDC2 (NM_014315.1,928-946).
ctggagccagcctataact

SEQ ID NO: 340167 - DNA, 19 bp, Homo sapiens
  siRNA target sequence for KLHDC2 (NM_014315.1,931-949).
gagccagcctataactact

SEQ ID NO: 340168 - DNA, 19 bp, Homo sapiens
  siRNA target sequence for KLHDC2 (NM_014315.1,1035-1053).
ctagaatgaatgatcttca

SEQ ID NO: 340169 - DNA, 19 bp, Homo sapiens
  siRNA target sequence for KLHDC2 (NM_014315.1,1038-1056).
gaatgaatgatcttcacta

SEQ ID NO: 340170 - DNA, 19 bp, Homo sapiens
  siRNA target sequence for KLHDC2 (NM_014315.1,1173-1191).
gatttaccactgataaaca

SEQ ID NO: 340171 - DNA, 19 bp, Homo sapiens
  siRNA target sequence for KLHDC2 (NM_014315.1,1209-1227).
ggacttactgcatcagtaa

SEQ ID NO: 340172 - DNA, 19 bp, Homo sapiens
  siRNA target sequence for HEBP2 (NM_014320.1,373-391).
cccagcccggaagttatga

SEQ ID NO: 340173 - DNA, 19 bp, Homo sapiens
  siRNA target sequence for HEBP2 (NM_014320.1,424-442).
gcacgtccgtggagtctat

SEQ ID NO: 340174 - DNA, 19 bp, Homo sapiens
  siRNA target sequence for HEBP2 (NM_014320.1,461-479).
ccagacgggctttacgaaa

SEQ ID NO: 340175 - DNA, 19 bp, Homo sapiens
  siRNA target sequence for HEBP2 (NM_014320.1,466-484).
cgggctttacgaaactgaa

SEQ ID NO: 340176 - DNA, 19 bp, Homo sapiens
  siRNA target sequence for HEBP2 (NM_014320.1,476-494).
gaaactgaacagctacatt

SEQ ID NO: 340177 - DNA, 19 bp, Homo sapiens
  siRNA target sequence for HEBP2 (NM_014320.1,562-580).
gttcaggtccttttagtga

SEQ ID NO: 340178 - DNA, 19 bp, Homo sapiens
  siRNA target sequence for HEBP2 (NM_014320.1,663-681).
gaagatagagccgaaatga

SEQ ID NO: 340179 - DNA, 19 bp, Homo sapiens
  siRNA target sequence for HEBP2 (NM_014320.1,674-692).
cgaaatgactgtgtttgta

SEQ ID NO: 340180 - DNA, 19 bp, Homo sapiens
  siRNA target sequence for HEBP2 (NM_014320.1,686-704).
gtttgtacggtctttcgat

SEQ ID NO: 340181 - DNA, 19 bp, Homo sapiens
  siRNA target sequence for HEBP2 (NM_014320.1,712-730).
ctagtgcccaaaagaatca

SEQ ID NO: 340182 - DNA, 19 bp, Homo sapiens
  siRNA target sequence for HEBP2 (NM_014320.1,777-795).
gttttcgatgagaaggttt

SEQ ID NO: 340183 - DNA, 19 bp, Homo sapiens
  siRNA target sequence for HEBP2 (NM_014320.1,819-837).
cctgtcaaattgcttaata

SEQ ID NO: 340184 - DNA, 19 bp, Homo sapiens
  siRNA target sequence for HEBP2 (NM_014320.1,822-840).
gtcaaattgcttaatagaa

SEQ ID NO: 340185 - DNA, 19 bp, Homo sapiens
  siRNA target sequence for IGSF4 (NM_014333.2,134-152).
ggcagaatctgtttacgaa

SEQ ID NO: 340186 - DNA, 19 bp, Homo sapiens
  siRNA target sequence for IGSF4 (NM_014333.2,311-329).
ctagcagtgaactcaaagt

SEQ ID NO: 340187 - DNA, 19 bp, Homo sapiens
  siRNA target sequence for IGSF4 (NM_014333.2,332-350).
cattgacaaacgtctcaat

SEQ ID NO: 340188 - DNA, 19 bp, Homo sapiens
  siRNA target sequence for IGSF4 (NM_014333.2,388-406).
gatcccccacaggaaagtt

SEQ ID NO: 340189 - DNA, 19 bp, Homo sapiens
  siRNA target sequence for IGSF4 (NM_014333.2,423-441).
cctggtcccaccacgtaat

SEQ ID NO: 340190 - DNA, 19 bp, Homo sapiens
  siRNA target sequence for IGSF4 (NM_014333.2,427-445).
gtcccaccacgtaatctga

SEQ ID NO: 340191 - DNA, 19 bp, Homo sapiens
  siRNA target sequence for IGSF4 (NM_014333.2,431-449).
caccacgtaatctgatgat

SEQ ID NO: 340192 - DNA, 19 bp, Homo sapiens
  siRNA target sequence for IGSF4 (NM_014333.2,436-454).
cgtaatctgatgatcgata

SEQ ID NO: 340193 - DNA, 19 bp, Homo sapiens
  siRNA target sequence for IGSF4 (NM_014333.2,437-455).
gtaatctgatgatcgatat

SEQ ID NO: 340194 - DNA, 19 bp, Homo sapiens
  siRNA target sequence for IGSF4 (NM_014333.2,528-546).
gactatcaggtggttcaaa

SEQ ID NO: 340195 - DNA, 19 bp, Homo sapiens
  siRNA target sequence for IGSF4 (NM_014333.2,696-714).
gcagacccagcggtatcta

SEQ ID NO: 340196 - DNA, 19 bp, Homo sapiens
  siRNA target sequence for IGSF4 (NM_014333.2,701-719).
cccagcggtatctagaagt

SEQ ID NO: 340197 - DNA, 19 bp, Homo sapiens
  siRNA target sequence for IGSF4 (NM_014333.2,707-725).
ggtatctagaagtacagta

SEQ ID NO: 340198 - DNA, 19 bp, Homo sapiens
  siRNA target sequence for IGSF4 (NM_014333.2,708-726).
gtatctagaagtacagtat

SEQ ID NO: 340199 - DNA, 19 bp, Homo sapiens
  siRNA target sequence for IGSF4 (NM_014333.2,781-799).
ggggacgcgcttgagttaa

SEQ ID NO: 340200 - DNA, 19 bp, Homo sapiens
  siRNA target sequence for IGSF4 (NM_014333.2,783-801).
ggacgcgcttgagttaaca

SEQ ID NO: 340201 - DNA, 19 bp, Homo sapiens
  siRNA target sequence for IGSF4 (NM_014333.2,784-802).
gacgcgcttgagttaacat

SEQ ID NO: 340202 - DNA, 19 bp, Homo sapiens
  siRNA target sequence for IGSF4 (NM_014333.2,786-804).
cgcgcttgagttaacatgt

SEQ ID NO: 340203 - DNA, 19 bp, Homo sapiens
  siRNA target sequence for IGSF4 (NM_014333.2,884-902).
ctgggcccaacctgttcat

SEQ ID NO: 340204 - DNA, 19 bp, Homo sapiens
  siRNA target sequence for IGSF4 (NM_014333.2,887-905).
ggcccaacctgttcatcaa

SEQ ID NO: 340205 - DNA, 19 bp, Homo sapiens
  siRNA target sequence for IGSF4 (NM_014333.2,888-906).
gcccaacctgttcatcaat

SEQ ID NO: 340206 - DNA, 19 bp, Homo sapiens
  siRNA target sequence for IGSF4 (NM_014333.2,895-913).
ctgttcatcaataacctaa

SEQ ID NO: 340207 - DNA, 19 bp, Homo sapiens
  siRNA target sequence for IGSF4 (NM_014333.2,939-957).
ctgtgaagcttcaaacata

SEQ ID NO: 340208 - DNA, 19 bp, Homo sapiens
  siRNA target sequence for IGSF4 (NM_014333.2,963-981).
gaaagctcactcggattat

SEQ ID NO: 340209 - DNA, 19 bp, Homo sapiens
  siRNA target sequence for IGSF4 (NM_014333.2,968-986).
ctcactcggattatatgct

SEQ ID NO: 340210 - DNA, 19 bp, Homo sapiens
  siRNA target sequence for IGSF4 (NM_014333.2,974-992).
cggattatatgctgtatgt

SEQ ID NO: 340211 - DNA, 19 bp, Homo sapiens
  siRNA target sequence for IGSF4 (NM_014333.2,1192-1210).
cgctattttgccagacata

SEQ ID NO: 340212 - DNA, 19 bp, Homo sapiens
  siRNA target sequence for IGSF4 (NM_014333.2,1193-1211).
gctattttgccagacataa

SEQ ID NO: 340213 - DNA, 19 bp, Homo sapiens
  siRNA target sequence for IGSF4 (NM_014333.2,1258-1276).
gacgcagacacagctataa

SEQ ID NO: 340214 - DNA, 19 bp, Homo sapiens
  siRNA target sequence for PISD (NM_014338.3,538-556).
gtccagacccgctctgaaa

SEQ ID NO: 340215 - DNA, 19 bp, Homo sapiens
  siRNA target sequence for PISD (NM_014338.3,540-558).
ccagacccgctctgaaact

SEQ ID NO: 340216 - DNA, 19 bp, Homo sapiens
  siRNA target sequence for PISD (NM_014338.3,872-890).
ggcctgcacagcgtgatta

SEQ ID NO: 340217 - DNA, 19 bp, Homo sapiens
  siRNA target sequence for PISD (NM_014338.3,1198-1216).
catggctcgctggatcaaa

SEQ ID NO: 340218 - DNA, 19 bp, Homo sapiens
  siRNA target sequence for PISD (NM_014338.3,1307-1325).
ggctccattcgcatctact

SEQ ID NO: 340219 - DNA, 19 bp, Homo sapiens
  siRNA target sequence for PISD (NM_014338.3,1362-1380).
gcaagggctcctacaatga

SEQ ID NO: 340220 - DNA, 19 bp, Homo sapiens
  siRNA target sequence for PISD (NM_014338.3,1488-1506).
ccaaggacttcaatttcca

SEQ ID NO: 340221 - DNA, 19 bp, Homo sapiens
  siRNA target sequence for MTCH2 (NM_014342.2,106-124).
cgctcatgtacgtgaaagt

SEQ ID NO: 340222 - DNA, 19 bp, Homo sapiens
  siRNA target sequence for MTCH2 (NM_014342.2,224-242).
gcacattgccagtatcgat

SEQ ID NO: 340223 - DNA, 19 bp, Homo sapiens
  siRNA target sequence for MTCH2 (NM_014342.2,305-323).
ggtccatggtaaagtttta

SEQ ID NO: 340224 - DNA, 19 bp, Homo sapiens
  siRNA target sequence for MTCH2 (NM_014342.2,391-409).
cttcctttgaccacgttat

SEQ ID NO: 340225 - DNA, 19 bp, Homo sapiens
  siRNA target sequence for MTCH2 (NM_014342.2,394-412).
cctttgaccacgttatcaa

SEQ ID NO: 340226 - DNA, 19 bp, Homo sapiens
  siRNA target sequence for MTCH2 (NM_014342.2,479-497).
cactctgagatctatggta

SEQ ID NO: 340227 - DNA, 19 bp, Homo sapiens
  siRNA target sequence for MTCH2 (NM_014342.2,535-553).
gtgattccataataaccat

SEQ ID NO: 340228 - DNA, 19 bp, Homo sapiens
  siRNA target sequence for MTCH2 (NM_014342.2,603-621).
cttctaggtgacatccttt

SEQ ID NO: 340229 - DNA, 19 bp, Homo sapiens
  siRNA target sequence for MTCH2 (NM_014342.2,606-624).
ctaggtgacatcctttctt

SEQ ID NO: 340230 - DNA, 19 bp, Homo sapiens
  siRNA target sequence for MTCH2 (NM_014342.2,642-660).
ctggcctacctcgtcaata

SEQ ID NO: 340231 - DNA, 19 bp, Homo sapiens
  siRNA target sequence for MTCH2 (NM_014342.2,645-663).
gcctacctcgtcaatacct

SEQ ID NO: 340232 - DNA, 19 bp, Homo sapiens
  siRNA target sequence for MTCH2 (NM_014342.2,646-664).
cctacctcgtcaataccta

SEQ ID NO: 340233 - DNA, 19 bp, Homo sapiens
  siRNA target sequence for MTCH2 (NM_014342.2,647-665).
ctacctcgtcaatacctat

SEQ ID NO: 340234 - DNA, 19 bp, Homo sapiens
  siRNA target sequence for MTCH2 (NM_014342.2,726-744).
ggattttttgcgagtatgt

SEQ ID NO: 340235 - DNA, 19 bp, Homo sapiens
  siRNA target sequence for MTCH2 (NM_014342.2,727-745).
gattttttgcgagtatgtt

SEQ ID NO: 340236 - DNA, 19 bp, Homo sapiens
  siRNA target sequence for MTCH2 (NM_014342.2,814-832).
ctccttactccccaatata

SEQ ID NO: 340237 - DNA, 19 bp, Homo sapiens
  siRNA target sequence for MTCH2 (NM_014342.2,816-834).
ccttactccccaatatata

SEQ ID NO: 340238 - DNA, 19 bp, Homo sapiens
  siRNA target sequence for MTCH2 (NM_014342.2,875-893).
gaatatgagccgaggaaat

SEQ ID NO: 340239 - DNA, 19 bp, Homo sapiens
  siRNA target sequence for MTCH2 (NM_014342.2,881-899).
gagccgaggaaatagctta

SEQ ID NO: 340240 - DNA, 19 bp, Homo sapiens
  siRNA target sequence for MTCH2 (NM_014342.2,912-930).
gtcccctttgggaagactt

SEQ ID NO: 340241 - DNA, 19 bp, Homo sapiens
  siRNA target sequence for MTCH2 (NM_014342.2,915-933).
ccctttgggaagacttatt

SEQ ID NO: 340242 - DNA, 19 bp, Homo sapiens
  siRNA target sequence for C22orf4 (NM_014346.1,228-246).
cccctttgatccactgtta

SEQ ID NO: 340243 - DNA, 19 bp, Homo sapiens
  siRNA target sequence for C22orf4 (NM_014346.1,231-249).
ctttgatccactgttacat

SEQ ID NO: 340244 - DNA, 19 bp, Homo sapiens
  siRNA target sequence for C22orf4 (NM_014346.1,698-716).
cagcgctgagcgaaagaga

SEQ ID NO: 340245 - DNA, 19 bp, Homo sapiens
  siRNA target sequence for C22orf4 (NM_014346.1,719-737).
cctcccggctcgacaagtt

SEQ ID NO: 340246 - DNA, 19 bp, Homo sapiens
  siRNA target sequence for C22orf4 (NM_014346.1,722-740).
cccggctcgacaagttcaa

SEQ ID NO: 340247 - DNA, 19 bp, Homo sapiens
  siRNA target sequence for C22orf4 (NM_014346.1,762-780).
cacggaccttgaggaatta

SEQ ID NO: 340248 - DNA, 19 bp, Homo sapiens
  siRNA target sequence for C22orf4 (NM_014346.1,919-937).
gagcactattacgattcta

SEQ ID NO: 340249 - DNA, 19 bp, Homo sapiens
  siRNA target sequence for C22orf4 (NM_014346.1,935-953).
ctaggaacgacgaagttca

SEQ ID NO: 340250 - DNA, 19 bp, Homo sapiens
  siRNA target sequence for C22orf4 (NM_014346.1,1021-1039).
cccaaggtgacggagattt

SEQ ID NO: 340251 - DNA, 19 bp, Homo sapiens
  siRNA target sequence for C22orf4 (NM_014346.1,1026-1044).
ggtgacggagatttttgaa

SEQ ID NO: 340252 - DNA, 19 bp, Homo sapiens
  siRNA target sequence for C22orf4 (NM_014346.1,1074-1092).
cccagccagtggatacgtt

SEQ ID NO: 340253 - DNA, 19 bp, Homo sapiens
  siRNA target sequence for C22orf4 (NM_014346.1,1084-1102).
ggatacgttcagggtataa

SEQ ID NO: 340254 - DNA, 19 bp, Homo sapiens
  siRNA target sequence for C22orf4 (NM_014346.1,1085-1103).
gatacgttcagggtataaa

SEQ ID NO: 340255 - DNA, 19 bp, Homo sapiens
  siRNA target sequence for C22orf4 (NM_014346.1,1252-1270).
ggcattcaggacaactaca

SEQ ID NO: 340256 - DNA, 19 bp, Homo sapiens
  siRNA target sequence for C22orf4 (NM_014346.1,1276-1294).
gcccaacctgggattcaaa

SEQ ID NO: 340257 - DNA, 19 bp, Homo sapiens
  siRNA target sequence for C22orf4 (NM_014346.1,1277-1295).
cccaacctgggattcaaat

SEQ ID NO: 340258 - DNA, 19 bp, Homo sapiens
  siRNA target sequence for C22orf4 (NM_014346.1,1471-1489).
ccggacggcttttctcatt

SEQ ID NO: 340259 - DNA, 19 bp, Homo sapiens
  siRNA target sequence for C22orf4 (NM_014346.1,1472-1490).
cggacggcttttctcattt

SEQ ID NO: 340260 - DNA, 19 bp, Homo sapiens
  siRNA target sequence for C6orf123 (NM_014356.2,417-435).
gccagacacaggtttattt

SEQ ID NO: 340261 - DNA, 19 bp, Homo sapiens
  siRNA target sequence for CNTN5 (NM_014361.2,347-365).
cctcttggaaactaatgct

SEQ ID NO: 340262 - DNA, 19 bp, Homo sapiens
  siRNA target sequence for CNTN5 (NM_014361.2,384-402).
gtgtctttcagagtattca

SEQ ID NO: 340263 - DNA, 19 bp, Homo sapiens
  siRNA target sequence for CNTN5 (NM_014361.2,386-404).
gtctttcagagtattcaaa

SEQ ID NO: 340264 - DNA, 19 bp, Homo sapiens
  siRNA target sequence for CNTN5 (NM_014361.2,434-452).
ctgctttgttaagaattaa

SEQ ID NO: 340265 - DNA, 19 bp, Homo sapiens
  siRNA target sequence for CNTN5 (NM_014361.2,497-515).
gatacagcagcccttcatt

SEQ ID NO: 340266 - DNA, 19 bp, Homo sapiens
  siRNA target sequence for CNTN5 (NM_014361.2,546-564).
gctaggggcagctcagaat

SEQ ID NO: 340267 - DNA, 19 bp, Homo sapiens
  siRNA target sequence for CNTN5 (NM_014361.2,547-565).
ctaggggcagctcagaatt

SEQ ID NO: 340268 - DNA, 19 bp, Homo sapiens
  siRNA target sequence for CNTN5 (NM_014361.2,572-590).
cccccatcaatctttatca

SEQ ID NO: 340269 - DNA, 19 bp, Homo sapiens
  siRNA target sequence for CNTN5 (NM_014361.2,573-591).
ccccatcaatctttatcat

SEQ ID NO: 340270 - DNA, 19 bp, Homo sapiens
  siRNA target sequence for CNTN5 (NM_014361.2,624-642).
ggactatgggccagttttt

SEQ ID NO: 340271 - DNA, 19 bp, Homo sapiens
  siRNA target sequence for CNTN5 (NM_014361.2,643-661).
gtgcaagaaccagatgata

SEQ ID NO: 340272 - DNA, 19 bp, Homo sapiens
  siRNA target sequence for CNTN5 (NM_014361.2,690-708).
gaaggtagcattgaattgt

SEQ ID NO: 340273 - DNA, 19 bp, Homo sapiens
  siRNA target sequence for CNTN5 (NM_014361.2,776-794).
gtgattatcgctacagttt

SEQ ID NO: 340274 - DNA, 19 bp, Homo sapiens
  siRNA target sequence for CNTN5 (NM_014361.2,778-796).
gattatcgctacagtttga

SEQ ID NO: 340275 - DNA, 19 bp, Homo sapiens
  siRNA target sequence for CNTN5 (NM_014361.2,802-820).
ggcaccttcattataagca

SEQ ID NO: 340276 - DNA, 19 bp, Homo sapiens
  siRNA target sequence for CNTN5 (NM_014361.2,803-821).
gcaccttcattataagcaa

SEQ ID NO: 340277 - DNA, 19 bp, Homo sapiens
  siRNA target sequence for CNTN5 (NM_014361.2,838-856).
gattctggtcattatcagt

SEQ ID NO: 340278 - DNA, 19 bp, Homo sapiens
  siRNA target sequence for CNTN5 (NM_014361.2,842-860).
ctggtcattatcagtgttt

SEQ ID NO: 340279 - DNA, 19 bp, Homo sapiens
  siRNA target sequence for CNTN5 (NM_014361.2,847-865).
cattatcagtgtttagcaa

SEQ ID NO: 340280 - DNA, 19 bp, Homo sapiens
  siRNA target sequence for CNTN5 (NM_014361.2,867-885).
caacactgtggggagtatt

SEQ ID NO: 340281 - DNA, 19 bp, Homo sapiens
  siRNA target sequence for CNTN5 (NM_014361.2,968-986).
gccagggtgtcgttctgat

SEQ ID NO: 340282 - DNA, 19 bp, Homo sapiens
  siRNA target sequence for CNTN5 (NM_014361.2,1003-1021).
cattcaccagagatcatct

SEQ ID NO: 340283 - DNA, 19 bp, Homo sapiens
  siRNA target sequence for CNTN5 (NM_014361.2,1020-1038).
ctatagctgggtatttaat

SEQ ID NO: 340284 - DNA, 19 bp, Homo sapiens
  siRNA target sequence for CNTN5 (NM_014361.2,1084-1102).
caggagacaggcaaccttt

SEQ ID NO: 340285 - DNA, 19 bp, Homo sapiens
  siRNA target sequence for CNTN5 (NM_014361.2,1196-1214).
cactcactctgcgtaatga

SEQ ID NO: 340286 - DNA, 19 bp, Homo sapiens
  siRNA target sequence for CNTN5 (NM_014361.2,1238-1256).
cgaaaattgaggtccattt

SEQ ID NO: 340287 - DNA, 19 bp, Homo sapiens
  siRNA target sequence for CNTN5 (NM_014361.2,1263-1281).
cacggttacagctgctaaa

SEQ ID NO: 340288 - DNA, 19 bp, Homo sapiens
  siRNA target sequence for CNTN5 (NM_014361.2,1266-1284).
ggttacagctgctaaagga

SEQ ID NO: 340289 - DNA, 19 bp, Homo sapiens
  siRNA target sequence for CNTN5 (NM_014361.2,1276-1294).
gctaaaggaacaactgtta

SEQ ID NO: 340290 - DNA, 19 bp, Homo sapiens
  siRNA target sequence for CNTN5 (NM_014361.2,1316-1334).
gcaaccccgttccaacaat

SEQ ID NO: 340291 - DNA, 19 bp, Homo sapiens
  siRNA target sequence for CNTN5 (NM_014361.2,1320-1338).
ccccgttccaacaatcaca

SEQ ID NO: 340292 - DNA, 19 bp, Homo sapiens
  siRNA target sequence for CNTN5 (NM_014361.2,1321-1339).
cccgttccaacaatcacat

SEQ ID NO: 340293 - DNA, 19 bp, Homo sapiens
  siRNA target sequence for CNTN5 (NM_014361.2,1335-1353).
cacatggatgaaggttaat

SEQ ID NO: 340294 - DNA, 19 bp, Homo sapiens
  siRNA target sequence for CNTN5 (NM_014361.2,1340-1358).
ggatgaaggttaatggtta

SEQ ID NO: 340295 - DNA, 19 bp, Homo sapiens
  siRNA target sequence for CNTN5 (NM_014361.2,1344-1362).
gaaggttaatggttatatt

SEQ ID NO: 340296 - DNA, 19 bp, Homo sapiens
  siRNA target sequence for CNTN5 (NM_014361.2,1347-1365).
ggttaatggttatattcct

SEQ ID NO: 340297 - DNA, 19 bp, Homo sapiens
  siRNA target sequence for CNTN5 (NM_014361.2,1348-1366).
gttaatggttatattccta

SEQ ID NO: 340298 - DNA, 19 bp, Homo sapiens
  siRNA target sequence for CNTN5 (NM_014361.2,1371-1389).
ggcacgtctgcggaaatct

SEQ ID NO: 340299 - DNA, 19 bp, Homo sapiens
  siRNA target sequence for CNTN5 (NM_014361.2,1373-1391).
cacgtctgcggaaatctca

SEQ ID NO: 340300 - DNA, 19 bp, Homo sapiens
  siRNA target sequence for CNTN5 (NM_014361.2,1398-1416).
gctggaaataccgaatgta

SEQ ID NO: 340301 - DNA, 19 bp, Homo sapiens
  siRNA target sequence for CNTN5 (NM_014361.2,1475-1493).
cctttcgtggacaattaca

SEQ ID NO: 340302 - DNA, 19 bp, Homo sapiens
  siRNA target sequence for CNTN5 (NM_014361.2,1476-1494).
ctttcgtggacaattacaa

SEQ ID NO: 340303 - DNA, 19 bp, Homo sapiens
  siRNA target sequence for CNTN5 (NM_014361.2,1588-1606).
cccagacccacgtatcgtt

SEQ ID NO: 340304 - DNA, 19 bp, Homo sapiens
  siRNA target sequence for CNTN5 (NM_014361.2,1598-1616).
cgtatcgttggctgaagaa

SEQ ID NO: 340305 - DNA, 19 bp, Homo sapiens
  siRNA target sequence for CNTN5 (NM_014361.2,1634-1652).
ctcagagtagggttgagat

SEQ ID NO: 340306 - DNA, 19 bp, Homo sapiens
  siRNA target sequence for CNTN5 (NM_014361.2,1640-1658).
gtagggttgagatggttaa

SEQ ID NO: 340307 - DNA, 19 bp, Homo sapiens
  siRNA target sequence for CNTN5 (NM_014361.2,1654-1672).
gttaatggagtattgatga

SEQ ID NO: 340308 - DNA, 19 bp, Homo sapiens
  siRNA target sequence for CNTN5 (NM_014361.2,1671-1689).
gatccacaatgtgaatcaa

SEQ ID NO: 340309 - DNA, 19 bp, Homo sapiens
  siRNA target sequence for CNTN5 (NM_014361.2,1677-1695).
caatgtgaatcaatcagat

SEQ ID NO: 340310 - DNA, 19 bp, Homo sapiens
  siRNA target sequence for CNTN5 (NM_014361.2,1778-1796).
ccacttttgcactgaatca

SEQ ID NO: 340311 - DNA, 19 bp, Homo sapiens
  siRNA target sequence for CNTN5 (NM_014361.2,1779-1797).
cacttttgcactgaatcaa

SEQ ID NO: 340312 - DNA, 19 bp, Homo sapiens
  siRNA target sequence for CNTN5 (NM_014361.2,1855-1873).
caaggctctccaaaaccaa

SEQ ID NO: 340313 - DNA, 19 bp, Homo sapiens
  siRNA target sequence for CNTN5 (NM_014361.2,1939-1957).
gggagtctacggatcctaa

SEQ ID NO: 340314 - DNA, 19 bp, Homo sapiens
  siRNA target sequence for CNTN5 (NM_014361.2,1940-1958).
ggagtctacggatcctaaa

SEQ ID NO: 340315 - DNA, 19 bp, Homo sapiens
  siRNA target sequence for CNTN5 (NM_014361.2,1941-1959).
gagtctacggatcctaaat

SEQ ID NO: 340316 - DNA, 19 bp, Homo sapiens
  siRNA target sequence for CNTN5 (NM_014361.2,1945-1963).
ctacggatcctaaatgctt

SEQ ID NO: 340317 - DNA, 19 bp, Homo sapiens
  siRNA target sequence for CNTN5 (NM_014361.2,1953-1971).
cctaaatgcttccaaatca

SEQ ID NO: 340318 - DNA, 19 bp, Homo sapiens
  siRNA target sequence for CNTN5 (NM_014361.2,1996-2014).
ggggaaaacgtctttggtt

SEQ ID NO: 340319 - DNA, 19 bp, Homo sapiens
  siRNA target sequence for CNTN5 (NM_014361.2,2050-2068).
cctacaaggatagaactta

SEQ ID NO: 340320 - DNA, 19 bp, Homo sapiens
  siRNA target sequence for CNTN5 (NM_014361.2,2102-2120).
gcattgtccttaattgcaa

SEQ ID NO: 340321 - DNA, 19 bp, Homo sapiens
  siRNA target sequence for CNTN5 (NM_014361.2,2103-2121).
cattgtccttaattgcaaa

SEQ ID NO: 340322 - DNA, 19 bp, Homo sapiens
  siRNA target sequence for CNTN5 (NM_014361.2,2107-2125).
gtccttaattgcaaagcaa

SEQ ID NO: 340323 - DNA, 19 bp, Homo sapiens
  siRNA target sequence for CNTN5 (NM_014361.2,2123-2141).
caattcacgatgctagttt

SEQ ID NO: 340324 - DNA, 19 bp, Homo sapiens
  siRNA target sequence for CNTN5 (NM_014361.2,2138-2156).
gtttggatgtcactttcta

SEQ ID NO: 340325 - DNA, 19 bp, Homo sapiens
  siRNA target sequence for CNTN5 (NM_014361.2,2171-2189).
gacagcctattgatttcga

SEQ ID NO: 340326 - DNA, 19 bp, Homo sapiens
  siRNA target sequence for CNTN5 (NM_014361.2,2228-2246).
catcctctgcagatttaat

SEQ ID NO: 340327 - DNA, 19 bp, Homo sapiens
  siRNA target sequence for CNTN5 (NM_014361.2,2231-2249).
cctctgcagatttaatgat

SEQ ID NO: 340328 - DNA, 19 bp, Homo sapiens
  siRNA target sequence for CNTN5 (NM_014361.2,2353-2371).
ggcccacctgggatagtaa

SEQ ID NO: 340329 - DNA, 19 bp, Homo sapiens
  siRNA target sequence for CNTN5 (NM_014361.2,2354-2372).
gcccacctgggatagtaat

SEQ ID NO: 340330 - DNA, 19 bp, Homo sapiens
  siRNA target sequence for CNTN5 (NM_014361.2,2355-2373).
cccacctgggatagtaatt

SEQ ID NO: 340331 - DNA, 19 bp, Homo sapiens
  siRNA target sequence for CNTN5 (NM_014361.2,2357-2375).
cacctgggatagtaattgt

SEQ ID NO: 340332 - DNA, 19 bp, Homo sapiens
  siRNA target sequence for CNTN5 (NM_014361.2,2377-2395).
gaggaaataaccgaaagta

SEQ ID NO: 340333 - DNA, 19 bp, Homo sapiens
  siRNA target sequence for CNTN5 (NM_014361.2,2458-2476).
caagctcgcagcccatttt

SEQ ID NO: 340334 - DNA, 19 bp, Homo sapiens
  siRNA target sequence for CNTN5 (NM_014361.2,2537-2555).
ccatggctgtggacctaaa

SEQ ID NO: 340335 - DNA, 19 bp, Homo sapiens
  siRNA target sequence for CNTN5 (NM_014361.2,2538-2556).
catggctgtggacctaaat

SEQ ID NO: 340336 - DNA, 19 bp, Homo sapiens
  siRNA target sequence for CNTN5 (NM_014361.2,2618-2636).
gcaccccatctcgaatgat

SEQ ID NO: 340337 - DNA, 19 bp, Homo sapiens
  siRNA target sequence for CNTN5 (NM_014361.2,2630-2648).
gaatgatccgcacaaatga

SEQ ID NO: 340338 - DNA, 19 bp, Homo sapiens
  siRNA target sequence for CNTN5 (NM_014361.2,2661-2679).
gacagcacccaccaatgta

SEQ ID NO: 340339 - DNA, 19 bp, Homo sapiens
  siRNA target sequence for CNTN5 (NM_014361.2,2673-2691).
caatgtaagcggaagaagt

SEQ ID NO: 340340 - DNA, 19 bp, Homo sapiens
  siRNA target sequence for CNTN5 (NM_014361.2,2717-2735).
cctgggagccagtatctga

SEQ ID NO: 340341 - DNA, 19 bp, Homo sapiens
  siRNA target sequence for CNTN5 (NM_014361.2,2822-2840).
cctctgaagcttccaaatt

SEQ ID NO: 340342 - DNA, 19 bp, Homo sapiens
  siRNA target sequence for CNTN5 (NM_014361.2,2841-2859).
catttatcgagatgaaagt

SEQ ID NO: 340343 - DNA, 19 bp, Homo sapiens
  siRNA target sequence for CNTN5 (NM_014361.2,2884-2902).
gtgaaagttggcgtttata

SEQ ID NO: 340344 - DNA, 19 bp, Homo sapiens
  siRNA target sequence for CNTN5 (NM_014361.2,2890-2908).
gttggcgtttataacaata

SEQ ID NO: 340345 - DNA, 19 bp, Homo sapiens
  siRNA target sequence for CNTN5 (NM_014361.2,2895-2913).
cgtttataacaataaagga

SEQ ID NO: 340346 - DNA, 19 bp, Homo sapiens
  siRNA target sequence for CNTN5 (NM_014361.2,2912-2930).
gagatgggccttttagtca

SEQ ID NO: 340347 - DNA, 19 bp, Homo sapiens
  siRNA target sequence for CNTN5 (NM_014361.2,2929-2947).
caaattgtggtcatctgtt

SEQ ID NO: 340348 - DNA, 19 bp, Homo sapiens
  siRNA target sequence for CNTN5 (NM_014361.2,2969-2987).
ctgctcccacagatgtcaa

SEQ ID NO: 340349 - DNA, 19 bp, Homo sapiens
  siRNA target sequence for CNTN5 (NM_014361.2,3133-3151).
gagtctttcgtcatcctaa

SEQ ID NO: 340350 - DNA, 19 bp, Homo sapiens
  siRNA target sequence for CNTN5 (NM_014361.2,3154-3172).
ggattagaaggaaatacgt

SEQ ID NO: 340351 - DNA, 19 bp, Homo sapiens
  siRNA target sequence for CNTN5 (NM_014361.2,3155-3173).
gattagaaggaaatacgtt

SEQ ID NO: 340352 - DNA, 19 bp, Homo sapiens
  siRNA target sequence for CNTN5 (NM_014361.2,3163-3181).
ggaaatacgttatatcact

SEQ ID NO: 340353 - DNA, 19 bp, Homo sapiens
  siRNA target sequence for CNTN5 (NM_014361.2,3164-3182).
gaaatacgttatatcactt

SEQ ID NO: 340354 - DNA, 19 bp, Homo sapiens
  siRNA target sequence for CNTN5 (NM_014361.2,3249-3267).
gaaatcccctcctagtcaa

SEQ ID NO: 340355 - DNA, 19 bp, Homo sapiens
  siRNA target sequence for CNTN5 (NM_014361.2,3320-3338).
gggaacccgtcataccatt

SEQ ID NO: 340356 - DNA, 19 bp, Homo sapiens
  siRNA target sequence for CNTN5 (NM_014361.2,3321-3339).
ggaacccgtcataccatta

SEQ ID NO: 340357 - DNA, 19 bp, Homo sapiens
  siRNA target sequence for CNTN5 (NM_014361.2,3335-3353).
cattagccaacgaatctga

SEQ ID NO: 340358 - DNA, 19 bp, Homo sapiens
  siRNA target sequence for CNTN5 (NM_014361.2,3396-3414).
caacagccaagttattgaa

SEQ ID NO: 340359 - DNA, 19 bp, Homo sapiens
  siRNA target sequence for CNTN5 (NM_014361.2,3446-3464).
cagatgctggagtctatat

SEQ ID NO: 340360 - DNA, 19 bp, Homo sapiens
  siRNA target sequence for CNTN5 (NM_014361.2,3606-3624).
gctcttggcattgatgatt

SEQ ID NO: 340361 - DNA, 19 bp, Homo sapiens
  siRNA target sequence for NS (NM_014366.3,62-80).
cctgccataagcggtataa

SEQ ID NO: 340362 - DNA, 19 bp, Homo sapiens
  siRNA target sequence for NS (NM_014366.3,63-81).
ctgccataagcggtataaa

SEQ ID NO: 340363 - DNA, 19 bp, Homo sapiens
  siRNA target sequence for NS (NM_014366.3,65-83).
gccataagcggtataaaat

SEQ ID NO: 340364 - DNA, 19 bp, Homo sapiens
  siRNA target sequence for NS (NM_014366.3,97-115).
cgagaacatcatcgaaaat

SEQ ID NO: 340365 - DNA, 19 bp, Homo sapiens
  siRNA target sequence for NS (NM_014366.3,103-121).
catcatcgaaaattaagaa

SEQ ID NO: 340366 - DNA, 19 bp, Homo sapiens
  siRNA target sequence for NS (NM_014366.3,320-338).
catcaaatgtggaacctat

SEQ ID NO: 340367 - DNA, 19 bp, Homo sapiens
  siRNA target sequence for NS (NM_014366.3,376-394).
gccaagtcgggcaaacaga

SEQ ID NO: 340368 - DNA, 19 bp, Homo sapiens
  siRNA target sequence for NS (NM_014366.3,381-399).
gtcgggcaaacagaattca

SEQ ID NO: 340369 - DNA, 19 bp, Homo sapiens
  siRNA target sequence for NS (NM_014366.3,383-401).
cgggcaaacagaattcaaa

SEQ ID NO: 340370 - DNA, 19 bp, Homo sapiens
  siRNA target sequence for NS (NM_014366.3,405-423).
gctgtactgccaagaactt

SEQ ID NO: 340371 - DNA, 19 bp, Homo sapiens
  siRNA target sequence for NS (NM_014366.3,491-509).
gatgtcctcaggtagaaga

SEQ ID NO: 340372 - DNA, 19 bp, Homo sapiens
  siRNA target sequence for NS (NM_014366.3,529-547).
cagaaaaagctggtactta

SEQ ID NO: 340373 - DNA, 19 bp, Homo sapiens
  siRNA target sequence for NS (NM_014366.3,628-646).
gtgttcagagcctcaacaa

SEQ ID NO: 340374 - DNA, 19 bp, Homo sapiens
  siRNA target sequence for NS (NM_014366.3,635-653).
gagcctcaacaaaaccaaa

SEQ ID NO: 340375 - DNA, 19 bp, Homo sapiens
  siRNA target sequence for NS (NM_014366.3,655-673).
gataaagggaagataacca

SEQ ID NO: 340376 - DNA, 19 bp, Homo sapiens
  siRNA target sequence for NS (NM_014366.3,693-711).
gaatgctgctccattcaga

SEQ ID NO: 340377 - DNA, 19 bp, Homo sapiens
  siRNA target sequence for NS (NM_014366.3,782-800).
ccattcgggttggagtaat

SEQ ID NO: 340378 - DNA, 19 bp, Homo sapiens
  siRNA target sequence for NS (NM_014366.3,783-801).
cattcgggttggagtaatt

SEQ ID NO: 340379 - DNA, 19 bp, Homo sapiens
  siRNA target sequence for NS (NM_014366.3,787-805).
cgggttggagtaattggtt

SEQ ID NO: 340380 - DNA, 19 bp, Homo sapiens
  siRNA target sequence for NS (NM_014366.3,788-806).
gggttggagtaattggttt

SEQ ID NO: 340381 - DNA, 19 bp, Homo sapiens
  siRNA target sequence for NS (NM_014366.3,827-845).
gcattatcaatagcttaaa

SEQ ID NO: 340382 - DNA, 19 bp, Homo sapiens
  siRNA target sequence for NS (NM_014366.3,871-889).
gtatccatggggcttacaa

SEQ ID NO: 340383 - DNA, 19 bp, Homo sapiens
  siRNA target sequence for NS (NM_014366.3,887-905).
caaggagcatgcaagttgt

SEQ ID NO: 340384 - DNA, 19 bp, Homo sapiens
  siRNA target sequence for NS (NM_014366.3,915-933).
caaacagatcacaatcata

SEQ ID NO: 340385 - DNA, 19 bp, Homo sapiens
  siRNA target sequence for NS (NM_014366.3,919-937).
cagatcacaatcatagata

SEQ ID NO: 340386 - DNA, 19 bp, Homo sapiens
  siRNA target sequence for NS (NM_014366.3,921-939).
gatcacaatcatagatagt

SEQ ID NO: 340387 - DNA, 19 bp, Homo sapiens
  siRNA target sequence for NS (NM_014366.3,948-966).
catcgtatctccacttaat

SEQ ID NO: 340388 - DNA, 19 bp, Homo sapiens
  siRNA target sequence for NS (NM_014366.3,987-1005).
gcgaagtccagcaagtatt

SEQ ID NO: 340389 - DNA, 19 bp, Homo sapiens
  siRNA target sequence for NS (NM_014366.3,989-1007).
gaagtccagcaagtattga

SEQ ID NO: 340390 - DNA, 19 bp, Homo sapiens
  siRNA target sequence for NS (NM_014366.3,995-1013).
cagcaagtattgaagtagt

SEQ ID NO: 340391 - DNA, 19 bp, Homo sapiens
  siRNA target sequence for NS (NM_014366.3,997-1015).
gcaagtattgaagtagtaa

SEQ ID NO: 340392 - DNA, 19 bp, Homo sapiens
  siRNA target sequence for NS (NM_014366.3,998-1016).
caagtattgaagtagtaaa

SEQ ID NO: 340393 - DNA, 19 bp, Homo sapiens
  siRNA target sequence for NS (NM_014366.3,1058-1076).
ctcgacaggtagtactgaa

SEQ ID NO: 340394 - DNA, 19 bp, Homo sapiens
  siRNA target sequence for NS (NM_014366.3,1065-1083).
ggtagtactgaaatatact

SEQ ID NO: 340395 - DNA, 19 bp, Homo sapiens
  siRNA target sequence for NS (NM_014366.3,1084-1102).
gtcccaggctacaggaatt

SEQ ID NO: 340396 - DNA, 19 bp, Homo sapiens
  siRNA target sequence for NS (NM_014366.3,1088-1106).
caggctacaggaattctct

SEQ ID NO: 340397 - DNA, 19 bp, Homo sapiens
  siRNA target sequence for NS (NM_014366.3,1203-1221).
gacaggtgcctcattagct

SEQ ID NO: 340398 - DNA, 19 bp, Homo sapiens
  siRNA target sequence for NS (NM_014366.3,1208-1226).
gtgcctcattagcttacta

SEQ ID NO: 340399 - DNA, 19 bp, Homo sapiens
  siRNA target sequence for NS (NM_014366.3,1287-1305).
catgaaaagcggcttcaat

SEQ ID NO: 340400 - DNA, 19 bp, Homo sapiens
  siRNA target sequence for NS (NM_014366.3,1346-1364).
ccatcaagggccctcattt

SEQ ID NO: 340401 - DNA, 19 bp, Homo sapiens
  siRNA target sequence for NS (NM_014366.3,1367-1385).
ccaatagcatccttttcca

SEQ ID NO: 340402 - DNA, 19 bp, Homo sapiens
  siRNA target sequence for NS (NM_014366.3,1386-1404).
gtcttccggtctgacaaat

SEQ ID NO: 340403 - DNA, 19 bp, Homo sapiens
  siRNA target sequence for NS (NM_014366.3,1391-1409).
ccggtctgacaaatggaat

SEQ ID NO: 340404 - DNA, 19 bp, Homo sapiens
  siRNA target sequence for NS (NM_014366.3,1392-1410).
cggtctgacaaatggaata

SEQ ID NO: 340405 - DNA, 19 bp, Homo sapiens
  siRNA target sequence for NS (NM_014366.3,1393-1411).
ggtctgacaaatggaataa

SEQ ID NO: 340406 - DNA, 19 bp, Homo sapiens
  siRNA target sequence for NS (NM_014366.3,1594-1612).
cagtctacaaggtctttta

SEQ ID NO: 340407 - DNA, 19 bp, Homo sapiens
  siRNA target sequence for NS (NM_014366.3,1605-1623).
gtcttttatcttggataaa

SEQ ID NO: 340408 - DNA, 19 bp, Homo sapiens
  siRNA target sequence for E2IG5 (NM_014367.2,101-119).
gcaggaagctgttttaggt

SEQ ID NO: 340409 - DNA, 19 bp, Homo sapiens
  siRNA target sequence for E2IG5 (NM_014367.2,102-120).
caggaagctgttttaggtt

SEQ ID NO: 340410 - DNA, 19 bp, Homo sapiens
  siRNA target sequence for E2IG5 (NM_014367.2,104-122).
ggaagctgttttaggttat

SEQ ID NO: 340411 - DNA, 19 bp, Homo sapiens
  siRNA target sequence for E2IG5 (NM_014367.2,108-126).
gctgttttaggttatgtga

SEQ ID NO: 340412 - DNA, 19 bp, Homo sapiens
  siRNA target sequence for E2IG5 (NM_014367.2,118-136).
gttatgtgaaagagatgtt

SEQ ID NO: 340413 - DNA, 19 bp, Homo sapiens
  siRNA target sequence for E2IG5 (NM_014367.2,163-181).
ctctgatttgaagagaata

SEQ ID NO: 340414 - DNA, 19 bp, Homo sapiens
  siRNA target sequence for E2IG5 (NM_014367.2,259-277).
ctacggattggcagaaaaa

SEQ ID NO: 340415 - DNA, 19 bp, Homo sapiens
  siRNA target sequence for E2IG5 (NM_014367.2,371-389).
gtgaagatcagctatctaa

SEQ ID NO: 340416 - DNA, 19 bp, Homo sapiens
  siRNA target sequence for E2IG5 (NM_014367.2,376-394).
gatcagctatctaatgatt

SEQ ID NO: 340417 - DNA, 19 bp, Homo sapiens
  siRNA target sequence for E2IG5 (NM_014367.2,613-631).
gtggtatgaggatccattt

SEQ ID NO: 340418 - DNA, 19 bp, Homo sapiens
  siRNA target sequence for E2IG5 (NM_014367.2,615-633).
ggtatgaggatccatttca

SEQ ID NO: 340419 - DNA, 19 bp, Homo sapiens
  siRNA target sequence for E2IG5 (NM_014367.2,616-634).
gtatgaggatccatttcat

SEQ ID NO: 340420 - DNA, 19 bp, Homo sapiens
  siRNA target sequence for E2IG5 (NM_014367.2,623-641).
gatccatttcataaagtat

SEQ ID NO: 340421 - DNA, 19 bp, Homo sapiens
  siRNA target sequence for CYFIP2 (NM_014376.1,373-391).
catgtaccaggctaacttt

SEQ ID NO: 340422 - DNA, 19 bp, Homo sapiens
  siRNA target sequence for CYFIP2 (NM_014376.1,383-401).
gctaactttgacacaaact

SEQ ID NO: 340423 - DNA, 19 bp, Homo sapiens
  siRNA target sequence for CYFIP2 (NM_014376.1,384-402).
ctaactttgacacaaactt

SEQ ID NO: 340424 - DNA, 19 bp, Homo sapiens
  siRNA target sequence for CYFIP2 (NM_014376.1,427-445).
gggcattgcaaggtacatt

SEQ ID NO: 340425 - DNA, 19 bp, Homo sapiens
  siRNA target sequence for CYFIP2 (NM_014376.1,570-588).
ccaaccgagtagagatcta

SEQ ID NO: 340426 - DNA, 19 bp, Homo sapiens
  siRNA target sequence for CYFIP2 (NM_014376.1,575-593).
cgagtagagatctatgaga

SEQ ID NO: 340427 - DNA, 19 bp, Homo sapiens
  siRNA target sequence for CYFIP2 (NM_014376.1,740-758).
ctgacccttggcaagttca

SEQ ID NO: 340428 - DNA, 19 bp, Homo sapiens
  siRNA target sequence for CYFIP2 (NM_014376.1,796-814).
gaagtgcagcgtcaagaat

SEQ ID NO: 340429 - DNA, 19 bp, Homo sapiens
  siRNA target sequence for CYFIP2 (NM_014376.1,878-896).
caggagtcgcagaaccttt

SEQ ID NO: 340430 - DNA, 19 bp, Homo sapiens
  siRNA target sequence for CYFIP2 (NM_014376.1,1068-1086).
gctttggcctctacctaat

SEQ ID NO: 340431 - DNA, 19 bp, Homo sapiens
  siRNA target sequence for CYFIP2 (NM_014376.1,1078-1096).
ctacctaatggatggaaat

SEQ ID NO: 340432 - DNA, 19 bp, Homo sapiens
  siRNA target sequence for CYFIP2 (NM_014376.1,1139-1157).
cttagcaaaattgataaat

SEQ ID NO: 340433 - DNA, 19 bp, Homo sapiens
  siRNA target sequence for CYFIP2 (NM_014376.1,1230-1248).
gtgctcactatgaagagaa

SEQ ID NO: 340434 - DNA, 19 bp, Homo sapiens
  siRNA target sequence for CYFIP2 (NM_014376.1,1279-1297).
catcagcccccagtacaat

SEQ ID NO: 340435 - DNA, 19 bp, Homo sapiens
  siRNA target sequence for CYFIP2 (NM_014376.1,1551-1569).
gcaccgcggaggaatatga

SEQ ID NO: 340436 - DNA, 19 bp, Homo sapiens
  siRNA target sequence for CYFIP2 (NM_014376.1,1570-1588).
gagagccacacgctacaat

SEQ ID NO: 340437 - DNA, 19 bp, Homo sapiens
  siRNA target sequence for CYFIP2 (NM_014376.1,1591-1609).
caccagtgaggaaaaattt

SEQ ID NO: 340438 - DNA, 19 bp, Homo sapiens
  siRNA target sequence for CYFIP2 (NM_014376.1,1754-1772).
caggcggtacggaagaaga

SEQ ID NO: 340439 - DNA, 19 bp, Homo sapiens
  siRNA target sequence for CYFIP2 (NM_014376.1,1757-1775).
gcggtacggaagaagaaga

SEQ ID NO: 340440 - DNA, 19 bp, Homo sapiens
  siRNA target sequence for CYFIP2 (NM_014376.1,1789-1807).
cgtcctacaggcaattcga

SEQ ID NO: 340441 - DNA, 19 bp, Homo sapiens
  siRNA target sequence for CYFIP2 (NM_014376.1,1790-1808).
gtcctacaggcaattcgaa

SEQ ID NO: 340442 - DNA, 19 bp, Homo sapiens
  siRNA target sequence for CYFIP2 (NM_014376.1,1833-1851).
ggcgagagccccctaatga

SEQ ID NO: 340443 - DNA, 19 bp, Homo sapiens
  siRNA target sequence for CYFIP2 (NM_014376.1,1948-1966).
gcggaccatgcttgaatca

SEQ ID NO: 340444 - DNA, 19 bp, Homo sapiens
  siRNA target sequence for CYFIP2 (NM_014376.1,1950-1968).
ggaccatgcttgaatcact

SEQ ID NO: 340445 - DNA, 19 bp, Homo sapiens
  siRNA target sequence for CYFIP2 (NM_014376.1,2033-2051).
gccatagaggactttcaca

SEQ ID NO: 340446 - DNA, 19 bp, Homo sapiens
  siRNA target sequence for CYFIP2 (NM_014376.1,2034-2052).
ccatagaggactttcacaa

SEQ ID NO: 340447 - DNA, 19 bp, Homo sapiens
  siRNA target sequence for CYFIP2 (NM_014376.1,2188-2206).
gtccatgccctggattcta

SEQ ID NO: 340448 - DNA, 19 bp, Homo sapiens
  siRNA target sequence for CYFIP2 (NM_014376.1,2199-2217).
ggattctaacggaccatat

SEQ ID NO: 340449 - DNA, 19 bp, Homo sapiens
  siRNA target sequence for CYFIP2 (NM_014376.1,2418-2436).
gcagtgtcctgttggataa

SEQ ID NO: 340450 - DNA, 19 bp, Homo sapiens
  siRNA target sequence for CYFIP2 (NM_014376.1,2423-2441).
gtcctgttggataaacgtt

SEQ ID NO: 340451 - DNA, 19 bp, Homo sapiens
  siRNA target sequence for CYFIP2 (NM_014376.1,2425-2443).
cctgttggataaacgtttt

SEQ ID NO: 340452 - DNA, 19 bp, Homo sapiens
  siRNA target sequence for CYFIP2 (NM_014376.1,2428-2446).
gttggataaacgttttcga

SEQ ID NO: 340453 - DNA, 19 bp, Homo sapiens
  siRNA target sequence for CYFIP2 (NM_014376.1,2444-2462).
cgagctgagtgtaagaatt

SEQ ID NO: 340454 - DNA, 19 bp, Homo sapiens
  siRNA target sequence for CYFIP2 (NM_014376.1,2458-2476).
gaattatggcgtcatcatt

SEQ ID NO: 340455 - DNA, 19 bp, Homo sapiens
  siRNA target sequence for CYFIP2 (NM_014376.1,2486-2504).
ccgtccaatcgctatgaaa

SEQ ID NO: 340456 - DNA, 19 bp, Homo sapiens
  siRNA target sequence for CYFIP2 (NM_014376.1,2488-2506).
gtccaatcgctatgaaaca

SEQ ID NO: 340457 - DNA, 19 bp, Homo sapiens
  siRNA target sequence for CYFIP2 (NM_014376.1,2490-2508).
ccaatcgctatgaaacact

SEQ ID NO: 340458 - DNA, 19 bp, Homo sapiens
  siRNA target sequence for CYFIP2 (NM_014376.1,2538-2556).
gtagatcaattgacttgaa

SEQ ID NO: 340459 - DNA, 19 bp, Homo sapiens
  siRNA target sequence for CYFIP2 (NM_014376.1,2583-2601).
ccgccatgtataaatcctt

SEQ ID NO: 340460 - DNA, 19 bp, Homo sapiens
  siRNA target sequence for CYFIP2 (NM_014376.1,2685-2703).
cgcatcggctgctctgtaa

SEQ ID NO: 340461 - DNA, 19 bp, Homo sapiens
  siRNA target sequence for CYFIP2 (NM_014376.1,2690-2708).
cggctgctctgtaagcata

SEQ ID NO: 340462 - DNA, 19 bp, Homo sapiens
  siRNA target sequence for CYFIP2 (NM_014376.1,2737-2755).
ccgagaggccaatcacaat

SEQ ID NO: 340463 - DNA, 19 bp, Homo sapiens
  siRNA target sequence for CYFIP2 (NM_014376.1,2838-2856).
ggtccactaaccgttttgt

SEQ ID NO: 340464 - DNA, 19 bp, Homo sapiens
  siRNA target sequence for CYFIP2 (NM_014376.1,2903-2921).
gccaacgtccagccttatt

SEQ ID NO: 340465 - DNA, 19 bp, Homo sapiens
  siRNA target sequence for CYFIP2 (NM_014376.1,2904-2922).
ccaacgtccagccttatta

SEQ ID NO: 340466 - DNA, 19 bp, Homo sapiens
  siRNA target sequence for CYFIP2 (NM_014376.1,2915-2933).
ccttattacctctatggat

SEQ ID NO: 340467 - DNA, 19 bp, Homo sapiens
  siRNA target sequence for CYFIP2 (NM_014376.1,2931-2949).
gatccaagcctctcaacat

SEQ ID NO: 340468 - DNA, 19 bp, Homo sapiens
  siRNA target sequence for CYFIP2 (NM_014376.1,2970-2988).
gctcctacaggaatttcgt

SEQ ID NO: 340469 - DNA, 19 bp, Homo sapiens
  siRNA target sequence for CYFIP2 (NM_014376.1,2987-3005).
gtggggccacctcatttca

SEQ ID NO: 340470 - DNA, 19 bp, Homo sapiens
  siRNA target sequence for CYFIP2 (NM_014376.1,3015-3033).
gcagactcctgggttatca

SEQ ID NO: 340471 - DNA, 19 bp, Homo sapiens
  siRNA target sequence for CYFIP2 (NM_014376.1,3079-3097).
cttgctccaaggaaccatt

SEQ ID NO: 340472 - DNA, 19 bp, Homo sapiens
  siRNA target sequence for CYFIP2 (NM_014376.1,3094-3112).
cattctccagtatgtgaaa

SEQ ID NO: 340473 - DNA, 19 bp, Homo sapiens
  siRNA target sequence for CYFIP2 (NM_014376.1,3144-3162).
gcttgccccgacatgagta

SEQ ID NO: 340474 - DNA, 19 bp, Homo sapiens
  siRNA target sequence for CYFIP2 (NM_014376.1,3145-3163).
cttgccccgacatgagtat

SEQ ID NO: 340475 - DNA, 19 bp, Homo sapiens
  siRNA target sequence for CYFIP2 (NM_014376.1,3217-3235).
gtacgcagagctcaaaaca

SEQ ID NO: 340476 - DNA, 19 bp, Homo sapiens
  siRNA target sequence for CYFIP2 (NM_014376.1,3335-3353).
gccgcacccttccaaaaca

SEQ ID NO: 340477 - DNA, 19 bp, Homo sapiens
  siRNA target sequence for CYFIP2 (NM_014376.1,3336-3354).
ccgcacccttccaaaacat

SEQ ID NO: 340478 - DNA, 19 bp, Homo sapiens
  siRNA target sequence for CYFIP2 (NM_014376.1,3358-3376).
gcctagagtctacatcaaa

SEQ ID NO: 340479 - DNA, 19 bp, Homo sapiens
  siRNA target sequence for CYFIP2 (NM_014376.1,3741-3759).
ctggttgctccatcattgt

SEQ ID NO: 340480 - DNA, 19 bp, Homo sapiens
  siRNA target sequence for CYFIP2 (NM_014376.1,3881-3899).
cggatcaggaagtatcaga

SEQ ID NO: 340481 - DNA, 19 bp, Homo sapiens
  siRNA target sequence for CYFIP2 (NM_014376.1,3882-3900).
ggatcaggaagtatcagat

SEQ ID NO: 340482 - DNA, 19 bp, Homo sapiens
  siRNA target sequence for MGC29875 (NM_014388.2,92-110).
ctactcaacaccctaacta

SEQ ID NO: 340483 - DNA, 19 bp, Homo sapiens
  siRNA target sequence for MGC29875 (NM_014388.2,95-113).
ctcaacaccctaactaaaa

SEQ ID NO: 340484 - DNA, 19 bp, Homo sapiens
  siRNA target sequence for MGC29875 (NM_014388.2,142-160).
cgaggagcatcccttctat

SEQ ID NO: 340485 - DNA, 19 bp, Homo sapiens
  siRNA target sequence for MGC29875 (NM_014388.2,497-515).
ccgggcacatcacaaacat

SEQ ID NO: 340486 - DNA, 19 bp, Homo sapiens
  siRNA target sequence for MGC29875 (NM_014388.2,553-571).
gttcagcctggaaaccaat

SEQ ID NO: 340487 - DNA, 19 bp, Homo sapiens
  siRNA target sequence for MGC29875 (NM_014388.2,558-576).
gcctggaaaccaattttct

SEQ ID NO: 340488 - DNA, 19 bp, Homo sapiens
  siRNA target sequence for MGC29875 (NM_014388.2,624-642).
catttcttcaacatgtgaa

SEQ ID NO: 340489 - DNA, 19 bp, Homo sapiens
  siRNA target sequence for MGC29875 (NM_014388.2,851-869).
ctatctggtccccaaaaat

SEQ ID NO: 340490 - DNA, 19 bp, Homo sapiens
  siRNA target sequence for MGC29875 (NM_014388.2,921-939).
cttaccgggacctgttcta

SEQ ID NO: 340491 - DNA, 19 bp, Homo sapiens
  siRNA target sequence for MGC29875 (NM_014388.2,985-1003).
gtattgcctgcatgtgata

SEQ ID NO: 340492 - DNA, 19 bp, Homo sapiens
  siRNA target sequence for MGC29875 (NM_014388.2,990-1008).
gcctgcatgtgataaatca

SEQ ID NO: 340493 - DNA, 19 bp, Homo sapiens
  siRNA target sequence for MGC29875 (NM_014388.2,1050-1068).
gacgccgaagccagaagtt

SEQ ID NO: 340494 - DNA, 19 bp, Homo sapiens
  siRNA target sequence for MGC29875 (NM_014388.2,1262-1280).
gagagaccacccaacttga

SEQ ID NO: 340495 - DNA, 19 bp, Homo sapiens
  siRNA target sequence for MGC29875 (NM_014388.2,1279-1297).
gaagaggcctgaggattat

SEQ ID NO: 340496 - DNA, 19 bp, Homo sapiens
  siRNA target sequence for MGC29875 (NM_014388.2,1282-1300).
gaggcctgaggattatgaa

SEQ ID NO: 340497 - DNA, 19 bp, Homo sapiens
  siRNA target sequence for MGC29875 (NM_014388.2,1291-1309).
ggattatgaagccgtattt

SEQ ID NO: 340498 - DNA, 19 bp, Homo sapiens
  siRNA target sequence for MGC29875 (NM_014388.2,1302-1320).
ccgtatttgtgggcaatat

SEQ ID NO: 340499 - DNA, 19 bp, Homo sapiens
  siRNA target sequence for MGC29875 (NM_014388.2,1335-1353).
ggattggagtggcaatact

SEQ ID NO: 340500 - DNA, 19 bp, Homo sapiens
  siRNA target sequence for MGC29875 (NM_014388.2,1336-1354).
gattggagtggcaatactt

SEQ ID NO: 340501 - DNA, 19 bp, Homo sapiens
  siRNA target sequence for MGC29875 (NM_014388.2,1357-1375).
gagaagcatccgactctat

SEQ ID NO: 340502 - DNA, 19 bp, Homo sapiens
  siRNA target sequence for MGC29875 (NM_014388.2,1368-1386).
gactctatgccccgtttta

SEQ ID NO: 340503 - DNA, 19 bp, Homo sapiens
  siRNA target sequence for MGC29875 (NM_014388.2,1479-1497).
ctatcgagcttctcatcat

SEQ ID NO: 340504 - DNA, 19 bp, Homo sapiens
  siRNA target sequence for MGC29875 (NM_014388.2,1483-1501).
cgagcttctcatcattgat

SEQ ID NO: 340505 - DNA, 19 bp, Homo sapiens
  siRNA target sequence for MGC29875 (NM_014388.2,1535-1553).
catgtcctgcatttgatga

SEQ ID NO: 340506 - DNA, 19 bp, Homo sapiens
  siRNA target sequence for MGC29875 (NM_014388.2,1579-1597).
ctcacatggggtagacttt

SEQ ID NO: 340507 - DNA, 19 bp, Homo sapiens
  siRNA target sequence for MGC29875 (NM_014388.2,1607-1625).
cggatgtggagcctcaata

SEQ ID NO: 340508 - DNA, 19 bp, Homo sapiens
  siRNA target sequence for MGC29875 (NM_014388.2,1608-1626).
ggatgtggagcctcaataa

SEQ ID NO: 340509 - DNA, 19 bp, Homo sapiens
  siRNA target sequence for MGC29875 (NM_014388.2,1609-1627).
gatgtggagcctcaataat

SEQ ID NO: 340510 - DNA, 19 bp, Homo sapiens
  siRNA target sequence for MGC29875 (NM_014388.2,1735-1753).
gaggaatgtcccaatgaca

SEQ ID NO: 340511 - DNA, 19 bp, Homo sapiens
  siRNA target sequence for MGC29875 (NM_014388.2,1745-1763).
ccaatgacaggctctatca

SEQ ID NO: 340512 - DNA, 19 bp, Homo sapiens
  siRNA target sequence for MGC29875 (NM_014388.2,1816-1834).
cctagcttcagtgattgat

SEQ ID NO: 340513 - DNA, 19 bp, Homo sapiens
  siRNA target sequence for MGC29875 (NM_014388.2,1826-1844).
gtgattgatgccaggttta

SEQ ID NO: 340514 - DNA, 19 bp, Homo sapiens
  siRNA target sequence for MGC29875 (NM_014388.2,1927-1945).
cttcgtgcgtcttcgaaat

SEQ ID NO: 340515 - DNA, 19 bp, Homo sapiens
  siRNA target sequence for MGC29875 (NM_014388.2,1931-1949).
gtgcgtcttcgaaattact

SEQ ID NO: 340516 - DNA, 19 bp, Homo sapiens
  siRNA target sequence for MGC29875 (NM_014388.2,1934-1952).
cgtcttcgaaattacttca

SEQ ID NO: 340517 - DNA, 19 bp, Homo sapiens
  siRNA target sequence for MGC29875 (NM_014388.2,2030-2048).
cttcaaggagagaaacagt

SEQ ID NO: 340518 - DNA, 19 bp, Homo sapiens
  siRNA target sequence for MGC29875 (NM_014388.2,2063-2081).
gagcgcttccatttctaca

SEQ ID NO: 340519 - DNA, 19 bp, Homo sapiens
  siRNA target sequence for MGC29875 (NM_014388.2,2077-2095).
ctacaaaaggtatacaata

SEQ ID NO: 340520 - DNA, 19 bp, Homo sapiens
  siRNA target sequence for MGC29875 (NM_014388.2,2099-2117).
ggcatcaggaacctgattt

SEQ ID NO: 340521 - DNA, 19 bp, Homo sapiens
  siRNA target sequence for MGC29875 (NM_014388.2,2100-2118).
gcatcaggaacctgatttt

SEQ ID NO: 340522 - DNA, 19 bp, Homo sapiens
  siRNA target sequence for MGC29875 (NM_014388.2,2106-2124).
ggaacctgattttctatga

SEQ ID NO: 340523 - DNA, 19 bp, Homo sapiens
  siRNA target sequence for MGC29875 (NM_014388.2,2107-2125).
gaacctgattttctatgaa

SEQ ID NO: 340524 - DNA, 19 bp, Homo sapiens
  siRNA target sequence for MGC29875 (NM_014388.2,2119-2137).
ctatgaactgccgacatat

SEQ ID NO: 340525 - DNA, 19 bp, Homo sapiens
  siRNA target sequence for MGC29875 (NM_014388.2,2128-2146).
gccgacatatccacacttt

SEQ ID NO: 340526 - DNA, 19 bp, Homo sapiens
  siRNA target sequence for MGC29875 (NM_014388.2,2130-2148).
cgacatatccacactttta

SEQ ID NO: 340527 - DNA, 19 bp, Homo sapiens
  siRNA target sequence for MGC29875 (NM_014388.2,2141-2159).
cacttttacagtgaaatct

SEQ ID NO: 340528 - DNA, 19 bp, Homo sapiens
  siRNA target sequence for MGC29875 (NM_014388.2,2202-2220).
ggacctgcactgttctcta

SEQ ID NO: 340529 - DNA, 19 bp, Homo sapiens
  siRNA target sequence for C4.4A (NM_014400.1,212-230).
ggatgctccccgaacaaga

SEQ ID NO: 340530 - DNA, 19 bp, Homo sapiens
  siRNA target sequence for C4.4A (NM_014400.1,213-231).
gatgctccccgaacaagat

SEQ ID NO: 340531 - DNA, 19 bp, Homo sapiens
  siRNA target sequence for C4.4A (NM_014400.1,216-234).
gctccccgaacaagatgaa

SEQ ID NO: 340532 - DNA, 19 bp, Homo sapiens
  siRNA target sequence for C4.4A (NM_014400.1,454-472).
gctcgacccggcaggtaat

SEQ ID NO: 340533 - DNA, 19 bp, Homo sapiens
  siRNA target sequence for C4.4A (NM_014400.1,458-476).
gacccggcaggtaatgaga

SEQ ID NO: 340534 - DNA, 19 bp, Homo sapiens
  siRNA target sequence for C4.4A (NM_014400.1,576-594).
ccagcgatcatgtctacaa

SEQ ID NO: 340535 - DNA, 19 bp, Homo sapiens
  siRNA target sequence for C4.4A (NM_014400.1,616-634).
caccttgacggcagctaat

SEQ ID NO: 340536 - DNA, 19 bp, Homo sapiens
  siRNA target sequence for C4.4A (NM_014400.1,618-636).
ccttgacggcagctaatgt

SEQ ID NO: 340537 - DNA, 19 bp, Homo sapiens
  siRNA target sequence for C4.4A (NM_014400.1,682-700).
cactcgggatggagtaaca

SEQ ID NO: 340538 - DNA, 19 bp, Homo sapiens
  siRNA target sequence for C4.4A (NM_014400.1,734-752).
caggggtcccgctgtaact

SEQ ID NO: 340539 - DNA, 19 bp, Homo sapiens
  siRNA target sequence for C4.4A (NM_014400.1,1037-1055).
ccccagcagccccataata

SEQ ID NO: 340540 - DNA, 19 bp, Homo sapiens
  siRNA target sequence for C4.4A (NM_014400.1,1038-1056).
cccagcagccccataataa

SEQ ID NO: 340541 - DNA, 19 bp, Homo sapiens
  siRNA target sequence for C4.4A (NM_014400.1,1039-1057).
ccagcagccccataataaa

SEQ ID NO: 340542 - DNA, 19 bp, Homo sapiens
  siRNA target sequence for NSG-X (NM_014411.1,201-219).
cactcacttcgtaattcgt

SEQ ID NO: 340543 - DNA, 19 bp, Homo sapiens
  siRNA target sequence for NSG-X (NM_014411.1,210-228).
cgtaattcgtgccttatca

SEQ ID NO: 340544 - DNA, 19 bp, Homo sapiens
  siRNA target sequence for NSG-X (NM_014411.1,245-263).
ctggcagttcaccatatat

SEQ ID NO: 340545 - DNA, 19 bp, Homo sapiens
  siRNA target sequence for NSG-X (NM_014411.1,254-272).
caccatatataccattaca

SEQ ID NO: 340546 - DNA, 19 bp, Homo sapiens
  siRNA target sequence for NSG-X (NM_014411.1,285-303).
catctctcaggtagactta

SEQ ID NO: 340547 - DNA, 19 bp, Homo sapiens
  siRNA target sequence for NSG-X (NM_014411.1,290-308).
ctcaggtagacttacactt

SEQ ID NO: 340548 - DNA, 19 bp, Homo sapiens
  siRNA target sequence for NSG-X (NM_014411.1,400-418).
gctctcccaggctagatga

SEQ ID NO: 340549 - DNA, 19 bp, Homo sapiens
  siRNA target sequence for NSG-X (NM_014411.1,443-461).
gcaccctgtgcatgtatct

SEQ ID NO: 340550 - DNA, 19 bp, Homo sapiens
  siRNA target sequence for NSG-X (NM_014411.1,460-478).
ctgttgtgcacttaccaat

SEQ ID NO: 340551 - DNA, 19 bp, Homo sapiens
  siRNA target sequence for NSG-X (NM_014411.1,465-483).
gtgcacttaccaatagtat

SEQ ID NO: 340552 - DNA, 19 bp, Homo sapiens
  siRNA target sequence for NSG-X (NM_014411.1,468-486).
cacttaccaatagtataca

SEQ ID NO: 340553 - DNA, 19 bp, Homo sapiens
  siRNA target sequence for NSG-X (NM_014411.1,480-498).
gtatacaagggatctatga

SEQ ID NO: 340554 - DNA, 19 bp, Homo sapiens
  siRNA target sequence for SIP (NM_014412.1,174-192).
ggctactaggaaaagagta

SEQ ID NO: 340555 - DNA, 19 bp, Homo sapiens
  siRNA target sequence for SIP (NM_014412.1,199-217).
gcccttacagctgaaaaat

SEQ ID NO: 340556 - DNA, 19 bp, Homo sapiens
  siRNA target sequence for SIP (NM_014412.1,730-748).
gatatgaagcgaaccatta

SEQ ID NO: 340557 - DNA, 19 bp, Homo sapiens
  siRNA target sequence for SIP (NM_014412.1,735-753).
gaagcgaaccattaataaa

SEQ ID NO: 340558 - DNA, 19 bp, Homo sapiens
  siRNA target sequence for BBC3 (NM_014417.2,782-800).
ctggagggtcctgtacaat

SEQ ID NO: 340559 - DNA, 19 bp, Homo sapiens
  siRNA target sequence for BBC3 (NM_014417.2,784-802).
ggagggtcctgtacaatct

SEQ ID NO: 340560 - DNA, 19 bp, Homo sapiens
  siRNA target sequence for BBC3 (NM_014417.2,787-805).
gggtcctgtacaatctcat

SEQ ID NO: 340561 - DNA, 19 bp, Homo sapiens
  siRNA target sequence for PIB5PA (NM_014422.1,453-471).
gcgacggcgcagacatgat

SEQ ID NO: 340562 - DNA, 19 bp, Homo sapiens
  siRNA target sequence for PIB5PA (NM_014422.1,563-581).
gcgctagggcccttcaact

SEQ ID NO: 340563 - DNA, 19 bp, Homo sapiens
  siRNA target sequence for PIB5PA (NM_014422.1,894-912).
ggttcggggacctgaactt

SEQ ID NO: 340564 - DNA, 19 bp, Homo sapiens
  siRNA target sequence for PIB5PA (NM_014422.1,905-923).
ctgaacttccgcattgaga

SEQ ID NO: 340565 - DNA, 19 bp, Homo sapiens
  siRNA target sequence for PIB5PA (NM_014422.1,1057-1075).
cgctcccaccttcaagttt

SEQ ID NO: 340566 - DNA, 19 bp, Homo sapiens
  siRNA target sequence for PIB5PA (NM_014422.1,1076-1094).
gatgtgggtaccaacaaat

SEQ ID NO: 340567 - DNA, 19 bp, Homo sapiens
  siRNA target sequence for PIB5PA (NM_014422.1,1081-1099).
gggtaccaacaaatacgat

SEQ ID NO: 340568 - DNA, 19 bp, Homo sapiens
  siRNA target sequence for PIB5PA (NM_014422.1,1082-1100).
ggtaccaacaaatacgata

SEQ ID NO: 340569 - DNA, 19 bp, Homo sapiens
  siRNA target sequence for PIB5PA (NM_014422.1,1131-1149).
cagaccgtatcctatggaa

SEQ ID NO: 340570 - DNA, 19 bp, Homo sapiens
  siRNA target sequence for PIB5PA (NM_014422.1,1364-1382).
gtgaggtaccgcatggaaa

SEQ ID NO: 340571 - DNA, 19 bp, Homo sapiens
  siRNA target sequence for PIB5PA (NM_014422.1,1481-1499).
gatgtggatgggaatacct

SEQ ID NO: 340572 - DNA, 19 bp, Homo sapiens
  siRNA target sequence for PIB5PA (NM_014422.1,1498-1516).
ctaccaggtaacattcagt

SEQ ID NO: 340573 - DNA, 19 bp, Homo sapiens
  siRNA target sequence for PIB5PA (NM_014422.1,1509-1527).
cattcagtgaggaatcact

SEQ ID NO: 340574 - DNA, 19 bp, Homo sapiens
  siRNA target sequence for INVS (NM_014425.2,233-251).
gctgtttgctggttcatca

SEQ ID NO: 340575 - DNA, 19 bp, Homo sapiens
  siRNA target sequence for INVS (NM_014425.2,234-252).
ctgtttgctggttcatcat

SEQ ID NO: 340576 - DNA, 19 bp, Homo sapiens
  siRNA target sequence for INVS (NM_014425.2,240-258).
gctggttcatcattagcat

SEQ ID NO: 340577 - DNA, 19 bp, Homo sapiens
  siRNA target sequence for INVS (NM_014425.2,266-284).
ccatgctgctgccgttaat

SEQ ID NO: 340578 - DNA, 19 bp, Homo sapiens
  siRNA target sequence for INVS (NM_014425.2,355-373).
ggagaacaccacttatgta

SEQ ID NO: 340579 - DNA, 19 bp, Homo sapiens
  siRNA target sequence for INVS (NM_014425.2,356-374).
gagaacaccacttatgtat

SEQ ID NO: 340580 - DNA, 19 bp, Homo sapiens
  siRNA target sequence for INVS (NM_014425.2,376-394).
gcgtgttggctgacagatt

SEQ ID NO: 340581 - DNA, 19 bp, Homo sapiens
  siRNA target sequence for INVS (NM_014425.2,420-438).
gcaggagcagatgtgaata

SEQ ID NO: 340582 - DNA, 19 bp, Homo sapiens
  siRNA target sequence for INVS (NM_014425.2,479-497).
ccagaagggaaattatcgt

SEQ ID NO: 340583 - DNA, 19 bp, Homo sapiens
  siRNA target sequence for INVS (NM_014425.2,486-504).
ggaaattatcgtttcatga

SEQ ID NO: 340584 - DNA, 19 bp, Homo sapiens
  siRNA target sequence for INVS (NM_014425.2,487-505).
gaaattatcgtttcatgaa

SEQ ID NO: 340585 - DNA, 19 bp, Homo sapiens
  siRNA target sequence for INVS (NM_014425.2,500-518).
catgaaactcttacttaca

SEQ ID NO: 340586 - DNA, 19 bp, Homo sapiens
  siRNA target sequence for INVS (NM_014425.2,672-690).
cattggagtgcctactaca

SEQ ID NO: 340587 - DNA, 19 bp, Homo sapiens
  siRNA target sequence for INVS (NM_014425.2,711-729).
ctgctcatcaagcatgatt

SEQ ID NO: 340588 - DNA, 19 bp, Homo sapiens
  siRNA target sequence for INVS (NM_014425.2,713-731).
gctcatcaagcatgattct

SEQ ID NO: 340589 - DNA, 19 bp, Homo sapiens
  siRNA target sequence for INVS (NM_014425.2,714-732).
ctcatcaagcatgattcta

SEQ ID NO: 340590 - DNA, 19 bp, Homo sapiens
  siRNA target sequence for INVS (NM_014425.2,771-789).
cactgggcagccaaccata

SEQ ID NO: 340591 - DNA, 19 bp, Homo sapiens
  siRNA target sequence for INVS (NM_014425.2,835-853).
ctccaacagagtctttact

SEQ ID NO: 340592 - DNA, 19 bp, Homo sapiens
  siRNA target sequence for INVS (NM_014425.2,838-856).
caacagagtctttactgaa

SEQ ID NO: 340593 - DNA, 19 bp, Homo sapiens
  siRNA target sequence for INVS (NM_014425.2,874-892).
gtcgaactcctcttcactt

SEQ ID NO: 340594 - DNA, 19 bp, Homo sapiens
  siRNA target sequence for INVS (NM_014425.2,942-960).
gaaagctgcaatataacgt

SEQ ID NO: 340595 - DNA, 19 bp, Homo sapiens
  siRNA target sequence for INVS (NM_014425.2,947-965).
ctgcaatataacgtcttat

SEQ ID NO: 340596 - DNA, 19 bp, Homo sapiens
  siRNA target sequence for INVS (NM_014425.2,949-967).
gcaatataacgtcttatga

SEQ ID NO: 340597 - DNA, 19 bp, Homo sapiens
  siRNA target sequence for INVS (NM_014425.2,950-968).
caatataacgtcttatgat

SEQ ID NO: 340598 - DNA, 19 bp, Homo sapiens
  siRNA target sequence for INVS (NM_014425.2,958-976).
cgtcttatgataacttatt

SEQ ID NO: 340599 - DNA, 19 bp, Homo sapiens
  siRNA target sequence for INVS (NM_014425.2,989-1007).
gcactgggcagctttatta

SEQ ID NO: 340600 - DNA, 19 bp, Homo sapiens
  siRNA target sequence for INVS (NM_014425.2,1019-1037).
gattgtccatctcctttta

SEQ ID NO: 340601 - DNA, 19 bp, Homo sapiens
  siRNA target sequence for INVS (NM_014425.2,1042-1060).
gaaataagtctggaactat

SEQ ID NO: 340602 - DNA, 19 bp, Homo sapiens
  siRNA target sequence for INVS (NM_014425.2,1112-1130).
ctttgctgaaacggttaaa

SEQ ID NO: 340603 - DNA, 19 bp, Homo sapiens
  siRNA target sequence for INVS (NM_014425.2,1116-1134).
gctgaaacggttaaagtgt

SEQ ID NO: 340604 - DNA, 19 bp, Homo sapiens
  siRNA target sequence for INVS (NM_014425.2,1119-1137).
gaaacggttaaagtgtttt

SEQ ID NO: 340605 - DNA, 19 bp, Homo sapiens
  siRNA target sequence for INVS (NM_014425.2,1176-1194).
ggaagaacatcctttatgt

SEQ ID NO: 340606 - DNA, 19 bp, Homo sapiens
  siRNA target sequence for INVS (NM_014425.2,1241-1259).
cttaaaatcggacatagat

SEQ ID NO: 340607 - DNA, 19 bp, Homo sapiens
  siRNA target sequence for INVS (NM_014425.2,1249-1267).
cggacatagatattaacat

SEQ ID NO: 340608 - DNA, 19 bp, Homo sapiens
  siRNA target sequence for INVS (NM_014425.2,1265-1283).
catggctgacaaatatgga

SEQ ID NO: 340609 - DNA, 19 bp, Homo sapiens
  siRNA target sequence for INVS (NM_014425.2,1322-1340).
cagcaccgtgaagttatta

SEQ ID NO: 340610 - DNA, 19 bp, Homo sapiens
  siRNA target sequence for INVS (NM_014425.2,1405-1423).
gtgagatgggacacaaaga

SEQ ID NO: 340611 - DNA, 19 bp, Homo sapiens
  siRNA target sequence for INVS (NM_014425.2,1414-1432).
gacacaaagatgtgattca

SEQ ID NO: 340612 - DNA, 19 bp, Homo sapiens
  siRNA target sequence for INVS (NM_014425.2,1447-1465).
gtggagcaagggtagatct

SEQ ID NO: 340613 - DNA, 19 bp, Homo sapiens
  siRNA target sequence for INVS (NM_014425.2,1450-1468).
gagcaagggtagatctagt

SEQ ID NO: 340614 - DNA, 19 bp, Homo sapiens
  siRNA target sequence for INVS (NM_014425.2,1592-1610).
gcagtgtgcagcatatgga

SEQ ID NO: 340615 - DNA, 19 bp, Homo sapiens
  siRNA target sequence for INVS (NM_014425.2,1600-1618).
cagcatatggaggctatat

SEQ ID NO: 340616 - DNA, 19 bp, Homo sapiens
  siRNA target sequence for INVS (NM_014425.2,1602-1620).
gcatatggaggctatatca

SEQ ID NO: 340617 - DNA, 19 bp, Homo sapiens
  siRNA target sequence for INVS (NM_014425.2,1603-1621).
catatggaggctatatcaa

SEQ ID NO: 340618 - DNA, 19 bp, Homo sapiens
  siRNA target sequence for INVS (NM_014425.2,1630-1648).
cagttctcatggaaaacaa

SEQ ID NO: 340619 - DNA, 19 bp, Homo sapiens
  siRNA target sequence for INVS (NM_014425.2,1657-1675).
ctaacattcaagacaaaga

SEQ ID NO: 340620 - DNA, 19 bp, Homo sapiens
  siRNA target sequence for INVS (NM_014425.2,1696-1714).
ggtcctgcaacaatggata

SEQ ID NO: 340621 - DNA, 19 bp, Homo sapiens
  siRNA target sequence for INVS (NM_014425.2,1711-1729).
gataccttgatgccattaa

SEQ ID NO: 340622 - DNA, 19 bp, Homo sapiens
  siRNA target sequence for INVS (NM_014425.2,1715-1733).
ccttgatgccattaaatta

SEQ ID NO: 340623 - DNA, 19 bp, Homo sapiens
  siRNA target sequence for INVS (NM_014425.2,1746-1764).
gctgctttccctaatcaga

SEQ ID NO: 340624 - DNA, 19 bp, Homo sapiens
  siRNA target sequence for INVS (NM_014425.2,1783-1801).
gatacacaccccttgatta

SEQ ID NO: 340625 - DNA, 19 bp, Homo sapiens
  siRNA target sequence for INVS (NM_014425.2,1789-1807).
caccccttgattatgcttt

SEQ ID NO: 340626 - DNA, 19 bp, Homo sapiens
  siRNA target sequence for INVS (NM_014425.2,1793-1811).
ccttgattatgctttgctt

SEQ ID NO: 340627 - DNA, 19 bp, Homo sapiens
  siRNA target sequence for INVS (NM_014425.2,1813-1831).
gtgagcgccatgaagtgat

SEQ ID NO: 340628 - DNA, 19 bp, Homo sapiens
  siRNA target sequence for INVS (NM_014425.2,1932-1950).
gccttccgagacaggaaaa

SEQ ID NO: 340629 - DNA, 19 bp, Homo sapiens
  siRNA target sequence for INVS (NM_014425.2,2284-2302).
cagccagagaacattctaa

SEQ ID NO: 340630 - DNA, 19 bp, Homo sapiens
  siRNA target sequence for INVS (NM_014425.2,2462-2480).
ggctgggcctgatgagaaa

SEQ ID NO: 340631 - DNA, 19 bp, Homo sapiens
  siRNA target sequence for INVS (NM_014425.2,2694-2712).
catcgtacaccaagaaaca

SEQ ID NO: 340632 - DNA, 19 bp, Homo sapiens
  siRNA target sequence for INVS (NM_014425.2,2730-2748).
ctcacaggagggctctatt

SEQ ID NO: 340633 - DNA, 19 bp, Homo sapiens
  siRNA target sequence for INVS (NM_014425.2,2736-2754).
ggagggctctattcacatt

SEQ ID NO: 340634 - DNA, 19 bp, Homo sapiens
  siRNA target sequence for INVS (NM_014425.2,2737-2755).
gagggctctattcacattt

SEQ ID NO: 340635 - DNA, 19 bp, Homo sapiens
  siRNA target sequence for INVS (NM_014425.2,2809-2827).
ccctgtccgaggactttca

SEQ ID NO: 340636 - DNA, 19 bp, Homo sapiens
  siRNA target sequence for INVS (NM_014425.2,2869-2887).
ggcagagtgtgaatattga

SEQ ID NO: 340637 - DNA, 19 bp, Homo sapiens
  siRNA target sequence for INVS (NM_014425.2,2903-2921).
gctccgactgcagataatt

SEQ ID NO: 340638 - DNA, 19 bp, Homo sapiens
  siRNA target sequence for INVS (NM_014425.2,2907-2925).
cgactgcagataattcaga

SEQ ID NO: 340639 - DNA, 19 bp, Homo sapiens
  siRNA target sequence for INVS (NM_014425.2,3022-3040).
cccaccttcggcatatgaa

SEQ ID NO: 340640 - DNA, 19 bp, Homo sapiens
  siRNA target sequence for INVS (NM_014425.2,3208-3226).
cagtgcttaagcaaatcta

SEQ ID NO: 340641 - DNA, 19 bp, Homo sapiens
  siRNA target sequence for INVS (NM_014425.2,3239-3257).
cgaagggaaaatacatcat

SEQ ID NO: 340642 - DNA, 19 bp, Homo sapiens
  siRNA target sequence for INVS (NM_014425.2,3305-3323).
gagcaacctacagtgtata

SEQ ID NO: 340643 - DNA, 19 bp, Homo sapiens
  siRNA target sequence for INVS (NM_014425.2,3307-3325).
gcaacctacagtgtataca

SEQ ID NO: 340644 - DNA, 19 bp, Homo sapiens
  siRNA target sequence for INVS (NM_014425.2,3319-3337).
gtatacatctccttgagaa

SEQ ID NO: 340645 - DNA, 19 bp, Homo sapiens
  siRNA target sequence for INVS (NM_014425.2,3378-3396).
gctactcagccaaaaaaca

SEQ ID NO: 340646 - DNA, 19 bp, Homo sapiens
  siRNA target sequence for TJP3 (NM_014428.1,157-175).
ggtggatccatggttgtat

SEQ ID NO: 340647 - DNA, 19 bp, Homo sapiens
  siRNA target sequence for TJP3 (NM_014428.1,269-287).
ccgcgtttgccattcagat

SEQ ID NO: 340648 - DNA, 19 bp, Homo sapiens
  siRNA target sequence for TJP3 (NM_014428.1,270-288).
cgcgtttgccattcagata

SEQ ID NO: 340649 - DNA, 19 bp, Homo sapiens
  siRNA target sequence for TJP3 (NM_014428.1,272-290).
cgtttgccattcagatact

SEQ ID NO: 340650 - DNA, 19 bp, Homo sapiens
  siRNA target sequence for TJP3 (NM_014428.1,753-771).
ggaaggagatctcattcta

SEQ ID NO: 340651 - DNA, 19 bp, Homo sapiens
  siRNA target sequence for TJP3 (NM_014428.1,758-776).
gagatctcattctacagat

SEQ ID NO: 340652 - DNA, 19 bp, Homo sapiens
  siRNA target sequence for TJP3 (NM_014428.1,1105-1123).
cgggaaagttcagtagatt

SEQ ID NO: 340653 - DNA, 19 bp, Homo sapiens
  siRNA target sequence for TJP3 (NM_014428.1,1533-1551).
ctacatccgcactcacttt

SEQ ID NO: 340654 - DNA, 19 bp, Homo sapiens
  siRNA target sequence for TJP3 (NM_014428.1,1976-1994).
ccgtggccgacattgctat

SEQ ID NO: 340655 - DNA, 19 bp, Homo sapiens
  siRNA target sequence for TJP3 (NM_014428.1,2056-2074).
gacagcccctccaagatca

SEQ ID NO: 340656 - DNA, 19 bp, Homo sapiens
  siRNA target sequence for TJP3 (NM_014428.1,2060-2078).
gcccctccaagatcatcaa

SEQ ID NO: 340657 - DNA, 19 bp, Homo sapiens
  siRNA target sequence for TJP3 (NM_014428.1,2145-2163).
catcgagcgcctcaactat

SEQ ID NO: 340658 - DNA, 19 bp, Homo sapiens
  siRNA target sequence for TJP3 (NM_014428.1,2787-2805).
gtttatgcgagtacatgat

SEQ ID NO: 340659 - DNA, 19 bp, Homo sapiens
  siRNA target sequence for ARHGEF16 (NM_014448.2,1039-1057).
gcgcggagagctgttctta

SEQ ID NO: 340660 - DNA, 19 bp, Homo sapiens
  siRNA target sequence for ARHGEF16 (NM_014448.2,1041-1059).
gcggagagctgttcttagt

SEQ ID NO: 340661 - DNA, 19 bp, Homo sapiens
  siRNA target sequence for ARHGEF16 (NM_014448.2,1064-1082).
gaaaccggactttttcgaa

SEQ ID NO: 340662 - DNA, 19 bp, Homo sapiens
  siRNA target sequence for ARHGEF16 (NM_014448.2,1068-1086).
ccggactttttcgaaaaat

SEQ ID NO: 340663 - DNA, 19 bp, Homo sapiens
  siRNA target sequence for ARHGEF16 (NM_014448.2,1069-1087).
cggactttttcgaaaaatt

SEQ ID NO: 340664 - DNA, 19 bp, Homo sapiens
  siRNA target sequence for ARHGEF16 (NM_014448.2,1095-1113).
ggccaacgtgctacctttt

SEQ ID NO: 340665 - DNA, 19 bp, Homo sapiens
  siRNA target sequence for ARHGEF16 (NM_014448.2,1098-1116).
caacgtgctaccttttcct

SEQ ID NO: 340666 - DNA, 19 bp, Homo sapiens
  siRNA target sequence for SIT (NM_014450.2,248-266).
gtgacgctgctatttctca

SEQ ID NO: 340667 - DNA, 19 bp, Homo sapiens
  siRNA target sequence for SIT (NM_014450.2,364-382).
gtatgggaacctgcattat

SEQ ID NO: 340668 - DNA, 19 bp, Homo sapiens
  siRNA target sequence for SIT (NM_014450.2,369-387).
ggaacctgcattatctaca

SEQ ID NO: 340669 - DNA, 19 bp, Homo sapiens
  siRNA target sequence for SIT (NM_014450.2,464-482).
gaggtgatgtgctatacca

SEQ ID NO: 340670 - DNA, 19 bp, Homo sapiens
  siRNA target sequence for SIT (NM_014450.2,522-540).
ctggaacccccgtcaagta

SEQ ID NO: 340671 - DNA, 19 bp, Homo sapiens
  siRNA target sequence for SIT (NM_014450.2,524-542).
ggaacccccgtcaagtact

SEQ ID NO: 340672 - DNA, 19 bp, Homo sapiens
  siRNA target sequence for SIT (NM_014450.2,598-616).
gctctatgcctcagtatgt

SEQ ID NO: 340673 - DNA, 19 bp, Homo sapiens
  siRNA target sequence for ZNF364 (NM_014455.1,284-302).
cgaggtcagccccaaacta

SEQ ID NO: 340674 - DNA, 19 bp, Homo sapiens
  siRNA target sequence for ZNF364 (NM_014455.1,293-311).
ccccaaactaccggaatat

SEQ ID NO: 340675 - DNA, 19 bp, Homo sapiens
  siRNA target sequence for ZNF364 (NM_014455.1,294-312).
cccaaactaccggaatata

SEQ ID NO: 340676 - DNA, 19 bp, Homo sapiens
  siRNA target sequence for ZNF364 (NM_014455.1,295-313).
ccaaactaccggaatatat

SEQ ID NO: 340677 - DNA, 19 bp, Homo sapiens
  siRNA target sequence for ZNF364 (NM_014455.1,296-314).
caaactaccggaatatata

SEQ ID NO: 340678 - DNA, 19 bp, Homo sapiens
  siRNA target sequence for ZNF364 (NM_014455.1,378-396).
ggcggcagtcggatagaca

SEQ ID NO: 340679 - DNA, 19 bp, Homo sapiens
  siRNA target sequence for ZNF364 (NM_014455.1,379-397).
gcggcagtcggatagacaa

SEQ ID NO: 340680 - DNA, 19 bp, Homo sapiens
  siRNA target sequence for ZNF364 (NM_014455.1,380-398).
cggcagtcggatagacaat

SEQ ID NO: 340681 - DNA, 19 bp, Homo sapiens
  siRNA target sequence for ZNF364 (NM_014455.1,381-399).
ggcagtcggatagacaata

SEQ ID NO: 340682 - DNA, 19 bp, Homo sapiens
  siRNA target sequence for ZNF364 (NM_014455.1,422-440).
gctttggggccatttggat

SEQ ID NO: 340683 - DNA, 19 bp, Homo sapiens
  siRNA target sequence for ZNF364 (NM_014455.1,443-461).
cacgatgttttttcaagat

SEQ ID NO: 340684 - DNA, 19 bp, Homo sapiens
  siRNA target sequence for ZNF364 (NM_014455.1,484-502).
gtccactggaccaagataa

SEQ ID NO: 340685 - DNA, 19 bp, Homo sapiens
  siRNA target sequence for ZNF364 (NM_014455.1,486-504).
ccactggaccaagataata

SEQ ID NO: 340686 - DNA, 19 bp, Homo sapiens
  siRNA target sequence for ZNF364 (NM_014455.1,567-585).
ccattgggtcggagataca

SEQ ID NO: 340687 - DNA, 19 bp, Homo sapiens
  siRNA target sequence for ZNF364 (NM_014455.1,584-602).
cagatctcgaggaagttct

SEQ ID NO: 340688 - DNA, 19 bp, Homo sapiens
  siRNA target sequence for ZNF364 (NM_014455.1,619-637).
cagctattgaaggaatact

SEQ ID NO: 340689 - DNA, 19 bp, Homo sapiens
  siRNA target sequence for ZNF364 (NM_014455.1,651-669).
gcaggattctttgcaaatt

SEQ ID NO: 340690 - DNA, 19 bp, Homo sapiens
  siRNA target sequence for ZNF364 (NM_014455.1,763-781).
ccattgtaacccagctttt

SEQ ID NO: 340691 - DNA, 19 bp, Homo sapiens
  siRNA target sequence for ZNF364 (NM_014455.1,764-782).
cattgtaacccagctttta

SEQ ID NO: 340692 - DNA, 19 bp, Homo sapiens
  siRNA target sequence for ZNF364 (NM_014455.1,856-874).
ctcaggaacaagttgatat

SEQ ID NO: 340693 - DNA, 19 bp, Homo sapiens
  siRNA target sequence for ZNF364 (NM_014455.1,930-948).
cagttaccttgcaatcact

SEQ ID NO: 340694 - DNA, 19 bp, Homo sapiens
  siRNA target sequence for ZNF364 (NM_014455.1,990-1008).
gacacatgtcctgtatgta

SEQ ID NO: 340695 - DNA, 19 bp, Homo sapiens
  siRNA target sequence for ZNF364 (NM_014455.1,1066-1084).
caagcaacagatttagcaa

SEQ ID NO: 340696 - DNA, 19 bp, Homo sapiens
  siRNA target sequence for ZNF364 (NM_014455.1,1098-1116).
catgaccgatggactttct

SEQ ID NO: 340697 - DNA, 19 bp, Homo sapiens
  siRNA target sequence for PDCD4 (NM_014456.3,281-299).
ctgcagatcctgataactt

SEQ ID NO: 340698 - DNA, 19 bp, Homo sapiens
  siRNA target sequence for PDCD4 (NM_014456.3,389-407).
ccattaacgaagctagaat

SEQ ID NO: 340699 - DNA, 19 bp, Homo sapiens
  siRNA target sequence for PDCD4 (NM_014456.3,426-444).
gcgactaaggaaaaactca

SEQ ID NO: 340700 - DNA, 19 bp, Homo sapiens
  siRNA target sequence for PDCD4 (NM_014456.3,427-445).
cgactaaggaaaaactcat

SEQ ID NO: 340701 - DNA, 19 bp, Homo sapiens
  siRNA target sequence for PDCD4 (NM_014456.3,492-510).
cgcccttagaagtggatta

SEQ ID NO: 340702 - DNA, 19 bp, Homo sapiens
  siRNA target sequence for PDCD4 (NM_014456.3,495-513).
ccttagaagtggattaact

SEQ ID NO: 340703 - DNA, 19 bp, Homo sapiens
  siRNA target sequence for PDCD4 (NM_014456.3,569-587).
gaaggggactaccaaagaa

SEQ ID NO: 340704 - DNA, 19 bp, Homo sapiens
  siRNA target sequence for PDCD4 (NM_014456.3,623-641).
ctggacaggtgtatgatgt

SEQ ID NO: 340705 - DNA, 19 bp, Homo sapiens
  siRNA target sequence for PDCD4 (NM_014456.3,681-699).
ccaggagaactgtgtttat

SEQ ID NO: 340706 - DNA, 19 bp, Homo sapiens
  siRNA target sequence for PDCD4 (NM_014456.3,728-746).
gggcatttgagaagacttt

SEQ ID NO: 340707 - DNA, 19 bp, Homo sapiens
  siRNA target sequence for PDCD4 (NM_014456.3,729-747).
ggcatttgagaagacttta

SEQ ID NO: 340708 - DNA, 19 bp, Homo sapiens
  siRNA target sequence for PDCD4 (NM_014456.3,741-759).
gactttaacaccaatcata

SEQ ID NO: 340709 - DNA, 19 bp, Homo sapiens
  siRNA target sequence for PDCD4 (NM_014456.3,751-769).
ccaatcatacaggaatatt

SEQ ID NO: 340710 - DNA, 19 bp, Homo sapiens
  siRNA target sequence for PDCD4 (NM_014456.3,752-770).
caatcatacaggaatattt

SEQ ID NO: 340711 - DNA, 19 bp, Homo sapiens
  siRNA target sequence for PDCD4 (NM_014456.3,774-792).
gcatggagatactaatgaa

SEQ ID NO: 340712 - DNA, 19 bp, Homo sapiens
  siRNA target sequence for PDCD4 (NM_014456.3,845-863).
cagtgttggcagtatcctt

SEQ ID NO: 340713 - DNA, 19 bp, Homo sapiens
  siRNA target sequence for PDCD4 (NM_014456.3,873-891).
ggggaaggctagtcataga

SEQ ID NO: 340714 - DNA, 19 bp, Homo sapiens
  siRNA target sequence for PDCD4 (NM_014456.3,875-893).
ggaaggctagtcatagaga

SEQ ID NO: 340715 - DNA, 19 bp, Homo sapiens
  siRNA target sequence for PDCD4 (NM_014456.3,919-937).
ctttgtgggacagtaatga

SEQ ID NO: 340716 - DNA, 19 bp, Homo sapiens
  siRNA target sequence for PDCD4 (NM_014456.3,1020-1038).
gttggtgggccagtttatt

SEQ ID NO: 340717 - DNA, 19 bp, Homo sapiens
  siRNA target sequence for PDCD4 (NM_014456.3,1024-1042).
gtgggccagtttattgcta

SEQ ID NO: 340718 - DNA, 19 bp, Homo sapiens
  siRNA target sequence for PDCD4 (NM_014456.3,1136-1154).
ctaccgtgcttctgagtat

SEQ ID NO: 340719 - DNA, 19 bp, Homo sapiens
  siRNA target sequence for PDCD4 (NM_014456.3,1166-1184).
gaaagcgtaaagatagtgt

SEQ ID NO: 340720 - DNA, 19 bp, Homo sapiens
  siRNA target sequence for PDCD4 (NM_014456.3,1202-1220).
ggcagcaatctgtcaatca

SEQ ID NO: 340721 - DNA, 19 bp, Homo sapiens
  siRNA target sequence for PDCD4 (NM_014456.3,1237-1255).
gatatgctgctgaaagaat

SEQ ID NO: 340722 - DNA, 19 bp, Homo sapiens
  siRNA target sequence for PDCD4 (NM_014456.3,1283-1301).
ctgaacattgccttaagga

SEQ ID NO: 340723 - DNA, 19 bp, Homo sapiens
  siRNA target sequence for PDCD4 (NM_014456.3,1323-1341).
ccatgagcttgtatatgaa

SEQ ID NO: 340724 - DNA, 19 bp, Homo sapiens
  siRNA target sequence for PDCD4 (NM_014456.3,1416-1434).
gaagtcttctaccattact

SEQ ID NO: 340725 - DNA, 19 bp, Homo sapiens
  siRNA target sequence for PDCD4 (NM_014456.3,1419-1437).
gtcttctaccattactgta

SEQ ID NO: 340726 - DNA, 19 bp, Homo sapiens
  siRNA target sequence for PDCD4 (NM_014456.3,1451-1469).
gaggttatgagagaattta

SEQ ID NO: 340727 - DNA, 19 bp, Homo sapiens
  siRNA target sequence for PDCD4 (NM_014456.3,1495-1513).
gatgtcccacattcatact

SEQ ID NO: 340728 - DNA, 19 bp, Homo sapiens
  siRNA target sequence for PDCD4 (NM_014456.3,1521-1539).
ggagcggtttgtagaagaa

SEQ ID NO: 340729 - DNA, 19 bp, Homo sapiens
  siRNA target sequence for PDCD4 (NM_014456.3,1522-1540).
gagcggtttgtagaagaat

SEQ ID NO: 340730 - DNA, 19 bp, Homo sapiens
  siRNA target sequence for PDCD4 (NM_014456.3,1524-1542).
gcggtttgtagaagaatgt

SEQ ID NO: 340731 - DNA, 19 bp, Homo sapiens
  siRNA target sequence for PDCD4 (NM_014456.3,1525-1543).
cggtttgtagaagaatgtt

SEQ ID NO: 340732 - DNA, 19 bp, Homo sapiens
  siRNA target sequence for PDCD4 (NM_014456.3,1526-1544).
ggtttgtagaagaatgttt

SEQ ID NO: 340733 - DNA, 19 bp, Homo sapiens
  siRNA target sequence for PDCD4 (NM_014456.3,1592-1610).
ggggcagaaagcgttttgt

SEQ ID NO: 340734 - DNA, 19 bp, Homo sapiens
  siRNA target sequence for PDCD4 (NM_014456.3,1593-1611).
gggcagaaagcgttttgta

SEQ ID NO: 340735 - DNA, 19 bp, Homo sapiens
  siRNA target sequence for PDCD4 (NM_014456.3,1594-1612).
ggcagaaagcgttttgtaa

SEQ ID NO: 340736 - DNA, 19 bp, Homo sapiens
  siRNA target sequence for PDCD4 (NM_014456.3,1619-1637).
gagatggaggtcgtcttaa

SEQ ID NO: 340737 - DNA, 19 bp, Homo sapiens
  siRNA target sequence for C10orf28 (NM_014472.2,344-362).
ggcctgacatggcacttta

SEQ ID NO: 340738 - DNA, 19 bp, Homo sapiens
  siRNA target sequence for C10orf28 (NM_014472.2,345-363).
gcctgacatggcactttat

SEQ ID NO: 340739 - DNA, 19 bp, Homo sapiens
  siRNA target sequence for C10orf28 (NM_014472.2,380-398).
ggggtgcagtactccttaa

SEQ ID NO: 340740 - DNA, 19 bp, Homo sapiens
  siRNA target sequence for C10orf28 (NM_014472.2,382-400).
ggtgcagtactccttaaga

SEQ ID NO: 340741 - DNA, 19 bp, Homo sapiens
  siRNA target sequence for C10orf28 (NM_014472.2,393-411).
ccttaagacaggtgatgaa

SEQ ID NO: 340742 - DNA, 19 bp, Homo sapiens
  siRNA target sequence for C10orf28 (NM_014472.2,499-517).
ccggaggctcgaagactaa

SEQ ID NO: 340743 - DNA, 19 bp, Homo sapiens
  siRNA target sequence for C10orf28 (NM_014472.2,500-518).
cggaggctcgaagactaaa

SEQ ID NO: 340744 - DNA, 19 bp, Homo sapiens
  siRNA target sequence for C10orf28 (NM_014472.2,501-519).
ggaggctcgaagactaaat

SEQ ID NO: 340745 - DNA, 19 bp, Homo sapiens
  siRNA target sequence for C10orf28 (NM_014472.2,502-520).
gaggctcgaagactaaata

SEQ ID NO: 340746 - DNA, 19 bp, Homo sapiens
  siRNA target sequence for C10orf28 (NM_014472.2,505-523).
gctcgaagactaaatatca

SEQ ID NO: 340747 - DNA, 19 bp, Homo sapiens
  siRNA target sequence for C10orf28 (NM_014472.2,506-524).
ctcgaagactaaatatcaa

SEQ ID NO: 340748 - DNA, 19 bp, Homo sapiens
  siRNA target sequence for C10orf28 (NM_014472.2,527-545).
ctgatagaaaggagcataa

SEQ ID NO: 340749 - DNA, 19 bp, Homo sapiens
  siRNA target sequence for C10orf28 (NM_014472.2,537-555).
ggagcataattgtagagaa

SEQ ID NO: 340750 - DNA, 19 bp, Homo sapiens
  siRNA target sequence for C10orf28 (NM_014472.2,773-791).
gacatgagaggatacttct

SEQ ID NO: 340751 - DNA, 19 bp, Homo sapiens
  siRNA target sequence for C10orf28 (NM_014472.2,775-793).
catgagaggatacttcttt

SEQ ID NO: 340752 - DNA, 19 bp, Homo sapiens
  siRNA target sequence for C10orf28 (NM_014472.2,796-814).
caggcctgtttagaaatca

SEQ ID NO: 340753 - DNA, 19 bp, Homo sapiens
  siRNA target sequence for C10orf28 (NM_014472.2,833-851).
gcaaaccattccaaaatgt

SEQ ID NO: 340754 - DNA, 19 bp, Homo sapiens
  siRNA target sequence for C10orf28 (NM_014472.2,916-934).
ggcagaattgaaactgata

SEQ ID NO: 340755 - DNA, 19 bp, Homo sapiens
  siRNA target sequence for C10orf28 (NM_014472.2,945-963).
ggagatactatatgagttt

SEQ ID NO: 340756 - DNA, 19 bp, Homo sapiens
  siRNA target sequence for C10orf28 (NM_014472.2,960-978).
gtttcctagagtttttagt

SEQ ID NO: 340757 - DNA, 19 bp, Homo sapiens
  siRNA target sequence for C10orf28 (NM_014472.2,1118-1136).
gtccagatggtgtctttga

SEQ ID NO: 340758 - DNA, 19 bp, Homo sapiens
  siRNA target sequence for C10orf28 (NM_014472.2,1135-1153).
gatcaaacttgcgtagatt

SEQ ID NO: 340759 - DNA, 19 bp, Homo sapiens
  siRNA target sequence for C10orf28 (NM_014472.2,1181-1199).
ccaatagtacaggtttcat

SEQ ID NO: 340760 - DNA, 19 bp, Homo sapiens
  siRNA target sequence for C10orf28 (NM_014472.2,1197-1215).
catcttagatcaaaaagat

SEQ ID NO: 340761 - DNA, 19 bp, Homo sapiens
  siRNA target sequence for C10orf28 (NM_014472.2,1276-1294).
gttagtccagtaatgatta

SEQ ID NO: 340762 - DNA, 19 bp, Homo sapiens
  siRNA target sequence for C10orf28 (NM_014472.2,1314-1332).
cagcactgctgatgagtta

SEQ ID NO: 340763 - DNA, 19 bp, Homo sapiens
  siRNA target sequence for C10orf28 (NM_014472.2,1316-1334).
gcactgctgatgagttaca

SEQ ID NO: 340764 - DNA, 19 bp, Homo sapiens
  siRNA target sequence for C10orf28 (NM_014472.2,1317-1335).
cactgctgatgagttacat

SEQ ID NO: 340765 - DNA, 19 bp, Homo sapiens
  siRNA target sequence for C10orf28 (NM_014472.2,1319-1337).
ctgctgatgagttacatgt

SEQ ID NO: 340766 - DNA, 19 bp, Homo sapiens
  siRNA target sequence for C10orf28 (NM_014472.2,1321-1339).
gctgatgagttacatgtaa

SEQ ID NO: 340767 - DNA, 19 bp, Homo sapiens
  siRNA target sequence for C10orf28 (NM_014472.2,1322-1340).
ctgatgagttacatgtaaa

SEQ ID NO: 340768 - DNA, 19 bp, Homo sapiens
  siRNA target sequence for C10orf28 (NM_014472.2,1341-1359).
gcacgaacctcctgataca

SEQ ID NO: 340769 - DNA, 19 bp, Homo sapiens
  siRNA target sequence for C10orf28 (NM_014472.2,1366-1384).
cttgctcatgaaacacata

SEQ ID NO: 340770 - DNA, 19 bp, Homo sapiens
  siRNA target sequence for C10orf28 (NM_014472.2,1372-1390).
catgaaacacatagagata

SEQ ID NO: 340771 - DNA, 19 bp, Homo sapiens
  siRNA target sequence for C10orf28 (NM_014472.2,1381-1399).
catagagatagtggattta

SEQ ID NO: 340772 - DNA, 19 bp, Homo sapiens
  siRNA target sequence for C10orf28 (NM_014472.2,1405-1423).
gtaggtgacattaccaata

SEQ ID NO: 340773 - DNA, 19 bp, Homo sapiens
  siRNA target sequence for C10orf28 (NM_014472.2,1457-1475).
gtagtgatcatgtaactgt

SEQ ID NO: 340774 - DNA, 19 bp, Homo sapiens
  siRNA target sequence for C10orf28 (NM_014472.2,1507-1525).
gctgatgagacctctatta

SEQ ID NO: 340775 - DNA, 19 bp, Homo sapiens
  siRNA target sequence for C10orf28 (NM_014472.2,1510-1528).
gatgagacctctattaata

SEQ ID NO: 340776 - DNA, 19 bp, Homo sapiens
  siRNA target sequence for C10orf28 (NM_014472.2,1520-1538).
ctattaatacacgaagttt

SEQ ID NO: 340777 - DNA, 19 bp, Homo sapiens
  siRNA target sequence for C10orf28 (NM_014472.2,1529-1547).
cacgaagtttctcaaagtt

SEQ ID NO: 340778 - DNA, 19 bp, Homo sapiens
  siRNA target sequence for C10orf28 (NM_014472.2,1585-1603).
gctagaagtgggaatgaca

SEQ ID NO: 340779 - DNA, 19 bp, Homo sapiens
  siRNA target sequence for C10orf28 (NM_014472.2,1622-1640).
cttctgcttgctcagatat

SEQ ID NO: 340780 - DNA, 19 bp, Homo sapiens
  siRNA target sequence for C10orf28 (NM_014472.2,1738-1756).
gctggtagtaattataaca

SEQ ID NO: 340781 - DNA, 19 bp, Homo sapiens
  siRNA target sequence for C10orf28 (NM_014472.2,1765-1783).
gactctgaactcagtatgt

SEQ ID NO: 340782 - DNA, 19 bp, Homo sapiens
  siRNA target sequence for C10orf28 (NM_014472.2,1769-1787).
ctgaactcagtatgttaaa

SEQ ID NO: 340783 - DNA, 19 bp, Homo sapiens
  siRNA target sequence for C10orf28 (NM_014472.2,1821-1839).
cattgacctgggtagtact

SEQ ID NO: 340784 - DNA, 19 bp, Homo sapiens
  siRNA target sequence for C10orf28 (NM_014472.2,1830-1848).
gggtagtactggtgataca

SEQ ID NO: 340785 - DNA, 19 bp, Homo sapiens
  siRNA target sequence for C10orf28 (NM_014472.2,1831-1849).
ggtagtactggtgatacaa

SEQ ID NO: 340786 - DNA, 19 bp, Homo sapiens
  siRNA target sequence for C10orf28 (NM_014472.2,1841-1859).
gtgatacaacagaagcatt

SEQ ID NO: 340787 - DNA, 19 bp, Homo sapiens
  siRNA target sequence for C10orf28 (NM_014472.2,1852-1870).
gaagcattgcacgaactaa

SEQ ID NO: 340788 - DNA, 19 bp, Homo sapiens
  siRNA target sequence for C10orf28 (NM_014472.2,1855-1873).
gcattgcacgaactaagaa

SEQ ID NO: 340789 - DNA, 19 bp, Homo sapiens
  siRNA target sequence for C10orf28 (NM_014472.2,1871-1889).
gaactgccgaagagttcaa

SEQ ID NO: 340790 - DNA, 19 bp, Homo sapiens
  siRNA target sequence for C10orf28 (NM_014472.2,1877-1895).
ccgaagagttcaaaacaga

SEQ ID NO: 340791 - DNA, 19 bp, Homo sapiens
  siRNA target sequence for C10orf28 (NM_014472.2,1878-1896).
cgaagagttcaaaacagaa

SEQ ID NO: 340792 - DNA, 19 bp, Homo sapiens
  siRNA target sequence for C10orf28 (NM_014472.2,1908-1926).
ctcagggagtatagaattt

SEQ ID NO: 340793 - DNA, 19 bp, Homo sapiens
  siRNA target sequence for C10orf28 (NM_014472.2,1939-1957).
cctgatagggaatcatcat

SEQ ID NO: 340794 - DNA, 19 bp, Homo sapiens
  siRNA target sequence for C10orf28 (NM_014472.2,1974-1992).
cgaaccaaaagcaactgaa

SEQ ID NO: 340795 - DNA, 19 bp, Homo sapiens
  siRNA target sequence for C10orf28 (NM_014472.2,2028-2046).
gagctgggagtctatgttt

SEQ ID NO: 340796 - DNA, 19 bp, Homo sapiens
  siRNA target sequence for C10orf28 (NM_014472.2,2030-2048).
gctgggagtctatgtttaa

SEQ ID NO: 340797 - DNA, 19 bp, Homo sapiens
  siRNA target sequence for C10orf28 (NM_014472.2,2033-2051).
gggagtctatgtttaacga

SEQ ID NO: 340798 - DNA, 19 bp, Homo sapiens
  siRNA target sequence for C10orf28 (NM_014472.2,2034-2052).
ggagtctatgtttaacgat

SEQ ID NO: 340799 - DNA, 19 bp, Homo sapiens
  siRNA target sequence for C10orf28 (NM_014472.2,2118-2136).
ccactgctcaaagttatca

SEQ ID NO: 340800 - DNA, 19 bp, Homo sapiens
  siRNA target sequence for C10orf28 (NM_014472.2,2164-2182).
caggaacctagatctgatt

SEQ ID NO: 340801 - DNA, 19 bp, Homo sapiens
  siRNA target sequence for C10orf28 (NM_014472.2,2170-2188).
cctagatctgattactaca

SEQ ID NO: 340802 - DNA, 19 bp, Homo sapiens
  siRNA target sequence for C10orf28 (NM_014472.2,2171-2189).
ctagatctgattactacaa

SEQ ID NO: 340803 - DNA, 19 bp, Homo sapiens
  siRNA target sequence for C10orf28 (NM_014472.2,2174-2192).
gatctgattactacaatca

SEQ ID NO: 340804 - DNA, 19 bp, Homo sapiens
  siRNA target sequence for C10orf28 (NM_014472.2,2209-2227).
gacctcagtgattgtgaat

SEQ ID NO: 340805 - DNA, 19 bp, Homo sapiens
  siRNA target sequence for C10orf28 (NM_014472.2,2344-2362).
catgccctaggagtattct

SEQ ID NO: 340806 - DNA, 19 bp, Homo sapiens
  siRNA target sequence for C10orf28 (NM_014472.2,2380-2398).
cgtgatgcgttgggtatta

SEQ ID NO: 340807 - DNA, 19 bp, Homo sapiens
  siRNA target sequence for C10orf28 (NM_014472.2,2381-2399).
gtgatgcgttgggtattaa

SEQ ID NO: 340808 - DNA, 19 bp, Homo sapiens
  siRNA target sequence for C10orf28 (NM_014472.2,2386-2404).
gcgttgggtattaaacaca

SEQ ID NO: 340809 - DNA, 19 bp, Homo sapiens
  siRNA target sequence for C10orf28 (NM_014472.2,2518-2536).
ctagccagaaggttagtca

SEQ ID NO: 340810 - DNA, 19 bp, Homo sapiens
  siRNA target sequence for C10orf28 (NM_014472.2,2543-2561).
cccttggggttcgaagtaa

SEQ ID NO: 340811 - DNA, 19 bp, Homo sapiens
  siRNA target sequence for C10orf28 (NM_014472.2,2661-2679).
cagagaccagtctacagtt

SEQ ID NO: 340812 - DNA, 19 bp, Homo sapiens
  siRNA target sequence for CNOT3 (NM_014516.1,1767-1785).
cggctgagggaccaaatca

SEQ ID NO: 340813 - DNA, 19 bp, Homo sapiens
  siRNA target sequence for CNOT3 (NM_014516.1,1847-1865).
cattgagacgcaaatggaa

SEQ ID NO: 340814 - DNA, 19 bp, Homo sapiens
  siRNA target sequence for CNOT3 (NM_014516.1,1856-1874).
gcaaatggaacggttcaaa

SEQ ID NO: 340815 - DNA, 19 bp, Homo sapiens
  siRNA target sequence for CNOT3 (NM_014516.1,1878-1896).
gtggaacgagagaccaaaa

SEQ ID NO: 340816 - DNA, 19 bp, Homo sapiens
  siRNA target sequence for CNOT3 (NM_014516.1,1881-1899).
gaacgagagaccaaaacca

SEQ ID NO: 340817 - DNA, 19 bp, Homo sapiens
  siRNA target sequence for CNOT3 (NM_014516.1,1971-1989).
ggccagtggctcacgaata

SEQ ID NO: 340818 - DNA, 19 bp, Homo sapiens
  siRNA target sequence for CNOT3 (NM_014516.1,2049-2067).
gtgcagacacgcaagaaga

SEQ ID NO: 340819 - DNA, 19 bp, Homo sapiens
  siRNA target sequence for CNOT3 (NM_014516.1,2210-2228).
ggacgacgttgagtactat

SEQ ID NO: 340820 - DNA, 19 bp, Homo sapiens
  siRNA target sequence for CNOT3 (NM_014516.1,2213-2231).
cgacgttgagtactatgtt

SEQ ID NO: 340821 - DNA, 19 bp, Homo sapiens
  siRNA target sequence for CNOT3 (NM_014516.1,2426-2444).
ctgtaccacggaaaactct

SEQ ID NO: 340822 - DNA, 19 bp, Homo sapiens
  siRNA target sequence for CNOT3 (NM_014516.1,3568-3586).
cggacactgtggaattcta

SEQ ID NO: 340823 - DNA, 19 bp, Homo sapiens
  siRNA target sequence for CNOT3 (NM_014516.1,3598-3616).
cgaccgagacactcttctt

SEQ ID NO: 340824 - DNA, 19 bp, Homo sapiens
  siRNA target sequence for CNOT3 (NM_014516.1,3635-3653).
gggcactaaggcacagtat

SEQ ID NO: 340825 - DNA, 19 bp, Homo sapiens
  siRNA target sequence for CNOT3 (NM_014516.1,3637-3655).
gcactaaggcacagtatct

SEQ ID NO: 340826 - DNA, 19 bp, Homo sapiens
  siRNA target sequence for CNOT3 (NM_014516.1,3687-3705).
cgattccacaccaagtaca

SEQ ID NO: 340827 - DNA, 19 bp, Homo sapiens
  siRNA target sequence for CNOT3 (NM_014516.1,3688-3706).
gattccacaccaagtacat

SEQ ID NO: 340828 - DNA, 19 bp, Homo sapiens
  siRNA target sequence for CNOT3 (NM_014516.1,3759-3777).
cagggcacctacatctact

SEQ ID NO: 340829 - DNA, 19 bp, Homo sapiens
  siRNA target sequence for CNOT3 (NM_014516.1,3766-3784).
cctacatctactttgacta

SEQ ID NO: 340830 - DNA, 19 bp, Homo sapiens
  siRNA target sequence for 384D8-2 (NM_014551.3,285-303).
gcctgcgtctacagtaaga

SEQ ID NO: 340831 - DNA, 19 bp, Homo sapiens
  siRNA target sequence for 384D8-2 (NM_014551.3,286-304).
cctgcgtctacagtaagaa

SEQ ID NO: 340832 - DNA, 19 bp, Homo sapiens
  siRNA target sequence for 384D8-2 (NM_014551.3,478-496).
ggactaacgtggatctcaa

SEQ ID NO: 340833 - DNA, 19 bp, Homo sapiens
  siRNA target sequence for 384D8-2 (NM_014551.3,481-499).
ctaacgtggatctcaagaa

SEQ ID NO: 340834 - DNA, 19 bp, Homo sapiens
  siRNA target sequence for TFCP2L2 (NM_014552.2,271-289).
gcgaccaaagcgatgatga

SEQ ID NO: 340835 - DNA, 19 bp, Homo sapiens
  siRNA target sequence for TFCP2L2 (NM_014552.2,419-437).
gaaacagcataccaattgt

SEQ ID NO: 340836 - DNA, 19 bp, Homo sapiens
  siRNA target sequence for TFCP2L2 (NM_014552.2,473-491).
gagtgcaagtactgaaaaa

SEQ ID NO: 340837 - DNA, 19 bp, Homo sapiens
  siRNA target sequence for TFCP2L2 (NM_014552.2,528-546).
gctgggcattgataagaga

SEQ ID NO: 340838 - DNA, 19 bp, Homo sapiens
  siRNA target sequence for TFCP2L2 (NM_014552.2,604-622).
cactccatcaagacagaaa

SEQ ID NO: 340839 - DNA, 19 bp, Homo sapiens
  siRNA target sequence for TFCP2L2 (NM_014552.2,680-698).
ctgagcgggtggtggtttt

SEQ ID NO: 340840 - DNA, 19 bp, Homo sapiens
  siRNA target sequence for TFCP2L2 (NM_014552.2,684-702).
gcgggtggtggttttcgat

SEQ ID NO: 340841 - DNA, 19 bp, Homo sapiens
  siRNA target sequence for TFCP2L2 (NM_014552.2,694-712).
gttttcgatcggaatctca

SEQ ID NO: 340842 - DNA, 19 bp, Homo sapiens
  siRNA target sequence for TFCP2L2 (NM_014552.2,699-717).
cgatcggaatctcaatact

SEQ ID NO: 340843 - DNA, 19 bp, Homo sapiens
  siRNA target sequence for TFCP2L2 (NM_014552.2,800-818).
gcgttcaggaggttttctt

SEQ ID NO: 340844 - DNA, 19 bp, Homo sapiens
  siRNA target sequence for TFCP2L2 (NM_014552.2,837-855).
gcggatgcctggcatgaat

SEQ ID NO: 340845 - DNA, 19 bp, Homo sapiens
  siRNA target sequence for TFCP2L2 (NM_014552.2,838-856).
cggatgcctggcatgaatt

SEQ ID NO: 340846 - DNA, 19 bp, Homo sapiens
  siRNA target sequence for TFCP2L2 (NM_014552.2,906-924).
cctagaagcttcaaaatca

SEQ ID NO: 340847 - DNA, 19 bp, Homo sapiens
  siRNA target sequence for TFCP2L2 (NM_014552.2,1005-1023).
cagcagtgaaggaatccat

SEQ ID NO: 340848 - DNA, 19 bp, Homo sapiens
  siRNA target sequence for TFCP2L2 (NM_014552.2,1121-1139).
ggcagcacaccgctaaaca

SEQ ID NO: 340849 - DNA, 19 bp, Homo sapiens
  siRNA target sequence for TFCP2L2 (NM_014552.2,1122-1140).
gcagcacaccgctaaacaa

SEQ ID NO: 340850 - DNA, 19 bp, Homo sapiens
  siRNA target sequence for TFCP2L2 (NM_014552.2,1123-1141).
cagcacaccgctaaacaaa

SEQ ID NO: 340851 - DNA, 19 bp, Homo sapiens
  siRNA target sequence for TFCP2L2 (NM_014552.2,1125-1143).
gcacaccgctaaacaaaga

SEQ ID NO: 340852 - DNA, 19 bp, Homo sapiens
  siRNA target sequence for TFCP2L2 (NM_014552.2,1126-1144).
cacaccgctaaacaaagat

SEQ ID NO: 340853 - DNA, 19 bp, Homo sapiens
  siRNA target sequence for TFCP2L2 (NM_014552.2,1168-1186).
gaaagcttcaacactatca

SEQ ID NO: 340854 - DNA, 19 bp, Homo sapiens
  siRNA target sequence for TFCP2L2 (NM_014552.2,1172-1190).
gcttcaacactatcagtaa

SEQ ID NO: 340855 - DNA, 19 bp, Homo sapiens
  siRNA target sequence for TFCP2L2 (NM_014552.2,1204-1222).
gcgtataacgccatttcct

SEQ ID NO: 340856 - DNA, 19 bp, Homo sapiens
  siRNA target sequence for TFCP2L2 (NM_014552.2,1205-1223).
cgtataacgccatttcctt

SEQ ID NO: 340857 - DNA, 19 bp, Homo sapiens
  siRNA target sequence for TFCP2L2 (NM_014552.2,1310-1328).
ggttgcctcttaacattca

SEQ ID NO: 340858 - DNA, 19 bp, Homo sapiens
  siRNA target sequence for TFCP2L2 (NM_014552.2,1314-1332).
gcctcttaacattcaagtt

SEQ ID NO: 340859 - DNA, 19 bp, Homo sapiens
  siRNA target sequence for TFCP2L2 (NM_014552.2,1327-1345).
caagttgatacctatagtt

SEQ ID NO: 340860 - DNA, 19 bp, Homo sapiens
  siRNA target sequence for TFCP2L2 (NM_014552.2,1333-1351).
gatacctatagttacaaca

SEQ ID NO: 340861 - DNA, 19 bp, Homo sapiens
  siRNA target sequence for TFCP2L2 (NM_014552.2,1422-1440).
gaaaatcagggatgaagaa

SEQ ID NO: 340862 - DNA, 19 bp, Homo sapiens
  siRNA target sequence for TFCP2L2 (NM_014552.2,1491-1509).
ctctcacaagcgaatggat

SEQ ID NO: 340863 - DNA, 19 bp, Homo sapiens
  siRNA target sequence for TFCP2L2 (NM_014552.2,1493-1511).
ctcacaagcgaatggatat

SEQ ID NO: 340864 - DNA, 19 bp, Homo sapiens
  siRNA target sequence for TFCP2L2 (NM_014552.2,1495-1513).
cacaagcgaatggatatca

SEQ ID NO: 340865 - DNA, 19 bp, Homo sapiens
  siRNA target sequence for TFCP2L2 (NM_014552.2,1497-1515).
caagcgaatggatatcaca

SEQ ID NO: 340866 - DNA, 19 bp, Homo sapiens
  siRNA target sequence for TFCP2L2 (NM_014552.2,1501-1519).
cgaatggatatcacagttt

SEQ ID NO: 340867 - DNA, 19 bp, Homo sapiens
  siRNA target sequence for TFCP2L2 (NM_014552.2,1659-1677).
gccgtacggcacagaagat

SEQ ID NO: 340868 - DNA, 19 bp, Homo sapiens
  siRNA target sequence for TFCP2L2 (NM_014552.2,1661-1679).
cgtacggcacagaagatga

SEQ ID NO: 340869 - DNA, 19 bp, Homo sapiens
  siRNA target sequence for TFCP2L2 (NM_014552.2,1665-1683).
cggcacagaagatgacttt

SEQ ID NO: 340870 - DNA, 19 bp, Homo sapiens
  siRNA target sequence for TFCP2L2 (NM_014552.2,1817-1835).
ctatctcagacaaatacga

SEQ ID NO: 340871 - DNA, 19 bp, Homo sapiens
  siRNA target sequence for TFCP2L1 (NM_014553.1,107-125).
cgcagcccgagcactacaa

SEQ ID NO: 340872 - DNA, 19 bp, Homo sapiens
  siRNA target sequence for TFCP2L1 (NM_014553.1,342-360).
gctgggagactttcaagat

SEQ ID NO: 340873 - DNA, 19 bp, Homo sapiens
  siRNA target sequence for TFCP2L1 (NM_014553.1,472-490).
cggatcctggacatcgata

SEQ ID NO: 340874 - DNA, 19 bp, Homo sapiens
  siRNA target sequence for TFCP2L1 (NM_014553.1,473-491).
ggatcctggacatcgatat

SEQ ID NO: 340875 - DNA, 19 bp, Homo sapiens
  siRNA target sequence for TFCP2L1 (NM_014553.1,474-492).
gatcctggacatcgatatt

SEQ ID NO: 340876 - DNA, 19 bp, Homo sapiens
  siRNA target sequence for TFCP2L1 (NM_014553.1,538-556).
ctgaatgcagtcgagtttt

SEQ ID NO: 340877 - DNA, 19 bp, Homo sapiens
  siRNA target sequence for TFCP2L1 (NM_014553.1,661-679).
gtccagattgacacgttta

SEQ ID NO: 340878 - DNA, 19 bp, Homo sapiens
  siRNA target sequence for TFCP2L1 (NM_014553.1,754-772).
ggagccgatcggaaacaga

SEQ ID NO: 340879 - DNA, 19 bp, Homo sapiens
  siRNA target sequence for TFCP2L1 (NM_014553.1,755-773).
gagccgatcggaaacagaa

SEQ ID NO: 340880 - DNA, 19 bp, Homo sapiens
  siRNA target sequence for TFCP2L1 (NM_014553.1,1467-1485).
cctcagcacaattaaagct

SEQ ID NO: 340881 - DNA, 19 bp, Homo sapiens
  siRNA target sequence for TFCP2L1 (NM_014553.1,1503-1521).
ccacatcatcctgaaatgt

SEQ ID NO: 340882 - DNA, 19 bp, Homo sapiens
  siRNA target sequence for ERVWE1 (NM_014590.2,1256-1274).
cacccaaactggtatgtct

SEQ ID NO: 340883 - DNA, 19 bp, Homo sapiens
  siRNA target sequence for ERVWE1 (NM_014590.2,1352-1370).
cacctctagcccctacaaa

SEQ ID NO: 340884 - DNA, 19 bp, Homo sapiens
  siRNA target sequence for ERVWE1 (NM_014590.2,1361-1379).
cccctacaaaggactagat

SEQ ID NO: 340885 - DNA, 19 bp, Homo sapiens
  siRNA target sequence for ERVWE1 (NM_014590.2,1372-1390).
gactagatctctcaaaact

SEQ ID NO: 340886 - DNA, 19 bp, Homo sapiens
  siRNA target sequence for ERVWE1 (NM_014590.2,1416-1434).
cgcctggtaagcctattta

SEQ ID NO: 340887 - DNA, 19 bp, Homo sapiens
  siRNA target sequence for ERVWE1 (NM_014590.2,1422-1440).
gtaagcctatttaatacca

SEQ ID NO: 340888 - DNA, 19 bp, Homo sapiens
  siRNA target sequence for ERVWE1 (NM_014590.2,1465-1483).
cggcccaaaaccctactaa

SEQ ID NO: 340889 - DNA, 19 bp, Homo sapiens
  siRNA target sequence for ERVWE1 (NM_014590.2,1469-1487).
ccaaaaccctactaactgt

SEQ ID NO: 340890 - DNA, 19 bp, Homo sapiens
  siRNA target sequence for ERVWE1 (NM_014590.2,1470-1488).
caaaaccctactaactgtt

SEQ ID NO: 340891 - DNA, 19 bp, Homo sapiens
  siRNA target sequence for ERVWE1 (NM_014590.2,1475-1493).
ccctactaactgttggata

SEQ ID NO: 340892 - DNA, 19 bp, Homo sapiens
  siRNA target sequence for ERVWE1 (NM_014590.2,1476-1494).
cctactaactgttggatat

SEQ ID NO: 340893 - DNA, 19 bp, Homo sapiens
  siRNA target sequence for ERVWE1 (NM_014590.2,1505-1523).
gaacttcaggccatatgtt

SEQ ID NO: 340894 - DNA, 19 bp, Homo sapiens
  siRNA target sequence for ERVWE1 (NM_014590.2,1627-1645).
caaacctcacctgtgtaaa

SEQ ID NO: 340895 - DNA, 19 bp, Homo sapiens
  siRNA target sequence for ERVWE1 (NM_014590.2,1666-1684).
caaccaactcccaatgcat

SEQ ID NO: 340896 - DNA, 19 bp, Homo sapiens
  siRNA target sequence for ERVWE1 (NM_014590.2,1717-1735).
gcctaccctcaggaatatt

SEQ ID NO: 340897 - DNA, 19 bp, Homo sapiens
  siRNA target sequence for ERVWE1 (NM_014590.2,1746-1764).
ggtacctcagcctatcgtt

SEQ ID NO: 340898 - DNA, 19 bp, Homo sapiens
  siRNA target sequence for ERVWE1 (NM_014590.2,1750-1768).
cctcagcctatcgttgttt

SEQ ID NO: 340899 - DNA, 19 bp, Homo sapiens
  siRNA target sequence for ERVWE1 (NM_014590.2,1773-1791).
ggctcttcagaatctatgt

SEQ ID NO: 340900 - DNA, 19 bp, Homo sapiens
  siRNA target sequence for ERVWE1 (NM_014590.2,1820-1838).
gaccatctacactgaacaa

SEQ ID NO: 340901 - DNA, 19 bp, Homo sapiens
  siRNA target sequence for ERVWE1 (NM_014590.2,1822-1840).
ccatctacactgaacaaga

SEQ ID NO: 340902 - DNA, 19 bp, Homo sapiens
  siRNA target sequence for ERVWE1 (NM_014590.2,1879-1897).
gagtacccattcttccttt

SEQ ID NO: 340903 - DNA, 19 bp, Homo sapiens
  siRNA target sequence for ERVWE1 (NM_014590.2,1935-1953).
ggcattggcggtatcacaa

SEQ ID NO: 340904 - DNA, 19 bp, Homo sapiens
  siRNA target sequence for ERVWE1 (NM_014590.2,1957-1975).
ctactcagttctactacaa

SEQ ID NO: 340905 - DNA, 19 bp, Homo sapiens
  siRNA target sequence for ERVWE1 (NM_014590.2,1967-1985).
ctactacaaactatctcaa

SEQ ID NO: 340906 - DNA, 19 bp, Homo sapiens
  siRNA target sequence for ERVWE1 (NM_014590.2,2029-2047).
ccttgcaagatcaacttaa

SEQ ID NO: 340907 - DNA, 19 bp, Homo sapiens
  siRNA target sequence for ERVWE1 (NM_014590.2,2090-2108).
cttgctaaccgctgaaaga

SEQ ID NO: 340908 - DNA, 19 bp, Homo sapiens
  siRNA target sequence for ERVWE1 (NM_014590.2,2162-2180).
cggaatcgtcactgagaaa

SEQ ID NO: 340909 - DNA, 19 bp, Homo sapiens
  siRNA target sequence for ERVWE1 (NM_014590.2,2164-2182).
gaatcgtcactgagaaagt

SEQ ID NO: 340910 - DNA, 19 bp, Homo sapiens
  siRNA target sequence for ERVWE1 (NM_014590.2,2168-2186).
cgtcactgagaaagttaaa

SEQ ID NO: 340911 - DNA, 19 bp, Homo sapiens
  siRNA target sequence for ERVWE1 (NM_014590.2,2286-2304).
ggacctctagcagctataa

SEQ ID NO: 340912 - DNA, 19 bp, Homo sapiens
  siRNA target sequence for ERVWE1 (NM_014590.2,2287-2305).
gacctctagcagctataat

SEQ ID NO: 340913 - DNA, 19 bp, Homo sapiens
  siRNA target sequence for HSU15552 (NM_014597.1,67-85).
gccgcgtcggctgaaagtt

SEQ ID NO: 340914 - DNA, 19 bp, Homo sapiens
  siRNA target sequence for HSU15552 (NM_014597.1,121-139).
gcgcatccagaaagtagta

SEQ ID NO: 340915 - DNA, 19 bp, Homo sapiens
  siRNA target sequence for HSU15552 (NM_014597.1,123-141).
gcatccagaaagtagtact

SEQ ID NO: 340916 - DNA, 19 bp, Homo sapiens
  siRNA target sequence for HSU15552 (NM_014597.1,176-194).
ccactgggaagcaaagttt

SEQ ID NO: 340917 - DNA, 19 bp, Homo sapiens
  siRNA target sequence for HSU15552 (NM_014597.1,285-303).
ctctgaggcagagtcaaat

SEQ ID NO: 340918 - DNA, 19 bp, Homo sapiens
  siRNA target sequence for HSU15552 (NM_014597.1,287-305).
ctgaggcagagtcaaatta

SEQ ID NO: 340919 - DNA, 19 bp, Homo sapiens
  siRNA target sequence for HSU15552 (NM_014597.1,289-307).
gaggcagagtcaaattatt

SEQ ID NO: 340920 - DNA, 19 bp, Homo sapiens
  siRNA target sequence for HSU15552 (NM_014597.1,316-334).
gagcaccatgataccattt

SEQ ID NO: 340921 - DNA, 19 bp, Homo sapiens
  siRNA target sequence for HSU15552 (NM_014597.1,318-336).
gcaccatgataccatttta

SEQ ID NO: 340922 - DNA, 19 bp, Homo sapiens
  siRNA target sequence for HSU15552 (NM_014597.1,347-365).
ggagaaggcagatcttaat

SEQ ID NO: 340923 - DNA, 19 bp, Homo sapiens
  siRNA target sequence for HSU15552 (NM_014597.1,412-430).
ccaacaaaggagtcttaca

SEQ ID NO: 340924 - DNA, 19 bp, Homo sapiens
  siRNA target sequence for HSU15552 (NM_014597.1,448-466).
gaagcagaatctcatgttt

SEQ ID NO: 340925 - DNA, 19 bp, Homo sapiens
  siRNA target sequence for HSU15552 (NM_014597.1,548-566).
gccaagaatctcatacaga

SEQ ID NO: 340926 - DNA, 19 bp, Homo sapiens
  siRNA target sequence for HSU15552 (NM_014597.1,585-603).
gacatcaagctcagacatt

SEQ ID NO: 340927 - DNA, 19 bp, Homo sapiens
  siRNA target sequence for HSU15552 (NM_014597.1,590-608).
caagctcagacatttcatt

SEQ ID NO: 340928 - DNA, 19 bp, Homo sapiens
  siRNA target sequence for HSU15552 (NM_014597.1,712-730).
gtgggtacacctgtgaatt

SEQ ID NO: 340929 - DNA, 19 bp, Homo sapiens
  siRNA target sequence for HSU15552 (NM_014597.1,714-732).
gggtacacctgtgaattca

SEQ ID NO: 340930 - DNA, 19 bp, Homo sapiens
  siRNA target sequence for HSU15552 (NM_014597.1,736-754).
gattcagataccagacaaa

SEQ ID NO: 340931 - DNA, 19 bp, Homo sapiens
  siRNA target sequence for HSU15552 (NM_014597.1,833-851).
cccacagaagttcagaaaa

SEQ ID NO: 340932 - DNA, 19 bp, Homo sapiens
  siRNA target sequence for HSU15552 (NM_014597.1,864-882).
gcacgaacaggccaatgtt

SEQ ID NO: 340933 - DNA, 19 bp, Homo sapiens
  siRNA target sequence for HSU15552 (NM_014597.1,867-885).
cgaacaggccaatgttgaa

SEQ ID NO: 340934 - DNA, 19 bp, Homo sapiens
  siRNA target sequence for HSU15552 (NM_014597.1,868-886).
gaacaggccaatgttgaat

SEQ ID NO: 340935 - DNA, 19 bp, Homo sapiens
  siRNA target sequence for HSU15552 (NM_014597.1,874-892).
gccaatgttgaatctctta

SEQ ID NO: 340936 - DNA, 19 bp, Homo sapiens
  siRNA target sequence for HSU15552 (NM_014597.1,906-924).
gaattgtaaggatttggat

SEQ ID NO: 340937 - DNA, 19 bp, Homo sapiens
  siRNA target sequence for HSU15552 (NM_014597.1,1014-1032).
ccttcaacagttagtttct

SEQ ID NO: 340938 - DNA, 19 bp, Homo sapiens
  siRNA target sequence for HSU15552 (NM_014597.1,1064-1082).
ctgtatcagtgcactctaa

SEQ ID NO: 340939 - DNA, 19 bp, Homo sapiens
  siRNA target sequence for HSU15552 (NM_014597.1,1093-1111).
gaggctgtaatgaaatcat

SEQ ID NO: 340940 - DNA, 19 bp, Homo sapiens
  siRNA target sequence for HSU15552 (NM_014597.1,1141-1159).
ggcagatggaataacaaca

SEQ ID NO: 340941 - DNA, 19 bp, Homo sapiens
  siRNA target sequence for HSU15552 (NM_014597.1,1263-1281).
cagtgaagggaatgtagat

SEQ ID NO: 340942 - DNA, 19 bp, Homo sapiens
  siRNA target sequence for HSU15552 (NM_014597.1,1285-1303).
gaatgtgataccaaactat

SEQ ID NO: 340943 - DNA, 19 bp, Homo sapiens
  siRNA target sequence for HSU15552 (NM_014597.1,1374-1392).
ccaacagtctgaaaacagt

SEQ ID NO: 340944 - DNA, 19 bp, Homo sapiens
  siRNA target sequence for HSU15552 (NM_014597.1,1399-1417).
gaagaggatactttatgtt

SEQ ID NO: 340945 - DNA, 19 bp, Homo sapiens
  siRNA target sequence for HSU15552 (NM_014597.1,1404-1422).
ggatactttatgttttgtt

SEQ ID NO: 340946 - DNA, 19 bp, Homo sapiens
  siRNA target sequence for HSU15552 (NM_014597.1,1472-1490).
catgtgacaatgcattgtt

SEQ ID NO: 340947 - DNA, 19 bp, Homo sapiens
  siRNA target sequence for HSU15552 (NM_014597.1,1479-1497).
caatgcattgtttgtaatt

SEQ ID NO: 340948 - DNA, 19 bp, Homo sapiens
  siRNA target sequence for HSU15552 (NM_014597.1,1500-1518).
cacaactcctggaatgagt

SEQ ID NO: 340949 - DNA, 19 bp, Homo sapiens
  siRNA target sequence for HSU15552 (NM_014597.1,1517-1535).
gtgctgataaaaattttta

SEQ ID NO: 340950 - DNA, 19 bp, Homo sapiens
  siRNA target sequence for HSU15552 (NM_014597.1,1632-1650).
cgaaaatgaagatgagttt

SEQ ID NO: 340951 - DNA, 19 bp, Homo sapiens
  siRNA target sequence for HSU15552 (NM_014597.1,1660-1678).
gaagacttcctaaatagca

SEQ ID NO: 340952 - DNA, 19 bp, Homo sapiens
  siRNA target sequence for HSU15552 (NM_014597.1,1676-1694).
gcacaaaggctaaacttct

SEQ ID NO: 340953 - DNA, 19 bp, Homo sapiens
  siRNA target sequence for HSU15552 (NM_014597.1,1684-1702).
gctaaacttctgaagttga

SEQ ID NO: 340954 - DNA, 19 bp, Homo sapiens
  siRNA target sequence for HSU15552 (NM_014597.1,1717-1735).
gaccctggtctgagtatca

SEQ ID NO: 340955 - DNA, 19 bp, Homo sapiens
  siRNA target sequence for HSU15552 (NM_014597.1,1777-1795).
ctacagtctaacaagagaa

SEQ ID NO: 340956 - DNA, 19 bp, Homo sapiens
  siRNA target sequence for HSU15552 (NM_014597.1,1875-1893).
ctgtgttccaccatatagt

SEQ ID NO: 340957 - DNA, 19 bp, Homo sapiens
  siRNA target sequence for HSU15552 (NM_014597.1,1877-1895).
gtgttccaccatatagtga

SEQ ID NO: 340958 - DNA, 19 bp, Homo sapiens
  siRNA target sequence for HSU15552 (NM_014597.1,1882-1900).
ccaccatatagtgaatcaa

SEQ ID NO: 340959 - DNA, 19 bp, Homo sapiens
  siRNA target sequence for HSU15552 (NM_014597.1,1883-1901).
caccatatagtgaatcaaa

SEQ ID NO: 340960 - DNA, 19 bp, Homo sapiens
  siRNA target sequence for HSU15552 (NM_014597.1,1885-1903).
ccatatagtgaatcaaagt

SEQ ID NO: 340961 - DNA, 19 bp, Homo sapiens
  siRNA target sequence for HSU15552 (NM_014597.1,1886-1904).
catatagtgaatcaaagta

SEQ ID NO: 340962 - DNA, 19 bp, Homo sapiens
  siRNA target sequence for HSU15552 (NM_014597.1,1948-1966).
ggggatggctggtttggta

SEQ ID NO: 340963 - DNA, 19 bp, Homo sapiens
  siRNA target sequence for HSU15552 (NM_014597.1,2028-2046).
cagcatggacccgaaaaga

SEQ ID NO: 340964 - DNA, 19 bp, Homo sapiens
  siRNA target sequence for HSU15552 (NM_014597.1,2031-2049).
catggacccgaaaagattt

SEQ ID NO: 340965 - DNA, 19 bp, Homo sapiens
  siRNA target sequence for HSU15552 (NM_014597.1,2113-2131).
ccagctgatttctaccatt

SEQ ID NO: 340966 - DNA, 19 bp, Homo sapiens
  siRNA target sequence for HSU15552 (NM_014597.1,2178-2196).
ctggctgattctgaattca

SEQ ID NO: 340967 - DNA, 19 bp, Homo sapiens
  siRNA target sequence for HSU15552 (NM_014597.1,2180-2198).
ggctgattctgaattcaga

SEQ ID NO: 340968 - DNA, 19 bp, Homo sapiens
  siRNA target sequence for HSU15552 (NM_014597.1,2211-2229).
ggaagtactcagagatcat

SEQ ID NO: 340969 - DNA, 19 bp, Homo sapiens
  siRNA target sequence for MAGED2 (NM_014599.4,258-276).
ggatgtgaaggtctcaaaa

SEQ ID NO: 340970 - DNA, 19 bp, Homo sapiens
  siRNA target sequence for MAGED2 (NM_014599.4,382-400).
ctggcagctgaaaacaaga

SEQ ID NO: 340971 - DNA, 19 bp, Homo sapiens
  siRNA target sequence for MAGED2 (NM_014599.4,479-497).
gccatgtggctgatacaaa

SEQ ID NO: 340972 - DNA, 19 bp, Homo sapiens
  siRNA target sequence for MAGED2 (NM_014599.4,487-505).
gctgatacaaaggtcaata

SEQ ID NO: 340973 - DNA, 19 bp, Homo sapiens
  siRNA target sequence for MAGED2 (NM_014599.4,490-508).
gatacaaaggtcaatacaa

SEQ ID NO: 340974 - DNA, 19 bp, Homo sapiens
  siRNA target sequence for MAGED2 (NM_014599.4,701-719).
gtggccgaagggtctcaaa

SEQ ID NO: 340975 - DNA, 19 bp, Homo sapiens
  siRNA target sequence for MAGED2 (NM_014599.4,828-846).
ctccctgagatcacctaaa

SEQ ID NO: 340976 - DNA, 19 bp, Homo sapiens
  siRNA target sequence for MAGED2 (NM_014599.4,936-954).
gcaagggagggcaaatgat

SEQ ID NO: 340977 - DNA, 19 bp, Homo sapiens
  siRNA target sequence for MAGED2 (NM_014599.4,937-955).
caagggagggcaaatgatt

SEQ ID NO: 340978 - DNA, 19 bp, Homo sapiens
  siRNA target sequence for MAGED2 (NM_014599.4,952-970).
gatttggtgaagtaccttt

SEQ ID NO: 340979 - DNA, 19 bp, Homo sapiens
  siRNA target sequence for MAGED2 (NM_014599.4,1047-1065).
gtaccccgaaatcattgaa

SEQ ID NO: 340980 - DNA, 19 bp, Homo sapiens
  siRNA target sequence for MAGED2 (NM_014599.4,1063-1081).
gaacgagcaggctattcct

SEQ ID NO: 340981 - DNA, 19 bp, Homo sapiens
  siRNA target sequence for MAGED2 (NM_014599.4,1122-1140).
gaatgaccacttgtacatt

SEQ ID NO: 340982 - DNA, 19 bp, Homo sapiens
  siRNA target sequence for MAGED2 (NM_014599.4,1299-1317).
gcgccctgggatacatcat

SEQ ID NO: 340983 - DNA, 19 bp, Homo sapiens
  siRNA target sequence for MAGED2 (NM_014599.4,1302-1320).
ccctgggatacatcattca

SEQ ID NO: 340984 - DNA, 19 bp, Homo sapiens
  siRNA target sequence for MAGED2 (NM_014599.4,1304-1322).
ctgggatacatcattcact

SEQ ID NO: 340985 - DNA, 19 bp, Homo sapiens
  siRNA target sequence for MAGED2 (NM_014599.4,1531-1549).
gcgatggaagcggatttga

SEQ ID NO: 340986 - DNA, 19 bp, Homo sapiens
  siRNA target sequence for MAGED2 (NM_014599.4,1532-1550).
cgatggaagcggatttgaa

SEQ ID NO: 340987 - DNA, 19 bp, Homo sapiens
  siRNA target sequence for MAGED2 (NM_014599.4,1581-1599).
ggctagggccgagattaga

SEQ ID NO: 340988 - DNA, 19 bp, Homo sapiens
  siRNA target sequence for MAGED2 (NM_014599.4,1750-1768).
gccagtaccagtaccaata

SEQ ID NO: 340989 - DNA, 19 bp, Homo sapiens
  siRNA target sequence for MAGED2 (NM_014599.4,1751-1769).
ccagtaccagtaccaataa

SEQ ID NO: 340990 - DNA, 19 bp, Homo sapiens
  siRNA target sequence for HUMPPA (NM_014603.1,1717-1735).
gtacaaggcgctcttcaaa

SEQ ID NO: 340991 - DNA, 19 bp, Homo sapiens
  siRNA target sequence for HUMPPA (NM_014603.1,1725-1743).
cgctcttcaaagagatctt

SEQ ID NO: 340992 - DNA, 19 bp, Homo sapiens
  siRNA target sequence for UBXD2 (NM_014607.2,328-346).
gtgaagcctgcctacagtt

SEQ ID NO: 340993 - DNA, 19 bp, Homo sapiens
  siRNA target sequence for UBXD2 (NM_014607.2,330-348).
gaagcctgcctacagtttt

SEQ ID NO: 340994 - DNA, 19 bp, Homo sapiens
  siRNA target sequence for UBXD2 (NM_014607.2,334-352).
cctgcctacagttttcaca

SEQ ID NO: 340995 - DNA, 19 bp, Homo sapiens
  siRNA target sequence for UBXD2 (NM_014607.2,547-565).
ctgcgtcatttgaacctaa

SEQ ID NO: 340996 - DNA, 19 bp, Homo sapiens
  siRNA target sequence for UBXD2 (NM_014607.2,550-568).
cgtcatttgaacctaacaa

SEQ ID NO: 340997 - DNA, 19 bp, Homo sapiens
  siRNA target sequence for UBXD2 (NM_014607.2,731-749).
catccgagtggaaagacta

SEQ ID NO: 340998 - DNA, 19 bp, Homo sapiens
  siRNA target sequence for UBXD2 (NM_014607.2,734-752).
ccgagtggaaagactaaca

SEQ ID NO: 340999 - DNA, 19 bp, Homo sapiens
  siRNA target sequence for UBXD2 (NM_014607.2,735-753).
cgagtggaaagactaacaa

SEQ ID NO: 341000 - DNA, 19 bp, Homo sapiens
  siRNA target sequence for UBXD2 (NM_014607.2,736-754).
gagtggaaagactaacaaa

SEQ ID NO: 341001 - DNA, 19 bp, Homo sapiens
  siRNA target sequence for UBXD2 (NM_014607.2,928-946).
gggcagctcgagaacgtat

SEQ ID NO: 341002 - DNA, 19 bp, Homo sapiens
  siRNA target sequence for UBXD2 (NM_014607.2,929-947).
ggcagctcgagaacgtata

SEQ ID NO: 341003 - DNA, 19 bp, Homo sapiens
  siRNA target sequence for UBXD2 (NM_014607.2,930-948).
gcagctcgagaacgtataa

SEQ ID NO: 341004 - DNA, 19 bp, Homo sapiens
  siRNA target sequence for UBXD2 (NM_014607.2,931-949).
cagctcgagaacgtataaa

SEQ ID NO: 341005 - DNA, 19 bp, Homo sapiens
  siRNA target sequence for UBXD2 (NM_014607.2,934-952).
ctcgagaacgtataaaaca

SEQ ID NO: 341006 - DNA, 19 bp, Homo sapiens
  siRNA target sequence for UBXD2 (NM_014607.2,977-995).
gagagctgctcgttttgca

SEQ ID NO: 341007 - DNA, 19 bp, Homo sapiens
  siRNA target sequence for UBXD2 (NM_014607.2,979-997).
gagctgctcgttttgcaaa

SEQ ID NO: 341008 - DNA, 19 bp, Homo sapiens
  siRNA target sequence for UBXD2 (NM_014607.2,985-1003).
ctcgttttgcaaagacaaa

SEQ ID NO: 341009 - DNA, 19 bp, Homo sapiens
  siRNA target sequence for UBXD2 (NM_014607.2,1027-1045).
ctgctgccttgctagcaaa

SEQ ID NO: 341010 - DNA, 19 bp, Homo sapiens
  siRNA target sequence for UBXD2 (NM_014607.2,1030-1048).
ctgccttgctagcaaaaca

SEQ ID NO: 341011 - DNA, 19 bp, Homo sapiens
  siRNA target sequence for UBXD2 (NM_014607.2,1210-1228).
cttacggtaatttttcgtt

SEQ ID NO: 341012 - DNA, 19 bp, Homo sapiens
  siRNA target sequence for UBXD2 (NM_014607.2,1215-1233).
ggtaatttttcgttagcaa

SEQ ID NO: 341013 - DNA, 19 bp, Homo sapiens
  siRNA target sequence for UBXD2 (NM_014607.2,1306-1324).
gcgcttcggtggtactgtt

SEQ ID NO: 341014 - DNA, 19 bp, Homo sapiens
  siRNA target sequence for UBXD2 (NM_014607.2,1339-1357).
caactgcatccattgtaca

SEQ ID NO: 341015 - DNA, 19 bp, Homo sapiens
  siRNA target sequence for UBXD2 (NM_014607.2,1409-1427).
ccttgccatctggagatta

SEQ ID NO: 341016 - DNA, 19 bp, Homo sapiens
  siRNA target sequence for UBXD2 (NM_014607.2,1502-1520).
ccctgcatcatctagcaaa

SEQ ID NO: 341017 - DNA, 19 bp, Homo sapiens
  siRNA target sequence for UBXD2 (NM_014607.2,1563-1581).
cgtggagacgactttaaaa

SEQ ID NO: 341018 - DNA, 19 bp, Homo sapiens
  siRNA target sequence for UBXD2 (NM_014607.2,1567-1585).
gagacgactttaaaaagga

SEQ ID NO: 341019 - DNA, 19 bp, Homo sapiens
  siRNA target sequence for UBXD2 (NM_014607.2,1584-1602).
gaggggaaaatttatagat

SEQ ID NO: 341020 - DNA, 19 bp, Homo sapiens
  siRNA target sequence for UBXD2 (NM_014607.2,1648-1666).
gaaattccactcaacagat

SEQ ID NO: 341021 - DNA, 19 bp, Homo sapiens
  siRNA target sequence for CYFIP1 (NM_014608.1,158-176).
ctgctctaccagccaaatt

SEQ ID NO: 341022 - DNA, 19 bp, Homo sapiens
  siRNA target sequence for CYFIP1 (NM_014608.1,161-179).
ctctaccagccaaatttca

SEQ ID NO: 341023 - DNA, 19 bp, Homo sapiens
  siRNA target sequence for CYFIP1 (NM_014608.1,167-185).
cagccaaatttcaacacta

SEQ ID NO: 341024 - DNA, 19 bp, Homo sapiens
  siRNA target sequence for CYFIP1 (NM_014608.1,170-188).
ccaaatttcaacactaact

SEQ ID NO: 341025 - DNA, 19 bp, Homo sapiens
  siRNA target sequence for CYFIP1 (NM_014608.1,213-231).
ctggcatcgcaagatacat

SEQ ID NO: 341026 - DNA, 19 bp, Homo sapiens
  siRNA target sequence for CYFIP1 (NM_014608.1,217-235).
catcgcaagatacattgaa

SEQ ID NO: 341027 - DNA, 19 bp, Homo sapiens
  siRNA target sequence for CYFIP1 (NM_014608.1,220-238).
cgcaagatacattgaacaa

SEQ ID NO: 341028 - DNA, 19 bp, Homo sapiens
  siRNA target sequence for CYFIP1 (NM_014608.1,274-292).
ggagggccaagaatatgct

SEQ ID NO: 341029 - DNA, 19 bp, Homo sapiens
  siRNA target sequence for CYFIP1 (NM_014608.1,397-415).
ggagcctgaggtcacaaaa

SEQ ID NO: 341030 - DNA, 19 bp, Homo sapiens
  siRNA target sequence for CYFIP1 (NM_014608.1,625-643).
cgctcagtttttacgtaaa

SEQ ID NO: 341031 - DNA, 19 bp, Homo sapiens
  siRNA target sequence for CYFIP1 (NM_014608.1,626-644).
gctcagtttttacgtaaaa

SEQ ID NO: 341032 - DNA, 19 bp, Homo sapiens
  siRNA target sequence for CYFIP1 (NM_014608.1,692-710).
ctggccaatcataacaaga

SEQ ID NO: 341033 - DNA, 19 bp, Homo sapiens
  siRNA target sequence for CYFIP1 (NM_014608.1,695-713).
gccaatcataacaagatca

SEQ ID NO: 341034 - DNA, 19 bp, Homo sapiens
  siRNA target sequence for CYFIP1 (NM_014608.1,728-746).
cagcagctcgaagtgattt

SEQ ID NO: 341035 - DNA, 19 bp, Homo sapiens
  siRNA target sequence for CYFIP1 (NM_014608.1,767-785).
gcagatattgtgaatctgt

SEQ ID NO: 341036 - DNA, 19 bp, Homo sapiens
  siRNA target sequence for CYFIP1 (NM_014608.1,879-897).
ggagtgtcagtaacatcta

SEQ ID NO: 341037 - DNA, 19 bp, Homo sapiens
  siRNA target sequence for CYFIP1 (NM_014608.1,880-898).
gagtgtcagtaacatctat

SEQ ID NO: 341038 - DNA, 19 bp, Homo sapiens
  siRNA target sequence for CYFIP1 (NM_014608.1,882-900).
gtgtcagtaacatctataa

SEQ ID NO: 341039 - DNA, 19 bp, Homo sapiens
  siRNA target sequence for CYFIP1 (NM_014608.1,971-989).
ctatttggggacatgcaaa

SEQ ID NO: 341040 - DNA, 19 bp, Homo sapiens
  siRNA target sequence for CYFIP1 (NM_014608.1,1017-1035).
gcgcccactacgaggaaaa

SEQ ID NO: 341041 - DNA, 19 bp, Homo sapiens
  siRNA target sequence for CYFIP1 (NM_014608.1,1018-1036).
cgcccactacgaggaaaat

SEQ ID NO: 341042 - DNA, 19 bp, Homo sapiens
  siRNA target sequence for CYFIP1 (NM_014608.1,1019-1037).
gcccactacgaggaaaata

SEQ ID NO: 341043 - DNA, 19 bp, Homo sapiens
  siRNA target sequence for CYFIP1 (NM_014608.1,1020-1038).
cccactacgaggaaaataa

SEQ ID NO: 341044 - DNA, 19 bp, Homo sapiens
  siRNA target sequence for CYFIP1 (NM_014608.1,1024-1042).
ctacgaggaaaataaatct

SEQ ID NO: 341045 - DNA, 19 bp, Homo sapiens
  siRNA target sequence for CYFIP1 (NM_014608.1,1068-1086).
gcagccctcagtacaacat

SEQ ID NO: 341046 - DNA, 19 bp, Homo sapiens
  siRNA target sequence for CYFIP1 (NM_014608.1,1114-1132).
ggaccacatgcgcttcatt

SEQ ID NO: 341047 - DNA, 19 bp, Homo sapiens
  siRNA target sequence for CYFIP1 (NM_014608.1,1269-1287).
cgcacgtgatggaagtgta

SEQ ID NO: 341048 - DNA, 19 bp, Homo sapiens
  siRNA target sequence for CYFIP1 (NM_014608.1,1271-1289).
cacgtgatggaagtgtatt

SEQ ID NO: 341049 - DNA, 19 bp, Homo sapiens
  siRNA target sequence for CYFIP1 (NM_014608.1,1304-1322).
caccccaccgacaagtact

SEQ ID NO: 341050 - DNA, 19 bp, Homo sapiens
  siRNA target sequence for CYFIP1 (NM_014608.1,1361-1379).
cgtgccacgcgctacaact

SEQ ID NO: 341051 - DNA, 19 bp, Homo sapiens
  siRNA target sequence for CYFIP1 (NM_014608.1,1381-1399).
caccagcgaggagaagttt

SEQ ID NO: 341052 - DNA, 19 bp, Homo sapiens
  siRNA target sequence for CYFIP1 (NM_014608.1,1672-1690).
gagcggcttcgacataaaa

SEQ ID NO: 341053 - DNA, 19 bp, Homo sapiens
  siRNA target sequence for CYFIP1 (NM_014608.1,1674-1692).
gcggcttcgacataaaagt

SEQ ID NO: 341054 - DNA, 19 bp, Homo sapiens
  siRNA target sequence for CYFIP1 (NM_014608.1,1675-1693).
cggcttcgacataaaagta

SEQ ID NO: 341055 - DNA, 19 bp, Homo sapiens
  siRNA target sequence for CYFIP1 (NM_014608.1,1773-1791).
gtggttccaagaaaacctt

SEQ ID NO: 341056 - DNA, 19 bp, Homo sapiens
  siRNA target sequence for CYFIP1 (NM_014608.1,1838-1856).
catcgagagtcattcttct

SEQ ID NO: 341057 - DNA, 19 bp, Homo sapiens
  siRNA target sequence for CYFIP1 (NM_014608.1,1852-1870).
cttctacactcacttgata

SEQ ID NO: 341058 - DNA, 19 bp, Homo sapiens
  siRNA target sequence for CYFIP1 (NM_014608.1,1855-1873).
ctacactcacttgataaat

SEQ ID NO: 341059 - DNA, 19 bp, Homo sapiens
  siRNA target sequence for CYFIP1 (NM_014608.1,2084-2102).
gcgctcaccaggttcaaca

SEQ ID NO: 341060 - DNA, 19 bp, Homo sapiens
  siRNA target sequence for CYFIP1 (NM_014608.1,2085-2103).
cgctcaccaggttcaacaa

SEQ ID NO: 341061 - DNA, 19 bp, Homo sapiens
  siRNA target sequence for CYFIP1 (NM_014608.1,2107-2125).
gttcctgtacgacgaaatt

SEQ ID NO: 341062 - DNA, 19 bp, Homo sapiens
  siRNA target sequence for CYFIP1 (NM_014608.1,2126-2144).
gaggccgaggtgaatctat

SEQ ID NO: 341063 - DNA, 19 bp, Homo sapiens
  siRNA target sequence for CYFIP1 (NM_014608.1,2128-2146).
ggccgaggtgaatctatgt

SEQ ID NO: 341064 - DNA, 19 bp, Homo sapiens
  siRNA target sequence for CYFIP1 (NM_014608.1,2129-2147).
gccgaggtgaatctatgtt

SEQ ID NO: 341065 - DNA, 19 bp, Homo sapiens
  siRNA target sequence for CYFIP1 (NM_014608.1,2130-2148).
ccgaggtgaatctatgttt

SEQ ID NO: 341066 - DNA, 19 bp, Homo sapiens
  siRNA target sequence for CYFIP1 (NM_014608.1,2131-2149).
cgaggtgaatctatgtttt

SEQ ID NO: 341067 - DNA, 19 bp, Homo sapiens
  siRNA target sequence for CYFIP1 (NM_014608.1,2219-2237).
cttgataaacggttacgat

SEQ ID NO: 341068 - DNA, 19 bp, Homo sapiens
  siRNA target sequence for CYFIP1 (NM_014608.1,2229-2247).
ggttacgatcagaatgcaa

SEQ ID NO: 341069 - DNA, 19 bp, Homo sapiens
  siRNA target sequence for CYFIP1 (NM_014608.1,2318-2336).
cagctcctcggcagatcaa

SEQ ID NO: 341070 - DNA, 19 bp, Homo sapiens
  siRNA target sequence for CYFIP1 (NM_014608.1,2320-2338).
gctcctcggcagatcaata

SEQ ID NO: 341071 - DNA, 19 bp, Homo sapiens
  siRNA target sequence for CYFIP1 (NM_014608.1,2365-2383).
cgtctcagcagccatgtat

SEQ ID NO: 341072 - DNA, 19 bp, Homo sapiens
  siRNA target sequence for CYFIP1 (NM_014608.1,2401-2419).
gattggacgatttgaaagt

SEQ ID NO: 341073 - DNA, 19 bp, Homo sapiens
  siRNA target sequence for CYFIP1 (NM_014608.1,2586-2604).
gggagctcaactatgactt

SEQ ID NO: 341074 - DNA, 19 bp, Homo sapiens
  siRNA target sequence for CYFIP1 (NM_014608.1,2641-2659).
gtttgttcggacagtgtta

SEQ ID NO: 341075 - DNA, 19 bp, Homo sapiens
  siRNA target sequence for CYFIP1 (NM_014608.1,2645-2663).
gttcggacagtgttaccat

SEQ ID NO: 341076 - DNA, 19 bp, Homo sapiens
  siRNA target sequence for CYFIP1 (NM_014608.1,2669-2687).
caggaatttcaaagagata

SEQ ID NO: 341077 - DNA, 19 bp, Homo sapiens
  siRNA target sequence for CYFIP1 (NM_014608.1,2781-2799).
gacctccacactttcaagt

SEQ ID NO: 341078 - DNA, 19 bp, Homo sapiens
  siRNA target sequence for CYFIP1 (NM_014608.1,2784-2802).
ctccacactttcaagtcat

SEQ ID NO: 341079 - DNA, 19 bp, Homo sapiens
  siRNA target sequence for CYFIP1 (NM_014608.1,3088-3106).
gagcctgtctttagaagaa

SEQ ID NO: 341080 - DNA, 19 bp, Homo sapiens
  siRNA target sequence for CYFIP1 (NM_014608.1,3090-3108).
gcctgtctttagaagaagt

SEQ ID NO: 341081 - DNA, 19 bp, Homo sapiens
  siRNA target sequence for CYFIP1 (NM_014608.1,3126-3144).
cggctcctttccagaacat

SEQ ID NO: 341082 - DNA, 19 bp, Homo sapiens
  siRNA target sequence for CYFIP1 (NM_014608.1,3148-3166).
gccgcgagtccatgtgaaa

SEQ ID NO: 341083 - DNA, 19 bp, Homo sapiens
  siRNA target sequence for CYFIP1 (NM_014608.1,3227-3245).
cttgtcccactgattgaaa

SEQ ID NO: 341084 - DNA, 19 bp, Homo sapiens
  siRNA target sequence for CYFIP1 (NM_014608.1,3537-3555).
gtatgatcatcgtacttct

SEQ ID NO: 341085 - DNA, 19 bp, Homo sapiens
  siRNA target sequence for CYFIP1 (NM_014608.1,3620-3638).
gatggcaaagatgagatta

SEQ ID NO: 341086 - DNA, 19 bp, Homo sapiens
  siRNA target sequence for CYFIP1 (NM_014608.1,3624-3642).
gcaaagatgagattattaa

SEQ ID NO: 341087 - DNA, 19 bp, Homo sapiens
  siRNA target sequence for CYFIP1 (NM_014608.1,3677-3695).
cgcaagttccagattctca

SEQ ID NO: 341088 - DNA, 19 bp, Homo sapiens
  siRNA target sequence for C9orf10 (NM_014612.2,524-542).
catcaggaagtgattggtt

SEQ ID NO: 341089 - DNA, 19 bp, Homo sapiens
  siRNA target sequence for C9orf10 (NM_014612.2,598-616).
gtgcaacatcccctactat

SEQ ID NO: 341090 - DNA, 19 bp, Homo sapiens
  siRNA target sequence for C9orf10 (NM_014612.2,600-618).
gcaacatcccctactattt

SEQ ID NO: 341091 - DNA, 19 bp, Homo sapiens
  siRNA target sequence for C9orf10 (NM_014612.2,604-622).
catcccctactatttcagt

SEQ ID NO: 341092 - DNA, 19 bp, Homo sapiens
  siRNA target sequence for C9orf10 (NM_014612.2,619-637).
cagtgcccatgccctaaaa

SEQ ID NO: 341093 - DNA, 19 bp, Homo sapiens
  siRNA target sequence for C9orf10 (NM_014612.2,623-641).
gcccatgccctaaaactga

SEQ ID NO: 341094 - DNA, 19 bp, Homo sapiens
  siRNA target sequence for C9orf10 (NM_014612.2,640-658).
gagccggaacgggaaaagt

SEQ ID NO: 341095 - DNA, 19 bp, Homo sapiens
  siRNA target sequence for C9orf10 (NM_014612.2,642-660).
gccggaacgggaaaagtct

SEQ ID NO: 341096 - DNA, 19 bp, Homo sapiens
  siRNA target sequence for C9orf10 (NM_014612.2,703-721).
ggacctgaatccaaatcgt

SEQ ID NO: 341097 - DNA, 19 bp, Homo sapiens
  siRNA target sequence for C9orf10 (NM_014612.2,704-722).
gacctgaatccaaatcgtt

SEQ ID NO: 341098 - DNA, 19 bp, Homo sapiens
  siRNA target sequence for C9orf10 (NM_014612.2,706-724).
cctgaatccaaatcgtttt

SEQ ID NO: 341099 - DNA, 19 bp, Homo sapiens
  siRNA target sequence for C9orf10 (NM_014612.2,714-732).
caaatcgttttcctatttt

SEQ ID NO: 341100 - DNA, 19 bp, Homo sapiens
  siRNA target sequence for C9orf10 (NM_014612.2,735-753).
ctgctctcttaggaaatca

SEQ ID NO: 341101 - DNA, 19 bp, Homo sapiens
  siRNA target sequence for C9orf10 (NM_014612.2,738-756).
ctctcttaggaaatcacat

SEQ ID NO: 341102 - DNA, 19 bp, Homo sapiens
  siRNA target sequence for C9orf10 (NM_014612.2,855-873).
caccttgcgacgtagtgat

SEQ ID NO: 341103 - DNA, 19 bp, Homo sapiens
  siRNA target sequence for C9orf10 (NM_014612.2,963-981).
gaacagatgacaaagttat

SEQ ID NO: 341104 - DNA, 19 bp, Homo sapiens
  siRNA target sequence for C9orf10 (NM_014612.2,968-986).
gatgacaaagttattcgat

SEQ ID NO: 341105 - DNA, 19 bp, Homo sapiens
  siRNA target sequence for C9orf10 (NM_014612.2,1017-1035).
ctagtaagcctatgtcatt

SEQ ID NO: 341106 - DNA, 19 bp, Homo sapiens
  siRNA target sequence for C9orf10 (NM_014612.2,1020-1038).
gtaagcctatgtcatttca

SEQ ID NO: 341107 - DNA, 19 bp, Homo sapiens
  siRNA target sequence for C9orf10 (NM_014612.2,1429-1447).
cggaggggcgacaaaccat

SEQ ID NO: 341108 - DNA, 19 bp, Homo sapiens
  siRNA target sequence for C9orf10 (NM_014612.2,1430-1448).
ggaggggcgacaaaccata

SEQ ID NO: 341109 - DNA, 19 bp, Homo sapiens
  siRNA target sequence for C9orf10 (NM_014612.2,1431-1449).
gaggggcgacaaaccatat

SEQ ID NO: 341110 - DNA, 19 bp, Homo sapiens
  siRNA target sequence for C9orf10 (NM_014612.2,1433-1451).
ggggcgacaaaccatatca

SEQ ID NO: 341111 - DNA, 19 bp, Homo sapiens
  siRNA target sequence for C9orf10 (NM_014612.2,1511-1529).
gacccaggagaccaaacaa

SEQ ID NO: 341112 - DNA, 19 bp, Homo sapiens
  siRNA target sequence for C9orf10 (NM_014612.2,1701-1719).
ccgagcacaggcacaagaa

SEQ ID NO: 341113 - DNA, 19 bp, Homo sapiens
  siRNA target sequence for C9orf10 (NM_014612.2,1724-1742).
ctgatgtacccctacatct

SEQ ID NO: 341114 - DNA, 19 bp, Homo sapiens
  siRNA target sequence for C9orf10 (NM_014612.2,1751-1769).
ctgacgaagggtgaaatca

SEQ ID NO: 341115 - DNA, 19 bp, Homo sapiens
  siRNA target sequence for C9orf10 (NM_014612.2,1753-1771).
gacgaagggtgaaatcaaa

SEQ ID NO: 341116 - DNA, 19 bp, Homo sapiens
  siRNA target sequence for C9orf10 (NM_014612.2,1833-1851).
ggccagttcgtcagtatgt

SEQ ID NO: 341117 - DNA, 19 bp, Homo sapiens
  siRNA target sequence for C9orf10 (NM_014612.2,1834-1852).
gccagttcgtcagtatgtt

SEQ ID NO: 341118 - DNA, 19 bp, Homo sapiens
  siRNA target sequence for C9orf10 (NM_014612.2,1835-1853).
ccagttcgtcagtatgttt

SEQ ID NO: 341119 - DNA, 19 bp, Homo sapiens
  siRNA target sequence for C9orf10 (NM_014612.2,1836-1854).
cagttcgtcagtatgttta

SEQ ID NO: 341120 - DNA, 19 bp, Homo sapiens
  siRNA target sequence for C9orf10 (NM_014612.2,1850-1868).
gtttacggagtcctgttta

SEQ ID NO: 341121 - DNA, 19 bp, Homo sapiens
  siRNA target sequence for C9orf10 (NM_014612.2,2253-2271).
cgctgtcccccaaactcta

SEQ ID NO: 341122 - DNA, 19 bp, Homo sapiens
  siRNA target sequence for C9orf10 (NM_014612.2,2330-2348).
ctatcagctctcttcatga

SEQ ID NO: 341123 - DNA, 19 bp, Homo sapiens
  siRNA target sequence for C9orf10 (NM_014612.2,2357-2375).
gacatggccttgtttgcaa

SEQ ID NO: 341124 - DNA, 19 bp, Homo sapiens
  siRNA target sequence for C9orf10 (NM_014612.2,2410-2428).
ctgttgtccttggatgtat

SEQ ID NO: 341125 - DNA, 19 bp, Homo sapiens
  siRNA target sequence for C9orf10 (NM_014612.2,2827-2845).
gggcggagtccaacctata

SEQ ID NO: 341126 - DNA, 19 bp, Homo sapiens
  siRNA target sequence for C9orf10 (NM_014612.2,2978-2996).
ccaagaggagttatttcca

SEQ ID NO: 341127 - DNA, 19 bp, Homo sapiens
  siRNA target sequence for C9orf10 (NM_014612.2,3039-3057).
gcagaggttacaaaaacca

SEQ ID NO: 341128 - DNA, 19 bp, Homo sapiens
  siRNA target sequence for C9orf10 (NM_014612.2,3049-3067).
caaaaaccaggcagcaatt

SEQ ID NO: 341129 - DNA, 19 bp, Homo sapiens
  siRNA target sequence for C9orf10 (NM_014612.2,3106-3124).
ggccaaagaacttaagtca

SEQ ID NO: 341130 - DNA, 19 bp, Homo sapiens
  siRNA target sequence for C9orf10 (NM_014612.2,3123-3141).
caaaatctggggaatcgaa

SEQ ID NO: 341131 - DNA, 19 bp, Homo sapiens
  siRNA target sequence for C9orf10 (NM_014612.2,3255-3273).
ctgaaagtgccttgaataa

SEQ ID NO: 341132 - DNA, 19 bp, Homo sapiens
  siRNA target sequence for C9orf10 (NM_014612.2,3275-3293).
gactctaaaacgtgcaata

SEQ ID NO: 341133 - DNA, 19 bp, Homo sapiens
  siRNA target sequence for C9orf10 (NM_014612.2,3277-3295).
ctctaaaacgtgcaataca

SEQ ID NO: 341134 - DNA, 19 bp, Homo sapiens
  siRNA target sequence for C9orf10 (NM_014612.2,3279-3297).
ctaaaacgtgcaatacaaa

SEQ ID NO: 341135 - DNA, 19 bp, Homo sapiens
  siRNA target sequence for C9orf10 (NM_014612.2,3355-3373).
ggcagctgtcttaaataaa

SEQ ID NO: 341136 - DNA, 19 bp, Homo sapiens
  siRNA target sequence for ETEA (NM_014613.1,41-59).
cctgaggagcgggatctaa

SEQ ID NO: 341137 - DNA, 19 bp, Homo sapiens
  siRNA target sequence for ETEA (NM_014613.1,95-113).
gatctcactggcatcgaat

SEQ ID NO: 341138 - DNA, 19 bp, Homo sapiens
  siRNA target sequence for ETEA (NM_014613.1,98-116).
ctcactggcatcgaatcta

SEQ ID NO: 341139 - DNA, 19 bp, Homo sapiens
  siRNA target sequence for ETEA (NM_014613.1,167-185).
gctgtacaggacagattga

SEQ ID NO: 341140 - DNA, 19 bp, Homo sapiens
  siRNA target sequence for ETEA (NM_014613.1,168-186).
ctgtacaggacagattgaa

SEQ ID NO: 341141 - DNA, 19 bp, Homo sapiens
  siRNA target sequence for ETEA (NM_014613.1,194-212).
gagggcgtacctagtgttt

SEQ ID NO: 341142 - DNA, 19 bp, Homo sapiens
  siRNA target sequence for ETEA (NM_014613.1,228-246).
cacgacccctgcaggttaa

SEQ ID NO: 341143 - DNA, 19 bp, Homo sapiens
  siRNA target sequence for ETEA (NM_014613.1,251-269).
gctgaccacaggatctaca

SEQ ID NO: 341144 - DNA, 19 bp, Homo sapiens
  siRNA target sequence for ETEA (NM_014613.1,259-277).
caggatctacagctatgtt

SEQ ID NO: 341145 - DNA, 19 bp, Homo sapiens
  siRNA target sequence for ETEA (NM_014613.1,261-279).
ggatctacagctatgttgt

SEQ ID NO: 341146 - DNA, 19 bp, Homo sapiens
  siRNA target sequence for ETEA (NM_014613.1,308-326).
ggatggggttattacttga

SEQ ID NO: 341147 - DNA, 19 bp, Homo sapiens
  siRNA target sequence for ETEA (NM_014613.1,309-327).
gatggggttattacttgat

SEQ ID NO: 341148 - DNA, 19 bp, Homo sapiens
  siRNA target sequence for ETEA (NM_014613.1,332-350).
cttccattccggtttacct

SEQ ID NO: 341149 - DNA, 19 bp, Homo sapiens
  siRNA target sequence for ETEA (NM_014613.1,335-353).
ccattccggtttacctatt

SEQ ID NO: 341150 - DNA, 19 bp, Homo sapiens
  siRNA target sequence for ETEA (NM_014613.1,336-354).
cattccggtttacctatta

SEQ ID NO: 341151 - DNA, 19 bp, Homo sapiens
  siRNA target sequence for ETEA (NM_014613.1,348-366).
cctattacacgatacttga

SEQ ID NO: 341152 - DNA, 19 bp, Homo sapiens
  siRNA target sequence for ETEA (NM_014613.1,349-367).
ctattacacgatacttgat

SEQ ID NO: 341153 - DNA, 19 bp, Homo sapiens
  siRNA target sequence for ETEA (NM_014613.1,355-373).
cacgatacttgatatattt

SEQ ID NO: 341154 - DNA, 19 bp, Homo sapiens
  siRNA target sequence for ETEA (NM_014613.1,427-445).
cgttggggacattgtttca

SEQ ID NO: 341155 - DNA, 19 bp, Homo sapiens
  siRNA target sequence for ETEA (NM_014613.1,451-469).
gcactcttttgaagagaaa

SEQ ID NO: 341156 - DNA, 19 bp, Homo sapiens
  siRNA target sequence for ETEA (NM_014613.1,504-522).
cgtacagccaggcacttaa

SEQ ID NO: 341157 - DNA, 19 bp, Homo sapiens
  siRNA target sequence for ETEA (NM_014613.1,508-526).
cagccaggcacttaacgat

SEQ ID NO: 341158 - DNA, 19 bp, Homo sapiens
  siRNA target sequence for ETEA (NM_014613.1,658-676).
ggcatgctctacaaacaaa

SEQ ID NO: 341159 - DNA, 19 bp, Homo sapiens
  siRNA target sequence for ETEA (NM_014613.1,691-709).
ggtctcacaggctttacga

SEQ ID NO: 341160 - DNA, 19 bp, Homo sapiens
  siRNA target sequence for ETEA (NM_014613.1,707-725).
cgagagaacacctatccat

SEQ ID NO: 341161 - DNA, 19 bp, Homo sapiens
  siRNA target sequence for ETEA (NM_014613.1,775-793).
gctagaaggcctcattcaa

SEQ ID NO: 341162 - DNA, 19 bp, Homo sapiens
  siRNA target sequence for ETEA (NM_014613.1,819-837).
catttatcatggatgctaa

SEQ ID NO: 341163 - DNA, 19 bp, Homo sapiens
  siRNA target sequence for ETEA (NM_014613.1,862-880).
cctagaaagggaagaaaga

SEQ ID NO: 341164 - DNA, 19 bp, Homo sapiens
  siRNA target sequence for ETEA (NM_014613.1,1154-1172).
gagagacgattccactttt

SEQ ID NO: 341165 - DNA, 19 bp, Homo sapiens
  siRNA target sequence for ETEA (NM_014613.1,1173-1191).
cacagtctctaacagtaat

SEQ ID NO: 341166 - DNA, 19 bp, Homo sapiens
  siRNA target sequence for PSME4 (NM_014614.1,290-308).
cgccttttgatcaacttgt

SEQ ID NO: 341167 - DNA, 19 bp, Homo sapiens
  siRNA target sequence for PSME4 (NM_014614.1,291-309).
gccttttgatcaacttgtt

SEQ ID NO: 341168 - DNA, 19 bp, Homo sapiens
  siRNA target sequence for PSME4 (NM_014614.1,404-422).
cacctaggattaaattggt

SEQ ID NO: 341169 - DNA, 19 bp, Homo sapiens
  siRNA target sequence for PSME4 (NM_014614.1,410-428).
ggattaaattggtttccta

SEQ ID NO: 341170 - DNA, 19 bp, Homo sapiens
  siRNA target sequence for PSME4 (NM_014614.1,411-429).
gattaaattggtttcctaa

SEQ ID NO: 341171 - DNA, 19 bp, Homo sapiens
  siRNA target sequence for PSME4 (NM_014614.1,460-478).
gaaaagctgccgaccatat

SEQ ID NO: 341172 - DNA, 19 bp, Homo sapiens
  siRNA target sequence for PSME4 (NM_014614.1,495-513).
ccgctgagatgctagaaga

SEQ ID NO: 341173 - DNA, 19 bp, Homo sapiens
  siRNA target sequence for PSME4 (NM_014614.1,496-514).
cgctgagatgctagaagaa

SEQ ID NO: 341174 - DNA, 19 bp, Homo sapiens
  siRNA target sequence for PSME4 (NM_014614.1,558-576).
ccatcacttattttgaaat

SEQ ID NO: 341175 - DNA, 19 bp, Homo sapiens
  siRNA target sequence for PSME4 (NM_014614.1,654-672).
gggtttcagtgcaaaatct

SEQ ID NO: 341176 - DNA, 19 bp, Homo sapiens
  siRNA target sequence for PSME4 (NM_014614.1,708-726).
ctcgattggctacagataa

SEQ ID NO: 341177 - DNA, 19 bp, Homo sapiens
  siRNA target sequence for PSME4 (NM_014614.1,710-728).
cgattggctacagataata

SEQ ID NO: 341178 - DNA, 19 bp, Homo sapiens
  siRNA target sequence for PSME4 (NM_014614.1,711-729).
gattggctacagataatat

SEQ ID NO: 341179 - DNA, 19 bp, Homo sapiens
  siRNA target sequence for PSME4 (NM_014614.1,736-754).
catagattgggatccatat

SEQ ID NO: 341180 - DNA, 19 bp, Homo sapiens
  siRNA target sequence for PSME4 (NM_014614.1,744-762).
gggatccatatgtaccaaa

SEQ ID NO: 341181 - DNA, 19 bp, Homo sapiens
  siRNA target sequence for PSME4 (NM_014614.1,815-833).
gtgttagtcccaagatttt

SEQ ID NO: 341182 - DNA, 19 bp, Homo sapiens
  siRNA target sequence for PSME4 (NM_014614.1,886-904).
gggtggaccaagtaagcta

SEQ ID NO: 341183 - DNA, 19 bp, Homo sapiens
  siRNA target sequence for PSME4 (NM_014614.1,901-919).
gctagtgcaaaaacactta

SEQ ID NO: 341184 - DNA, 19 bp, Homo sapiens
  siRNA target sequence for PSME4 (NM_014614.1,914-932).
cacttagctggtttgttta

SEQ ID NO: 341185 - DNA, 19 bp, Homo sapiens
  siRNA target sequence for PSME4 (NM_014614.1,936-954).
gcatcacatctttttacca

SEQ ID NO: 341186 - DNA, 19 bp, Homo sapiens
  siRNA target sequence for PSME4 (NM_014614.1,970-988).
gcgctggctgaacaagtta

SEQ ID NO: 341187 - DNA, 19 bp, Homo sapiens
  siRNA target sequence for PSME4 (NM_014614.1,971-989).
cgctggctgaacaagttaa

SEQ ID NO: 341188 - DNA, 19 bp, Homo sapiens
  siRNA target sequence for PSME4 (NM_014614.1,982-1000).
caagttaatgaaactactt

SEQ ID NO: 341189 - DNA, 19 bp, Homo sapiens
  siRNA target sequence for PSME4 (NM_014614.1,1009-1027).
gccaaacagtgttgttaga

SEQ ID NO: 341190 - DNA, 19 bp, Homo sapiens
  siRNA target sequence for PSME4 (NM_014614.1,1029-1047).
gattgcatcgtgaaagata

SEQ ID NO: 341191 - DNA, 19 bp, Homo sapiens
  siRNA target sequence for PSME4 (NM_014614.1,1034-1052).
catcgtgaaagatacaaga

SEQ ID NO: 341192 - DNA, 19 bp, Homo sapiens
  siRNA target sequence for PSME4 (NM_014614.1,1048-1066).
caagaagccctcttggtta

SEQ ID NO: 341193 - DNA, 19 bp, Homo sapiens
  siRNA target sequence for PSME4 (NM_014614.1,1076-1094).
cctgatagccacaagctta

SEQ ID NO: 341194 - DNA, 19 bp, Homo sapiens
  siRNA target sequence for PSME4 (NM_014614.1,1091-1109).
cttactgatcaagatgtta

SEQ ID NO: 341195 - DNA, 19 bp, Homo sapiens
  siRNA target sequence for PSME4 (NM_014614.1,1112-1130).
gactttgtacaatgcatta

SEQ ID NO: 341196 - DNA, 19 bp, Homo sapiens
  siRNA target sequence for PSME4 (NM_014614.1,1207-1225).
catgagacctgaattggta

SEQ ID NO: 341197 - DNA, 19 bp, Homo sapiens
  siRNA target sequence for PSME4 (NM_014614.1,1210-1228).
gagacctgaattggtaata

SEQ ID NO: 341198 - DNA, 19 bp, Homo sapiens
  siRNA target sequence for PSME4 (NM_014614.1,1232-1250).
cctgtacttgaaagaacat

SEQ ID NO: 341199 - DNA, 19 bp, Homo sapiens
  siRNA target sequence for PSME4 (NM_014614.1,1245-1263).
gaacatatcctgcattaga

SEQ ID NO: 341200 - DNA, 19 bp, Homo sapiens
  siRNA target sequence for PSME4 (NM_014614.1,1257-1275).
cattagagacattaacaga

SEQ ID NO: 341201 - DNA, 19 bp, Homo sapiens
  siRNA target sequence for PSME4 (NM_014614.1,1283-1301).
cagctcacagctactttaa

SEQ ID NO: 341202 - DNA, 19 bp, Homo sapiens
  siRNA target sequence for PSME4 (NM_014614.1,1285-1303).
gctcacagctactttaagt

SEQ ID NO: 341203 - DNA, 19 bp, Homo sapiens
  siRNA target sequence for PSME4 (NM_014614.1,1288-1306).
cacagctactttaagttgt

SEQ ID NO: 341204 - DNA, 19 bp, Homo sapiens
  siRNA target sequence for PSME4 (NM_014614.1,1316-1334).
gtagcccgcagtttggtat

SEQ ID NO: 341205 - DNA, 19 bp, Homo sapiens
  siRNA target sequence for PSME4 (NM_014614.1,1353-1371).
ctgaaggtcctacacatat

SEQ ID NO: 341206 - DNA, 19 bp, Homo sapiens
  siRNA target sequence for PSME4 (NM_014614.1,1396-1414).
gcctggggtggatccaaat

SEQ ID NO: 341207 - DNA, 19 bp, Homo sapiens
  siRNA target sequence for PSME4 (NM_014614.1,1405-1423).
ggatccaaatgactttagt

SEQ ID NO: 341208 - DNA, 19 bp, Homo sapiens
  siRNA target sequence for PSME4 (NM_014614.1,1406-1424).
gatccaaatgactttagta

SEQ ID NO: 341209 - DNA, 19 bp, Homo sapiens
  siRNA target sequence for PSME4 (NM_014614.1,1464-1482).
ctctggtgcctttagtaga

SEQ ID NO: 341210 - DNA, 19 bp, Homo sapiens
  siRNA target sequence for PSME4 (NM_014614.1,1466-1484).
ctggtgcctttagtagatt

SEQ ID NO: 341211 - DNA, 19 bp, Homo sapiens
  siRNA target sequence for PSME4 (NM_014614.1,1468-1486).
ggtgcctttagtagattgt

SEQ ID NO: 341212 - DNA, 19 bp, Homo sapiens
  siRNA target sequence for PSME4 (NM_014614.1,1469-1487).
gtgcctttagtagattgtt

SEQ ID NO: 341213 - DNA, 19 bp, Homo sapiens
  siRNA target sequence for PSME4 (NM_014614.1,1472-1490).
cctttagtagattgttcat

SEQ ID NO: 341214 - DNA, 19 bp, Homo sapiens
  siRNA target sequence for PSME4 (NM_014614.1,1485-1503).
gttcatctgtactacaaga

SEQ ID NO: 341215 - DNA, 19 bp, Homo sapiens
  siRNA target sequence for PSME4 (NM_014614.1,1559-1577).
gaggatttcgtcttacagt

SEQ ID NO: 341216 - DNA, 19 bp, Homo sapiens
  siRNA target sequence for PSME4 (NM_014614.1,1585-1603).
cagatgttttggacttata

SEQ ID NO: 341217 - DNA, 19 bp, Homo sapiens
  siRNA target sequence for PSME4 (NM_014614.1,1587-1605).
gatgttttggacttataga

SEQ ID NO: 341218 - DNA, 19 bp, Homo sapiens
  siRNA target sequence for PSME4 (NM_014614.1,1612-1630).
cacattggagcaaacaaga

SEQ ID NO: 341219 - DNA, 19 bp, Homo sapiens
  siRNA target sequence for PSME4 (NM_014614.1,1663-1681).
ggagagtttggtcgaatta

SEQ ID NO: 341220 - DNA, 19 bp, Homo sapiens
  siRNA target sequence for PSME4 (NM_014614.1,1682-1700).
ggtctgtcttctacgttta

SEQ ID NO: 341221 - DNA, 19 bp, Homo sapiens
  siRNA target sequence for PSME4 (NM_014614.1,1685-1703).
ctgtcttctacgtttagta

SEQ ID NO: 341222 - DNA, 19 bp, Homo sapiens
  siRNA target sequence for PSME4 (NM_014614.1,1687-1705).
gtcttctacgtttagtaca

SEQ ID NO: 341223 - DNA, 19 bp, Homo sapiens
  siRNA target sequence for PSME4 (NM_014614.1,1689-1707).
cttctacgtttagtacaat

SEQ ID NO: 341224 - DNA, 19 bp, Homo sapiens
  siRNA target sequence for PSME4 (NM_014614.1,1708-1726).
cctcacccaatgttccaaa

SEQ ID NO: 341225 - DNA, 19 bp, Homo sapiens
  siRNA target sequence for PSME4 (NM_014614.1,1873-1891).
ccactgctgcagtgttata

SEQ ID NO: 341226 - DNA, 19 bp, Homo sapiens
  siRNA target sequence for PSME4 (NM_014614.1,1874-1892).
cactgctgcagtgttataa

SEQ ID NO: 341227 - DNA, 19 bp, Homo sapiens
  siRNA target sequence for PSME4 (NM_014614.1,1878-1896).
gctgcagtgttataactca

SEQ ID NO: 341228 - DNA, 19 bp, Homo sapiens
  siRNA target sequence for PSME4 (NM_014614.1,1893-1911).
ctcagcttacaatgaatga

SEQ ID NO: 341229 - DNA, 19 bp, Homo sapiens
  siRNA target sequence for PSME4 (NM_014614.1,1897-1915).
gcttacaatgaatgatgat

SEQ ID NO: 341230 - DNA, 19 bp, Homo sapiens
  siRNA target sequence for PSME4 (NM_014614.1,1933-1951).
gctagacaaggaattacta

SEQ ID NO: 341231 - DNA, 19 bp, Homo sapiens
  siRNA target sequence for PSME4 (NM_014614.1,1934-1952).
ctagacaaggaattactat

SEQ ID NO: 341232 - DNA, 19 bp, Homo sapiens
  siRNA target sequence for PSME4 (NM_014614.1,1949-1967).
ctatggaatcttcaacttt

SEQ ID NO: 341233 - DNA, 19 bp, Homo sapiens
  siRNA target sequence for PSME4 (NM_014614.1,1961-1979).
caacttttgtctgagatta

SEQ ID NO: 341234 - DNA, 19 bp, Homo sapiens
  siRNA target sequence for PSME4 (NM_014614.1,2033-2051).
ctccaaagaaccctacatt

SEQ ID NO: 341235 - DNA, 19 bp, Homo sapiens
  siRNA target sequence for PSME4 (NM_014614.1,2066-2084).
ggttacactctgtcttgta

SEQ ID NO: 341236 - DNA, 19 bp, Homo sapiens
  siRNA target sequence for PSME4 (NM_014614.1,2077-2095).
gtcttgtaaccttttgcat

SEQ ID NO: 341237 - DNA, 19 bp, Homo sapiens
  siRNA target sequence for PSME4 (NM_014614.1,2082-2100).
gtaaccttttgcatcatct

SEQ ID NO: 341238 - DNA, 19 bp, Homo sapiens
  siRNA target sequence for PSME4 (NM_014614.1,2102-2120).
ctccgttctaccacactta

SEQ ID NO: 341239 - DNA, 19 bp, Homo sapiens
  siRNA target sequence for PSME4 (NM_014614.1,2105-2123).
cgttctaccacacttatct

SEQ ID NO: 341240 - DNA, 19 bp, Homo sapiens
  siRNA target sequence for PSME4 (NM_014614.1,2106-2124).
gttctaccacacttatcta

SEQ ID NO: 341241 - DNA, 19 bp, Homo sapiens
  siRNA target sequence for PSME4 (NM_014614.1,2144-2162).
gtgccaggtggctttgaca

SEQ ID NO: 341242 - DNA, 19 bp, Homo sapiens
  siRNA target sequence for PSME4 (NM_014614.1,2172-2190).
ctgaatactttcctatcaa

SEQ ID NO: 341243 - DNA, 19 bp, Homo sapiens
  siRNA target sequence for PSME4 (NM_014614.1,2431-2449).
gccagttactaacttagta

SEQ ID NO: 341244 - DNA, 19 bp, Homo sapiens
  siRNA target sequence for PSME4 (NM_014614.1,2439-2457).
ctaacttagtaccaagtat

SEQ ID NO: 341245 - DNA, 19 bp, Homo sapiens
  siRNA target sequence for PSME4 (NM_014614.1,2487-2505).
ctggacttgaatatgatct

SEQ ID NO: 341246 - DNA, 19 bp, Homo sapiens
  siRNA target sequence for PSME4 (NM_014614.1,2555-2573).
cttaaccacatacttgata

SEQ ID NO: 341247 - DNA, 19 bp, Homo sapiens
  siRNA target sequence for PSME4 (NM_014614.1,2560-2578).
ccacatacttgataattca

SEQ ID NO: 341248 - DNA, 19 bp, Homo sapiens
  siRNA target sequence for PSME4 (NM_014614.1,2582-2600).
gatgatactaagtcattgt

SEQ ID NO: 341249 - DNA, 19 bp, Homo sapiens
  siRNA target sequence for PSME4 (NM_014614.1,2614-2632).
gattattggagacctttta

SEQ ID NO: 341250 - DNA, 19 bp, Homo sapiens
  siRNA target sequence for PSME4 (NM_014614.1,2642-2660).
ggatctcacaagcatgaat

SEQ ID NO: 341251 - DNA, 19 bp, Homo sapiens
  siRNA target sequence for PSME4 (NM_014614.1,2646-2664).
ctcacaagcatgaatttga

SEQ ID NO: 341252 - DNA, 19 bp, Homo sapiens
  siRNA target sequence for PSME4 (NM_014614.1,2673-2691).
ggaaaagcttcaacttagt

SEQ ID NO: 341253 - DNA, 19 bp, Homo sapiens
  siRNA target sequence for PSME4 (NM_014614.1,2742-2760).
cactgttgattgatagagt

SEQ ID NO: 341254 - DNA, 19 bp, Homo sapiens
  siRNA target sequence for PSME4 (NM_014614.1,2744-2762).
ctgttgattgatagagtaa

SEQ ID NO: 341255 - DNA, 19 bp, Homo sapiens
  siRNA target sequence for PSME4 (NM_014614.1,2771-2789).
catgagctacggacactaa

SEQ ID NO: 341256 - DNA, 19 bp, Homo sapiens
  siRNA target sequence for PSME4 (NM_014614.1,2776-2794).
gctacggacactaactgtt

SEQ ID NO: 341257 - DNA, 19 bp, Homo sapiens
  siRNA target sequence for PSME4 (NM_014614.1,2790-2808).
ctgttgagggttgtgaata

SEQ ID NO: 341258 - DNA, 19 bp, Homo sapiens
  siRNA target sequence for PSME4 (NM_014614.1,2792-2810).
gttgagggttgtgaataca

SEQ ID NO: 341259 - DNA, 19 bp, Homo sapiens
  siRNA target sequence for PSME4 (NM_014614.1,2833-2851).
cagagatcttcttcgttta

SEQ ID NO: 341260 - DNA, 19 bp, Homo sapiens
  siRNA target sequence for PSME4 (NM_014614.1,2843-2861).
cttcgtttatctacaagtt

SEQ ID NO: 341261 - DNA, 19 bp, Homo sapiens
  siRNA target sequence for PSME4 (NM_014614.1,2846-2864).
cgtttatctacaagttcat

SEQ ID NO: 341262 - DNA, 19 bp, Homo sapiens
  siRNA target sequence for PSME4 (NM_014614.1,2903-2921).
gctgccttgggagcatata

SEQ ID NO: 341263 - DNA, 19 bp, Homo sapiens
  siRNA target sequence for PSME4 (NM_014614.1,2907-2925).
ccttgggagcatataactt

SEQ ID NO: 341264 - DNA, 19 bp, Homo sapiens
  siRNA target sequence for PSME4 (NM_014614.1,2936-2954).
gatatcattcccttggttt

SEQ ID NO: 341265 - DNA, 19 bp, Homo sapiens
  siRNA target sequence for PSME4 (NM_014614.1,2962-2980).
cttaaggcctgatagacaa

SEQ ID NO: 341266 - DNA, 19 bp, Homo sapiens
  siRNA target sequence for PSME4 (NM_014614.1,3045-3063).
gcttggcaaaccttcatga

SEQ ID NO: 341267 - DNA, 19 bp, Homo sapiens
  siRNA target sequence for PSME4 (NM_014614.1,3082-3100).
gacgtggccagcgattgtt

SEQ ID NO: 341268 - DNA, 19 bp, Homo sapiens
  siRNA target sequence for PSME4 (NM_014614.1,3105-3123).
cagggcttagccaagcaat

SEQ ID NO: 341269 - DNA, 19 bp, Homo sapiens
  siRNA target sequence for PSME4 (NM_014614.1,3131-3149).
gaaaagccatcaatagtga

SEQ ID NO: 341270 - DNA, 19 bp, Homo sapiens
  siRNA target sequence for PSME4 (NM_014614.1,3137-3155).
ccatcaatagtgagattgt

SEQ ID NO: 341271 - DNA, 19 bp, Homo sapiens
  siRNA target sequence for PSME4 (NM_014614.1,3141-3159).
caatagtgagattgtttga

SEQ ID NO: 341272 - DNA, 19 bp, Homo sapiens
  siRNA target sequence for PSME4 (NM_014614.1,3148-3166).
gagattgtttgatgatctt

SEQ ID NO: 341273 - DNA, 19 bp, Homo sapiens
  siRNA target sequence for PSME4 (NM_014614.1,3266-3284).
ccctctatcaaccagatat

SEQ ID NO: 341274 - DNA, 19 bp, Homo sapiens
  siRNA target sequence for PSME4 (NM_014614.1,3267-3285).
cctctatcaaccagatatt

SEQ ID NO: 341275 - DNA, 19 bp, Homo sapiens
  siRNA target sequence for PSME4 (NM_014614.1,3270-3288).
ctatcaaccagatattgct

SEQ ID NO: 341276 - DNA, 19 bp, Homo sapiens
  siRNA target sequence for PSME4 (NM_014614.1,3291-3309).
gcccagaaaaaattaagga

SEQ ID NO: 341277 - DNA, 19 bp, Homo sapiens
  siRNA target sequence for PSME4 (NM_014614.1,3340-3358).
cgatgccctaaggaactat

SEQ ID NO: 341278 - DNA, 19 bp, Homo sapiens
  siRNA target sequence for PSME4 (NM_014614.1,3346-3364).
cctaaggaactatgaaaat

SEQ ID NO: 341279 - DNA, 19 bp, Homo sapiens
  siRNA target sequence for PSME4 (NM_014614.1,3508-3526).
caaccatgatgcaattgta

SEQ ID NO: 341280 - DNA, 19 bp, Homo sapiens
  siRNA target sequence for PSME4 (NM_014614.1,3519-3537).
caattgtagttcgaaagat

SEQ ID NO: 341281 - DNA, 19 bp, Homo sapiens
  siRNA target sequence for PSME4 (NM_014614.1,3597-3615).
ccattaacccctgtgaaat

SEQ ID NO: 341282 - DNA, 19 bp, Homo sapiens
  siRNA target sequence for PSME4 (NM_014614.1,3626-3644).
cctaaacccacccaaatta

SEQ ID NO: 341283 - DNA, 19 bp, Homo sapiens
  siRNA target sequence for PSME4 (NM_014614.1,3627-3645).
ctaaacccacccaaattat

SEQ ID NO: 341284 - DNA, 19 bp, Homo sapiens
  siRNA target sequence for PSME4 (NM_014614.1,3651-3669).
gtgataggcctgataatca

SEQ ID NO: 341285 - DNA, 19 bp, Homo sapiens
  siRNA target sequence for PSME4 (NM_014614.1,3653-3671).
gataggcctgataatcatt

SEQ ID NO: 341286 - DNA, 19 bp, Homo sapiens
  siRNA target sequence for PSME4 (NM_014614.1,3657-3675).
ggcctgataatcattggtt

SEQ ID NO: 341287 - DNA, 19 bp, Homo sapiens
  siRNA target sequence for PSME4 (NM_014614.1,3668-3686).
cattggttgcattatgaca

SEQ ID NO: 341288 - DNA, 19 bp, Homo sapiens
  siRNA target sequence for PSME4 (NM_014614.1,3676-3694).
gcattatgacagcaaaact

SEQ ID NO: 341289 - DNA, 19 bp, Homo sapiens
  siRNA target sequence for PSME4 (NM_014614.1,3683-3701).
gacagcaaaactataccaa

SEQ ID NO: 341290 - DNA, 19 bp, Homo sapiens
  siRNA target sequence for PSME4 (NM_014614.1,3723-3741).
caagttgctttgtggaaaa

SEQ ID NO: 341291 - DNA, 19 bp, Homo sapiens
  siRNA target sequence for PSME4 (NM_014614.1,3763-3781).
ctggccaaagaatatggtt

SEQ ID NO: 341292 - DNA, 19 bp, Homo sapiens
  siRNA target sequence for PSME4 (NM_014614.1,3772-3790).
gaatatggttgtttatgct

SEQ ID NO: 341293 - DNA, 19 bp, Homo sapiens
  siRNA target sequence for PSME4 (NM_014614.1,3870-3888).
ctgatcctaaatttgttga

SEQ ID NO: 341294 - DNA, 19 bp, Homo sapiens
  siRNA target sequence for PSME4 (NM_014614.1,3884-3902).
gttgagcagttaattactt

SEQ ID NO: 341295 - DNA, 19 bp, Homo sapiens
  siRNA target sequence for PSME4 (NM_014614.1,3937-3955).
gtttaatccacgacgtttt

SEQ ID NO: 341296 - DNA, 19 bp, Homo sapiens
  siRNA target sequence for PSME4 (NM_014614.1,3947-3965).
cgacgtttttgcctcttta

SEQ ID NO: 341297 - DNA, 19 bp, Homo sapiens
  siRNA target sequence for PSME4 (NM_014614.1,3948-3966).
gacgtttttgcctctttaa

SEQ ID NO: 341298 - DNA, 19 bp, Homo sapiens
  siRNA target sequence for PSME4 (NM_014614.1,3967-3985).
gggtatattcaggaatttt

SEQ ID NO: 341299 - DNA, 19 bp, Homo sapiens
  siRNA target sequence for PSME4 (NM_014614.1,4009-4027).
gaagccccatttagaacat

SEQ ID NO: 341300 - DNA, 19 bp, Homo sapiens
  siRNA target sequence for PSME4 (NM_014614.1,4014-4032).
cccatttagaacatttggt

SEQ ID NO: 341301 - DNA, 19 bp, Homo sapiens
  siRNA target sequence for PSME4 (NM_014614.1,4015-4033).
ccatttagaacatttggtt

SEQ ID NO: 341302 - DNA, 19 bp, Homo sapiens
  siRNA target sequence for PSME4 (NM_014614.1,4058-4076).
cgatgtgttgcagaaatta

SEQ ID NO: 341303 - DNA, 19 bp, Homo sapiens
  siRNA target sequence for PSME4 (NM_014614.1,4059-4077).
gatgtgttgcagaaattat

SEQ ID NO: 341304 - DNA, 19 bp, Homo sapiens
  siRNA target sequence for PSME4 (NM_014614.1,4098-4116).
ctaagcactggacatttga

SEQ ID NO: 341305 - DNA, 19 bp, Homo sapiens
  siRNA target sequence for PSME4 (NM_014614.1,4179-4197).
ccgtagaaacttataatga

SEQ ID NO: 341306 - DNA, 19 bp, Homo sapiens
  siRNA target sequence for PSME4 (NM_014614.1,4181-4199).
gtagaaacttataatgact

SEQ ID NO: 341307 - DNA, 19 bp, Homo sapiens
  siRNA target sequence for PSME4 (NM_014614.1,4231-4249).
cagagatccccggaaactt

SEQ ID NO: 341308 - DNA, 19 bp, Homo sapiens
  siRNA target sequence for PSME4 (NM_014614.1,4243-4261).
gaaacttcactggcttttt

SEQ ID NO: 341309 - DNA, 19 bp, Homo sapiens
  siRNA target sequence for PSME4 (NM_014614.1,4314-4332).
catgtcgactttatgtact

SEQ ID NO: 341310 - DNA, 19 bp, Homo sapiens
  siRNA target sequence for PSME4 (NM_014614.1,4317-4335).
gtcgactttatgtactaca

SEQ ID NO: 341311 - DNA, 19 bp, Homo sapiens
  siRNA target sequence for PSME4 (NM_014614.1,4362-4380).
gagtgcctgaactattgca

SEQ ID NO: 341312 - DNA, 19 bp, Homo sapiens
  siRNA target sequence for PSME4 (NM_014614.1,4404-4422).
ccaaactcacccaggttta

SEQ ID NO: 341313 - DNA, 19 bp, Homo sapiens
  siRNA target sequence for PSME4 (NM_014614.1,4449-4467).
gtgtgctgacctacatatt

SEQ ID NO: 341314 - DNA, 19 bp, Homo sapiens
  siRNA target sequence for PSME4 (NM_014614.1,4451-4469).
gtgctgacctacatattca

SEQ ID NO: 341315 - DNA, 19 bp, Homo sapiens
  siRNA target sequence for PSME4 (NM_014614.1,4456-4474).
gacctacatattcatgata

SEQ ID NO: 341316 - DNA, 19 bp, Homo sapiens
  siRNA target sequence for PSME4 (NM_014614.1,4510-4528).
gcctcatgtccctgagttt

SEQ ID NO: 341317 - DNA, 19 bp, Homo sapiens
  siRNA target sequence for PSME4 (NM_014614.1,4511-4529).
cctcatgtccctgagttta

SEQ ID NO: 341318 - DNA, 19 bp, Homo sapiens
  siRNA target sequence for PSME4 (NM_014614.1,4532-4550).
gctcgaattctggagaaat

SEQ ID NO: 341319 - DNA, 19 bp, Homo sapiens
  siRNA target sequence for PSME4 (NM_014614.1,4533-4551).
ctcgaattctggagaaatt

SEQ ID NO: 341320 - DNA, 19 bp, Homo sapiens
  siRNA target sequence for PSME4 (NM_014614.1,4627-4645).
gcgaactcagggcattaaa

SEQ ID NO: 341321 - DNA, 19 bp, Homo sapiens
  siRNA target sequence for PSME4 (NM_014614.1,4629-4647).
gaactcagggcattaaact

SEQ ID NO: 341322 - DNA, 19 bp, Homo sapiens
  siRNA target sequence for PSME4 (NM_014614.1,4774-4792).
cgatgaactgaaaagagat

SEQ ID NO: 341323 - DNA, 19 bp, Homo sapiens
  siRNA target sequence for PSME4 (NM_014614.1,4852-4870).
ggtacttcaggtgctaaaa

SEQ ID NO: 341324 - DNA, 19 bp, Homo sapiens
  siRNA target sequence for PSME4 (NM_014614.1,5065-5083).
gctacagtgtaactttctt

SEQ ID NO: 341325 - DNA, 19 bp, Homo sapiens
  siRNA target sequence for PSME4 (NM_014614.1,5066-5084).
ctacagtgtaactttctta

SEQ ID NO: 341326 - DNA, 19 bp, Homo sapiens
  siRNA target sequence for PSME4 (NM_014614.1,5163-5181).
gttctgtaggagataccat

SEQ ID NO: 341327 - DNA, 19 bp, Homo sapiens
  siRNA target sequence for PSME4 (NM_014614.1,5168-5186).
gtaggagataccattcctt

SEQ ID NO: 341328 - DNA, 19 bp, Homo sapiens
  siRNA target sequence for PSME4 (NM_014614.1,5225-5243).
cttggtgcatgtgttcttt

SEQ ID NO: 341329 - DNA, 19 bp, Homo sapiens
  siRNA target sequence for PSME4 (NM_014614.1,5276-5294).
cagctcctcatgaatctca

SEQ ID NO: 341330 - DNA, 19 bp, Homo sapiens
  siRNA target sequence for PSME4 (NM_014614.1,5287-5305).
gaatctcagtgcacatcta

SEQ ID NO: 341331 - DNA, 19 bp, Homo sapiens
  siRNA target sequence for PSME4 (NM_014614.1,5293-5311).
cagtgcacatctaaatgat

SEQ ID NO: 341332 - DNA, 19 bp, Homo sapiens
  siRNA target sequence for PSME4 (NM_014614.1,5309-5327).
gatcctcagcctattgaga

SEQ ID NO: 341333 - DNA, 19 bp, Homo sapiens
  siRNA target sequence for PSME4 (NM_014614.1,5372-5390).
gacaactggcaggaacata

SEQ ID NO: 341334 - DNA, 19 bp, Homo sapiens
  siRNA target sequence for PSME4 (NM_014614.1,5374-5392).
caactggcaggaacataaa

SEQ ID NO: 341335 - DNA, 19 bp, Homo sapiens
  siRNA target sequence for PSME4 (NM_014614.1,5435-5453).
cttgtgtcaccatgctatt

SEQ ID NO: 341336 - DNA, 19 bp, Homo sapiens
  siRNA target sequence for DBC1 (NM_014618.1,518-536).
gtctccaaggaatttgatt

SEQ ID NO: 341337 - DNA, 19 bp, Homo sapiens
  siRNA target sequence for DBC1 (NM_014618.1,566-584).
cactccaggagctacctat

SEQ ID NO: 341338 - DNA, 19 bp, Homo sapiens
  siRNA target sequence for DBC1 (NM_014618.1,599-617).
caccgtcaaggatttacaa

SEQ ID NO: 341339 - DNA, 19 bp, Homo sapiens
  siRNA target sequence for DBC1 (NM_014618.1,608-626).
ggatttacaaccagatata

SEQ ID NO: 341340 - DNA, 19 bp, Homo sapiens
  siRNA target sequence for DBC1 (NM_014618.1,609-627).
gatttacaaccagatataa

SEQ ID NO: 341341 - DNA, 19 bp, Homo sapiens
  siRNA target sequence for DBC1 (NM_014618.1,705-723).
ccctcatgccggagtttca

SEQ ID NO: 341342 - DNA, 19 bp, Homo sapiens
  siRNA target sequence for DBC1 (NM_014618.1,706-724).
cctcatgccggagtttcaa

SEQ ID NO: 341343 - DNA, 19 bp, Homo sapiens
  siRNA target sequence for DBC1 (NM_014618.1,707-725).
ctcatgccggagtttcaaa

SEQ ID NO: 341344 - DNA, 19 bp, Homo sapiens
  siRNA target sequence for DBC1 (NM_014618.1,832-850).
ggaggctttgaccatgtat

SEQ ID NO: 341345 - DNA, 19 bp, Homo sapiens
  siRNA target sequence for DBC1 (NM_014618.1,833-851).
gaggctttgaccatgtata

SEQ ID NO: 341346 - DNA, 19 bp, Homo sapiens
  siRNA target sequence for DBC1 (NM_014618.1,837-855).
ctttgaccatgtatatgga

SEQ ID NO: 341347 - DNA, 19 bp, Homo sapiens
  siRNA target sequence for DBC1 (NM_014618.1,883-901).
gaatgccactcaaagtgtt

SEQ ID NO: 341348 - DNA, 19 bp, Homo sapiens
  siRNA target sequence for DBC1 (NM_014618.1,919-937).
cgcatcatcctactttgtt

SEQ ID NO: 341349 - DNA, 19 bp, Homo sapiens
  siRNA target sequence for DBC1 (NM_014618.1,951-969).
ccatgaggaggcttcatga

SEQ ID NO: 341350 - DNA, 19 bp, Homo sapiens
  siRNA target sequence for DBC1 (NM_014618.1,1148-1166).
cagtcggccttgagctata

SEQ ID NO: 341351 - DNA, 19 bp, Homo sapiens
  siRNA target sequence for DBC1 (NM_014618.1,1152-1170).
cggccttgagctatatcat

SEQ ID NO: 341352 - DNA, 19 bp, Homo sapiens
  siRNA target sequence for DBC1 (NM_014618.1,1154-1172).
gccttgagctatatcatgt

SEQ ID NO: 341353 - DNA, 19 bp, Homo sapiens
  siRNA target sequence for DBC1 (NM_014618.1,1303-1321).
gtcttgggccgaagcttat

SEQ ID NO: 341354 - DNA, 19 bp, Homo sapiens
  siRNA target sequence for DBC1 (NM_014618.1,1308-1326).
gggccgaagcttataagga

SEQ ID NO: 341355 - DNA, 19 bp, Homo sapiens
  siRNA target sequence for DBC1 (NM_014618.1,1594-1612).
gtcactcctctactgtaat

SEQ ID NO: 341356 - DNA, 19 bp, Homo sapiens
  siRNA target sequence for DBC1 (NM_014618.1,1703-1721).
gtgataggcgggaacaaca

SEQ ID NO: 341357 - DNA, 19 bp, Homo sapiens
  siRNA target sequence for DBC1 (NM_014618.1,1826-1844).
cggagcgagcagttcatca

SEQ ID NO: 341358 - DNA, 19 bp, Homo sapiens
  siRNA target sequence for DBC1 (NM_014618.1,1950-1968).
gcctcgacaccttctttga

SEQ ID NO: 341359 - DNA, 19 bp, Homo sapiens
  siRNA target sequence for DBC1 (NM_014618.1,2146-2164).
catgcccttcggggaattt

SEQ ID NO: 341360 - DNA, 19 bp, Homo sapiens
  siRNA target sequence for DBC1 (NM_014618.1,2295-2313).
ctaccctactgcgaaatga

SEQ ID NO: 341361 - DNA, 19 bp, Homo sapiens
  siRNA target sequence for DBC1 (NM_014618.1,2349-2367).
ccaagaggcagttctacat

SEQ ID NO: 341362 - DNA, 19 bp, Homo sapiens
  siRNA target sequence for DBC1 (NM_014618.1,2355-2373).
ggcagttctacatcaagat

SEQ ID NO: 341363 - DNA, 19 bp, Homo sapiens
  siRNA target sequence for DBC1 (NM_014618.1,2510-2528).
gatattcgggaccgaatta

SEQ ID NO: 341364 - DNA, 19 bp, Homo sapiens
  siRNA target sequence for HOXC4 (NM_014620.2,663-681).
cgtatttgatggactctaa

SEQ ID NO: 341365 - DNA, 19 bp, Homo sapiens
  siRNA target sequence for HOXC4 (NM_014620.2,682-700).
ctacatcgatccgaaattt

SEQ ID NO: 341366 - DNA, 19 bp, Homo sapiens
  siRNA target sequence for HOXC4 (NM_014620.2,685-703).
catcgatccgaaatttcct

SEQ ID NO: 341367 - DNA, 19 bp, Homo sapiens
  siRNA target sequence for HOXC4 (NM_014620.2,709-727).
cgaagaatattcgcaaaat

SEQ ID NO: 341368 - DNA, 19 bp, Homo sapiens
  siRNA target sequence for HOXC4 (NM_014620.2,713-731).
gaatattcgcaaaatagct

SEQ ID NO: 341369 - DNA, 19 bp, Homo sapiens
  siRNA target sequence for HOXC4 (NM_014620.2,740-758).
gaacacagtccggaatatt

SEQ ID NO: 341370 - DNA, 19 bp, Homo sapiens
  siRNA target sequence for HOXC4 (NM_014620.2,913-931).
ccaccaccccgagaaatca

SEQ ID NO: 341371 - DNA, 19 bp, Homo sapiens
  siRNA target sequence for HOXC4 (NM_014620.2,1038-1056).
gcaagcaacccatagtcta

SEQ ID NO: 341372 - DNA, 19 bp, Homo sapiens
  siRNA target sequence for HOXC4 (NM_014620.2,1054-1072).
ctacccatggatgaaaaaa

SEQ ID NO: 341373 - DNA, 19 bp, Homo sapiens
  siRNA target sequence for HOXC4 (NM_014620.2,1415-1433).
caacgggcagaggacatta

SEQ ID NO: 341374 - DNA, 19 bp, Homo sapiens
  siRNA target sequence for HOXC4 (NM_014620.2,1424-1442).
gaggacattaccaggttat

SEQ ID NO: 341375 - DNA, 19 bp, Homo sapiens
  siRNA target sequence for LOH11CR2A (NM_014622.3,111-129).
ccagtgccgctgaagagta

SEQ ID NO: 341376 - DNA, 19 bp, Homo sapiens
  siRNA target sequence for LOH11CR2A (NM_014622.3,112-130).
cagtgccgctgaagagtat

SEQ ID NO: 341377 - DNA, 19 bp, Homo sapiens
  siRNA target sequence for LOH11CR2A (NM_014622.3,114-132).
gtgccgctgaagagtatct

SEQ ID NO: 341378 - DNA, 19 bp, Homo sapiens
  siRNA target sequence for LOH11CR2A (NM_014622.3,178-196).
ctttgaactacgagaatga

SEQ ID NO: 341379 - DNA, 19 bp, Homo sapiens
  siRNA target sequence for LOH11CR2A (NM_014622.3,188-206).
cgagaatgaggagaaagtt

SEQ ID NO: 341380 - DNA, 19 bp, Homo sapiens
  siRNA target sequence for LOH11CR2A (NM_014622.3,272-290).
ggtggatgggaagaaaatt

SEQ ID NO: 341381 - DNA, 19 bp, Homo sapiens
  siRNA target sequence for LOH11CR2A (NM_014622.3,350-368).
gggccaccaggccttctta

SEQ ID NO: 341382 - DNA, 19 bp, Homo sapiens
  siRNA target sequence for LOH11CR2A (NM_014622.3,351-369).
ggccaccaggccttcttat

SEQ ID NO: 341383 - DNA, 19 bp, Homo sapiens
  siRNA target sequence for LOH11CR2A (NM_014622.3,352-370).
gccaccaggccttcttatt

SEQ ID NO: 341384 - DNA, 19 bp, Homo sapiens
  siRNA target sequence for LOH11CR2A (NM_014622.3,392-410).
ggatgtcttctcttgcaat

SEQ ID NO: 341385 - DNA, 19 bp, Homo sapiens
  siRNA target sequence for LOH11CR2A (NM_014622.3,439-457).
cggcagtcaccctgaagta

SEQ ID NO: 341386 - DNA, 19 bp, Homo sapiens
  siRNA target sequence for LOH11CR2A (NM_014622.3,442-460).
cagtcaccctgaagtatgt

SEQ ID NO: 341387 - DNA, 19 bp, Homo sapiens
  siRNA target sequence for LOH11CR2A (NM_014622.3,614-632).
catggtcgccaccatagat

SEQ ID NO: 341388 - DNA, 19 bp, Homo sapiens
  siRNA target sequence for LOH11CR2A (NM_014622.3,753-771).
gtggaactcctgatttact

SEQ ID NO: 341389 - DNA, 19 bp, Homo sapiens
  siRNA target sequence for LOH11CR2A (NM_014622.3,874-892).
caaatatcccagaagatca

SEQ ID NO: 341390 - DNA, 19 bp, Homo sapiens
  siRNA target sequence for LOH11CR2A (NM_014622.3,883-901).
cagaagatcaaccatcaaa

SEQ ID NO: 341391 - DNA, 19 bp, Homo sapiens
  siRNA target sequence for LOH11CR2A (NM_014622.3,888-906).
gatcaaccatcaaatacct

SEQ ID NO: 341392 - DNA, 19 bp, Homo sapiens
  siRNA target sequence for LOH11CR2A (NM_014622.3,959-977).
gagtagccaggatacatct

SEQ ID NO: 341393 - DNA, 19 bp, Homo sapiens
  siRNA target sequence for LOH11CR2A (NM_014622.3,1181-1199).
ggcaccactccagaacatt

SEQ ID NO: 341394 - DNA, 19 bp, Homo sapiens
  siRNA target sequence for LOH11CR2A (NM_014622.3,1182-1200).
gcaccactccagaacattt

SEQ ID NO: 341395 - DNA, 19 bp, Homo sapiens
  siRNA target sequence for LOH11CR2A (NM_014622.3,1185-1203).
ccactccagaacatttaca

SEQ ID NO: 341396 - DNA, 19 bp, Homo sapiens
  siRNA target sequence for LOH11CR2A (NM_014622.3,1227-1245).
cccctacagctttttgtct

SEQ ID NO: 341397 - DNA, 19 bp, Homo sapiens
  siRNA target sequence for LOH11CR2A (NM_014622.3,1228-1246).
ccctacagctttttgtctt

SEQ ID NO: 341398 - DNA, 19 bp, Homo sapiens
  siRNA target sequence for LOH11CR2A (NM_014622.3,1229-1247).
cctacagctttttgtcttt

SEQ ID NO: 341399 - DNA, 19 bp, Homo sapiens
  siRNA target sequence for LOH11CR2A (NM_014622.3,1230-1248).
ctacagctttttgtcttta

SEQ ID NO: 341400 - DNA, 19 bp, Homo sapiens
  siRNA target sequence for LOH11CR2A (NM_014622.3,1257-1275).
gaagttacagacacgttta

SEQ ID NO: 341401 - DNA, 19 bp, Homo sapiens
  siRNA target sequence for LOH11CR2A (NM_014622.3,1266-1284).
gacacgtttagtgtaatta

SEQ ID NO: 341402 - DNA, 19 bp, Homo sapiens
  siRNA target sequence for LOH11CR2A (NM_014622.3,1268-1286).
cacgtttagtgtaattaaa

SEQ ID NO: 341403 - DNA, 19 bp, Homo sapiens
  siRNA target sequence for LOH11CR2A (NM_014622.3,1270-1288).
cgtttagtgtaattaaaga

SEQ ID NO: 341404 - DNA, 19 bp, Homo sapiens
  siRNA target sequence for LOH11CR2A (NM_014622.3,1352-1370).
cagcctaataaaaggtatt

SEQ ID NO: 341405 - DNA, 19 bp, Homo sapiens
  siRNA target sequence for LOH11CR2A (NM_014622.3,1383-1401).
gggggcacctcagaattta

SEQ ID NO: 341406 - DNA, 19 bp, Homo sapiens
  siRNA target sequence for LOH11CR2A (NM_014622.3,1384-1402).
ggggcacctcagaatttat

SEQ ID NO: 341407 - DNA, 19 bp, Homo sapiens
  siRNA target sequence for LOH11CR2A (NM_014622.3,1504-1522).
gtctgtctgctaaaatgct

SEQ ID NO: 341408 - DNA, 19 bp, Homo sapiens
  siRNA target sequence for LOH11CR2A (NM_014622.3,1544-1562).
ctttaggggtcagagatta

SEQ ID NO: 341409 - DNA, 19 bp, Homo sapiens
  siRNA target sequence for LOH11CR2A (NM_014622.3,1611-1629).
ggagaagtatgcctcaaat

SEQ ID NO: 341410 - DNA, 19 bp, Homo sapiens
  siRNA target sequence for LOH11CR2A (NM_014622.3,1612-1630).
gagaagtatgcctcaaata

SEQ ID NO: 341411 - DNA, 19 bp, Homo sapiens
  siRNA target sequence for LOH11CR2A (NM_014622.3,1661-1679).
ggtgacatttcctctacaa

SEQ ID NO: 341412 - DNA, 19 bp, Homo sapiens
  siRNA target sequence for LOH11CR2A (NM_014622.3,1758-1776).
gagactccagcaagtgata

SEQ ID NO: 341413 - DNA, 19 bp, Homo sapiens
  siRNA target sequence for LOH11CR2A (NM_014622.3,1800-1818).
cttgagtctggtgtcataa

SEQ ID NO: 341414 - DNA, 19 bp, Homo sapiens
  siRNA target sequence for LOH11CR2A (NM_014622.3,1915-1933).
gtgcttctgccccattgaa

SEQ ID NO: 341415 - DNA, 19 bp, Homo sapiens
  siRNA target sequence for LOH11CR2A (NM_014622.3,1917-1935).
gcttctgccccattgaaga

SEQ ID NO: 341416 - DNA, 19 bp, Homo sapiens
  siRNA target sequence for LOH11CR2A (NM_014622.3,1921-1939).
ctgccccattgaagataaa

SEQ ID NO: 341417 - DNA, 19 bp, Homo sapiens
  siRNA target sequence for LOH11CR2A (NM_014622.3,2000-2018).
cagaggggaacttatgtgt

SEQ ID NO: 341418 - DNA, 19 bp, Homo sapiens
  siRNA target sequence for LOH11CR2A (NM_014622.3,2004-2022).
ggggaacttatgtgttata

SEQ ID NO: 341419 - DNA, 19 bp, Homo sapiens
  siRNA target sequence for LOH11CR2A (NM_014622.3,2017-2035).
gttataaggccaagacatt

SEQ ID NO: 341420 - DNA, 19 bp, Homo sapiens
  siRNA target sequence for LOH11CR2A (NM_014622.3,2032-2050).
cattccagatggacgatta

SEQ ID NO: 341421 - DNA, 19 bp, Homo sapiens
  siRNA target sequence for LOH11CR2A (NM_014622.3,2152-2170).
gggatctgaatgaagatct

SEQ ID NO: 341422 - DNA, 19 bp, Homo sapiens
  siRNA target sequence for LOH11CR2A (NM_014622.3,2153-2171).
ggatctgaatgaagatcta

SEQ ID NO: 341423 - DNA, 19 bp, Homo sapiens
  siRNA target sequence for LOH11CR2A (NM_014622.3,2180-2198).
cctaggtatgagtttggaa

SEQ ID NO: 341424 - DNA, 19 bp, Homo sapiens
  siRNA target sequence for LOH11CR2A (NM_014622.3,2359-2377).
ccatgccttcggttgtgaa

SEQ ID NO: 341425 - DNA, 19 bp, Homo sapiens
  siRNA target sequence for LOH11CR2A (NM_014622.3,2360-2378).
catgccttcggttgtgaaa

SEQ ID NO: 341426 - DNA, 19 bp, Homo sapiens
  siRNA target sequence for MAD2L1BP (NM_014628.1,38-56).
ccgcagtccctgatttgga

SEQ ID NO: 341427 - DNA, 19 bp, Homo sapiens
  siRNA target sequence for MAD2L1BP (NM_014628.1,84-102).
cgcctcccagatagaacta

SEQ ID NO: 341428 - DNA, 19 bp, Homo sapiens
  siRNA target sequence for MAD2L1BP (NM_014628.1,86-104).
cctcccagatagaactact

SEQ ID NO: 341429 - DNA, 19 bp, Homo sapiens
  siRNA target sequence for MAD2L1BP (NM_014628.1,87-105).
ctcccagatagaactactt

SEQ ID NO: 341430 - DNA, 19 bp, Homo sapiens
  siRNA target sequence for MAD2L1BP (NM_014628.1,89-107).
cccagatagaactacttga

SEQ ID NO: 341431 - DNA, 19 bp, Homo sapiens
  siRNA target sequence for MAD2L1BP (NM_014628.1,205-223).
ggctgctgtcagtttactt

SEQ ID NO: 341432 - DNA, 19 bp, Homo sapiens
  siRNA target sequence for MAD2L1BP (NM_014628.1,224-242).
gtgaacttctaaagcatat

SEQ ID NO: 341433 - DNA, 19 bp, Homo sapiens
  siRNA target sequence for MAD2L1BP (NM_014628.1,288-306).
gcacttttaccgaaaacct

SEQ ID NO: 341434 - DNA, 19 bp, Homo sapiens
  siRNA target sequence for MAD2L1BP (NM_014628.1,569-587).
gtctcttccgagccatatt

SEQ ID NO: 341435 - DNA, 19 bp, Homo sapiens
  siRNA target sequence for MAD2L1BP (NM_014628.1,571-589).
ctcttccgagccatattca

SEQ ID NO: 341436 - DNA, 19 bp, Homo sapiens
  siRNA target sequence for MAD2L1BP (NM_014628.1,663-681).
ctgtggagaagattggttt

SEQ ID NO: 341437 - DNA, 19 bp, Homo sapiens
  siRNA target sequence for MAD2L1BP (NM_014628.1,773-791).
gggaagactacatttggtt

SEQ ID NO: 341438 - DNA, 19 bp, Homo sapiens
  siRNA target sequence for SH3MD1 (NM_014631.1,403-421).
cgtggtggtgtccaactat

SEQ ID NO: 341439 - DNA, 19 bp, Homo sapiens
  siRNA target sequence for SH3MD1 (NM_014631.1,548-566).
ctggaggcccagaatggta

SEQ ID NO: 341440 - DNA, 19 bp, Homo sapiens
  siRNA target sequence for SH3MD1 (NM_014631.1,572-590).
gatgactccgacatcaaca

SEQ ID NO: 341441 - DNA, 19 bp, Homo sapiens
  siRNA target sequence for SH3MD1 (NM_014631.1,821-839).
gagatcattgggaacatca

SEQ ID NO: 341442 - DNA, 19 bp, Homo sapiens
  siRNA target sequence for SH3MD1 (NM_014631.1,1149-1167).
ctgttgaggtggagtacta

SEQ ID NO: 341443 - DNA, 19 bp, Homo sapiens
  siRNA target sequence for SH3MD1 (NM_014631.1,1299-1317).
ccgcatcatacatcgataa

SEQ ID NO: 341444 - DNA, 19 bp, Homo sapiens
  siRNA target sequence for SH3MD1 (NM_014631.1,1462-1480).
gtatgaggagcctgagtat

SEQ ID NO: 341445 - DNA, 19 bp, Homo sapiens
  siRNA target sequence for SH3MD1 (NM_014631.1,1675-1693).
gggcttccggccatatgca

SEQ ID NO: 341446 - DNA, 19 bp, Homo sapiens
  siRNA target sequence for SH3MD1 (NM_014631.1,2327-2345).
ccagccacctcgtacatga

SEQ ID NO: 341447 - DNA, 19 bp, Homo sapiens
  siRNA target sequence for SH3MD1 (NM_014631.1,2472-2490).
ccccttcccactatttggt

SEQ ID NO: 341448 - DNA, 19 bp, Homo sapiens
  siRNA target sequence for SH3MD1 (NM_014631.1,2792-2810).
gccctgcggaggaatgagt

SEQ ID NO: 341449 - DNA, 19 bp, Homo sapiens
  siRNA target sequence for SH3MD1 (NM_014631.1,2843-2861).
cgacggaactcctccttta

SEQ ID NO: 341450 - DNA, 19 bp, Homo sapiens
  siRNA target sequence for SH2BP1 (NM_014633.1,159-177).
ccggagggagatgaagtta

SEQ ID NO: 341451 - DNA, 19 bp, Homo sapiens
  siRNA target sequence for SH2BP1 (NM_014633.1,162-180).
gagggagatgaagttatca

SEQ ID NO: 341452 - DNA, 19 bp, Homo sapiens
  siRNA target sequence for SH2BP1 (NM_014633.1,202-220).
cacaactgcacatatggat

SEQ ID NO: 341453 - DNA, 19 bp, Homo sapiens
  siRNA target sequence for SH2BP1 (NM_014633.1,222-240).
gctttggcgctggaatact

SEQ ID NO: 341454 - DNA, 19 bp, Homo sapiens
  siRNA target sequence for SH2BP1 (NM_014633.1,223-241).
ctttggcgctggaatacta

SEQ ID NO: 341455 - DNA, 19 bp, Homo sapiens
  siRNA target sequence for SH2BP1 (NM_014633.1,275-293).
gttggaagcagcacgtata

SEQ ID NO: 341456 - DNA, 19 bp, Homo sapiens
  siRNA target sequence for SH2BP1 (NM_014633.1,278-296).
ggaagcagcacgtatagat

SEQ ID NO: 341457 - DNA, 19 bp, Homo sapiens
  siRNA target sequence for SH2BP1 (NM_014633.1,349-367).
cattggcagcgtattatgt

SEQ ID NO: 341458 - DNA, 19 bp, Homo sapiens
  siRNA target sequence for SH2BP1 (NM_014633.1,353-371).
ggcagcgtattatgtacaa

SEQ ID NO: 341459 - DNA, 19 bp, Homo sapiens
  siRNA target sequence for SH2BP1 (NM_014633.1,355-373).
cagcgtattatgtacaaca

SEQ ID NO: 341460 - DNA, 19 bp, Homo sapiens
  siRNA target sequence for SH2BP1 (NM_014633.1,398-416).
caataaaaaggatcttatt

SEQ ID NO: 341461 - DNA, 19 bp, Homo sapiens
  siRNA target sequence for SH2BP1 (NM_014633.1,420-438).
caggccaccttgttgtata

SEQ ID NO: 341462 - DNA, 19 bp, Homo sapiens
  siRNA target sequence for SH2BP1 (NM_014633.1,422-440).
ggccaccttgttgtataca

SEQ ID NO: 341463 - DNA, 19 bp, Homo sapiens
  siRNA target sequence for SH2BP1 (NM_014633.1,423-441).
gccaccttgttgtatacaa

SEQ ID NO: 341464 - DNA, 19 bp, Homo sapiens
  siRNA target sequence for SH2BP1 (NM_014633.1,424-442).
ccaccttgttgtatacaat

SEQ ID NO: 341465 - DNA, 19 bp, Homo sapiens
  siRNA target sequence for SH2BP1 (NM_014633.1,434-452).
gtatacaatggccgataaa

SEQ ID NO: 341466 - DNA, 19 bp, Homo sapiens
  siRNA target sequence for SH2BP1 (NM_014633.1,444-462).
gccgataaaattattatgt

SEQ ID NO: 341467 - DNA, 19 bp, Homo sapiens
  siRNA target sequence for SH2BP1 (NM_014633.1,528-546).
gctgatgcacagtttcatt

SEQ ID NO: 341468 - DNA, 19 bp, Homo sapiens
  siRNA target sequence for SH2BP1 (NM_014633.1,552-570).
ctcaatcagtctccaaata

SEQ ID NO: 341469 - DNA, 19 bp, Homo sapiens
  siRNA target sequence for SH2BP1 (NM_014633.1,579-597).
gcccttcttggtaaagctt

SEQ ID NO: 341470 - DNA, 19 bp, Homo sapiens
  siRNA target sequence for SH2BP1 (NM_014633.1,595-613).
cttgcatttccttcaacaa

SEQ ID NO: 341471 - DNA, 19 bp, Homo sapiens
  siRNA target sequence for SH2BP1 (NM_014633.1,627-645).
ggagctcttgcttactata

SEQ ID NO: 341472 - DNA, 19 bp, Homo sapiens
  siRNA target sequence for SH2BP1 (NM_014633.1,628-646).
gagctcttgcttactataa

SEQ ID NO: 341473 - DNA, 19 bp, Homo sapiens
  siRNA target sequence for SH2BP1 (NM_014633.1,630-648).
gctcttgcttactataaga

SEQ ID NO: 341474 - DNA, 19 bp, Homo sapiens
  siRNA target sequence for SH2BP1 (NM_014633.1,636-654).
gcttactataagaaagcat

SEQ ID NO: 341475 - DNA, 19 bp, Homo sapiens
  siRNA target sequence for SH2BP1 (NM_014633.1,673-691).
gtccagcggaagttcgttt

SEQ ID NO: 341476 - DNA, 19 bp, Homo sapiens
  siRNA target sequence for SH2BP1 (NM_014633.1,678-696).
gcggaagttcgtttaggaa

SEQ ID NO: 341477 - DNA, 19 bp, Homo sapiens
  siRNA target sequence for SH2BP1 (NM_014633.1,679-697).
cggaagttcgtttaggaat

SEQ ID NO: 341478 - DNA, 19 bp, Homo sapiens
  siRNA target sequence for SH2BP1 (NM_014633.1,791-809).
ggttggactggctgttcta

SEQ ID NO: 341479 - DNA, 19 bp, Homo sapiens
  siRNA target sequence for SH2BP1 (NM_014633.1,804-822).
gttctagaactcaacaata

SEQ ID NO: 341480 - DNA, 19 bp, Homo sapiens
  siRNA target sequence for SH2BP1 (NM_014633.1,858-876).
ctttccagagcctatacta

SEQ ID NO: 341481 - DNA, 19 bp, Homo sapiens
  siRNA target sequence for SH2BP1 (NM_014633.1,862-880).
ccagagcctatactattga

SEQ ID NO: 341482 - DNA, 19 bp, Homo sapiens
  siRNA target sequence for SH2BP1 (NM_014633.1,863-881).
cagagcctatactattgat

SEQ ID NO: 341483 - DNA, 19 bp, Homo sapiens
  siRNA target sequence for SH2BP1 (NM_014633.1,882-900).
cctagcaaccctatggtat

SEQ ID NO: 341484 - DNA, 19 bp, Homo sapiens
  siRNA target sequence for SH2BP1 (NM_014633.1,883-901).
ctagcaaccctatggtatt

SEQ ID NO: 341485 - DNA, 19 bp, Homo sapiens
  siRNA target sequence for SH2BP1 (NM_014633.1,886-904).
gcaaccctatggtattgaa

SEQ ID NO: 341486 - DNA, 19 bp, Homo sapiens
  siRNA target sequence for SH2BP1 (NM_014633.1,963-981).
ctccatgcattccataata

SEQ ID NO: 341487 - DNA, 19 bp, Homo sapiens
  siRNA target sequence for SH2BP1 (NM_014633.1,1013-1031).
ctatcagctagctagatca

SEQ ID NO: 341488 - DNA, 19 bp, Homo sapiens
  siRNA target sequence for SH2BP1 (NM_014633.1,1024-1042).
ctagatcattccatgttca

SEQ ID NO: 341489 - DNA, 19 bp, Homo sapiens
  siRNA target sequence for SH2BP1 (NM_014633.1,1123-1141).
gtttgggacaaatgtatat

SEQ ID NO: 341490 - DNA, 19 bp, Homo sapiens
  siRNA target sequence for SH2BP1 (NM_014633.1,1184-1202).
ggttttgaaagcttatcct

SEQ ID NO: 341491 - DNA, 19 bp, Homo sapiens
  siRNA target sequence for SH2BP1 (NM_014633.1,1190-1208).
gaaagcttatcctaataat

SEQ ID NO: 341492 - DNA, 19 bp, Homo sapiens
  siRNA target sequence for SH2BP1 (NM_014633.1,1195-1213).
cttatcctaataattacga

SEQ ID NO: 341493 - DNA, 19 bp, Homo sapiens
  siRNA target sequence for SH2BP1 (NM_014633.1,1200-1218).
cctaataattacgaaacta

SEQ ID NO: 341494 - DNA, 19 bp, Homo sapiens
  siRNA target sequence for SH2BP1 (NM_014633.1,1201-1219).
ctaataattacgaaactat

SEQ ID NO: 341495 - DNA, 19 bp, Homo sapiens
  siRNA target sequence for SH2BP1 (NM_014633.1,1238-1256).
ctatgctgcctcagaagat

SEQ ID NO: 341496 - DNA, 19 bp, Homo sapiens
  siRNA target sequence for SH2BP1 (NM_014633.1,1292-1310).
gaaggtcacagaacagtat

SEQ ID NO: 341497 - DNA, 19 bp, Homo sapiens
  siRNA target sequence for SH2BP1 (NM_014633.1,1320-1338).
gttgaagcttggattgaat

SEQ ID NO: 341498 - DNA, 19 bp, Homo sapiens
  siRNA target sequence for SH2BP1 (NM_014633.1,1330-1348).
ggattgaattggcacaaat

SEQ ID NO: 341499 - DNA, 19 bp, Homo sapiens
  siRNA target sequence for SH2BP1 (NM_014633.1,1427-1445).
cgatgttcctccagagatt

SEQ ID NO: 341500 - DNA, 19 bp, Homo sapiens
  siRNA target sequence for SH2BP1 (NM_014633.1,1434-1452).
cctccagagattctcaata

SEQ ID NO: 341501 - DNA, 19 bp, Homo sapiens
  siRNA target sequence for SH2BP1 (NM_014633.1,1455-1473).
gtgggtgccctccatttta

SEQ ID NO: 341502 - DNA, 19 bp, Homo sapiens
  siRNA target sequence for SH2BP1 (NM_014633.1,1457-1475).
gggtgccctccattttaga

SEQ ID NO: 341503 - DNA, 19 bp, Homo sapiens
  siRNA target sequence for SH2BP1 (NM_014633.1,1540-1558).
cggaacacgatgagcatta

SEQ ID NO: 341504 - DNA, 19 bp, Homo sapiens
  siRNA target sequence for SH2BP1 (NM_014633.1,1542-1560).
gaacacgatgagcattact

SEQ ID NO: 341505 - DNA, 19 bp, Homo sapiens
  siRNA target sequence for SH2BP1 (NM_014633.1,1545-1563).
cacgatgagcattactata

SEQ ID NO: 341506 - DNA, 19 bp, Homo sapiens
  siRNA target sequence for SH2BP1 (NM_014633.1,1573-1591).
ccgttaccacgtcatataa

SEQ ID NO: 341507 - DNA, 19 bp, Homo sapiens
  siRNA target sequence for SH2BP1 (NM_014633.1,1574-1592).
cgttaccacgtcatataat

SEQ ID NO: 341508 - DNA, 19 bp, Homo sapiens
  siRNA target sequence for SH2BP1 (NM_014633.1,1655-1673).
cttacgcgaacatcctaat

SEQ ID NO: 341509 - DNA, 19 bp, Homo sapiens
  siRNA target sequence for SH2BP1 (NM_014633.1,1660-1678).
gcgaacatcctaattatgt

SEQ ID NO: 341510 - DNA, 19 bp, Homo sapiens
  siRNA target sequence for SH2BP1 (NM_014633.1,1724-1742).
cttttatgaggcttcagat

SEQ ID NO: 341511 - DNA, 19 bp, Homo sapiens
  siRNA target sequence for SH2BP1 (NM_014633.1,1731-1749).
gaggcttcagattggttta

SEQ ID NO: 341512 - DNA, 19 bp, Homo sapiens
  siRNA target sequence for SH2BP1 (NM_014633.1,1751-1769).
ggaagctcttcagattaat

SEQ ID NO: 341513 - DNA, 19 bp, Homo sapiens
  siRNA target sequence for SH2BP1 (NM_014633.1,1790-1808).
gtctttgattggcaatctt

SEQ ID NO: 341514 - DNA, 19 bp, Homo sapiens
  siRNA target sequence for SH2BP1 (NM_014633.1,1792-1810).
ctttgattggcaatcttca

SEQ ID NO: 341515 - DNA, 19 bp, Homo sapiens
  siRNA target sequence for SH2BP1 (NM_014633.1,1873-1891).
ccacacagagtgataccta

SEQ ID NO: 341516 - DNA, 19 bp, Homo sapiens
  siRNA target sequence for SH2BP1 (NM_014633.1,1874-1892).
cacacagagtgatacctat

SEQ ID NO: 341517 - DNA, 19 bp, Homo sapiens
  siRNA target sequence for SH2BP1 (NM_014633.1,1913-1931).
cgtgtggctccaaacttta

SEQ ID NO: 341518 - DNA, 19 bp, Homo sapiens
  siRNA target sequence for SH2BP1 (NM_014633.1,1916-1934).
gtggctccaaactttacat

SEQ ID NO: 341519 - DNA, 19 bp, Homo sapiens
  siRNA target sequence for SH2BP1 (NM_014633.1,1939-1957).
ccacccgagatcgagaaaa

SEQ ID NO: 341520 - DNA, 19 bp, Homo sapiens
  siRNA target sequence for SH2BP1 (NM_014633.1,1958-1976).
ggaaaagcgtcatcaagat

SEQ ID NO: 341521 - DNA, 19 bp, Homo sapiens
  siRNA target sequence for SH2BP1 (NM_014633.1,1977-1995).
cgtgctctggccatctaca

SEQ ID NO: 341522 - DNA, 19 bp, Homo sapiens
  siRNA target sequence for SH2BP1 (NM_014633.1,2052-2070).
gttttggcccacaaaggat

SEQ ID NO: 341523 - DNA, 19 bp, Homo sapiens
  siRNA target sequence for SH2BP1 (NM_014633.1,2141-2159).
gaacttagcacacatctat

SEQ ID NO: 341524 - DNA, 19 bp, Homo sapiens
  siRNA target sequence for SH2BP1 (NM_014633.1,2163-2181).
gagcaaaagcagtacatca

SEQ ID NO: 341525 - DNA, 19 bp, Homo sapiens
  siRNA target sequence for SH2BP1 (NM_014633.1,2180-2198).
cagcgccgttcagatgtat

SEQ ID NO: 341526 - DNA, 19 bp, Homo sapiens
  siRNA target sequence for SH2BP1 (NM_014633.1,2182-2200).
gcgccgttcagatgtatga

SEQ ID NO: 341527 - DNA, 19 bp, Homo sapiens
  siRNA target sequence for SH2BP1 (NM_014633.1,2184-2202).
gccgttcagatgtatgaaa

SEQ ID NO: 341528 - DNA, 19 bp, Homo sapiens
  siRNA target sequence for SH2BP1 (NM_014633.1,2185-2203).
ccgttcagatgtatgaaaa

SEQ ID NO: 341529 - DNA, 19 bp, Homo sapiens
  siRNA target sequence for SH2BP1 (NM_014633.1,2219-2237).
ctataagcaccaaaacact

SEQ ID NO: 341530 - DNA, 19 bp, Homo sapiens
  siRNA target sequence for SH2BP1 (NM_014633.1,2225-2243).
gcaccaaaacactgaagtt

SEQ ID NO: 341531 - DNA, 19 bp, Homo sapiens
  siRNA target sequence for SH2BP1 (NM_014633.1,2279-2297).
caagttacaggaatgcaaa

SEQ ID NO: 341532 - DNA, 19 bp, Homo sapiens
  siRNA target sequence for SH2BP1 (NM_014633.1,2319-2337).
catgtggcacccagtgata

SEQ ID NO: 341533 - DNA, 19 bp, Homo sapiens
  siRNA target sequence for SH2BP1 (NM_014633.1,2324-2342).
ggcacccagtgatacagtt

SEQ ID NO: 341534 - DNA, 19 bp, Homo sapiens
  siRNA target sequence for SH2BP1 (NM_014633.1,2334-2352).
gatacagttcttatgttta

SEQ ID NO: 341535 - DNA, 19 bp, Homo sapiens
  siRNA target sequence for SH2BP1 (NM_014633.1,2359-2377).
ccttggtcctgcaaagatt

SEQ ID NO: 341536 - DNA, 19 bp, Homo sapiens
  siRNA target sequence for SH2BP1 (NM_014633.1,2363-2381).
ggtcctgcaaagattagct

SEQ ID NO: 341537 - DNA, 19 bp, Homo sapiens
  siRNA target sequence for SH2BP1 (NM_014633.1,2380-2398).
ctacctctgtcctgaaaga

SEQ ID NO: 341538 - DNA, 19 bp, Homo sapiens
  siRNA target sequence for SH2BP1 (NM_014633.1,2414-2432).
gaaggaagtacttaatgct

SEQ ID NO: 341539 - DNA, 19 bp, Homo sapiens
  siRNA target sequence for SH2BP1 (NM_014633.1,2445-2463).
gagcttgcacatagatact

SEQ ID NO: 341540 - DNA, 19 bp, Homo sapiens
  siRNA target sequence for SH2BP1 (NM_014633.1,2448-2466).
cttgcacatagatacttca

SEQ ID NO: 341541 - DNA, 19 bp, Homo sapiens
  siRNA target sequence for SH2BP1 (NM_014633.1,2452-2470).
cacatagatacttcagtta

SEQ ID NO: 341542 - DNA, 19 bp, Homo sapiens
  siRNA target sequence for SH2BP1 (NM_014633.1,2462-2480).
cttcagttatttgagtaaa

SEQ ID NO: 341543 - DNA, 19 bp, Homo sapiens
  siRNA target sequence for SH2BP1 (NM_014633.1,2474-2492).
gagtaaagtgggagataaa

SEQ ID NO: 341544 - DNA, 19 bp, Homo sapiens
  siRNA target sequence for SH2BP1 (NM_014633.1,2507-2525).
ggcccttgctgctacagaa

SEQ ID NO: 341545 - DNA, 19 bp, Homo sapiens
  siRNA target sequence for SH2BP1 (NM_014633.1,2576-2594).
ggcacgcaaacaagatgaa

SEQ ID NO: 341546 - DNA, 19 bp, Homo sapiens
  siRNA target sequence for SH2BP1 (NM_014633.1,2764-2782).
gtgagactgaagcaacaaa

SEQ ID NO: 341547 - DNA, 19 bp, Homo sapiens
  siRNA target sequence for SH2BP1 (NM_014633.1,2803-2821).
gtggtggacggcgttctaa

SEQ ID NO: 341548 - DNA, 19 bp, Homo sapiens
  siRNA target sequence for SH2BP1 (NM_014633.1,2805-2823).
ggtggacggcgttctaaga

SEQ ID NO: 341549 - DNA, 19 bp, Homo sapiens
  siRNA target sequence for SH2BP1 (NM_014633.1,2806-2824).
gtggacggcgttctaagaa

SEQ ID NO: 341550 - DNA, 19 bp, Homo sapiens
  siRNA target sequence for SH2BP1 (NM_014633.1,2827-2845).
gaggagagtttgatgaatt

SEQ ID NO: 341551 - DNA, 19 bp, Homo sapiens
  siRNA target sequence for SH2BP1 (NM_014633.1,2860-2878).
ctgatgatgacctacctat

SEQ ID NO: 341552 - DNA, 19 bp, Homo sapiens
  siRNA target sequence for SH2BP1 (NM_014633.1,2862-2880).
gatgatgacctacctatat

SEQ ID NO: 341553 - DNA, 19 bp, Homo sapiens
  siRNA target sequence for SH2BP1 (NM_014633.1,2865-2883).
gatgacctacctatatcca

SEQ ID NO: 341554 - DNA, 19 bp, Homo sapiens
  siRNA target sequence for SH2BP1 (NM_014633.1,2871-2889).
ctacctatatccaaaaaga

SEQ ID NO: 341555 - DNA, 19 bp, Homo sapiens
  siRNA target sequence for SH2BP1 (NM_014633.1,2905-2923).
gtagtggcagtgaacaaga

SEQ ID NO: 341556 - DNA, 19 bp, Homo sapiens
  siRNA target sequence for SH2BP1 (NM_014633.1,3122-3140).
cataatttcatcaagtgat

SEQ ID NO: 341557 - DNA, 19 bp, Homo sapiens
  siRNA target sequence for SH2BP1 (NM_014633.1,3145-3163).
cttcggatgaggataaact

SEQ ID NO: 341558 - DNA, 19 bp, Homo sapiens
  siRNA target sequence for SH2BP1 (NM_014633.1,3222-3240).
gacgaacaacgaaagaaat

SEQ ID NO: 341559 - DNA, 19 bp, Homo sapiens
  siRNA target sequence for SH2BP1 (NM_014633.1,3243-3261).
gcctcatcagagagtgatt

SEQ ID NO: 341560 - DNA, 19 bp, Homo sapiens
  siRNA target sequence for SH2BP1 (NM_014633.1,3264-3282).
gatgagaaccagaacaagt

SEQ ID NO: 341561 - DNA, 19 bp, Homo sapiens
  siRNA target sequence for SH2BP1 (NM_014633.1,3460-3478).
ctccaagtgccgaatcaga

SEQ ID NO: 341562 - DNA, 19 bp, Homo sapiens
  siRNA target sequence for SH2BP1 (NM_014633.1,3544-3562).
cagagggatccaacaatga

SEQ ID NO: 341563 - DNA, 19 bp, Homo sapiens
  siRNA target sequence for SH2BP1 (NM_014633.1,3557-3575).
caatgaggcctcagataga

SEQ ID NO: 341564 - DNA, 19 bp, Homo sapiens
  siRNA target sequence for CHPPR (NM_014637.2,135-153).
ctggattaagcgcctaatt

SEQ ID NO: 341565 - DNA, 19 bp, Homo sapiens
  siRNA target sequence for CHPPR (NM_014637.2,146-164).
gcctaattaggatggtttt

SEQ ID NO: 341566 - DNA, 19 bp, Homo sapiens
  siRNA target sequence for CHPPR (NM_014637.2,172-190).
gttggagtaagcatgcaat

SEQ ID NO: 341567 - DNA, 19 bp, Homo sapiens
  siRNA target sequence for CHPPR (NM_014637.2,201-219).
gtctaggaagccatatggt

SEQ ID NO: 341568 - DNA, 19 bp, Homo sapiens
  siRNA target sequence for CHPPR (NM_014637.2,224-242).
ctcgaagtatcgtaaggaa

SEQ ID NO: 341569 - DNA, 19 bp, Homo sapiens
  siRNA target sequence for CHPPR (NM_014637.2,226-244).
cgaagtatcgtaaggaaaa

SEQ ID NO: 341570 - DNA, 19 bp, Homo sapiens
  siRNA target sequence for CHPPR (NM_014637.2,227-245).
gaagtatcgtaaggaaaat

SEQ ID NO: 341571 - DNA, 19 bp, Homo sapiens
  siRNA target sequence for CHPPR (NM_014637.2,555-573).
gatttgcgctctcgaaaat

SEQ ID NO: 341572 - DNA, 19 bp, Homo sapiens
  siRNA target sequence for CHPPR (NM_014637.2,560-578).
gcgctctcgaaaatgaact

SEQ ID NO: 341573 - DNA, 19 bp, Homo sapiens
  siRNA target sequence for CHPPR (NM_014637.2,561-579).
cgctctcgaaaatgaactt

SEQ ID NO: 341574 - DNA, 19 bp, Homo sapiens
  siRNA target sequence for CHPPR (NM_014637.2,593-611).
ctcagattgccaaaattgt

SEQ ID NO: 341575 - DNA, 19 bp, Homo sapiens
  siRNA target sequence for CHPPR (NM_014637.2,595-613).
cagattgccaaaattgtga

SEQ ID NO: 341576 - DNA, 19 bp, Homo sapiens
  siRNA target sequence for CHPPR (NM_014637.2,648-666).
cttagattctaccacattt

SEQ ID NO: 341577 - DNA, 19 bp, Homo sapiens
  siRNA target sequence for CHPPR (NM_014637.2,721-739).
ctggggctccaccaaagta

SEQ ID NO: 341578 - DNA, 19 bp, Homo sapiens
  siRNA target sequence for CHPPR (NM_014637.2,723-741).
ggggctccaccaaagtaca

SEQ ID NO: 341579 - DNA, 19 bp, Homo sapiens
  siRNA target sequence for CHPPR (NM_014637.2,724-742).
gggctccaccaaagtacat

SEQ ID NO: 341580 - DNA, 19 bp, Homo sapiens
  siRNA target sequence for CHPPR (NM_014637.2,726-744).
gctccaccaaagtacatct

SEQ ID NO: 341581 - DNA, 19 bp, Homo sapiens
  siRNA target sequence for CHPPR (NM_014637.2,781-799).
gccaatgctggaaagactt

SEQ ID NO: 341582 - DNA, 19 bp, Homo sapiens
  siRNA target sequence for CHPPR (NM_014637.2,795-813).
gactttggttaagaacaat

SEQ ID NO: 341583 - DNA, 19 bp, Homo sapiens
  siRNA target sequence for CHPPR (NM_014637.2,1043-1061).
cctcagagagagtgttgtt

SEQ ID NO: 341584 - DNA, 19 bp, Homo sapiens
  siRNA target sequence for CHPPR (NM_014637.2,1044-1062).
ctcagagagagtgttgttt

SEQ ID NO: 341585 - DNA, 19 bp, Homo sapiens
  siRNA target sequence for KIAA0036 (NM_014642.1,177-195).
cccaaggatcttatctata

SEQ ID NO: 341586 - DNA, 19 bp, Homo sapiens
  siRNA target sequence for KIAA0036 (NM_014642.1,232-250).
cctgttatactgttgaagt

SEQ ID NO: 341587 - DNA, 19 bp, Homo sapiens
  siRNA target sequence for KIAA0036 (NM_014642.1,349-367).
gtcctcagtcaagattatt

SEQ ID NO: 341588 - DNA, 19 bp, Homo sapiens
  siRNA target sequence for KIAA0036 (NM_014642.1,376-394).
cagggtggttggactacaa

SEQ ID NO: 341589 - DNA, 19 bp, Homo sapiens
  siRNA target sequence for KIAA0036 (NM_014642.1,379-397).
ggtggttggactacaattt

SEQ ID NO: 341590 - DNA, 19 bp, Homo sapiens
  siRNA target sequence for KIAA0036 (NM_014642.1,392-410).
caatttcccagcttacaca

SEQ ID NO: 341591 - DNA, 19 bp, Homo sapiens
  siRNA target sequence for KIAA0036 (NM_014642.1,451-469).
gatgcagaggaattttaca

SEQ ID NO: 341592 - DNA, 19 bp, Homo sapiens
  siRNA target sequence for KIAA0036 (NM_014642.1,455-473).
cagaggaattttacaatga

SEQ ID NO: 341593 - DNA, 19 bp, Homo sapiens
  siRNA target sequence for KIAA0036 (NM_014642.1,502-520).
ctagttttggggagacaat

SEQ ID NO: 341594 - DNA, 19 bp, Homo sapiens
  siRNA target sequence for KIAA0036 (NM_014642.1,511-529).
gggagacaattacaaacat

SEQ ID NO: 341595 - DNA, 19 bp, Homo sapiens
  siRNA target sequence for KIAA0036 (NM_014642.1,562-580).
gatgaattactacactttt

SEQ ID NO: 341596 - DNA, 19 bp, Homo sapiens
  siRNA target sequence for KIAA0036 (NM_014642.1,617-635).
gaggccatgttgaacttat

SEQ ID NO: 341597 - DNA, 19 bp, Homo sapiens
  siRNA target sequence for KIAA0036 (NM_014642.1,643-661).
gtactacaaagtgatcatt

SEQ ID NO: 341598 - DNA, 19 bp, Homo sapiens
  siRNA target sequence for KIAA0036 (NM_014642.1,653-671).
gtgatcatttcttacattt

SEQ ID NO: 341599 - DNA, 19 bp, Homo sapiens
  siRNA target sequence for KIAA0036 (NM_014642.1,682-700).
gacaatgtccaaataggat

SEQ ID NO: 341600 - DNA, 19 bp, Homo sapiens
  siRNA target sequence for KIAA0036 (NM_014642.1,1104-1122).
gcttccatctgctgtgatt

SEQ ID NO: 341601 - DNA, 19 bp, Homo sapiens
  siRNA target sequence for KIAA0036 (NM_014642.1,1285-1303).
ggtcaggtggagaaacact

SEQ ID NO: 341602 - DNA, 19 bp, Homo sapiens
  siRNA target sequence for KIAA0036 (NM_014642.1,1330-1348).
ctgattatccagaaacatt

SEQ ID NO: 341603 - DNA, 19 bp, Homo sapiens
  siRNA target sequence for KIAA0036 (NM_014642.1,1388-1406).
ggcagtctctcatagagta

SEQ ID NO: 341604 - DNA, 19 bp, Homo sapiens
  siRNA target sequence for KIAA0036 (NM_014642.1,1389-1407).
gcagtctctcatagagtat

SEQ ID NO: 341605 - DNA, 19 bp, Homo sapiens
  siRNA target sequence for KIAA0036 (NM_014642.1,1426-1444).
caaagagcagcgcttaaat

SEQ ID NO: 341606 - DNA, 19 bp, Homo sapiens
  siRNA target sequence for KIAA0036 (NM_014642.1,1533-1551).
gaaacgagtggatgactat

SEQ ID NO: 341607 - DNA, 19 bp, Homo sapiens
  siRNA target sequence for KIAA0036 (NM_014642.1,1671-1689).
gcacagagaagctctgata

SEQ ID NO: 341608 - DNA, 19 bp, Homo sapiens
  siRNA target sequence for KIAA0036 (NM_014642.1,1756-1774).
gaacctgagctcttcctaa

SEQ ID NO: 341609 - DNA, 19 bp, Homo sapiens
  siRNA target sequence for KIAA0036 (NM_014642.1,1762-1780).
gagctcttcctaagtagat

SEQ ID NO: 341610 - DNA, 19 bp, Homo sapiens
  siRNA target sequence for KIAA0036 (NM_014642.1,1820-1838).
caaccctgaagcacataca

SEQ ID NO: 341611 - DNA, 19 bp, Homo sapiens
  siRNA target sequence for KIAA0036 (NM_014642.1,1891-1909).
ccaaaggatgagcttagta

SEQ ID NO: 341612 - DNA, 19 bp, Homo sapiens
  siRNA target sequence for KIAA0036 (NM_014642.1,1892-1910).
caaaggatgagcttagtat

SEQ ID NO: 341613 - DNA, 19 bp, Homo sapiens
  siRNA target sequence for KIAA0036 (NM_014642.1,1896-1914).
ggatgagcttagtatagaa

SEQ ID NO: 341614 - DNA, 19 bp, Homo sapiens
  siRNA target sequence for KIAA0036 (NM_014642.1,1897-1915).
gatgagcttagtatagaat

SEQ ID NO: 341615 - DNA, 19 bp, Homo sapiens
  siRNA target sequence for KIAA0635 (NM_014645.1,853-871).
gacatctgaagtcgttaat

SEQ ID NO: 341616 - DNA, 19 bp, Homo sapiens
  siRNA target sequence for KIAA0635 (NM_014645.1,855-873).
catctgaagtcgttaattt

SEQ ID NO: 341617 - DNA, 19 bp, Homo sapiens
  siRNA target sequence for KIAA0635 (NM_014645.1,895-913).
ctgccaagaattaactgaa

SEQ ID NO: 341618 - DNA, 19 bp, Homo sapiens
  siRNA target sequence for KIAA0635 (NM_014645.1,1055-1073).
cagctggaattgaacttat

SEQ ID NO: 341619 - DNA, 19 bp, Homo sapiens
  siRNA target sequence for KIAA0635 (NM_014645.1,1112-1130).
gtaaaatcagacctagaaa

SEQ ID NO: 341620 - DNA, 19 bp, Homo sapiens
  siRNA target sequence for KIAA0635 (NM_014645.1,1123-1141).
cctagaaactgttgttcat

SEQ ID NO: 341621 - DNA, 19 bp, Homo sapiens
  siRNA target sequence for KIAA0635 (NM_014645.1,1193-1211).
gttacagaacgacaactta

SEQ ID NO: 341622 - DNA, 19 bp, Homo sapiens
  siRNA target sequence for KIAA0635 (NM_014645.1,1197-1215).
cagaacgacaacttactct

SEQ ID NO: 341623 - DNA, 19 bp, Homo sapiens
  siRNA target sequence for KIAA0635 (NM_014645.1,1225-1243).
gaggatgagactagaacat

SEQ ID NO: 341624 - DNA, 19 bp, Homo sapiens
  siRNA target sequence for KIAA0635 (NM_014645.1,1261-1279).
caggtcaccttctcgttta

SEQ ID NO: 341625 - DNA, 19 bp, Homo sapiens
  siRNA target sequence for KIAA0635 (NM_014645.1,1263-1281).
ggtcaccttctcgtttaga

SEQ ID NO: 341626 - DNA, 19 bp, Homo sapiens
  siRNA target sequence for KIAA0635 (NM_014645.1,1274-1292).
cgtttagatacatttctga

SEQ ID NO: 341627 - DNA, 19 bp, Homo sapiens
  siRNA target sequence for KIAA0635 (NM_014645.1,1280-1298).
gatacatttctgaaaggta

SEQ ID NO: 341628 - DNA, 19 bp, Homo sapiens
  siRNA target sequence for KIAA0635 (NM_014645.1,1304-1322).
gaagaacgagattattata

SEQ ID NO: 341629 - DNA, 19 bp, Homo sapiens
  siRNA target sequence for KIAA0635 (NM_014645.1,1331-1349).
ctagagagactccaacata

SEQ ID NO: 341630 - DNA, 19 bp, Homo sapiens
  siRNA target sequence for KIAA0635 (NM_014645.1,1358-1376).
cgaagatcttgctctacaa

SEQ ID NO: 341631 - DNA, 19 bp, Homo sapiens
  siRNA target sequence for KIAA0635 (NM_014645.1,1362-1380).
gatcttgctctacaagtta

SEQ ID NO: 341632 - DNA, 19 bp, Homo sapiens
  siRNA target sequence for KIAA0635 (NM_014645.1,1384-1402).
cgcacgtgaaaaaagttca

SEQ ID NO: 341633 - DNA, 19 bp, Homo sapiens
  siRNA target sequence for KIAA0635 (NM_014645.1,1385-1403).
gcacgtgaaaaaagttcaa

SEQ ID NO: 341634 - DNA, 19 bp, Homo sapiens
  siRNA target sequence for KIAA0635 (NM_014645.1,1386-1404).
cacgtgaaaaaagttcaat

SEQ ID NO: 341635 - DNA, 19 bp, Homo sapiens
  siRNA target sequence for KIAA0635 (NM_014645.1,1423-1441).
gggtgattacaattcagaa

SEQ ID NO: 341636 - DNA, 19 bp, Homo sapiens
  siRNA target sequence for KIAA0635 (NM_014645.1,1472-1490).
cttcagcgtatgctagaaa

SEQ ID NO: 341637 - DNA, 19 bp, Homo sapiens
  siRNA target sequence for KIAA0635 (NM_014645.1,1475-1493).
cagcgtatgctagaaagat

SEQ ID NO: 341638 - DNA, 19 bp, Homo sapiens
  siRNA target sequence for KIAA0635 (NM_014645.1,1477-1495).
gcgtatgctagaaagattt

SEQ ID NO: 341639 - DNA, 19 bp, Homo sapiens
  siRNA target sequence for KIAA0635 (NM_014645.1,1511-1529).
gatatacagtccaatgtta

SEQ ID NO: 341640 - DNA, 19 bp, Homo sapiens
  siRNA target sequence for KIAA0635 (NM_014645.1,1550-1568).
gataaactaagtgtcttat

SEQ ID NO: 341641 - DNA, 19 bp, Homo sapiens
  siRNA target sequence for KIAA0635 (NM_014645.1,1586-1604).
gaattatctgccctaagaa

SEQ ID NO: 341642 - DNA, 19 bp, Homo sapiens
  siRNA target sequence for KIAA0635 (NM_014645.1,1621-1639).
cacagcaccccataatatt

SEQ ID NO: 341643 - DNA, 19 bp, Homo sapiens
  siRNA target sequence for KIAA0635 (NM_014645.1,1623-1641).
cagcaccccataatattgt

SEQ ID NO: 341644 - DNA, 19 bp, Homo sapiens
  siRNA target sequence for KIAA0635 (NM_014645.1,1629-1647).
cccataatattgttagtct

SEQ ID NO: 341645 - DNA, 19 bp, Homo sapiens
  siRNA target sequence for KIAA0635 (NM_014645.1,1630-1648).
ccataatattgttagtctt

SEQ ID NO: 341646 - DNA, 19 bp, Homo sapiens
  siRNA target sequence for KIAA0635 (NM_014645.1,1667-1685).
cttgcgttatctgacttaa

SEQ ID NO: 341647 - DNA, 19 bp, Homo sapiens
  siRNA target sequence for KIAA0635 (NM_014645.1,1670-1688).
gcgttatctgacttaagaa

SEQ ID NO: 341648 - DNA, 19 bp, Homo sapiens
  siRNA target sequence for KIAA0635 (NM_014645.1,1807-1825).
gcttgaaagcgaaaaatat

SEQ ID NO: 341649 - DNA, 19 bp, Homo sapiens
  siRNA target sequence for KIAA0635 (NM_014645.1,1815-1833).
gcgaaaaatatgaattaaa

SEQ ID NO: 341650 - DNA, 19 bp, Homo sapiens
  siRNA target sequence for KIAA0635 (NM_014645.1,1860-1878).
caatagagtcgttagagaa

SEQ ID NO: 341651 - DNA, 19 bp, Homo sapiens
  siRNA target sequence for KIAA0635 (NM_014645.1,1865-1883).
gagtcgttagagaacaaat

SEQ ID NO: 341652 - DNA, 19 bp, Homo sapiens
  siRNA target sequence for KIAA0635 (NM_014645.1,1867-1885).
gtcgttagagaacaaatta

SEQ ID NO: 341653 - DNA, 19 bp, Homo sapiens
  siRNA target sequence for KIAA0635 (NM_014645.1,1920-1938).
gtgactcatctcatcagaa

SEQ ID NO: 341654 - DNA, 19 bp, Homo sapiens
  siRNA target sequence for KIAA0635 (NM_014645.1,1945-1963).
ggtgaactcacttaggata

SEQ ID NO: 341655 - DNA, 19 bp, Homo sapiens
  siRNA target sequence for KIAA0635 (NM_014645.1,1951-1969).
ctcacttaggatagtgaat

SEQ ID NO: 341656 - DNA, 19 bp, Homo sapiens
  siRNA target sequence for KIAA0635 (NM_014645.1,1953-1971).
cacttaggatagtgaatga

SEQ ID NO: 341657 - DNA, 19 bp, Homo sapiens
  siRNA target sequence for KIAA0635 (NM_014645.1,1981-1999).
gcggtcagttgatgactat

SEQ ID NO: 341658 - DNA, 19 bp, Homo sapiens
  siRNA target sequence for KIAA0635 (NM_014645.1,2000-2018).
cagcaccgactttccataa

SEQ ID NO: 341659 - DNA, 19 bp, Homo sapiens
  siRNA target sequence for KIAA0635 (NM_014645.1,2002-2020).
gcaccgactttccataaaa

SEQ ID NO: 341660 - DNA, 19 bp, Homo sapiens
  siRNA target sequence for KIAA0635 (NM_014645.1,2003-2021).
caccgactttccataaaaa

SEQ ID NO: 341661 - DNA, 19 bp, Homo sapiens
  siRNA target sequence for KIAA0635 (NM_014645.1,2037-2055).
cagcccaagcacaaattaa

SEQ ID NO: 341662 - DNA, 19 bp, Homo sapiens
  siRNA target sequence for KIAA0635 (NM_014645.1,2039-2057).
gcccaagcacaaattaaaa

SEQ ID NO: 341663 - DNA, 19 bp, Homo sapiens
  siRNA target sequence for KIAA0635 (NM_014645.1,2041-2059).
ccaagcacaaattaaaata

SEQ ID NO: 341664 - DNA, 19 bp, Homo sapiens
  siRNA target sequence for KIAA0635 (NM_014645.1,2078-2096).
gaactaaaccttaagatga

SEQ ID NO: 341665 - DNA, 19 bp, Homo sapiens
  siRNA target sequence for KIAA0635 (NM_014645.1,2081-2099).
ctaaaccttaagatgactt

SEQ ID NO: 341666 - DNA, 19 bp, Homo sapiens
  siRNA target sequence for KIAA0635 (NM_014645.1,2104-2122).
ggatgaggaggctcatgta

SEQ ID NO: 341667 - DNA, 19 bp, Homo sapiens
  siRNA target sequence for KIAA0635 (NM_014645.1,2105-2123).
gatgaggaggctcatgtaa

SEQ ID NO: 341668 - DNA, 19 bp, Homo sapiens
  siRNA target sequence for KIAA0635 (NM_014645.1,2114-2132).
gctcatgtaatgaaaaaga

SEQ ID NO: 341669 - DNA, 19 bp, Homo sapiens
  siRNA target sequence for KIAA0635 (NM_014645.1,2131-2149).
gaccattggtgttattgat

SEQ ID NO: 341670 - DNA, 19 bp, Homo sapiens
  siRNA target sequence for KIAA0635 (NM_014645.1,2133-2151).
ccattggtgttattgataa

SEQ ID NO: 341671 - DNA, 19 bp, Homo sapiens
  siRNA target sequence for KIAA0635 (NM_014645.1,2260-2278).
gatctcagagtgtgaatca

SEQ ID NO: 341672 - DNA, 19 bp, Homo sapiens
  siRNA target sequence for KIAA0635 (NM_014645.1,2263-2281).
ctcagagtgtgaatcatct

SEQ ID NO: 341673 - DNA, 19 bp, Homo sapiens
  siRNA target sequence for KIAA0635 (NM_014645.1,2280-2298).
ctgtgaaccagctgaaaga

SEQ ID NO: 341674 - DNA, 19 bp, Homo sapiens
  siRNA target sequence for KIAA0635 (NM_014645.1,2312-2330).
cgagatcgtgagataaaca

SEQ ID NO: 341675 - DNA, 19 bp, Homo sapiens
  siRNA target sequence for KIAA0635 (NM_014645.1,2344-2362).
gcttgatgcagctcacaaa

SEQ ID NO: 341676 - DNA, 19 bp, Homo sapiens
  siRNA target sequence for KIAA0635 (NM_014645.1,2359-2377).
caaagaactcgatgaagta

SEQ ID NO: 341677 - DNA, 19 bp, Homo sapiens
  siRNA target sequence for KIAA0635 (NM_014645.1,2368-2386).
cgatgaagtaggaagatct

SEQ ID NO: 341678 - DNA, 19 bp, Homo sapiens
  siRNA target sequence for KIAA0635 (NM_014645.1,2369-2387).
gatgaagtaggaagatcta

SEQ ID NO: 341679 - DNA, 19 bp, Homo sapiens
  siRNA target sequence for KIAA0635 (NM_014645.1,2385-2403).
ctagagaaatcgcttttaa

SEQ ID NO: 341680 - DNA, 19 bp, Homo sapiens
  siRNA target sequence for KIAA0635 (NM_014645.1,2388-2406).
gagaaatcgcttttaagga

SEQ ID NO: 341681 - DNA, 19 bp, Homo sapiens
  siRNA target sequence for KIAA0635 (NM_014645.1,2395-2413).
cgcttttaaggaaaacaga

SEQ ID NO: 341682 - DNA, 19 bp, Homo sapiens
  siRNA target sequence for KIAA0635 (NM_014645.1,2669-2687).
gttcgactggaacttcttt

SEQ ID NO: 341683 - DNA, 19 bp, Homo sapiens
  siRNA target sequence for KIAA0635 (NM_014645.1,2704-2722).
gagacatcttcgagaaaga

SEQ ID NO: 341684 - DNA, 19 bp, Homo sapiens
  siRNA target sequence for KIAA0635 (NM_014645.1,2721-2739).
gagtggagctattagaaaa

SEQ ID NO: 341685 - DNA, 19 bp, Homo sapiens
  siRNA target sequence for KIAA0635 (NM_014645.1,2741-2759).
gaaattcaagagcacataa

SEQ ID NO: 341686 - DNA, 19 bp, Homo sapiens
  siRNA target sequence for KIAA0635 (NM_014645.1,2805-2823).
ccatgtctcgattagaaga

SEQ ID NO: 341687 - DNA, 19 bp, Homo sapiens
  siRNA target sequence for KIAA0635 (NM_014645.1,2806-2824).
catgtctcgattagaagaa

SEQ ID NO: 341688 - DNA, 19 bp, Homo sapiens
  siRNA target sequence for KIAA0635 (NM_014645.1,2846-2864).
gagaaagcaacagtattaa

SEQ ID NO: 341689 - DNA, 19 bp, Homo sapiens
  siRNA target sequence for KIAA0635 (NM_014645.1,2858-2876).
gtattaaatgacttgtcat

SEQ ID NO: 341690 - DNA, 19 bp, Homo sapiens
  siRNA target sequence for KIAA0635 (NM_014645.1,2888-2906).
ctttgcattaaacttgatt

SEQ ID NO: 341691 - DNA, 19 bp, Homo sapiens
  siRNA target sequence for KIAA0635 (NM_014645.1,2927-2945).
cagcaattgaattcgaaaa

SEQ ID NO: 341692 - DNA, 19 bp, Homo sapiens
  siRNA target sequence for KIAA0635 (NM_014645.1,2962-2980).
ggttgtggtggaattagaa

SEQ ID NO: 341693 - DNA, 19 bp, Homo sapiens
  siRNA target sequence for KIAA0635 (NM_014645.1,2963-2981).
gttgtggtggaattagaaa

SEQ ID NO: 341694 - DNA, 19 bp, Homo sapiens
  siRNA target sequence for KIAA0635 (NM_014645.1,2968-2986).
ggtggaattagaaaatgta

SEQ ID NO: 341695 - DNA, 19 bp, Homo sapiens
  siRNA target sequence for KIAA0635 (NM_014645.1,2991-3009).
cagagtcagacctactgaa

SEQ ID NO: 341696 - DNA, 19 bp, Homo sapiens
  siRNA target sequence for KIAA0635 (NM_014645.1,3026-3044).
gagagacatacagttaaaa

SEQ ID NO: 341697 - DNA, 19 bp, Homo sapiens
  siRNA target sequence for KIAA0635 (NM_014645.1,3030-3048).
gacatacagttaaaaacct

SEQ ID NO: 341698 - DNA, 19 bp, Homo sapiens
  siRNA target sequence for KIAA0635 (NM_014645.1,3038-3056).
gttaaaaacctcgaatcat

SEQ ID NO: 341699 - DNA, 19 bp, Homo sapiens
  siRNA target sequence for KIAA0635 (NM_014645.1,3117-3135).
cagaaatccagctacttaa

SEQ ID NO: 341700 - DNA, 19 bp, Homo sapiens
  siRNA target sequence for KIAA0635 (NM_014645.1,3127-3145).
gctacttaaggagaagtta

SEQ ID NO: 341701 - DNA, 19 bp, Homo sapiens
  siRNA target sequence for KIAA0635 (NM_014645.1,3250-3268).
ctcaactgaaagatacgaa

SEQ ID NO: 341702 - DNA, 19 bp, Homo sapiens
  siRNA target sequence for KIAA0635 (NM_014645.1,3308-3326).
gctacaccaccccttagtt

SEQ ID NO: 341703 - DNA, 19 bp, Homo sapiens
  siRNA target sequence for KIAA0635 (NM_014645.1,3347-3365).
cattctcctgaacatagaa

SEQ ID NO: 341704 - DNA, 19 bp, Homo sapiens
  siRNA target sequence for DZIP3 (NM_014648.2,178-196).
ggattctctaccagatgaa

SEQ ID NO: 341705 - DNA, 19 bp, Homo sapiens
  siRNA target sequence for DZIP3 (NM_014648.2,179-197).
gattctctaccagatgaat

SEQ ID NO: 341706 - DNA, 19 bp, Homo sapiens
  siRNA target sequence for DZIP3 (NM_014648.2,243-261).
ctgagaataagctagaaaa

SEQ ID NO: 341707 - DNA, 19 bp, Homo sapiens
  siRNA target sequence for DZIP3 (NM_014648.2,267-285).
ctggtcaactgaacaaaca

SEQ ID NO: 341708 - DNA, 19 bp, Homo sapiens
  siRNA target sequence for DZIP3 (NM_014648.2,303-321).
ctgatcttgtccctgttaa

SEQ ID NO: 341709 - DNA, 19 bp, Homo sapiens
  siRNA target sequence for DZIP3 (NM_014648.2,315-333).
ctgttaacctactattaga

SEQ ID NO: 341710 - DNA, 19 bp, Homo sapiens
  siRNA target sequence for DZIP3 (NM_014648.2,374-392).
ggtgtggttcctcacatta

SEQ ID NO: 341711 - DNA, 19 bp, Homo sapiens
  siRNA target sequence for DZIP3 (NM_014648.2,375-393).
gtgtggttcctcacattaa

SEQ ID NO: 341712 - DNA, 19 bp, Homo sapiens
  siRNA target sequence for DZIP3 (NM_014648.2,380-398).
gttcctcacattaagaagt

SEQ ID NO: 341713 - DNA, 19 bp, Homo sapiens
  siRNA target sequence for DZIP3 (NM_014648.2,383-401).
cctcacattaagaagttct

SEQ ID NO: 341714 - DNA, 19 bp, Homo sapiens
  siRNA target sequence for DZIP3 (NM_014648.2,529-547).
cattcaagctggcaattat

SEQ ID NO: 341715 - DNA, 19 bp, Homo sapiens
  siRNA target sequence for DZIP3 (NM_014648.2,549-567).
ccgcacaccagattaatat

SEQ ID NO: 341716 - DNA, 19 bp, Homo sapiens
  siRNA target sequence for DZIP3 (NM_014648.2,556-574).
ccagattaatattggttat

SEQ ID NO: 341717 - DNA, 19 bp, Homo sapiens
  siRNA target sequence for DZIP3 (NM_014648.2,557-575).
cagattaatattggttatt

SEQ ID NO: 341718 - DNA, 19 bp, Homo sapiens
  siRNA target sequence for DZIP3 (NM_014648.2,737-755).
ctgcgatgtgctcaaaaga

SEQ ID NO: 341719 - DNA, 19 bp, Homo sapiens
  siRNA target sequence for DZIP3 (NM_014648.2,739-757).
gcgatgtgctcaaaagaga

SEQ ID NO: 341720 - DNA, 19 bp, Homo sapiens
  siRNA target sequence for DZIP3 (NM_014648.2,740-758).
cgatgtgctcaaaagagat

SEQ ID NO: 341721 - DNA, 19 bp, Homo sapiens
  siRNA target sequence for DZIP3 (NM_014648.2,768-786).
gactgctagaatttcataa

SEQ ID NO: 341722 - DNA, 19 bp, Homo sapiens
  siRNA target sequence for DZIP3 (NM_014648.2,916-934).
gaagcagacgatttgtagt

SEQ ID NO: 341723 - DNA, 19 bp, Homo sapiens
  siRNA target sequence for DZIP3 (NM_014648.2,922-940).
gacgatttgtagttaccta

SEQ ID NO: 341724 - DNA, 19 bp, Homo sapiens
  siRNA target sequence for DZIP3 (NM_014648.2,1003-1021).
gttaatgtgcagtaaaagt

SEQ ID NO: 341725 - DNA, 19 bp, Homo sapiens
  siRNA target sequence for DZIP3 (NM_014648.2,1072-1090).
gtatccaggtgaaaatgat

SEQ ID NO: 341726 - DNA, 19 bp, Homo sapiens
  siRNA target sequence for DZIP3 (NM_014648.2,1131-1149).
caggtgacatggtaaggat

SEQ ID NO: 341727 - DNA, 19 bp, Homo sapiens
  siRNA target sequence for DZIP3 (NM_014648.2,1160-1178).
gatgtacctggaattgtta

SEQ ID NO: 341728 - DNA, 19 bp, Homo sapiens
  siRNA target sequence for DZIP3 (NM_014648.2,1163-1181).
gtacctggaattgttaaaa

SEQ ID NO: 341729 - DNA, 19 bp, Homo sapiens
  siRNA target sequence for DZIP3 (NM_014648.2,1232-1250).
ggagcaagttatagaaagt

SEQ ID NO: 341730 - DNA, 19 bp, Homo sapiens
  siRNA target sequence for DZIP3 (NM_014648.2,1277-1295).
gatataagaccgaagatca

SEQ ID NO: 341731 - DNA, 19 bp, Homo sapiens
  siRNA target sequence for DZIP3 (NM_014648.2,1286-1304).
ccgaagatcagtttaaaat

SEQ ID NO: 341732 - DNA, 19 bp, Homo sapiens
  siRNA target sequence for DZIP3 (NM_014648.2,1325-1343).
cctatcttcaagcttgatt

SEQ ID NO: 341733 - DNA, 19 bp, Homo sapiens
  siRNA target sequence for DZIP3 (NM_014648.2,1326-1344).
ctatcttcaagcttgatta

SEQ ID NO: 341734 - DNA, 19 bp, Homo sapiens
  siRNA target sequence for DZIP3 (NM_014648.2,1330-1348).
cttcaagcttgattataat

SEQ ID NO: 341735 - DNA, 19 bp, Homo sapiens
  siRNA target sequence for DZIP3 (NM_014648.2,1391-1409).
gacattgttcgacaaatat

SEQ ID NO: 341736 - DNA, 19 bp, Homo sapiens
  siRNA target sequence for DZIP3 (NM_014648.2,1393-1411).
cattgttcgacaaatattt

SEQ ID NO: 341737 - DNA, 19 bp, Homo sapiens
  siRNA target sequence for DZIP3 (NM_014648.2,1423-1441).
gccacctcctcttttgaaa

SEQ ID NO: 341738 - DNA, 19 bp, Homo sapiens
  siRNA target sequence for DZIP3 (NM_014648.2,1447-1465).
gcttcttatacacaagaat

SEQ ID NO: 341739 - DNA, 19 bp, Homo sapiens
  siRNA target sequence for DZIP3 (NM_014648.2,1486-1504).
ccatctttggaccaatcat

SEQ ID NO: 341740 - DNA, 19 bp, Homo sapiens
  siRNA target sequence for DZIP3 (NM_014648.2,1546-1564).
ggagttaccgcaatccaaa

SEQ ID NO: 341741 - DNA, 19 bp, Homo sapiens
  siRNA target sequence for DZIP3 (NM_014648.2,1556-1574).
caatccaaacagtttgact

SEQ ID NO: 341742 - DNA, 19 bp, Homo sapiens
  siRNA target sequence for DZIP3 (NM_014648.2,1580-1598).
ctcctgttagctcttataa

SEQ ID NO: 341743 - DNA, 19 bp, Homo sapiens
  siRNA target sequence for DZIP3 (NM_014648.2,1622-1640).
cccaaaaaaggatggaata

SEQ ID NO: 341744 - DNA, 19 bp, Homo sapiens
  siRNA target sequence for DZIP3 (NM_014648.2,1649-1667).
ccatcttctgacatctcta

SEQ ID NO: 341745 - DNA, 19 bp, Homo sapiens
  siRNA target sequence for DZIP3 (NM_014648.2,1692-1710).
gcaaatacagggatatcct

SEQ ID NO: 341746 - DNA, 19 bp, Homo sapiens
  siRNA target sequence for DZIP3 (NM_014648.2,1701-1719).
gggatatcctccttagtga

SEQ ID NO: 341747 - DNA, 19 bp, Homo sapiens
  siRNA target sequence for DZIP3 (NM_014648.2,1828-1846).
ggagaatcccattgagaat

SEQ ID NO: 341748 - DNA, 19 bp, Homo sapiens
  siRNA target sequence for DZIP3 (NM_014648.2,1829-1847).
gagaatcccattgagaata

SEQ ID NO: 341749 - DNA, 19 bp, Homo sapiens
  siRNA target sequence for DZIP3 (NM_014648.2,1841-1859).
gagaatatctcccttgatt

SEQ ID NO: 341750 - DNA, 19 bp, Homo sapiens
  siRNA target sequence for DZIP3 (NM_014648.2,1884-1902).
gcataccagtaccagaaat

SEQ ID NO: 341751 - DNA, 19 bp, Homo sapiens
  siRNA target sequence for DZIP3 (NM_014648.2,1912-1930).
gatgttatcctgctatcaa

SEQ ID NO: 341752 - DNA, 19 bp, Homo sapiens
  siRNA target sequence for DZIP3 (NM_014648.2,1920-1938).
cctgctatcaacaaggaat

SEQ ID NO: 341753 - DNA, 19 bp, Homo sapiens
  siRNA target sequence for DZIP3 (NM_014648.2,1956-1974).
caggcagtcagcgtattga

SEQ ID NO: 341754 - DNA, 19 bp, Homo sapiens
  siRNA target sequence for DZIP3 (NM_014648.2,1958-1976).
ggcagtcagcgtattgaaa

SEQ ID NO: 341755 - DNA, 19 bp, Homo sapiens
  siRNA target sequence for DZIP3 (NM_014648.2,1959-1977).
gcagtcagcgtattgaaat

SEQ ID NO: 341756 - DNA, 19 bp, Homo sapiens
  siRNA target sequence for DZIP3 (NM_014648.2,1962-1980).
gtcagcgtattgaaataga

SEQ ID NO: 341757 - DNA, 19 bp, Homo sapiens
  siRNA target sequence for DZIP3 (NM_014648.2,2024-2042).
gagtacaatataaatgtga

SEQ ID NO: 341758 - DNA, 19 bp, Homo sapiens
  siRNA target sequence for DZIP3 (NM_014648.2,2046-2064).
cacaccctgagatacagtt

SEQ ID NO: 341759 - DNA, 19 bp, Homo sapiens
  siRNA target sequence for DZIP3 (NM_014648.2,2109-2127).
caacagaatctcttaaaga

SEQ ID NO: 341760 - DNA, 19 bp, Homo sapiens
  siRNA target sequence for DZIP3 (NM_014648.2,2207-2225).
gtcccatatgtggtagaaa

SEQ ID NO: 341761 - DNA, 19 bp, Homo sapiens
  siRNA target sequence for DZIP3 (NM_014648.2,2261-2279).
cactcagtcagtagactta

SEQ ID NO: 341762 - DNA, 19 bp, Homo sapiens
  siRNA target sequence for DZIP3 (NM_014648.2,2263-2281).
ctcagtcagtagacttata

SEQ ID NO: 341763 - DNA, 19 bp, Homo sapiens
  siRNA target sequence for DZIP3 (NM_014648.2,2315-2333).
gcaatggaagacaagttct

SEQ ID NO: 341764 - DNA, 19 bp, Homo sapiens
  siRNA target sequence for DZIP3 (NM_014648.2,2350-2368).
gcatattctggacatgata

SEQ ID NO: 341765 - DNA, 19 bp, Homo sapiens
  siRNA target sequence for DZIP3 (NM_014648.2,2375-2393).
ggctcagctggcaaagtaa

SEQ ID NO: 341766 - DNA, 19 bp, Homo sapiens
  siRNA target sequence for DZIP3 (NM_014648.2,2430-2448).
ctcgtcaaaggcagcttta

SEQ ID NO: 341767 - DNA, 19 bp, Homo sapiens
  siRNA target sequence for DZIP3 (NM_014648.2,2432-2450).
cgtcaaaggcagctttata

SEQ ID NO: 341768 - DNA, 19 bp, Homo sapiens
  siRNA target sequence for DZIP3 (NM_014648.2,2433-2451).
gtcaaaggcagctttataa

SEQ ID NO: 341769 - DNA, 19 bp, Homo sapiens
  siRNA target sequence for DZIP3 (NM_014648.2,2439-2457).
ggcagctttataaattgca

SEQ ID NO: 341770 - DNA, 19 bp, Homo sapiens
  siRNA target sequence for DZIP3 (NM_014648.2,2455-2473).
gcactatcagtgtgaagat

SEQ ID NO: 341771 - DNA, 19 bp, Homo sapiens
  siRNA target sequence for DZIP3 (NM_014648.2,2485-2503).
gttgagaacagtgactttt

SEQ ID NO: 341772 - DNA, 19 bp, Homo sapiens
  siRNA target sequence for DZIP3 (NM_014648.2,2499-2517).
cttttcggtggcaagaaaa

SEQ ID NO: 341773 - DNA, 19 bp, Homo sapiens
  siRNA target sequence for DZIP3 (NM_014648.2,2542-2560).
caaaattatcgcatctctt

SEQ ID NO: 341774 - DNA, 19 bp, Homo sapiens
  siRNA target sequence for DZIP3 (NM_014648.2,2574-2592).
cttttggaatcaataaggt

SEQ ID NO: 341775 - DNA, 19 bp, Homo sapiens
  siRNA target sequence for DZIP3 (NM_014648.2,2580-2598).
gaatcaataaggtttccaa

SEQ ID NO: 341776 - DNA, 19 bp, Homo sapiens
  siRNA target sequence for DZIP3 (NM_014648.2,2595-2613).
ccaaattacagcgtcaaat

SEQ ID NO: 341777 - DNA, 19 bp, Homo sapiens
  siRNA target sequence for DZIP3 (NM_014648.2,2605-2623).
gcgtcaaatccatgctaaa

SEQ ID NO: 341778 - DNA, 19 bp, Homo sapiens
  siRNA target sequence for DZIP3 (NM_014648.2,2609-2627).
caaatccatgctaaagata

SEQ ID NO: 341779 - DNA, 19 bp, Homo sapiens
  siRNA target sequence for DZIP3 (NM_014648.2,2704-2722).
cacaatgaaaacatacgta

SEQ ID NO: 341780 - DNA, 19 bp, Homo sapiens
  siRNA target sequence for DZIP3 (NM_014648.2,2725-2743).
caaactgaacgcagaaact

SEQ ID NO: 341781 - DNA, 19 bp, Homo sapiens
  siRNA target sequence for DZIP3 (NM_014648.2,2738-2756).
gaaactagcagagctttaa

SEQ ID NO: 341782 - DNA, 19 bp, Homo sapiens
  siRNA target sequence for DZIP3 (NM_014648.2,2779-2797).
gtgtcgtagggattttggt

SEQ ID NO: 341783 - DNA, 19 bp, Homo sapiens
  siRNA target sequence for DZIP3 (NM_014648.2,2872-2890).
cctagaatcacttcaatta

SEQ ID NO: 341784 - DNA, 19 bp, Homo sapiens
  siRNA target sequence for DZIP3 (NM_014648.2,2921-2939).
gtggcagatgttagaaaca

SEQ ID NO: 341785 - DNA, 19 bp, Homo sapiens
  siRNA target sequence for DZIP3 (NM_014648.2,2930-2948).
gttagaaacaagattgcat

SEQ ID NO: 341786 - DNA, 19 bp, Homo sapiens
  siRNA target sequence for DZIP3 (NM_014648.2,2950-2968).
cctcaggacacagtacaat

SEQ ID NO: 341787 - DNA, 19 bp, Homo sapiens
  siRNA target sequence for DZIP3 (NM_014648.2,2953-2971).
caggacacagtacaatgaa

SEQ ID NO: 341788 - DNA, 19 bp, Homo sapiens
  siRNA target sequence for DZIP3 (NM_014648.2,3317-3335).
caaaccagaaaggaactta

SEQ ID NO: 341789 - DNA, 19 bp, Homo sapiens
  siRNA target sequence for DZIP3 (NM_014648.2,3348-3366).
ggaaattgaaggatgctta

SEQ ID NO: 341790 - DNA, 19 bp, Homo sapiens
  siRNA target sequence for DZIP3 (NM_014648.2,3379-3397).
gtctgaactgacatttgat

SEQ ID NO: 341791 - DNA, 19 bp, Homo sapiens
  siRNA target sequence for DZIP3 (NM_014648.2,3453-3471).
gaaaatcagtgtcaaatgt

SEQ ID NO: 341792 - DNA, 19 bp, Homo sapiens
  siRNA target sequence for KIAA0040 (NM_014656.1,932-950).
ccatgtccacagagtaact

SEQ ID NO: 341793 - DNA, 19 bp, Homo sapiens
  siRNA target sequence for KIAA0040 (NM_014656.1,961-979).
ggaacaaacctcagactaa

SEQ ID NO: 341794 - DNA, 19 bp, Homo sapiens
  siRNA target sequence for KIAA0040 (NM_014656.1,1006-1024).
gaccacgtggacaattctt

SEQ ID NO: 341795 - DNA, 19 bp, Homo sapiens
  siRNA target sequence for KIAA0040 (NM_014656.1,1011-1029).
cgtggacaattcttggata

SEQ ID NO: 341796 - DNA, 19 bp, Homo sapiens
  siRNA target sequence for KIAA0040 (NM_014656.1,1015-1033).
gacaattcttggatactgt

SEQ ID NO: 341797 - DNA, 19 bp, Homo sapiens
  siRNA target sequence for KIAA0040 (NM_014656.1,1037-1055).
ggcagctatgtgtccaata

SEQ ID NO: 341798 - DNA, 19 bp, Homo sapiens
  siRNA target sequence for KIAA0040 (NM_014656.1,1042-1060).
ctatgtgtccaatagcaat

SEQ ID NO: 341799 - DNA, 19 bp, Homo sapiens
  siRNA target sequence for KIAA0040 (NM_014656.1,1102-1120).
ggcataccccacatgcaaa

SEQ ID NO: 341800 - DNA, 19 bp, Homo sapiens
  siRNA target sequence for KIAA0040 (NM_014656.1,1208-1226).
caggtacgtgggcaagtat

SEQ ID NO: 341801 - DNA, 19 bp, Homo sapiens
  siRNA target sequence for KIAA0040 (NM_014656.1,1223-1241).
gtatattctgctcatcaaa

SEQ ID NO: 341802 - DNA, 19 bp, Homo sapiens
  siRNA target sequence for KIAA0040 (NM_014656.1,1259-1277).
ctttgtgcagggaagtaca

SEQ ID NO: 341803 - DNA, 19 bp, Homo sapiens
  siRNA target sequence for KIAA0040 (NM_014656.1,1263-1281).
gtgcagggaagtacattat

SEQ ID NO: 341804 - DNA, 19 bp, Homo sapiens
  siRNA target sequence for KIAA0040 (NM_014656.1,1265-1283).
gcagggaagtacattatct

SEQ ID NO: 341805 - DNA, 19 bp, Homo sapiens
  siRNA target sequence for KIAA0040 (NM_014656.1,1266-1284).
cagggaagtacattatcta

SEQ ID NO: 341806 - DNA, 19 bp, Homo sapiens
  siRNA target sequence for KIAA0040 (NM_014656.1,1268-1286).
gggaagtacattatctaca

SEQ ID NO: 341807 - DNA, 19 bp, Homo sapiens
  siRNA target sequence for KIAA0040 (NM_014656.1,1307-1325).
gaaagccttgccagattca

SEQ ID NO: 341808 - DNA, 19 bp, Homo sapiens
  siRNA target sequence for KIAA0040 (NM_014656.1,1316-1334).
gccagattcagacacatat

SEQ ID NO: 341809 - DNA, 19 bp, Homo sapiens
  siRNA target sequence for KIAA0040 (NM_014656.1,1317-1335).
ccagattcagacacatata

SEQ ID NO: 341810 - DNA, 19 bp, Homo sapiens
  siRNA target sequence for KIAA0040 (NM_014656.1,1328-1346).
cacatatatacaatttcct

SEQ ID NO: 341811 - DNA, 19 bp, Homo sapiens
  siRNA target sequence for KIAA0040 (NM_014656.1,1361-1379).
ccatacaccatctattcca

SEQ ID NO: 341812 - DNA, 19 bp, Homo sapiens
  siRNA target sequence for KIAA0040 (NM_014656.1,1362-1380).
catacaccatctattccat

SEQ ID NO: 341813 - DNA, 19 bp, Homo sapiens
  siRNA target sequence for KIAA0406 (NM_014657.1,443-461).
cacatttgtcctttcttca

SEQ ID NO: 341814 - DNA, 19 bp, Homo sapiens
  siRNA target sequence for KIAA0406 (NM_014657.1,457-475).
cttcaacatgtgtgaaaga

SEQ ID NO: 341815 - DNA, 19 bp, Homo sapiens
  siRNA target sequence for KIAA0406 (NM_014657.1,550-568).
ctgtgtccgaggagttgaa

SEQ ID NO: 341816 - DNA, 19 bp, Homo sapiens
  siRNA target sequence for KIAA0406 (NM_014657.1,581-599).
ccagggacttagcacatta

SEQ ID NO: 341817 - DNA, 19 bp, Homo sapiens
  siRNA target sequence for KIAA0406 (NM_014657.1,582-600).
cagggacttagcacattaa

SEQ ID NO: 341818 - DNA, 19 bp, Homo sapiens
  siRNA target sequence for KIAA0406 (NM_014657.1,586-604).
gacttagcacattaatgca

SEQ ID NO: 341819 - DNA, 19 bp, Homo sapiens
  siRNA target sequence for KIAA0406 (NM_014657.1,607-625).
cagcttatggggacatcat

SEQ ID NO: 341820 - DNA, 19 bp, Homo sapiens
  siRNA target sequence for KIAA0406 (NM_014657.1,647-665).
cattctgccacgtttagga

SEQ ID NO: 341821 - DNA, 19 bp, Homo sapiens
  siRNA target sequence for KIAA0406 (NM_014657.1,653-671).
gccacgtttaggatttgct

SEQ ID NO: 341822 - DNA, 19 bp, Homo sapiens
  siRNA target sequence for KIAA0406 (NM_014657.1,664-682).
gatttgctgtatctttact

SEQ ID NO: 341823 - DNA, 19 bp, Homo sapiens
  siRNA target sequence for KIAA0406 (NM_014657.1,776-794).
ccatccaaggtcattggat

SEQ ID NO: 341824 - DNA, 19 bp, Homo sapiens
  siRNA target sequence for KIAA0406 (NM_014657.1,781-799).
caaggtcattggatgaact

SEQ ID NO: 341825 - DNA, 19 bp, Homo sapiens
  siRNA target sequence for KIAA0406 (NM_014657.1,855-873).
gcactgaccaggcttatca

SEQ ID NO: 341826 - DNA, 19 bp, Homo sapiens
  siRNA target sequence for KIAA0406 (NM_014657.1,894-912).
cacagcattgtcgtatctt

SEQ ID NO: 341827 - DNA, 19 bp, Homo sapiens
  siRNA target sequence for KIAA0406 (NM_014657.1,903-921).
gtcgtatcttccctaaaga

SEQ ID NO: 341828 - DNA, 19 bp, Homo sapiens
  siRNA target sequence for KIAA0406 (NM_014657.1,1011-1029).
gtagcagagctgatggttt

SEQ ID NO: 341829 - DNA, 19 bp, Homo sapiens
  siRNA target sequence for KIAA0406 (NM_014657.1,1057-1075).
ctggcgacaagttgactat

SEQ ID NO: 341830 - DNA, 19 bp, Homo sapiens
  siRNA target sequence for KIAA0406 (NM_014657.1,1061-1079).
cgacaagttgactatcctt

SEQ ID NO: 341831 - DNA, 19 bp, Homo sapiens
  siRNA target sequence for KIAA0406 (NM_014657.1,1062-1080).
gacaagttgactatcctta

SEQ ID NO: 341832 - DNA, 19 bp, Homo sapiens
  siRNA target sequence for KIAA0406 (NM_014657.1,1088-1106).
gataattgagtgtgtttct

SEQ ID NO: 341833 - DNA, 19 bp, Homo sapiens
  siRNA target sequence for KIAA0406 (NM_014657.1,1146-1164).
cttgtggaggaccttcttt

SEQ ID NO: 341834 - DNA, 19 bp, Homo sapiens
  siRNA target sequence for KIAA0406 (NM_014657.1,1211-1229).
ggccttagtgggactagta

SEQ ID NO: 341835 - DNA, 19 bp, Homo sapiens
  siRNA target sequence for KIAA0406 (NM_014657.1,1212-1230).
gccttagtgggactagtaa

SEQ ID NO: 341836 - DNA, 19 bp, Homo sapiens
  siRNA target sequence for KIAA0406 (NM_014657.1,1214-1232).
cttagtgggactagtaaat

SEQ ID NO: 341837 - DNA, 19 bp, Homo sapiens
  siRNA target sequence for KIAA0406 (NM_014657.1,1255-1273).
cccagtgcaataaagttct

SEQ ID NO: 341838 - DNA, 19 bp, Homo sapiens
  siRNA target sequence for KIAA0406 (NM_014657.1,1403-1421).
ctctactctttccttgtta

SEQ ID NO: 341839 - DNA, 19 bp, Homo sapiens
  siRNA target sequence for KIAA0406 (NM_014657.1,1414-1432).
ccttgttacttggttatct

SEQ ID NO: 341840 - DNA, 19 bp, Homo sapiens
  siRNA target sequence for KIAA0406 (NM_014657.1,1696-1714).
gttattatgggaatcttta

SEQ ID NO: 341841 - DNA, 19 bp, Homo sapiens
  siRNA target sequence for KIAA0406 (NM_014657.1,1736-1754).
ggaactttaccatcaatct

SEQ ID NO: 341842 - DNA, 19 bp, Homo sapiens
  siRNA target sequence for KIAA0406 (NM_014657.1,1770-1788).
caagctgccatgatcctta

SEQ ID NO: 341843 - DNA, 19 bp, Homo sapiens
  siRNA target sequence for KIAA0406 (NM_014657.1,1903-1921).
caagtcaagaaaattggta

SEQ ID NO: 341844 - DNA, 19 bp, Homo sapiens
  siRNA target sequence for KIAA0406 (NM_014657.1,2072-2090).
cagtaacatctggcaaata

SEQ ID NO: 341845 - DNA, 19 bp, Homo sapiens
  siRNA target sequence for KIAA0406 (NM_014657.1,2156-2174).
gatgtcagccctttatcca

SEQ ID NO: 341846 - DNA, 19 bp, Homo sapiens
  siRNA target sequence for KIAA0406 (NM_014657.1,2191-2209).
gagaccaaaccctactcat

SEQ ID NO: 341847 - DNA, 19 bp, Homo sapiens
  siRNA target sequence for KIAA0406 (NM_014657.1,2193-2211).
gaccaaaccctactcatta

SEQ ID NO: 341848 - DNA, 19 bp, Homo sapiens
  siRNA target sequence for KIAA0406 (NM_014657.1,2195-2213).
ccaaaccctactcattagt

SEQ ID NO: 341849 - DNA, 19 bp, Homo sapiens
  siRNA target sequence for KIAA0406 (NM_014657.1,2270-2288).
gcagcacctgatcaatcaa

SEQ ID NO: 341850 - DNA, 19 bp, Homo sapiens
  siRNA target sequence for KIAA0406 (NM_014657.1,2271-2289).
cagcacctgatcaatcaaa

SEQ ID NO: 341851 - DNA, 19 bp, Homo sapiens
  siRNA target sequence for KIAA0406 (NM_014657.1,2273-2291).
gcacctgatcaatcaaaat

SEQ ID NO: 341852 - DNA, 19 bp, Homo sapiens
  siRNA target sequence for KIAA0406 (NM_014657.1,2274-2292).
cacctgatcaatcaaaatt

SEQ ID NO: 341853 - DNA, 19 bp, Homo sapiens
  siRNA target sequence for KIAA0406 (NM_014657.1,2304-2322).
gtgaatgggatctctttaa

SEQ ID NO: 341854 - DNA, 19 bp, Homo sapiens
  siRNA target sequence for KIAA0406 (NM_014657.1,2435-2453).
ggccaccctggaccaattt

SEQ ID NO: 341855 - DNA, 19 bp, Homo sapiens
  siRNA target sequence for KIAA0406 (NM_014657.1,2440-2458).
ccctggaccaattttacga

SEQ ID NO: 341856 - DNA, 19 bp, Homo sapiens
  siRNA target sequence for KIAA0406 (NM_014657.1,2442-2460).
ctggaccaattttacgata

SEQ ID NO: 341857 - DNA, 19 bp, Homo sapiens
  siRNA target sequence for KIAA0406 (NM_014657.1,2445-2463).
gaccaattttacgataaga

SEQ ID NO: 341858 - DNA, 19 bp, Homo sapiens
  siRNA target sequence for KIAA0406 (NM_014657.1,2447-2465).
ccaattttacgataagaga

SEQ ID NO: 341859 - DNA, 19 bp, Homo sapiens
  siRNA target sequence for KIAA0406 (NM_014657.1,2519-2537).
gttcccagacacaggtaat

SEQ ID NO: 341860 - DNA, 19 bp, Homo sapiens
  siRNA target sequence for KIAA0406 (NM_014657.1,2522-2540).
cccagacacaggtaatctt

SEQ ID NO: 341861 - DNA, 19 bp, Homo sapiens
  siRNA target sequence for KIAA0406 (NM_014657.1,2544-2562).
cacctccaagagcaaagtt

SEQ ID NO: 341862 - DNA, 19 bp, Homo sapiens
  siRNA target sequence for KIAA0406 (NM_014657.1,2626-2644).
ctgaagacatcgaacagtt

SEQ ID NO: 341863 - DNA, 19 bp, Homo sapiens
  siRNA target sequence for KIAA0406 (NM_014657.1,2628-2646).
gaagacatcgaacagtttt

SEQ ID NO: 341864 - DNA, 19 bp, Homo sapiens
  siRNA target sequence for KIAA0406 (NM_014657.1,2673-2691).
gtggcagatggaaatgtct

SEQ ID NO: 341865 - DNA, 19 bp, Homo sapiens
  siRNA target sequence for KIAA0406 (NM_014657.1,2814-2832).
cgctgcatccacttgttgt

SEQ ID NO: 341866 - DNA, 19 bp, Homo sapiens
  siRNA target sequence for KIAA0406 (NM_014657.1,2823-2841).
cacttgttgtcagataaaa

SEQ ID NO: 341867 - DNA, 19 bp, Homo sapiens
  siRNA target sequence for KIAA0406 (NM_014657.1,2825-2843).
cttgttgtcagataaaaat

SEQ ID NO: 341868 - DNA, 19 bp, Homo sapiens
  siRNA target sequence for KIAA0406 (NM_014657.1,2892-2910).
gttcttcagtcccacaaaa

SEQ ID NO: 341869 - DNA, 19 bp, Homo sapiens
  siRNA target sequence for KIAA0406 (NM_014657.1,2994-3012).
gccttcaaggttttacgta

SEQ ID NO: 341870 - DNA, 19 bp, Homo sapiens
  siRNA target sequence for KIAA0406 (NM_014657.1,3023-3041).
caagtgtggtgactttctt

SEQ ID NO: 341871 - DNA, 19 bp, Homo sapiens
  siRNA target sequence for KIAA0406 (NM_014657.1,3046-3064).
gccggttctgcaaagatgt

SEQ ID NO: 341872 - DNA, 19 bp, Homo sapiens
  siRNA target sequence for KIAA0406 (NM_014657.1,3152-3170).
gttgcagctggctgtctta

SEQ ID NO: 341873 - DNA, 19 bp, Homo sapiens
  siRNA target sequence for KIAA0406 (NM_014657.1,3207-3225).
ggtgagggtgacctgaata

SEQ ID NO: 341874 - DNA, 19 bp, Homo sapiens
  siRNA target sequence for KIAA0406 (NM_014657.1,3208-3226).
gtgagggtgacctgaataa

SEQ ID NO: 341875 - DNA, 19 bp, Homo sapiens
  siRNA target sequence for KIAA0406 (NM_014657.1,3230-3248).
ggctgatgcctgcttgatt

SEQ ID NO: 341876 - DNA, 19 bp, Homo sapiens
  siRNA target sequence for KIAA0406 (NM_014657.1,3258-3276).
gtcaaacagcccgtgaaat

SEQ ID NO: 341877 - DNA, 19 bp, Homo sapiens
  siRNA target sequence for KIAA0406 (NM_014657.1,3260-3278).
caaacagcccgtgaaatta

SEQ ID NO: 341878 - DNA, 19 bp, Homo sapiens
  siRNA target sequence for KIAA0406 (NM_014657.1,3295-3313).
gcgtcttcctccacttgat

SEQ ID NO: 341879 - DNA, 19 bp, Homo sapiens
  siRNA target sequence for KIAA0140 (NM_014661.1,249-267).
ggagctgactccattgcat

SEQ ID NO: 341880 - DNA, 19 bp, Homo sapiens
  siRNA target sequence for KIAA0140 (NM_014661.1,308-326).
gagtcaaggacctacactt

SEQ ID NO: 341881 - DNA, 19 bp, Homo sapiens
  siRNA target sequence for KIAA0140 (NM_014661.1,315-333).
ggacctacacttttctctt

SEQ ID NO: 341882 - DNA, 19 bp, Homo sapiens
  siRNA target sequence for KIAA0140 (NM_014661.1,334-352).
gtggaattatggaaaatga

SEQ ID NO: 341883 - DNA, 19 bp, Homo sapiens
  siRNA target sequence for KIAA0140 (NM_014661.1,360-378).
cgagacctggacaggaaat

SEQ ID NO: 341884 - DNA, 19 bp, Homo sapiens
  siRNA target sequence for KIAA0140 (NM_014661.1,415-433).
gggaatgcctgcctgaaaa

SEQ ID NO: 341885 - DNA, 19 bp, Homo sapiens
  siRNA target sequence for KIAA0140 (NM_014661.1,626-644).
gactcccgtggaaaagaga

SEQ ID NO: 341886 - DNA, 19 bp, Homo sapiens
  siRNA target sequence for KIAA0140 (NM_014661.1,664-682).
gcgtccagcgctattccaa

SEQ ID NO: 341887 - DNA, 19 bp, Homo sapiens
  siRNA target sequence for KIAA0140 (NM_014661.1,1024-1042).
gtgtccttaacgacaagaa

SEQ ID NO: 341888 - DNA, 19 bp, Homo sapiens
  siRNA target sequence for KIAA0140 (NM_014661.1,1037-1055).
caagaaggtcggtgttaaa

SEQ ID NO: 341889 - DNA, 19 bp, Homo sapiens
  siRNA target sequence for N4BP1 (NM_014664.1,423-441).
gcacagcgccaaggaatat

SEQ ID NO: 341890 - DNA, 19 bp, Homo sapiens
  siRNA target sequence for N4BP1 (NM_014664.1,424-442).
cacagcgccaaggaatata

SEQ ID NO: 341891 - DNA, 19 bp, Homo sapiens
  siRNA target sequence for N4BP1 (NM_014664.1,621-639).
catggctaggagtcacatt

SEQ ID NO: 341892 - DNA, 19 bp, Homo sapiens
  siRNA target sequence for N4BP1 (NM_014664.1,733-751).
gcccatgcagacaattaca

SEQ ID NO: 341893 - DNA, 19 bp, Homo sapiens
  siRNA target sequence for N4BP1 (NM_014664.1,735-753).
ccatgcagacaattacaca

SEQ ID NO: 341894 - DNA, 19 bp, Homo sapiens
  siRNA target sequence for N4BP1 (NM_014664.1,736-754).
catgcagacaattacacaa

SEQ ID NO: 341895 - DNA, 19 bp, Homo sapiens
  siRNA target sequence for N4BP1 (NM_014664.1,806-824).
cacaaggtgaggagaatct

SEQ ID NO: 341896 - DNA, 19 bp, Homo sapiens
  siRNA target sequence for N4BP1 (NM_014664.1,858-876).
gagagattctcaacaaaca

SEQ ID NO: 341897 - DNA, 19 bp, Homo sapiens
  siRNA target sequence for N4BP1 (NM_014664.1,895-913).
gccacagggctgaatattt

SEQ ID NO: 341898 - DNA, 19 bp, Homo sapiens
  siRNA target sequence for N4BP1 (NM_014664.1,897-915).
cacagggctgaatatttct

SEQ ID NO: 341899 - DNA, 19 bp, Homo sapiens
  siRNA target sequence for N4BP1 (NM_014664.1,1007-1025).
gctcaccagatgtgctttt

SEQ ID NO: 341900 - DNA, 19 bp, Homo sapiens
  siRNA target sequence for N4BP1 (NM_014664.1,1008-1026).
ctcaccagatgtgcttttt

SEQ ID NO: 341901 - DNA, 19 bp, Homo sapiens
  siRNA target sequence for N4BP1 (NM_014664.1,1010-1028).
caccagatgtgctttttga

SEQ ID NO: 341902 - DNA, 19 bp, Homo sapiens
  siRNA target sequence for N4BP1 (NM_014664.1,1018-1036).
gtgctttttgatccaataa

SEQ ID NO: 341903 - DNA, 19 bp, Homo sapiens
  siRNA target sequence for N4BP1 (NM_014664.1,1201-1219).
gctgacctatctgattctt

SEQ ID NO: 341904 - DNA, 19 bp, Homo sapiens
  siRNA target sequence for N4BP1 (NM_014664.1,1259-1277).
ctactgaggaaatggaata

SEQ ID NO: 341905 - DNA, 19 bp, Homo sapiens
  siRNA target sequence for N4BP1 (NM_014664.1,1311-1329).
ctactcccaagaaattgtt

SEQ ID NO: 341906 - DNA, 19 bp, Homo sapiens
  siRNA target sequence for N4BP1 (NM_014664.1,1354-1372).
ccatctactgaaccattat

SEQ ID NO: 341907 - DNA, 19 bp, Homo sapiens
  siRNA target sequence for N4BP1 (NM_014664.1,1358-1376).
ctactgaaccattattgct

SEQ ID NO: 341908 - DNA, 19 bp, Homo sapiens
  siRNA target sequence for N4BP1 (NM_014664.1,1443-1461).
gtatccagagaccaacaaa

SEQ ID NO: 341909 - DNA, 19 bp, Homo sapiens
  siRNA target sequence for N4BP1 (NM_014664.1,1530-1548).
ggctcacacacagcaaaat

SEQ ID NO: 341910 - DNA, 19 bp, Homo sapiens
  siRNA target sequence for N4BP1 (NM_014664.1,1578-1596).
caaagtggaagctaaacca

SEQ ID NO: 341911 - DNA, 19 bp, Homo sapiens
  siRNA target sequence for N4BP1 (NM_014664.1,1628-1646).
gaacagtgccaatagaaca

SEQ ID NO: 341912 - DNA, 19 bp, Homo sapiens
  siRNA target sequence for N4BP1 (NM_014664.1,1661-1679).
ggggttcaaaccagaacta

SEQ ID NO: 341913 - DNA, 19 bp, Homo sapiens
  siRNA target sequence for N4BP1 (NM_014664.1,1663-1681).
ggttcaaaccagaactaca

SEQ ID NO: 341914 - DNA, 19 bp, Homo sapiens
  siRNA target sequence for N4BP1 (NM_014664.1,1664-1682).
gttcaaaccagaactacat

SEQ ID NO: 341915 - DNA, 19 bp, Homo sapiens
  siRNA target sequence for N4BP1 (NM_014664.1,1674-1692).
gaactacatttgtaacaca

SEQ ID NO: 341916 - DNA, 19 bp, Homo sapiens
  siRNA target sequence for N4BP1 (NM_014664.1,1736-1754).
gtcccaaagaagtcaattt

SEQ ID NO: 341917 - DNA, 19 bp, Homo sapiens
  siRNA target sequence for N4BP1 (NM_014664.1,1828-1846).
gaacccttgcttccaaata

SEQ ID NO: 341918 - DNA, 19 bp, Homo sapiens
  siRNA target sequence for N4BP1 (NM_014664.1,1870-1888).
cgtttaggatgttgtagtt

SEQ ID NO: 341919 - DNA, 19 bp, Homo sapiens
  siRNA target sequence for N4BP1 (NM_014664.1,1894-1912).
cattctaagccaaattgct

SEQ ID NO: 341920 - DNA, 19 bp, Homo sapiens
  siRNA target sequence for N4BP1 (NM_014664.1,1947-1965).
gttaccttcggttactgat

SEQ ID NO: 341921 - DNA, 19 bp, Homo sapiens
  siRNA target sequence for N4BP1 (NM_014664.1,1971-1989).
gtcggcaggaccttctgat

SEQ ID NO: 341922 - DNA, 19 bp, Homo sapiens
  siRNA target sequence for N4BP1 (NM_014664.1,1979-1997).
gaccttctgatcatattga

SEQ ID NO: 341923 - DNA, 19 bp, Homo sapiens
  siRNA target sequence for N4BP1 (NM_014664.1,1981-1999).
ccttctgatcatattgatt

SEQ ID NO: 341924 - DNA, 19 bp, Homo sapiens
  siRNA target sequence for N4BP1 (NM_014664.1,1990-2008).
catattgattcctcagtta

SEQ ID NO: 341925 - DNA, 19 bp, Homo sapiens
  siRNA target sequence for N4BP1 (NM_014664.1,2044-2062).
ccctacaagctggaattaa

SEQ ID NO: 341926 - DNA, 19 bp, Homo sapiens
  siRNA target sequence for N4BP1 (NM_014664.1,2078-2096).
gaacggatttgaaacacat

SEQ ID NO: 341927 - DNA, 19 bp, Homo sapiens
  siRNA target sequence for N4BP1 (NM_014664.1,2081-2099).
cggatttgaaacacattgt

SEQ ID NO: 341928 - DNA, 19 bp, Homo sapiens
  siRNA target sequence for N4BP1 (NM_014664.1,2107-2125).
gggagcaatgttgcaatta

SEQ ID NO: 341929 - DNA, 19 bp, Homo sapiens
  siRNA target sequence for N4BP1 (NM_014664.1,2126-2144).
cccatggtctgaaaaagtt

SEQ ID NO: 341930 - DNA, 19 bp, Homo sapiens
  siRNA target sequence for N4BP1 (NM_014664.1,2128-2146).
catggtctgaaaaagttct

SEQ ID NO: 341931 - DNA, 19 bp, Homo sapiens
  siRNA target sequence for N4BP1 (NM_014664.1,2150-2168).
cttgtcgtggaattgcaat

SEQ ID NO: 341932 - DNA, 19 bp, Homo sapiens
  siRNA target sequence for N4BP1 (NM_014664.1,2164-2182).
gcaattgcagttgaatatt

SEQ ID NO: 341933 - DNA, 19 bp, Homo sapiens
  siRNA target sequence for N4BP1 (NM_014664.1,2231-2249).
gaacaaggcgtgatcctaa

SEQ ID NO: 341934 - DNA, 19 bp, Homo sapiens
  siRNA target sequence for N4BP1 (NM_014664.1,2234-2252).
caaggcgtgatcctaatgt

SEQ ID NO: 341935 - DNA, 19 bp, Homo sapiens
  siRNA target sequence for N4BP1 (NM_014664.1,2278-2296).
ctccaggagctcggaatat

SEQ ID NO: 341936 - DNA, 19 bp, Homo sapiens
  siRNA target sequence for N4BP1 (NM_014664.1,2281-2299).
caggagctcggaatattat

SEQ ID NO: 341937 - DNA, 19 bp, Homo sapiens
  siRNA target sequence for N4BP1 (NM_014664.1,2283-2301).
ggagctcggaatattatct

SEQ ID NO: 341938 - DNA, 19 bp, Homo sapiens
  siRNA target sequence for N4BP1 (NM_014664.1,2284-2302).
gagctcggaatattatctt

SEQ ID NO: 341939 - DNA, 19 bp, Homo sapiens
  siRNA target sequence for N4BP1 (NM_014664.1,2286-2304).
gctcggaatattatcttta

SEQ ID NO: 341940 - DNA, 19 bp, Homo sapiens
  siRNA target sequence for N4BP1 (NM_014664.1,2289-2307).
cggaatattatctttaact

SEQ ID NO: 341941 - DNA, 19 bp, Homo sapiens
  siRNA target sequence for N4BP1 (NM_014664.1,2362-2380).
ctacacttagcggacaaaa

SEQ ID NO: 341942 - DNA, 19 bp, Homo sapiens
  siRNA target sequence for N4BP1 (NM_014664.1,2434-2452).
gtctcttggagagaaatta

SEQ ID NO: 341943 - DNA, 19 bp, Homo sapiens
  siRNA target sequence for N4BP1 (NM_014664.1,2436-2454).
ctcttggagagaaattatt

SEQ ID NO: 341944 - DNA, 19 bp, Homo sapiens
  siRNA target sequence for N4BP1 (NM_014664.1,2477-2495).
cgttcgtgggggacatatt

SEQ ID NO: 341945 - DNA, 19 bp, Homo sapiens
  siRNA target sequence for N4BP1 (NM_014664.1,2478-2496).
gttcgtgggggacatattt

SEQ ID NO: 341946 - DNA, 19 bp, Homo sapiens
  siRNA target sequence for N4BP1 (NM_014664.1,2484-2502).
gggggacatatttatggtt

SEQ ID NO: 341947 - DNA, 19 bp, Homo sapiens
  siRNA target sequence for N4BP1 (NM_014664.1,2522-2540).
gaagtggacctcgattaga

SEQ ID NO: 341948 - DNA, 19 bp, Homo sapiens
  siRNA target sequence for N4BP1 (NM_014664.1,2531-2549).
ctcgattagaggagtttct

SEQ ID NO: 341949 - DNA, 19 bp, Homo sapiens
  siRNA target sequence for N4BP1 (NM_014664.1,2553-2571).
gaaggaagtctgtcttaga

SEQ ID NO: 341950 - DNA, 19 bp, Homo sapiens
  siRNA target sequence for N4BP1 (NM_014664.1,2557-2575).
gaagtctgtcttagagata

SEQ ID NO: 341951 - DNA, 19 bp, Homo sapiens
  siRNA target sequence for N4BP1 (NM_014664.1,2872-2890).
gtggcccacccatacatga

SEQ ID NO: 341952 - DNA, 19 bp, Homo sapiens
  siRNA target sequence for N4BP1 (NM_014664.1,2874-2892).
ggcccacccatacatgaaa

SEQ ID NO: 341953 - DNA, 19 bp, Homo sapiens
  siRNA target sequence for N4BP1 (NM_014664.1,2876-2894).
cccacccatacatgaaaga

SEQ ID NO: 341954 - DNA, 19 bp, Homo sapiens
  siRNA target sequence for N4BP1 (NM_014664.1,2877-2895).
ccacccatacatgaaagat

SEQ ID NO: 341955 - DNA, 19 bp, Homo sapiens
  siRNA target sequence for N4BP1 (NM_014664.1,2880-2898).
cccatacatgaaagatcta

SEQ ID NO: 341956 - DNA, 19 bp, Homo sapiens
  siRNA target sequence for KIAA0014 (NM_014665.1,150-168).
cacacgcttgtgttcttga

SEQ ID NO: 341957 - DNA, 19 bp, Homo sapiens
  siRNA target sequence for KIAA0014 (NM_014665.1,572-590).
cgtagctcgcacatgcatt

SEQ ID NO: 341958 - DNA, 19 bp, Homo sapiens
  siRNA target sequence for ENTH (NM_014666.2,226-244).
caaagccaccaatgttgtt

SEQ ID NO: 341959 - DNA, 19 bp, Homo sapiens
  siRNA target sequence for ENTH (NM_014666.2,232-250).
caccaatgttgttatgaat

SEQ ID NO: 341960 - DNA, 19 bp, Homo sapiens
  siRNA target sequence for ENTH (NM_014666.2,332-350).
gccaaggctacatttatgt

SEQ ID NO: 341961 - DNA, 19 bp, Homo sapiens
  siRNA target sequence for ENTH (NM_014666.2,333-351).
ccaaggctacatttatgta

SEQ ID NO: 341962 - DNA, 19 bp, Homo sapiens
  siRNA target sequence for ENTH (NM_014666.2,342-360).
catttatgtatgaacaatt

SEQ ID NO: 341963 - DNA, 19 bp, Homo sapiens
  siRNA target sequence for ENTH (NM_014666.2,365-383).
gaacttatgaacatgcttt

SEQ ID NO: 341964 - DNA, 19 bp, Homo sapiens
  siRNA target sequence for ENTH (NM_014666.2,379-397).
gctttggtcacgaatgtta

SEQ ID NO: 341965 - DNA, 19 bp, Homo sapiens
  siRNA target sequence for ENTH (NM_014666.2,380-398).
ctttggtcacgaatgttaa

SEQ ID NO: 341966 - DNA, 19 bp, Homo sapiens
  siRNA target sequence for ENTH (NM_014666.2,384-402).
ggtcacgaatgttaaaaga

SEQ ID NO: 341967 - DNA, 19 bp, Homo sapiens
  siRNA target sequence for ENTH (NM_014666.2,387-405).
cacgaatgttaaaagacaa

SEQ ID NO: 341968 - DNA, 19 bp, Homo sapiens
  siRNA target sequence for ENTH (NM_014666.2,443-461).
ctcctagcttacctcataa

SEQ ID NO: 341969 - DNA, 19 bp, Homo sapiens
  siRNA target sequence for ENTH (NM_014666.2,446-464).
ctagcttacctcataagga

SEQ ID NO: 341970 - DNA, 19 bp, Homo sapiens
  siRNA target sequence for ENTH (NM_014666.2,467-485).
ggatcagagcgtgttgtta

SEQ ID NO: 341971 - DNA, 19 bp, Homo sapiens
  siRNA target sequence for ENTH (NM_014666.2,489-507).
gtgccagagaacacattta

SEQ ID NO: 341972 - DNA, 19 bp, Homo sapiens
  siRNA target sequence for ENTH (NM_014666.2,556-574).
ggatcaaggtataaatatt

SEQ ID NO: 341973 - DNA, 19 bp, Homo sapiens
  siRNA target sequence for ENTH (NM_014666.2,689-707).
gttggaggattcagataca

SEQ ID NO: 341974 - DNA, 19 bp, Homo sapiens
  siRNA target sequence for ENTH (NM_014666.2,700-718).
cagatacagtgaaagatat

SEQ ID NO: 341975 - DNA, 19 bp, Homo sapiens
  siRNA target sequence for ENTH (NM_014666.2,719-737).
gatcctgagcccaaatcaa

SEQ ID NO: 341976 - DNA, 19 bp, Homo sapiens
  siRNA target sequence for ENTH (NM_014666.2,746-764).
gaggagtgggataaaaaca

SEQ ID NO: 341977 - DNA, 19 bp, Homo sapiens
  siRNA target sequence for ENTH (NM_014666.2,841-859).
caagttccggaggaaagat

SEQ ID NO: 341978 - DNA, 19 bp, Homo sapiens
  siRNA target sequence for ENTH (NM_014666.2,844-862).
gttccggaggaaagataga

SEQ ID NO: 341979 - DNA, 19 bp, Homo sapiens
  siRNA target sequence for ENTH (NM_014666.2,924-942).
ctcccaaaggtgaattcaa

SEQ ID NO: 341980 - DNA, 19 bp, Homo sapiens
  siRNA target sequence for ENTH (NM_014666.2,957-975).
ctgtgacgacaaagcatat

SEQ ID NO: 341981 - DNA, 19 bp, Homo sapiens
  siRNA target sequence for ENTH (NM_014666.2,961-979).
gacgacaaagcatattcat

SEQ ID NO: 341982 - DNA, 19 bp, Homo sapiens
  siRNA target sequence for ENTH (NM_014666.2,1015-1033).
caagcgcacagcaaatcct

SEQ ID NO: 341983 - DNA, 19 bp, Homo sapiens
  siRNA target sequence for ENTH (NM_014666.2,1032-1050).
cttccaaaaccattgatct

SEQ ID NO: 341984 - DNA, 19 bp, Homo sapiens
  siRNA target sequence for ENTH (NM_014666.2,1139-1157).
gtgcctagcagcaagtcat

SEQ ID NO: 341985 - DNA, 19 bp, Homo sapiens
  siRNA target sequence for ENTH (NM_014666.2,1222-1240).
cggaggatttgctgacttt

SEQ ID NO: 341986 - DNA, 19 bp, Homo sapiens
  siRNA target sequence for ENTH (NM_014666.2,1380-1398).
cacagccagcggtagaact

SEQ ID NO: 341987 - DNA, 19 bp, Homo sapiens
  siRNA target sequence for ENTH (NM_014666.2,1384-1402).
gccagcggtagaacttgtt

SEQ ID NO: 341988 - DNA, 19 bp, Homo sapiens
  siRNA target sequence for ENTH (NM_014666.2,1481-1499).
caggcaaccatgacatctt

SEQ ID NO: 341989 - DNA, 19 bp, Homo sapiens
  siRNA target sequence for ENTH (NM_014666.2,1494-1512).
catcttcccagagtatgaa

SEQ ID NO: 341990 - DNA, 19 bp, Homo sapiens
  siRNA target sequence for ENTH (NM_014666.2,1623-1641).
ctgaccccagtgtaaacat

SEQ ID NO: 341991 - DNA, 19 bp, Homo sapiens
  siRNA target sequence for ENTH (NM_014666.2,1639-1657).
catcagcctagacaactta

SEQ ID NO: 341992 - DNA, 19 bp, Homo sapiens
  siRNA target sequence for ENTH (NM_014666.2,1642-1660).
cagcctagacaacttacta

SEQ ID NO: 341993 - DNA, 19 bp, Homo sapiens
  siRNA target sequence for ENTH (NM_014666.2,1692-1710).
catcactgaatacaatgat

SEQ ID NO: 341994 - DNA, 19 bp, Homo sapiens
  siRNA target sequence for ENTH (NM_014666.2,1806-1824).
cccaaactaatgctttgat

SEQ ID NO: 341995 - DNA, 19 bp, Homo sapiens
  siRNA target sequence for ENTH (NM_014666.2,1807-1825).
ccaaactaatgctttgata

SEQ ID NO: 341996 - DNA, 19 bp, Homo sapiens
  siRNA target sequence for ENTH (NM_014666.2,1879-1897).
ggcccctcttggaaatact

SEQ ID NO: 341997 - DNA, 19 bp, Homo sapiens
  siRNA target sequence for KIAA0095 (NM_014669.1,260-278).
ggtctcggggacttgacat

SEQ ID NO: 341998 - DNA, 19 bp, Homo sapiens
  siRNA target sequence for KIAA0095 (NM_014669.1,523-541).
gaagacgcccttgacttta

SEQ ID NO: 341999 - DNA, 19 bp, Homo sapiens
  siRNA target sequence for KIAA0095 (NM_014669.1,587-605).
gtcgaagctctctggataa

SEQ ID NO: 342000 - DNA, 19 bp, Homo sapiens
  siRNA target sequence for KIAA0095 (NM_014669.1,589-607).
cgaagctctctggataaca

SEQ ID NO: 342001 - DNA, 19 bp, Homo sapiens
  siRNA target sequence for KIAA0095 (NM_014669.1,639-657).
ctataatgagaaaattgta

SEQ ID NO: 342002 - DNA, 19 bp, Homo sapiens
  siRNA target sequence for KIAA0095 (NM_014669.1,779-797).
caacggatgccctgaagaa

SEQ ID NO: 342003 - DNA, 19 bp, Homo sapiens
  siRNA target sequence for KIAA0095 (NM_014669.1,845-863).
cgtaccttgagcagagtta

SEQ ID NO: 342004 - DNA, 19 bp, Homo sapiens
  siRNA target sequence for KIAA0095 (NM_014669.1,846-864).
gtaccttgagcagagttat

SEQ ID NO: 342005 - DNA, 19 bp, Homo sapiens
  siRNA target sequence for KIAA0095 (NM_014669.1,873-891).
cacccttgtgactgtcttt

SEQ ID NO: 342006 - DNA, 19 bp, Homo sapiens
  siRNA target sequence for KIAA0095 (NM_014669.1,921-939).
ggtgcctgggacttaccaa

SEQ ID NO: 342007 - DNA, 19 bp, Homo sapiens
  siRNA target sequence for KIAA0095 (NM_014669.1,926-944).
ctgggacttaccaattggt

SEQ ID NO: 342008 - DNA, 19 bp, Homo sapiens
  siRNA target sequence for KIAA0095 (NM_014669.1,1015-1033).
cctgtgtgggcgctaattt

SEQ ID NO: 342009 - DNA, 19 bp, Homo sapiens
  siRNA target sequence for KIAA0095 (NM_014669.1,1016-1034).
ctgtgtgggcgctaattta

SEQ ID NO: 342010 - DNA, 19 bp, Homo sapiens
  siRNA target sequence for KIAA0095 (NM_014669.1,1018-1036).
gtgtgggcgctaatttact

SEQ ID NO: 342011 - DNA, 19 bp, Homo sapiens
  siRNA target sequence for KIAA0095 (NM_014669.1,1065-1083).
cgcttcacaggtagttaat

SEQ ID NO: 342012 - DNA, 19 bp, Homo sapiens
  siRNA target sequence for KIAA0095 (NM_014669.1,1095-1113).
ccagctgggagagtttaaa

SEQ ID NO: 342013 - DNA, 19 bp, Homo sapiens
  siRNA target sequence for KIAA0095 (NM_014669.1,1197-1215).
ggccctcaggaacaataca

SEQ ID NO: 342014 - DNA, 19 bp, Homo sapiens
  siRNA target sequence for KIAA0095 (NM_014669.1,1665-1683).
gctgtacacccggaagttt

SEQ ID NO: 342015 - DNA, 19 bp, Homo sapiens
  siRNA target sequence for KIAA0095 (NM_014669.1,1700-1718).
gggaggccctccagtactt

SEQ ID NO: 342016 - DNA, 19 bp, Homo sapiens
  siRNA target sequence for KIAA0095 (NM_014669.1,1730-1748).
gggatgagaaagatagtca

SEQ ID NO: 342017 - DNA, 19 bp, Homo sapiens
  siRNA target sequence for KIAA0095 (NM_014669.1,1772-1790).
gtgtgagtgagcttgtgat

SEQ ID NO: 342018 - DNA, 19 bp, Homo sapiens
  siRNA target sequence for KIAA0095 (NM_014669.1,1776-1794).
gagtgagcttgtgattgaa

SEQ ID NO: 342019 - DNA, 19 bp, Homo sapiens
  siRNA target sequence for KIAA0095 (NM_014669.1,1792-1810).
gaaagccgagagttcgata

SEQ ID NO: 342020 - DNA, 19 bp, Homo sapiens
  siRNA target sequence for KIAA0095 (NM_014669.1,1796-1814).
gccgagagttcgatatgat

SEQ ID NO: 342021 - DNA, 19 bp, Homo sapiens
  siRNA target sequence for KIAA0095 (NM_014669.1,1797-1815).
ccgagagttcgatatgatt

SEQ ID NO: 342022 - DNA, 19 bp, Homo sapiens
  siRNA target sequence for KIAA0095 (NM_014669.1,1799-1817).
gagagttcgatatgattct

SEQ ID NO: 342023 - DNA, 19 bp, Homo sapiens
  siRNA target sequence for KIAA0095 (NM_014669.1,1844-1862).
gaaagcctggagtcataga

SEQ ID NO: 342024 - DNA, 19 bp, Homo sapiens
  siRNA target sequence for KIAA0095 (NM_014669.1,1849-1867).
cctggagtcatagataagt

SEQ ID NO: 342025 - DNA, 19 bp, Homo sapiens
  siRNA target sequence for KIAA0095 (NM_014669.1,1852-1870).
ggagtcatagataagttta

SEQ ID NO: 342026 - DNA, 19 bp, Homo sapiens
  siRNA target sequence for KIAA0095 (NM_014669.1,1857-1875).
catagataagtttactagt

SEQ ID NO: 342027 - DNA, 19 bp, Homo sapiens
  siRNA target sequence for KIAA0095 (NM_014669.1,1874-1892).
gtgacacaaagcctattat

SEQ ID NO: 342028 - DNA, 19 bp, Homo sapiens
  siRNA target sequence for KIAA0095 (NM_014669.1,1880-1898).
caaagcctattatcaacaa

SEQ ID NO: 342029 - DNA, 19 bp, Homo sapiens
  siRNA target sequence for KIAA0095 (NM_014669.1,1884-1902).
gcctattatcaacaaagtt

SEQ ID NO: 342030 - DNA, 19 bp, Homo sapiens
  siRNA target sequence for KIAA0095 (NM_014669.1,1950-1968).
gtatgaccttgccaagaat

SEQ ID NO: 342031 - DNA, 19 bp, Homo sapiens
  siRNA target sequence for KIAA0095 (NM_014669.1,2095-2113).
caaggaataagcgcaaata

SEQ ID NO: 342032 - DNA, 19 bp, Homo sapiens
  siRNA target sequence for KIAA0095 (NM_014669.1,2121-2139).
ggactccacgttctatctt

SEQ ID NO: 342033 - DNA, 19 bp, Homo sapiens
  siRNA target sequence for KIAA0095 (NM_014669.1,2129-2147).
cgttctatcttcttttgga

SEQ ID NO: 342034 - DNA, 19 bp, Homo sapiens
  siRNA target sequence for KIAA0095 (NM_014669.1,2156-2174).
ccttttttgacgagtatca

SEQ ID NO: 342035 - DNA, 19 bp, Homo sapiens
  siRNA target sequence for KIAA0095 (NM_014669.1,2157-2175).
cttttttgacgagtatcat

SEQ ID NO: 342036 - DNA, 19 bp, Homo sapiens
  siRNA target sequence for KIAA0095 (NM_014669.1,2169-2187).
gtatcatagtggtcatatt

SEQ ID NO: 342037 - DNA, 19 bp, Homo sapiens
  siRNA target sequence for KIAA0095 (NM_014669.1,2228-2246).
ccctgaatcaggaaagtgt

SEQ ID NO: 342038 - DNA, 19 bp, Homo sapiens
  siRNA target sequence for KIAA0095 (NM_014669.1,2318-2336).
ccaccatgaacatcttgtt

SEQ ID NO: 342039 - DNA, 19 bp, Homo sapiens
  siRNA target sequence for KIAA0095 (NM_014669.1,2428-2446).
caagcccgcactctgatta

SEQ ID NO: 342040 - DNA, 19 bp, Homo sapiens
  siRNA target sequence for KIAA0095 (NM_014669.1,2431-2449).
gcccgcactctgattacct

SEQ ID NO: 342041 - DNA, 19 bp, Homo sapiens
  siRNA target sequence for KIAA0095 (NM_014669.1,2432-2450).
cccgcactctgattacctt

SEQ ID NO: 342042 - DNA, 19 bp, Homo sapiens
  siRNA target sequence for KIAA0095 (NM_014669.1,2433-2451).
ccgcactctgattaccttt

SEQ ID NO: 342043 - DNA, 19 bp, Homo sapiens
  siRNA target sequence for KIAA0095 (NM_014669.1,2505-2523).
gatggaggtcctcatgaat

SEQ ID NO: 342044 - DNA, 19 bp, Homo sapiens
  siRNA target sequence for KIAA0391 (NM_014672.1,368-386).
ctatttgtttggtattcga

SEQ ID NO: 342045 - DNA, 19 bp, Homo sapiens
  siRNA target sequence for KIAA0391 (NM_014672.1,374-392).
gtttggtattcgaagcttt

SEQ ID NO: 342046 - DNA, 19 bp, Homo sapiens
  siRNA target sequence for KIAA0391 (NM_014672.1,384-402).
cgaagctttccgaagcttt

SEQ ID NO: 342047 - DNA, 19 bp, Homo sapiens
  siRNA target sequence for KIAA0391 (NM_014672.1,479-497).
gaaccagcagaggttgttt

SEQ ID NO: 342048 - DNA, 19 bp, Homo sapiens
  siRNA target sequence for KIAA0391 (NM_014672.1,526-544).
ccaaagcaacgaatctgat

SEQ ID NO: 342049 - DNA, 19 bp, Homo sapiens
  siRNA target sequence for KIAA0391 (NM_014672.1,527-545).
caaagcaacgaatctgatt

SEQ ID NO: 342050 - DNA, 19 bp, Homo sapiens
  siRNA target sequence for KIAA0391 (NM_014672.1,542-560).
gattgccaaggccagatat

SEQ ID NO: 342051 - DNA, 19 bp, Homo sapiens
  siRNA target sequence for KIAA0391 (NM_014672.1,632-650).
ggagagatcacagatgaat

SEQ ID NO: 342052 - DNA, 19 bp, Homo sapiens
  siRNA target sequence for KIAA0391 (NM_014672.1,633-651).
gagagatcacagatgaatt

SEQ ID NO: 342053 - DNA, 19 bp, Homo sapiens
  siRNA target sequence for KIAA0391 (NM_014672.1,701-719).
cccaacacaacctttgaat

SEQ ID NO: 342054 - DNA, 19 bp, Homo sapiens
  siRNA target sequence for KIAA0391 (NM_014672.1,702-720).
ccaacacaacctttgaatt

SEQ ID NO: 342055 - DNA, 19 bp, Homo sapiens
  siRNA target sequence for KIAA0391 (NM_014672.1,706-724).
cacaacctttgaattcaga

SEQ ID NO: 342056 - DNA, 19 bp, Homo sapiens
  siRNA target sequence for KIAA0391 (NM_014672.1,721-739).
cagaggagtgggataaact

SEQ ID NO: 342057 - DNA, 19 bp, Homo sapiens
  siRNA target sequence for KIAA0391 (NM_014672.1,723-741).
gaggagtgggataaactta

SEQ ID NO: 342058 - DNA, 19 bp, Homo sapiens
  siRNA target sequence for KIAA0391 (NM_014672.1,847-865).
catgggtagcagccaaaaa

SEQ ID NO: 342059 - DNA, 19 bp, Homo sapiens
  siRNA target sequence for KIAA0391 (NM_014672.1,870-888).
ggtattgtaagttacgatt

SEQ ID NO: 342060 - DNA, 19 bp, Homo sapiens
  siRNA target sequence for KIAA0391 (NM_014672.1,871-889).
gtattgtaagttacgattt

SEQ ID NO: 342061 - DNA, 19 bp, Homo sapiens
  siRNA target sequence for KIAA0391 (NM_014672.1,884-902).
cgatttactggtcaagtat

SEQ ID NO: 342062 - DNA, 19 bp, Homo sapiens
  siRNA target sequence for KIAA0391 (NM_014672.1,929-947).
gacatctgaagttattgat

SEQ ID NO: 342063 - DNA, 19 bp, Homo sapiens
  siRNA target sequence for KIAA0391 (NM_014672.1,1012-1030).
ggggattgatccattcaga

SEQ ID NO: 342064 - DNA, 19 bp, Homo sapiens
  siRNA target sequence for KIAA0391 (NM_014672.1,1122-1140).
ctccttcatcaagatgtaa

SEQ ID NO: 342065 - DNA, 19 bp, Homo sapiens
  siRNA target sequence for KIAA0391 (NM_014672.1,1142-1160).
cacagcttggaatttatat

SEQ ID NO: 342066 - DNA, 19 bp, Homo sapiens
  siRNA target sequence for KIAA0391 (NM_014672.1,1163-1181).
ggaattgctaggtcatgat

SEQ ID NO: 342067 - DNA, 19 bp, Homo sapiens
  siRNA target sequence for KIAA0391 (NM_014672.1,1164-1182).
gaattgctaggtcatgata

SEQ ID NO: 342068 - DNA, 19 bp, Homo sapiens
  siRNA target sequence for KIAA0391 (NM_014672.1,1169-1187).
gctaggtcatgatattgtt

SEQ ID NO: 342069 - DNA, 19 bp, Homo sapiens
  siRNA target sequence for KIAA0391 (NM_014672.1,1188-1206).
cctatgttggaaactttaa

SEQ ID NO: 342070 - DNA, 19 bp, Homo sapiens
  siRNA target sequence for KIAA0391 (NM_014672.1,1193-1211).
gttggaaactttaaaagct

SEQ ID NO: 342071 - DNA, 19 bp, Homo sapiens
  siRNA target sequence for KIAA0391 (NM_014672.1,1238-1256).
ggatgataactattcaaat

SEQ ID NO: 342072 - DNA, 19 bp, Homo sapiens
  siRNA target sequence for KIAA0391 (NM_014672.1,1260-1278).
ctactagatattctttcat

SEQ ID NO: 342073 - DNA, 19 bp, Homo sapiens
  siRNA target sequence for KIAA0391 (NM_014672.1,1310-1328).
gtcatttgcacacagtata

SEQ ID NO: 342074 - DNA, 19 bp, Homo sapiens
  siRNA target sequence for KIAA0391 (NM_014672.1,1357-1375).
cgggctgtggaaaaaccat

SEQ ID NO: 342075 - DNA, 19 bp, Homo sapiens
  siRNA target sequence for KIAA0391 (NM_014672.1,1366-1384).
gaaaaaccatagagtctat

SEQ ID NO: 342076 - DNA, 19 bp, Homo sapiens
  siRNA target sequence for KIAA0391 (NM_014672.1,1413-1431).
cttaagggaaaaatcatga

SEQ ID NO: 342077 - DNA, 19 bp, Homo sapiens
  siRNA target sequence for KIAA0391 (NM_014672.1,1427-1445).
catgagggatgtgatagat

SEQ ID NO: 342078 - DNA, 19 bp, Homo sapiens
  siRNA target sequence for KIAA0391 (NM_014672.1,1447-1465).
gaggtgaccagtacagaaa

SEQ ID NO: 342079 - DNA, 19 bp, Homo sapiens
  siRNA target sequence for KIAA0391 (NM_014672.1,1449-1467).
ggtgaccagtacagaaaga

SEQ ID NO: 342080 - DNA, 19 bp, Homo sapiens
  siRNA target sequence for KIAA0391 (NM_014672.1,1452-1470).
gaccagtacagaaagacaa

SEQ ID NO: 342081 - DNA, 19 bp, Homo sapiens
  siRNA target sequence for KIAA0391 (NM_014672.1,1468-1486).
caacacctcaggaacttaa

SEQ ID NO: 342082 - DNA, 19 bp, Homo sapiens
  siRNA target sequence for KIAA0391 (NM_014672.1,1479-1497).
gaacttaagagatttgaga

SEQ ID NO: 342083 - DNA, 19 bp, Homo sapiens
  siRNA target sequence for KIAA0391 (NM_014672.1,1510-1528).
ctcgtcctccttttgatgt

SEQ ID NO: 342084 - DNA, 19 bp, Homo sapiens
  siRNA target sequence for KIAA0391 (NM_014672.1,1513-1531).
gtcctccttttgatgttgt

SEQ ID NO: 342085 - DNA, 19 bp, Homo sapiens
  siRNA target sequence for KIAA0391 (NM_014672.1,1542-1560).
ctcaatgttgccaaaatgt

SEQ ID NO: 342086 - DNA, 19 bp, Homo sapiens
  siRNA target sequence for KIAA0391 (NM_014672.1,1548-1566).
gttgccaaaatgtttccta

SEQ ID NO: 342087 - DNA, 19 bp, Homo sapiens
  siRNA target sequence for KIAA0391 (NM_014672.1,1573-1591).
gtgaatctcaacttctctt

SEQ ID NO: 342088 - DNA, 19 bp, Homo sapiens
  siRNA target sequence for KIAA0391 (NM_014672.1,1641-1659).
ggccggaagcacatgctaa

SEQ ID NO: 342089 - DNA, 19 bp, Homo sapiens
  siRNA target sequence for KIAA0391 (NM_014672.1,1851-1869).
caacgcctgttttttaagt

SEQ ID NO: 342090 - DNA, 19 bp, Homo sapiens
  siRNA target sequence for KIAA0391 (NM_014672.1,1889-1907).
ggcaattgtaaataggttt

SEQ ID NO: 342091 - DNA, 19 bp, Homo sapiens
  siRNA target sequence for KIAA0391 (NM_014672.1,1904-1922).
gtttccaggatcaaaacta

SEQ ID NO: 342092 - DNA, 19 bp, Homo sapiens
  siRNA target sequence for KIAA0391 (NM_014672.1,1976-1994).
gtggcacataccatatgat

SEQ ID NO: 342093 - DNA, 19 bp, Homo sapiens
  siRNA target sequence for KIAA0391 (NM_014672.1,2018-2036).
ctgtgaagtaccaaccaaa

SEQ ID NO: 342094 - DNA, 19 bp, Homo sapiens
  siRNA target sequence for KIAA0685 (NM_014678.2,431-449).
gtgacgctgcaggagttaa

SEQ ID NO: 342095 - DNA, 19 bp, Homo sapiens
  siRNA target sequence for KIAA0685 (NM_014678.2,580-598).
gaaggtccgcttcaaatat

SEQ ID NO: 342096 - DNA, 19 bp, Homo sapiens
  siRNA target sequence for KIAA0685 (NM_014678.2,583-601).
ggtccgcttcaaatatcca

SEQ ID NO: 342097 - DNA, 19 bp, Homo sapiens
  siRNA target sequence for KIAA0685 (NM_014678.2,584-602).
gtccgcttcaaatatccaa

SEQ ID NO: 342098 - DNA, 19 bp, Homo sapiens
  siRNA target sequence for KIAA0685 (NM_014678.2,700-718).
ccatgagccgcctctcaat

SEQ ID NO: 342099 - DNA, 19 bp, Homo sapiens
  siRNA target sequence for KIAA0685 (NM_014678.2,719-737).
cctctgctcgccagttttt

SEQ ID NO: 342100 - DNA, 19 bp, Homo sapiens
  siRNA target sequence for KIAA0685 (NM_014678.2,720-738).
ctctgctcgccagtttttt

SEQ ID NO: 342101 - DNA, 19 bp, Homo sapiens
  siRNA target sequence for KIAA0685 (NM_014678.2,722-740).
ctgctcgccagttttttca

SEQ ID NO: 342102 - DNA, 19 bp, Homo sapiens
  siRNA target sequence for KIAA0685 (NM_014678.2,745-763).
gaccattggcaatctcatt

SEQ ID NO: 342103 - DNA, 19 bp, Homo sapiens
  siRNA target sequence for KIAA0685 (NM_014678.2,774-792).
ccgaacaggtgattacgtt

SEQ ID NO: 342104 - DNA, 19 bp, Homo sapiens
  siRNA target sequence for KIAA0685 (NM_014678.2,775-793).
cgaacaggtgattacgttt

SEQ ID NO: 342105 - DNA, 19 bp, Homo sapiens
  siRNA target sequence for KIAA0685 (NM_014678.2,776-794).
gaacaggtgattacgtttt

SEQ ID NO: 342106 - DNA, 19 bp, Homo sapiens
  siRNA target sequence for KIAA0685 (NM_014678.2,779-797).
caggtgattacgtttttga

SEQ ID NO: 342107 - DNA, 19 bp, Homo sapiens
  siRNA target sequence for KIAA0685 (NM_014678.2,782-800).
gtgattacgtttttgaaga

SEQ ID NO: 342108 - DNA, 19 bp, Homo sapiens
  siRNA target sequence for KIAA0685 (NM_014678.2,983-1001).
gataggcagtcaaatgctt

SEQ ID NO: 342109 - DNA, 19 bp, Homo sapiens
  siRNA target sequence for KIAA0685 (NM_014678.2,1006-1024).
gactctctgtgacatagtt

SEQ ID NO: 342110 - DNA, 19 bp, Homo sapiens
  siRNA target sequence for KIAA0685 (NM_014678.2,1493-1511).
gacttgttctttaagtaca

SEQ ID NO: 342111 - DNA, 19 bp, Homo sapiens
  siRNA target sequence for KIAA0685 (NM_014678.2,1534-1552).
ccaagtggaactatgcata

SEQ ID NO: 342112 - DNA, 19 bp, Homo sapiens
  siRNA target sequence for KIAA0685 (NM_014678.2,1674-1692).
gcctccctgacaacacaat

SEQ ID NO: 342113 - DNA, 19 bp, Homo sapiens
  siRNA target sequence for KIAA0685 (NM_014678.2,2046-2064).
ccgaccaggacgacaacat

SEQ ID NO: 342114 - DNA, 19 bp, Homo sapiens
  siRNA target sequence for KIAA0685 (NM_014678.2,2422-2440).
gtggacggcagtgtttgat

SEQ ID NO: 342115 - DNA, 19 bp, Homo sapiens
  siRNA target sequence for KIAA0685 (NM_014678.2,2438-2456).
gatgagccagcgaactcaa

SEQ ID NO: 342116 - DNA, 19 bp, Homo sapiens
  siRNA target sequence for KIAA0685 (NM_014678.2,2876-2894).
gctgacagccggctgttaa

SEQ ID NO: 342117 - DNA, 19 bp, Homo sapiens
  siRNA target sequence for KIAA0685 (NM_014678.2,3093-3111).
ccctggggacagtgacaaa

SEQ ID NO: 342118 - DNA, 19 bp, Homo sapiens
  siRNA target sequence for KIAA0092 (NM_014679.1,134-152).
catggttcggcattcttca

SEQ ID NO: 342119 - DNA, 19 bp, Homo sapiens
  siRNA target sequence for KIAA0092 (NM_014679.1,137-155).
ggttcggcattcttcatct

SEQ ID NO: 342120 - DNA, 19 bp, Homo sapiens
  siRNA target sequence for KIAA0092 (NM_014679.1,151-169).
catctccatatgtagtata

SEQ ID NO: 342121 - DNA, 19 bp, Homo sapiens
  siRNA target sequence for KIAA0092 (NM_014679.1,175-193).
cggataagcctttccttaa

SEQ ID NO: 342122 - DNA, 19 bp, Homo sapiens
  siRNA target sequence for KIAA0092 (NM_014679.1,212-230).
cccaagtaagcctacactt

SEQ ID NO: 342123 - DNA, 19 bp, Homo sapiens
  siRNA target sequence for KIAA0092 (NM_014679.1,314-332).
gattcaggcagaagaaagt

SEQ ID NO: 342124 - DNA, 19 bp, Homo sapiens
  siRNA target sequence for KIAA0092 (NM_014679.1,421-439).
caaagcacaatcaagaact

SEQ ID NO: 342125 - DNA, 19 bp, Homo sapiens
  siRNA target sequence for KIAA0092 (NM_014679.1,535-553).
ggacatctgtcttagagaa

SEQ ID NO: 342126 - DNA, 19 bp, Homo sapiens
  siRNA target sequence for KIAA0092 (NM_014679.1,571-589).
gagaacgacaacatgatca

SEQ ID NO: 342127 - DNA, 19 bp, Homo sapiens
  siRNA target sequence for KIAA0092 (NM_014679.1,573-591).
gaacgacaacatgatcaaa

SEQ ID NO: 342128 - DNA, 19 bp, Homo sapiens
  siRNA target sequence for KIAA0092 (NM_014679.1,600-618).
cagagccaacttgaaaaat

SEQ ID NO: 342129 - DNA, 19 bp, Homo sapiens
  siRNA target sequence for KIAA0092 (NM_014679.1,724-742).
ggaaacgcatgcaagctaa

SEQ ID NO: 342130 - DNA, 19 bp, Homo sapiens
  siRNA target sequence for KIAA0092 (NM_014679.1,755-773).
gcagactggtctagaaaca

SEQ ID NO: 342131 - DNA, 19 bp, Homo sapiens
  siRNA target sequence for KIAA0092 (NM_014679.1,758-776).
gactggtctagaaacaaat

SEQ ID NO: 342132 - DNA, 19 bp, Homo sapiens
  siRNA target sequence for KIAA0092 (NM_014679.1,880-898).
ccgtggtagccaatgttca

SEQ ID NO: 342133 - DNA, 19 bp, Homo sapiens
  siRNA target sequence for KIAA0092 (NM_014679.1,889-907).
ccaatgttcagcttgtctt

SEQ ID NO: 342134 - DNA, 19 bp, Homo sapiens
  siRNA target sequence for KIAA0092 (NM_014679.1,900-918).
cttgtcttgcatctaatga

SEQ ID NO: 342135 - DNA, 19 bp, Homo sapiens
  siRNA target sequence for KIAA0092 (NM_014679.1,940-958).
gcaatgatcgagtcatcaa

SEQ ID NO: 342136 - DNA, 19 bp, Homo sapiens
  siRNA target sequence for KIAA0092 (NM_014679.1,945-963).
gatcgagtcatcaacagta

SEQ ID NO: 342137 - DNA, 19 bp, Homo sapiens
  siRNA target sequence for KIAA0092 (NM_014679.1,951-969).
gtcatcaacagtattcctt

SEQ ID NO: 342138 - DNA, 19 bp, Homo sapiens
  siRNA target sequence for KIAA0092 (NM_014679.1,993-1011).
ggtggtaaaagtaagaagt

SEQ ID NO: 342139 - DNA, 19 bp, Homo sapiens
  siRNA target sequence for KIAA0092 (NM_014679.1,1027-1045).
cctcctccaacggtattaa

SEQ ID NO: 342140 - DNA, 19 bp, Homo sapiens
  siRNA target sequence for KIAA0092 (NM_014679.1,1030-1048).
cctccaacggtattaatga

SEQ ID NO: 342141 - DNA, 19 bp, Homo sapiens
  siRNA target sequence for KIAA0092 (NM_014679.1,1057-1075).
cagaagtcttacagacttt

SEQ ID NO: 342142 - DNA, 19 bp, Homo sapiens
  siRNA target sequence for KIAA0092 (NM_014679.1,1080-1098).
gatgaatttgggcaaatga

SEQ ID NO: 342143 - DNA, 19 bp, Homo sapiens
  siRNA target sequence for KIAA0092 (NM_014679.1,1090-1108).
ggcaaatgagctttgatca

SEQ ID NO: 342144 - DNA, 19 bp, Homo sapiens
  siRNA target sequence for KIAA0092 (NM_014679.1,1109-1127).
ccagcagcttgcaaaactt

SEQ ID NO: 342145 - DNA, 19 bp, Homo sapiens
  siRNA target sequence for KIAA0092 (NM_014679.1,1110-1128).
cagcagcttgcaaaactta

SEQ ID NO: 342146 - DNA, 19 bp, Homo sapiens
  siRNA target sequence for KIAA0092 (NM_014679.1,1138-1156).
cgccaaccgttgaactgaa

SEQ ID NO: 342147 - DNA, 19 bp, Homo sapiens
  siRNA target sequence for KIAA0092 (NM_014679.1,1139-1157).
gccaaccgttgaactgaaa

SEQ ID NO: 342148 - DNA, 19 bp, Homo sapiens
  siRNA target sequence for KIAA0092 (NM_014679.1,1141-1159).
caaccgttgaactgaaaga

SEQ ID NO: 342149 - DNA, 19 bp, Homo sapiens
  siRNA target sequence for KIAA0092 (NM_014679.1,1222-1240).
ctaaagttcgaaaatacca

SEQ ID NO: 342150 - DNA, 19 bp, Homo sapiens
  siRNA target sequence for KIAA0092 (NM_014679.1,1328-1346).
cagccgttctggaatcaca

SEQ ID NO: 342151 - DNA, 19 bp, Homo sapiens
  siRNA target sequence for KIAA0092 (NM_014679.1,1449-1467).
caaagcagtagtttgtgtt

SEQ ID NO: 342152 - DNA, 19 bp, Homo sapiens
  siRNA target sequence for KIAA0355 (NM_014686.1,852-870).
gtgcccaggacagtaaaat

SEQ ID NO: 342153 - DNA, 19 bp, Homo sapiens
  siRNA target sequence for KIAA0355 (NM_014686.1,1155-1173).
ggaactctcactactcaaa

SEQ ID NO: 342154 - DNA, 19 bp, Homo sapiens
  siRNA target sequence for KIAA0355 (NM_014686.1,1227-1245).
ggctgacctcggccataaa

SEQ ID NO: 342155 - DNA, 19 bp, Homo sapiens
  siRNA target sequence for KIAA0355 (NM_014686.1,1255-1273).
cgccaagatgctaatggaa

SEQ ID NO: 342156 - DNA, 19 bp, Homo sapiens
  siRNA target sequence for KIAA0355 (NM_014686.1,1278-1296).
gtgctggggctgcaaattt

SEQ ID NO: 342157 - DNA, 19 bp, Homo sapiens
  siRNA target sequence for KIAA0355 (NM_014686.1,1280-1298).
gctggggctgcaaatttta

SEQ ID NO: 342158 - DNA, 19 bp, Homo sapiens
  siRNA target sequence for KIAA0355 (NM_014686.1,1367-1385).
gtccatttccagtttttga

SEQ ID NO: 342159 - DNA, 19 bp, Homo sapiens
  siRNA target sequence for KIAA0355 (NM_014686.1,1489-1507).
gggccacacacctgaagta

SEQ ID NO: 342160 - DNA, 19 bp, Homo sapiens
  siRNA target sequence for KIAA0355 (NM_014686.1,1541-1559).
gaggcgacatctagactaa

SEQ ID NO: 342161 - DNA, 19 bp, Homo sapiens
  siRNA target sequence for KIAA0355 (NM_014686.1,1543-1561).
ggcgacatctagactaaga

SEQ ID NO: 342162 - DNA, 19 bp, Homo sapiens
  siRNA target sequence for KIAA0355 (NM_014686.1,1545-1563).
cgacatctagactaagaga

SEQ ID NO: 342163 - DNA, 19 bp, Homo sapiens
  siRNA target sequence for KIAA0355 (NM_014686.1,1546-1564).
gacatctagactaagagaa

SEQ ID NO: 342164 - DNA, 19 bp, Homo sapiens
  siRNA target sequence for KIAA0355 (NM_014686.1,1672-1690).
cagtgctttgcaagcatat

SEQ ID NO: 342165 - DNA, 19 bp, Homo sapiens
  siRNA target sequence for KIAA0355 (NM_014686.1,1674-1692).
gtgctttgcaagcatataa

SEQ ID NO: 342166 - DNA, 19 bp, Homo sapiens
  siRNA target sequence for KIAA0355 (NM_014686.1,1676-1694).
gctttgcaagcatataaga

SEQ ID NO: 342167 - DNA, 19 bp, Homo sapiens
  siRNA target sequence for KIAA0355 (NM_014686.1,1677-1695).
ctttgcaagcatataagat

SEQ ID NO: 342168 - DNA, 19 bp, Homo sapiens
  siRNA target sequence for KIAA0355 (NM_014686.1,1713-1731).
gacactgtgaatatgcaat

SEQ ID NO: 342169 - DNA, 19 bp, Homo sapiens
  siRNA target sequence for KIAA0355 (NM_014686.1,1750-1768).
gaatccaaaggcgattgaa

SEQ ID NO: 342170 - DNA, 19 bp, Homo sapiens
  siRNA target sequence for KIAA0355 (NM_014686.1,1862-1880).
gtccctgtgcagataggat

SEQ ID NO: 342171 - DNA, 19 bp, Homo sapiens
  siRNA target sequence for KIAA0355 (NM_014686.1,1889-1907).
ctgaagggcgtctccttta

SEQ ID NO: 342172 - DNA, 19 bp, Homo sapiens
  siRNA target sequence for KIAA0355 (NM_014686.1,1934-1952).
cttaagacgcatacaatgt

SEQ ID NO: 342173 - DNA, 19 bp, Homo sapiens
  siRNA target sequence for KIAA0355 (NM_014686.1,1966-1984).
ggaggcaggctgctataat

SEQ ID NO: 342174 - DNA, 19 bp, Homo sapiens
  siRNA target sequence for KIAA0355 (NM_014686.1,2107-2125).
ggttgacacagcacagatt

SEQ ID NO: 342175 - DNA, 19 bp, Homo sapiens
  siRNA target sequence for KIAA0355 (NM_014686.1,2169-2187).
ctagaatcgtggttcaagt

SEQ ID NO: 342176 - DNA, 19 bp, Homo sapiens
  siRNA target sequence for KIAA0355 (NM_014686.1,2405-2423).
ggaaatggaaacaaatctt

SEQ ID NO: 342177 - DNA, 19 bp, Homo sapiens
  siRNA target sequence for KIAA0355 (NM_014686.1,2462-2480).
cggttcaccaagaaagctt

SEQ ID NO: 342178 - DNA, 19 bp, Homo sapiens
  siRNA target sequence for KIAA0355 (NM_014686.1,2494-2512).
cagcagcagcacaaattat

SEQ ID NO: 342179 - DNA, 19 bp, Homo sapiens
  siRNA target sequence for KIAA0355 (NM_014686.1,2499-2517).
gcagcacaaattattccat

SEQ ID NO: 342180 - DNA, 19 bp, Homo sapiens
  siRNA target sequence for KIAA0355 (NM_014686.1,2526-2544).
ccccttccaaaaacatctt

SEQ ID NO: 342181 - DNA, 19 bp, Homo sapiens
  siRNA target sequence for KIAA0355 (NM_014686.1,2550-2568).
ctggatgttccgaagagaa

SEQ ID NO: 342182 - DNA, 19 bp, Homo sapiens
  siRNA target sequence for KIAA0355 (NM_014686.1,2571-2589).
ccaaaatgcctggcaatat

SEQ ID NO: 342183 - DNA, 19 bp, Homo sapiens
  siRNA target sequence for KIAA0355 (NM_014686.1,2578-2596).
gcctggcaatattgataca

SEQ ID NO: 342184 - DNA, 19 bp, Homo sapiens
  siRNA target sequence for KIAA0355 (NM_014686.1,2579-2597).
cctggcaatattgatacaa

SEQ ID NO: 342185 - DNA, 19 bp, Homo sapiens
  siRNA target sequence for KIAA0355 (NM_014686.1,2584-2602).
caatattgatacaaggtta

SEQ ID NO: 342186 - DNA, 19 bp, Homo sapiens
  siRNA target sequence for KIAA0355 (NM_014686.1,2657-2675).
gctcagaattccagtaata

SEQ ID NO: 342187 - DNA, 19 bp, Homo sapiens
  siRNA target sequence for KIAA0355 (NM_014686.1,2738-2756).
gatgagaagggtatgaact

SEQ ID NO: 342188 - DNA, 19 bp, Homo sapiens
  siRNA target sequence for KIAA0355 (NM_014686.1,2776-2794).
gcaagaggtgatagatttt

SEQ ID NO: 342189 - DNA, 19 bp, Homo sapiens
  siRNA target sequence for KIAA0355 (NM_014686.1,3020-3038).
caacctcaagtccaatact

SEQ ID NO: 342190 - DNA, 19 bp, Homo sapiens
  siRNA target sequence for KIAA0355 (NM_014686.1,3169-3187).
gtggcctggcatatctgat

SEQ ID NO: 342191 - DNA, 19 bp, Homo sapiens
  siRNA target sequence for KIAA0355 (NM_014686.1,3222-3240).
gcagctatatggataatgt

SEQ ID NO: 342192 - DNA, 19 bp, Homo sapiens
  siRNA target sequence for KIAA0355 (NM_014686.1,3225-3243).
gctatatggataatgtgat

SEQ ID NO: 342193 - DNA, 19 bp, Homo sapiens
  siRNA target sequence for KIAA0355 (NM_014686.1,3265-3283).
gccgcagggacctagaaat

SEQ ID NO: 342194 - DNA, 19 bp, Homo sapiens
  siRNA target sequence for KIAA0355 (NM_014686.1,3266-3284).
ccgcagggacctagaaata

SEQ ID NO: 342195 - DNA, 19 bp, Homo sapiens
  siRNA target sequence for KIAA0355 (NM_014686.1,3267-3285).
cgcagggacctagaaataa

SEQ ID NO: 342196 - DNA, 19 bp, Homo sapiens
  siRNA target sequence for KIAA0355 (NM_014686.1,3294-3312).
ccaaccgtgaccaaagtga

SEQ ID NO: 342197 - DNA, 19 bp, Homo sapiens
  siRNA target sequence for KIAA0355 (NM_014686.1,3295-3313).
caaccgtgaccaaagtgat

SEQ ID NO: 342198 - DNA, 19 bp, Homo sapiens
  siRNA target sequence for KIAA0773 (NM_014690.2,1761-1779).
gagcaaactcgaactgatt

SEQ ID NO: 342199 - DNA, 19 bp, Homo sapiens
  siRNA target sequence for KIAA0773 (NM_014690.2,1808-1826).
ggaggacaccacttccatt

SEQ ID NO: 342200 - DNA, 19 bp, Homo sapiens
  siRNA target sequence for KIAA0773 (NM_014690.2,1822-1840).
ccattcttccgaagcttaa

SEQ ID NO: 342201 - DNA, 19 bp, Homo sapiens
  siRNA target sequence for KIAA0773 (NM_014690.2,2066-2084).
cgagaaggaggcacgtttt

SEQ ID NO: 342202 - DNA, 19 bp, Homo sapiens
  siRNA target sequence for KIAA0773 (NM_014690.2,2094-2112).
gtcatggagcagtttgcta

SEQ ID NO: 342203 - DNA, 19 bp, Homo sapiens
  siRNA target sequence for KIAA0773 (NM_014690.2,2280-2298).
gtgtcccagggtatgtact

SEQ ID NO: 342204 - DNA, 19 bp, Homo sapiens
  siRNA target sequence for KIAA0773 (NM_014690.2,2580-2598).
cgggacctggagtcacttt

SEQ ID NO: 342205 - DNA, 19 bp, Homo sapiens
  siRNA target sequence for KIAA0773 (NM_014690.2,2688-2706).
gaaggcgaggccaacaact

SEQ ID NO: 342206 - DNA, 19 bp, Homo sapiens
  siRNA target sequence for AQR (NM_014691.1,292-310).
cctacggtgtcccaaatca

SEQ ID NO: 342207 - DNA, 19 bp, Homo sapiens
  siRNA target sequence for AQR (NM_014691.1,293-311).
ctacggtgtcccaaatcaa

SEQ ID NO: 342208 - DNA, 19 bp, Homo sapiens
  siRNA target sequence for AQR (NM_014691.1,326-344).
cccagttagcatgtaaata

SEQ ID NO: 342209 - DNA, 19 bp, Homo sapiens
  siRNA target sequence for AQR (NM_014691.1,328-346).
cagttagcatgtaaatact

SEQ ID NO: 342210 - DNA, 19 bp, Homo sapiens
  siRNA target sequence for AQR (NM_014691.1,371-389).
caccttttgatataaaggt

SEQ ID NO: 342211 - DNA, 19 bp, Homo sapiens
  siRNA target sequence for AQR (NM_014691.1,418-436).
gtcaaatcaaggtttgcta

SEQ ID NO: 342212 - DNA, 19 bp, Homo sapiens
  siRNA target sequence for AQR (NM_014691.1,434-452).
ctattagaaagataatgct

SEQ ID NO: 342213 - DNA, 19 bp, Homo sapiens
  siRNA target sequence for AQR (NM_014691.1,465-483).
ccagtatcttgaaaattat

SEQ ID NO: 342214 - DNA, 19 bp, Homo sapiens
  siRNA target sequence for AQR (NM_014691.1,512-530).
ctagcaaggcctatttaat

SEQ ID NO: 342215 - DNA, 19 bp, Homo sapiens
  siRNA target sequence for AQR (NM_014691.1,516-534).
caaggcctatttaatgtca

SEQ ID NO: 342216 - DNA, 19 bp, Homo sapiens
  siRNA target sequence for AQR (NM_014691.1,520-538).
gcctatttaatgtcaatct

SEQ ID NO: 342217 - DNA, 19 bp, Homo sapiens
  siRNA target sequence for AQR (NM_014691.1,539-557).
gctgtatggtgaatgagaa

SEQ ID NO: 342218 - DNA, 19 bp, Homo sapiens
  siRNA target sequence for AQR (NM_014691.1,542-560).
gtatggtgaatgagaagtt

SEQ ID NO: 342219 - DNA, 19 bp, Homo sapiens
  siRNA target sequence for AQR (NM_014691.1,574-592).
cctgcatgggagattttta

SEQ ID NO: 342220 - DNA, 19 bp, Homo sapiens
  siRNA target sequence for AQR (NM_014691.1,633-651).
cttgaaggcggcattagct

SEQ ID NO: 342221 - DNA, 19 bp, Homo sapiens
  siRNA target sequence for AQR (NM_014691.1,639-657).
ggcggcattagctgaaact

SEQ ID NO: 342222 - DNA, 19 bp, Homo sapiens
  siRNA target sequence for AQR (NM_014691.1,641-659).
cggcattagctgaaactga

SEQ ID NO: 342223 - DNA, 19 bp, Homo sapiens
  siRNA target sequence for AQR (NM_014691.1,703-721).
cttgatcattgcttcaata

SEQ ID NO: 342224 - DNA, 19 bp, Homo sapiens
  siRNA target sequence for AQR (NM_014691.1,727-745).
gaagtagacttgatacgaa

SEQ ID NO: 342225 - DNA, 19 bp, Homo sapiens
  siRNA target sequence for AQR (NM_014691.1,748-766).
caagtacagcagcttatct

SEQ ID NO: 342226 - DNA, 19 bp, Homo sapiens
  siRNA target sequence for AQR (NM_014691.1,792-810).
gctggcacgattggaatta

SEQ ID NO: 342227 - DNA, 19 bp, Homo sapiens
  siRNA target sequence for AQR (NM_014691.1,797-815).
cacgattggaattagaatt

SEQ ID NO: 342228 - DNA, 19 bp, Homo sapiens
  siRNA target sequence for AQR (NM_014691.1,824-842).
cacctaagctaagaaaatt

SEQ ID NO: 342229 - DNA, 19 bp, Homo sapiens
  siRNA target sequence for AQR (NM_014691.1,887-905).
caagagaacaggcatatca

SEQ ID NO: 342230 - DNA, 19 bp, Homo sapiens
  siRNA target sequence for AQR (NM_014691.1,1014-1032).
cattgaacttatgattgat

SEQ ID NO: 342231 - DNA, 19 bp, Homo sapiens
  siRNA target sequence for AQR (NM_014691.1,1049-1067).
ccacaaggcgctggtttaa

SEQ ID NO: 342232 - DNA, 19 bp, Homo sapiens
  siRNA target sequence for AQR (NM_014691.1,1050-1068).
cacaaggcgctggtttaat

SEQ ID NO: 342233 - DNA, 19 bp, Homo sapiens
  siRNA target sequence for AQR (NM_014691.1,1055-1073).
ggcgctggtttaataccat

SEQ ID NO: 342234 - DNA, 19 bp, Homo sapiens
  siRNA target sequence for AQR (NM_014691.1,1103-1121).
gttacctttccaatcttgt

SEQ ID NO: 342235 - DNA, 19 bp, Homo sapiens
  siRNA target sequence for AQR (NM_014691.1,1113-1131).
caatcttgttcgtagagaa

SEQ ID NO: 342236 - DNA, 19 bp, Homo sapiens
  siRNA target sequence for AQR (NM_014691.1,1129-1147).
gaagaggatggccatcttt

SEQ ID NO: 342237 - DNA, 19 bp, Homo sapiens
  siRNA target sequence for AQR (NM_014691.1,1155-1173).
gcttttggacatgcttaaa

SEQ ID NO: 342238 - DNA, 19 bp, Homo sapiens
  siRNA target sequence for AQR (NM_014691.1,1161-1179).
ggacatgcttaaattctat

SEQ ID NO: 342239 - DNA, 19 bp, Homo sapiens
  siRNA target sequence for AQR (NM_014691.1,1228-1246).
gagatgaccacaattcact

SEQ ID NO: 342240 - DNA, 19 bp, Homo sapiens
  siRNA target sequence for AQR (NM_014691.1,1230-1248).
gatgaccacaattcactat

SEQ ID NO: 342241 - DNA, 19 bp, Homo sapiens
  siRNA target sequence for AQR (NM_014691.1,1233-1251).
gaccacaattcactatgat

SEQ ID NO: 342242 - DNA, 19 bp, Homo sapiens
  siRNA target sequence for AQR (NM_014691.1,1236-1254).
cacaattcactatgataga

SEQ ID NO: 342243 - DNA, 19 bp, Homo sapiens
  siRNA target sequence for AQR (NM_014691.1,1238-1256).
caattcactatgatagaat

SEQ ID NO: 342244 - DNA, 19 bp, Homo sapiens
  siRNA target sequence for AQR (NM_014691.1,1314-1332).
ctcaaatgtggcagaagta

SEQ ID NO: 342245 - DNA, 19 bp, Homo sapiens
  siRNA target sequence for AQR (NM_014691.1,1316-1334).
caaatgtggcagaagtaga

SEQ ID NO: 342246 - DNA, 19 bp, Homo sapiens
  siRNA target sequence for AQR (NM_014691.1,1340-1358).
gggagtccttggtcaagtt

SEQ ID NO: 342247 - DNA, 19 bp, Homo sapiens
  siRNA target sequence for AQR (NM_014691.1,1363-1381).
ggacctcttagttcaaaca

SEQ ID NO: 342248 - DNA, 19 bp, Homo sapiens
  siRNA target sequence for AQR (NM_014691.1,1435-1453).
gaagacacaacttttgata

SEQ ID NO: 342249 - DNA, 19 bp, Homo sapiens
  siRNA target sequence for AQR (NM_014691.1,1473-1491).
gctggtatctcgtcatgaa

SEQ ID NO: 342250 - DNA, 19 bp, Homo sapiens
  siRNA target sequence for AQR (NM_014691.1,1483-1501).
cgtcatgaacgtcgaattt

SEQ ID NO: 342251 - DNA, 19 bp, Homo sapiens
  siRNA target sequence for AQR (NM_014691.1,1493-1511).
gtcgaatttctcagattca

SEQ ID NO: 342252 - DNA, 19 bp, Homo sapiens
  siRNA target sequence for AQR (NM_014691.1,1606-1624).
gctcttcccaaattgaatt

SEQ ID NO: 342253 - DNA, 19 bp, Homo sapiens
  siRNA target sequence for AQR (NM_014691.1,1626-1644).
gcagtttttgactcttcat

SEQ ID NO: 342254 - DNA, 19 bp, Homo sapiens
  siRNA target sequence for AQR (NM_014691.1,1647-1665).
ctacctgctaaggaacttt

SEQ ID NO: 342255 - DNA, 19 bp, Homo sapiens
  siRNA target sequence for AQR (NM_014691.1,1668-1686).
cctcttccgcttagaatca

SEQ ID NO: 342256 - DNA, 19 bp, Homo sapiens
  siRNA target sequence for AQR (NM_014691.1,1669-1687).
ctcttccgcttagaatcaa

SEQ ID NO: 342257 - DNA, 19 bp, Homo sapiens
  siRNA target sequence for AQR (NM_014691.1,1671-1689).
cttccgcttagaatcaact

SEQ ID NO: 342258 - DNA, 19 bp, Homo sapiens
  siRNA target sequence for AQR (NM_014691.1,1674-1692).
ccgcttagaatcaacttat

SEQ ID NO: 342259 - DNA, 19 bp, Homo sapiens
  siRNA target sequence for AQR (NM_014691.1,1699-1717).
cgtcaggacattgaagata

SEQ ID NO: 342260 - DNA, 19 bp, Homo sapiens
  siRNA target sequence for AQR (NM_014691.1,1731-1749).
gaagccatggcaatctgaa

SEQ ID NO: 342261 - DNA, 19 bp, Homo sapiens
  siRNA target sequence for AQR (NM_014691.1,1802-1820).
ctttcactgtcgttgaagt

SEQ ID NO: 342262 - DNA, 19 bp, Homo sapiens
  siRNA target sequence for AQR (NM_014691.1,1828-1846).
cccaacataggtgaaaact

SEQ ID NO: 342263 - DNA, 19 bp, Homo sapiens
  siRNA target sequence for AQR (NM_014691.1,1861-1879).
cgtgcagatgttaccataa

SEQ ID NO: 342264 - DNA, 19 bp, Homo sapiens
  siRNA target sequence for AQR (NM_014691.1,1865-1883).
cagatgttaccataaatct

SEQ ID NO: 342265 - DNA, 19 bp, Homo sapiens
  siRNA target sequence for AQR (NM_014691.1,1921-1939).
cttcgtaagcatgatgtat

SEQ ID NO: 342266 - DNA, 19 bp, Homo sapiens
  siRNA target sequence for AQR (NM_014691.1,1925-1943).
gtaagcatgatgtatgctt

SEQ ID NO: 342267 - DNA, 19 bp, Homo sapiens
  siRNA target sequence for AQR (NM_014691.1,1929-1947).
gcatgatgtatgcttttta

SEQ ID NO: 342268 - DNA, 19 bp, Homo sapiens
  siRNA target sequence for AQR (NM_014691.1,1953-1971).
cgtacgtcccacaaaacct

SEQ ID NO: 342269 - DNA, 19 bp, Homo sapiens
  siRNA target sequence for AQR (NM_014691.1,1989-2007).
ccggaggagaccttttatt

SEQ ID NO: 342270 - DNA, 19 bp, Homo sapiens
  siRNA target sequence for AQR (NM_014691.1,2014-2032).
gttggcctggtttatgtca

SEQ ID NO: 342271 - DNA, 19 bp, Homo sapiens
  siRNA target sequence for AQR (NM_014691.1,2047-2065).
cagggcatgctggatgata

SEQ ID NO: 342272 - DNA, 19 bp, Homo sapiens
  siRNA target sequence for AQR (NM_014691.1,2049-2067).
gggcatgctggatgataaa

SEQ ID NO: 342273 - DNA, 19 bp, Homo sapiens
  siRNA target sequence for AQR (NM_014691.1,2142-2160).
ggatccaaaccagtatcaa

SEQ ID NO: 342274 - DNA, 19 bp, Homo sapiens
  siRNA target sequence for AQR (NM_014691.1,2158-2176).
caacaagatatgaccaata

SEQ ID NO: 342275 - DNA, 19 bp, Homo sapiens
  siRNA target sequence for AQR (NM_014691.1,2161-2179).
caagatatgaccaatacta

SEQ ID NO: 342276 - DNA, 19 bp, Homo sapiens
  siRNA target sequence for AQR (NM_014691.1,2270-2288).
ctattcggaacctgatgaa

SEQ ID NO: 342277 - DNA, 19 bp, Homo sapiens
  siRNA target sequence for AQR (NM_014691.1,2276-2294).
ggaacctgatgaatactga

SEQ ID NO: 342278 - DNA, 19 bp, Homo sapiens
  siRNA target sequence for AQR (NM_014691.1,2280-2298).
cctgatgaatactgattgt

SEQ ID NO: 342279 - DNA, 19 bp, Homo sapiens
  siRNA target sequence for AQR (NM_014691.1,2306-2324).
ctgactggctgcacgatat

SEQ ID NO: 342280 - DNA, 19 bp, Homo sapiens
  siRNA target sequence for AQR (NM_014691.1,2308-2326).
gactggctgcacgatatca

SEQ ID NO: 342281 - DNA, 19 bp, Homo sapiens
  siRNA target sequence for AQR (NM_014691.1,2313-2331).
gctgcacgatatcatttta

SEQ ID NO: 342282 - DNA, 19 bp, Homo sapiens
  siRNA target sequence for AQR (NM_014691.1,2319-2337).
cgatatcattttaggttat

SEQ ID NO: 342283 - DNA, 19 bp, Homo sapiens
  siRNA target sequence for AQR (NM_014691.1,2344-2362).
ccaagtagtgcacattatt

SEQ ID NO: 342284 - DNA, 19 bp, Homo sapiens
  siRNA target sequence for AQR (NM_014691.1,2348-2366).
gtagtgcacattattcgaa

SEQ ID NO: 342285 - DNA, 19 bp, Homo sapiens
  siRNA target sequence for AQR (NM_014691.1,2351-2369).
gtgcacattattcgaaaat

SEQ ID NO: 342286 - DNA, 19 bp, Homo sapiens
  siRNA target sequence for AQR (NM_014691.1,2363-2381).
cgaaaatgcccaatcagat

SEQ ID NO: 342287 - DNA, 19 bp, Homo sapiens
  siRNA target sequence for AQR (NM_014691.1,2384-2402).
ccacccttgatttcaatga

SEQ ID NO: 342288 - DNA, 19 bp, Homo sapiens
  siRNA target sequence for AQR (NM_014691.1,2385-2403).
cacccttgatttcaatgat

SEQ ID NO: 342289 - DNA, 19 bp, Homo sapiens
  siRNA target sequence for AQR (NM_014691.1,2410-2428).
ctctccattgagcatttaa

SEQ ID NO: 342290 - DNA, 19 bp, Homo sapiens
  siRNA target sequence for AQR (NM_014691.1,2435-2453).
gcttccctggtcataatgt

SEQ ID NO: 342291 - DNA, 19 bp, Homo sapiens
  siRNA target sequence for AQR (NM_014691.1,2436-2454).
cttccctggtcataatgtt

SEQ ID NO: 342292 - DNA, 19 bp, Homo sapiens
  siRNA target sequence for AQR (NM_014691.1,2439-2457).
ccctggtcataatgttaaa

SEQ ID NO: 342293 - DNA, 19 bp, Homo sapiens
  siRNA target sequence for AQR (NM_014691.1,2441-2459).
ctggtcataatgttaaagt

SEQ ID NO: 342294 - DNA, 19 bp, Homo sapiens
  siRNA target sequence for AQR (NM_014691.1,2568-2586).
cgaggaagcaaaaacctta

SEQ ID NO: 342295 - DNA, 19 bp, Homo sapiens
  siRNA target sequence for AQR (NM_014691.1,2569-2587).
gaggaagcaaaaaccttaa

SEQ ID NO: 342296 - DNA, 19 bp, Homo sapiens
  siRNA target sequence for AQR (NM_014691.1,2593-2611).
gagccccatgttattccta

SEQ ID NO: 342297 - DNA, 19 bp, Homo sapiens
  siRNA target sequence for AQR (NM_014691.1,2615-2633).
ggggtccttatccttataa

SEQ ID NO: 342298 - DNA, 19 bp, Homo sapiens
  siRNA target sequence for AQR (NM_014691.1,2616-2634).
gggtccttatccttataat

SEQ ID NO: 342299 - DNA, 19 bp, Homo sapiens
  siRNA target sequence for AQR (NM_014691.1,2618-2636).
gtccttatccttataatca

SEQ ID NO: 342300 - DNA, 19 bp, Homo sapiens
  siRNA target sequence for AQR (NM_014691.1,2635-2653).
caacccaaacgtaatacga

SEQ ID NO: 342301 - DNA, 19 bp, Homo sapiens
  siRNA target sequence for AQR (NM_014691.1,2652-2670).
gattcagttcactcataca

SEQ ID NO: 342302 - DNA, 19 bp, Homo sapiens
  siRNA target sequence for AQR (NM_014691.1,2658-2676).
gttcactcatacacagata

SEQ ID NO: 342303 - DNA, 19 bp, Homo sapiens
  siRNA target sequence for AQR (NM_014691.1,2661-2679).
cactcatacacagatagaa

SEQ ID NO: 342304 - DNA, 19 bp, Homo sapiens
  siRNA target sequence for AQR (NM_014691.1,2700-2718).
gcctgggctgactatggtt

SEQ ID NO: 342305 - DNA, 19 bp, Homo sapiens
  siRNA target sequence for AQR (NM_014691.1,2749-2767).
gtggcagttcagatcatat

SEQ ID NO: 342306 - DNA, 19 bp, Homo sapiens
  siRNA target sequence for AQR (NM_014691.1,2752-2770).
gcagttcagatcatatcca

SEQ ID NO: 342307 - DNA, 19 bp, Homo sapiens
  siRNA target sequence for AQR (NM_014691.1,2758-2776).
cagatcatatccaacatct

SEQ ID NO: 342308 - DNA, 19 bp, Homo sapiens
  siRNA target sequence for AQR (NM_014691.1,2794-2812).
cagaggactctaattgtta

SEQ ID NO: 342309 - DNA, 19 bp, Homo sapiens
  siRNA target sequence for AQR (NM_014691.1,2796-2814).
gaggactctaattgttact

SEQ ID NO: 342310 - DNA, 19 bp, Homo sapiens
  siRNA target sequence for AQR (NM_014691.1,2931-2949).
cagcaggtatggaagagtt

SEQ ID NO: 342311 - DNA, 19 bp, Homo sapiens
  siRNA target sequence for AQR (NM_014691.1,2933-2951).
gcaggtatggaagagttaa

SEQ ID NO: 342312 - DNA, 19 bp, Homo sapiens
  siRNA target sequence for AQR (NM_014691.1,2986-3004).
gaagtcaaacgattgcaaa

SEQ ID NO: 342313 - DNA, 19 bp, Homo sapiens
  siRNA target sequence for AQR (NM_014691.1,2989-3007).
gtcaaacgattgcaaaaga

SEQ ID NO: 342314 - DNA, 19 bp, Homo sapiens
  siRNA target sequence for AQR (NM_014691.1,2991-3009).
caaacgattgcaaaagagt

SEQ ID NO: 342315 - DNA, 19 bp, Homo sapiens
  siRNA target sequence for AQR (NM_014691.1,3022-3040).
ggagatgcctcatatacct

SEQ ID NO: 342316 - DNA, 19 bp, Homo sapiens
  siRNA target sequence for AQR (NM_014691.1,3030-3048).
ctcatatacctgtgaaact

SEQ ID NO: 342317 - DNA, 19 bp, Homo sapiens
  siRNA target sequence for AQR (NM_014691.1,3041-3059).
gtgaaactgcaggctattt

SEQ ID NO: 342318 - DNA, 19 bp, Homo sapiens
  siRNA target sequence for AQR (NM_014691.1,3063-3081).
cttataccaggtaatgtct

SEQ ID NO: 342319 - DNA, 19 bp, Homo sapiens
  siRNA target sequence for AQR (NM_014691.1,3140-3158).
cggaagtctccactttctt

SEQ ID NO: 342320 - DNA, 19 bp, Homo sapiens
  siRNA target sequence for AQR (NM_014691.1,3241-3259).
ggatgtttcaggcatatta

SEQ ID NO: 342321 - DNA, 19 bp, Homo sapiens
  siRNA target sequence for AQR (NM_014691.1,3242-3260).
gatgtttcaggcatattaa

SEQ ID NO: 342322 - DNA, 19 bp, Homo sapiens
  siRNA target sequence for AQR (NM_014691.1,3313-3331).
ggactggacagatctaaat

SEQ ID NO: 342323 - DNA, 19 bp, Homo sapiens
  siRNA target sequence for AQR (NM_014691.1,3323-3341).
gatctaaataccttttagt

SEQ ID NO: 342324 - DNA, 19 bp, Homo sapiens
  siRNA target sequence for AQR (NM_014691.1,3371-3389).
gtactcatgctgccttaaa

SEQ ID NO: 342325 - DNA, 19 bp, Homo sapiens
  siRNA target sequence for AQR (NM_014691.1,3405-3423).
caagctaggtttcaagtat

SEQ ID NO: 342326 - DNA, 19 bp, Homo sapiens
  siRNA target sequence for AQR (NM_014691.1,3514-3532).
cgactaaaacgatggatta

SEQ ID NO: 342327 - DNA, 19 bp, Homo sapiens
  siRNA target sequence for AQR (NM_014691.1,3515-3533).
gactaaaacgatggattat

SEQ ID NO: 342328 - DNA, 19 bp, Homo sapiens
  siRNA target sequence for AQR (NM_014691.1,3517-3535).
ctaaaacgatggattatga

SEQ ID NO: 342329 - DNA, 19 bp, Homo sapiens
  siRNA target sequence for AQR (NM_014691.1,3549-3567).
ccagttacctccagttatt

SEQ ID NO: 342330 - DNA, 19 bp, Homo sapiens
  siRNA target sequence for AQR (NM_014691.1,3577-3595).
gcctttcaaaagtactcaa

SEQ ID NO: 342331 - DNA, 19 bp, Homo sapiens
  siRNA target sequence for AQR (NM_014691.1,3680-3698).
gcttgtgcaacctctacaa

SEQ ID NO: 342332 - DNA, 19 bp, Homo sapiens
  siRNA target sequence for AQR (NM_014691.1,3708-3726).
caagaatctaggaaactta

SEQ ID NO: 342333 - DNA, 19 bp, Homo sapiens
  siRNA target sequence for AQR (NM_014691.1,3738-3756).
gctcttgccagagtttagt

SEQ ID NO: 342334 - DNA, 19 bp, Homo sapiens
  siRNA target sequence for AQR (NM_014691.1,3766-3784).
gctggcttactgtatgact

SEQ ID NO: 342335 - DNA, 19 bp, Homo sapiens
  siRNA target sequence for AQR (NM_014691.1,3823-3841).
gaatctgaacctaatcctt

SEQ ID NO: 342336 - DNA, 19 bp, Homo sapiens
  siRNA target sequence for AQR (NM_014691.1,3829-3847).
gaacctaatccttacttct

SEQ ID NO: 342337 - DNA, 19 bp, Homo sapiens
  siRNA target sequence for AQR (NM_014691.1,3833-3851).
ctaatccttacttctatca

SEQ ID NO: 342338 - DNA, 19 bp, Homo sapiens
  siRNA target sequence for AQR (NM_014691.1,3874-3892).
gtagtagcactttttatgt

SEQ ID NO: 342339 - DNA, 19 bp, Homo sapiens
  siRNA target sequence for AQR (NM_014691.1,3908-3926).
gttaccctgctgacaaaat

SEQ ID NO: 342340 - DNA, 19 bp, Homo sapiens
  siRNA target sequence for AQR (NM_014691.1,3927-3945).
cagtattctaacaacatat

SEQ ID NO: 342341 - DNA, 19 bp, Homo sapiens
  siRNA target sequence for AQR (NM_014691.1,3941-3959).
catataatggccaaaagca

SEQ ID NO: 342342 - DNA, 19 bp, Homo sapiens
  siRNA target sequence for AQR (NM_014691.1,3985-4003).
cgatgtggaaacaatccat

SEQ ID NO: 342343 - DNA, 19 bp, Homo sapiens
  siRNA target sequence for AQR (NM_014691.1,4024-4042).
gtgacaactgttgatagat

SEQ ID NO: 342344 - DNA, 19 bp, Homo sapiens
  siRNA target sequence for AQR (NM_014691.1,4028-4046).
caactgttgatagatttca

SEQ ID NO: 342345 - DNA, 19 bp, Homo sapiens
  siRNA target sequence for AQR (NM_014691.1,4040-4058).
gatttcaaggtcaacagaa

SEQ ID NO: 342346 - DNA, 19 bp, Homo sapiens
  siRNA target sequence for AQR (NM_014691.1,4048-4066).
ggtcaacagaatgactata

SEQ ID NO: 342347 - DNA, 19 bp, Homo sapiens
  siRNA target sequence for AQR (NM_014691.1,4049-4067).
gtcaacagaatgactatat

SEQ ID NO: 342348 - DNA, 19 bp, Homo sapiens
  siRNA target sequence for AQR (NM_014691.1,4142-4160).
gagccagacttggacttta

SEQ ID NO: 342349 - DNA, 19 bp, Homo sapiens
  siRNA target sequence for AQR (NM_014691.1,4145-4163).
ccagacttggactttatat

SEQ ID NO: 342350 - DNA, 19 bp, Homo sapiens
  siRNA target sequence for AQR (NM_014691.1,4178-4196).
ccctcttccaaaactgttt

SEQ ID NO: 342351 - DNA, 19 bp, Homo sapiens
  siRNA target sequence for AQR (NM_014691.1,4265-4283).
ctttcccaactactagaaa

SEQ ID NO: 342352 - DNA, 19 bp, Homo sapiens
  siRNA target sequence for AQR (NM_014691.1,4293-4311).
gagaccatctcatgaagta

SEQ ID NO: 342353 - DNA, 19 bp, Homo sapiens
  siRNA target sequence for AQR (NM_014691.1,4295-4313).
gaccatctcatgaagtaca

SEQ ID NO: 342354 - DNA, 19 bp, Homo sapiens
  siRNA target sequence for AQR (NM_014691.1,4301-4319).
ctcatgaagtacaaataat

SEQ ID NO: 342355 - DNA, 19 bp, Homo sapiens
  siRNA target sequence for AQR (NM_014691.1,4339-4357).
gcaaactttgtatacaaca

SEQ ID NO: 342356 - DNA, 19 bp, Homo sapiens
  siRNA target sequence for AQR (NM_014691.1,4340-4358).
caaactttgtatacaacat

SEQ ID NO: 342357 - DNA, 19 bp, Homo sapiens
  siRNA target sequence for AQR (NM_014691.1,4371-4389).
gatacagactacacatcat

SEQ ID NO: 342358 - DNA, 19 bp, Homo sapiens
  siRNA target sequence for AQR (NM_014691.1,4377-4395).
gactacacatcattatcat

SEQ ID NO: 342359 - DNA, 19 bp, Homo sapiens
  siRNA target sequence for AQR (NM_014691.1,4387-4405).
cattatcatcagactttat

SEQ ID NO: 342360 - DNA, 19 bp, Homo sapiens
  siRNA target sequence for AQR (NM_014691.1,4652-4670).
ctgcaccggcagaagctaa

SEQ ID NO: 342361 - DNA, 19 bp, Homo sapiens
  siRNA target sequence for KIAA0605 (NM_014694.1,958-976).
ctctgtacccggatgacta

SEQ ID NO: 342362 - DNA, 19 bp, Homo sapiens
  siRNA target sequence for KIAA0605 (NM_014694.1,1092-1110).
gtttgcgtgtctggaaaat

SEQ ID NO: 342363 - DNA, 19 bp, Homo sapiens
  siRNA target sequence for KIAA0605 (NM_014694.1,1123-1141).
gctgtgacggggtgctttt

SEQ ID NO: 342364 - DNA, 19 bp, Homo sapiens
  siRNA target sequence for KIAA0605 (NM_014694.1,1273-1291).
cccgagacatccagattgt

SEQ ID NO: 342365 - DNA, 19 bp, Homo sapiens
  siRNA target sequence for KIAA0605 (NM_014694.1,1274-1292).
ccgagacatccagattgta

SEQ ID NO: 342366 - DNA, 19 bp, Homo sapiens
  siRNA target sequence for KIAA0605 (NM_014694.1,1276-1294).
gagacatccagattgtaga

SEQ ID NO: 342367 - DNA, 19 bp, Homo sapiens
  siRNA target sequence for KIAA0605 (NM_014694.1,1332-1350).
gaagctggctactacttct

SEQ ID NO: 342368 - DNA, 19 bp, Homo sapiens
  siRNA target sequence for KIAA0605 (NM_014694.1,1335-1353).
gctggctactacttcttca

SEQ ID NO: 342369 - DNA, 19 bp, Homo sapiens
  siRNA target sequence for KIAA0605 (NM_014694.1,1948-1966).
gcgcaggctctgacttgaa

SEQ ID NO: 342370 - DNA, 19 bp, Homo sapiens
  siRNA target sequence for KIAA0605 (NM_014694.1,1968-1986).
gacttcaccctcaatgaga

SEQ ID NO: 342371 - DNA, 19 bp, Homo sapiens
  siRNA target sequence for KIAA0605 (NM_014694.1,2036-2054).
gagcttcttcgtggattat

SEQ ID NO: 342372 - DNA, 19 bp, Homo sapiens
  siRNA target sequence for KIAA0605 (NM_014694.1,2142-2160).
gccccattccccaacgtta

SEQ ID NO: 342373 - DNA, 19 bp, Homo sapiens
  siRNA target sequence for KIAA0605 (NM_014694.1,2324-2342).
catgtgtgtccgctatgat

SEQ ID NO: 342374 - DNA, 19 bp, Homo sapiens
  siRNA target sequence for KIAA0605 (NM_014694.1,2733-2751).
cctgtaggggagaagaact

SEQ ID NO: 342375 - DNA, 19 bp, Homo sapiens
  siRNA target sequence for KIAA0408 (NM_014702.1,1221-1239).
cagtacagctcttgaagaa

SEQ ID NO: 342376 - DNA, 19 bp, Homo sapiens
  siRNA target sequence for KIAA0408 (NM_014702.1,1223-1241).
gtacagctcttgaagaact

SEQ ID NO: 342377 - DNA, 19 bp, Homo sapiens
  siRNA target sequence for KIAA0408 (NM_014702.1,1243-1261).
gcgaaggtgagtgaagaat

SEQ ID NO: 342378 - DNA, 19 bp, Homo sapiens
  siRNA target sequence for KIAA0408 (NM_014702.1,1285-1303).
cgaaagcggtctaaccata

SEQ ID NO: 342379 - DNA, 19 bp, Homo sapiens
  siRNA target sequence for KIAA0408 (NM_014702.1,1363-1381).
ggggaccccatgatcaaca

SEQ ID NO: 342380 - DNA, 19 bp, Homo sapiens
  siRNA target sequence for KIAA0408 (NM_014702.1,1364-1382).
gggaccccatgatcaacaa

SEQ ID NO: 342381 - DNA, 19 bp, Homo sapiens
  siRNA target sequence for KIAA0408 (NM_014702.1,1380-1398).
caatgaccagtgcattctt

SEQ ID NO: 342382 - DNA, 19 bp, Homo sapiens
  siRNA target sequence for KIAA0408 (NM_014702.1,1389-1407).
gtgcattcttccaatcagt

SEQ ID NO: 342383 - DNA, 19 bp, Homo sapiens
  siRNA target sequence for KIAA0408 (NM_014702.1,1391-1409).
gcattcttccaatcagttt

SEQ ID NO: 342384 - DNA, 19 bp, Homo sapiens
  siRNA target sequence for KIAA0408 (NM_014702.1,1392-1410).
cattcttccaatcagttta

SEQ ID NO: 342385 - DNA, 19 bp, Homo sapiens
  siRNA target sequence for KIAA0408 (NM_014702.1,1456-1474).
gtgctccagagcaattcta

SEQ ID NO: 342386 - DNA, 19 bp, Homo sapiens
  siRNA target sequence for KIAA0408 (NM_014702.1,1461-1479).
ccagagcaattctacgaaa

SEQ ID NO: 342387 - DNA, 19 bp, Homo sapiens
  siRNA target sequence for KIAA0408 (NM_014702.1,1462-1480).
cagagcaattctacgaaaa

SEQ ID NO: 342388 - DNA, 19 bp, Homo sapiens
  siRNA target sequence for KIAA0408 (NM_014702.1,1464-1482).
gagcaattctacgaaaaaa

SEQ ID NO: 342389 - DNA, 19 bp, Homo sapiens
  siRNA target sequence for KIAA0408 (NM_014702.1,1475-1493).
cgaaaaaatgtggaattga

SEQ ID NO: 342390 - DNA, 19 bp, Homo sapiens
  siRNA target sequence for KIAA0408 (NM_014702.1,1486-1504).
ggaattgatacaatcgatt

SEQ ID NO: 342391 - DNA, 19 bp, Homo sapiens
  siRNA target sequence for KIAA0408 (NM_014702.1,1487-1505).
gaattgatacaatcgattt

SEQ ID NO: 342392 - DNA, 19 bp, Homo sapiens
  siRNA target sequence for KIAA0408 (NM_014702.1,1628-1646).
cccatgagggtcgaagtaa

SEQ ID NO: 342393 - DNA, 19 bp, Homo sapiens
  siRNA target sequence for KIAA0408 (NM_014702.1,1629-1647).
ccatgagggtcgaagtaaa

SEQ ID NO: 342394 - DNA, 19 bp, Homo sapiens
  siRNA target sequence for KIAA0408 (NM_014702.1,1630-1648).
catgagggtcgaagtaaaa

SEQ ID NO: 342395 - DNA, 19 bp, Homo sapiens
  siRNA target sequence for KIAA0408 (NM_014702.1,1637-1655).
gtcgaagtaaaaggaatta

SEQ ID NO: 342396 - DNA, 19 bp, Homo sapiens
  siRNA target sequence for KIAA0408 (NM_014702.1,1639-1657).
cgaagtaaaaggaattaca

SEQ ID NO: 342397 - DNA, 19 bp, Homo sapiens
  siRNA target sequence for KIAA0408 (NM_014702.1,1670-1688).
ctttgagacaacaagagat

SEQ ID NO: 342398 - DNA, 19 bp, Homo sapiens
  siRNA target sequence for KIAA0408 (NM_014702.1,1718-1736).
cttcgaaagatggtatcat

SEQ ID NO: 342399 - DNA, 19 bp, Homo sapiens
  siRNA target sequence for KIAA0408 (NM_014702.1,1745-1763).
ctttggtaccagaagtcaa

SEQ ID NO: 342400 - DNA, 19 bp, Homo sapiens
  siRNA target sequence for KIAA0408 (NM_014702.1,1821-1839).
cattgggataggtgcaaaa

SEQ ID NO: 342401 - DNA, 19 bp, Homo sapiens
  siRNA target sequence for KIAA0408 (NM_014702.1,1850-1868).
ctacttcgtggtttcagaa

SEQ ID NO: 342402 - DNA, 19 bp, Homo sapiens
  siRNA target sequence for KIAA0408 (NM_014702.1,1872-1890).
ctgctctacccccagtaat

SEQ ID NO: 342403 - DNA, 19 bp, Homo sapiens
  siRNA target sequence for KIAA0408 (NM_014702.1,1875-1893).
ctctacccccagtaatcca

SEQ ID NO: 342404 - DNA, 19 bp, Homo sapiens
  siRNA target sequence for KIAA0408 (NM_014702.1,1877-1895).
ctacccccagtaatccaaa

SEQ ID NO: 342405 - DNA, 19 bp, Homo sapiens
  siRNA target sequence for KIAA0408 (NM_014702.1,1880-1898).
cccccagtaatccaaaata

SEQ ID NO: 342406 - DNA, 19 bp, Homo sapiens
  siRNA target sequence for KIAA0408 (NM_014702.1,1912-1930).
ccagatcaccctgctaaat

SEQ ID NO: 342407 - DNA, 19 bp, Homo sapiens
  siRNA target sequence for KIAA0408 (NM_014702.1,1937-1955).
ctgatcttcatgtaagtaa

SEQ ID NO: 342408 - DNA, 19 bp, Homo sapiens
  siRNA target sequence for KIAA0408 (NM_014702.1,1980-1998).
gagcagtagcccacttaga

SEQ ID NO: 342409 - DNA, 19 bp, Homo sapiens
  siRNA target sequence for KIAA0408 (NM_014702.1,1982-2000).
gcagtagcccacttagaaa

SEQ ID NO: 342410 - DNA, 19 bp, Homo sapiens
  siRNA target sequence for KIAA0408 (NM_014702.1,1983-2001).
cagtagcccacttagaaat

SEQ ID NO: 342411 - DNA, 19 bp, Homo sapiens
  siRNA target sequence for KIAA0408 (NM_014702.1,1985-2003).
gtagcccacttagaaattt

SEQ ID NO: 342412 - DNA, 19 bp, Homo sapiens
  siRNA target sequence for KIAA0408 (NM_014702.1,1989-2007).
cccacttagaaatttcagt

SEQ ID NO: 342413 - DNA, 19 bp, Homo sapiens
  siRNA target sequence for KIAA0408 (NM_014702.1,1990-2008).
ccacttagaaatttcagtt

SEQ ID NO: 342414 - DNA, 19 bp, Homo sapiens
  siRNA target sequence for KIAA0408 (NM_014702.1,2081-2099).
gaacagatagaaattgtca

SEQ ID NO: 342415 - DNA, 19 bp, Homo sapiens
  siRNA target sequence for KIAA0408 (NM_014702.1,2090-2108).
gaaattgtcaggcaataca

SEQ ID NO: 342416 - DNA, 19 bp, Homo sapiens
  siRNA target sequence for KIAA0408 (NM_014702.1,2096-2114).
gtcaggcaatacagcaaaa

SEQ ID NO: 342417 - DNA, 19 bp, Homo sapiens
  siRNA target sequence for KIAA0408 (NM_014702.1,2140-2158).
gatctcaagccctgtgata

SEQ ID NO: 342418 - DNA, 19 bp, Homo sapiens
  siRNA target sequence for KIAA0408 (NM_014702.1,2172-2190).
cacaggtagcatatcacaa

SEQ ID NO: 342419 - DNA, 19 bp, Homo sapiens
  siRNA target sequence for KIAA0408 (NM_014702.1,2181-2199).
catatcacaaagtaacgat

SEQ ID NO: 342420 - DNA, 19 bp, Homo sapiens
  siRNA target sequence for KIAA0408 (NM_014702.1,2197-2215).
gatgtgtccggtatttgga

SEQ ID NO: 342421 - DNA, 19 bp, Homo sapiens
  siRNA target sequence for KIAA0408 (NM_014702.1,2204-2222).
ccggtatttggaaaaccaa

SEQ ID NO: 342422 - DNA, 19 bp, Homo sapiens
  siRNA target sequence for KIAA0408 (NM_014702.1,2205-2223).
cggtatttggaaaaccaat

SEQ ID NO: 342423 - DNA, 19 bp, Homo sapiens
  siRNA target sequence for KIAA0408 (NM_014702.1,2277-2295).
cacaacaggcctagtaaga

SEQ ID NO: 342424 - DNA, 19 bp, Homo sapiens
  siRNA target sequence for KIAA0408 (NM_014702.1,2285-2303).
gcctagtaagacaaatgca

SEQ ID NO: 342425 - DNA, 19 bp, Homo sapiens
  siRNA target sequence for KIAA0408 (NM_014702.1,2317-2335).
cctcgcagttatcgaaata

SEQ ID NO: 342426 - DNA, 19 bp, Homo sapiens
  siRNA target sequence for KIAA0408 (NM_014702.1,2318-2336).
ctcgcagttatcgaaatat

SEQ ID NO: 342427 - DNA, 19 bp, Homo sapiens
  siRNA target sequence for KIAA0408 (NM_014702.1,2484-2502).
ggataattggaccaaatgt

SEQ ID NO: 342428 - DNA, 19 bp, Homo sapiens
  siRNA target sequence for KIAA0408 (NM_014702.1,2514-2532).
cagtggtggtgccacatta

SEQ ID NO: 342429 - DNA, 19 bp, Homo sapiens
  siRNA target sequence for KIAA0408 (NM_014702.1,2519-2537).
gtggtgccacattaagtca

SEQ ID NO: 342430 - DNA, 19 bp, Homo sapiens
  siRNA target sequence for KIAA0408 (NM_014702.1,2525-2543).
ccacattaagtcagcattt

SEQ ID NO: 342431 - DNA, 19 bp, Homo sapiens
  siRNA target sequence for KIAA0408 (NM_014702.1,2528-2546).
cattaagtcagcatttaga

SEQ ID NO: 342432 - DNA, 19 bp, Homo sapiens
  siRNA target sequence for KIAA0408 (NM_014702.1,2614-2632).
ggaatagatccgaaaaaga

SEQ ID NO: 342433 - DNA, 19 bp, Homo sapiens
  siRNA target sequence for KIAA0408 (NM_014702.1,2615-2633).
gaatagatccgaaaaagat

SEQ ID NO: 342434 - DNA, 19 bp, Homo sapiens
  siRNA target sequence for KIAA0408 (NM_014702.1,2655-2673).
gaacgcctcacatggaaaa

SEQ ID NO: 342435 - DNA, 19 bp, Homo sapiens
  siRNA target sequence for KIAA0408 (NM_014702.1,2658-2676).
cgcctcacatggaaaagga

SEQ ID NO: 342436 - DNA, 19 bp, Homo sapiens
  siRNA target sequence for KIAA0408 (NM_014702.1,2659-2677).
gcctcacatggaaaaggat

SEQ ID NO: 342437 - DNA, 19 bp, Homo sapiens
  siRNA target sequence for KIAA0408 (NM_014702.1,2749-2767).
cctgccttgcggagaacta

SEQ ID NO: 342438 - DNA, 19 bp, Homo sapiens
  siRNA target sequence for KIAA0408 (NM_014702.1,2760-2778).
gagaactacccacaactat

SEQ ID NO: 342439 - DNA, 19 bp, Homo sapiens
  siRNA target sequence for KIAA0408 (NM_014702.1,2786-2804).
ctctgcgatccgaagcatt

SEQ ID NO: 342440 - DNA, 19 bp, Homo sapiens
  siRNA target sequence for VprBP (NM_014703.1,173-191).
ctacagtagtggtacatgt

SEQ ID NO: 342441 - DNA, 19 bp, Homo sapiens
  siRNA target sequence for VprBP (NM_014703.1,251-269).
ggcaggacatggtacctat

SEQ ID NO: 342442 - DNA, 19 bp, Homo sapiens
  siRNA target sequence for VprBP (NM_014703.1,256-274).
gacatggtacctatcctta

SEQ ID NO: 342443 - DNA, 19 bp, Homo sapiens
  siRNA target sequence for VprBP (NM_014703.1,323-341).
gggatccagacccatttga

SEQ ID NO: 342444 - DNA, 19 bp, Homo sapiens
  siRNA target sequence for VprBP (NM_014703.1,324-342).
ggatccagacccatttgat

SEQ ID NO: 342445 - DNA, 19 bp, Homo sapiens
  siRNA target sequence for VprBP (NM_014703.1,359-377).
gagctgatccagagtgtat

SEQ ID NO: 342446 - DNA, 19 bp, Homo sapiens
  siRNA target sequence for VprBP (NM_014703.1,383-401).
gccacttgctgagaatact

SEQ ID NO: 342447 - DNA, 19 bp, Homo sapiens
  siRNA target sequence for VprBP (NM_014703.1,393-411).
gagaatactcttcaagaat

SEQ ID NO: 342448 - DNA, 19 bp, Homo sapiens
  siRNA target sequence for VprBP (NM_014703.1,395-413).
gaatactcttcaagaatga

SEQ ID NO: 342449 - DNA, 19 bp, Homo sapiens
  siRNA target sequence for VprBP (NM_014703.1,455-473).
gccgagagccccctttaaa

SEQ ID NO: 342450 - DNA, 19 bp, Homo sapiens
  siRNA target sequence for VprBP (NM_014703.1,457-475).
cgagagccccctttaaaca

SEQ ID NO: 342451 - DNA, 19 bp, Homo sapiens
  siRNA target sequence for VprBP (NM_014703.1,479-497).
cagcttgcagactcctatt

SEQ ID NO: 342452 - DNA, 19 bp, Homo sapiens
  siRNA target sequence for VprBP (NM_014703.1,482-500).
cttgcagactcctattaga

SEQ ID NO: 342453 - DNA, 19 bp, Homo sapiens
  siRNA target sequence for VprBP (NM_014703.1,485-503).
gcagactcctattagacat

SEQ ID NO: 342454 - DNA, 19 bp, Homo sapiens
  siRNA target sequence for VprBP (NM_014703.1,521-539).
ctgctgtcgtctttcaaga

SEQ ID NO: 342455 - DNA, 19 bp, Homo sapiens
  siRNA target sequence for VprBP (NM_014703.1,553-571).
gtcgagaatcttttcaaat

SEQ ID NO: 342456 - DNA, 19 bp, Homo sapiens
  siRNA target sequence for VprBP (NM_014703.1,578-596).
gagaggccgatcaaccatt

SEQ ID NO: 342457 - DNA, 19 bp, Homo sapiens
  siRNA target sequence for VprBP (NM_014703.1,589-607).
caaccattgaggacatatt

SEQ ID NO: 342458 - DNA, 19 bp, Homo sapiens
  siRNA target sequence for VprBP (NM_014703.1,618-636).
gttaggaggtgctatggaa

SEQ ID NO: 342459 - DNA, 19 bp, Homo sapiens
  siRNA target sequence for VprBP (NM_014703.1,654-672).
caactatagagatgaaaat

SEQ ID NO: 342460 - DNA, 19 bp, Homo sapiens
  siRNA target sequence for VprBP (NM_014703.1,730-748).
gctttgcggcaggaaaaca

SEQ ID NO: 342461 - DNA, 19 bp, Homo sapiens
  siRNA target sequence for VprBP (NM_014703.1,984-1002).
gggtgacagagagaacttt

SEQ ID NO: 342462 - DNA, 19 bp, Homo sapiens
  siRNA target sequence for VprBP (NM_014703.1,985-1003).
ggtgacagagagaacttta

SEQ ID NO: 342463 - DNA, 19 bp, Homo sapiens
  siRNA target sequence for VprBP (NM_014703.1,1043-1061).
cagatcgcatgtttgttga

SEQ ID NO: 342464 - DNA, 19 bp, Homo sapiens
  siRNA target sequence for VprBP (NM_014703.1,1053-1071).
gtttgttgagctgtctaat

SEQ ID NO: 342465 - DNA, 19 bp, Homo sapiens
  siRNA target sequence for VprBP (NM_014703.1,1097-1115).
gggtgattggcaccaatta

SEQ ID NO: 342466 - DNA, 19 bp, Homo sapiens
  siRNA target sequence for VprBP (NM_014703.1,1099-1117).
gtgattggcaccaattata

SEQ ID NO: 342467 - DNA, 19 bp, Homo sapiens
  siRNA target sequence for VprBP (NM_014703.1,1107-1125).
caccaattataccctttat

SEQ ID NO: 342468 - DNA, 19 bp, Homo sapiens
  siRNA target sequence for VprBP (NM_014703.1,1110-1128).
caattataccctttatcct

SEQ ID NO: 342469 - DNA, 19 bp, Homo sapiens
  siRNA target sequence for VprBP (NM_014703.1,1149-1167).
gcgactcattctccaatat

SEQ ID NO: 342470 - DNA, 19 bp, Homo sapiens
  siRNA target sequence for VprBP (NM_014703.1,1150-1168).
cgactcattctccaatatt

SEQ ID NO: 342471 - DNA, 19 bp, Homo sapiens
  siRNA target sequence for VprBP (NM_014703.1,1170-1188).
gacccctctaggagaatat

SEQ ID NO: 342472 - DNA, 19 bp, Homo sapiens
  siRNA target sequence for VprBP (NM_014703.1,1192-1210).
gagctacttcccatattca

SEQ ID NO: 342473 - DNA, 19 bp, Homo sapiens
  siRNA target sequence for VprBP (NM_014703.1,1220-1238).
gatcacgggagctgatgat

SEQ ID NO: 342474 - DNA, 19 bp, Homo sapiens
  siRNA target sequence for VprBP (NM_014703.1,1223-1241).
cacgggagctgatgatgtt

SEQ ID NO: 342475 - DNA, 19 bp, Homo sapiens
  siRNA target sequence for VprBP (NM_014703.1,1311-1329).
cctgctccataacaaattt

SEQ ID NO: 342476 - DNA, 19 bp, Homo sapiens
  siRNA target sequence for VprBP (NM_014703.1,1346-1364).
cgcatggtggagtacagaa

SEQ ID NO: 342477 - DNA, 19 bp, Homo sapiens
  siRNA target sequence for VprBP (NM_014703.1,1347-1365).
gcatggtggagtacagaaa

SEQ ID NO: 342478 - DNA, 19 bp, Homo sapiens
  siRNA target sequence for VprBP (NM_014703.1,1460-1478).
gcatgcatccccacaatgt

SEQ ID NO: 342479 - DNA, 19 bp, Homo sapiens
  siRNA target sequence for VprBP (NM_014703.1,1461-1479).
catgcatccccacaatgtt

SEQ ID NO: 342480 - DNA, 19 bp, Homo sapiens
  siRNA target sequence for VprBP (NM_014703.1,1539-1557).
ctgccatgctaccatgttt

SEQ ID NO: 342481 - DNA, 19 bp, Homo sapiens
  siRNA target sequence for VprBP (NM_014703.1,1593-1611).
gctctttgaccgctatgat

SEQ ID NO: 342482 - DNA, 19 bp, Homo sapiens
  siRNA target sequence for VprBP (NM_014703.1,1618-1636).
cgtcgtctggtgaacttga

SEQ ID NO: 342483 - DNA, 19 bp, Homo sapiens
  siRNA target sequence for VprBP (NM_014703.1,1619-1637).
gtcgtctggtgaacttgat

SEQ ID NO: 342484 - DNA, 19 bp, Homo sapiens
  siRNA target sequence for VprBP (NM_014703.1,1627-1645).
gtgaacttgatcagtactt

SEQ ID NO: 342485 - DNA, 19 bp, Homo sapiens
  siRNA target sequence for VprBP (NM_014703.1,1708-1726).
cgccaaactgggaaacata

SEQ ID NO: 342486 - DNA, 19 bp, Homo sapiens
  siRNA target sequence for VprBP (NM_014703.1,1756-1774).
gctcacctggccattaaat

SEQ ID NO: 342487 - DNA, 19 bp, Homo sapiens
  siRNA target sequence for VprBP (NM_014703.1,1839-1857).
gtacaaggcatgctcatat

SEQ ID NO: 342488 - DNA, 19 bp, Homo sapiens
  siRNA target sequence for VprBP (NM_014703.1,1842-1860).
caaggcatgctcatatact

SEQ ID NO: 342489 - DNA, 19 bp, Homo sapiens
  siRNA target sequence for VprBP (NM_014703.1,1845-1863).
ggcatgctcatatactcat

SEQ ID NO: 342490 - DNA, 19 bp, Homo sapiens
  siRNA target sequence for VprBP (NM_014703.1,1853-1871).
catatactcatgaacagat

SEQ ID NO: 342491 - DNA, 19 bp, Homo sapiens
  siRNA target sequence for VprBP (NM_014703.1,1881-1899).
gatggaatttttgatagaa

SEQ ID NO: 342492 - DNA, 19 bp, Homo sapiens
  siRNA target sequence for VprBP (NM_014703.1,1903-1921).
ggcccagcgcagctatatt

SEQ ID NO: 342493 - DNA, 19 bp, Homo sapiens
  siRNA target sequence for VprBP (NM_014703.1,1965-1983).
cttgttgcagcttatttct

SEQ ID NO: 342494 - DNA, 19 bp, Homo sapiens
  siRNA target sequence for VprBP (NM_014703.1,1982-2000).
ctattgcctgcaattggaa

SEQ ID NO: 342495 - DNA, 19 bp, Homo sapiens
  siRNA target sequence for VprBP (NM_014703.1,1991-2009).
gcaattggaagacctatta

SEQ ID NO: 342496 - DNA, 19 bp, Homo sapiens
  siRNA target sequence for VprBP (NM_014703.1,1992-2010).
caattggaagacctattat

SEQ ID NO: 342497 - DNA, 19 bp, Homo sapiens
  siRNA target sequence for VprBP (NM_014703.1,2040-2058).
ggatgtcctggctattctt

SEQ ID NO: 342498 - DNA, 19 bp, Homo sapiens
  siRNA target sequence for VprBP (NM_014703.1,2126-2144).
cagtctctactgtaggtat

SEQ ID NO: 342499 - DNA, 19 bp, Homo sapiens
  siRNA target sequence for VprBP (NM_014703.1,2135-2153).
ctgtaggtatcagcattat

SEQ ID NO: 342500 - DNA, 19 bp, Homo sapiens
  siRNA target sequence for VprBP (NM_014703.1,2209-2227).
gcacttcagattatcatca

SEQ ID NO: 342501 - DNA, 19 bp, Homo sapiens
  siRNA target sequence for VprBP (NM_014703.1,2239-2257).
ggcccagataaccgaatat

SEQ ID NO: 342502 - DNA, 19 bp, Homo sapiens
  siRNA target sequence for VprBP (NM_014703.1,2242-2260).
ccagataaccgaatatcca

SEQ ID NO: 342503 - DNA, 19 bp, Homo sapiens
  siRNA target sequence for VprBP (NM_014703.1,2250-2268).
ccgaatatccagtattggt

SEQ ID NO: 342504 - DNA, 19 bp, Homo sapiens
  siRNA target sequence for VprBP (NM_014703.1,2251-2269).
cgaatatccagtattggta

SEQ ID NO: 342505 - DNA, 19 bp, Homo sapiens
  siRNA target sequence for VprBP (NM_014703.1,2326-2344).
cacaccctggccaagatgt

SEQ ID NO: 342506 - DNA, 19 bp, Homo sapiens
  siRNA target sequence for VprBP (NM_014703.1,2377-2395).
gtgctcctgtccttactgt

SEQ ID NO: 342507 - DNA, 19 bp, Homo sapiens
  siRNA target sequence for VprBP (NM_014703.1,2387-2405).
ccttactgtccattaagat

SEQ ID NO: 342508 - DNA, 19 bp, Homo sapiens
  siRNA target sequence for VprBP (NM_014703.1,2474-2492).
gcactgtccggcagatcat

SEQ ID NO: 342509 - DNA, 19 bp, Homo sapiens
  siRNA target sequence for VprBP (NM_014703.1,2479-2497).
gtccggcagatcatcagta

SEQ ID NO: 342510 - DNA, 19 bp, Homo sapiens
  siRNA target sequence for VprBP (NM_014703.1,2483-2501).
ggcagatcatcagtaaact

SEQ ID NO: 342511 - DNA, 19 bp, Homo sapiens
  siRNA target sequence for VprBP (NM_014703.1,2564-2582).
gcagtgaccatgtcaagtt

SEQ ID NO: 342512 - DNA, 19 bp, Homo sapiens
  siRNA target sequence for VprBP (NM_014703.1,2716-2734).
ctgcttttgttgatacgaa

SEQ ID NO: 342513 - DNA, 19 bp, Homo sapiens
  siRNA target sequence for VprBP (NM_014703.1,2727-2745).
gatacgaaaccatcttatt

SEQ ID NO: 342514 - DNA, 19 bp, Homo sapiens
  siRNA target sequence for VprBP (NM_014703.1,2768-2786).
caaccgtgctgacaaaaga

SEQ ID NO: 342515 - DNA, 19 bp, Homo sapiens
  siRNA target sequence for VprBP (NM_014703.1,3011-3029).
caggcaactcccctttgat

SEQ ID NO: 342516 - DNA, 19 bp, Homo sapiens
  siRNA target sequence for VprBP (NM_014703.1,3065-3083).
cctgcaatggcaggaaaat

SEQ ID NO: 342517 - DNA, 19 bp, Homo sapiens
  siRNA target sequence for VprBP (NM_014703.1,3172-3190).
cctacgctggacagtataa

SEQ ID NO: 342518 - DNA, 19 bp, Homo sapiens
  siRNA target sequence for VprBP (NM_014703.1,3173-3191).
ctacgctggacagtataat

SEQ ID NO: 342519 - DNA, 19 bp, Homo sapiens
  siRNA target sequence for VprBP (NM_014703.1,3177-3195).
gctggacagtataatcaca

SEQ ID NO: 342520 - DNA, 19 bp, Homo sapiens
  siRNA target sequence for VprBP (NM_014703.1,3296-3314).
ggcggcaagcgccaataaa

SEQ ID NO: 342521 - DNA, 19 bp, Homo sapiens
  siRNA target sequence for VprBP (NM_014703.1,3298-3316).
cggcaagcgccaataaact

SEQ ID NO: 342522 - DNA, 19 bp, Homo sapiens
  siRNA target sequence for VprBP (NM_014703.1,3299-3317).
ggcaagcgccaataaactt

SEQ ID NO: 342523 - DNA, 19 bp, Homo sapiens
  siRNA target sequence for VprBP (NM_014703.1,3300-3318).
gcaagcgccaataaacttt

SEQ ID NO: 342524 - DNA, 19 bp, Homo sapiens
  siRNA target sequence for VprBP (NM_014703.1,3301-3319).
caagcgccaataaacttta

SEQ ID NO: 342525 - DNA, 19 bp, Homo sapiens
  siRNA target sequence for VprBP (NM_014703.1,3304-3322).
gcgccaataaactttacgt

SEQ ID NO: 342526 - DNA, 19 bp, Homo sapiens
  siRNA target sequence for VprBP (NM_014703.1,3333-3351).
ccgcagggcatcatttcca

SEQ ID NO: 342527 - DNA, 19 bp, Homo sapiens
  siRNA target sequence for VprBP (NM_014703.1,3334-3352).
cgcagggcatcatttccaa

SEQ ID NO: 342528 - DNA, 19 bp, Homo sapiens
  siRNA target sequence for VprBP (NM_014703.1,3335-3353).
gcagggcatcatttccaaa

SEQ ID NO: 342529 - DNA, 19 bp, Homo sapiens
  siRNA target sequence for VprBP (NM_014703.1,3338-3356).
gggcatcatttccaaagta

SEQ ID NO: 342530 - DNA, 19 bp, Homo sapiens
  siRNA target sequence for VprBP (NM_014703.1,3339-3357).
ggcatcatttccaaagtat

SEQ ID NO: 342531 - DNA, 19 bp, Homo sapiens
  siRNA target sequence for VprBP (NM_014703.1,3363-3381).
ggtggatggcggatgcttt

SEQ ID NO: 342532 - DNA, 19 bp, Homo sapiens
  siRNA target sequence for VprBP (NM_014703.1,3366-3384).
ggatggcggatgctttgat

SEQ ID NO: 342533 - DNA, 19 bp, Homo sapiens
  siRNA target sequence for VprBP (NM_014703.1,3367-3385).
gatggcggatgctttgata

SEQ ID NO: 342534 - DNA, 19 bp, Homo sapiens
  siRNA target sequence for VprBP (NM_014703.1,3404-3422).
gattccgtcctatttcagt

SEQ ID NO: 342535 - DNA, 19 bp, Homo sapiens
  siRNA target sequence for VprBP (NM_014703.1,3522-3540).
gctctataatgtgtttagt

SEQ ID NO: 342536 - DNA, 19 bp, Homo sapiens
  siRNA target sequence for VprBP (NM_014703.1,3549-3567).
ggaggccagctataactgt

SEQ ID NO: 342537 - DNA, 19 bp, Homo sapiens
  siRNA target sequence for VprBP (NM_014703.1,3575-3593).
cagccatcacacatcttga

SEQ ID NO: 342538 - DNA, 19 bp, Homo sapiens
  siRNA target sequence for VprBP (NM_014703.1,3659-3677).
ggggaatgaagtcagtatt

SEQ ID NO: 342539 - DNA, 19 bp, Homo sapiens
  siRNA target sequence for VprBP (NM_014703.1,3662-3680).
gaatgaagtcagtatttga

SEQ ID NO: 342540 - DNA, 19 bp, Homo sapiens
  siRNA target sequence for VprBP (NM_014703.1,3696-3714).
cacagaagatcactatgtt

SEQ ID NO: 342541 - DNA, 19 bp, Homo sapiens
  siRNA target sequence for VprBP (NM_014703.1,3758-3776).
gagacattgcccacattta

SEQ ID NO: 342542 - DNA, 19 bp, Homo sapiens
  siRNA target sequence for VprBP (NM_014703.1,3762-3780).
cattgcccacatttatgat

SEQ ID NO: 342543 - DNA, 19 bp, Homo sapiens
  siRNA target sequence for VprBP (NM_014703.1,3767-3785).
cccacatttatgatattca

SEQ ID NO: 342544 - DNA, 19 bp, Homo sapiens
  siRNA target sequence for VprBP (NM_014703.1,3817-3835).
ccagatcttgccaacaact

SEQ ID NO: 342545 - DNA, 19 bp, Homo sapiens
  siRNA target sequence for VprBP (NM_014703.1,3820-3838).
gatcttgccaacaactaca

SEQ ID NO: 342546 - DNA, 19 bp, Homo sapiens
  siRNA target sequence for VprBP (NM_014703.1,3843-3861).
gaactgtgccacctttaat

SEQ ID NO: 342547 - DNA, 19 bp, Homo sapiens
  siRNA target sequence for VprBP (NM_014703.1,3852-3870).
cacctttaatcctacagat

SEQ ID NO: 342548 - DNA, 19 bp, Homo sapiens
  siRNA target sequence for VprBP (NM_014703.1,3855-3873).
ctttaatcctacagatgat

SEQ ID NO: 342549 - DNA, 19 bp, Homo sapiens
  siRNA target sequence for VprBP (NM_014703.1,3956-3974).
gtggtgttttccatccaaa

SEQ ID NO: 342550 - DNA, 19 bp, Homo sapiens
  siRNA target sequence for VprBP (NM_014703.1,3977-3995).
gactggaggtgatcattaa

SEQ ID NO: 342551 - DNA, 19 bp, Homo sapiens
  siRNA target sequence for VprBP (NM_014703.1,3981-3999).
ggaggtgatcattaatact

SEQ ID NO: 342552 - DNA, 19 bp, Homo sapiens
  siRNA target sequence for VprBP (NM_014703.1,3987-4005).
gatcattaatactgagatt

SEQ ID NO: 342553 - DNA, 19 bp, Homo sapiens
  siRNA target sequence for VprBP (NM_014703.1,4007-4025).
gggaccttcgaacttttca

SEQ ID NO: 342554 - DNA, 19 bp, Homo sapiens
  siRNA target sequence for VprBP (NM_014703.1,4008-4026).
ggaccttcgaacttttcat

SEQ ID NO: 342555 - DNA, 19 bp, Homo sapiens
  siRNA target sequence for VprBP (NM_014703.1,4011-4029).
ccttcgaacttttcatctt

SEQ ID NO: 342556 - DNA, 19 bp, Homo sapiens
  siRNA target sequence for VprBP (NM_014703.1,4056-4074).
gtgtcgcgtggtgttcaat

SEQ ID NO: 342557 - DNA, 19 bp, Homo sapiens
  siRNA target sequence for VprBP (NM_014703.1,4060-4078).
cgcgtggtgttcaatcaca

SEQ ID NO: 342558 - DNA, 19 bp, Homo sapiens
  siRNA target sequence for VprBP (NM_014703.1,4077-4095).
cacgggaacagtgatgtat

SEQ ID NO: 342559 - DNA, 19 bp, Homo sapiens
  siRNA target sequence for VprBP (NM_014703.1,4160-4178).
ggtcatccttccgaacatt

SEQ ID NO: 342560 - DNA, 19 bp, Homo sapiens
  siRNA target sequence for VprBP (NM_014703.1,4161-4179).
gtcatccttccgaacattt

SEQ ID NO: 342561 - DNA, 19 bp, Homo sapiens
  siRNA target sequence for VprBP (NM_014703.1,4183-4201).
gcaactgactacaaaccta

SEQ ID NO: 342562 - DNA, 19 bp, Homo sapiens
  siRNA target sequence for VprBP (NM_014703.1,4184-4202).
caactgactacaaacctat

SEQ ID NO: 342563 - DNA, 19 bp, Homo sapiens
  siRNA target sequence for VprBP (NM_014703.1,4189-4207).
gactacaaacctatagcaa

SEQ ID NO: 342564 - DNA, 19 bp, Homo sapiens
  siRNA target sequence for VprBP (NM_014703.1,4213-4231).
gatgtgaaacggaacatct

SEQ ID NO: 342565 - DNA, 19 bp, Homo sapiens
  siRNA target sequence for VprBP (NM_014703.1,4300-4318).
ctgaacatggacacagtat

SEQ ID NO: 342566 - DNA, 19 bp, Homo sapiens
  siRNA target sequence for VprBP (NM_014703.1,4313-4331).
cagtatgcaggctgtatga

SEQ ID NO: 342567 - DNA, 19 bp, Homo sapiens
  siRNA target sequence for KIAA0562 (NM_014704.1,411-429).
ggtggcggtcacctagatt

SEQ ID NO: 342568 - DNA, 19 bp, Homo sapiens
  siRNA target sequence for KIAA0562 (NM_014704.1,412-430).
gtggcggtcacctagattt

SEQ ID NO: 342569 - DNA, 19 bp, Homo sapiens
  siRNA target sequence for KIAA0562 (NM_014704.1,463-481).
ggtggagagatgtcgaata

SEQ ID NO: 342570 - DNA, 19 bp, Homo sapiens
  siRNA target sequence for KIAA0562 (NM_014704.1,464-482).
gtggagagatgtcgaataa

SEQ ID NO: 342571 - DNA, 19 bp, Homo sapiens
  siRNA target sequence for KIAA0562 (NM_014704.1,522-540).
gtaaaattgagttctacat

SEQ ID NO: 342572 - DNA, 19 bp, Homo sapiens
  siRNA target sequence for KIAA0562 (NM_014704.1,575-593).
caagcagagcggtttcgaa

SEQ ID NO: 342573 - DNA, 19 bp, Homo sapiens
  siRNA target sequence for KIAA0562 (NM_014704.1,604-622).
cgtgtctctctgtgataat

SEQ ID NO: 342574 - DNA, 19 bp, Homo sapiens
  siRNA target sequence for KIAA0562 (NM_014704.1,646-664).
ggaactaaaatcagtttat

SEQ ID NO: 342575 - DNA, 19 bp, Homo sapiens
  siRNA target sequence for KIAA0562 (NM_014704.1,671-689).
gcagtaggacaatttctta

SEQ ID NO: 342576 - DNA, 19 bp, Homo sapiens
  siRNA target sequence for KIAA0562 (NM_014704.1,672-690).
cagtaggacaatttcttaa

SEQ ID NO: 342577 - DNA, 19 bp, Homo sapiens
  siRNA target sequence for KIAA0562 (NM_014704.1,743-761).
gctttggttgccataaata

SEQ ID NO: 342578 - DNA, 19 bp, Homo sapiens
  siRNA target sequence for KIAA0562 (NM_014704.1,803-821).
gcctctcgagagaagttga

SEQ ID NO: 342579 - DNA, 19 bp, Homo sapiens
  siRNA target sequence for KIAA0562 (NM_014704.1,805-823).
ctctcgagagaagttgatt

SEQ ID NO: 342580 - DNA, 19 bp, Homo sapiens
  siRNA target sequence for KIAA0562 (NM_014704.1,807-825).
ctcgagagaagttgattga

SEQ ID NO: 342581 - DNA, 19 bp, Homo sapiens
  siRNA target sequence for KIAA0562 (NM_014704.1,847-865).
cgaggaccctgctctagaa

SEQ ID NO: 342582 - DNA, 19 bp, Homo sapiens
  siRNA target sequence for KIAA0562 (NM_014704.1,866-884).
ggaacgtacgccaggaaat

SEQ ID NO: 342583 - DNA, 19 bp, Homo sapiens
  siRNA target sequence for KIAA0562 (NM_014704.1,870-888).
cgtacgccaggaaatctga

SEQ ID NO: 342584 - DNA, 19 bp, Homo sapiens
  siRNA target sequence for KIAA0562 (NM_014704.1,895-913).
ctctccgctagatgactta

SEQ ID NO: 342585 - DNA, 19 bp, Homo sapiens
  siRNA target sequence for KIAA0562 (NM_014704.1,899-917).
ccgctagatgacttagctt

SEQ ID NO: 342586 - DNA, 19 bp, Homo sapiens
  siRNA target sequence for KIAA0562 (NM_014704.1,900-918).
cgctagatgacttagcttt

SEQ ID NO: 342587 - DNA, 19 bp, Homo sapiens
  siRNA target sequence for KIAA0562 (NM_014704.1,941-959).
gttgcacagatcatacgaa

SEQ ID NO: 342588 - DNA, 19 bp, Homo sapiens
  siRNA target sequence for KIAA0562 (NM_014704.1,944-962).
gcacagatcatacgaaaat

SEQ ID NO: 342589 - DNA, 19 bp, Homo sapiens
  siRNA target sequence for KIAA0562 (NM_014704.1,945-963).
cacagatcatacgaaaatt

SEQ ID NO: 342590 - DNA, 19 bp, Homo sapiens
  siRNA target sequence for KIAA0562 (NM_014704.1,949-967).
gatcatacgaaaattagat

SEQ ID NO: 342591 - DNA, 19 bp, Homo sapiens
  siRNA target sequence for KIAA0562 (NM_014704.1,988-1006).
ccaaaaggaacgctatgat

SEQ ID NO: 342592 - DNA, 19 bp, Homo sapiens
  siRNA target sequence for KIAA0562 (NM_014704.1,1065-1083).
ggaggtatgaggtagagaa

SEQ ID NO: 342593 - DNA, 19 bp, Homo sapiens
  siRNA target sequence for KIAA0562 (NM_014704.1,1092-1110).
ccgtggagaaggaagacta

SEQ ID NO: 342594 - DNA, 19 bp, Homo sapiens
  siRNA target sequence for KIAA0562 (NM_014704.1,1201-1219).
gctgatgcgaagacctttt

SEQ ID NO: 342595 - DNA, 19 bp, Homo sapiens
  siRNA target sequence for KIAA0562 (NM_014704.1,1456-1474).
gcggcctcttccagctatt

SEQ ID NO: 342596 - DNA, 19 bp, Homo sapiens
  siRNA target sequence for KIAA0562 (NM_014704.1,1459-1477).
gcctcttccagctattcgt

SEQ ID NO: 342597 - DNA, 19 bp, Homo sapiens
  siRNA target sequence for KIAA0562 (NM_014704.1,1461-1479).
ctcttccagctattcgtaa

SEQ ID NO: 342598 - DNA, 19 bp, Homo sapiens
  siRNA target sequence for KIAA0562 (NM_014704.1,1498-1516).
ggtggagccggaaatgagt

SEQ ID NO: 342599 - DNA, 19 bp, Homo sapiens
  siRNA target sequence for KIAA0562 (NM_014704.1,1499-1517).
gtggagccggaaatgagta

SEQ ID NO: 342600 - DNA, 19 bp, Homo sapiens
  siRNA target sequence for KIAA0562 (NM_014704.1,1501-1519).
ggagccggaaatgagtaat

SEQ ID NO: 342601 - DNA, 19 bp, Homo sapiens
  siRNA target sequence for KIAA0562 (NM_014704.1,1634-1652).
gctgaggcctattgtaaga

SEQ ID NO: 342602 - DNA, 19 bp, Homo sapiens
  siRNA target sequence for KIAA0562 (NM_014704.1,1673-1691).
gcactgcttgccttgtcta

SEQ ID NO: 342603 - DNA, 19 bp, Homo sapiens
  siRNA target sequence for KIAA0562 (NM_014704.1,1674-1692).
cactgcttgccttgtctaa

SEQ ID NO: 342604 - DNA, 19 bp, Homo sapiens
  siRNA target sequence for KIAA0562 (NM_014704.1,1683-1701).
ccttgtctaagaagttaat

SEQ ID NO: 342605 - DNA, 19 bp, Homo sapiens
  siRNA target sequence for KIAA0562 (NM_014704.1,1716-1734).
gaaccccaaaagaagattt

SEQ ID NO: 342606 - DNA, 19 bp, Homo sapiens
  siRNA target sequence for KIAA0562 (NM_014704.1,1756-1774).
cgtctttctcgttagaaga

SEQ ID NO: 342607 - DNA, 19 bp, Homo sapiens
  siRNA target sequence for KIAA0562 (NM_014704.1,1773-1791).
gagccataaaggacattgt

SEQ ID NO: 342608 - DNA, 19 bp, Homo sapiens
  siRNA target sequence for KIAA0562 (NM_014704.1,1797-1815).
ccgtttttcaggcttcttt

SEQ ID NO: 342609 - DNA, 19 bp, Homo sapiens
  siRNA target sequence for KIAA0562 (NM_014704.1,1822-1840).
gttgaaaatgatcattaca

SEQ ID NO: 342610 - DNA, 19 bp, Homo sapiens
  siRNA target sequence for KIAA0562 (NM_014704.1,1896-1914).
ggaccattcccgttttgct

SEQ ID NO: 342611 - DNA, 19 bp, Homo sapiens
  siRNA target sequence for KIAA0562 (NM_014704.1,1915-1933).
caccagaactggagattct

SEQ ID NO: 342612 - DNA, 19 bp, Homo sapiens
  siRNA target sequence for KIAA0562 (NM_014704.1,1945-1963).
ccgcgtcacagctgcaaat

SEQ ID NO: 342613 - DNA, 19 bp, Homo sapiens
  siRNA target sequence for KIAA0562 (NM_014704.1,1946-1964).
cgcgtcacagctgcaaatt

SEQ ID NO: 342614 - DNA, 19 bp, Homo sapiens
  siRNA target sequence for KIAA0562 (NM_014704.1,1947-1965).
gcgtcacagctgcaaattt

SEQ ID NO: 342615 - DNA, 19 bp, Homo sapiens
  siRNA target sequence for KIAA0562 (NM_014704.1,1970-1988).
caggaaatggccttgttta

SEQ ID NO: 342616 - DNA, 19 bp, Homo sapiens
  siRNA target sequence for KIAA0562 (NM_014704.1,1999-2017).
gtctctccaaattattcca

SEQ ID NO: 342617 - DNA, 19 bp, Homo sapiens
  siRNA target sequence for KIAA0562 (NM_014704.1,2190-2208).
gcgagacggcggttcgaat

SEQ ID NO: 342618 - DNA, 19 bp, Homo sapiens
  siRNA target sequence for KIAA0562 (NM_014704.1,2191-2209).
cgagacggcggttcgaatt

SEQ ID NO: 342619 - DNA, 19 bp, Homo sapiens
  siRNA target sequence for KIAA0562 (NM_014704.1,2192-2210).
gagacggcggttcgaatta

SEQ ID NO: 342620 - DNA, 19 bp, Homo sapiens
  siRNA target sequence for KIAA0562 (NM_014704.1,2194-2212).
gacggcggttcgaattatt

SEQ ID NO: 342621 - DNA, 19 bp, Homo sapiens
  siRNA target sequence for KIAA0562 (NM_014704.1,2196-2214).
cggcggttcgaattatttt

SEQ ID NO: 342622 - DNA, 19 bp, Homo sapiens
  siRNA target sequence for KIAA0562 (NM_014704.1,2199-2217).
cggttcgaattattttgga

SEQ ID NO: 342623 - DNA, 19 bp, Homo sapiens
  siRNA target sequence for KIAA0562 (NM_014704.1,2205-2223).
gaattattttggacatgta

SEQ ID NO: 342624 - DNA, 19 bp, Homo sapiens
  siRNA target sequence for KIAA0562 (NM_014704.1,2272-2290).
caacacacgcaggaacatt

SEQ ID NO: 342625 - DNA, 19 bp, Homo sapiens
  siRNA target sequence for KIAA0562 (NM_014704.1,2277-2295).
cacgcaggaacattctcta

SEQ ID NO: 342626 - DNA, 19 bp, Homo sapiens
  siRNA target sequence for KIAA0562 (NM_014704.1,2280-2298).
gcaggaacattctctacaa

SEQ ID NO: 342627 - DNA, 19 bp, Homo sapiens
  siRNA target sequence for KIAA0562 (NM_014704.1,2311-2329).
gggatttgctaaaatagat

SEQ ID NO: 342628 - DNA, 19 bp, Homo sapiens
  siRNA target sequence for KIAA0562 (NM_014704.1,2362-2380).
gagaaaagcggctacagaa

SEQ ID NO: 342629 - DNA, 19 bp, Homo sapiens
  siRNA target sequence for KIAA0562 (NM_014704.1,2545-2563).
cccggatgagcactatcta

SEQ ID NO: 342630 - DNA, 19 bp, Homo sapiens
  siRNA target sequence for KIAA0562 (NM_014704.1,2547-2565).
cggatgagcactatctaga

SEQ ID NO: 342631 - DNA, 19 bp, Homo sapiens
  siRNA target sequence for KIAA0562 (NM_014704.1,2548-2566).
ggatgagcactatctagat

SEQ ID NO: 342632 - DNA, 19 bp, Homo sapiens
  siRNA target sequence for KIAA0562 (NM_014704.1,2549-2567).
gatgagcactatctagata

SEQ ID NO: 342633 - DNA, 19 bp, Homo sapiens
  siRNA target sequence for KIAA0562 (NM_014704.1,2552-2570).
gagcactatctagataatt

SEQ ID NO: 342634 - DNA, 19 bp, Homo sapiens
  siRNA target sequence for KIAA0562 (NM_014704.1,2557-2575).
ctatctagataatttgtgt

SEQ ID NO: 342635 - DNA, 19 bp, Homo sapiens
  siRNA target sequence for KIAA0562 (NM_014704.1,2710-2728).
gctgacggaatgtgacaaa

SEQ ID NO: 342636 - DNA, 19 bp, Homo sapiens
  siRNA target sequence for KIAA0562 (NM_014704.1,2711-2729).
ctgacggaatgtgacaaaa

SEQ ID NO: 342637 - DNA, 19 bp, Homo sapiens
  siRNA target sequence for KIAA0590 (NM_014714.1,102-120).
gcagggtcaccctcattta

SEQ ID NO: 342638 - DNA, 19 bp, Homo sapiens
  siRNA target sequence for KIAA0590 (NM_014714.1,103-121).
cagggtcaccctcatttat

SEQ ID NO: 342639 - DNA, 19 bp, Homo sapiens
  siRNA target sequence for KIAA0590 (NM_014714.1,209-227).
ggagtgcgtgccagataca

SEQ ID NO: 342640 - DNA, 19 bp, Homo sapiens
  siRNA target sequence for KIAA0590 (NM_014714.1,478-496).
ggacgcctctgctgaaaca

SEQ ID NO: 342641 - DNA, 19 bp, Homo sapiens
  siRNA target sequence for KIAA0590 (NM_014714.1,547-565).
gcgaggacctggttcagtt

SEQ ID NO: 342642 - DNA, 19 bp, Homo sapiens
  siRNA target sequence for KIAA0590 (NM_014714.1,577-595).
ctgtgagcggtgatgagaa

SEQ ID NO: 342643 - DNA, 19 bp, Homo sapiens
  siRNA target sequence for KIAA0590 (NM_014714.1,597-615).
gccctggacatgtttaact

SEQ ID NO: 342644 - DNA, 19 bp, Homo sapiens
  siRNA target sequence for KIAA0590 (NM_014714.1,655-673).
ctcacgaggggctgttgtt

SEQ ID NO: 342645 - DNA, 19 bp, Homo sapiens
  siRNA target sequence for KIAA0590 (NM_014714.1,659-677).
cgaggggctgttgttcttt

SEQ ID NO: 342646 - DNA, 19 bp, Homo sapiens
  siRNA target sequence for KIAA0590 (NM_014714.1,745-763).
cagacagcacgattcagat

SEQ ID NO: 342647 - DNA, 19 bp, Homo sapiens
  siRNA target sequence for KIAA0590 (NM_014714.1,754-772).
cgattcagatgctgttcta

SEQ ID NO: 342648 - DNA, 19 bp, Homo sapiens
  siRNA target sequence for KIAA0590 (NM_014714.1,898-916).
gggcagacatcgctttgat

SEQ ID NO: 342649 - DNA, 19 bp, Homo sapiens
  siRNA target sequence for KIAA0590 (NM_014714.1,899-917).
ggcagacatcgctttgatt

SEQ ID NO: 342650 - DNA, 19 bp, Homo sapiens
  siRNA target sequence for KIAA0590 (NM_014714.1,975-993).
gaacgaggagagaattata

SEQ ID NO: 342651 - DNA, 19 bp, Homo sapiens
  siRNA target sequence for KIAA0590 (NM_014714.1,979-997).
gaggagagaattatatact

SEQ ID NO: 342652 - DNA, 19 bp, Homo sapiens
  siRNA target sequence for KIAA0590 (NM_014714.1,1047-1065).
gtgtgttactgtaaagtca

SEQ ID NO: 342653 - DNA, 19 bp, Homo sapiens
  siRNA target sequence for KIAA0590 (NM_014714.1,1180-1198).
ctaccgagctccaaggaaa

SEQ ID NO: 342654 - DNA, 19 bp, Homo sapiens
  siRNA target sequence for KIAA0590 (NM_014714.1,1327-1345).
ccccgagtctgctgaatgt

SEQ ID NO: 342655 - DNA, 19 bp, Homo sapiens
  siRNA target sequence for KIAA0590 (NM_014714.1,1506-1524).
gagacgcctgtgttagcaa

SEQ ID NO: 342656 - DNA, 19 bp, Homo sapiens
  siRNA target sequence for KIAA0590 (NM_014714.1,1550-1568).
ggagtcaaaccgagttcaa

SEQ ID NO: 342657 - DNA, 19 bp, Homo sapiens
  siRNA target sequence for KIAA0590 (NM_014714.1,1553-1571).
gtcaaaccgagttcaagtt

SEQ ID NO: 342658 - DNA, 19 bp, Homo sapiens
  siRNA target sequence for KIAA0590 (NM_014714.1,1577-1595).
ctggcaggggactgtcaaa

SEQ ID NO: 342659 - DNA, 19 bp, Homo sapiens
  siRNA target sequence for KIAA0590 (NM_014714.1,1579-1597).
ggcaggggactgtcaaaca

SEQ ID NO: 342660 - DNA, 19 bp, Homo sapiens
  siRNA target sequence for KIAA0590 (NM_014714.1,1580-1598).
gcaggggactgtcaaacaa

SEQ ID NO: 342661 - DNA, 19 bp, Homo sapiens
  siRNA target sequence for KIAA0590 (NM_014714.1,1856-1874).
ctgcttctacgatgttgaa

SEQ ID NO: 342662 - DNA, 19 bp, Homo sapiens
  siRNA target sequence for KIAA0590 (NM_014714.1,1858-1876).
gcttctacgatgttgaaat

SEQ ID NO: 342663 - DNA, 19 bp, Homo sapiens
  siRNA target sequence for KIAA0590 (NM_014714.1,1882-1900).
cagtgaccgtctttgactt

SEQ ID NO: 342664 - DNA, 19 bp, Homo sapiens
  siRNA target sequence for KIAA0590 (NM_014714.1,1898-1916).
cttcaagactggacaaatt

SEQ ID NO: 342665 - DNA, 19 bp, Homo sapiens
  siRNA target sequence for KIAA0590 (NM_014714.1,2119-2137).
gccctgcggcagatgtttt

SEQ ID NO: 342666 - DNA, 19 bp, Homo sapiens
  siRNA target sequence for KIAA0590 (NM_014714.1,2121-2139).
cctgcggcagatgttttga

SEQ ID NO: 342667 - DNA, 19 bp, Homo sapiens
  siRNA target sequence for KIAA0590 (NM_014714.1,2229-2247).
gaagtgccttattactact

SEQ ID NO: 342668 - DNA, 19 bp, Homo sapiens
  siRNA target sequence for KIAA0590 (NM_014714.1,2235-2253).
ccttattactacttcacaa

SEQ ID NO: 342669 - DNA, 19 bp, Homo sapiens
  siRNA target sequence for KIAA0590 (NM_014714.1,2327-2345).
gagacccctgcgagacttt

SEQ ID NO: 342670 - DNA, 19 bp, Homo sapiens
  siRNA target sequence for KIAA0590 (NM_014714.1,2329-2347).
gacccctgcgagactttgt

SEQ ID NO: 342671 - DNA, 19 bp, Homo sapiens
  siRNA target sequence for KIAA0590 (NM_014714.1,2424-2442).
gacgaagccttcaaatcca

SEQ ID NO: 342672 - DNA, 19 bp, Homo sapiens
  siRNA target sequence for KIAA0590 (NM_014714.1,2673-2691).
cacgacctcctgaacaagt

SEQ ID NO: 342673 - DNA, 19 bp, Homo sapiens
  siRNA target sequence for KIAA0590 (NM_014714.1,2892-2910).
ctggagctctacgtgaata

SEQ ID NO: 342674 - DNA, 19 bp, Homo sapiens
  siRNA target sequence for KIAA0590 (NM_014714.1,2898-2916).
ctctacgtgaataaaatga

SEQ ID NO: 342675 - DNA, 19 bp, Homo sapiens
  siRNA target sequence for KIAA0590 (NM_014714.1,3139-3157).
ggcaggcggtgcacttcta

SEQ ID NO: 342676 - DNA, 19 bp, Homo sapiens
  siRNA target sequence for KIAA0590 (NM_014714.1,3442-3460).
gctgctccgacttcttcat

SEQ ID NO: 342677 - DNA, 19 bp, Homo sapiens
  siRNA target sequence for KIAA0590 (NM_014714.1,3786-3804).
cagaaggaaatctacatca

SEQ ID NO: 342678 - DNA, 19 bp, Homo sapiens
  siRNA target sequence for RICS (NM_014715.2,336-354).
gcagcggggaatcttgaaa

SEQ ID NO: 342679 - DNA, 19 bp, Homo sapiens
  siRNA target sequence for RICS (NM_014715.2,409-427).
gtgccgcaggttcttcaaa

SEQ ID NO: 342680 - DNA, 19 bp, Homo sapiens
  siRNA target sequence for RICS (NM_014715.2,502-520).
cagagactacgccatgaat

SEQ ID NO: 342681 - DNA, 19 bp, Homo sapiens
  siRNA target sequence for RICS (NM_014715.2,504-522).
gagactacgccatgaattt

SEQ ID NO: 342682 - DNA, 19 bp, Homo sapiens
  siRNA target sequence for RICS (NM_014715.2,506-524).
gactacgccatgaatttga

SEQ ID NO: 342683 - DNA, 19 bp, Homo sapiens
  siRNA target sequence for RICS (NM_014715.2,508-526).
ctacgccatgaatttgact

SEQ ID NO: 342684 - DNA, 19 bp, Homo sapiens
  siRNA target sequence for RICS (NM_014715.2,537-555).
ccccgacctgacgaaagaa

SEQ ID NO: 342685 - DNA, 19 bp, Homo sapiens
  siRNA target sequence for RICS (NM_014715.2,546-564).
gacgaaagaaccgtatgtt

SEQ ID NO: 342686 - DNA, 19 bp, Homo sapiens
  siRNA target sequence for RICS (NM_014715.2,587-605).
ccctatgtaagctgtactt

SEQ ID NO: 342687 - DNA, 19 bp, Homo sapiens
  siRNA target sequence for RICS (NM_014715.2,768-786).
gtctcttctagctgactat

SEQ ID NO: 342688 - DNA, 19 bp, Homo sapiens
  siRNA target sequence for RICS (NM_014715.2,772-790).
cttctagctgactattgtt

SEQ ID NO: 342689 - DNA, 19 bp, Homo sapiens
  siRNA target sequence for RICS (NM_014715.2,781-799).
gactattgttccatcacaa

SEQ ID NO: 342690 - DNA, 19 bp, Homo sapiens
  siRNA target sequence for RICS (NM_014715.2,783-801).
ctattgttccatcacaaat

SEQ ID NO: 342691 - DNA, 19 bp, Homo sapiens
  siRNA target sequence for RICS (NM_014715.2,831-849).
ggctccaaacctgttaaga

SEQ ID NO: 342692 - DNA, 19 bp, Homo sapiens
  siRNA target sequence for RICS (NM_014715.2,832-850).
gctccaaacctgttaagat

SEQ ID NO: 342693 - DNA, 19 bp, Homo sapiens
  siRNA target sequence for RICS (NM_014715.2,987-1005).
gggggcagcttctctatca

SEQ ID NO: 342694 - DNA, 19 bp, Homo sapiens
  siRNA target sequence for RICS (NM_014715.2,988-1006).
ggggcagcttctctatcaa

SEQ ID NO: 342695 - DNA, 19 bp, Homo sapiens
  siRNA target sequence for RICS (NM_014715.2,1062-1080).
ggcccaggcacgaacacaa

SEQ ID NO: 342696 - DNA, 19 bp, Homo sapiens
  siRNA target sequence for RICS (NM_014715.2,1096-1114).
ccaattgtgacggaaaata

SEQ ID NO: 342697 - DNA, 19 bp, Homo sapiens
  siRNA target sequence for RICS (NM_014715.2,1227-1245).
gggtagctggcgttccttt

SEQ ID NO: 342698 - DNA, 19 bp, Homo sapiens
  siRNA target sequence for RICS (NM_014715.2,1228-1246).
ggtagctggcgttcctttt

SEQ ID NO: 342699 - DNA, 19 bp, Homo sapiens
  siRNA target sequence for RICS (NM_014715.2,1229-1247).
gtagctggcgttccttttt

SEQ ID NO: 342700 - DNA, 19 bp, Homo sapiens
  siRNA target sequence for RICS (NM_014715.2,1254-1272).
ggggaaatcatcatctgtt

SEQ ID NO: 342701 - DNA, 19 bp, Homo sapiens
  siRNA target sequence for RICS (NM_014715.2,1265-1283).
catctgtttctaaacgaaa

SEQ ID NO: 342702 - DNA, 19 bp, Homo sapiens
  siRNA target sequence for RICS (NM_014715.2,1400-1418).
cagttgatggtgattctaa

SEQ ID NO: 342703 - DNA, 19 bp, Homo sapiens
  siRNA target sequence for RICS (NM_014715.2,1456-1474).
gcactgtctgcctctttta

SEQ ID NO: 342704 - DNA, 19 bp, Homo sapiens
  siRNA target sequence for RICS (NM_014715.2,1486-1504).
ctggggaaccgctgtaact

SEQ ID NO: 342705 - DNA, 19 bp, Homo sapiens
  siRNA target sequence for RICS (NM_014715.2,1499-1517).
gtaactcctatgataatct

SEQ ID NO: 342706 - DNA, 19 bp, Homo sapiens
  siRNA target sequence for RICS (NM_014715.2,1516-1534).
ctgcctcatgacaatgaga

SEQ ID NO: 342707 - DNA, 19 bp, Homo sapiens
  siRNA target sequence for RICS (NM_014715.2,1569-1587).
ccttatgtctcctcattca

SEQ ID NO: 342708 - DNA, 19 bp, Homo sapiens
  siRNA target sequence for RICS (NM_014715.2,1586-1604).
cagctgaggatgttgactt

SEQ ID NO: 342709 - DNA, 19 bp, Homo sapiens
  siRNA target sequence for RICS (NM_014715.2,1622-1640).
gagtagccagcctggattt

SEQ ID NO: 342710 - DNA, 19 bp, Homo sapiens
  siRNA target sequence for RICS (NM_014715.2,1631-1649).
gcctggattttgatccaat

SEQ ID NO: 342711 - DNA, 19 bp, Homo sapiens
  siRNA target sequence for RICS (NM_014715.2,1635-1653).
ggattttgatccaatgtca

SEQ ID NO: 342712 - DNA, 19 bp, Homo sapiens
  siRNA target sequence for RICS (NM_014715.2,1642-1660).
gatccaatgtcatttcaat

SEQ ID NO: 342713 - DNA, 19 bp, Homo sapiens
  siRNA target sequence for RICS (NM_014715.2,1697-1715).
gtggtgcttcctttttaga

SEQ ID NO: 342714 - DNA, 19 bp, Homo sapiens
  siRNA target sequence for RICS (NM_014715.2,1720-1738).
ccaggatactccaaggata

SEQ ID NO: 342715 - DNA, 19 bp, Homo sapiens
  siRNA target sequence for RICS (NM_014715.2,1721-1739).
caggatactccaaggataa

SEQ ID NO: 342716 - DNA, 19 bp, Homo sapiens
  siRNA target sequence for RICS (NM_014715.2,1866-1884).
gagcccaactgaagataaa

SEQ ID NO: 342717 - DNA, 19 bp, Homo sapiens
  siRNA target sequence for RICS (NM_014715.2,1870-1888).
ccaactgaagataaatcat

SEQ ID NO: 342718 - DNA, 19 bp, Homo sapiens
  siRNA target sequence for RICS (NM_014715.2,1909-1927).
gaaaaggtcgtctatgctt

SEQ ID NO: 342719 - DNA, 19 bp, Homo sapiens
  siRNA target sequence for RICS (NM_014715.2,1964-1982).
cttctatgagcatatctga

SEQ ID NO: 342720 - DNA, 19 bp, Homo sapiens
  siRNA target sequence for RICS (NM_014715.2,2006-2024).
cacgggtgtcagaagtcat

SEQ ID NO: 342721 - DNA, 19 bp, Homo sapiens
  siRNA target sequence for RICS (NM_014715.2,2022-2040).
cattggtacagtctcaaat

SEQ ID NO: 342722 - DNA, 19 bp, Homo sapiens
  siRNA target sequence for RICS (NM_014715.2,2026-2044).
ggtacagtctcaaatacca

SEQ ID NO: 342723 - DNA, 19 bp, Homo sapiens
  siRNA target sequence for RICS (NM_014715.2,2047-2065).
gctcagaatgcatcatctt

SEQ ID NO: 342724 - DNA, 19 bp, Homo sapiens
  siRNA target sequence for RICS (NM_014715.2,2108-2126).
gatcccccacccagatagt

SEQ ID NO: 342725 - DNA, 19 bp, Homo sapiens
  siRNA target sequence for RICS (NM_014715.2,2111-2129).
cccccacccagatagtaaa

SEQ ID NO: 342726 - DNA, 19 bp, Homo sapiens
  siRNA target sequence for RICS (NM_014715.2,2113-2131).
cccacccagatagtaaaga

SEQ ID NO: 342727 - DNA, 19 bp, Homo sapiens
  siRNA target sequence for RICS (NM_014715.2,2114-2132).
ccacccagatagtaaagat

SEQ ID NO: 342728 - DNA, 19 bp, Homo sapiens
  siRNA target sequence for RICS (NM_014715.2,2378-2396).
gaatgttggcgctagcatt

SEQ ID NO: 342729 - DNA, 19 bp, Homo sapiens
  siRNA target sequence for RICS (NM_014715.2,2382-2400).
gttggcgctagcattagct

SEQ ID NO: 342730 - DNA, 19 bp, Homo sapiens
  siRNA target sequence for RICS (NM_014715.2,2416-2434).
gcctcaactcagtcattga

SEQ ID NO: 342731 - DNA, 19 bp, Homo sapiens
  siRNA target sequence for RICS (NM_014715.2,2452-2470).
caggctgggtatacaaatt

SEQ ID NO: 342732 - DNA, 19 bp, Homo sapiens
  siRNA target sequence for RICS (NM_014715.2,2485-2503).
gtggctacaactgaagata

SEQ ID NO: 342733 - DNA, 19 bp, Homo sapiens
  siRNA target sequence for RICS (NM_014715.2,2574-2592).
gttccacctccagaataat

SEQ ID NO: 342734 - DNA, 19 bp, Homo sapiens
  siRNA target sequence for RICS (NM_014715.2,2577-2595).
ccacctccagaataatgca

SEQ ID NO: 342735 - DNA, 19 bp, Homo sapiens
  siRNA target sequence for RICS (NM_014715.2,2649-2667).
ccattccaacacaactgaa

SEQ ID NO: 342736 - DNA, 19 bp, Homo sapiens
  siRNA target sequence for RICS (NM_014715.2,2680-2698).
catcaccaagtagacttaa

SEQ ID NO: 342737 - DNA, 19 bp, Homo sapiens
  siRNA target sequence for RICS (NM_014715.2,2778-2796).
gaagtctgatgatcatgta

SEQ ID NO: 342738 - DNA, 19 bp, Homo sapiens
  siRNA target sequence for RICS (NM_014715.2,2783-2801).
ctgatgatcatgtaagttt

SEQ ID NO: 342739 - DNA, 19 bp, Homo sapiens
  siRNA target sequence for RICS (NM_014715.2,3004-3022).
gggtcccccgaagagaata

SEQ ID NO: 342740 - DNA, 19 bp, Homo sapiens
  siRNA target sequence for RICS (NM_014715.2,3031-3049).
gccaccatgacttacatga

SEQ ID NO: 342741 - DNA, 19 bp, Homo sapiens
  siRNA target sequence for RICS (NM_014715.2,3039-3057).
gacttacatgacaactact

SEQ ID NO: 342742 - DNA, 19 bp, Homo sapiens
  siRNA target sequence for RICS (NM_014715.2,3147-3165).
gcgcacgcacagaactaat

SEQ ID NO: 342743 - DNA, 19 bp, Homo sapiens
  siRNA target sequence for RICS (NM_014715.2,3150-3168).
cacgcacagaactaatcgt

SEQ ID NO: 342744 - DNA, 19 bp, Homo sapiens
  siRNA target sequence for RICS (NM_014715.2,3235-3253).
gcaaccaatataggattaa

SEQ ID NO: 342745 - DNA, 19 bp, Homo sapiens
  siRNA target sequence for RICS (NM_014715.2,3393-3411).
gccaggcctgcctgagaaa

SEQ ID NO: 342746 - DNA, 19 bp, Homo sapiens
  siRNA target sequence for RICS (NM_014715.2,3395-3413).
caggcctgcctgagaaagt

SEQ ID NO: 342747 - DNA, 19 bp, Homo sapiens
  siRNA target sequence for RICS (NM_014715.2,3556-3574).
gccaccagcagttcaaatt

SEQ ID NO: 342748 - DNA, 19 bp, Homo sapiens
  siRNA target sequence for RICS (NM_014715.2,3558-3576).
caccagcagttcaaattat

SEQ ID NO: 342749 - DNA, 19 bp, Homo sapiens
  siRNA target sequence for RICS (NM_014715.2,3602-3620).
cctctgtggacgatgcatt

SEQ ID NO: 342750 - DNA, 19 bp, Homo sapiens
  siRNA target sequence for RICS (NM_014715.2,3709-3727).
ccctttggtccagataact

SEQ ID NO: 342751 - DNA, 19 bp, Homo sapiens
  siRNA target sequence for RICS (NM_014715.2,3773-3791).
gtgtacctccccatcacaa

SEQ ID NO: 342752 - DNA, 19 bp, Homo sapiens
  siRNA target sequence for RICS (NM_014715.2,3775-3793).
gtacctccccatcacaata

SEQ ID NO: 342753 - DNA, 19 bp, Homo sapiens
  siRNA target sequence for RICS (NM_014715.2,3839-3857).
cctccatgggtcttcgtta

SEQ ID NO: 342754 - DNA, 19 bp, Homo sapiens
  siRNA target sequence for RICS (NM_014715.2,3840-3858).
ctccatgggtcttcgttat

SEQ ID NO: 342755 - DNA, 19 bp, Homo sapiens
  siRNA target sequence for RICS (NM_014715.2,3842-3860).
ccatgggtcttcgttataa

SEQ ID NO: 342756 - DNA, 19 bp, Homo sapiens
  siRNA target sequence for RICS (NM_014715.2,3846-3864).
gggtcttcgttataacaca

SEQ ID NO: 342757 - DNA, 19 bp, Homo sapiens
  siRNA target sequence for RICS (NM_014715.2,3847-3865).
ggtcttcgttataacacat

SEQ ID NO: 342758 - DNA, 19 bp, Homo sapiens
  siRNA target sequence for RICS (NM_014715.2,3848-3866).
gtcttcgttataacacata

SEQ ID NO: 342759 - DNA, 19 bp, Homo sapiens
  siRNA target sequence for RICS (NM_014715.2,3919-3937).
gtcgagtatgtgtcttctt

SEQ ID NO: 342760 - DNA, 19 bp, Homo sapiens
  siRNA target sequence for RICS (NM_014715.2,4100-4118).
gacctctgtaccaatataa

SEQ ID NO: 342761 - DNA, 19 bp, Homo sapiens
  siRNA target sequence for RICS (NM_014715.2,4165-4183).
cttcagccttactttgaga

SEQ ID NO: 342762 - DNA, 19 bp, Homo sapiens
  siRNA target sequence for RICS (NM_014715.2,4189-4207).
cgggtccactacaggtata

SEQ ID NO: 342763 - DNA, 19 bp, Homo sapiens
  siRNA target sequence for RICS (NM_014715.2,4305-4323).
ccttcccaatcgagacttt

SEQ ID NO: 342764 - DNA, 19 bp, Homo sapiens
  siRNA target sequence for RICS (NM_014715.2,4315-4333).
cgagactttgctttctaca

SEQ ID NO: 342765 - DNA, 19 bp, Homo sapiens
  siRNA target sequence for RICS (NM_014715.2,4345-4363).
caaggaaagagcttgtaca

SEQ ID NO: 342766 - DNA, 19 bp, Homo sapiens
  siRNA target sequence for RICS (NM_014715.2,4348-4366).
ggaaagagcttgtacagtt

SEQ ID NO: 342767 - DNA, 19 bp, Homo sapiens
  siRNA target sequence for RICS (NM_014715.2,4349-4367).
gaaagagcttgtacagtta

SEQ ID NO: 342768 - DNA, 19 bp, Homo sapiens
  siRNA target sequence for RICS (NM_014715.2,4398-4416).
cgtgactggctatttctct

SEQ ID NO: 342769 - DNA, 19 bp, Homo sapiens
  siRNA target sequence for RICS (NM_014715.2,4413-4431).
ctctcccaacgaccataat

SEQ ID NO: 342770 - DNA, 19 bp, Homo sapiens
  siRNA target sequence for RICS (NM_014715.2,4418-4436).
ccaacgaccataatgtagt

SEQ ID NO: 342771 - DNA, 19 bp, Homo sapiens
  siRNA target sequence for RICS (NM_014715.2,4486-4504).
cttgaggacatggaaaaat

SEQ ID NO: 342772 - DNA, 19 bp, Homo sapiens
  siRNA target sequence for RICS (NM_014715.2,4557-4575).
gcctgtcatgtcccaatat

SEQ ID NO: 342773 - DNA, 19 bp, Homo sapiens
  siRNA target sequence for RICS (NM_014715.2,4559-4577).
ctgtcatgtcccaatatga

SEQ ID NO: 342774 - DNA, 19 bp, Homo sapiens
  siRNA target sequence for RICS (NM_014715.2,4602-4620).
cgacttgggtgggatctat

SEQ ID NO: 342775 - DNA, 19 bp, Homo sapiens
  siRNA target sequence for RICS (NM_014715.2,4623-4641).
catccatctgcgtagtaaa

SEQ ID NO: 342776 - DNA, 19 bp, Homo sapiens
  siRNA target sequence for RICS (NM_014715.2,4626-4644).
ccatctgcgtagtaaatca

SEQ ID NO: 342777 - DNA, 19 bp, Homo sapiens
  siRNA target sequence for RICS (NM_014715.2,4726-4744).
gaggaccgcttctatagga

SEQ ID NO: 342778 - DNA, 19 bp, Homo sapiens
  siRNA target sequence for RICS (NM_014715.2,5016-5034).
ccacaactctggagtaaaa

SEQ ID NO: 342779 - DNA, 19 bp, Homo sapiens
  siRNA target sequence for RICS (NM_014715.2,5038-5056).
gctgcatccgggcaagaat

SEQ ID NO: 342780 - DNA, 19 bp, Homo sapiens
  siRNA target sequence for RICS (NM_014715.2,5046-5064).
cgggcaagaatctttaaga

SEQ ID NO: 342781 - DNA, 19 bp, Homo sapiens
  siRNA target sequence for RICS (NM_014715.2,5309-5327).
ctgttgtgtcccagtatga

SEQ ID NO: 342782 - DNA, 19 bp, Homo sapiens
  siRNA target sequence for RICS (NM_014715.2,5311-5329).
gttgtgtcccagtatgata

SEQ ID NO: 342783 - DNA, 19 bp, Homo sapiens
  siRNA target sequence for RICS (NM_014715.2,5425-5443).
cagagcaggacctatgcta

SEQ ID NO: 342784 - DNA, 19 bp, Homo sapiens
  siRNA target sequence for KIAA0390 (NM_014717.1,1738-1756).
gaacatggcttcttgtcta

SEQ ID NO: 342785 - DNA, 19 bp, Homo sapiens
  siRNA target sequence for KIAA0390 (NM_014717.1,1805-1823).
gggttctgtttgataagga

SEQ ID NO: 342786 - DNA, 19 bp, Homo sapiens
  siRNA target sequence for KIAA0390 (NM_014717.1,1925-1943).
gtaagctcgaccctttaga

SEQ ID NO: 342787 - DNA, 19 bp, Homo sapiens
  siRNA target sequence for KIAA0390 (NM_014717.1,1999-2017).
cagggtcctgggaacatga

SEQ ID NO: 342788 - DNA, 19 bp, Homo sapiens
  siRNA target sequence for KIAA0390 (NM_014717.1,2295-2313).
gccatcctcctcagacatt

SEQ ID NO: 342789 - DNA, 19 bp, Homo sapiens
  siRNA target sequence for KIAA0390 (NM_014717.1,2398-2416).
ccgtactgtgggaaaactt

SEQ ID NO: 342790 - DNA, 19 bp, Homo sapiens
  siRNA target sequence for KIAA0390 (NM_014717.1,2420-2438).
ggacatcccatcaccttaa

SEQ ID NO: 342791 - DNA, 19 bp, Homo sapiens
  siRNA target sequence for KIAA0390 (NM_014717.1,2423-2441).
catcccatcaccttaaggt

SEQ ID NO: 342792 - DNA, 19 bp, Homo sapiens
  siRNA target sequence for KIAA0390 (NM_014717.1,2516-2534).
ccttaaaataccacttaga

SEQ ID NO: 342793 - DNA, 19 bp, Homo sapiens
  siRNA target sequence for KIAA0390 (NM_014717.1,2599-2617).
cacaaggatgagatgtcaa

SEQ ID NO: 342794 - DNA, 19 bp, Homo sapiens
  siRNA target sequence for KIAA0390 (NM_014717.1,2778-2796).
cccctcagatgctctgaaa

SEQ ID NO: 342795 - DNA, 19 bp, Homo sapiens
  siRNA target sequence for KIAA0390 (NM_014717.1,2840-2858).
gaagagcttatcaaagcat

SEQ ID NO: 342796 - DNA, 19 bp, Homo sapiens
  siRNA target sequence for KIAA0390 (NM_014717.1,2860-2878).
gtgagcaacggtgtgaatt

SEQ ID NO: 342797 - DNA, 19 bp, Homo sapiens
  siRNA target sequence for KIAA0390 (NM_014717.1,2864-2882).
gcaacggtgtgaatttcca

SEQ ID NO: 342798 - DNA, 19 bp, Homo sapiens
  siRNA target sequence for KIAA0390 (NM_014717.1,2865-2883).
caacggtgtgaatttccaa

SEQ ID NO: 342799 - DNA, 19 bp, Homo sapiens
  siRNA target sequence for KIAA0390 (NM_014717.1,3039-3057).
gtccgagaaatctcagtat

SEQ ID NO: 342800 - DNA, 19 bp, Homo sapiens
  siRNA target sequence for KIAA0390 (NM_014717.1,3041-3059).
ccgagaaatctcagtatga

SEQ ID NO: 342801 - DNA, 19 bp, Homo sapiens
  siRNA target sequence for KIAA0390 (NM_014717.1,3042-3060).
cgagaaatctcagtatgaa

SEQ ID NO: 342802 - DNA, 19 bp, Homo sapiens
  siRNA target sequence for KIAA0390 (NM_014717.1,3138-3156).
gcacggctgcttgttttgt

SEQ ID NO: 342803 - DNA, 19 bp, Homo sapiens
  siRNA target sequence for KIAA0390 (NM_014717.1,3216-3234).
caaagcgaaacgcaaagat

SEQ ID NO: 342804 - DNA, 19 bp, Homo sapiens
  siRNA target sequence for KIAA0390 (NM_014717.1,3294-3312).
cctgctgccctcgttacaa

SEQ ID NO: 342805 - DNA, 19 bp, Homo sapiens
  siRNA target sequence for KIAA0390 (NM_014717.1,3295-3313).
ctgctgccctcgttacaat

SEQ ID NO: 342806 - DNA, 19 bp, Homo sapiens
  siRNA target sequence for KIAA0390 (NM_014717.1,3297-3315).
gctgccctcgttacaatca

SEQ ID NO: 342807 - DNA, 19 bp, Homo sapiens
  siRNA target sequence for KIAA0390 (NM_014717.1,3298-3316).
ctgccctcgttacaatcaa

SEQ ID NO: 342808 - DNA, 19 bp, Homo sapiens
  siRNA target sequence for KIAA0390 (NM_014717.1,3301-3319).
ccctcgttacaatcaaaca

SEQ ID NO: 342809 - DNA, 19 bp, Homo sapiens
  siRNA target sequence for KIAA0390 (NM_014717.1,3302-3320).
cctcgttacaatcaaacaa

SEQ ID NO: 342810 - DNA, 19 bp, Homo sapiens
  siRNA target sequence for KIAA0390 (NM_014717.1,3303-3321).
ctcgttacaatcaaacaaa

SEQ ID NO: 342811 - DNA, 19 bp, Homo sapiens
  siRNA target sequence for KIAA0390 (NM_014717.1,3435-3453).
cgtggaccctgcattttgt

SEQ ID NO: 342812 - DNA, 19 bp, Homo sapiens
  siRNA target sequence for KIAA0390 (NM_014717.1,3436-3454).
gtggaccctgcattttgta

SEQ ID NO: 342813 - DNA, 19 bp, Homo sapiens
  siRNA target sequence for KIAA0390 (NM_014717.1,3589-3607).
gaaaccacgagtaagaaca

SEQ ID NO: 342814 - DNA, 19 bp, Homo sapiens
  siRNA target sequence for KIAA0390 (NM_014717.1,3597-3615).
gagtaagaacactactgat

SEQ ID NO: 342815 - DNA, 19 bp, Homo sapiens
  siRNA target sequence for KIAA0390 (NM_014717.1,3796-3814).
ggactggtctcacctttat

SEQ ID NO: 342816 - DNA, 19 bp, Homo sapiens
  siRNA target sequence for KIAA0390 (NM_014717.1,3937-3955).
gtcctcagggcctacagtt

SEQ ID NO: 342817 - DNA, 19 bp, Homo sapiens
  siRNA target sequence for KIAA0390 (NM_014717.1,3942-3960).
cagggcctacagttctgat

SEQ ID NO: 342818 - DNA, 19 bp, Homo sapiens
  siRNA target sequence for KIAA0390 (NM_014717.1,3985-4003).
gcaagtagcacagcaaatt

SEQ ID NO: 342819 - DNA, 19 bp, Homo sapiens
  siRNA target sequence for KIAA0390 (NM_014717.1,3998-4016).
caaattctggatgtatcaa

SEQ ID NO: 342820 - DNA, 19 bp, Homo sapiens
  siRNA target sequence for KIAA0738 (NM_014719.1,209-227).
ccatgtgaactgcttctta

SEQ ID NO: 342821 - DNA, 19 bp, Homo sapiens
  siRNA target sequence for KIAA0738 (NM_014719.1,544-562).
gctggtcaagttcatgaaa

SEQ ID NO: 342822 - DNA, 19 bp, Homo sapiens
  siRNA target sequence for KIAA0738 (NM_014719.1,547-565).
ggtcaagttcatgaaatgt

SEQ ID NO: 342823 - DNA, 19 bp, Homo sapiens
  siRNA target sequence for KIAA0738 (NM_014719.1,660-678).
ccagtgtggctggcattta

SEQ ID NO: 342824 - DNA, 19 bp, Homo sapiens
  siRNA target sequence for KIAA0738 (NM_014719.1,663-681).
gtgtggctggcatttactt

SEQ ID NO: 342825 - DNA, 19 bp, Homo sapiens
  siRNA target sequence for KIAA0738 (NM_014719.1,667-685).
ggctggcatttactttact

SEQ ID NO: 342826 - DNA, 19 bp, Homo sapiens
  siRNA target sequence for KIAA0738 (NM_014719.1,695-713).
ggggacacgagtttcttta

SEQ ID NO: 342827 - DNA, 19 bp, Homo sapiens
  siRNA target sequence for KIAA0738 (NM_014719.1,696-714).
gggacacgagtttctttaa

SEQ ID NO: 342828 - DNA, 19 bp, Homo sapiens
  siRNA target sequence for KIAA0738 (NM_014719.1,739-757).
cccagtgttggttagttgt

SEQ ID NO: 342829 - DNA, 19 bp, Homo sapiens
  siRNA target sequence for C6orf56 (NM_014721.1,63-81).
gacggactggacaaagctt

SEQ ID NO: 342830 - DNA, 19 bp, Homo sapiens
  siRNA target sequence for C6orf56 (NM_014721.1,71-89).
ggacaaagcttctatagca

SEQ ID NO: 342831 - DNA, 19 bp, Homo sapiens
  siRNA target sequence for C6orf56 (NM_014721.1,151-169).
ccaccattggtaaaatctt

SEQ ID NO: 342832 - DNA, 19 bp, Homo sapiens
  siRNA target sequence for C6orf56 (NM_014721.1,197-215).
gaccagcgacaaatttaga

SEQ ID NO: 342833 - DNA, 19 bp, Homo sapiens
  siRNA target sequence for C6orf56 (NM_014721.1,199-217).
ccagcgacaaatttagaga

SEQ ID NO: 342834 - DNA, 19 bp, Homo sapiens
  siRNA target sequence for C6orf56 (NM_014721.1,200-218).
cagcgacaaatttagagaa

SEQ ID NO: 342835 - DNA, 19 bp, Homo sapiens
  siRNA target sequence for C6orf56 (NM_014721.1,214-232).
gagaaacctcggcagtatt

SEQ ID NO: 342836 - DNA, 19 bp, Homo sapiens
  siRNA target sequence for C6orf56 (NM_014721.1,223-241).
cggcagtattagaaaggaa

SEQ ID NO: 342837 - DNA, 19 bp, Homo sapiens
  siRNA target sequence for C6orf56 (NM_014721.1,242-260).
gatatccacacgacaaagt

SEQ ID NO: 342838 - DNA, 19 bp, Homo sapiens
  siRNA target sequence for C6orf56 (NM_014721.1,280-298).
ggggagtgcttaaggaatt

SEQ ID NO: 342839 - DNA, 19 bp, Homo sapiens
  siRNA target sequence for C6orf56 (NM_014721.1,312-330).
ggagatgtaacagttaact

SEQ ID NO: 342840 - DNA, 19 bp, Homo sapiens
  siRNA target sequence for C6orf56 (NM_014721.1,313-331).
gagatgtaacagttaactt

SEQ ID NO: 342841 - DNA, 19 bp, Homo sapiens
  siRNA target sequence for C6orf56 (NM_014721.1,376-394).
cccgagaggaaaatgtagt

SEQ ID NO: 342842 - DNA, 19 bp, Homo sapiens
  siRNA target sequence for C6orf56 (NM_014721.1,378-396).
cgagaggaaaatgtagtaa

SEQ ID NO: 342843 - DNA, 19 bp, Homo sapiens
  siRNA target sequence for C6orf56 (NM_014721.1,711-729).
ggctcctctcattcaaaaa

SEQ ID NO: 342844 - DNA, 19 bp, Homo sapiens
  siRNA target sequence for C6orf56 (NM_014721.1,781-799).
ctcgtcccaaagcttcaaa

SEQ ID NO: 342845 - DNA, 19 bp, Homo sapiens
  siRNA target sequence for C6orf56 (NM_014721.1,800-818).
ggagacagtttctagcaaa

SEQ ID NO: 342846 - DNA, 19 bp, Homo sapiens
  siRNA target sequence for C6orf56 (NM_014721.1,1071-1089).
cttgaggatcagtgcatta

SEQ ID NO: 342847 - DNA, 19 bp, Homo sapiens
  siRNA target sequence for C6orf56 (NM_014721.1,1176-1194).
gaagagccgacgaacagaa

SEQ ID NO: 342848 - DNA, 19 bp, Homo sapiens
  siRNA target sequence for C6orf56 (NM_014721.1,1205-1223).
ctcaggcactggcttaagt

SEQ ID NO: 342849 - DNA, 19 bp, Homo sapiens
  siRNA target sequence for C6orf56 (NM_014721.1,1209-1227).
ggcactggcttaagtgtta

SEQ ID NO: 342850 - DNA, 19 bp, Homo sapiens
  siRNA target sequence for C6orf56 (NM_014721.1,1210-1228).
gcactggcttaagtgttaa

SEQ ID NO: 342851 - DNA, 19 bp, Homo sapiens
  siRNA target sequence for C6orf56 (NM_014721.1,1299-1317).
gggctgatgggcgaatctt

SEQ ID NO: 342852 - DNA, 19 bp, Homo sapiens
  siRNA target sequence for C6orf56 (NM_014721.1,1301-1319).
gctgatgggcgaatcttca

SEQ ID NO: 342853 - DNA, 19 bp, Homo sapiens
  siRNA target sequence for C6orf56 (NM_014721.1,1304-1322).
gatgggcgaatcttcagaa

SEQ ID NO: 342854 - DNA, 19 bp, Homo sapiens
  siRNA target sequence for C6orf56 (NM_014721.1,1310-1328).
cgaatcttcagaatccttt

SEQ ID NO: 342855 - DNA, 19 bp, Homo sapiens
  siRNA target sequence for C6orf56 (NM_014721.1,1381-1399).
cggacgggcctatcttgta

SEQ ID NO: 342856 - DNA, 19 bp, Homo sapiens
  siRNA target sequence for C6orf56 (NM_014721.1,1383-1401).
gacgggcctatcttgtaca

SEQ ID NO: 342857 - DNA, 19 bp, Homo sapiens
  siRNA target sequence for C6orf56 (NM_014721.1,1475-1493).
ggatactcttgctatcaaa

SEQ ID NO: 342858 - DNA, 19 bp, Homo sapiens
  siRNA target sequence for C6orf56 (NM_014721.1,1497-1515).
ggcaacagaccatctaaga

SEQ ID NO: 342859 - DNA, 19 bp, Homo sapiens
  siRNA target sequence for C6orf56 (NM_014721.1,1498-1516).
gcaacagaccatctaagaa

SEQ ID NO: 342860 - DNA, 19 bp, Homo sapiens
  siRNA target sequence for C6orf56 (NM_014721.1,1499-1517).
caacagaccatctaagaaa

SEQ ID NO: 342861 - DNA, 19 bp, Homo sapiens
  siRNA target sequence for C6orf56 (NM_014721.1,1535-1553).
catcttgcagcgtacatct

SEQ ID NO: 342862 - DNA, 19 bp, Homo sapiens
  siRNA target sequence for C6orf56 (NM_014721.1,1565-1583).
gcaggaaatccgacaacaa

SEQ ID NO: 342863 - DNA, 19 bp, Homo sapiens
  siRNA target sequence for C6orf56 (NM_014721.1,1566-1584).
caggaaatccgacaacaaa

SEQ ID NO: 342864 - DNA, 19 bp, Homo sapiens
  siRNA target sequence for C6orf56 (NM_014721.1,1619-1637).
gcccacaactgaagaatta

SEQ ID NO: 342865 - DNA, 19 bp, Homo sapiens
  siRNA target sequence for C6orf56 (NM_014721.1,1758-1776).
cgaaggatcctgcgattta

SEQ ID NO: 342866 - DNA, 19 bp, Homo sapiens
  siRNA target sequence for C6orf56 (NM_014721.1,1759-1777).
gaaggatcctgcgatttaa

SEQ ID NO: 342867 - DNA, 19 bp, Homo sapiens
  siRNA target sequence for C6orf56 (NM_014721.1,1762-1780).
ggatcctgcgatttaacga

SEQ ID NO: 342868 - DNA, 19 bp, Homo sapiens
  siRNA target sequence for C6orf56 (NM_014721.1,1769-1787).
gcgatttaacgagtatgta

SEQ ID NO: 342869 - DNA, 19 bp, Homo sapiens
  siRNA target sequence for C6orf56 (NM_014721.1,1771-1789).
gatttaacgagtatgtaga

SEQ ID NO: 342870 - DNA, 19 bp, Homo sapiens
  siRNA target sequence for C6orf56 (NM_014721.1,1829-1847).
gccctgggccaggttaaca

SEQ ID NO: 342871 - DNA, 19 bp, Homo sapiens
  siRNA target sequence for C6orf56 (NM_014721.1,1914-1932).
gaagagagtcgacagttta

SEQ ID NO: 342872 - DNA, 19 bp, Homo sapiens
  siRNA target sequence for C6orf56 (NM_014721.1,1917-1935).
gagagtcgacagtttacaa

SEQ ID NO: 342873 - DNA, 19 bp, Homo sapiens
  siRNA target sequence for ProSAPiP2 (NM_014726.1,1182-1200).
ccagttccagcatgagtta

SEQ ID NO: 342874 - DNA, 19 bp, Homo sapiens
  siRNA target sequence for ProSAPiP2 (NM_014726.1,1419-1437).
ccctccctgcactgattta

SEQ ID NO: 342875 - DNA, 19 bp, Homo sapiens
  siRNA target sequence for ProSAPiP2 (NM_014726.1,1687-1705).
gacatggcgtgggtgaaaa

SEQ ID NO: 342876 - DNA, 19 bp, Homo sapiens
  siRNA target sequence for ProSAPiP2 (NM_014726.1,1689-1707).
catggcgtgggtgaaaaga

SEQ ID NO: 342877 - DNA, 19 bp, Homo sapiens
  siRNA target sequence for ProSAPiP2 (NM_014726.1,1692-1710).
ggcgtgggtgaaaagagtt

SEQ ID NO: 342878 - DNA, 19 bp, Homo sapiens
  siRNA target sequence for ProSAPiP2 (NM_014726.1,1789-1807).
ctacaggggagaatcttga

SEQ ID NO: 342879 - DNA, 19 bp, Homo sapiens
  siRNA target sequence for ProSAPiP2 (NM_014726.1,2552-2570).
cctggccgtccatcaactt

SEQ ID NO: 342880 - DNA, 19 bp, Homo sapiens
  siRNA target sequence for KIAA0513 (NM_014732.1,651-669).
ccgtgggctcgctaatcga

SEQ ID NO: 342881 - DNA, 19 bp, Homo sapiens
  siRNA target sequence for KIAA0513 (NM_014732.1,778-796).
gtctgcggacagtgagaat

SEQ ID NO: 342882 - DNA, 19 bp, Homo sapiens
  siRNA target sequence for KIAA0513 (NM_014732.1,782-800).
gcggacagtgagaatgaca

SEQ ID NO: 342883 - DNA, 19 bp, Homo sapiens
  siRNA target sequence for KIAA0513 (NM_014732.1,1102-1120).
cctggtgcagtcttttgca

SEQ ID NO: 342884 - DNA, 19 bp, Homo sapiens
  siRNA target sequence for KIAA0513 (NM_014732.1,1688-1706).
cggttcaacgagaacatca

SEQ ID NO: 342885 - DNA, 19 bp, Homo sapiens
  siRNA target sequence for KIAA0513 (NM_014732.1,1722-1740).
gcacattcacgcacaacat

SEQ ID NO: 342886 - DNA, 19 bp, Homo sapiens
  siRNA target sequence for KIAA0513 (NM_014732.1,1836-1854).
gtgaccacattgagcaaat

SEQ ID NO: 342887 - DNA, 19 bp, Homo sapiens
  siRNA target sequence for KIAA0101 (NM_014736.3,236-254).
caagtggcaaaaaggaatt

SEQ ID NO: 342888 - DNA, 19 bp, Homo sapiens
  siRNA target sequence for KIAA0101 (NM_014736.3,269-287).
gttgtcccctaaagattct

SEQ ID NO: 342889 - DNA, 19 bp, Homo sapiens
  siRNA target sequence for KIAA0101 (NM_014736.3,272-290).
gtcccctaaagattctgaa

SEQ ID NO: 342890 - DNA, 19 bp, Homo sapiens
  siRNA target sequence for KIAA0101 (NM_014736.3,362-380).
gcaacctgatcacacaaat

SEQ ID NO: 342891 - DNA, 19 bp, Homo sapiens
  siRNA target sequence for KIAA0652 (NM_014741.1,399-417).
gctcggcttggtgaaaaga

SEQ ID NO: 342892 - DNA, 19 bp, Homo sapiens
  siRNA target sequence for KIAA0652 (NM_014741.1,402-420).
cggcttggtgaaaagattt

SEQ ID NO: 342893 - DNA, 19 bp, Homo sapiens
  siRNA target sequence for KIAA0652 (NM_014741.1,442-460).
caacgggttcagattggtt

SEQ ID NO: 342894 - DNA, 19 bp, Homo sapiens
  siRNA target sequence for KIAA0652 (NM_014741.1,447-465).
ggttcagattggttcaact

SEQ ID NO: 342895 - DNA, 19 bp, Homo sapiens
  siRNA target sequence for KIAA0652 (NM_014741.1,453-471).
gattggttcaacttagcaa

SEQ ID NO: 342896 - DNA, 19 bp, Homo sapiens
  siRNA target sequence for KIAA0652 (NM_014741.1,457-475).
ggttcaacttagcaatcaa

SEQ ID NO: 342897 - DNA, 19 bp, Homo sapiens
  siRNA target sequence for KIAA0652 (NM_014741.1,458-476).
gttcaacttagcaatcaaa

SEQ ID NO: 342898 - DNA, 19 bp, Homo sapiens
  siRNA target sequence for KIAA0652 (NM_014741.1,550-568).
gtgtggagatttcacttaa

SEQ ID NO: 342899 - DNA, 19 bp, Homo sapiens
  siRNA target sequence for KIAA0652 (NM_014741.1,554-572).
ggagatttcacttaagact

SEQ ID NO: 342900 - DNA, 19 bp, Homo sapiens
  siRNA target sequence for KIAA0652 (NM_014741.1,683-701).
gaagtcccttcttgctata

SEQ ID NO: 342901 - DNA, 19 bp, Homo sapiens
  siRNA target sequence for KIAA0652 (NM_014741.1,868-886).
gtgcttacagaattaactt

SEQ ID NO: 342902 - DNA, 19 bp, Homo sapiens
  siRNA target sequence for KIAA0652 (NM_014741.1,877-895).
gaattaacttggcattcat

SEQ ID NO: 342903 - DNA, 19 bp, Homo sapiens
  siRNA target sequence for KIAA0652 (NM_014741.1,922-940).
cacctatcatggggattat

SEQ ID NO: 342904 - DNA, 19 bp, Homo sapiens
  siRNA target sequence for KIAA0652 (NM_014741.1,924-942).
cctatcatggggattatta

SEQ ID NO: 342905 - DNA, 19 bp, Homo sapiens
  siRNA target sequence for KIAA0652 (NM_014741.1,925-943).
ctatcatggggattattat

SEQ ID NO: 342906 - DNA, 19 bp, Homo sapiens
  siRNA target sequence for KIAA0652 (NM_014741.1,934-952).
ggattattattgatcactt

SEQ ID NO: 342907 - DNA, 19 bp, Homo sapiens
  siRNA target sequence for KIAA0652 (NM_014741.1,986-1004).
gcacccctgcaattacaga

SEQ ID NO: 342908 - DNA, 19 bp, Homo sapiens
  siRNA target sequence for KIAA0652 (NM_014741.1,1340-1358).
cagtagtgaggatactgaa

SEQ ID NO: 342909 - DNA, 19 bp, Homo sapiens
  siRNA target sequence for KIAA0652 (NM_014741.1,1350-1368).
gatactgaaaccgtatcaa

SEQ ID NO: 342910 - DNA, 19 bp, Homo sapiens
  siRNA target sequence for KIAA0652 (NM_014741.1,1387-1405).
cctcccctcacgatgtctt

SEQ ID NO: 342911 - DNA, 19 bp, Homo sapiens
  siRNA target sequence for KIAA0652 (NM_014741.1,1411-1429).
ccatctttgtccgaaaagt

SEQ ID NO: 342912 - DNA, 19 bp, Homo sapiens
  siRNA target sequence for KIAA0652 (NM_014741.1,1463-1481).
gaccctgacgagtttggat

SEQ ID NO: 342913 - DNA, 19 bp, Homo sapiens
  siRNA target sequence for KIAA0652 (NM_014741.1,1465-1483).
ccctgacgagtttggatat

SEQ ID NO: 342914 - DNA, 19 bp, Homo sapiens
  siRNA target sequence for KIAA0652 (NM_014741.1,1466-1484).
cctgacgagtttggatata

SEQ ID NO: 342915 - DNA, 19 bp, Homo sapiens
  siRNA target sequence for KIAA0652 (NM_014741.1,1621-1639).
gcaatacccatgatgactt

SEQ ID NO: 342916 - DNA, 19 bp, Homo sapiens
  siRNA target sequence for KIAA0652 (NM_014741.1,1622-1640).
caatacccatgatgacttt

SEQ ID NO: 342917 - DNA, 19 bp, Homo sapiens
  siRNA target sequence for KIAA0652 (NM_014741.1,1627-1645).
cccatgatgactttgttat

SEQ ID NO: 342918 - DNA, 19 bp, Homo sapiens
  siRNA target sequence for KIAA0652 (NM_014741.1,1635-1653).
gactttgttatgatagact

SEQ ID NO: 342919 - DNA, 19 bp, Homo sapiens
  siRNA target sequence for KIAA0652 (NM_014741.1,1637-1655).
ctttgttatgatagacttt

SEQ ID NO: 342920 - DNA, 19 bp, Homo sapiens
  siRNA target sequence for KIAA0652 (NM_014741.1,1702-1720).
ccttctatcgggagtttca

SEQ ID NO: 342921 - DNA, 19 bp, Homo sapiens
  siRNA target sequence for KIAA0652 (NM_014741.1,1738-1756).
gcagcctctccatagatat

SEQ ID NO: 342922 - DNA, 19 bp, Homo sapiens
  siRNA target sequence for KIAA0652 (NM_014741.1,1739-1757).
cagcctctccatagatatt

SEQ ID NO: 342923 - DNA, 19 bp, Homo sapiens
  siRNA target sequence for KIAA0652 (NM_014741.1,1820-1838).
gaatgtccgcgagtttgat

SEQ ID NO: 342924 - DNA, 19 bp, Homo sapiens
  siRNA target sequence for TBC1D5 (NM_014744.1,1786-1804).
gaacaagttctactttaga

SEQ ID NO: 342925 - DNA, 19 bp, Homo sapiens
  siRNA target sequence for TBC1D5 (NM_014744.1,1936-1954).
ggaagctatttctttgtgt

SEQ ID NO: 342926 - DNA, 19 bp, Homo sapiens
  siRNA target sequence for TBC1D5 (NM_014744.1,1967-1985).
caaaagtcaatggataagt

SEQ ID NO: 342927 - DNA, 19 bp, Homo sapiens
  siRNA target sequence for TBC1D5 (NM_014744.1,1978-1996).
ggataagtagaattgaaga

SEQ ID NO: 342928 - DNA, 19 bp, Homo sapiens
  siRNA target sequence for TBC1D5 (NM_014744.1,2009-2027).
gtatagcaacattaaagaa

SEQ ID NO: 342929 - DNA, 19 bp, Homo sapiens
  siRNA target sequence for TBC1D5 (NM_014744.1,2055-2073).
gttggccaacaagatttga

SEQ ID NO: 342930 - DNA, 19 bp, Homo sapiens
  siRNA target sequence for TBC1D5 (NM_014744.1,2058-2076).
ggccaacaagatttgatga

SEQ ID NO: 342931 - DNA, 19 bp, Homo sapiens
  siRNA target sequence for TBC1D5 (NM_014744.1,2059-2077).
gccaacaagatttgatgat

SEQ ID NO: 342932 - DNA, 19 bp, Homo sapiens
  siRNA target sequence for TBC1D5 (NM_014744.1,2075-2093).
gatcaataatcctctttca

SEQ ID NO: 342933 - DNA, 19 bp, Homo sapiens
  siRNA target sequence for TBC1D5 (NM_014744.1,2170-2188).
gaacgtttcctgaaatgca

SEQ ID NO: 342934 - DNA, 19 bp, Homo sapiens
  siRNA target sequence for TBC1D5 (NM_014744.1,2239-2257).
gttatgccagagaaaacga

SEQ ID NO: 342935 - DNA, 19 bp, Homo sapiens
  siRNA target sequence for TBC1D5 (NM_014744.1,2255-2273).
cgagcagttgctttataaa

SEQ ID NO: 342936 - DNA, 19 bp, Homo sapiens
  siRNA target sequence for TBC1D5 (NM_014744.1,2276-2294).
gggcatgcacgaactgtta

SEQ ID NO: 342937 - DNA, 19 bp, Homo sapiens
  siRNA target sequence for TBC1D5 (NM_014744.1,2285-2303).
cgaactgttagcacctata

SEQ ID NO: 342938 - DNA, 19 bp, Homo sapiens
  siRNA target sequence for TBC1D5 (NM_014744.1,2291-2309).
gttagcacctatagtcttt

SEQ ID NO: 342939 - DNA, 19 bp, Homo sapiens
  siRNA target sequence for TBC1D5 (NM_014744.1,2320-2338).
gtgaccaccaagcttttct

SEQ ID NO: 342940 - DNA, 19 bp, Homo sapiens
  siRNA target sequence for TBC1D5 (NM_014744.1,2418-2436).
gcagtgttctcacaactta

SEQ ID NO: 342941 - DNA, 19 bp, Homo sapiens
  siRNA target sequence for TBC1D5 (NM_014744.1,2570-2588).
ccagatccaggatcatcta

SEQ ID NO: 342942 - DNA, 19 bp, Homo sapiens
  siRNA target sequence for TBC1D5 (NM_014744.1,2610-2628).
ctttacatgcacttgaaca

SEQ ID NO: 342943 - DNA, 19 bp, Homo sapiens
  siRNA target sequence for TBC1D5 (NM_014744.1,2646-2664).
cagatatatgggttaaggt

SEQ ID NO: 342944 - DNA, 19 bp, Homo sapiens
  siRNA target sequence for TBC1D5 (NM_014744.1,2662-2680).
ggtgggtgcggctgctatt

SEQ ID NO: 342945 - DNA, 19 bp, Homo sapiens
  siRNA target sequence for TBC1D5 (NM_014744.1,2663-2681).
gtgggtgcggctgctattt

SEQ ID NO: 342946 - DNA, 19 bp, Homo sapiens
  siRNA target sequence for TBC1D5 (NM_014744.1,2666-2684).
ggtgcggctgctatttgga

SEQ ID NO: 342947 - DNA, 19 bp, Homo sapiens
  siRNA target sequence for TBC1D5 (NM_014744.1,2740-2758).
gcctcagcctgggtttagt

SEQ ID NO: 342948 - DNA, 19 bp, Homo sapiens
  siRNA target sequence for TBC1D5 (NM_014744.1,2741-2759).
cctcagcctgggtttagta

SEQ ID NO: 342949 - DNA, 19 bp, Homo sapiens
  siRNA target sequence for TBC1D5 (NM_014744.1,2746-2764).
gcctgggtttagtagatta

SEQ ID NO: 342950 - DNA, 19 bp, Homo sapiens
  siRNA target sequence for TBC1D5 (NM_014744.1,2748-2766).
ctgggtttagtagattata

SEQ ID NO: 342951 - DNA, 19 bp, Homo sapiens
  siRNA target sequence for TBC1D5 (NM_014744.1,2751-2769).
ggtttagtagattatatct

SEQ ID NO: 342952 - DNA, 19 bp, Homo sapiens
  siRNA target sequence for TBC1D5 (NM_014744.1,2796-2814).
gatgctttgatctctagta

SEQ ID NO: 342953 - DNA, 19 bp, Homo sapiens
  siRNA target sequence for TBC1D5 (NM_014744.1,2799-2817).
gctttgatctctagtaact

SEQ ID NO: 342954 - DNA, 19 bp, Homo sapiens
  siRNA target sequence for TBC1D5 (NM_014744.1,2851-2869).
cattcatcggggatgtaca

SEQ ID NO: 342955 - DNA, 19 bp, Homo sapiens
  siRNA target sequence for TBC1D5 (NM_014744.1,2861-2879).
ggatgtacactcactgatt

SEQ ID NO: 342956 - DNA, 19 bp, Homo sapiens
  siRNA target sequence for TBC1D5 (NM_014744.1,2917-2935).
caagaccagtgacttatca

SEQ ID NO: 342957 - DNA, 19 bp, Homo sapiens
  siRNA target sequence for TBC1D5 (NM_014744.1,2920-2938).
gaccagtgacttatcaatt

SEQ ID NO: 342958 - DNA, 19 bp, Homo sapiens
  siRNA target sequence for TBC1D5 (NM_014744.1,2973-2991).
gcagacctcatgaataaaa

SEQ ID NO: 342959 - DNA, 19 bp, Homo sapiens
  siRNA target sequence for TBC1D5 (NM_014744.1,3009-3027).
ggtgctcccctgaatataa

SEQ ID NO: 342960 - DNA, 19 bp, Homo sapiens
  siRNA target sequence for TBC1D5 (NM_014744.1,3012-3030).
gctcccctgaatataaata

SEQ ID NO: 342961 - DNA, 19 bp, Homo sapiens
  siRNA target sequence for TBC1D5 (NM_014744.1,3016-3034).
ccctgaatataaataaggt

SEQ ID NO: 342962 - DNA, 19 bp, Homo sapiens
  siRNA target sequence for TBC1D5 (NM_014744.1,3033-3051).
gtctctaatagcctgatta

SEQ ID NO: 342963 - DNA, 19 bp, Homo sapiens
  siRNA target sequence for TBC1D5 (NM_014744.1,3035-3053).
ctctaatagcctgattaat

SEQ ID NO: 342964 - DNA, 19 bp, Homo sapiens
  siRNA target sequence for TBC1D5 (NM_014744.1,3229-3247).
gcatgcctgtgcaattgaa

SEQ ID NO: 342965 - DNA, 19 bp, Homo sapiens
  siRNA target sequence for TBC1D5 (NM_014744.1,3233-3251).
gcctgtgcaattgaacaaa

SEQ ID NO: 342966 - DNA, 19 bp, Homo sapiens
  siRNA target sequence for TBC1D5 (NM_014744.1,3245-3263).
gaacaaagggctaagttct

SEQ ID NO: 342967 - DNA, 19 bp, Homo sapiens
  siRNA target sequence for TBC1D5 (NM_014744.1,3248-3266).
caaagggctaagttctaaa

SEQ ID NO: 342968 - DNA, 19 bp, Homo sapiens
  siRNA target sequence for TBC1D5 (NM_014744.1,3331-3349).
cttcatctgctactaaaaa

SEQ ID NO: 342969 - DNA, 19 bp, Homo sapiens
  siRNA target sequence for TBC1D5 (NM_014744.1,3381-3399).
cgctcacacagcaaaacta

SEQ ID NO: 342970 - DNA, 19 bp, Homo sapiens
  siRNA target sequence for TBC1D5 (NM_014744.1,3468-3486).
ctggatgccatgtgcaaat

SEQ ID NO: 342971 - DNA, 19 bp, Homo sapiens
  siRNA target sequence for TBC1D5 (NM_014744.1,3503-3521).
ggacactcatcttgtaaat

SEQ ID NO: 342972 - DNA, 19 bp, Homo sapiens
  siRNA target sequence for TBC1D5 (NM_014744.1,3504-3522).
gacactcatcttgtaaata

SEQ ID NO: 342973 - DNA, 19 bp, Homo sapiens
  siRNA target sequence for TBC1D5 (NM_014744.1,3616-3634).
gttccctgcgttttaacca

SEQ ID NO: 342974 - DNA, 19 bp, Homo sapiens
  siRNA target sequence for TBC1D5 (NM_014744.1,3649-3667).
ccgaagagaacgaacagat

SEQ ID NO: 342975 - DNA, 19 bp, Homo sapiens
  siRNA target sequence for TBC1D5 (NM_014744.1,3723-3741).
ggccagagcgttcaaatgt

SEQ ID NO: 342976 - DNA, 19 bp, Homo sapiens
  siRNA target sequence for TBC1D5 (NM_014744.1,3790-3808).
gagggaattccgatgactt

SEQ ID NO: 342977 - DNA, 19 bp, Homo sapiens
  siRNA target sequence for KIAA0233 (NM_014745.1,267-285).
ggcgtgtacgccaagtact

SEQ ID NO: 342978 - DNA, 19 bp, Homo sapiens
  siRNA target sequence for KIAA0233 (NM_014745.1,333-351).
cgcctcgtggtctacaaga

SEQ ID NO: 342979 - DNA, 19 bp, Homo sapiens
  siRNA target sequence for KIAA0233 (NM_014745.1,334-352).
gcctcgtggtctacaagat

SEQ ID NO: 342980 - DNA, 19 bp, Homo sapiens
  siRNA target sequence for KIAA0233 (NM_014745.1,387-405).
ctcttccaggtctactaca

SEQ ID NO: 342981 - DNA, 19 bp, Homo sapiens
  siRNA target sequence for KIAA0233 (NM_014745.1,1132-1150).
gcgtcatcatcgtgtgtaa

SEQ ID NO: 342982 - DNA, 19 bp, Homo sapiens
  siRNA target sequence for KIAA0233 (NM_014745.1,1134-1152).
gtcatcatcgtgtgtaaga

SEQ ID NO: 342983 - DNA, 19 bp, Homo sapiens
  siRNA target sequence for KIAA0233 (NM_014745.1,1482-1500).
ctcggctgcctcaagtact

SEQ ID NO: 342984 - DNA, 19 bp, Homo sapiens
  siRNA target sequence for KIAA0233 (NM_014745.1,1486-1504).
gctgcctcaagtacttcat

SEQ ID NO: 342985 - DNA, 19 bp, Homo sapiens
  siRNA target sequence for KIAA0233 (NM_014745.1,1565-1583).
cgggcagcgcatgaacttt

SEQ ID NO: 342986 - DNA, 19 bp, Homo sapiens
  siRNA target sequence for KIAA0233 (NM_014745.1,1567-1585).
ggcagcgcatgaactttct

SEQ ID NO: 342987 - DNA, 19 bp, Homo sapiens
  siRNA target sequence for KIAA0233 (NM_014745.1,1650-1668).
cgcctctggcccaactact

SEQ ID NO: 342988 - DNA, 19 bp, Homo sapiens
  siRNA target sequence for KIAA0233 (NM_014745.1,1795-1813).
ggctgtacctgcctgattt

SEQ ID NO: 342989 - DNA, 19 bp, Homo sapiens
  siRNA target sequence for KIAA0233 (NM_014745.1,1797-1815).
ctgtacctgcctgatttct

SEQ ID NO: 342990 - DNA, 19 bp, Homo sapiens
  siRNA target sequence for KIAA0233 (NM_014745.1,2318-2336).
caccgtcaagggctactat

SEQ ID NO: 342991 - DNA, 19 bp, Homo sapiens
  siRNA target sequence for KIAA0233 (NM_014745.1,2320-2338).
ccgtcaagggctactatga

SEQ ID NO: 342992 - DNA, 19 bp, Homo sapiens
  siRNA target sequence for KIAA0233 (NM_014745.1,3606-3624).
gagctgctctgctacttca

SEQ ID NO: 342993 - DNA, 19 bp, Homo sapiens
  siRNA target sequence for KIAA0233 (NM_014745.1,3880-3898).
ctgacggctacatcaagta

SEQ ID NO: 342994 - DNA, 19 bp, Homo sapiens
  siRNA target sequence for KIAA0233 (NM_014745.1,4144-4162).
ggcgcatcagtctacgttt

SEQ ID NO: 342995 - DNA, 19 bp, Homo sapiens
  siRNA target sequence for KIAA0233 (NM_014745.1,4145-4163).
gcgcatcagtctacgtttt

SEQ ID NO: 342996 - DNA, 19 bp, Homo sapiens
  siRNA target sequence for KIAA0233 (NM_014745.1,4146-4164).
cgcatcagtctacgtttta

SEQ ID NO: 342997 - DNA, 19 bp, Homo sapiens
  siRNA target sequence for KIAA0233 (NM_014745.1,4148-4166).
catcagtctacgttttaga

SEQ ID NO: 342998 - DNA, 19 bp, Homo sapiens
  siRNA target sequence for KIAA0233 (NM_014745.1,4286-4304).
ccgctctggaggaagagta

SEQ ID NO: 342999 - DNA, 19 bp, Homo sapiens
  siRNA target sequence for KIAA0233 (NM_014745.1,4446-4464).
gatgttgtcgacttcatca

SEQ ID NO: 343000 - DNA, 19 bp, Homo sapiens
  siRNA target sequence for KIAA0233 (NM_014745.1,4449-4467).
gttgtcgacttcatcatca

SEQ ID NO: 343001 - DNA, 19 bp, Homo sapiens
  siRNA target sequence for KIAA0233 (NM_014745.1,4965-4983).
gacatctatgccaacatct

SEQ ID NO: 343002 - DNA, 19 bp, Homo sapiens
  siRNA target sequence for KIAA0233 (NM_014745.1,5140-5158).
ccgtggttggggttgtcaa

SEQ ID NO: 343003 - DNA, 19 bp, Homo sapiens
  siRNA target sequence for KIAA0586 (NM_014749.1,428-446).
ggttcatcagacttaactt

SEQ ID NO: 343004 - DNA, 19 bp, Homo sapiens
  siRNA target sequence for KIAA0586 (NM_014749.1,459-477).
gttaccagcctctattaga

SEQ ID NO: 343005 - DNA, 19 bp, Homo sapiens
  siRNA target sequence for KIAA0586 (NM_014749.1,463-481).
ccagcctctattagaaaat

SEQ ID NO: 343006 - DNA, 19 bp, Homo sapiens
  siRNA target sequence for KIAA0586 (NM_014749.1,484-502).
catggtgtcagaaagtgat

SEQ ID NO: 343007 - DNA, 19 bp, Homo sapiens
  siRNA target sequence for KIAA0586 (NM_014749.1,529-547).
gttgcctttggataaaata

SEQ ID NO: 343008 - DNA, 19 bp, Homo sapiens
  siRNA target sequence for KIAA0586 (NM_014749.1,592-610).
gtatacaatgggacagaaa

SEQ ID NO: 343009 - DNA, 19 bp, Homo sapiens
  siRNA target sequence for KIAA0586 (NM_014749.1,642-660).
ctcaaagcatgcctgtttt

SEQ ID NO: 343010 - DNA, 19 bp, Homo sapiens
  siRNA target sequence for KIAA0586 (NM_014749.1,648-666).
gcatgcctgtttttaagga

SEQ ID NO: 343011 - DNA, 19 bp, Homo sapiens
  siRNA target sequence for KIAA0586 (NM_014749.1,673-691).
ggtacatctgttagaagat

SEQ ID NO: 343012 - DNA, 19 bp, Homo sapiens
  siRNA target sequence for KIAA0586 (NM_014749.1,795-813).
ccgcagctccgttgataaa

SEQ ID NO: 343013 - DNA, 19 bp, Homo sapiens
  siRNA target sequence for KIAA0586 (NM_014749.1,798-816).
cagctccgttgataaaggt

SEQ ID NO: 343014 - DNA, 19 bp, Homo sapiens
  siRNA target sequence for KIAA0586 (NM_014749.1,953-971).
gatcacgaaaagcaaatga

SEQ ID NO: 343015 - DNA, 19 bp, Homo sapiens
  siRNA target sequence for KIAA0586 (NM_014749.1,989-1007).
cacataaggcatcttgaaa

SEQ ID NO: 343016 - DNA, 19 bp, Homo sapiens
  siRNA target sequence for KIAA0586 (NM_014749.1,997-1015).
gcatcttgaaaagttacaa

SEQ ID NO: 343017 - DNA, 19 bp, Homo sapiens
  siRNA target sequence for KIAA0586 (NM_014749.1,1055-1073).
gcactcaagactagtagtt

SEQ ID NO: 343018 - DNA, 19 bp, Homo sapiens
  siRNA target sequence for KIAA0586 (NM_014749.1,1142-1160).
cttggtagctgtaatccat

SEQ ID NO: 343019 - DNA, 19 bp, Homo sapiens
  siRNA target sequence for KIAA0586 (NM_014749.1,1150-1168).
ctgtaatccatctttatat

SEQ ID NO: 343020 - DNA, 19 bp, Homo sapiens
  siRNA target sequence for KIAA0586 (NM_014749.1,1157-1175).
ccatctttatataacacat

SEQ ID NO: 343021 - DNA, 19 bp, Homo sapiens
  siRNA target sequence for KIAA0586 (NM_014749.1,1191-1209).
cacctttaaaagaagttga

SEQ ID NO: 343022 - DNA, 19 bp, Homo sapiens
  siRNA target sequence for KIAA0586 (NM_014749.1,1208-1226).
gaagatacgagttttgata

SEQ ID NO: 343023 - DNA, 19 bp, Homo sapiens
  siRNA target sequence for KIAA0586 (NM_014749.1,1287-1305).
gggatgatgaactatcaaa

SEQ ID NO: 343024 - DNA, 19 bp, Homo sapiens
  siRNA target sequence for KIAA0586 (NM_014749.1,1435-1453).
ctcactaactaggtcaaaa

SEQ ID NO: 343025 - DNA, 19 bp, Homo sapiens
  siRNA target sequence for KIAA0586 (NM_014749.1,1496-1514).
gaagagctagaaacaacta

SEQ ID NO: 343026 - DNA, 19 bp, Homo sapiens
  siRNA target sequence for KIAA0586 (NM_014749.1,1502-1520).
ctagaaacaactaaagtga

SEQ ID NO: 343027 - DNA, 19 bp, Homo sapiens
  siRNA target sequence for KIAA0586 (NM_014749.1,1585-1603).
ggtccagccaaaagaatct

SEQ ID NO: 343028 - DNA, 19 bp, Homo sapiens
  siRNA target sequence for KIAA0586 (NM_014749.1,1598-1616).
gaatctctgagtatgttga

SEQ ID NO: 343029 - DNA, 19 bp, Homo sapiens
  siRNA target sequence for KIAA0586 (NM_014749.1,1648-1666).
gcttcaaacaaccaataca

SEQ ID NO: 343030 - DNA, 19 bp, Homo sapiens
  siRNA target sequence for KIAA0586 (NM_014749.1,1660-1678).
caatacaacaagatctgta

SEQ ID NO: 343031 - DNA, 19 bp, Homo sapiens
  siRNA target sequence for KIAA0586 (NM_014749.1,1741-1759).
cctggaagctattattcgt

SEQ ID NO: 343032 - DNA, 19 bp, Homo sapiens
  siRNA target sequence for KIAA0586 (NM_014749.1,1749-1767).
ctattattcgtgcaaaaga

SEQ ID NO: 343033 - DNA, 19 bp, Homo sapiens
  siRNA target sequence for KIAA0586 (NM_014749.1,1775-1793).
gccatgtattcgcttatca

SEQ ID NO: 343034 - DNA, 19 bp, Homo sapiens
  siRNA target sequence for KIAA0586 (NM_014749.1,1776-1794).
ccatgtattcgcttatcaa

SEQ ID NO: 343035 - DNA, 19 bp, Homo sapiens
  siRNA target sequence for KIAA0586 (NM_014749.1,1777-1795).
catgtattcgcttatcaat

SEQ ID NO: 343036 - DNA, 19 bp, Homo sapiens
  siRNA target sequence for KIAA0586 (NM_014749.1,1786-1804).
gcttatcaatgctttatct

SEQ ID NO: 343037 - DNA, 19 bp, Homo sapiens
  siRNA target sequence for KIAA0586 (NM_014749.1,1787-1805).
cttatcaatgctttatcta

SEQ ID NO: 343038 - DNA, 19 bp, Homo sapiens
  siRNA target sequence for KIAA0586 (NM_014749.1,1894-1912).
gtcaagaacagattatgaa

SEQ ID NO: 343039 - DNA, 19 bp, Homo sapiens
  siRNA target sequence for KIAA0586 (NM_014749.1,1944-1962).
ccaagaaaggtcagaatat

SEQ ID NO: 343040 - DNA, 19 bp, Homo sapiens
  siRNA target sequence for KIAA0586 (NM_014749.1,1948-1966).
gaaaggtcagaatatgact

SEQ ID NO: 343041 - DNA, 19 bp, Homo sapiens
  siRNA target sequence for KIAA0586 (NM_014749.1,1977-1995).
gaaccaacacacaagataa

SEQ ID NO: 343042 - DNA, 19 bp, Homo sapiens
  siRNA target sequence for KIAA0586 (NM_014749.1,2002-2020).
caacaaatctgtaattcca

SEQ ID NO: 343043 - DNA, 19 bp, Homo sapiens
  siRNA target sequence for KIAA0586 (NM_014749.1,2077-2095).
catgcctgcttcaagttta

SEQ ID NO: 343044 - DNA, 19 bp, Homo sapiens
  siRNA target sequence for KIAA0586 (NM_014749.1,2122-2140).
gaaagcaaccacagtaata

SEQ ID NO: 343045 - DNA, 19 bp, Homo sapiens
  siRNA target sequence for KIAA0586 (NM_014749.1,2141-2159).
caagatgaagattatatgt

SEQ ID NO: 343046 - DNA, 19 bp, Homo sapiens
  siRNA target sequence for KIAA0586 (NM_014749.1,2167-2185).
ctatggaaagccagtttat

SEQ ID NO: 343047 - DNA, 19 bp, Homo sapiens
  siRNA target sequence for KIAA0586 (NM_014749.1,2189-2207).
ggccatcgaagcactctta

SEQ ID NO: 343048 - DNA, 19 bp, Homo sapiens
  siRNA target sequence for KIAA0586 (NM_014749.1,2190-2208).
gccatcgaagcactcttaa

SEQ ID NO: 343049 - DNA, 19 bp, Homo sapiens
  siRNA target sequence for KIAA0586 (NM_014749.1,2191-2209).
ccatcgaagcactcttaaa

SEQ ID NO: 343050 - DNA, 19 bp, Homo sapiens
  siRNA target sequence for KIAA0586 (NM_014749.1,2192-2210).
catcgaagcactcttaaaa

SEQ ID NO: 343051 - DNA, 19 bp, Homo sapiens
  siRNA target sequence for KIAA0586 (NM_014749.1,2213-2231).
ggaccatatctcagattta

SEQ ID NO: 343052 - DNA, 19 bp, Homo sapiens
  siRNA target sequence for KIAA0586 (NM_014749.1,2214-2232).
gaccatatctcagatttaa

SEQ ID NO: 343053 - DNA, 19 bp, Homo sapiens
  siRNA target sequence for KIAA0586 (NM_014749.1,2255-2273).
ccacagagaccaaaagtaa

SEQ ID NO: 343054 - DNA, 19 bp, Homo sapiens
  siRNA target sequence for KIAA0586 (NM_014749.1,2256-2274).
cacagagaccaaaagtaat

SEQ ID NO: 343055 - DNA, 19 bp, Homo sapiens
  siRNA target sequence for KIAA0586 (NM_014749.1,2282-2300).
gttaaaggcactaaggtaa

SEQ ID NO: 343056 - DNA, 19 bp, Homo sapiens
  siRNA target sequence for KIAA0586 (NM_014749.1,2288-2306).
ggcactaaggtaaagtcaa

SEQ ID NO: 343057 - DNA, 19 bp, Homo sapiens
  siRNA target sequence for KIAA0586 (NM_014749.1,2339-2357).
cctaagaagatggattcta

SEQ ID NO: 343058 - DNA, 19 bp, Homo sapiens
  siRNA target sequence for KIAA0586 (NM_014749.1,2385-2403).
ctcatggcgatcagcaata

SEQ ID NO: 343059 - DNA, 19 bp, Homo sapiens
  siRNA target sequence for KIAA0586 (NM_014749.1,2387-2405).
catggcgatcagcaatatt

SEQ ID NO: 343060 - DNA, 19 bp, Homo sapiens
  siRNA target sequence for KIAA0586 (NM_014749.1,2390-2408).
ggcgatcagcaatatttgt

SEQ ID NO: 343061 - DNA, 19 bp, Homo sapiens
  siRNA target sequence for KIAA0586 (NM_014749.1,2391-2409).
gcgatcagcaatatttgtt

SEQ ID NO: 343062 - DNA, 19 bp, Homo sapiens
  siRNA target sequence for KIAA0586 (NM_014749.1,2393-2411).
gatcagcaatatttgttca

SEQ ID NO: 343063 - DNA, 19 bp, Homo sapiens
  siRNA target sequence for KIAA0586 (NM_014749.1,2461-2479).
gattcctatggcaattctt

SEQ ID NO: 343064 - DNA, 19 bp, Homo sapiens
  siRNA target sequence for KIAA0586 (NM_014749.1,2483-2501).
ggacaaacccaaagtaata

SEQ ID NO: 343065 - DNA, 19 bp, Homo sapiens
  siRNA target sequence for KIAA0586 (NM_014749.1,2574-2592).
catcatctcgaaaagtaga

SEQ ID NO: 343066 - DNA, 19 bp, Homo sapiens
  siRNA target sequence for KIAA0586 (NM_014749.1,2598-2616).
gagtaaagaaacctaacat

SEQ ID NO: 343067 - DNA, 19 bp, Homo sapiens
  siRNA target sequence for KIAA0586 (NM_014749.1,2610-2628).
ctaacatagccattgtaga

SEQ ID NO: 343068 - DNA, 19 bp, Homo sapiens
  siRNA target sequence for KIAA0586 (NM_014749.1,2659-2677).
gcttactgtgcaggtatta

SEQ ID NO: 343069 - DNA, 19 bp, Homo sapiens
  siRNA target sequence for KIAA0586 (NM_014749.1,2671-2689).
ggtattacccagtgtagat

SEQ ID NO: 343070 - DNA, 19 bp, Homo sapiens
  siRNA target sequence for KIAA0586 (NM_014749.1,2672-2690).
gtattacccagtgtagata

SEQ ID NO: 343071 - DNA, 19 bp, Homo sapiens
  siRNA target sequence for KIAA0586 (NM_014749.1,2695-2713).
cagcatttcaaatagtagt

SEQ ID NO: 343072 - DNA, 19 bp, Homo sapiens
  siRNA target sequence for KIAA0586 (NM_014749.1,2762-2780).
cctgtgcaaacttggataa

SEQ ID NO: 343073 - DNA, 19 bp, Homo sapiens
  siRNA target sequence for KIAA0586 (NM_014749.1,2889-2907).
cagactctgaaccaattct

SEQ ID NO: 343074 - DNA, 19 bp, Homo sapiens
  siRNA target sequence for KIAA0586 (NM_014749.1,2963-2981).
ccgccagttgcttctactt

SEQ ID NO: 343075 - DNA, 19 bp, Homo sapiens
  siRNA target sequence for KIAA0586 (NM_014749.1,3110-3128).
cagattgcacctagtatca

SEQ ID NO: 343076 - DNA, 19 bp, Homo sapiens
  siRNA target sequence for KIAA0586 (NM_014749.1,3120-3138).
ctagtatcagtgtttcagt

SEQ ID NO: 343077 - DNA, 19 bp, Homo sapiens
  siRNA target sequence for KIAA0586 (NM_014749.1,3156-3174).
cactgacttctgacattgt

SEQ ID NO: 343078 - DNA, 19 bp, Homo sapiens
  siRNA target sequence for KIAA0586 (NM_014749.1,3218-3236).
ggtgttcctgtgaactcaa

SEQ ID NO: 343079 - DNA, 19 bp, Homo sapiens
  siRNA target sequence for KIAA0586 (NM_014749.1,3219-3237).
gtgttcctgtgaactcaaa

SEQ ID NO: 343080 - DNA, 19 bp, Homo sapiens
  siRNA target sequence for KIAA0586 (NM_014749.1,3225-3243).
ctgtgaactcaaatgtgat

SEQ ID NO: 343081 - DNA, 19 bp, Homo sapiens
  siRNA target sequence for KIAA0586 (NM_014749.1,3227-3245).
gtgaactcaaatgtgatta

SEQ ID NO: 343082 - DNA, 19 bp, Homo sapiens
  siRNA target sequence for KIAA0586 (NM_014749.1,3229-3247).
gaactcaaatgtgattaaa

SEQ ID NO: 343083 - DNA, 19 bp, Homo sapiens
  siRNA target sequence for KIAA0586 (NM_014749.1,3342-3360).
gggatgcttcaacaaatga

SEQ ID NO: 343084 - DNA, 19 bp, Homo sapiens
  siRNA target sequence for KIAA0586 (NM_014749.1,3343-3361).
ggatgcttcaacaaatgaa

SEQ ID NO: 343085 - DNA, 19 bp, Homo sapiens
  siRNA target sequence for KIAA0586 (NM_014749.1,3435-3453).
ctgctaaggagtgtgtttt

SEQ ID NO: 343086 - DNA, 19 bp, Homo sapiens
  siRNA target sequence for KIAA0586 (NM_014749.1,3480-3498).
gtgattcggatcatgatat

SEQ ID NO: 343087 - DNA, 19 bp, Homo sapiens
  siRNA target sequence for KIAA0586 (NM_014749.1,3609-3627).
cagtttttaccccaacttt

SEQ ID NO: 343088 - DNA, 19 bp, Homo sapiens
  siRNA target sequence for KIAA0586 (NM_014749.1,3720-3738).
ctaactcacctcaagaaga

SEQ ID NO: 343089 - DNA, 19 bp, Homo sapiens
  siRNA target sequence for KIAA0586 (NM_014749.1,3746-3764).
ccaagagctattgtaatgt

SEQ ID NO: 343090 - DNA, 19 bp, Homo sapiens
  siRNA target sequence for KIAA0586 (NM_014749.1,3822-3840).
cagagccagttccctttat

SEQ ID NO: 343091 - DNA, 19 bp, Homo sapiens
  siRNA target sequence for KIAA0586 (NM_014749.1,3878-3896).
cagatgccaggttctgatt

SEQ ID NO: 343092 - DNA, 19 bp, Homo sapiens
  siRNA target sequence for KIAA0586 (NM_014749.1,3910-3928).
gagcacattgagtgttact

SEQ ID NO: 343093 - DNA, 19 bp, Homo sapiens
  siRNA target sequence for KIAA0586 (NM_014749.1,4003-4021).
ccccaagattttagaagat

SEQ ID NO: 343094 - DNA, 19 bp, Homo sapiens
  siRNA target sequence for KIAA0586 (NM_014749.1,4004-4022).
cccaagattttagaagata

SEQ ID NO: 343095 - DNA, 19 bp, Homo sapiens
  siRNA target sequence for KIAA0586 (NM_014749.1,4028-4046).
ctgtacctgacaaacctta

SEQ ID NO: 343096 - DNA, 19 bp, Homo sapiens
  siRNA target sequence for KIAA0586 (NM_014749.1,4030-4048).
gtacctgacaaaccttaat

SEQ ID NO: 343097 - DNA, 19 bp, Homo sapiens
  siRNA target sequence for KIAA0586 (NM_014749.1,4067-4085).
ctgcatgatgccgttgaaa

SEQ ID NO: 343098 - DNA, 19 bp, Homo sapiens
  siRNA target sequence for KIAA0586 (NM_014749.1,4101-4119).
ctagtgaagggcaagtgat

SEQ ID NO: 343099 - DNA, 19 bp, Homo sapiens
  siRNA target sequence for KIAA0586 (NM_014749.1,4117-4135).
gattaggatgtcccataaa

SEQ ID NO: 343100 - DNA, 19 bp, Homo sapiens
  siRNA target sequence for KIAA0586 (NM_014749.1,4122-4140).
ggatgtcccataaaaaatt

SEQ ID NO: 343101 - DNA, 19 bp, Homo sapiens
  siRNA target sequence for KIAA0586 (NM_014749.1,4123-4141).
gatgtcccataaaaaattt

SEQ ID NO: 343102 - DNA, 19 bp, Homo sapiens
  siRNA target sequence for KIAA0586 (NM_014749.1,4126-4144).
gtcccataaaaaatttcat

SEQ ID NO: 343103 - DNA, 19 bp, Homo sapiens
  siRNA target sequence for KIAA0586 (NM_014749.1,4151-4169).
gcaattctttcttttgcta

SEQ ID NO: 343104 - DNA, 19 bp, Homo sapiens
  siRNA target sequence for KIAA0586 (NM_014749.1,4194-4212).
cccagcaagcagtctatca

SEQ ID NO: 343105 - DNA, 19 bp, Homo sapiens
  siRNA target sequence for KIAA0586 (NM_014749.1,4231-4249).
cagtgtgggtgaacttagt

SEQ ID NO: 343106 - DNA, 19 bp, Homo sapiens
  siRNA target sequence for KIAA0586 (NM_014749.1,4288-4306).
catcttaatgggacattct

SEQ ID NO: 343107 - DNA, 19 bp, Homo sapiens
  siRNA target sequence for KIAA0586 (NM_014749.1,4315-4333).
gcagccacctgtcactaat

SEQ ID NO: 343108 - DNA, 19 bp, Homo sapiens
  siRNA target sequence for KIAA0586 (NM_014749.1,4316-4334).
cagccacctgtcactaata

SEQ ID NO: 343109 - DNA, 19 bp, Homo sapiens
  siRNA target sequence for KIAA0586 (NM_014749.1,4318-4336).
gccacctgtcactaataca

SEQ ID NO: 343110 - DNA, 19 bp, Homo sapiens
  siRNA target sequence for KIAA0586 (NM_014749.1,4320-4338).
cacctgtcactaatacaca

SEQ ID NO: 343111 - DNA, 19 bp, Homo sapiens
  siRNA target sequence for KIAA0586 (NM_014749.1,4339-4357).
gtctttggatcaacaatgt

SEQ ID NO: 343112 - DNA, 19 bp, Homo sapiens
  siRNA target sequence for KIAA0586 (NM_014749.1,4352-4370).
caatgtgatcctaaaccat

SEQ ID NO: 343113 - DNA, 19 bp, Homo sapiens
  siRNA target sequence for KIAA0586 (NM_014749.1,4376-4394).
cggcaatttgacacagttt

SEQ ID NO: 343114 - DNA, 19 bp, Homo sapiens
  siRNA target sequence for KIAA0586 (NM_014749.1,4387-4405).
cacagtttcaggtagtatt

SEQ ID NO: 343115 - DNA, 19 bp, Homo sapiens
  siRNA target sequence for KIAA0586 (NM_014749.1,4389-4407).
cagtttcaggtagtattta

SEQ ID NO: 343116 - DNA, 19 bp, Homo sapiens
  siRNA target sequence for KIAA0586 (NM_014749.1,4425-4443).
gtcatggtccaatgagttt

SEQ ID NO: 343117 - DNA, 19 bp, Homo sapiens
  siRNA target sequence for KIAA0586 (NM_014749.1,4526-4544).
ccagtagccgctgaagatt

SEQ ID NO: 343118 - DNA, 19 bp, Homo sapiens
  siRNA target sequence for KIAA0586 (NM_014749.1,4529-4547).
gtagccgctgaagattttt

SEQ ID NO: 343119 - DNA, 19 bp, Homo sapiens
  siRNA target sequence for KIAA0586 (NM_014749.1,4548-4566).
cccagtaccaactaaagca

SEQ ID NO: 343120 - DNA, 19 bp, Homo sapiens
  siRNA target sequence for KIAA0586 (NM_014749.1,4592-4610).
cacaaaccatcacaaagtt

SEQ ID NO: 343121 - DNA, 19 bp, Homo sapiens
  siRNA target sequence for KIAA0586 (NM_014749.1,4670-4688).
gatatggatcggacacaaa

SEQ ID NO: 343122 - DNA, 19 bp, Homo sapiens
  siRNA target sequence for KIAA0586 (NM_014749.1,4681-4699).
gacacaaattgagcttaat

SEQ ID NO: 343123 - DNA, 19 bp, Homo sapiens
  siRNA target sequence for KIAA0586 (NM_014749.1,4700-4718).
ccgtacctcacatgtgtat

SEQ ID NO: 343124 - DNA, 19 bp, Homo sapiens
  siRNA target sequence for KIAA0586 (NM_014749.1,4701-4719).
cgtacctcacatgtgtatt

SEQ ID NO: 343125 - DNA, 19 bp, Homo sapiens
  siRNA target sequence for MAML1 (NM_014757.2,572-590).
ggccacgcatcttcatgat

SEQ ID NO: 343126 - DNA, 19 bp, Homo sapiens
  siRNA target sequence for MAML1 (NM_014757.2,573-591).
gccacgcatcttcatgata

SEQ ID NO: 343127 - DNA, 19 bp, Homo sapiens
  siRNA target sequence for MAML1 (NM_014757.2,575-593).
cacgcatcttcatgataca

SEQ ID NO: 343128 - DNA, 19 bp, Homo sapiens
  siRNA target sequence for MAML1 (NM_014757.2,577-595).
cgcatcttcatgatacagt

SEQ ID NO: 343129 - DNA, 19 bp, Homo sapiens
  siRNA target sequence for MAML1 (NM_014757.2,578-596).
gcatcttcatgatacagtt

SEQ ID NO: 343130 - DNA, 19 bp, Homo sapiens
  siRNA target sequence for MAML1 (NM_014757.2,592-610).
cagttaagaggaatcttga

SEQ ID NO: 343131 - DNA, 19 bp, Homo sapiens
  siRNA target sequence for MAML1 (NM_014757.2,625-643).
ctcagaatggcgatcaaca

SEQ ID NO: 343132 - DNA, 19 bp, Homo sapiens
  siRNA target sequence for MAML1 (NM_014757.2,660-678).
ctctttcctgggcataaga

SEQ ID NO: 343133 - DNA, 19 bp, Homo sapiens
  siRNA target sequence for MAML1 (NM_014757.2,951-969).
gggactgtcggctccatat

SEQ ID NO: 343134 - DNA, 19 bp, Homo sapiens
  siRNA target sequence for MAML1 (NM_014757.2,961-979).
gctccatatcgcaaagcaa

SEQ ID NO: 343135 - DNA, 19 bp, Homo sapiens
  siRNA target sequence for MAML1 (NM_014757.2,988-1006).
cagacctcaaccttaacga

SEQ ID NO: 343136 - DNA, 19 bp, Homo sapiens
  siRNA target sequence for MAML1 (NM_014757.2,1042-1060).
ggtcggtgcccgatgaaga

SEQ ID NO: 343137 - DNA, 19 bp, Homo sapiens
  siRNA target sequence for MAML1 (NM_014757.2,1045-1063).
cggtgcccgatgaagacat

SEQ ID NO: 343138 - DNA, 19 bp, Homo sapiens
  siRNA target sequence for MAML1 (NM_014757.2,1134-1152).
cccttggcacaggacatta

SEQ ID NO: 343139 - DNA, 19 bp, Homo sapiens
  siRNA target sequence for MAML1 (NM_014757.2,1136-1154).
cttggcacaggacattaat

SEQ ID NO: 343140 - DNA, 19 bp, Homo sapiens
  siRNA target sequence for MAML1 (NM_014757.2,1139-1157).
ggcacaggacattaatatt

SEQ ID NO: 343141 - DNA, 19 bp, Homo sapiens
  siRNA target sequence for MAML1 (NM_014757.2,1140-1158).
gcacaggacattaatatta

SEQ ID NO: 343142 - DNA, 19 bp, Homo sapiens
  siRNA target sequence for MAML1 (NM_014757.2,1390-1408).
cccttgcaggtgtggtatt

SEQ ID NO: 343143 - DNA, 19 bp, Homo sapiens
  siRNA target sequence for MAML1 (NM_014757.2,1570-1588).
cccacagttccttagatgt

SEQ ID NO: 343144 - DNA, 19 bp, Homo sapiens
  siRNA target sequence for MAML1 (NM_014757.2,1658-1676).
catgatgcctagtgtgaat

SEQ ID NO: 343145 - DNA, 19 bp, Homo sapiens
  siRNA target sequence for MAML1 (NM_014757.2,1737-1755).
caccagccaccgagtaact

SEQ ID NO: 343146 - DNA, 19 bp, Homo sapiens
  siRNA target sequence for MAML1 (NM_014757.2,1742-1760).
gccaccgagtaacttgaat

SEQ ID NO: 343147 - DNA, 19 bp, Homo sapiens
  siRNA target sequence for MAML1 (NM_014757.2,1744-1762).
caccgagtaacttgaatca

SEQ ID NO: 343148 - DNA, 19 bp, Homo sapiens
  siRNA target sequence for MAML1 (NM_014757.2,1746-1764).
ccgagtaacttgaatcaga

SEQ ID NO: 343149 - DNA, 19 bp, Homo sapiens
  siRNA target sequence for MAML1 (NM_014757.2,1747-1765).
cgagtaacttgaatcagaa

SEQ ID NO: 343150 - DNA, 19 bp, Homo sapiens
  siRNA target sequence for MAML1 (NM_014757.2,1790-1808).
gctggactacggcaataca

SEQ ID NO: 343151 - DNA, 19 bp, Homo sapiens
  siRNA target sequence for MAML1 (NM_014757.2,1791-1809).
ctggactacggcaatacaa

SEQ ID NO: 343152 - DNA, 19 bp, Homo sapiens
  siRNA target sequence for MAML1 (NM_014757.2,1793-1811).
ggactacggcaatacaaaa

SEQ ID NO: 343153 - DNA, 19 bp, Homo sapiens
  siRNA target sequence for MAML1 (NM_014757.2,2109-2127).
caacaggccgctgtaatga

SEQ ID NO: 343154 - DNA, 19 bp, Homo sapiens
  siRNA target sequence for MAML1 (NM_014757.2,2400-2418).
cctcaggctgggaatctga

SEQ ID NO: 343155 - DNA, 19 bp, Homo sapiens
  siRNA target sequence for MAML1 (NM_014757.2,2545-2563).
ctggcataacccagatagt

SEQ ID NO: 343156 - DNA, 19 bp, Homo sapiens
  siRNA target sequence for MAML1 (NM_014757.2,2682-2700).
ctctcccagcagcacaata

SEQ ID NO: 343157 - DNA, 19 bp, Homo sapiens
  siRNA target sequence for MAML1 (NM_014757.2,3223-3241).
ctggacacaccgatctgat

SEQ ID NO: 343158 - DNA, 19 bp, Homo sapiens
  siRNA target sequence for PHYHIP (NM_014759.1,420-438).
cgccccacagcattgagat

SEQ ID NO: 343159 - DNA, 19 bp, Homo sapiens
  siRNA target sequence for PHYHIP (NM_014759.1,429-447).
gcattgagatcaacaacat

SEQ ID NO: 343160 - DNA, 19 bp, Homo sapiens
  siRNA target sequence for PHYHIP (NM_014759.1,497-515).
gagagggtcacccattact

SEQ ID NO: 343161 - DNA, 19 bp, Homo sapiens
  siRNA target sequence for PHYHIP (NM_014759.1,502-520).
ggtcacccattacttcatt

SEQ ID NO: 343162 - DNA, 19 bp, Homo sapiens
  siRNA target sequence for PHYHIP (NM_014759.1,1029-1047).
cagctcagcgcctcttcaa

SEQ ID NO: 343163 - DNA, 19 bp, Homo sapiens
  siRNA target sequence for PHYHIP (NM_014759.1,1166-1184).
cccctcctggacattgctt

SEQ ID NO: 343164 - DNA, 19 bp, Homo sapiens
  siRNA target sequence for SES1 (NM_014766.2,126-144).
ctgcagctcctccaagtta

SEQ ID NO: 343165 - DNA, 19 bp, Homo sapiens
  siRNA target sequence for SES1 (NM_014766.2,160-178).
ccctccacgtgctaaggat

SEQ ID NO: 343166 - DNA, 19 bp, Homo sapiens
  siRNA target sequence for SES1 (NM_014766.2,187-205).
ggtatttgggaaaaattca

SEQ ID NO: 343167 - DNA, 19 bp, Homo sapiens
  siRNA target sequence for SES1 (NM_014766.2,224-242).
gtgcaagaggttgtgtatt

SEQ ID NO: 343168 - DNA, 19 bp, Homo sapiens
  siRNA target sequence for SES1 (NM_014766.2,278-296).
gagtgcacttacatttcaa

SEQ ID NO: 343169 - DNA, 19 bp, Homo sapiens
  siRNA target sequence for SES1 (NM_014766.2,313-331).
gacctatgccataatgata

SEQ ID NO: 343170 - DNA, 19 bp, Homo sapiens
  siRNA target sequence for SES1 (NM_014766.2,489-507).
ctaaagaagccttagatgt

SEQ ID NO: 343171 - DNA, 19 bp, Homo sapiens
  siRNA target sequence for SES1 (NM_014766.2,533-551).
ggacaaggtgggaattact

SEQ ID NO: 343172 - DNA, 19 bp, Homo sapiens
  siRNA target sequence for SES1 (NM_014766.2,534-552).
gacaaggtgggaattactt

SEQ ID NO: 343173 - DNA, 19 bp, Homo sapiens
  siRNA target sequence for SES1 (NM_014766.2,595-613).
gattgtggatcgtgatgaa

SEQ ID NO: 343174 - DNA, 19 bp, Homo sapiens
  siRNA target sequence for SES1 (NM_014766.2,626-644).
gagaccatagggaagtact

SEQ ID NO: 343175 - DNA, 19 bp, Homo sapiens
  siRNA target sequence for SES1 (NM_014766.2,692-710).
ctttcgctcaccactaaga

SEQ ID NO: 343176 - DNA, 19 bp, Homo sapiens
  siRNA target sequence for SES1 (NM_014766.2,766-784).
gggagagggcgagttcaat

SEQ ID NO: 343177 - DNA, 19 bp, Homo sapiens
  siRNA target sequence for SES1 (NM_014766.2,770-788).
gagggcgagttcaattttt

SEQ ID NO: 343178 - DNA, 19 bp, Homo sapiens
  siRNA target sequence for SES1 (NM_014766.2,804-822).
cagttgaggatcatctaga

SEQ ID NO: 343179 - DNA, 19 bp, Homo sapiens
  siRNA target sequence for SES1 (NM_014766.2,981-999).
gctctccgtgcattcacta

SEQ ID NO: 343180 - DNA, 19 bp, Homo sapiens
  siRNA target sequence for SES1 (NM_014766.2,984-1002).
ctccgtgcattcactactt

SEQ ID NO: 343181 - DNA, 19 bp, Homo sapiens
  siRNA target sequence for SES1 (NM_014766.2,1181-1199).
gcacgtgccatcatcgaaa

SEQ ID NO: 343182 - DNA, 19 bp, Homo sapiens
  siRNA target sequence for SES1 (NM_014766.2,1337-1355).
gttgacacggagattaagt

SEQ ID NO: 343183 - DNA, 19 bp, Homo sapiens
  siRNA target sequence for SES1 (NM_014766.2,1342-1360).
cacggagattaagttcttt

SEQ ID NO: 343184 - DNA, 19 bp, Homo sapiens
  siRNA target sequence for SES1 (NM_014766.2,1344-1362).
cggagattaagttctttaa

SEQ ID NO: 343185 - DNA, 19 bp, Homo sapiens
  siRNA target sequence for KIAA0087 (NM_014769.1,387-405).
ctctgggaatccaatctca

SEQ ID NO: 343186 - DNA, 19 bp, Homo sapiens
  siRNA target sequence for KIAA0087 (NM_014769.1,424-442).
gtgaccaaagtcaaatgct

SEQ ID NO: 343187 - DNA, 19 bp, Homo sapiens
  siRNA target sequence for KIAA0087 (NM_014769.1,511-529).
catggtatggggaagaatt

SEQ ID NO: 343188 - DNA, 19 bp, Homo sapiens
  siRNA target sequence for KIAA0087 (NM_014769.1,583-601).
cttgtttctatcagattca

SEQ ID NO: 343189 - DNA, 19 bp, Homo sapiens
  siRNA target sequence for KIAA0087 (NM_014769.1,620-638).
gaggccagtctgagacatt

SEQ ID NO: 343190 - DNA, 19 bp, Homo sapiens
  siRNA target sequence for KIAA0087 (NM_014769.1,622-640).
ggccagtctgagacattca

SEQ ID NO: 343191 - DNA, 19 bp, Homo sapiens
  siRNA target sequence for KIAA0087 (NM_014769.1,623-641).
gccagtctgagacattcaa

SEQ ID NO: 343192 - DNA, 19 bp, Homo sapiens
  siRNA target sequence for KIAA0087 (NM_014769.1,625-643).
cagtctgagacattcaata

SEQ ID NO: 343193 - DNA, 19 bp, Homo sapiens
  siRNA target sequence for KIAA0087 (NM_014769.1,627-645).
gtctgagacattcaatatt

SEQ ID NO: 343194 - DNA, 19 bp, Homo sapiens
  siRNA target sequence for RNF40 (NM_014771.2,998-1016).
gagagcaaaagctcaataa

SEQ ID NO: 343195 - DNA, 19 bp, Homo sapiens
  siRNA target sequence for RNF40 (NM_014771.2,1030-1048).
gccttagagcagcttaact

SEQ ID NO: 343196 - DNA, 19 bp, Homo sapiens
  siRNA target sequence for RNF40 (NM_014771.2,1032-1050).
cttagagcagcttaactct

SEQ ID NO: 343197 - DNA, 19 bp, Homo sapiens
  siRNA target sequence for RNF40 (NM_014771.2,1122-1140).
gatgctgaatgcagagtta

SEQ ID NO: 343198 - DNA, 19 bp, Homo sapiens
  siRNA target sequence for RNF40 (NM_014771.2,1572-1590).
gcgccacctgattagtagt

SEQ ID NO: 343199 - DNA, 19 bp, Homo sapiens
  siRNA target sequence for RNF40 (NM_014771.2,1575-1593).
ccacctgattagtagtctt

SEQ ID NO: 343200 - DNA, 19 bp, Homo sapiens
  siRNA target sequence for RNF40 (NM_014771.2,1619-1637).
gggacgcccagcgatacaa

SEQ ID NO: 343201 - DNA, 19 bp, Homo sapiens
  siRNA target sequence for RNF40 (NM_014771.2,1638-1656).
gcggaagcttcgagaagta

SEQ ID NO: 343202 - DNA, 19 bp, Homo sapiens
  siRNA target sequence for RNF40 (NM_014771.2,1640-1658).
ggaagcttcgagaagtaca

SEQ ID NO: 343203 - DNA, 19 bp, Homo sapiens
  siRNA target sequence for RNF40 (NM_014771.2,1790-1808).
gtacccccgacaacagaaa

SEQ ID NO: 343204 - DNA, 19 bp, Homo sapiens
  siRNA target sequence for RNF40 (NM_014771.2,2210-2228).
ctaaggccgaggttgatga

SEQ ID NO: 343205 - DNA, 19 bp, Homo sapiens
  siRNA target sequence for RNF40 (NM_014771.2,2700-2718).
caagcggaaggctgtagaa

SEQ ID NO: 343206 - DNA, 19 bp, Homo sapiens
  siRNA target sequence for RNF40 (NM_014771.2,2809-2827).
gctgctcgtgagaaagaga

SEQ ID NO: 343207 - DNA, 19 bp, Homo sapiens
  siRNA target sequence for RNF40 (NM_014771.2,2909-2927).
cagatgccgacgaaatcct

SEQ ID NO: 343208 - DNA, 19 bp, Homo sapiens
  siRNA target sequence for RNF40 (NM_014771.2,3098-3116).
cccacgacttccatcgtat

SEQ ID NO: 343209 - DNA, 19 bp, Homo sapiens
  siRNA target sequence for KIAA0141 (NM_014773.1,323-341).
cctatgggatgccatatct

SEQ ID NO: 343210 - DNA, 19 bp, Homo sapiens
  siRNA target sequence for KIAA0141 (NM_014773.1,412-430).
gacctcagcgggtagaaca

SEQ ID NO: 343211 - DNA, 19 bp, Homo sapiens
  siRNA target sequence for KIAA0141 (NM_014773.1,445-463).
gtcccctggaccgtttctt

SEQ ID NO: 343212 - DNA, 19 bp, Homo sapiens
  siRNA target sequence for KIAA0141 (NM_014773.1,450-468).
ctggaccgtttcttctcat

SEQ ID NO: 343213 - DNA, 19 bp, Homo sapiens
  siRNA target sequence for KIAA0141 (NM_014773.1,490-508).
cctcactgcgacaacacat

SEQ ID NO: 343214 - DNA, 19 bp, Homo sapiens
  siRNA target sequence for KIAA0141 (NM_014773.1,647-665).
ggaaggtcccggtgatttt

SEQ ID NO: 343215 - DNA, 19 bp, Homo sapiens
  siRNA target sequence for KIAA0141 (NM_014773.1,860-878).
ccacacggcagccttttct

SEQ ID NO: 343216 - DNA, 19 bp, Homo sapiens
  siRNA target sequence for KIAA0141 (NM_014773.1,954-972).
ggcacccccagggacatta

SEQ ID NO: 343217 - DNA, 19 bp, Homo sapiens
  siRNA target sequence for KIAA0141 (NM_014773.1,958-976).
cccccagggacattagcaa

SEQ ID NO: 343218 - DNA, 19 bp, Homo sapiens
  siRNA target sequence for KIAA0141 (NM_014773.1,973-991).
gcaaggcggtcctttatta

SEQ ID NO: 343219 - DNA, 19 bp, Homo sapiens
  siRNA target sequence for KIAA0141 (NM_014773.1,974-992).
caaggcggtcctttattat

SEQ ID NO: 343220 - DNA, 19 bp, Homo sapiens
  siRNA target sequence for KIAA0141 (NM_014773.1,978-996).
gcggtcctttattatcagt

SEQ ID NO: 343221 - DNA, 19 bp, Homo sapiens
  siRNA target sequence for KIAA0141 (NM_014773.1,979-997).
cggtcctttattatcagtt

SEQ ID NO: 343222 - DNA, 19 bp, Homo sapiens
  siRNA target sequence for KIAA0141 (NM_014773.1,1144-1162).
ctttcctcggggtgctttt

SEQ ID NO: 343223 - DNA, 19 bp, Homo sapiens
  siRNA target sequence for KIAA0141 (NM_014773.1,1240-1258).
gcaggtaccaccttggaat

SEQ ID NO: 343224 - DNA, 19 bp, Homo sapiens
  siRNA target sequence for KIAA0141 (NM_014773.1,1241-1259).
caggtaccaccttggaatt

SEQ ID NO: 343225 - DNA, 19 bp, Homo sapiens
  siRNA target sequence for KIAA0141 (NM_014773.1,1296-1314).
ggagaggccttgagatgtt

SEQ ID NO: 343226 - DNA, 19 bp, Homo sapiens
  siRNA target sequence for KIAA0141 (NM_014773.1,1297-1315).
gagaggccttgagatgtta

SEQ ID NO: 343227 - DNA, 19 bp, Homo sapiens
  siRNA target sequence for KIAA0141 (NM_014773.1,1398-1416).
cccagcgacctgacagtta

SEQ ID NO: 343228 - DNA, 19 bp, Homo sapiens
  siRNA target sequence for KIAA0141 (NM_014773.1,1400-1418).
cagcgacctgacagttaca

SEQ ID NO: 343229 - DNA, 19 bp, Homo sapiens
  siRNA target sequence for KIAA0141 (NM_014773.1,1593-1611).
ctggaaaggagtgttgtaa

SEQ ID NO: 343230 - DNA, 19 bp, Homo sapiens
  siRNA target sequence for KIAA0141 (NM_014773.1,1603-1621).
gtgttgtaagactaggttt

SEQ ID NO: 343231 - DNA, 19 bp, Homo sapiens
  siRNA target sequence for KIAA0076 (NM_014780.2,521-539).
gtccaaggatgagatctat

SEQ ID NO: 343232 - DNA, 19 bp, Homo sapiens
  siRNA target sequence for KIAA0076 (NM_014780.2,769-787).
ccctcactggagtattcaa

SEQ ID NO: 343233 - DNA, 19 bp, Homo sapiens
  siRNA target sequence for KIAA0076 (NM_014780.2,826-844).
gtagtcctgattatcagat

SEQ ID NO: 343234 - DNA, 19 bp, Homo sapiens
  siRNA target sequence for KIAA0076 (NM_014780.2,851-869).
gagtgcaggccggatgata

SEQ ID NO: 343235 - DNA, 19 bp, Homo sapiens
  siRNA target sequence for KIAA0076 (NM_014780.2,853-871).
gtgcaggccggatgataca

SEQ ID NO: 343236 - DNA, 19 bp, Homo sapiens
  siRNA target sequence for KIAA0076 (NM_014780.2,1006-1024).
ctgaacaccccatgtcttt

SEQ ID NO: 343237 - DNA, 19 bp, Homo sapiens
  siRNA target sequence for KIAA0076 (NM_014780.2,1073-1091).
ggtgaagcggtatttgcat

SEQ ID NO: 343238 - DNA, 19 bp, Homo sapiens
  siRNA target sequence for KIAA0076 (NM_014780.2,1367-1385).
caggaggtcaagacgtttt

SEQ ID NO: 343239 - DNA, 19 bp, Homo sapiens
  siRNA target sequence for KIAA0076 (NM_014780.2,1403-1421).
cgcaagtggcaatacctat

SEQ ID NO: 343240 - DNA, 19 bp, Homo sapiens
  siRNA target sequence for KIAA0076 (NM_014780.2,1535-1553).
gcctcctgtgcaggtattt

SEQ ID NO: 343241 - DNA, 19 bp, Homo sapiens
  siRNA target sequence for KIAA0076 (NM_014780.2,1911-1929).
ctggccgtgcccatagaat

SEQ ID NO: 343242 - DNA, 19 bp, Homo sapiens
  siRNA target sequence for KIAA0076 (NM_014780.2,2047-2065).
cctacccatcccttctaga

SEQ ID NO: 343243 - DNA, 19 bp, Homo sapiens
  siRNA target sequence for KIAA0076 (NM_014780.2,2048-2066).
ctacccatcccttctagaa

SEQ ID NO: 343244 - DNA, 19 bp, Homo sapiens
  siRNA target sequence for KIAA0076 (NM_014780.2,2334-2352).
gacactccggagactaaca

SEQ ID NO: 343245 - DNA, 19 bp, Homo sapiens
  siRNA target sequence for KIAA0076 (NM_014780.2,2483-2501).
ggtgctccaggaactgatt

SEQ ID NO: 343246 - DNA, 19 bp, Homo sapiens
  siRNA target sequence for KIAA0076 (NM_014780.2,2664-2682).
cacctctaccgcaaactca

SEQ ID NO: 343247 - DNA, 19 bp, Homo sapiens
  siRNA target sequence for KIAA0076 (NM_014780.2,3058-3076).
ctcttcacacggaactcaa

SEQ ID NO: 343248 - DNA, 19 bp, Homo sapiens
  siRNA target sequence for KIAA0076 (NM_014780.2,3192-3210).
cgcattcgggggttagaga

SEQ ID NO: 343249 - DNA, 19 bp, Homo sapiens
  siRNA target sequence for KIAA0076 (NM_014780.2,3193-3211).
gcattcgggggttagagat

SEQ ID NO: 343250 - DNA, 19 bp, Homo sapiens
  siRNA target sequence for KIAA0076 (NM_014780.2,3333-3351).
ctcctgcacctgagttcta

SEQ ID NO: 343251 - DNA, 19 bp, Homo sapiens
  siRNA target sequence for KIAA0076 (NM_014780.2,3796-3814).
catcctggcgggatgatga

SEQ ID NO: 343252 - DNA, 19 bp, Homo sapiens
  siRNA target sequence for KIAA0076 (NM_014780.2,3799-3817).
cctggcgggatgatgactt

SEQ ID NO: 343253 - DNA, 19 bp, Homo sapiens
  siRNA target sequence for KIAA0076 (NM_014780.2,3800-3818).
ctggcgggatgatgacttt

SEQ ID NO: 343254 - DNA, 19 bp, Homo sapiens
  siRNA target sequence for KIAA0076 (NM_014780.2,3825-3843).
cgctactgtgagcacttta

SEQ ID NO: 343255 - DNA, 19 bp, Homo sapiens
  siRNA target sequence for KIAA0076 (NM_014780.2,3826-3844).
gctactgtgagcactttaa

SEQ ID NO: 343256 - DNA, 19 bp, Homo sapiens
  siRNA target sequence for KIAA0076 (NM_014780.2,3827-3845).
ctactgtgagcactttaat

SEQ ID NO: 343257 - DNA, 19 bp, Homo sapiens
  siRNA target sequence for KIAA0076 (NM_014780.2,3830-3848).
ctgtgagcactttaatatt

SEQ ID NO: 343258 - DNA, 19 bp, Homo sapiens
  siRNA target sequence for KIAA0076 (NM_014780.2,3857-3875).
ctcaagctctgaactgttt

SEQ ID NO: 343259 - DNA, 19 bp, Homo sapiens
  siRNA target sequence for KIAA0076 (NM_014780.2,4099-4117).
ccacttttgagcattatta

SEQ ID NO: 343260 - DNA, 19 bp, Homo sapiens
  siRNA target sequence for KIAA0076 (NM_014780.2,4570-4588).
ggggcactttgaacagata

SEQ ID NO: 343261 - DNA, 19 bp, Homo sapiens
  siRNA target sequence for KIAA0076 (NM_014780.2,4572-4590).
ggcactttgaacagatact

SEQ ID NO: 343262 - DNA, 19 bp, Homo sapiens
  siRNA target sequence for KIAA0076 (NM_014780.2,4859-4877).
cgagcaaaaggatatacca

SEQ ID NO: 343263 - DNA, 19 bp, Homo sapiens
  siRNA target sequence for KIAA0076 (NM_014780.2,4918-4936).
ggtcgagatgggacattgt

SEQ ID NO: 343264 - DNA, 19 bp, Homo sapiens
  siRNA target sequence for KIAA0076 (NM_014780.2,4975-4993).
gtgaagacggccagaactt

SEQ ID NO: 343265 - DNA, 19 bp, Homo sapiens
  siRNA target sequence for KIAA0076 (NM_014780.2,5330-5348).
cttccataccctacagatt

SEQ ID NO: 343266 - DNA, 19 bp, Homo sapiens
  siRNA target sequence for RB1CC1 (NM_014781.1,536-554).
ggttaacactggaactact

SEQ ID NO: 343267 - DNA, 19 bp, Homo sapiens
  siRNA target sequence for RB1CC1 (NM_014781.1,586-604).
ctgtggcagaccttaagca

SEQ ID NO: 343268 - DNA, 19 bp, Homo sapiens
  siRNA target sequence for RB1CC1 (NM_014781.1,597-615).
cttaagcatgccattcaaa

SEQ ID NO: 343269 - DNA, 19 bp, Homo sapiens
  siRNA target sequence for RB1CC1 (NM_014781.1,617-635).
caaatacaagattgctatt

SEQ ID NO: 343270 - DNA, 19 bp, Homo sapiens
  siRNA target sequence for RB1CC1 (NM_014781.1,708-726).
gggacggatacaaatccaa

SEQ ID NO: 343271 - DNA, 19 bp, Homo sapiens
  siRNA target sequence for RB1CC1 (NM_014781.1,712-730).
cggatacaaatccaatttt

SEQ ID NO: 343272 - DNA, 19 bp, Homo sapiens
  siRNA target sequence for RB1CC1 (NM_014781.1,787-805).
ccttttcgacagaaaatga

SEQ ID NO: 343273 - DNA, 19 bp, Homo sapiens
  siRNA target sequence for RB1CC1 (NM_014781.1,836-854).
gatgcctgcagtttttcat

SEQ ID NO: 343274 - DNA, 19 bp, Homo sapiens
  siRNA target sequence for RB1CC1 (NM_014781.1,841-859).
ctgcagtttttcatactgt

SEQ ID NO: 343275 - DNA, 19 bp, Homo sapiens
  siRNA target sequence for RB1CC1 (NM_014781.1,900-918).
gccaagaaactttgttctt

SEQ ID NO: 343276 - DNA, 19 bp, Homo sapiens
  siRNA target sequence for RB1CC1 (NM_014781.1,983-1001).
cctggaggactgttcaaat

SEQ ID NO: 343277 - DNA, 19 bp, Homo sapiens
  siRNA target sequence for RB1CC1 (NM_014781.1,984-1002).
ctggaggactgttcaaatt

SEQ ID NO: 343278 - DNA, 19 bp, Homo sapiens
  siRNA target sequence for RB1CC1 (NM_014781.1,986-1004).
ggaggactgttcaaattca

SEQ ID NO: 343279 - DNA, 19 bp, Homo sapiens
  siRNA target sequence for RB1CC1 (NM_014781.1,987-1005).
gaggactgttcaaattcat

SEQ ID NO: 343280 - DNA, 19 bp, Homo sapiens
  siRNA target sequence for RB1CC1 (NM_014781.1,1058-1076).
catagaagacatcaagtta

SEQ ID NO: 343281 - DNA, 19 bp, Homo sapiens
  siRNA target sequence for RB1CC1 (NM_014781.1,1070-1088).
caagttaaaacttactcat

SEQ ID NO: 343282 - DNA, 19 bp, Homo sapiens
  siRNA target sequence for RB1CC1 (NM_014781.1,1092-1110).
ggaactgcagtttcagtaa

SEQ ID NO: 343283 - DNA, 19 bp, Homo sapiens
  siRNA target sequence for RB1CC1 (NM_014781.1,1131-1149).
gagtgcctaaccagacata

SEQ ID NO: 343284 - DNA, 19 bp, Homo sapiens
  siRNA target sequence for RB1CC1 (NM_014781.1,1133-1151).
gtgcctaaccagacatagt

SEQ ID NO: 343285 - DNA, 19 bp, Homo sapiens
  siRNA target sequence for RB1CC1 (NM_014781.1,1135-1153).
gcctaaccagacatagtta

SEQ ID NO: 343286 - DNA, 19 bp, Homo sapiens
  siRNA target sequence for RB1CC1 (NM_014781.1,1175-1193).
ggattctttacctgaacat

SEQ ID NO: 343287 - DNA, 19 bp, Homo sapiens
  siRNA target sequence for RB1CC1 (NM_014781.1,1253-1271).
gcctagaacaactaacgaa

SEQ ID NO: 343288 - DNA, 19 bp, Homo sapiens
  siRNA target sequence for RB1CC1 (NM_014781.1,1254-1272).
cctagaacaactaacgaat

SEQ ID NO: 343289 - DNA, 19 bp, Homo sapiens
  siRNA target sequence for RB1CC1 (NM_014781.1,1258-1276).
gaacaactaacgaatcttt

SEQ ID NO: 343290 - DNA, 19 bp, Homo sapiens
  siRNA target sequence for RB1CC1 (NM_014781.1,1261-1279).
caactaacgaatctttgtt

SEQ ID NO: 343291 - DNA, 19 bp, Homo sapiens
  siRNA target sequence for RB1CC1 (NM_014781.1,1379-1397).
gcaagatgaaactacgatt

SEQ ID NO: 343292 - DNA, 19 bp, Homo sapiens
  siRNA target sequence for RB1CC1 (NM_014781.1,1383-1401).
gatgaaactacgattgaca

SEQ ID NO: 343293 - DNA, 19 bp, Homo sapiens
  siRNA target sequence for RB1CC1 (NM_014781.1,1445-1463).
ctggataaatgttcaagat

SEQ ID NO: 343294 - DNA, 19 bp, Homo sapiens
  siRNA target sequence for RB1CC1 (NM_014781.1,1514-1532).
caggcttgatccaaggatt

SEQ ID NO: 343295 - DNA, 19 bp, Homo sapiens
  siRNA target sequence for RB1CC1 (NM_014781.1,1528-1546).
ggattattcgaccatttat

SEQ ID NO: 343296 - DNA, 19 bp, Homo sapiens
  siRNA target sequence for RB1CC1 (NM_014781.1,1548-1566).
gcagaatgccgtcaaacta

SEQ ID NO: 343297 - DNA, 19 bp, Homo sapiens
  siRNA target sequence for RB1CC1 (NM_014781.1,1549-1567).
cagaatgccgtcaaactat

SEQ ID NO: 343298 - DNA, 19 bp, Homo sapiens
  siRNA target sequence for RB1CC1 (NM_014781.1,1564-1582).
ctattgccaaacttgataa

SEQ ID NO: 343299 - DNA, 19 bp, Homo sapiens
  siRNA target sequence for RB1CC1 (NM_014781.1,1570-1588).
ccaaacttgataatcagaa

SEQ ID NO: 343300 - DNA, 19 bp, Homo sapiens
  siRNA target sequence for RB1CC1 (NM_014781.1,1575-1593).
cttgataatcagaatatga

SEQ ID NO: 343301 - DNA, 19 bp, Homo sapiens
  siRNA target sequence for RB1CC1 (NM_014781.1,1677-1695).
gagcttgctcagggatttt

SEQ ID NO: 343302 - DNA, 19 bp, Homo sapiens
  siRNA target sequence for RB1CC1 (NM_014781.1,1683-1701).
gctcagggatttttagcta

SEQ ID NO: 343303 - DNA, 19 bp, Homo sapiens
  siRNA target sequence for RB1CC1 (NM_014781.1,1684-1702).
ctcagggatttttagctaa

SEQ ID NO: 343304 - DNA, 19 bp, Homo sapiens
  siRNA target sequence for RB1CC1 (NM_014781.1,1689-1707).
ggatttttagctaatcaga

SEQ ID NO: 343305 - DNA, 19 bp, Homo sapiens
  siRNA target sequence for RB1CC1 (NM_014781.1,1761-1779).
cacgcaaatcagttgatga

SEQ ID NO: 343306 - DNA, 19 bp, Homo sapiens
  siRNA target sequence for RB1CC1 (NM_014781.1,1763-1781).
cgcaaatcagttgatgatt

SEQ ID NO: 343307 - DNA, 19 bp, Homo sapiens
  siRNA target sequence for RB1CC1 (NM_014781.1,1764-1782).
gcaaatcagttgatgatta

SEQ ID NO: 343308 - DNA, 19 bp, Homo sapiens
  siRNA target sequence for RB1CC1 (NM_014781.1,1765-1783).
caaatcagttgatgattat

SEQ ID NO: 343309 - DNA, 19 bp, Homo sapiens
  siRNA target sequence for RB1CC1 (NM_014781.1,1775-1793).
gatgattatgttgcaaaat

SEQ ID NO: 343310 - DNA, 19 bp, Homo sapiens
  siRNA target sequence for RB1CC1 (NM_014781.1,1823-1841).
gtgtaccactgccaaacaa

SEQ ID NO: 343311 - DNA, 19 bp, Homo sapiens
  siRNA target sequence for RB1CC1 (NM_014781.1,1825-1843).
gtaccactgccaaacaaga

SEQ ID NO: 343312 - DNA, 19 bp, Homo sapiens
  siRNA target sequence for RB1CC1 (NM_014781.1,1912-1930).
gagagaagttacaagcttt

SEQ ID NO: 343313 - DNA, 19 bp, Homo sapiens
  siRNA target sequence for RB1CC1 (NM_014781.1,1927-1945).
ctttgctccgcctcgtaat

SEQ ID NO: 343314 - DNA, 19 bp, Homo sapiens
  siRNA target sequence for RB1CC1 (NM_014781.1,1940-1958).
cgtaatagagctgttagaa

SEQ ID NO: 343315 - DNA, 19 bp, Homo sapiens
  siRNA target sequence for RB1CC1 (NM_014781.1,1941-1959).
gtaatagagctgttagaaa

SEQ ID NO: 343316 - DNA, 19 bp, Homo sapiens
  siRNA target sequence for RB1CC1 (NM_014781.1,1984-2002).
gtacagttcctcagatgta

SEQ ID NO: 343317 - DNA, 19 bp, Homo sapiens
  siRNA target sequence for RB1CC1 (NM_014781.1,2000-2018).
gtactgcttagctgttgtt

SEQ ID NO: 343318 - DNA, 19 bp, Homo sapiens
  siRNA target sequence for RB1CC1 (NM_014781.1,2010-2028).
gctgttgttgaggttgtaa

SEQ ID NO: 343319 - DNA, 19 bp, Homo sapiens
  siRNA target sequence for RB1CC1 (NM_014781.1,2065-2083).
ctggtgctttagtcaaaga

SEQ ID NO: 343320 - DNA, 19 bp, Homo sapiens
  siRNA target sequence for RB1CC1 (NM_014781.1,2232-2250).
gaacttccagatatttcat

SEQ ID NO: 343321 - DNA, 19 bp, Homo sapiens
  siRNA target sequence for RB1CC1 (NM_014781.1,2304-2322).
ctcagggttcccttacttt

SEQ ID NO: 343322 - DNA, 19 bp, Homo sapiens
  siRNA target sequence for RB1CC1 (NM_014781.1,2306-2324).
cagggttcccttactttgt

SEQ ID NO: 343323 - DNA, 19 bp, Homo sapiens
  siRNA target sequence for RB1CC1 (NM_014781.1,2308-2326).
gggttcccttactttgtga

SEQ ID NO: 343324 - DNA, 19 bp, Homo sapiens
  siRNA target sequence for RB1CC1 (NM_014781.1,2345-2363).
gcatgtacttgctctacat

SEQ ID NO: 343325 - DNA, 19 bp, Homo sapiens
  siRNA target sequence for RB1CC1 (NM_014781.1,2483-2501).
ggaaagtacagcaggaatt

SEQ ID NO: 343326 - DNA, 19 bp, Homo sapiens
  siRNA target sequence for RB1CC1 (NM_014781.1,2484-2502).
gaaagtacagcaggaatta

SEQ ID NO: 343327 - DNA, 19 bp, Homo sapiens
  siRNA target sequence for RB1CC1 (NM_014781.1,2596-2614).
gtattgatgcacatacgtt

SEQ ID NO: 343328 - DNA, 19 bp, Homo sapiens
  siRNA target sequence for RB1CC1 (NM_014781.1,2601-2619).
gatgcacatacgtttgatt

SEQ ID NO: 343329 - DNA, 19 bp, Homo sapiens
  siRNA target sequence for RB1CC1 (NM_014781.1,2626-2644).
ctattccccatccaaacat

SEQ ID NO: 343330 - DNA, 19 bp, Homo sapiens
  siRNA target sequence for RB1CC1 (NM_014781.1,2649-2667).
cagactattcaccaagttt

SEQ ID NO: 343331 - DNA, 19 bp, Homo sapiens
  siRNA target sequence for RB1CC1 (NM_014781.1,2653-2671).
ctattcaccaagtttcttt

SEQ ID NO: 343332 - DNA, 19 bp, Homo sapiens
  siRNA target sequence for RB1CC1 (NM_014781.1,2658-2676).
caccaagtttctttagact

SEQ ID NO: 343333 - DNA, 19 bp, Homo sapiens
  siRNA target sequence for RB1CC1 (NM_014781.1,2691-2709).
gaaagtcctgaatcagatt

SEQ ID NO: 343334 - DNA, 19 bp, Homo sapiens
  siRNA target sequence for RB1CC1 (NM_014781.1,2695-2713).
gtcctgaatcagattttat

SEQ ID NO: 343335 - DNA, 19 bp, Homo sapiens
  siRNA target sequence for RB1CC1 (NM_014781.1,2753-2771).
gtctcctaatcctataagt

SEQ ID NO: 343336 - DNA, 19 bp, Homo sapiens
  siRNA target sequence for RB1CC1 (NM_014781.1,2803-2821).
cactttattcatcagttat

SEQ ID NO: 343337 - DNA, 19 bp, Homo sapiens
  siRNA target sequence for RB1CC1 (NM_014781.1,2817-2835).
gttatcaatgcgatagaca

SEQ ID NO: 343338 - DNA, 19 bp, Homo sapiens
  siRNA target sequence for RB1CC1 (NM_014781.1,2839-2857).
gacgaatgcaggatacaaa

SEQ ID NO: 343339 - DNA, 19 bp, Homo sapiens
  siRNA target sequence for RB1CC1 (NM_014781.1,2846-2864).
gcaggatacaaatgtatgt

SEQ ID NO: 343340 - DNA, 19 bp, Homo sapiens
  siRNA target sequence for RB1CC1 (NM_014781.1,2931-2949).
caagactctcacttcagta

SEQ ID NO: 343341 - DNA, 19 bp, Homo sapiens
  siRNA target sequence for RB1CC1 (NM_014781.1,2947-2965).
gtatacaaaccattaagga

SEQ ID NO: 343342 - DNA, 19 bp, Homo sapiens
  siRNA target sequence for RB1CC1 (NM_014781.1,2964-2982).
gaagacctttgccacttta

SEQ ID NO: 343343 - DNA, 19 bp, Homo sapiens
  siRNA target sequence for RB1CC1 (NM_014781.1,3003-3021).
cagtgtgacttctcaaatt

SEQ ID NO: 343344 - DNA, 19 bp, Homo sapiens
  siRNA target sequence for RB1CC1 (NM_014781.1,3005-3023).
gtgtgacttctcaaattca

SEQ ID NO: 343345 - DNA, 19 bp, Homo sapiens
  siRNA target sequence for RB1CC1 (NM_014781.1,3073-3091).
gttctctggaaataacact

SEQ ID NO: 343346 - DNA, 19 bp, Homo sapiens
  siRNA target sequence for RB1CC1 (NM_014781.1,3142-3160).
gtaaacttgacggactaat

SEQ ID NO: 343347 - DNA, 19 bp, Homo sapiens
  siRNA target sequence for RB1CC1 (NM_014781.1,3150-3168).
gacggactaataaaggaaa

SEQ ID NO: 343348 - DNA, 19 bp, Homo sapiens
  siRNA target sequence for RB1CC1 (NM_014781.1,3154-3172).
gactaataaaggaaactga

SEQ ID NO: 343349 - DNA, 19 bp, Homo sapiens
  siRNA target sequence for RB1CC1 (NM_014781.1,3374-3392).
gtcacgagaaatagtgtta

SEQ ID NO: 343350 - DNA, 19 bp, Homo sapiens
  siRNA target sequence for RB1CC1 (NM_014781.1,3461-3479).
cttggagcaaagtcatcta

SEQ ID NO: 343351 - DNA, 19 bp, Homo sapiens
  siRNA target sequence for RB1CC1 (NM_014781.1,3472-3490).
gtcatctaaaggaattaga

SEQ ID NO: 343352 - DNA, 19 bp, Homo sapiens
  siRNA target sequence for RB1CC1 (NM_014781.1,3508-3526).
ggcacatacaagagtttga

SEQ ID NO: 343353 - DNA, 19 bp, Homo sapiens
  siRNA target sequence for RB1CC1 (NM_014781.1,3603-3621).
gaatctcatgctgaaatta

SEQ ID NO: 343354 - DNA, 19 bp, Homo sapiens
  siRNA target sequence for RB1CC1 (NM_014781.1,3689-3707).
caagttagaggttgaactt

SEQ ID NO: 343355 - DNA, 19 bp, Homo sapiens
  siRNA target sequence for RB1CC1 (NM_014781.1,3820-3838).
cagaaattagtaaactcaa

SEQ ID NO: 343356 - DNA, 19 bp, Homo sapiens
  siRNA target sequence for RB1CC1 (NM_014781.1,3839-3857).
ccaaaagattcaggataat

SEQ ID NO: 343357 - DNA, 19 bp, Homo sapiens
  siRNA target sequence for RB1CC1 (NM_014781.1,3840-3858).
caaaagattcaggataata

SEQ ID NO: 343358 - DNA, 19 bp, Homo sapiens
  siRNA target sequence for RB1CC1 (NM_014781.1,3878-3896).
cttagcagagctaagaact

SEQ ID NO: 343359 - DNA, 19 bp, Homo sapiens
  siRNA target sequence for RB1CC1 (NM_014781.1,3929-3947).
cgagttaattagtagacat

SEQ ID NO: 343360 - DNA, 19 bp, Homo sapiens
  siRNA target sequence for RB1CC1 (NM_014781.1,3994-4012).
ctttgcataaccaagcatt

SEQ ID NO: 343361 - DNA, 19 bp, Homo sapiens
  siRNA target sequence for RB1CC1 (NM_014781.1,4187-4205).
gcaagacagagaacagtta

SEQ ID NO: 343362 - DNA, 19 bp, Homo sapiens
  siRNA target sequence for RB1CC1 (NM_014781.1,4202-4220).
gttaattcagaagcttaat

SEQ ID NO: 343363 - DNA, 19 bp, Homo sapiens
  siRNA target sequence for RB1CC1 (NM_014781.1,4244-4262).
gactgccctaaaagaattt

SEQ ID NO: 343364 - DNA, 19 bp, Homo sapiens
  siRNA target sequence for RB1CC1 (NM_014781.1,4372-4390).
gcttagttgctgaacttca

SEQ ID NO: 343365 - DNA, 19 bp, Homo sapiens
  siRNA target sequence for RB1CC1 (NM_014781.1,4373-4391).
cttagttgctgaacttcaa

SEQ ID NO: 343366 - DNA, 19 bp, Homo sapiens
  siRNA target sequence for RB1CC1 (NM_014781.1,4466-4484).
gcaaaatgttcgaacatct

SEQ ID NO: 343367 - DNA, 19 bp, Homo sapiens
  siRNA target sequence for RB1CC1 (NM_014781.1,4467-4485).
caaaatgttcgaacatctt

SEQ ID NO: 343368 - DNA, 19 bp, Homo sapiens
  siRNA target sequence for RB1CC1 (NM_014781.1,4483-4501).
ctttgattgcggaacaaca

SEQ ID NO: 343369 - DNA, 19 bp, Homo sapiens
  siRNA target sequence for RB1CC1 (NM_014781.1,4491-4509).
gcggaacaacagaccaatt

SEQ ID NO: 343370 - DNA, 19 bp, Homo sapiens
  siRNA target sequence for RB1CC1 (NM_014781.1,4492-4510).
cggaacaacagaccaattt

SEQ ID NO: 343371 - DNA, 19 bp, Homo sapiens
  siRNA target sequence for RB1CC1 (NM_014781.1,4493-4511).
ggaacaacagaccaatttt

SEQ ID NO: 343372 - DNA, 19 bp, Homo sapiens
  siRNA target sequence for RB1CC1 (NM_014781.1,4494-4512).
gaacaacagaccaatttta

SEQ ID NO: 343373 - DNA, 19 bp, Homo sapiens
  siRNA target sequence for RB1CC1 (NM_014781.1,4497-4515).
caacagaccaattttaaca

SEQ ID NO: 343374 - DNA, 19 bp, Homo sapiens
  siRNA target sequence for RB1CC1 (NM_014781.1,4560-4578).
gatcttagtgataagttga

SEQ ID NO: 343375 - DNA, 19 bp, Homo sapiens
  siRNA target sequence for RB1CC1 (NM_014781.1,4582-4600).
gtacaatgcagcaacaaga

SEQ ID NO: 343376 - DNA, 19 bp, Homo sapiens
  siRNA target sequence for RB1CC1 (NM_014781.1,4592-4610).
gcaacaagaacgggataaa

SEQ ID NO: 343377 - DNA, 19 bp, Homo sapiens
  siRNA target sequence for RB1CC1 (NM_014781.1,4596-4614).
caagaacgggataaagatt

SEQ ID NO: 343378 - DNA, 19 bp, Homo sapiens
  siRNA target sequence for RB1CC1 (NM_014781.1,4603-4621).
gggataaagatttgataga

SEQ ID NO: 343379 - DNA, 19 bp, Homo sapiens
  siRNA target sequence for RB1CC1 (NM_014781.1,4644-4662).
cgtttgcttgaggaaaaga

SEQ ID NO: 343380 - DNA, 19 bp, Homo sapiens
  siRNA target sequence for RB1CC1 (NM_014781.1,4645-4663).
gtttgcttgaggaaaagaa

SEQ ID NO: 343381 - DNA, 19 bp, Homo sapiens
  siRNA target sequence for RB1CC1 (NM_014781.1,4766-4784).
cccaggtgaatcagataga

SEQ ID NO: 343382 - DNA, 19 bp, Homo sapiens
  siRNA target sequence for RB1CC1 (NM_014781.1,4837-4855).
gcatgatgtctgtacaaga

SEQ ID NO: 343383 - DNA, 19 bp, Homo sapiens
  siRNA target sequence for RB1CC1 (NM_014781.1,4838-4856).
catgatgtctgtacaagaa

SEQ ID NO: 343384 - DNA, 19 bp, Homo sapiens
  siRNA target sequence for RB1CC1 (NM_014781.1,4886-4904).
gcggataatgctgttagaa

SEQ ID NO: 343385 - DNA, 19 bp, Homo sapiens
  siRNA target sequence for RB1CC1 (NM_014781.1,4898-4916).
gttagaacgaacattgcaa

SEQ ID NO: 343386 - DNA, 19 bp, Homo sapiens
  siRNA target sequence for RB1CC1 (NM_014781.1,4906-4924).
gaacattgcaattgaaaga

SEQ ID NO: 343387 - DNA, 19 bp, Homo sapiens
  siRNA target sequence for RB1CC1 (NM_014781.1,4909-4927).
cattgcaattgaaagaaga

SEQ ID NO: 343388 - DNA, 19 bp, Homo sapiens
  siRNA target sequence for RB1CC1 (NM_014781.1,4964-4982).
gagcatgtcttcagtatct

SEQ ID NO: 343389 - DNA, 19 bp, Homo sapiens
  siRNA target sequence for RB1CC1 (NM_014781.1,4984-5002).
caaggcattctgaaaagat

SEQ ID NO: 343390 - DNA, 19 bp, Homo sapiens
  siRNA target sequence for RB1CC1 (NM_014781.1,5049-5067).
gacgaacgccatgacaatt

SEQ ID NO: 343391 - DNA, 19 bp, Homo sapiens
  siRNA target sequence for RB1CC1 (NM_014781.1,5051-5069).
cgaacgccatgacaattat

SEQ ID NO: 343392 - DNA, 19 bp, Homo sapiens
  siRNA target sequence for RB1CC1 (NM_014781.1,5055-5073).
cgccatgacaattatgtgt

SEQ ID NO: 343393 - DNA, 19 bp, Homo sapiens
  siRNA target sequence for RB1CC1 (NM_014781.1,5056-5074).
gccatgacaattatgtgtt

SEQ ID NO: 343394 - DNA, 19 bp, Homo sapiens
  siRNA target sequence for RB1CC1 (NM_014781.1,5057-5075).
ccatgacaattatgtgtta

SEQ ID NO: 343395 - DNA, 19 bp, Homo sapiens
  siRNA target sequence for RB1CC1 (NM_014781.1,5142-5160).
gcttcaggtgcatctagaa

SEQ ID NO: 343396 - DNA, 19 bp, Homo sapiens
  siRNA target sequence for RB1CC1 (NM_014781.1,5240-5258).
ggggacaaagttttacaga

SEQ ID NO: 343397 - DNA, 19 bp, Homo sapiens
  siRNA target sequence for RB1CC1 (NM_014781.1,5266-5284).
ccgtatcatggaataagaa

SEQ ID NO: 343398 - DNA, 19 bp, Homo sapiens
  siRNA target sequence for ALEX2 (NM_014782.3,516-534).
cctggtactgtgtctacaa

SEQ ID NO: 343399 - DNA, 19 bp, Homo sapiens
  siRNA target sequence for ALEX2 (NM_014782.3,519-537).
ggtactgtgtctacaaata

SEQ ID NO: 343400 - DNA, 19 bp, Homo sapiens
  siRNA target sequence for ALEX2 (NM_014782.3,625-643).
gctaagagccggattcaca

SEQ ID NO: 343401 - DNA, 19 bp, Homo sapiens
  siRNA target sequence for ALEX2 (NM_014782.3,626-644).
ctaagagccggattcacaa

SEQ ID NO: 343402 - DNA, 19 bp, Homo sapiens
  siRNA target sequence for ALEX2 (NM_014782.3,828-846).
ggcctaaggccgaatcagt

SEQ ID NO: 343403 - DNA, 19 bp, Homo sapiens
  siRNA target sequence for ALEX2 (NM_014782.3,1201-1219).
ggtggttcctggaacatca

SEQ ID NO: 343404 - DNA, 19 bp, Homo sapiens
  siRNA target sequence for ALEX2 (NM_014782.3,1690-1708).
gagcaacaatgccaattat

SEQ ID NO: 343405 - DNA, 19 bp, Homo sapiens
  siRNA target sequence for ALEX2 (NM_014782.3,1776-1794).
ctgatccacacattaagga

SEQ ID NO: 343406 - DNA, 19 bp, Homo sapiens
  siRNA target sequence for ALEX2 (NM_014782.3,1799-1817).
gccttaatggccatgaata

SEQ ID NO: 343407 - DNA, 19 bp, Homo sapiens
  siRNA target sequence for ALEX2 (NM_014782.3,1800-1818).
ccttaatggccatgaataa

SEQ ID NO: 343408 - DNA, 19 bp, Homo sapiens
  siRNA target sequence for ALEX2 (NM_014782.3,1850-1868).
cttcaggtgtacatgaata

SEQ ID NO: 343409 - DNA, 19 bp, Homo sapiens
  siRNA target sequence for ALEX2 (NM_014782.3,1967-1985).
cacctgcttgtcaattcca

SEQ ID NO: 343410 - DNA, 19 bp, Homo sapiens
  siRNA target sequence for ALEX2 (NM_014782.3,1973-1991).
cttgtcaattccattgcaa

SEQ ID NO: 343411 - DNA, 19 bp, Homo sapiens
  siRNA target sequence for ALEX2 (NM_014782.3,2066-2084).
gaaaatccagatatgttga

SEQ ID NO: 343412 - DNA, 19 bp, Homo sapiens
  siRNA target sequence for ALEX2 (NM_014782.3,2172-2190).
ctctatttgagattatcta

SEQ ID NO: 343413 - DNA, 19 bp, Homo sapiens
  siRNA target sequence for ALEX2 (NM_014782.3,2202-2220).
gagcagaagtgtttaacta

SEQ ID NO: 343414 - DNA, 19 bp, Homo sapiens
  siRNA target sequence for ALEX2 (NM_014782.3,2204-2222).
gcagaagtgtttaactata

SEQ ID NO: 343415 - DNA, 19 bp, Homo sapiens
  siRNA target sequence for ALEX2 (NM_014782.3,2210-2228).
gtgtttaactatagagaat

SEQ ID NO: 343416 - DNA, 19 bp, Homo sapiens
  siRNA target sequence for ALEX2 (NM_014782.3,2237-2255).
ggttcccttttttacttat

SEQ ID NO: 343417 - DNA, 19 bp, Homo sapiens
  siRNA target sequence for ALEX2 (NM_014782.3,2318-2336).
gtgaaagtgaaagttataa

SEQ ID NO: 343418 - DNA, 19 bp, Homo sapiens
  siRNA target sequence for ARHGAP11A (NM_014783.2,1372-1390).
cagaaaagaagctacgatt

SEQ ID NO: 343419 - DNA, 19 bp, Homo sapiens
  siRNA target sequence for ARHGAP11A (NM_014783.2,1404-1422).
gtacagactcttatcgatt

SEQ ID NO: 343420 - DNA, 19 bp, Homo sapiens
  siRNA target sequence for ARHGAP11A (NM_014783.2,1409-1427).
gactcttatcgattatgca

SEQ ID NO: 343421 - DNA, 19 bp, Homo sapiens
  siRNA target sequence for ARHGAP11A (NM_014783.2,1437-1455).
gggcgtgtaccagatttta

SEQ ID NO: 343422 - DNA, 19 bp, Homo sapiens
  siRNA target sequence for ARHGAP11A (NM_014783.2,1438-1456).
ggcgtgtaccagattttat

SEQ ID NO: 343423 - DNA, 19 bp, Homo sapiens
  siRNA target sequence for ARHGAP11A (NM_014783.2,1471-1489).
cagccatgttgggtattga

SEQ ID NO: 343424 - DNA, 19 bp, Homo sapiens
  siRNA target sequence for ARHGAP11A (NM_014783.2,1539-1557).
gaaactcctggtgaatata

SEQ ID NO: 343425 - DNA, 19 bp, Homo sapiens
  siRNA target sequence for ARHGAP11A (NM_014783.2,1590-1608).
gttagtggagcactaaata

SEQ ID NO: 343426 - DNA, 19 bp, Homo sapiens
  siRNA target sequence for ARHGAP11A (NM_014783.2,1654-1672).
gaattgcccagctatctga

SEQ ID NO: 343427 - DNA, 19 bp, Homo sapiens
  siRNA target sequence for ARHGAP11A (NM_014783.2,1693-1711).
caaatgctaagcgtacatt

SEQ ID NO: 343428 - DNA, 19 bp, Homo sapiens
  siRNA target sequence for ARHGAP11A (NM_014783.2,1703-1721).
gcgtacattgccagtagat

SEQ ID NO: 343429 - DNA, 19 bp, Homo sapiens
  siRNA target sequence for ARHGAP11A (NM_014783.2,1704-1722).
cgtacattgccagtagatt

SEQ ID NO: 343430 - DNA, 19 bp, Homo sapiens
  siRNA target sequence for ARHGAP11A (NM_014783.2,1712-1730).
gccagtagattcttctcat

SEQ ID NO: 343431 - DNA, 19 bp, Homo sapiens
  siRNA target sequence for ARHGAP11A (NM_014783.2,1726-1744).
ctcatggtttctcaagtaa

SEQ ID NO: 343432 - DNA, 19 bp, Homo sapiens
  siRNA target sequence for ARHGAP11A (NM_014783.2,1754-1772).
gtccatcaagcacaatttt

SEQ ID NO: 343433 - DNA, 19 bp, Homo sapiens
  siRNA target sequence for ARHGAP11A (NM_014783.2,1787-1805).
gccaagtaatctcttcaat

SEQ ID NO: 343434 - DNA, 19 bp, Homo sapiens
  siRNA target sequence for ARHGAP11A (NM_014783.2,1788-1806).
ccaagtaatctcttcaata

SEQ ID NO: 343435 - DNA, 19 bp, Homo sapiens
  siRNA target sequence for ARHGAP11A (NM_014783.2,1797-1815).
ctcttcaatagcagttcta

SEQ ID NO: 343436 - DNA, 19 bp, Homo sapiens
  siRNA target sequence for ARHGAP11A (NM_014783.2,1799-1817).
cttcaatagcagttctaca

SEQ ID NO: 343437 - DNA, 19 bp, Homo sapiens
  siRNA target sequence for ARHGAP11A (NM_014783.2,1810-1828).
gttctacaccggtatcagt

SEQ ID NO: 343438 - DNA, 19 bp, Homo sapiens
  siRNA target sequence for ARHGAP11A (NM_014783.2,1816-1834).
caccggtatcagttcacat

SEQ ID NO: 343439 - DNA, 19 bp, Homo sapiens
  siRNA target sequence for ARHGAP11A (NM_014783.2,1821-1839).
gtatcagttcacatcgata

SEQ ID NO: 343440 - DNA, 19 bp, Homo sapiens
  siRNA target sequence for ARHGAP11A (NM_014783.2,1912-1930).
gtgtgccaaggcgaagtaa

SEQ ID NO: 343441 - DNA, 19 bp, Homo sapiens
  siRNA target sequence for ARHGAP11A (NM_014783.2,1914-1932).
gtgccaaggcgaagtaaaa

SEQ ID NO: 343442 - DNA, 19 bp, Homo sapiens
  siRNA target sequence for ARHGAP11A (NM_014783.2,1918-1936).
caaggcgaagtaaaagaat

SEQ ID NO: 343443 - DNA, 19 bp, Homo sapiens
  siRNA target sequence for ARHGAP11A (NM_014783.2,1922-1940).
gcgaagtaaaagaattgca

SEQ ID NO: 343444 - DNA, 19 bp, Homo sapiens
  siRNA target sequence for ARHGAP11A (NM_014783.2,2027-2045).
gcgtttgaaattcaatcta

SEQ ID NO: 343445 - DNA, 19 bp, Homo sapiens
  siRNA target sequence for ARHGAP11A (NM_014783.2,2084-2102).
caatagatatgaaagtgtt

SEQ ID NO: 343446 - DNA, 19 bp, Homo sapiens
  siRNA target sequence for ARHGAP11A (NM_014783.2,2107-2125).
ggcgacttgcaaatcaaca

SEQ ID NO: 343447 - DNA, 19 bp, Homo sapiens
  siRNA target sequence for ARHGAP11A (NM_014783.2,2115-2133).
gcaaatcaacaaagtttaa

SEQ ID NO: 343448 - DNA, 19 bp, Homo sapiens
  siRNA target sequence for ARHGAP11A (NM_014783.2,2139-2157).
cgaattgaatctgtaaaaa

SEQ ID NO: 343449 - DNA, 19 bp, Homo sapiens
  siRNA target sequence for ARHGAP11A (NM_014783.2,2181-2199).
gttgatgaaaagttaccaa

SEQ ID NO: 343450 - DNA, 19 bp, Homo sapiens
  siRNA target sequence for ARHGAP11A (NM_014783.2,2225-2243).
gtctgaggaaaccttacta

SEQ ID NO: 343451 - DNA, 19 bp, Homo sapiens
  siRNA target sequence for ARHGAP11A (NM_014783.2,2252-2270).
gcgactagttggaacaaat

SEQ ID NO: 343452 - DNA, 19 bp, Homo sapiens
  siRNA target sequence for ARHGAP11A (NM_014783.2,2253-2271).
cgactagttggaacaaatt

SEQ ID NO: 343453 - DNA, 19 bp, Homo sapiens
  siRNA target sequence for ARHGAP11A (NM_014783.2,2279-2297).
gtcttggacaggacctaat

SEQ ID NO: 343454 - DNA, 19 bp, Homo sapiens
  siRNA target sequence for ARHGAP11A (NM_014783.2,2285-2303).
gacaggacctaataattca

SEQ ID NO: 343455 - DNA, 19 bp, Homo sapiens
  siRNA target sequence for ARHGAP11A (NM_014783.2,2293-2311).
ctaataattcaagttttca

SEQ ID NO: 343456 - DNA, 19 bp, Homo sapiens
  siRNA target sequence for ARHGAP11A (NM_014783.2,2422-2440).
ccccttccaatttaaacaa

SEQ ID NO: 343457 - DNA, 19 bp, Homo sapiens
  siRNA target sequence for ARHGAP11A (NM_014783.2,2423-2441).
cccttccaatttaaacaat

SEQ ID NO: 343458 - DNA, 19 bp, Homo sapiens
  siRNA target sequence for ARHGAP11A (NM_014783.2,2469-2487).
cctcttagcggggatgaaa

SEQ ID NO: 343459 - DNA, 19 bp, Homo sapiens
  siRNA target sequence for ARHGAP11A (NM_014783.2,2470-2488).
ctcttagcggggatgaaaa

SEQ ID NO: 343460 - DNA, 19 bp, Homo sapiens
  siRNA target sequence for ARHGAP11A (NM_014783.2,2472-2490).
cttagcggggatgaaaata

SEQ ID NO: 343461 - DNA, 19 bp, Homo sapiens
  siRNA target sequence for ARHGAP11A (NM_014783.2,2478-2496).
ggggatgaaaataacatga

SEQ ID NO: 343462 - DNA, 19 bp, Homo sapiens
  siRNA target sequence for ARHGAP11A (NM_014783.2,2504-2522).
gactttggtgaaagttcaa

SEQ ID NO: 343463 - DNA, 19 bp, Homo sapiens
  siRNA target sequence for ARHGAP11A (NM_014783.2,2533-2551).
ctgaatctggaagtaatct

SEQ ID NO: 343464 - DNA, 19 bp, Homo sapiens
  siRNA target sequence for ARHGAP11A (NM_014783.2,2545-2563).
gtaatcttcacgcattgat

SEQ ID NO: 343465 - DNA, 19 bp, Homo sapiens
  siRNA target sequence for ARHGAP11A (NM_014783.2,2587-2605).
ctaatgtggggaaagtaaa

SEQ ID NO: 343466 - DNA, 19 bp, Homo sapiens
  siRNA target sequence for ARHGAP11A (NM_014783.2,2592-2610).
gtggggaaagtaaaattaa

SEQ ID NO: 343467 - DNA, 19 bp, Homo sapiens
  siRNA target sequence for ARHGAP11A (NM_014783.2,2635-2653).
gcccagaggaaaatctatt

SEQ ID NO: 343468 - DNA, 19 bp, Homo sapiens
  siRNA target sequence for ARHGAP11A (NM_014783.2,2655-2673).
gaaactaatgatttgacta

SEQ ID NO: 343469 - DNA, 19 bp, Homo sapiens
  siRNA target sequence for ARHGAP11A (NM_014783.2,2748-2766).
ccccttcaaactcaaacat

SEQ ID NO: 343470 - DNA, 19 bp, Homo sapiens
  siRNA target sequence for ARHGAP11A (NM_014783.2,2903-2921).
gtccccaaaggataaacta

SEQ ID NO: 343471 - DNA, 19 bp, Homo sapiens
  siRNA target sequence for ARHGAP11A (NM_014783.2,3017-3035).
gcagagtacatgtgttgta

SEQ ID NO: 343472 - DNA, 19 bp, Homo sapiens
  siRNA target sequence for ARHGAP11A (NM_014783.2,3020-3038).
gagtacatgtgttgtaaca

SEQ ID NO: 343473 - DNA, 19 bp, Homo sapiens
  siRNA target sequence for ARHGAP11A (NM_014783.2,3025-3043).
catgtgttgtaacaaactt

SEQ ID NO: 343474 - DNA, 19 bp, Homo sapiens
  siRNA target sequence for ARHGAP11A (NM_014783.2,3030-3048).
gttgtaacaaacttgtcaa

SEQ ID NO: 343475 - DNA, 19 bp, Homo sapiens
  siRNA target sequence for ARHGAP11A (NM_014783.2,3077-3095).
gcagtcattggaaacatgt

SEQ ID NO: 343476 - DNA, 19 bp, Homo sapiens
  siRNA target sequence for ARHGAP11A (NM_014783.2,3136-3154).
gaaaggtttctgatcacat

SEQ ID NO: 343477 - DNA, 19 bp, Homo sapiens
  siRNA target sequence for ARHGAP11A (NM_014783.2,3203-3221).
caagtcacctcttaagttt

SEQ ID NO: 343478 - DNA, 19 bp, Homo sapiens
  siRNA target sequence for ARHGAP11A (NM_014783.2,3237-3255).
cgtcagtccgtcagaagaa

SEQ ID NO: 343479 - DNA, 19 bp, Homo sapiens
  siRNA target sequence for ARHGAP11A (NM_014783.2,3240-3258).
cagtccgtcagaagaatta

SEQ ID NO: 343480 - DNA, 19 bp, Homo sapiens
  siRNA target sequence for ARHGAP11A (NM_014783.2,3242-3260).
gtccgtcagaagaattaat

SEQ ID NO: 343481 - DNA, 19 bp, Homo sapiens
  siRNA target sequence for ARHGAP11A (NM_014783.2,3245-3263).
cgtcagaagaattaattct

SEQ ID NO: 343482 - DNA, 19 bp, Homo sapiens
  siRNA target sequence for ARHGAP11A (NM_014783.2,3282-3300).
caacctacagggcataagt

SEQ ID NO: 343483 - DNA, 19 bp, Homo sapiens
  siRNA target sequence for ARHGAP11A (NM_014783.2,3321-3339).
gcttctcctttggtcaaat

SEQ ID NO: 343484 - DNA, 19 bp, Homo sapiens
  siRNA target sequence for ARHGAP11A (NM_014783.2,3485-3503).
ggagttaccctcgaaatct

SEQ ID NO: 343485 - DNA, 19 bp, Homo sapiens
  siRNA target sequence for ARHGAP11A (NM_014783.2,3486-3504).
gagttaccctcgaaatctt

SEQ ID NO: 343486 - DNA, 19 bp, Homo sapiens
  siRNA target sequence for ARHGAP11A (NM_014783.2,3492-3510).
ccctcgaaatctttcttaa

SEQ ID NO: 343487 - DNA, 19 bp, Homo sapiens
  siRNA target sequence for ARHGAP11A (NM_014783.2,3517-3535).
ggaagcacccagattcagt

SEQ ID NO: 343488 - DNA, 19 bp, Homo sapiens
  siRNA target sequence for ARHGAP11A (NM_014783.2,3521-3539).
gcacccagattcagtgaat

SEQ ID NO: 343489 - DNA, 19 bp, Homo sapiens
  siRNA target sequence for ARHGAP11A (NM_014783.2,3540-3558).
gcttctcttaggtctacta

SEQ ID NO: 343490 - DNA, 19 bp, Homo sapiens
  siRNA target sequence for ARHGAP11A (NM_014783.2,3546-3564).
cttaggtctactacagttt

SEQ ID NO: 343491 - DNA, 19 bp, Homo sapiens
  siRNA target sequence for ARHGAP11A (NM_014783.2,3551-3569).
gtctactacagtttataaa

SEQ ID NO: 343492 - DNA, 19 bp, Homo sapiens
  siRNA target sequence for ARHGAP11A (NM_014783.2,3583-3601).
ctgatggccaagttaaggt

SEQ ID NO: 343493 - DNA, 19 bp, Homo sapiens
  siRNA target sequence for ARHGAP11A (NM_014783.2,3608-3626).
ggatgatctgactaatcat

SEQ ID NO: 343494 - DNA, 19 bp, Homo sapiens
  siRNA target sequence for ARHGAP11A (NM_014783.2,3617-3635).
gactaatcatgatatagta

SEQ ID NO: 343495 - DNA, 19 bp, Homo sapiens
  siRNA target sequence for ARHGAP11A (NM_014783.2,3653-3671).
caacatgggcatttcttct

SEQ ID NO: 343496 - DNA, 19 bp, Homo sapiens
  siRNA target sequence for ARHGAP11A (NM_014783.2,3744-3762).
cctatcggaaaaactcaat

SEQ ID NO: 343497 - DNA, 19 bp, Homo sapiens
  siRNA target sequence for ARHGAP11A (NM_014783.2,3745-3763).
ctatcggaaaaactcaatt

SEQ ID NO: 343498 - DNA, 19 bp, Homo sapiens
  siRNA target sequence for ARHGAP11A (NM_014783.2,3759-3777).
caattactaccaacaagta

SEQ ID NO: 343499 - DNA, 19 bp, Homo sapiens
  siRNA target sequence for KIAA0258 (NM_014785.1,216-234).
gggccagtgcccaaatcca

SEQ ID NO: 343500 - DNA, 19 bp, Homo sapiens
  siRNA target sequence for KIAA0258 (NM_014785.1,343-361).
gaggggccagtgtatcctt

SEQ ID NO: 343501 - DNA, 19 bp, Homo sapiens
  siRNA target sequence for KIAA0258 (NM_014785.1,349-367).
ccagtgtatcctttctact

SEQ ID NO: 343502 - DNA, 19 bp, Homo sapiens
  siRNA target sequence for KIAA0258 (NM_014785.1,363-381).
ctactccaccgaaaattct

SEQ ID NO: 343503 - DNA, 19 bp, Homo sapiens
  siRNA target sequence for KIAA0258 (NM_014785.1,366-384).
ctccaccgaaaattctatt

SEQ ID NO: 343504 - DNA, 19 bp, Homo sapiens
  siRNA target sequence for KIAA0258 (NM_014785.1,401-419).
gatcctggagagtccaaat

SEQ ID NO: 343505 - DNA, 19 bp, Homo sapiens
  siRNA target sequence for KIAA0258 (NM_014785.1,404-422).
cctggagagtccaaatcat

SEQ ID NO: 343506 - DNA, 19 bp, Homo sapiens
  siRNA target sequence for KIAA0258 (NM_014785.1,405-423).
ctggagagtccaaatcata

SEQ ID NO: 343507 - DNA, 19 bp, Homo sapiens
  siRNA target sequence for KIAA0258 (NM_014785.1,477-495).
cagtcaagtacgtctacaa

SEQ ID NO: 343508 - DNA, 19 bp, Homo sapiens
  siRNA target sequence for KIAA0258 (NM_014785.1,518-536).
gtcaactcccctatcactt

SEQ ID NO: 343509 - DNA, 19 bp, Homo sapiens
  siRNA target sequence for KIAA0258 (NM_014785.1,520-538).
caactcccctatcacttta

SEQ ID NO: 343510 - DNA, 19 bp, Homo sapiens
  siRNA target sequence for KIAA0258 (NM_014785.1,710-728).
cgcagcctccatctataca

SEQ ID NO: 343511 - DNA, 19 bp, Homo sapiens
  siRNA target sequence for KIAA0258 (NM_014785.1,711-729).
gcagcctccatctatacaa

SEQ ID NO: 343512 - DNA, 19 bp, Homo sapiens
  siRNA target sequence for KIAA0258 (NM_014785.1,716-734).
ctccatctatacaatatca

SEQ ID NO: 343513 - DNA, 19 bp, Homo sapiens
  siRNA target sequence for KIAA0258 (NM_014785.1,718-736).
ccatctatacaatatcagt

SEQ ID NO: 343514 - DNA, 19 bp, Homo sapiens
  siRNA target sequence for KIAA0258 (NM_014785.1,756-774).
ggacgtttggcatcttcaa

SEQ ID NO: 343515 - DNA, 19 bp, Homo sapiens
  siRNA target sequence for KIAA0258 (NM_014785.1,953-971).
caggaatcctgcctacata

SEQ ID NO: 343516 - DNA, 19 bp, Homo sapiens
  siRNA target sequence for KIAA0258 (NM_014785.1,955-973).
ggaatcctgcctacataca

SEQ ID NO: 343517 - DNA, 19 bp, Homo sapiens
  siRNA target sequence for KIAA0258 (NM_014785.1,956-974).
gaatcctgcctacatacaa

SEQ ID NO: 343518 - DNA, 19 bp, Homo sapiens
  siRNA target sequence for KIAA0258 (NM_014785.1,961-979).
ctgcctacatacaactaga

SEQ ID NO: 343519 - DNA, 19 bp, Homo sapiens
  siRNA target sequence for ARHGEF17 (NM_014786.2,639-657).
gcgtccagcggatggttta

SEQ ID NO: 343520 - DNA, 19 bp, Homo sapiens
  siRNA target sequence for ARHGEF17 (NM_014786.2,641-659).
gtccagcggatggtttaca

SEQ ID NO: 343521 - DNA, 19 bp, Homo sapiens
  siRNA target sequence for ARHGEF17 (NM_014786.2,643-661).
ccagcggatggtttacatt

SEQ ID NO: 343522 - DNA, 19 bp, Homo sapiens
  siRNA target sequence for ARHGEF17 (NM_014786.2,646-664).
gcggatggtttacattctt

SEQ ID NO: 343523 - DNA, 19 bp, Homo sapiens
  siRNA target sequence for ARHGEF17 (NM_014786.2,942-960).
cagtgatgggttaaatcta

SEQ ID NO: 343524 - DNA, 19 bp, Homo sapiens
  siRNA target sequence for ARHGEF17 (NM_014786.2,1086-1104).
gggacttcggcctatgtct

SEQ ID NO: 343525 - DNA, 19 bp, Homo sapiens
  siRNA target sequence for ARHGEF17 (NM_014786.2,1180-1198).
ggtagcagccgttattcca

SEQ ID NO: 343526 - DNA, 19 bp, Homo sapiens
  siRNA target sequence for ARHGEF17 (NM_014786.2,1219-1237).
gacgacctatggtctagta

SEQ ID NO: 343527 - DNA, 19 bp, Homo sapiens
  siRNA target sequence for ARHGEF17 (NM_014786.2,1260-1278).
gtaccgctcccctagcttt

SEQ ID NO: 343528 - DNA, 19 bp, Homo sapiens
  siRNA target sequence for ARHGEF17 (NM_014786.2,1363-1381).
ggatttgagcctgaaaaga

SEQ ID NO: 343529 - DNA, 19 bp, Homo sapiens
  siRNA target sequence for ARHGEF17 (NM_014786.2,1389-1407).
gcggaagtccctgtcaaat

SEQ ID NO: 343530 - DNA, 19 bp, Homo sapiens
  siRNA target sequence for ARHGEF17 (NM_014786.2,1636-1654).
ctgcggagagcaaagtcat

SEQ ID NO: 343531 - DNA, 19 bp, Homo sapiens
  siRNA target sequence for ARHGEF17 (NM_014786.2,1639-1657).
cggagagcaaagtcattca

SEQ ID NO: 343532 - DNA, 19 bp, Homo sapiens
  siRNA target sequence for ARHGEF17 (NM_014786.2,1770-1788).
catcgtccaggaccaatat

SEQ ID NO: 343533 - DNA, 19 bp, Homo sapiens
  siRNA target sequence for ARHGEF17 (NM_014786.2,1830-1848).
gggtgcccaacaagatgat

SEQ ID NO: 343534 - DNA, 19 bp, Homo sapiens
  siRNA target sequence for ARHGEF17 (NM_014786.2,1935-1953).
gtccagtctgacagatgaa

SEQ ID NO: 343535 - DNA, 19 bp, Homo sapiens
  siRNA target sequence for ARHGEF17 (NM_014786.2,1975-1993).
cctcctgttgcagcatttt

SEQ ID NO: 343536 - DNA, 19 bp, Homo sapiens
  siRNA target sequence for ARHGEF17 (NM_014786.2,2397-2415).
gggatatcaggaggttatt

SEQ ID NO: 343537 - DNA, 19 bp, Homo sapiens
  siRNA target sequence for ARHGEF17 (NM_014786.2,2399-2417).
gatatcaggaggttattca

SEQ ID NO: 343538 - DNA, 19 bp, Homo sapiens
  siRNA target sequence for ARHGEF17 (NM_014786.2,2556-2574).
ggagcccatccgagaagtt

SEQ ID NO: 343539 - DNA, 19 bp, Homo sapiens
  siRNA target sequence for ARHGEF17 (NM_014786.2,2600-2618).
gcgagcccatccttgtaga

SEQ ID NO: 343540 - DNA, 19 bp, Homo sapiens
  siRNA target sequence for ARHGEF17 (NM_014786.2,2706-2724).
cactgcccaccgaaacttt

SEQ ID NO: 343541 - DNA, 19 bp, Homo sapiens
  siRNA target sequence for ARHGEF17 (NM_014786.2,2708-2726).
ctgcccaccgaaactttca

SEQ ID NO: 343542 - DNA, 19 bp, Homo sapiens
  siRNA target sequence for ARHGEF17 (NM_014786.2,3473-3491).
ccaaggatgtcctagtaaa

SEQ ID NO: 343543 - DNA, 19 bp, Homo sapiens
  siRNA target sequence for ARHGEF17 (NM_014786.2,3483-3501).
cctagtaaacatctattct

SEQ ID NO: 343544 - DNA, 19 bp, Homo sapiens
  siRNA target sequence for ARHGEF17 (NM_014786.2,3495-3513).
ctattctgcctatatcgat

SEQ ID NO: 343545 - DNA, 19 bp, Homo sapiens
  siRNA target sequence for ARHGEF17 (NM_014786.2,3500-3518).
ctgcctatatcgataactt

SEQ ID NO: 343546 - DNA, 19 bp, Homo sapiens
  siRNA target sequence for ARHGEF17 (NM_014786.2,3557-3575).
cgaggcctgcctttctcaa

SEQ ID NO: 343547 - DNA, 19 bp, Homo sapiens
  siRNA target sequence for ARHGEF17 (NM_014786.2,3617-3635).
cgctgtctgacctcatgat

SEQ ID NO: 343548 - DNA, 19 bp, Homo sapiens
  siRNA target sequence for ARHGEF17 (NM_014786.2,3730-3748).
gaggcgcagcggaacatca

SEQ ID NO: 343549 - DNA, 19 bp, Homo sapiens
  siRNA target sequence for ARHGEF17 (NM_014786.2,3754-3772).
gtggctgagcgcatcaaca

SEQ ID NO: 343550 - DNA, 19 bp, Homo sapiens
  siRNA target sequence for ARHGEF17 (NM_014786.2,4022-4040).
cggcagccagtgtcattga

SEQ ID NO: 343551 - DNA, 19 bp, Homo sapiens
  siRNA target sequence for ARHGEF17 (NM_014786.2,4115-4133).
ccaccaatcgggagaacat

SEQ ID NO: 343552 - DNA, 19 bp, Homo sapiens
  siRNA target sequence for ARHGEF17 (NM_014786.2,4347-4365).
gggcaccgactcctacatt

SEQ ID NO: 343553 - DNA, 19 bp, Homo sapiens
  siRNA target sequence for ARHGEF17 (NM_014786.2,4349-4367).
gcaccgactcctacatttt

SEQ ID NO: 343554 - DNA, 19 bp, Homo sapiens
  siRNA target sequence for ARHGEF17 (NM_014786.2,4350-4368).
caccgactcctacattttt

SEQ ID NO: 343555 - DNA, 19 bp, Homo sapiens
  siRNA target sequence for ARHGEF17 (NM_014786.2,4352-4370).
ccgactcctacatttttga

SEQ ID NO: 343556 - DNA, 19 bp, Homo sapiens
  siRNA target sequence for ARHGEF17 (NM_014786.2,4354-4372).
gactcctacatttttgagt

SEQ ID NO: 343557 - DNA, 19 bp, Homo sapiens
  siRNA target sequence for ARHGEF17 (NM_014786.2,5124-5142).
cggcaccagcccaatggat

SEQ ID NO: 343558 - DNA, 19 bp, Homo sapiens
  siRNA target sequence for ARHGEF17 (NM_014786.2,5333-5351).
ctgtgacctgcatcttgta

SEQ ID NO: 343559 - DNA, 19 bp, Homo sapiens
  siRNA target sequence for ARHGEF17 (NM_014786.2,5473-5491).
cccatcaccaagatggtat

SEQ ID NO: 343560 - DNA, 19 bp, Homo sapiens
  siRNA target sequence for ARHGEF17 (NM_014786.2,6077-6095).
ggcctaaaatgctggttat

SEQ ID NO: 343561 - DNA, 19 bp, Homo sapiens
  siRNA target sequence for ARHGEF17 (NM_014786.2,6079-6097).
cctaaaatgctggttatca

SEQ ID NO: 343562 - DNA, 19 bp, Homo sapiens
  siRNA target sequence for KIAA0555 (NM_014790.1,268-286).
gcccgaggcactcattgtt

SEQ ID NO: 343563 - DNA, 19 bp, Homo sapiens
  siRNA target sequence for KIAA0555 (NM_014790.1,316-334).
gaccaagctcacagacatt

SEQ ID NO: 343564 - DNA, 19 bp, Homo sapiens
  siRNA target sequence for KIAA0555 (NM_014790.1,358-376).
gtccaaggtatcaaagctt

SEQ ID NO: 343565 - DNA, 19 bp, Homo sapiens
  siRNA target sequence for KIAA0555 (NM_014790.1,494-512).
gctgtgagggagaacctta

SEQ ID NO: 343566 - DNA, 19 bp, Homo sapiens
  siRNA target sequence for KIAA0555 (NM_014790.1,495-513).
ctgtgagggagaaccttat

SEQ ID NO: 343567 - DNA, 19 bp, Homo sapiens
  siRNA target sequence for KIAA0555 (NM_014790.1,497-515).
gtgagggagaaccttatca

SEQ ID NO: 343568 - DNA, 19 bp, Homo sapiens
  siRNA target sequence for KIAA0555 (NM_014790.1,520-538).
gcacgagcaggaaatgtca

SEQ ID NO: 343569 - DNA, 19 bp, Homo sapiens
  siRNA target sequence for KIAA0555 (NM_014790.1,605-623).
ggcagcagtgacaaagtaa

SEQ ID NO: 343570 - DNA, 19 bp, Homo sapiens
  siRNA target sequence for KIAA0555 (NM_014790.1,812-830).
gaagccatctcgaagatca

SEQ ID NO: 343571 - DNA, 19 bp, Homo sapiens
  siRNA target sequence for KIAA0555 (NM_014790.1,815-833).
gccatctcgaagatcaagt

SEQ ID NO: 343572 - DNA, 19 bp, Homo sapiens
  siRNA target sequence for KIAA0555 (NM_014790.1,835-853).
ggagtcggagcgggatatt

SEQ ID NO: 343573 - DNA, 19 bp, Homo sapiens
  siRNA target sequence for KIAA0555 (NM_014790.1,921-939).
cccagacaggctatgtaca

SEQ ID NO: 343574 - DNA, 19 bp, Homo sapiens
  siRNA target sequence for KIAA0555 (NM_014790.1,925-943).
gacaggctatgtacagaaa

SEQ ID NO: 343575 - DNA, 19 bp, Homo sapiens
  siRNA target sequence for KIAA0555 (NM_014790.1,963-981).
ctttggacgaacaactctt

SEQ ID NO: 343576 - DNA, 19 bp, Homo sapiens
  siRNA target sequence for KIAA0555 (NM_014790.1,1006-1024).
catgagcagcccaaaacga

SEQ ID NO: 343577 - DNA, 19 bp, Homo sapiens
  siRNA target sequence for KIAA0555 (NM_014790.1,1068-1086).
gtcctgatttgcgaagaaa

SEQ ID NO: 343578 - DNA, 19 bp, Homo sapiens
  siRNA target sequence for KIAA0555 (NM_014790.1,1071-1089).
ctgatttgcgaagaaatca

SEQ ID NO: 343579 - DNA, 19 bp, Homo sapiens
  siRNA target sequence for KIAA0555 (NM_014790.1,1113-1131).
ccactataagaaaattaga

SEQ ID NO: 343580 - DNA, 19 bp, Homo sapiens
  siRNA target sequence for KIAA0555 (NM_014790.1,1184-1202).
cgggaaaccgaaaagcaat

SEQ ID NO: 343581 - DNA, 19 bp, Homo sapiens
  siRNA target sequence for KIAA0555 (NM_014790.1,1187-1205).
gaaaccgaaaagcaatgta

SEQ ID NO: 343582 - DNA, 19 bp, Homo sapiens
  siRNA target sequence for KIAA0555 (NM_014790.1,1231-1249).
cctcgccaagagaaacgat

SEQ ID NO: 343583 - DNA, 19 bp, Homo sapiens
  siRNA target sequence for KIAA0555 (NM_014790.1,1236-1254).
ccaagagaaacgatgaact

SEQ ID NO: 343584 - DNA, 19 bp, Homo sapiens
  siRNA target sequence for KIAA0555 (NM_014790.1,1270-1288).
gcgcatggaagaaaaacta

SEQ ID NO: 343585 - DNA, 19 bp, Homo sapiens
  siRNA target sequence for KIAA0555 (NM_014790.1,1292-1310).
gccgttaccaaggaaaatt

SEQ ID NO: 343586 - DNA, 19 bp, Homo sapiens
  siRNA target sequence for KIAA0555 (NM_014790.1,1294-1312).
cgttaccaaggaaaattca

SEQ ID NO: 343587 - DNA, 19 bp, Homo sapiens
  siRNA target sequence for KIAA0555 (NM_014790.1,1423-1441).
cattgagcaacagaacatt

SEQ ID NO: 343588 - DNA, 19 bp, Homo sapiens
  siRNA target sequence for KIAA0555 (NM_014790.1,1429-1447).
gcaacagaacattattgat

SEQ ID NO: 343589 - DNA, 19 bp, Homo sapiens
  siRNA target sequence for KIAA0555 (NM_014790.1,1497-1515).
gaagttccaagccaattaa

SEQ ID NO: 343590 - DNA, 19 bp, Homo sapiens
  siRNA target sequence for KIAA0555 (NM_014790.1,1531-1549).
cccgtttattggctatgat

SEQ ID NO: 343591 - DNA, 19 bp, Homo sapiens
  siRNA target sequence for KIAA0555 (NM_014790.1,1533-1551).
cgtttattggctatgatga

SEQ ID NO: 343592 - DNA, 19 bp, Homo sapiens
  siRNA target sequence for KIAA0555 (NM_014790.1,1542-1560).
gctatgatgaggactctat

SEQ ID NO: 343593 - DNA, 19 bp, Homo sapiens
  siRNA target sequence for KIAA0555 (NM_014790.1,1547-1565).
gatgaggactctatggatt

SEQ ID NO: 343594 - DNA, 19 bp, Homo sapiens
  siRNA target sequence for KIAA0555 (NM_014790.1,1670-1688).
cgacaattaacaaaagaat

SEQ ID NO: 343595 - DNA, 19 bp, Homo sapiens
  siRNA target sequence for KIAA0555 (NM_014790.1,1693-1711).
ggccctccaaagagcatat

SEQ ID NO: 343596 - DNA, 19 bp, Homo sapiens
  siRNA target sequence for KIAA0555 (NM_014790.1,1784-1802).
gcagaggtgctaaggtata

SEQ ID NO: 343597 - DNA, 19 bp, Homo sapiens
  siRNA target sequence for KIAA0555 (NM_014790.1,1785-1803).
cagaggtgctaaggtataa

SEQ ID NO: 343598 - DNA, 19 bp, Homo sapiens
  siRNA target sequence for KIAA0555 (NM_014790.1,1876-1894).
ccggttacaacaagaacta

SEQ ID NO: 343599 - DNA, 19 bp, Homo sapiens
  siRNA target sequence for KIAA0555 (NM_014790.1,1921-1939).
gctggagtttcgaaaccta

SEQ ID NO: 343600 - DNA, 19 bp, Homo sapiens
  siRNA target sequence for KIAA0555 (NM_014790.1,1957-1975).
gagacgatcccctccattt

SEQ ID NO: 343601 - DNA, 19 bp, Homo sapiens
  siRNA target sequence for KIAA0555 (NM_014790.1,1959-1977).
gacgatcccctccatttaa

SEQ ID NO: 343602 - DNA, 19 bp, Homo sapiens
  siRNA target sequence for KIAA0555 (NM_014790.1,1962-1980).
gatcccctccatttaatct

SEQ ID NO: 343603 - DNA, 19 bp, Homo sapiens
  siRNA target sequence for KIAA0555 (NM_014790.1,2004-2022).
gtgtgagtgctctacagat

SEQ ID NO: 343604 - DNA, 19 bp, Homo sapiens
  siRNA target sequence for KIAA0555 (NM_014790.1,2012-2030).
gctctacagatctactgta

SEQ ID NO: 343605 - DNA, 19 bp, Homo sapiens
  siRNA target sequence for KIAA0555 (NM_014790.1,2013-2031).
ctctacagatctactgtat

SEQ ID NO: 343606 - DNA, 19 bp, Homo sapiens
  siRNA target sequence for KIAA0555 (NM_014790.1,2015-2033).
ctacagatctactgtatga

SEQ ID NO: 343607 - DNA, 19 bp, Homo sapiens
  siRNA target sequence for KIAA0555 (NM_014790.1,2028-2046).
gtatgaaagaaggtgttaa

SEQ ID NO: 343608 - DNA, 19 bp, Homo sapiens
  siRNA target sequence for KIAA0555 (NM_014790.1,2066-2084).
ctcataaagcagcttgata

SEQ ID NO: 343609 - DNA, 19 bp, Homo sapiens
  siRNA target sequence for KIAA0555 (NM_014790.1,2089-2107).
gggtgataatgggaattta

SEQ ID NO: 343610 - DNA, 19 bp, Homo sapiens
  siRNA target sequence for KIAA0555 (NM_014790.1,2090-2108).
ggtgataatgggaatttaa

SEQ ID NO: 343611 - DNA, 19 bp, Homo sapiens
  siRNA target sequence for KIAA0555 (NM_014790.1,2195-2213).
gctgccctacaccagaaaa

SEQ ID NO: 343612 - DNA, 19 bp, Homo sapiens
  siRNA target sequence for KIAA0555 (NM_014790.1,2294-2312).
gctcttgaccaagcatata

SEQ ID NO: 343613 - DNA, 19 bp, Homo sapiens
  siRNA target sequence for KIAA0555 (NM_014790.1,2297-2315).
cttgaccaagcatatatga

SEQ ID NO: 343614 - DNA, 19 bp, Homo sapiens
  siRNA target sequence for KIAA0555 (NM_014790.1,2300-2318).
gaccaagcatatatgagaa

SEQ ID NO: 343615 - DNA, 19 bp, Homo sapiens
  siRNA target sequence for KIAA0555 (NM_014790.1,2349-2367).
ctctacagcaagaaactgt

SEQ ID NO: 343616 - DNA, 19 bp, Homo sapiens
  siRNA target sequence for KIAA0555 (NM_014790.1,2410-2428).
gctgaggacggcagtagaa

SEQ ID NO: 343617 - DNA, 19 bp, Homo sapiens
  siRNA target sequence for KIAA0555 (NM_014790.1,2411-2429).
ctgaggacggcagtagaaa

SEQ ID NO: 343618 - DNA, 19 bp, Homo sapiens
  siRNA target sequence for LCMT2 (NM_014793.3,401-419).
gcgtgcgcgcttttttgga

SEQ ID NO: 343619 - DNA, 19 bp, Homo sapiens
  siRNA target sequence for LCMT2 (NM_014793.3,475-493).
ggcttcgactcgctctatt

SEQ ID NO: 343620 - DNA, 19 bp, Homo sapiens
  siRNA target sequence for LCMT2 (NM_014793.3,476-494).
gcttcgactcgctctattt

SEQ ID NO: 343621 - DNA, 19 bp, Homo sapiens
  siRNA target sequence for LCMT2 (NM_014793.3,477-495).
cttcgactcgctctatttt

SEQ ID NO: 343622 - DNA, 19 bp, Homo sapiens
  siRNA target sequence for LCMT2 (NM_014793.3,485-503).
cgctctattttcgcttaaa

SEQ ID NO: 343623 - DNA, 19 bp, Homo sapiens
  siRNA target sequence for LCMT2 (NM_014793.3,486-504).
gctctattttcgcttaaaa

SEQ ID NO: 343624 - DNA, 19 bp, Homo sapiens
  siRNA target sequence for LCMT2 (NM_014793.3,487-505).
ctctattttcgcttaaaaa

SEQ ID NO: 343625 - DNA, 19 bp, Homo sapiens
  siRNA target sequence for LCMT2 (NM_014793.3,842-860).
cccttttcgtggtctatga

SEQ ID NO: 343626 - DNA, 19 bp, Homo sapiens
  siRNA target sequence for LCMT2 (NM_014793.3,904-922).
cattttcggcagctaaact

SEQ ID NO: 343627 - DNA, 19 bp, Homo sapiens
  siRNA target sequence for LCMT2 (NM_014793.3,1001-1019).
gcggtgccgtggacatgaa

SEQ ID NO: 343628 - DNA, 19 bp, Homo sapiens
  siRNA target sequence for LCMT2 (NM_014793.3,1002-1020).
cggtgccgtggacatgaat

SEQ ID NO: 343629 - DNA, 19 bp, Homo sapiens
  siRNA target sequence for LCMT2 (NM_014793.3,1006-1024).
gccgtggacatgaatgaat

SEQ ID NO: 343630 - DNA, 19 bp, Homo sapiens
  siRNA target sequence for LCMT2 (NM_014793.3,1105-1123).
ctgaagtgcgcccattatt

SEQ ID NO: 343631 - DNA, 19 bp, Homo sapiens
  siRNA target sequence for LCMT2 (NM_014793.3,1110-1128).
gtgcgcccattatttcatt

SEQ ID NO: 343632 - DNA, 19 bp, Homo sapiens
  siRNA target sequence for LCMT2 (NM_014793.3,1112-1130).
gcgcccattatttcattct

SEQ ID NO: 343633 - DNA, 19 bp, Homo sapiens
  siRNA target sequence for LCMT2 (NM_014793.3,1185-1203).
ggcatttcctcgcgtaaat

SEQ ID NO: 343634 - DNA, 19 bp, Homo sapiens
  siRNA target sequence for LCMT2 (NM_014793.3,1296-1314).
cttgagcccagacgttatt

SEQ ID NO: 343635 - DNA, 19 bp, Homo sapiens
  siRNA target sequence for LCMT2 (NM_014793.3,1357-1375).
cgagtgagccagtttcact

SEQ ID NO: 343636 - DNA, 19 bp, Homo sapiens
  siRNA target sequence for LCMT2 (NM_014793.3,1374-1392).
cttgctctcaagagattgt

SEQ ID NO: 343637 - DNA, 19 bp, Homo sapiens
  siRNA target sequence for LCMT2 (NM_014793.3,1443-1461).
gtgggatggacgcctttat

SEQ ID NO: 343638 - DNA, 19 bp, Homo sapiens
  siRNA target sequence for LCMT2 (NM_014793.3,1445-1463).
gggatggacgcctttatca

SEQ ID NO: 343639 - DNA, 19 bp, Homo sapiens
  siRNA target sequence for LCMT2 (NM_014793.3,1447-1465).
gatggacgcctttatcaca

SEQ ID NO: 343640 - DNA, 19 bp, Homo sapiens
  siRNA target sequence for LCMT2 (NM_014793.3,1456-1474).
ctttatcacaccatgacaa

SEQ ID NO: 343641 - DNA, 19 bp, Homo sapiens
  siRNA target sequence for LCMT2 (NM_014793.3,1509-1527).
gagactgtccccagtaagt

SEQ ID NO: 343642 - DNA, 19 bp, Homo sapiens
  siRNA target sequence for LCMT2 (NM_014793.3,1537-1555).
ggggttctccagcttcatt

SEQ ID NO: 343643 - DNA, 19 bp, Homo sapiens
  siRNA target sequence for LCMT2 (NM_014793.3,1538-1556).
gggttctccagcttcattt

SEQ ID NO: 343644 - DNA, 19 bp, Homo sapiens
  siRNA target sequence for LCMT2 (NM_014793.3,1540-1558).
gttctccagcttcattttt

SEQ ID NO: 343645 - DNA, 19 bp, Homo sapiens
  siRNA target sequence for LCMT2 (NM_014793.3,1584-1602).
ggacctgaaagtgacaata

SEQ ID NO: 343646 - DNA, 19 bp, Homo sapiens
  siRNA target sequence for LCMT2 (NM_014793.3,1609-1627).
gctggccgaaaggatgatt

SEQ ID NO: 343647 - DNA, 19 bp, Homo sapiens
  siRNA target sequence for LCMT2 (NM_014793.3,1713-1731).
ggtggaacctgtactaagt

SEQ ID NO: 343648 - DNA, 19 bp, Homo sapiens
  siRNA target sequence for LCMT2 (NM_014793.3,2041-2059).
ggagtgactgtgatcaatt

SEQ ID NO: 343649 - DNA, 19 bp, Homo sapiens
  siRNA target sequence for LCMT2 (NM_014793.3,2069-2087).
gattgagctctgagtatca

SEQ ID NO: 343650 - DNA, 19 bp, Homo sapiens
  siRNA target sequence for LCMT2 (NM_014793.3,2104-2122).
gtgccatggccattaatgt

SEQ ID NO: 343651 - DNA, 19 bp, Homo sapiens
  siRNA target sequence for LCMT2 (NM_014793.3,2108-2126).
catggccattaatgttaca

SEQ ID NO: 343652 - DNA, 19 bp, Homo sapiens
  siRNA target sequence for LCMT2 (NM_014793.3,2111-2129).
ggccattaatgttacacaa

SEQ ID NO: 343653 - DNA, 19 bp, Homo sapiens
  siRNA target sequence for LCMT2 (NM_014793.3,2121-2139).
gttacacaaccatactagt

SEQ ID NO: 343654 - DNA, 19 bp, Homo sapiens
  siRNA target sequence for LCMT2 (NM_014793.3,2127-2145).
caaccatactagtatcctt

SEQ ID NO: 343655 - DNA, 19 bp, Homo sapiens
  siRNA target sequence for LCMT2 (NM_014793.3,2198-2216).
cctttggtacctacttcaa

SEQ ID NO: 343656 - DNA, 19 bp, Homo sapiens
  siRNA target sequence for LCMT2 (NM_014793.3,2227-2245).
gtcacattagacctttctt

SEQ ID NO: 343657 - DNA, 19 bp, Homo sapiens
  siRNA target sequence for KIAA0748 (NM_014796.1,669-687).
ggggggaccaacaagacta

SEQ ID NO: 343658 - DNA, 19 bp, Homo sapiens
  siRNA target sequence for KIAA0748 (NM_014796.1,760-778).
gccaagaggatcacaaaga

SEQ ID NO: 343659 - DNA, 19 bp, Homo sapiens
  siRNA target sequence for KIAA0748 (NM_014796.1,857-875).
ccaggtgcggaggattgaa

SEQ ID NO: 343660 - DNA, 19 bp, Homo sapiens
  siRNA target sequence for KIAA0748 (NM_014796.1,858-876).
caggtgcggaggattgaaa

SEQ ID NO: 343661 - DNA, 19 bp, Homo sapiens
  siRNA target sequence for KIAA0748 (NM_014796.1,962-980).
ctcctatgtgtctaagaca

SEQ ID NO: 343662 - DNA, 19 bp, Homo sapiens
  siRNA target sequence for KIAA0748 (NM_014796.1,1005-1023).
cacatgttctggaattgca

SEQ ID NO: 343663 - DNA, 19 bp, Homo sapiens
  siRNA target sequence for KIAA0748 (NM_014796.1,1041-1059).
ccatccatcaggattctgt

SEQ ID NO: 343664 - DNA, 19 bp, Homo sapiens
  siRNA target sequence for KIAA0748 (NM_014796.1,1158-1176).
cacaacacccccaaaagga

SEQ ID NO: 343665 - DNA, 19 bp, Homo sapiens
  siRNA target sequence for KIAA0748 (NM_014796.1,1662-1680).
gaactgcgtcggtctttaa

SEQ ID NO: 343666 - DNA, 19 bp, Homo sapiens
  siRNA target sequence for KIAA0748 (NM_014796.1,1689-1707).
ccacaggacacttttgact

SEQ ID NO: 343667 - DNA, 19 bp, Homo sapiens
  siRNA target sequence for KIAA0356 (NM_014798.1,245-263).
cacggtggtcactagtgaa

SEQ ID NO: 343668 - DNA, 19 bp, Homo sapiens
  siRNA target sequence for KIAA0356 (NM_014798.1,292-310).
ccctggaggccgtatttat

SEQ ID NO: 343669 - DNA, 19 bp, Homo sapiens
  siRNA target sequence for KIAA0356 (NM_014798.1,296-314).
ggaggccgtatttatccat

SEQ ID NO: 343670 - DNA, 19 bp, Homo sapiens
  siRNA target sequence for KIAA0356 (NM_014798.1,616-634).
gcgagttcctccttagctt

SEQ ID NO: 343671 - DNA, 19 bp, Homo sapiens
  siRNA target sequence for KIAA0356 (NM_014798.1,1045-1063).
ggtctctgcaagaggtatt

SEQ ID NO: 343672 - DNA, 19 bp, Homo sapiens
  siRNA target sequence for KIAA0356 (NM_014798.1,1076-1094).
caaagcccaggtaaactct

SEQ ID NO: 343673 - DNA, 19 bp, Homo sapiens
  siRNA target sequence for KIAA0356 (NM_014798.1,1106-1124).
cggactgagccaagaaaca

SEQ ID NO: 343674 - DNA, 19 bp, Homo sapiens
  siRNA target sequence for KIAA0356 (NM_014798.1,1276-1294).
ccagccccctggacttaca

SEQ ID NO: 343675 - DNA, 19 bp, Homo sapiens
  siRNA target sequence for KIAA0356 (NM_014798.1,1407-1425).
ggtctgaagctggtagttt

SEQ ID NO: 343676 - DNA, 19 bp, Homo sapiens
  siRNA target sequence for KIAA0356 (NM_014798.1,3038-3056).
cgcagacggggtgtatgaa

SEQ ID NO: 343677 - DNA, 19 bp, Homo sapiens
  siRNA target sequence for FLJ11383 (NM_014801.2,109-127).
gaccaagtcagtaatacct

SEQ ID NO: 343678 - DNA, 19 bp, Homo sapiens
  siRNA target sequence for FLJ11383 (NM_014801.2,146-164).
gaaactctcatcaatggta

SEQ ID NO: 343679 - DNA, 19 bp, Homo sapiens
  siRNA target sequence for FLJ11383 (NM_014801.2,268-286).
gtctcagtatgacttacta

SEQ ID NO: 343680 - DNA, 19 bp, Homo sapiens
  siRNA target sequence for FLJ11383 (NM_014801.2,270-288).
ctcagtatgacttactaga

SEQ ID NO: 343681 - DNA, 19 bp, Homo sapiens
  siRNA target sequence for FLJ11383 (NM_014801.2,272-290).
cagtatgacttactagaaa

SEQ ID NO: 343682 - DNA, 19 bp, Homo sapiens
  siRNA target sequence for FLJ11383 (NM_014801.2,274-292).
gtatgacttactagaaaca

SEQ ID NO: 343683 - DNA, 19 bp, Homo sapiens
  siRNA target sequence for FLJ11383 (NM_014801.2,307-325).
gccgtgggggagtgagaat

SEQ ID NO: 343684 - DNA, 19 bp, Homo sapiens
  siRNA target sequence for FLJ11383 (NM_014801.2,312-330).
gggggagtgagaattcagt

SEQ ID NO: 343685 - DNA, 19 bp, Homo sapiens
  siRNA target sequence for FLJ11383 (NM_014801.2,372-390).
gggaacgggtacaaagcaa

SEQ ID NO: 343686 - DNA, 19 bp, Homo sapiens
  siRNA target sequence for FLJ11383 (NM_014801.2,521-539).
gaagtggactcctcagata

SEQ ID NO: 343687 - DNA, 19 bp, Homo sapiens
  siRNA target sequence for FLJ11383 (NM_014801.2,540-558).
gtgaggtagctgttactct

SEQ ID NO: 343688 - DNA, 19 bp, Homo sapiens
  siRNA target sequence for FLJ11383 (NM_014801.2,548-566).
gctgttactctcatcgata

SEQ ID NO: 343689 - DNA, 19 bp, Homo sapiens
  siRNA target sequence for FLJ11383 (NM_014801.2,551-569).
gttactctcatcgatactt

SEQ ID NO: 343690 - DNA, 19 bp, Homo sapiens
  siRNA target sequence for FLJ11383 (NM_014801.2,591-609).
gtctacatgagcccataaa

SEQ ID NO: 343691 - DNA, 19 bp, Homo sapiens
  siRNA target sequence for FLJ11383 (NM_014801.2,593-611).
ctacatgagcccataaaaa

SEQ ID NO: 343692 - DNA, 19 bp, Homo sapiens
  siRNA target sequence for FLJ11383 (NM_014801.2,599-617).
gagcccataaaaattgtta

SEQ ID NO: 343693 - DNA, 19 bp, Homo sapiens
  siRNA target sequence for FLJ11383 (NM_014801.2,635-653).
ccaaactccatgacagatt

SEQ ID NO: 343694 - DNA, 19 bp, Homo sapiens
  siRNA target sequence for FLJ11383 (NM_014801.2,636-654).
caaactccatgacagattt

SEQ ID NO: 343695 - DNA, 19 bp, Homo sapiens
  siRNA target sequence for FLJ11383 (NM_014801.2,1025-1043).
cttgacccatcgtcttgta

SEQ ID NO: 343696 - DNA, 19 bp, Homo sapiens
  siRNA target sequence for FLJ11383 (NM_014801.2,1028-1046).
gacccatcgtcttgtaagt

SEQ ID NO: 343697 - DNA, 19 bp, Homo sapiens
  siRNA target sequence for FLJ11383 (NM_014801.2,1041-1059).
gtaagtccagccatgaaaa

SEQ ID NO: 343698 - DNA, 19 bp, Homo sapiens
  siRNA target sequence for FLJ11383 (NM_014801.2,1095-1113).
cagatgtcttcttgagtaa

SEQ ID NO: 343699 - DNA, 19 bp, Homo sapiens
  siRNA target sequence for FLJ11383 (NM_014801.2,1097-1115).
gatgtcttcttgagtaaaa

SEQ ID NO: 343700 - DNA, 19 bp, Homo sapiens
  siRNA target sequence for FLJ11383 (NM_014801.2,1228-1246).
cctgttagaatccattaat

SEQ ID NO: 343701 - DNA, 19 bp, Homo sapiens
  siRNA target sequence for FLJ11383 (NM_014801.2,1229-1247).
ctgttagaatccattaata

SEQ ID NO: 343702 - DNA, 19 bp, Homo sapiens
  siRNA target sequence for FLJ11383 (NM_014801.2,1231-1249).
gttagaatccattaatact

SEQ ID NO: 343703 - DNA, 19 bp, Homo sapiens
  siRNA target sequence for FLJ11383 (NM_014801.2,1260-1278).
cggcatccagtcaactgaa

SEQ ID NO: 343704 - DNA, 19 bp, Homo sapiens
  siRNA target sequence for FLJ11383 (NM_014801.2,1305-1323).
gtgggcttctccgagataa

SEQ ID NO: 343705 - DNA, 19 bp, Homo sapiens
  siRNA target sequence for FLJ11383 (NM_014801.2,1307-1325).
gggcttctccgagataact

SEQ ID NO: 343706 - DNA, 19 bp, Homo sapiens
  siRNA target sequence for FLJ11383 (NM_014801.2,1309-1327).
gcttctccgagataactgt

SEQ ID NO: 343707 - DNA, 19 bp, Homo sapiens
  siRNA target sequence for FLJ11383 (NM_014801.2,1310-1328).
cttctccgagataactgtt

SEQ ID NO: 343708 - DNA, 19 bp, Homo sapiens
  siRNA target sequence for FLJ11383 (NM_014801.2,1368-1386).
ccagtggacacagttctaa

SEQ ID NO: 343709 - DNA, 19 bp, Homo sapiens
  siRNA target sequence for FLJ11383 (NM_014801.2,1406-1424).
caaagtcaagaccatacta

SEQ ID NO: 343710 - DNA, 19 bp, Homo sapiens
  siRNA target sequence for FLJ11383 (NM_014801.2,1477-1495).
caatagacaaagacagata

SEQ ID NO: 343711 - DNA, 19 bp, Homo sapiens
  siRNA target sequence for FLJ11383 (NM_014801.2,1482-1500).
gacaaagacagataatcta

SEQ ID NO: 343712 - DNA, 19 bp, Homo sapiens
  siRNA target sequence for FLJ11383 (NM_014801.2,1540-1558).
catcagtgggcctgaaaca

SEQ ID NO: 343713 - DNA, 19 bp, Homo sapiens
  siRNA target sequence for FLJ11383 (NM_014801.2,1543-1561).
cagtgggcctgaaacatct

SEQ ID NO: 343714 - DNA, 19 bp, Homo sapiens
  siRNA target sequence for FLJ11383 (NM_014801.2,1591-1609).
gcatgtcttcattgatgaa

SEQ ID NO: 343715 - DNA, 19 bp, Homo sapiens
  siRNA target sequence for FLJ11383 (NM_014801.2,1607-1625).
gaacatggggaaattagat

SEQ ID NO: 343716 - DNA, 19 bp, Homo sapiens
  siRNA target sequence for FLJ11383 (NM_014801.2,1669-1687).
gcctctaccatcaaataat

SEQ ID NO: 343717 - DNA, 19 bp, Homo sapiens
  siRNA target sequence for FLJ11383 (NM_014801.2,1673-1691).
ctaccatcaaataatgact

SEQ ID NO: 343718 - DNA, 19 bp, Homo sapiens
  siRNA target sequence for KIAA0753 (NM_014804.1,145-163).
cacctaggacccaacttga

SEQ ID NO: 343719 - DNA, 19 bp, Homo sapiens
  siRNA target sequence for KIAA0753 (NM_014804.1,206-224).
gcagtttaataggaatgtt

SEQ ID NO: 343720 - DNA, 19 bp, Homo sapiens
  siRNA target sequence for KIAA0753 (NM_014804.1,242-260).
cttggcgatccgatattct

SEQ ID NO: 343721 - DNA, 19 bp, Homo sapiens
  siRNA target sequence for KIAA0753 (NM_014804.1,263-281).
cccacatgccattagaatt

SEQ ID NO: 343722 - DNA, 19 bp, Homo sapiens
  siRNA target sequence for KIAA0753 (NM_014804.1,293-311).
gcactcatacaatgaatca

SEQ ID NO: 343723 - DNA, 19 bp, Homo sapiens
  siRNA target sequence for KIAA0753 (NM_014804.1,382-400).
cccaagagagacttagcta

SEQ ID NO: 343724 - DNA, 19 bp, Homo sapiens
  siRNA target sequence for KIAA0753 (NM_014804.1,383-401).
ccaagagagacttagctat

SEQ ID NO: 343725 - DNA, 19 bp, Homo sapiens
  siRNA target sequence for KIAA0753 (NM_014804.1,497-515).
gtgtggacatactaagtat

SEQ ID NO: 343726 - DNA, 19 bp, Homo sapiens
  siRNA target sequence for KIAA0753 (NM_014804.1,499-517).
gtggacatactaagtataa

SEQ ID NO: 343727 - DNA, 19 bp, Homo sapiens
  siRNA target sequence for KIAA0753 (NM_014804.1,578-596).
ccaccagccatccaaagta

SEQ ID NO: 343728 - DNA, 19 bp, Homo sapiens
  siRNA target sequence for KIAA0753 (NM_014804.1,581-599).
ccagccatccaaagtagaa

SEQ ID NO: 343729 - DNA, 19 bp, Homo sapiens
  siRNA target sequence for KIAA0753 (NM_014804.1,605-623).
cagctctggtgccaaagta

SEQ ID NO: 343730 - DNA, 19 bp, Homo sapiens
  siRNA target sequence for KIAA0753 (NM_014804.1,607-625).
gctctggtgccaaagtata

SEQ ID NO: 343731 - DNA, 19 bp, Homo sapiens
  siRNA target sequence for KIAA0753 (NM_014804.1,610-628).
ctggtgccaaagtatacct

SEQ ID NO: 343732 - DNA, 19 bp, Homo sapiens
  siRNA target sequence for KIAA0753 (NM_014804.1,613-631).
gtgccaaagtataccttta

SEQ ID NO: 343733 - DNA, 19 bp, Homo sapiens
  siRNA target sequence for KIAA0753 (NM_014804.1,615-633).
gccaaagtatacctttact

SEQ ID NO: 343734 - DNA, 19 bp, Homo sapiens
  siRNA target sequence for KIAA0753 (NM_014804.1,617-635).
caaagtatacctttactca

SEQ ID NO: 343735 - DNA, 19 bp, Homo sapiens
  siRNA target sequence for KIAA0753 (NM_014804.1,646-664).
gccagtcagatcttactgt

SEQ ID NO: 343736 - DNA, 19 bp, Homo sapiens
  siRNA target sequence for KIAA0753 (NM_014804.1,654-672).
gatcttactgtgccaaatt

SEQ ID NO: 343737 - DNA, 19 bp, Homo sapiens
  siRNA target sequence for KIAA0753 (NM_014804.1,1032-1050).
gccattcgggccttacaga

SEQ ID NO: 343738 - DNA, 19 bp, Homo sapiens
  siRNA target sequence for KIAA0753 (NM_014804.1,1033-1051).
ccattcgggccttacagat

SEQ ID NO: 343739 - DNA, 19 bp, Homo sapiens
  siRNA target sequence for KIAA0753 (NM_014804.1,1039-1057).
gggccttacagatgtttgt

SEQ ID NO: 343740 - DNA, 19 bp, Homo sapiens
  siRNA target sequence for KIAA0753 (NM_014804.1,1041-1059).
gccttacagatgtttgtca

SEQ ID NO: 343741 - DNA, 19 bp, Homo sapiens
  siRNA target sequence for KIAA0753 (NM_014804.1,1052-1070).
gtttgtcactcagtttact

SEQ ID NO: 343742 - DNA, 19 bp, Homo sapiens
  siRNA target sequence for KIAA0753 (NM_014804.1,1106-1124).
ggaactgggcagccttatt

SEQ ID NO: 343743 - DNA, 19 bp, Homo sapiens
  siRNA target sequence for KIAA0753 (NM_014804.1,1125-1143).
cgccagctttcactttgtt

SEQ ID NO: 343744 - DNA, 19 bp, Homo sapiens
  siRNA target sequence for KIAA0753 (NM_014804.1,1168-1186).
ctgttcctgatgtggttat

SEQ ID NO: 343745 - DNA, 19 bp, Homo sapiens
  siRNA target sequence for KIAA0753 (NM_014804.1,1387-1405).
gtcgaccttctgtagcaaa

SEQ ID NO: 343746 - DNA, 19 bp, Homo sapiens
  siRNA target sequence for KIAA0753 (NM_014804.1,1407-1425).
cagcttcttgccgataagt

SEQ ID NO: 343747 - DNA, 19 bp, Homo sapiens
  siRNA target sequence for KIAA0753 (NM_014804.1,1409-1427).
gcttcttgccgataagtat

SEQ ID NO: 343748 - DNA, 19 bp, Homo sapiens
  siRNA target sequence for KIAA0753 (NM_014804.1,1464-1482).
cagagtgagcttgatgtat

SEQ ID NO: 343749 - DNA, 19 bp, Homo sapiens
  siRNA target sequence for KIAA0753 (NM_014804.1,1466-1484).
gagtgagcttgatgtatta

SEQ ID NO: 343750 - DNA, 19 bp, Homo sapiens
  siRNA target sequence for KIAA0753 (NM_014804.1,1526-1544).
ccaaagtgcaagcttcaaa

SEQ ID NO: 343751 - DNA, 19 bp, Homo sapiens
  siRNA target sequence for KIAA0753 (NM_014804.1,1551-1569).
gtgttagccgtggcaaaaa

SEQ ID NO: 343752 - DNA, 19 bp, Homo sapiens
  siRNA target sequence for KIAA0753 (NM_014804.1,1553-1571).
gttagccgtggcaaaaaca

SEQ ID NO: 343753 - DNA, 19 bp, Homo sapiens
  siRNA target sequence for KIAA0753 (NM_014804.1,1599-1617).
gagaatgtgccgtttagga

SEQ ID NO: 343754 - DNA, 19 bp, Homo sapiens
  siRNA target sequence for KIAA0753 (NM_014804.1,1607-1625).
gccgtttaggaagaaagat

SEQ ID NO: 343755 - DNA, 19 bp, Homo sapiens
  siRNA target sequence for KIAA0753 (NM_014804.1,1608-1626).
ccgtttaggaagaaagata

SEQ ID NO: 343756 - DNA, 19 bp, Homo sapiens
  siRNA target sequence for KIAA0753 (NM_014804.1,1739-1757).
gaaccggcagcctgtgaaa

SEQ ID NO: 343757 - DNA, 19 bp, Homo sapiens
  siRNA target sequence for KIAA0753 (NM_014804.1,1760-1778).
ccgcaaggcaccatggata

SEQ ID NO: 343758 - DNA, 19 bp, Homo sapiens
  siRNA target sequence for KIAA0753 (NM_014804.1,1796-1814).
cccaccagcgtctcctaaa

SEQ ID NO: 343759 - DNA, 19 bp, Homo sapiens
  siRNA target sequence for KIAA0753 (NM_014804.1,1816-1834).
gtgctgcatggctaaaggt

SEQ ID NO: 343760 - DNA, 19 bp, Homo sapiens
  siRNA target sequence for KIAA0753 (NM_014804.1,1844-1862).
ccccagagatgccacaaaa

SEQ ID NO: 343761 - DNA, 19 bp, Homo sapiens
  siRNA target sequence for KIAA0753 (NM_014804.1,2013-2031).
caaaaacagaggcttgatt

SEQ ID NO: 343762 - DNA, 19 bp, Homo sapiens
  siRNA target sequence for KIAA0753 (NM_014804.1,2190-2208).
cagagagtcaattctacta

SEQ ID NO: 343763 - DNA, 19 bp, Homo sapiens
  siRNA target sequence for KIAA0753 (NM_014804.1,2192-2210).
gagagtcaattctactaca

SEQ ID NO: 343764 - DNA, 19 bp, Homo sapiens
  siRNA target sequence for KIAA0753 (NM_014804.1,2306-2324).
cattcgtcagcttgatgat

SEQ ID NO: 343765 - DNA, 19 bp, Homo sapiens
  siRNA target sequence for KIAA0753 (NM_014804.1,2358-2376).
gtgactcatgctaagatct

SEQ ID NO: 343766 - DNA, 19 bp, Homo sapiens
  siRNA target sequence for KIAA0753 (NM_014804.1,2375-2393).
cttggggtctgaaacctta

SEQ ID NO: 343767 - DNA, 19 bp, Homo sapiens
  siRNA target sequence for KIAA0753 (NM_014804.1,2471-2489).
ggagtctgttcgtcaaaga

SEQ ID NO: 343768 - DNA, 19 bp, Homo sapiens
  siRNA target sequence for KIAA0753 (NM_014804.1,2472-2490).
gagtctgttcgtcaaagat

SEQ ID NO: 343769 - DNA, 19 bp, Homo sapiens
  siRNA target sequence for KIAA0753 (NM_014804.1,2474-2492).
gtctgttcgtcaaagatat

SEQ ID NO: 343770 - DNA, 19 bp, Homo sapiens
  siRNA target sequence for KIAA0753 (NM_014804.1,2476-2494).
ctgttcgtcaaagatataa

SEQ ID NO: 343771 - DNA, 19 bp, Homo sapiens
  siRNA target sequence for KIAA0753 (NM_014804.1,2481-2499).
cgtcaaagatataataaaa

SEQ ID NO: 343772 - DNA, 19 bp, Homo sapiens
  siRNA target sequence for KIAA0753 (NM_014804.1,2509-2527).
ctgatcctcgactttggat

SEQ ID NO: 343773 - DNA, 19 bp, Homo sapiens
  siRNA target sequence for KIAA0753 (NM_014804.1,2625-2643).
ccagccgtgaacatcatgt

SEQ ID NO: 343774 - DNA, 19 bp, Homo sapiens
  siRNA target sequence for KIAA0753 (NM_014804.1,2626-2644).
cagccgtgaacatcatgtt

SEQ ID NO: 343775 - DNA, 19 bp, Homo sapiens
  siRNA target sequence for KIAA0753 (NM_014804.1,2629-2647).
ccgtgaacatcatgttaga

SEQ ID NO: 343776 - DNA, 19 bp, Homo sapiens
  siRNA target sequence for KIAA0753 (NM_014804.1,2630-2648).
cgtgaacatcatgttagaa

SEQ ID NO: 343777 - DNA, 19 bp, Homo sapiens
  siRNA target sequence for KIAA0753 (NM_014804.1,2642-2660).
gttagaaaggccctgtaat

SEQ ID NO: 343778 - DNA, 19 bp, Homo sapiens
  siRNA target sequence for KIAA0753 (NM_014804.1,2663-2681).
caattccctggatgaaagt

SEQ ID NO: 343779 - DNA, 19 bp, Homo sapiens
  siRNA target sequence for KIAA0753 (NM_014804.1,2728-2746).
ccctagccgaagattctca

SEQ ID NO: 343780 - DNA, 19 bp, Homo sapiens
  siRNA target sequence for KIAA0753 (NM_014804.1,2729-2747).
cctagccgaagattctcaa

SEQ ID NO: 343781 - DNA, 19 bp, Homo sapiens
  siRNA target sequence for KIAA0753 (NM_014804.1,2758-2776).
gccgagctcccctctttgt

SEQ ID NO: 343782 - DNA, 19 bp, Homo sapiens
  siRNA target sequence for KIAA0753 (NM_014804.1,2831-2849).
ccttcggatcatatctcat

SEQ ID NO: 343783 - DNA, 19 bp, Homo sapiens
  siRNA target sequence for KIAA0753 (NM_014804.1,2879-2897).
gatagctgaaagcttttca

SEQ ID NO: 343784 - DNA, 19 bp, Homo sapiens
  siRNA target sequence for KIAA0753 (NM_014804.1,2975-2993).
gttcacctcagaattctta

SEQ ID NO: 343785 - DNA, 19 bp, Homo sapiens
  siRNA target sequence for EPM2AIP1 (NM_014805.2,230-248).
gtggatgacgcccaaaaga

SEQ ID NO: 343786 - DNA, 19 bp, Homo sapiens
  siRNA target sequence for EPM2AIP1 (NM_014805.2,261-279).
gtcgacgaggctctagttt

SEQ ID NO: 343787 - DNA, 19 bp, Homo sapiens
  siRNA target sequence for EPM2AIP1 (NM_014805.2,288-306).
gagtggacccagcgttatt

SEQ ID NO: 343788 - DNA, 19 bp, Homo sapiens
  siRNA target sequence for EPM2AIP1 (NM_014805.2,292-310).
ggacccagcgttatttggt

SEQ ID NO: 343789 - DNA, 19 bp, Homo sapiens
  siRNA target sequence for EPM2AIP1 (NM_014805.2,402-420).
gaggctgagcacgaatact

SEQ ID NO: 343790 - DNA, 19 bp, Homo sapiens
  siRNA target sequence for EPM2AIP1 (NM_014805.2,572-590).
gggtgagggggactttgta

SEQ ID NO: 343791 - DNA, 19 bp, Homo sapiens
  siRNA target sequence for EPM2AIP1 (NM_014805.2,573-591).
ggtgagggggactttgtat

SEQ ID NO: 343792 - DNA, 19 bp, Homo sapiens
  siRNA target sequence for EPM2AIP1 (NM_014805.2,574-592).
gtgagggggactttgtata

SEQ ID NO: 343793 - DNA, 19 bp, Homo sapiens
  siRNA target sequence for EPM2AIP1 (NM_014805.2,621-639).
gtactgcccgagcatgtaa

SEQ ID NO: 343794 - DNA, 19 bp, Homo sapiens
  siRNA target sequence for EPM2AIP1 (NM_014805.2,647-665).
gcaaggcgttgacttatct

SEQ ID NO: 343795 - DNA, 19 bp, Homo sapiens
  siRNA target sequence for EPM2AIP1 (NM_014805.2,657-675).
gacttatctccagatatca

SEQ ID NO: 343796 - DNA, 19 bp, Homo sapiens
  siRNA target sequence for EPM2AIP1 (NM_014805.2,708-726).
ctacgcaaccagcttttta

SEQ ID NO: 343797 - DNA, 19 bp, Homo sapiens
  siRNA target sequence for EPM2AIP1 (NM_014805.2,728-746).
ccgagccagggactttaaa

SEQ ID NO: 343798 - DNA, 19 bp, Homo sapiens
  siRNA target sequence for EPM2AIP1 (NM_014805.2,774-792).
gcttttgtggcctatgaga

SEQ ID NO: 343799 - DNA, 19 bp, Homo sapiens
  siRNA target sequence for EPM2AIP1 (NM_014805.2,775-793).
cttttgtggcctatgagaa

SEQ ID NO: 343800 - DNA, 19 bp, Homo sapiens
  siRNA target sequence for EPM2AIP1 (NM_014805.2,843-861).
gaagatcttctgaccataa

SEQ ID NO: 343801 - DNA, 19 bp, Homo sapiens
  siRNA target sequence for EPM2AIP1 (NM_014805.2,846-864).
gatcttctgaccataatca

SEQ ID NO: 343802 - DNA, 19 bp, Homo sapiens
  siRNA target sequence for EPM2AIP1 (NM_014805.2,957-975).
ctgaccacgacccatactt

SEQ ID NO: 343803 - DNA, 19 bp, Homo sapiens
  siRNA target sequence for EPM2AIP1 (NM_014805.2,999-1017).
ggactcgtctcatacatga

SEQ ID NO: 343804 - DNA, 19 bp, Homo sapiens
  siRNA target sequence for EPM2AIP1 (NM_014805.2,1026-1044).
gccgtaagccccaactgtt

SEQ ID NO: 343805 - DNA, 19 bp, Homo sapiens
  siRNA target sequence for EPM2AIP1 (NM_014805.2,1035-1053).
cccaactgttggaatgtca

SEQ ID NO: 343806 - DNA, 19 bp, Homo sapiens
  siRNA target sequence for EPM2AIP1 (NM_014805.2,1036-1054).
ccaactgttggaatgtcat

SEQ ID NO: 343807 - DNA, 19 bp, Homo sapiens
  siRNA target sequence for EPM2AIP1 (NM_014805.2,1085-1103).
gttgagctcctatgatgta

SEQ ID NO: 343808 - DNA, 19 bp, Homo sapiens
  siRNA target sequence for EPM2AIP1 (NM_014805.2,1088-1106).
gagctcctatgatgtagat

SEQ ID NO: 343809 - DNA, 19 bp, Homo sapiens
  siRNA target sequence for EPM2AIP1 (NM_014805.2,1113-1131).
cagatcataaataccatat

SEQ ID NO: 343810 - DNA, 19 bp, Homo sapiens
  siRNA target sequence for EPM2AIP1 (NM_014805.2,1127-1145).
catatccgaatggatagtt

SEQ ID NO: 343811 - DNA, 19 bp, Homo sapiens
  siRNA target sequence for EPM2AIP1 (NM_014805.2,1132-1150).
ccgaatggatagttttgat

SEQ ID NO: 343812 - DNA, 19 bp, Homo sapiens
  siRNA target sequence for EPM2AIP1 (NM_014805.2,1162-1180).
gcgttaggcgacctgaatt

SEQ ID NO: 343813 - DNA, 19 bp, Homo sapiens
  siRNA target sequence for EPM2AIP1 (NM_014805.2,1163-1181).
cgttaggcgacctgaattt

SEQ ID NO: 343814 - DNA, 19 bp, Homo sapiens
  siRNA target sequence for EPM2AIP1 (NM_014805.2,1186-1204).
ctttactaacggaatctga

SEQ ID NO: 343815 - DNA, 19 bp, Homo sapiens
  siRNA target sequence for EPM2AIP1 (NM_014805.2,1230-1248).
ggacgatgtctgaacaatt

SEQ ID NO: 343816 - DNA, 19 bp, Homo sapiens
  siRNA target sequence for EPM2AIP1 (NM_014805.2,1372-1390).
gcttcttggtggacattat

SEQ ID NO: 343817 - DNA, 19 bp, Homo sapiens
  siRNA target sequence for EPM2AIP1 (NM_014805.2,1465-1483).
gtactttcgaagttaagct

SEQ ID NO: 343818 - DNA, 19 bp, Homo sapiens
  siRNA target sequence for EPM2AIP1 (NM_014805.2,1593-1611).
gatcctgataggtatcaaa

SEQ ID NO: 343819 - DNA, 19 bp, Homo sapiens
  siRNA target sequence for EPM2AIP1 (NM_014805.2,1655-1673).
ggacctcaggttcattaaa

SEQ ID NO: 343820 - DNA, 19 bp, Homo sapiens
  siRNA target sequence for EPM2AIP1 (NM_014805.2,1676-1694).
ggacttagaacttttttca

SEQ ID NO: 343821 - DNA, 19 bp, Homo sapiens
  siRNA target sequence for EPM2AIP1 (NM_014805.2,1706-1724).
ctttaaacctgaatatgca

SEQ ID NO: 343822 - DNA, 19 bp, Homo sapiens
  siRNA target sequence for EPM2AIP1 (NM_014805.2,1739-1757).
ggtggagctaacaaaactt

SEQ ID NO: 343823 - DNA, 19 bp, Homo sapiens
  siRNA target sequence for EPM2AIP1 (NM_014805.2,1808-1826).
gttttatgctggattgtct

SEQ ID NO: 343824 - DNA, 19 bp, Homo sapiens
  siRNA target sequence for EPM2AIP1 (NM_014805.2,1819-1837).
gattgtctgctgaatccta

SEQ ID NO: 343825 - DNA, 19 bp, Homo sapiens
  siRNA target sequence for EPM2AIP1 (NM_014805.2,1828-1846).
ctgaatcctacccaattat

SEQ ID NO: 343826 - DNA, 19 bp, Homo sapiens
  siRNA target sequence for EPM2AIP1 (NM_014805.2,1830-1848).
gaatcctacccaattatca

SEQ ID NO: 343827 - DNA, 19 bp, Homo sapiens
  siRNA target sequence for EPM2AIP1 (NM_014805.2,1865-1883).
ggtggcatccttgtttgat

SEQ ID NO: 343828 - DNA, 19 bp, Homo sapiens
  siRNA target sequence for EPM2AIP1 (NM_014805.2,1868-1886).
ggcatccttgtttgatagt

SEQ ID NO: 343829 - DNA, 19 bp, Homo sapiens
  siRNA target sequence for EPM2AIP1 (NM_014805.2,1869-1887).
gcatccttgtttgatagta

SEQ ID NO: 343830 - DNA, 19 bp, Homo sapiens
  siRNA target sequence for EPM2AIP1 (NM_014805.2,1870-1888).
catccttgtttgatagtaa

SEQ ID NO: 343831 - DNA, 19 bp, Homo sapiens
  siRNA target sequence for EPM2AIP1 (NM_014805.2,1921-1939).
ctcgaaaccaacacacttt

SEQ ID NO: 343832 - DNA, 19 bp, Homo sapiens
  siRNA target sequence for EPM2AIP1 (NM_014805.2,1923-1941).
cgaaaccaacacactttga

SEQ ID NO: 343833 - DNA, 19 bp, Homo sapiens
  siRNA target sequence for EPM2AIP1 (NM_014805.2,1980-1998).
cgggttgccacaactgaaa

SEQ ID NO: 343834 - DNA, 19 bp, Homo sapiens
  siRNA target sequence for EPM2AIP1 (NM_014805.2,1981-1999).
gggttgccacaactgaaat

SEQ ID NO: 343835 - DNA, 19 bp, Homo sapiens
  siRNA target sequence for KIAA0319 (NM_014809.1,586-604).
cagcgaggggaggacatat

SEQ ID NO: 343836 - DNA, 19 bp, Homo sapiens
  siRNA target sequence for KIAA0319 (NM_014809.1,799-817).
caggtcttatctcactttt

SEQ ID NO: 343837 - DNA, 19 bp, Homo sapiens
  siRNA target sequence for KIAA0319 (NM_014809.1,903-921).
gggactcacctgaggatat

SEQ ID NO: 343838 - DNA, 19 bp, Homo sapiens
  siRNA target sequence for KIAA0319 (NM_014809.1,907-925).
ctcacctgaggatatcaga

SEQ ID NO: 343839 - DNA, 19 bp, Homo sapiens
  siRNA target sequence for KIAA0319 (NM_014809.1,1154-1172).
ctccattacctgaatgagt

SEQ ID NO: 343840 - DNA, 19 bp, Homo sapiens
  siRNA target sequence for KIAA0319 (NM_014809.1,1518-1536).
cggtatcggctggagataa

SEQ ID NO: 343841 - DNA, 19 bp, Homo sapiens
  siRNA target sequence for KIAA0319 (NM_014809.1,1524-1542).
cggctggagataacctaat

SEQ ID NO: 343842 - DNA, 19 bp, Homo sapiens
  siRNA target sequence for KIAA0319 (NM_014809.1,1525-1543).
ggctggagataacctaatt

SEQ ID NO: 343843 - DNA, 19 bp, Homo sapiens
  siRNA target sequence for KIAA0319 (NM_014809.1,1529-1547).
ggagataacctaattataa

SEQ ID NO: 343844 - DNA, 19 bp, Homo sapiens
  siRNA target sequence for KIAA0319 (NM_014809.1,1592-1610).
gcgccacctgtagaaacaa

SEQ ID NO: 343845 - DNA, 19 bp, Homo sapiens
  siRNA target sequence for KIAA0319 (NM_014809.1,1611-1629).
cctacaactatgaatggaa

SEQ ID NO: 343846 - DNA, 19 bp, Homo sapiens
  siRNA target sequence for KIAA0319 (NM_014809.1,1647-1665).
cagactaccaaggtgaaat

SEQ ID NO: 343847 - DNA, 19 bp, Homo sapiens
  siRNA target sequence for KIAA0319 (NM_014809.1,1649-1667).
gactaccaaggtgaaataa

SEQ ID NO: 343848 - DNA, 19 bp, Homo sapiens
  siRNA target sequence for KIAA0319 (NM_014809.1,1674-1692).
gacacaagcaaactcttaa

SEQ ID NO: 343849 - DNA, 19 bp, Homo sapiens
  siRNA target sequence for KIAA0319 (NM_014809.1,1686-1704).
ctcttaacctctctcaatt

SEQ ID NO: 343850 - DNA, 19 bp, Homo sapiens
  siRNA target sequence for KIAA0319 (NM_014809.1,1707-1725).
ccgtcggactttatgtctt

SEQ ID NO: 343851 - DNA, 19 bp, Homo sapiens
  siRNA target sequence for KIAA0319 (NM_014809.1,1721-1739).
gtcttcaaagtcactgttt

SEQ ID NO: 343852 - DNA, 19 bp, Homo sapiens
  siRNA target sequence for KIAA0319 (NM_014809.1,1807-1825).
gccacctgtagcagttgtt

SEQ ID NO: 343853 - DNA, 19 bp, Homo sapiens
  siRNA target sequence for KIAA0319 (NM_014809.1,1879-1897).
cagccaaagtacagatgat

SEQ ID NO: 343854 - DNA, 19 bp, Homo sapiens
  siRNA target sequence for KIAA0319 (NM_014809.1,1882-1900).
ccaaagtacagatgatact

SEQ ID NO: 343855 - DNA, 19 bp, Homo sapiens
  siRNA target sequence for KIAA0319 (NM_014809.1,1890-1908).
cagatgatactgaaatagt

SEQ ID NO: 343856 - DNA, 19 bp, Homo sapiens
  siRNA target sequence for KIAA0319 (NM_014809.1,1892-1910).
gatgatactgaaatagtga

SEQ ID NO: 343857 - DNA, 19 bp, Homo sapiens
  siRNA target sequence for KIAA0319 (NM_014809.1,1899-1917).
ctgaaatagtgagttatca

SEQ ID NO: 343858 - DNA, 19 bp, Homo sapiens
  siRNA target sequence for KIAA0319 (NM_014809.1,1970-1988).
cccgtcttacgcttgtcta

SEQ ID NO: 343859 - DNA, 19 bp, Homo sapiens
  siRNA target sequence for KIAA0319 (NM_014809.1,1971-1989).
ccgtcttacgcttgtctaa

SEQ ID NO: 343860 - DNA, 19 bp, Homo sapiens
  siRNA target sequence for KIAA0319 (NM_014809.1,1975-1993).
cttacgcttgtctaacctt

SEQ ID NO: 343861 - DNA, 19 bp, Homo sapiens
  siRNA target sequence for KIAA0319 (NM_014809.1,1990-2008).
ccttgatcctggtaactat

SEQ ID NO: 343862 - DNA, 19 bp, Homo sapiens
  siRNA target sequence for KIAA0319 (NM_014809.1,1994-2012).
gatcctggtaactatagtt

SEQ ID NO: 343863 - DNA, 19 bp, Homo sapiens
  siRNA target sequence for KIAA0319 (NM_014809.1,1997-2015).
cctggtaactatagtttca

SEQ ID NO: 343864 - DNA, 19 bp, Homo sapiens
  siRNA target sequence for KIAA0319 (NM_014809.1,2036-2054).
gacggagccactaactcta

SEQ ID NO: 343865 - DNA, 19 bp, Homo sapiens
  siRNA target sequence for KIAA0319 (NM_014809.1,2039-2057).
ggagccactaactctacaa

SEQ ID NO: 343866 - DNA, 19 bp, Homo sapiens
  siRNA target sequence for KIAA0319 (NM_014809.1,2055-2073).
caactgcagccctaatagt

SEQ ID NO: 343867 - DNA, 19 bp, Homo sapiens
  siRNA target sequence for KIAA0319 (NM_014809.1,2058-2076).
ctgcagccctaatagtgaa

SEQ ID NO: 343868 - DNA, 19 bp, Homo sapiens
  siRNA target sequence for KIAA0319 (NM_014809.1,2089-2107).
ctacccaccagttgctaat

SEQ ID NO: 343869 - DNA, 19 bp, Homo sapiens
  siRNA target sequence for KIAA0319 (NM_014809.1,2103-2121).
ctaatgcaggaccaaatca

SEQ ID NO: 343870 - DNA, 19 bp, Homo sapiens
  siRNA target sequence for KIAA0319 (NM_014809.1,2111-2129).
ggaccaaatcacaccataa

SEQ ID NO: 343871 - DNA, 19 bp, Homo sapiens
  siRNA target sequence for KIAA0319 (NM_014809.1,2114-2132).
ccaaatcacaccataactt

SEQ ID NO: 343872 - DNA, 19 bp, Homo sapiens
  siRNA target sequence for KIAA0319 (NM_014809.1,2254-2272).
gacgccataccttcattta

SEQ ID NO: 343873 - DNA, 19 bp, Homo sapiens
  siRNA target sequence for KIAA0319 (NM_014809.1,2257-2275).
gccataccttcatttatct

SEQ ID NO: 343874 - DNA, 19 bp, Homo sapiens
  siRNA target sequence for KIAA0319 (NM_014809.1,2575-2593).
ctaccacttccgtttgaca

SEQ ID NO: 343875 - DNA, 19 bp, Homo sapiens
  siRNA target sequence for KIAA0319 (NM_014809.1,2677-2695).
ggctggtggcagacatgtt

SEQ ID NO: 343876 - DNA, 19 bp, Homo sapiens
  siRNA target sequence for KIAA0319 (NM_014809.1,2682-2700).
gtggcagacatgttcttgt

SEQ ID NO: 343877 - DNA, 19 bp, Homo sapiens
  siRNA target sequence for KIAA0319 (NM_014809.1,2696-2714).
cttgtgcttcccaataatt

SEQ ID NO: 343878 - DNA, 19 bp, Homo sapiens
  siRNA target sequence for KIAA0319 (NM_014809.1,2699-2717).
gtgcttcccaataattcca

SEQ ID NO: 343879 - DNA, 19 bp, Homo sapiens
  siRNA target sequence for KIAA0319 (NM_014809.1,2701-2719).
gcttcccaataattccatt

SEQ ID NO: 343880 - DNA, 19 bp, Homo sapiens
  siRNA target sequence for KIAA0319 (NM_014809.1,2739-2757).
ctactgatgaccaaagaat

SEQ ID NO: 343881 - DNA, 19 bp, Homo sapiens
  siRNA target sequence for KIAA0319 (NM_014809.1,2742-2760).
ctgatgaccaaagaattgt

SEQ ID NO: 343882 - DNA, 19 bp, Homo sapiens
  siRNA target sequence for KIAA0319 (NM_014809.1,2855-2873).
gtggagggggtgtacactt

SEQ ID NO: 343883 - DNA, 19 bp, Homo sapiens
  siRNA target sequence for KIAA0319 (NM_014809.1,3064-3082).
cattaaggtccagaagatt

SEQ ID NO: 343884 - DNA, 19 bp, Homo sapiens
  siRNA target sequence for KIAA0319 (NM_014809.1,3106-3124).
cgtgattgtgttttatgta

SEQ ID NO: 343885 - DNA, 19 bp, Homo sapiens
  siRNA target sequence for KIAA0319 (NM_014809.1,3135-3153).
cgcctttcaaggttctcaa

SEQ ID NO: 343886 - DNA, 19 bp, Homo sapiens
  siRNA target sequence for KIAA0319 (NM_014809.1,3159-3177).
ctgaagtggcccgaaatct

SEQ ID NO: 343887 - DNA, 19 bp, Homo sapiens
  siRNA target sequence for KIAA0319 (NM_014809.1,3223-3241).
ggtcttgagggttgataca

SEQ ID NO: 343888 - DNA, 19 bp, Homo sapiens
  siRNA target sequence for KIAA0319 (NM_014809.1,3245-3263).
ggttgccttctgaagtgtt

SEQ ID NO: 343889 - DNA, 19 bp, Homo sapiens
  siRNA target sequence for KIAA0319 (NM_014809.1,3318-3336).
ggatggagaaccttataca

SEQ ID NO: 343890 - DNA, 19 bp, Homo sapiens
  siRNA target sequence for KIAA0319 (NM_014809.1,3329-3347).
cttatacagcgttatatct

SEQ ID NO: 343891 - DNA, 19 bp, Homo sapiens
  siRNA target sequence for KIAA0319 (NM_014809.1,3366-3384).
gtgagtggagtatattcta

SEQ ID NO: 343892 - DNA, 19 bp, Homo sapiens
  siRNA target sequence for KIAA0319 (NM_014809.1,3392-3410).
gtgttggcttttactctta

SEQ ID NO: 343893 - DNA, 19 bp, Homo sapiens
  siRNA target sequence for KIAA0319 (NM_014809.1,3415-3433).
gctaacaggaggtttcact

SEQ ID NO: 343894 - DNA, 19 bp, Homo sapiens
  siRNA target sequence for KIAA0319 (NM_014809.1,3416-3434).
ctaacaggaggtttcactt

SEQ ID NO: 343895 - DNA, 19 bp, Homo sapiens
  siRNA target sequence for KIAA0319 (NM_014809.1,3540-3558).
ggcccaaatatggtatcaa

SEQ ID NO: 343896 - DNA, 19 bp, Homo sapiens
  siRNA target sequence for KIAA0319 (NM_014809.1,3592-3610).
ggtatccgagtctgagttt

SEQ ID NO: 343897 - DNA, 19 bp, Homo sapiens
  siRNA target sequence for KIAA0319 (NM_014809.1,3652-3670).
gagagggaatccaaaggtt

SEQ ID NO: 343898 - DNA, 19 bp, Homo sapiens
  siRNA target sequence for CAP350 (NM_014810.2,191-209).
ggtgcctttaccaaatcca

SEQ ID NO: 343899 - DNA, 19 bp, Homo sapiens
  siRNA target sequence for CAP350 (NM_014810.2,192-210).
gtgcctttaccaaatccaa

SEQ ID NO: 343900 - DNA, 19 bp, Homo sapiens
  siRNA target sequence for CAP350 (NM_014810.2,217-235).
ctcaaagcaaggatactgt

SEQ ID NO: 343901 - DNA, 19 bp, Homo sapiens
  siRNA target sequence for CAP350 (NM_014810.2,234-252).
gttcaagcagatataacca

SEQ ID NO: 343902 - DNA, 19 bp, Homo sapiens
  siRNA target sequence for CAP350 (NM_014810.2,256-274).
cgtgggatgcactttctca

SEQ ID NO: 343903 - DNA, 19 bp, Homo sapiens
  siRNA target sequence for CAP350 (NM_014810.2,257-275).
gtgggatgcactttctcaa

SEQ ID NO: 343904 - DNA, 19 bp, Homo sapiens
  siRNA target sequence for CAP350 (NM_014810.2,283-301).
ctgctctgagacacattga

SEQ ID NO: 343905 - DNA, 19 bp, Homo sapiens
  siRNA target sequence for CAP350 (NM_014810.2,285-303).
gctctgagacacattgaaa

SEQ ID NO: 343906 - DNA, 19 bp, Homo sapiens
  siRNA target sequence for CAP350 (NM_014810.2,373-391).
caagtgctactcgaaaaat

SEQ ID NO: 343907 - DNA, 19 bp, Homo sapiens
  siRNA target sequence for CAP350 (NM_014810.2,405-423).
ggtagatacctggatgatt

SEQ ID NO: 343908 - DNA, 19 bp, Homo sapiens
  siRNA target sequence for CAP350 (NM_014810.2,443-461).
ctccaaatccactaaatca

SEQ ID NO: 343909 - DNA, 19 bp, Homo sapiens
  siRNA target sequence for CAP350 (NM_014810.2,569-587).
ccatggtgcaccttccaat

SEQ ID NO: 343910 - DNA, 19 bp, Homo sapiens
  siRNA target sequence for CAP350 (NM_014810.2,573-591).
ggtgcaccttccaatttca

SEQ ID NO: 343911 - DNA, 19 bp, Homo sapiens
  siRNA target sequence for CAP350 (NM_014810.2,606-624).
gaatcaaagcacgtatact

SEQ ID NO: 343912 - DNA, 19 bp, Homo sapiens
  siRNA target sequence for CAP350 (NM_014810.2,614-632).
gcacgtatactgtgtagat

SEQ ID NO: 343913 - DNA, 19 bp, Homo sapiens
  siRNA target sequence for CAP350 (NM_014810.2,653-671).
gagcggtaactggatgata

SEQ ID NO: 343914 - DNA, 19 bp, Homo sapiens
  siRNA target sequence for CAP350 (NM_014810.2,668-686).
gataggcagtcgagaagaa

SEQ ID NO: 343915 - DNA, 19 bp, Homo sapiens
  siRNA target sequence for CAP350 (NM_014810.2,727-745).
ctgtcatcaatgatacagt

SEQ ID NO: 343916 - DNA, 19 bp, Homo sapiens
  siRNA target sequence for CAP350 (NM_014810.2,738-756).
gatacagttgttaggtttt

SEQ ID NO: 343917 - DNA, 19 bp, Homo sapiens
  siRNA target sequence for CAP350 (NM_014810.2,793-811).
ctgaatgtttgattaggat

SEQ ID NO: 343918 - DNA, 19 bp, Homo sapiens
  siRNA target sequence for CAP350 (NM_014810.2,893-911).
catggcccatgatactgat

SEQ ID NO: 343919 - DNA, 19 bp, Homo sapiens
  siRNA target sequence for CAP350 (NM_014810.2,899-917).
ccatgatactgatccaaaa

SEQ ID NO: 343920 - DNA, 19 bp, Homo sapiens
  siRNA target sequence for CAP350 (NM_014810.2,1075-1093).
gccagaagctgggtcatat

SEQ ID NO: 343921 - DNA, 19 bp, Homo sapiens
  siRNA target sequence for CAP350 (NM_014810.2,1076-1094).
ccagaagctgggtcatatt

SEQ ID NO: 343922 - DNA, 19 bp, Homo sapiens
  siRNA target sequence for CAP350 (NM_014810.2,1164-1182).
ccacctgctccagcatata

SEQ ID NO: 343923 - DNA, 19 bp, Homo sapiens
  siRNA target sequence for CAP350 (NM_014810.2,1165-1183).
cacctgctccagcatataa

SEQ ID NO: 343924 - DNA, 19 bp, Homo sapiens
  siRNA target sequence for CAP350 (NM_014810.2,1256-1274).
catgagtagagaactgtat

SEQ ID NO: 343925 - DNA, 19 bp, Homo sapiens
  siRNA target sequence for CAP350 (NM_014810.2,1276-1294).
gagatttagcacttcactt

SEQ ID NO: 343926 - DNA, 19 bp, Homo sapiens
  siRNA target sequence for CAP350 (NM_014810.2,1380-1398).
gtagcacagttatcaagta

SEQ ID NO: 343927 - DNA, 19 bp, Homo sapiens
  siRNA target sequence for CAP350 (NM_014810.2,1406-1424).
cagaacaggtagtagtcat

SEQ ID NO: 343928 - DNA, 19 bp, Homo sapiens
  siRNA target sequence for CAP350 (NM_014810.2,1411-1429).
caggtagtagtcatcttat

SEQ ID NO: 343929 - DNA, 19 bp, Homo sapiens
  siRNA target sequence for CAP350 (NM_014810.2,1413-1431).
ggtagtagtcatcttataa

SEQ ID NO: 343930 - DNA, 19 bp, Homo sapiens
  siRNA target sequence for CAP350 (NM_014810.2,1441-1459).
cttggcgagatggacaaaa

SEQ ID NO: 343931 - DNA, 19 bp, Homo sapiens
  siRNA target sequence for CAP350 (NM_014810.2,1444-1462).
ggcgagatggacaaaaatt

SEQ ID NO: 343932 - DNA, 19 bp, Homo sapiens
  siRNA target sequence for CAP350 (NM_014810.2,1452-1470).
ggacaaaaattagtaaaga

SEQ ID NO: 343933 - DNA, 19 bp, Homo sapiens
  siRNA target sequence for CAP350 (NM_014810.2,1595-1613).
gttggacgttttacataga

SEQ ID NO: 343934 - DNA, 19 bp, Homo sapiens
  siRNA target sequence for CAP350 (NM_014810.2,1687-1705).
ctcttccagataataagca

SEQ ID NO: 343935 - DNA, 19 bp, Homo sapiens
  siRNA target sequence for CAP350 (NM_014810.2,1719-1737).
gccttaaataaggactttt

SEQ ID NO: 343936 - DNA, 19 bp, Homo sapiens
  siRNA target sequence for CAP350 (NM_014810.2,1767-1785).
gacctacagctggattcta

SEQ ID NO: 343937 - DNA, 19 bp, Homo sapiens
  siRNA target sequence for CAP350 (NM_014810.2,1769-1787).
cctacagctggattctaca

SEQ ID NO: 343938 - DNA, 19 bp, Homo sapiens
  siRNA target sequence for CAP350 (NM_014810.2,1791-1809).
cacactgcaaagcaagata

SEQ ID NO: 343939 - DNA, 19 bp, Homo sapiens
  siRNA target sequence for CAP350 (NM_014810.2,1802-1820).
gcaagatactgtagagtta

SEQ ID NO: 343940 - DNA, 19 bp, Homo sapiens
  siRNA target sequence for CAP350 (NM_014810.2,1832-1850).
gtcatcagcaccagtacat

SEQ ID NO: 343941 - DNA, 19 bp, Homo sapiens
  siRNA target sequence for CAP350 (NM_014810.2,1858-1876).
ggagtcacagcccagtaaa

SEQ ID NO: 343942 - DNA, 19 bp, Homo sapiens
  siRNA target sequence for CAP350 (NM_014810.2,1905-1923).
gaagatccccctgttattt

SEQ ID NO: 343943 - DNA, 19 bp, Homo sapiens
  siRNA target sequence for CAP350 (NM_014810.2,1908-1926).
gatccccctgttatttcca

SEQ ID NO: 343944 - DNA, 19 bp, Homo sapiens
  siRNA target sequence for CAP350 (NM_014810.2,1924-1942).
ccaaaaggcgccactatga

SEQ ID NO: 343945 - DNA, 19 bp, Homo sapiens
  siRNA target sequence for CAP350 (NM_014810.2,1952-1970).
ggtacgacagtacattgtt

SEQ ID NO: 343946 - DNA, 19 bp, Homo sapiens
  siRNA target sequence for CAP350 (NM_014810.2,1953-1971).
gtacgacagtacattgtta

SEQ ID NO: 343947 - DNA, 19 bp, Homo sapiens
  siRNA target sequence for CAP350 (NM_014810.2,2131-2149).
ggcgactacaggaaactta

SEQ ID NO: 343948 - DNA, 19 bp, Homo sapiens
  siRNA target sequence for CAP350 (NM_014810.2,2177-2195).
gcttgaagagccatctcat

SEQ ID NO: 343949 - DNA, 19 bp, Homo sapiens
  siRNA target sequence for CAP350 (NM_014810.2,2186-2204).
gccatctcatcaacatgtt

SEQ ID NO: 343950 - DNA, 19 bp, Homo sapiens
  siRNA target sequence for CAP350 (NM_014810.2,2365-2383).
ggatgcagcctgaaagatt

SEQ ID NO: 343951 - DNA, 19 bp, Homo sapiens
  siRNA target sequence for CAP350 (NM_014810.2,2425-2443).
gaacagctggaagtttact

SEQ ID NO: 343952 - DNA, 19 bp, Homo sapiens
  siRNA target sequence for CAP350 (NM_014810.2,2437-2455).
gtttactctcccatctctt

SEQ ID NO: 343953 - DNA, 19 bp, Homo sapiens
  siRNA target sequence for CAP350 (NM_014810.2,2458-2476).
gtttagagcatgtaggaat

SEQ ID NO: 343954 - DNA, 19 bp, Homo sapiens
  siRNA target sequence for CAP350 (NM_014810.2,2528-2546).
ggcttcaaggccattaact

SEQ ID NO: 343955 - DNA, 19 bp, Homo sapiens
  siRNA target sequence for CAP350 (NM_014810.2,2567-2585).
gacctcaccagctgcttat

SEQ ID NO: 343956 - DNA, 19 bp, Homo sapiens
  siRNA target sequence for CAP350 (NM_014810.2,2570-2588).
ctcaccagctgcttataca

SEQ ID NO: 343957 - DNA, 19 bp, Homo sapiens
  siRNA target sequence for CAP350 (NM_014810.2,2589-2607).
gatgccttgttaaaaccta

SEQ ID NO: 343958 - DNA, 19 bp, Homo sapiens
  siRNA target sequence for CAP350 (NM_014810.2,2604-2622).
cctagtgccagccaatata

SEQ ID NO: 343959 - DNA, 19 bp, Homo sapiens
  siRNA target sequence for CAP350 (NM_014810.2,2610-2628).
gccagccaatataagagta

SEQ ID NO: 343960 - DNA, 19 bp, Homo sapiens
  siRNA target sequence for CAP350 (NM_014810.2,2614-2632).
gccaatataagagtaaact

SEQ ID NO: 343961 - DNA, 19 bp, Homo sapiens
  siRNA target sequence for CAP350 (NM_014810.2,2624-2642).
gagtaaactggatcgtatt

SEQ ID NO: 343962 - DNA, 19 bp, Homo sapiens
  siRNA target sequence for CAP350 (NM_014810.2,2626-2644).
gtaaactggatcgtattga

SEQ ID NO: 343963 - DNA, 19 bp, Homo sapiens
  siRNA target sequence for CAP350 (NM_014810.2,2655-2673).
gcaacagctgcttctttgt

SEQ ID NO: 343964 - DNA, 19 bp, Homo sapiens
  siRNA target sequence for CAP350 (NM_014810.2,2734-2752).
catggaacactgagtatga

SEQ ID NO: 343965 - DNA, 19 bp, Homo sapiens
  siRNA target sequence for CAP350 (NM_014810.2,2737-2755).
ggaacactgagtatgatgt

SEQ ID NO: 343966 - DNA, 19 bp, Homo sapiens
  siRNA target sequence for CAP350 (NM_014810.2,2802-2820).
ccacctgtgaaagatgata

SEQ ID NO: 343967 - DNA, 19 bp, Homo sapiens
  siRNA target sequence for CAP350 (NM_014810.2,2866-2884).
gtgtatctcatgcaacttt

SEQ ID NO: 343968 - DNA, 19 bp, Homo sapiens
  siRNA target sequence for CAP350 (NM_014810.2,2878-2896).
caacttttgatgatgatct

SEQ ID NO: 343969 - DNA, 19 bp, Homo sapiens
  siRNA target sequence for CAP350 (NM_014810.2,2898-2916).
cctggtgtaggcaatctta

SEQ ID NO: 343970 - DNA, 19 bp, Homo sapiens
  siRNA target sequence for CAP350 (NM_014810.2,2904-2922).
gtaggcaatcttagtgaat

SEQ ID NO: 343971 - DNA, 19 bp, Homo sapiens
  siRNA target sequence for CAP350 (NM_014810.2,2907-2925).
ggcaatcttagtgaattta

SEQ ID NO: 343972 - DNA, 19 bp, Homo sapiens
  siRNA target sequence for CAP350 (NM_014810.2,2930-2948).
gcttcctgagatgataaga

SEQ ID NO: 343973 - DNA, 19 bp, Homo sapiens
  siRNA target sequence for CAP350 (NM_014810.2,2949-2967).
ccacagagtgccatatcaa

SEQ ID NO: 343974 - DNA, 19 bp, Homo sapiens
  siRNA target sequence for CAP350 (NM_014810.2,2954-2972).
gagtgccatatcaagcttt

SEQ ID NO: 343975 - DNA, 19 bp, Homo sapiens
  siRNA target sequence for CAP350 (NM_014810.2,2959-2977).
ccatatcaagctttagagt

SEQ ID NO: 343976 - DNA, 19 bp, Homo sapiens
  siRNA target sequence for CAP350 (NM_014810.2,3005-3023).
gctactggcacagttatgt

SEQ ID NO: 343977 - DNA, 19 bp, Homo sapiens
  siRNA target sequence for CAP350 (NM_014810.2,3090-3108).
cttggttccagcatagatt

SEQ ID NO: 343978 - DNA, 19 bp, Homo sapiens
  siRNA target sequence for CAP350 (NM_014810.2,3168-3186).
gatggacagccccttttga

SEQ ID NO: 343979 - DNA, 19 bp, Homo sapiens
  siRNA target sequence for CAP350 (NM_014810.2,3351-3369).
ccacatagcgtcattaata

SEQ ID NO: 343980 - DNA, 19 bp, Homo sapiens
  siRNA target sequence for CAP350 (NM_014810.2,3352-3370).
cacatagcgtcattaatat

SEQ ID NO: 343981 - DNA, 19 bp, Homo sapiens
  siRNA target sequence for CAP350 (NM_014810.2,3382-3400).
cctatcagttatatggaaa

SEQ ID NO: 343982 - DNA, 19 bp, Homo sapiens
  siRNA target sequence for CAP350 (NM_014810.2,3455-3473).
caccgcaactcctctaagt

SEQ ID NO: 343983 - DNA, 19 bp, Homo sapiens
  siRNA target sequence for CAP350 (NM_014810.2,3465-3483).
cctctaagtggtgtttcat

SEQ ID NO: 343984 - DNA, 19 bp, Homo sapiens
  siRNA target sequence for CAP350 (NM_014810.2,3466-3484).
ctctaagtggtgtttcata

SEQ ID NO: 343985 - DNA, 19 bp, Homo sapiens
  siRNA target sequence for CAP350 (NM_014810.2,3514-3532).
ctgggacttcgacagaaaa

SEQ ID NO: 343986 - DNA, 19 bp, Homo sapiens
  siRNA target sequence for CAP350 (NM_014810.2,3546-3564).
gaacctcatagcactttaa

SEQ ID NO: 343987 - DNA, 19 bp, Homo sapiens
  siRNA target sequence for CAP350 (NM_014810.2,3570-3588).
caggaggaccattctaaca

SEQ ID NO: 343988 - DNA, 19 bp, Homo sapiens
  siRNA target sequence for CAP350 (NM_014810.2,3572-3590).
ggaggaccattctaacaga

SEQ ID NO: 343989 - DNA, 19 bp, Homo sapiens
  siRNA target sequence for CAP350 (NM_014810.2,3573-3591).
gaggaccattctaacagaa

SEQ ID NO: 343990 - DNA, 19 bp, Homo sapiens
  siRNA target sequence for CAP350 (NM_014810.2,3587-3605).
cagaaagtctgcctatgat

SEQ ID NO: 343991 - DNA, 19 bp, Homo sapiens
  siRNA target sequence for CAP350 (NM_014810.2,3657-3675).
gcatcgtctcgttcatcta

SEQ ID NO: 343992 - DNA, 19 bp, Homo sapiens
  siRNA target sequence for CAP350 (NM_014810.2,3714-3732).
gaatggttggattcattca

SEQ ID NO: 343993 - DNA, 19 bp, Homo sapiens
  siRNA target sequence for CAP350 (NM_014810.2,3781-3799).
gctcccatcaaggaaagaa

SEQ ID NO: 343994 - DNA, 19 bp, Homo sapiens
  siRNA target sequence for CAP350 (NM_014810.2,3814-3832).
gcaaactttctgttaaaga

SEQ ID NO: 343995 - DNA, 19 bp, Homo sapiens
  siRNA target sequence for CAP350 (NM_014810.2,3839-3857).
gcagactcttgatacagat

SEQ ID NO: 343996 - DNA, 19 bp, Homo sapiens
  siRNA target sequence for CAP350 (NM_014810.2,3840-3858).
cagactcttgatacagata

SEQ ID NO: 343997 - DNA, 19 bp, Homo sapiens
  siRNA target sequence for CAP350 (NM_014810.2,3860-3878).
cactttggaggatctttct

SEQ ID NO: 343998 - DNA, 19 bp, Homo sapiens
  siRNA target sequence for CAP350 (NM_014810.2,3945-3963).
ccaagttcccagaaatcat

SEQ ID NO: 343999 - DNA, 19 bp, Homo sapiens
  siRNA target sequence for CAP350 (NM_014810.2,3972-3990).
gacgttgcaggaacttctt

SEQ ID NO: 344000 - DNA, 19 bp, Homo sapiens
  siRNA target sequence for CAP350 (NM_014810.2,3997-4015).
gatctaagtcgtcagtaat

SEQ ID NO: 344001 - DNA, 19 bp, Homo sapiens
  siRNA target sequence for CAP350 (NM_014810.2,4009-4027).
cagtaatgcctccaactat

SEQ ID NO: 344002 - DNA, 19 bp, Homo sapiens
  siRNA target sequence for CAP350 (NM_014810.2,4020-4038).
ccaactataacaggattta

SEQ ID NO: 344003 - DNA, 19 bp, Homo sapiens
  siRNA target sequence for CAP350 (NM_014810.2,4048-4066).
cacctctcactgatctgaa

SEQ ID NO: 344004 - DNA, 19 bp, Homo sapiens
  siRNA target sequence for CAP350 (NM_014810.2,4081-4099).
gaacaacgacagagaacat

SEQ ID NO: 344005 - DNA, 19 bp, Homo sapiens
  siRNA target sequence for CAP350 (NM_014810.2,4102-4120).
ctccaataccaggttctaa

SEQ ID NO: 344006 - DNA, 19 bp, Homo sapiens
  siRNA target sequence for CAP350 (NM_014810.2,4156-4174).
cagcagaactcagttatct

SEQ ID NO: 344007 - DNA, 19 bp, Homo sapiens
  siRNA target sequence for CAP350 (NM_014810.2,4196-4214).
gcgccaactgtcagatgta

SEQ ID NO: 344008 - DNA, 19 bp, Homo sapiens
  siRNA target sequence for CAP350 (NM_014810.2,4219-4237).
gagttagaggcatttcact

SEQ ID NO: 344009 - DNA, 19 bp, Homo sapiens
  siRNA target sequence for CAP350 (NM_014810.2,4346-4364).
gagtcagagacaattagaa

SEQ ID NO: 344010 - DNA, 19 bp, Homo sapiens
  siRNA target sequence for CAP350 (NM_014810.2,4388-4406).
ggtccatgcagaatcatta

SEQ ID NO: 344011 - DNA, 19 bp, Homo sapiens
  siRNA target sequence for CAP350 (NM_014810.2,4409-4427).
gcaggtggttcaatcacaa

SEQ ID NO: 344012 - DNA, 19 bp, Homo sapiens
  siRNA target sequence for CAP350 (NM_014810.2,4504-4522).
cagacgcagcacgtcaaat

SEQ ID NO: 344013 - DNA, 19 bp, Homo sapiens
  siRNA target sequence for CAP350 (NM_014810.2,4506-4524).
gacgcagcacgtcaaatct

SEQ ID NO: 344014 - DNA, 19 bp, Homo sapiens
  siRNA target sequence for CAP350 (NM_014810.2,4541-4559).
gactagaactcatatctca

SEQ ID NO: 344015 - DNA, 19 bp, Homo sapiens
  siRNA target sequence for CAP350 (NM_014810.2,4576-4594).
caggagctccccttgcaat

SEQ ID NO: 344016 - DNA, 19 bp, Homo sapiens
  siRNA target sequence for CAP350 (NM_014810.2,4579-4597).
gagctccccttgcaatact

SEQ ID NO: 344017 - DNA, 19 bp, Homo sapiens
  siRNA target sequence for CAP350 (NM_014810.2,4581-4599).
gctccccttgcaatactgt

SEQ ID NO: 344018 - DNA, 19 bp, Homo sapiens
  siRNA target sequence for CAP350 (NM_014810.2,4582-4600).
ctccccttgcaatactgta

SEQ ID NO: 344019 - DNA, 19 bp, Homo sapiens
  siRNA target sequence for CAP350 (NM_014810.2,4585-4603).
cccttgcaatactgtatga

SEQ ID NO: 344020 - DNA, 19 bp, Homo sapiens
  siRNA target sequence for CAP350 (NM_014810.2,4684-4702).
cactctctcagagtaaaga

SEQ ID NO: 344021 - DNA, 19 bp, Homo sapiens
  siRNA target sequence for CAP350 (NM_014810.2,4706-4724).
gacccttgactcaaagcat

SEQ ID NO: 344022 - DNA, 19 bp, Homo sapiens
  siRNA target sequence for CAP350 (NM_014810.2,4737-4755).
gcttcatatgatagttatt

SEQ ID NO: 344023 - DNA, 19 bp, Homo sapiens
  siRNA target sequence for CAP350 (NM_014810.2,4756-4774).
ctgagtcttcaggatacaa

SEQ ID NO: 344024 - DNA, 19 bp, Homo sapiens
  siRNA target sequence for CAP350 (NM_014810.2,4767-4785).
ggatacaagaatcatgata

SEQ ID NO: 344025 - DNA, 19 bp, Homo sapiens
  siRNA target sequence for CAP350 (NM_014810.2,4811-4829).
ccaagaaagtccttcagtt

SEQ ID NO: 344026 - DNA, 19 bp, Homo sapiens
  siRNA target sequence for CAP350 (NM_014810.2,4827-4845).
gttccatcttgtaaggaaa

SEQ ID NO: 344027 - DNA, 19 bp, Homo sapiens
  siRNA target sequence for CAP350 (NM_014810.2,4903-4921).
ctgctgcagatgattctct

SEQ ID NO: 344028 - DNA, 19 bp, Homo sapiens
  siRNA target sequence for CAP350 (NM_014810.2,4918-4936).
ctctacgaagtgatagtgt

SEQ ID NO: 344029 - DNA, 19 bp, Homo sapiens
  siRNA target sequence for CAP350 (NM_014810.2,4959-4977).
gactcaacgtctattgcaa

SEQ ID NO: 344030 - DNA, 19 bp, Homo sapiens
  siRNA target sequence for CAP350 (NM_014810.2,4966-4984).
cgtctattgcaacagaata

SEQ ID NO: 344031 - DNA, 19 bp, Homo sapiens
  siRNA target sequence for CAP350 (NM_014810.2,4967-4985).
gtctattgcaacagaatat

SEQ ID NO: 344032 - DNA, 19 bp, Homo sapiens
  siRNA target sequence for CAP350 (NM_014810.2,5025-5043).
gaagaacaatcatttcgat

SEQ ID NO: 344033 - DNA, 19 bp, Homo sapiens
  siRNA target sequence for CAP350 (NM_014810.2,5058-5076).
gagagtcaccgcagattta

SEQ ID NO: 344034 - DNA, 19 bp, Homo sapiens
  siRNA target sequence for CAP350 (NM_014810.2,5062-5080).
gtcaccgcagatttaacat

SEQ ID NO: 344035 - DNA, 19 bp, Homo sapiens
  siRNA target sequence for CAP350 (NM_014810.2,5176-5194).
caggaggacaagatagctt

SEQ ID NO: 344036 - DNA, 19 bp, Homo sapiens
  siRNA target sequence for CAP350 (NM_014810.2,5178-5196).
ggaggacaagatagctttt

SEQ ID NO: 344037 - DNA, 19 bp, Homo sapiens
  siRNA target sequence for CAP350 (NM_014810.2,5181-5199).
ggacaagatagcttttcta

SEQ ID NO: 344038 - DNA, 19 bp, Homo sapiens
  siRNA target sequence for CAP350 (NM_014810.2,5210-5228).
ggagatggttcgacagtat

SEQ ID NO: 344039 - DNA, 19 bp, Homo sapiens
  siRNA target sequence for CAP350 (NM_014810.2,5211-5229).
gagatggttcgacagtata

SEQ ID NO: 344040 - DNA, 19 bp, Homo sapiens
  siRNA target sequence for CAP350 (NM_014810.2,5216-5234).
ggttcgacagtatatgaaa

SEQ ID NO: 344041 - DNA, 19 bp, Homo sapiens
  siRNA target sequence for CAP350 (NM_014810.2,5290-5308).
ccttgaaggagaagactaa

SEQ ID NO: 344042 - DNA, 19 bp, Homo sapiens
  siRNA target sequence for CAP350 (NM_014810.2,5321-5339).
ctggttagagcatcaaaaa

SEQ ID NO: 344043 - DNA, 19 bp, Homo sapiens
  siRNA target sequence for CAP350 (NM_014810.2,5330-5348).
gcatcaaaaaaaacatcta

SEQ ID NO: 344044 - DNA, 19 bp, Homo sapiens
  siRNA target sequence for CAP350 (NM_014810.2,5390-5408).
gaaacagcgtggtttgctt

SEQ ID NO: 344045 - DNA, 19 bp, Homo sapiens
  siRNA target sequence for CAP350 (NM_014810.2,5394-5412).
cagcgtggtttgcttttaa

SEQ ID NO: 344046 - DNA, 19 bp, Homo sapiens
  siRNA target sequence for CAP350 (NM_014810.2,5443-5461).
gtcttcaagaagccaataa

SEQ ID NO: 344047 - DNA, 19 bp, Homo sapiens
  siRNA target sequence for CAP350 (NM_014810.2,5519-5537).
ccgacagaccaccataaaa

SEQ ID NO: 344048 - DNA, 19 bp, Homo sapiens
  siRNA target sequence for CAP350 (NM_014810.2,5557-5575).
ctgcaggggagagtaaatt

SEQ ID NO: 344049 - DNA, 19 bp, Homo sapiens
  siRNA target sequence for CAP350 (NM_014810.2,5583-5601).
catagtgatgatgatacaa

SEQ ID NO: 344050 - DNA, 19 bp, Homo sapiens
  siRNA target sequence for CAP350 (NM_014810.2,5652-5670).
ccttctcccatttcaatct

SEQ ID NO: 344051 - DNA, 19 bp, Homo sapiens
  siRNA target sequence for CAP350 (NM_014810.2,5677-5695).
gtgaaactagcagcattat

SEQ ID NO: 344052 - DNA, 19 bp, Homo sapiens
  siRNA target sequence for CAP350 (NM_014810.2,5716-5734).
gaagccgcatggatgaaaa

SEQ ID NO: 344053 - DNA, 19 bp, Homo sapiens
  siRNA target sequence for CAP350 (NM_014810.2,5719-5737).
gccgcatggatgaaaagtt

SEQ ID NO: 344054 - DNA, 19 bp, Homo sapiens
  siRNA target sequence for CAP350 (NM_014810.2,5743-5761).
caaagcgggagcaaaaatt

SEQ ID NO: 344055 - DNA, 19 bp, Homo sapiens
  siRNA target sequence for CAP350 (NM_014810.2,5749-5767).
gggagcaaaaattaatgca

SEQ ID NO: 344056 - DNA, 19 bp, Homo sapiens
  siRNA target sequence for CAP350 (NM_014810.2,5798-5816).
gtggaagcgacgtttagat

SEQ ID NO: 344057 - DNA, 19 bp, Homo sapiens
  siRNA target sequence for CAP350 (NM_014810.2,5827-5845).
cagaaattcgtcaaatgga

SEQ ID NO: 344058 - DNA, 19 bp, Homo sapiens
  siRNA target sequence for CAP350 (NM_014810.2,5969-5987).
gtactctcatctaaacagt

SEQ ID NO: 344059 - DNA, 19 bp, Homo sapiens
  siRNA target sequence for CAP350 (NM_014810.2,5992-6010).
gctccattccagaagaatt

SEQ ID NO: 344060 - DNA, 19 bp, Homo sapiens
  siRNA target sequence for CAP350 (NM_014810.2,6017-6035).
ccctgctgttgaatatgta

SEQ ID NO: 344061 - DNA, 19 bp, Homo sapiens
  siRNA target sequence for CAP350 (NM_014810.2,6067-6085).
ggagtccagatcacagtat

SEQ ID NO: 344062 - DNA, 19 bp, Homo sapiens
  siRNA target sequence for CAP350 (NM_014810.2,6068-6086).
gagtccagatcacagtata

SEQ ID NO: 344063 - DNA, 19 bp, Homo sapiens
  siRNA target sequence for CAP350 (NM_014810.2,6131-6149).
ctctcctagtaaacattca

SEQ ID NO: 344064 - DNA, 19 bp, Homo sapiens
  siRNA target sequence for CAP350 (NM_014810.2,6133-6151).
ctcctagtaaacattcact

SEQ ID NO: 344065 - DNA, 19 bp, Homo sapiens
  siRNA target sequence for CAP350 (NM_014810.2,6256-6274).
gttggtcagatgagtcatt

SEQ ID NO: 344066 - DNA, 19 bp, Homo sapiens
  siRNA target sequence for CAP350 (NM_014810.2,6260-6278).
gtcagatgagtcattatct

SEQ ID NO: 344067 - DNA, 19 bp, Homo sapiens
  siRNA target sequence for CAP350 (NM_014810.2,6298-6316).
catctgaccagagtgatat

SEQ ID NO: 344068 - DNA, 19 bp, Homo sapiens
  siRNA target sequence for CAP350 (NM_014810.2,6331-6349).
gagctctgaaggatgagtt

SEQ ID NO: 344069 - DNA, 19 bp, Homo sapiens
  siRNA target sequence for CAP350 (NM_014810.2,6350-6368).
gcggaaaagaaaatcagtt

SEQ ID NO: 344070 - DNA, 19 bp, Homo sapiens
  siRNA target sequence for CAP350 (NM_014810.2,6440-6458).
caagcagttagagtcatat

SEQ ID NO: 344071 - DNA, 19 bp, Homo sapiens
  siRNA target sequence for CAP350 (NM_014810.2,6443-6461).
gcagttagagtcatatgat

SEQ ID NO: 344072 - DNA, 19 bp, Homo sapiens
  siRNA target sequence for CAP350 (NM_014810.2,6446-6464).
gttagagtcatatgatgaa

SEQ ID NO: 344073 - DNA, 19 bp, Homo sapiens
  siRNA target sequence for CAP350 (NM_014810.2,6450-6468).
gagtcatatgatgaattta

SEQ ID NO: 344074 - DNA, 19 bp, Homo sapiens
  siRNA target sequence for CAP350 (NM_014810.2,6452-6470).
gtcatatgatgaatttatt

SEQ ID NO: 344075 - DNA, 19 bp, Homo sapiens
  siRNA target sequence for CAP350 (NM_014810.2,6483-6501).
gccgagcttagccaagatt

SEQ ID NO: 344076 - DNA, 19 bp, Homo sapiens
  siRNA target sequence for CAP350 (NM_014810.2,6484-6502).
ccgagcttagccaagattt

SEQ ID NO: 344077 - DNA, 19 bp, Homo sapiens
  siRNA target sequence for CAP350 (NM_014810.2,6494-6512).
ccaagatttggaaacatca

SEQ ID NO: 344078 - DNA, 19 bp, Homo sapiens
  siRNA target sequence for CAP350 (NM_014810.2,6519-6537).
gccaagcctcagattaaaa

SEQ ID NO: 344079 - DNA, 19 bp, Homo sapiens
  siRNA target sequence for CAP350 (NM_014810.2,6582-6600).
ccactacacagatctgaaa

SEQ ID NO: 344080 - DNA, 19 bp, Homo sapiens
  siRNA target sequence for CAP350 (NM_014810.2,6690-6708).
ggttctgagagatcagtat

SEQ ID NO: 344081 - DNA, 19 bp, Homo sapiens
  siRNA target sequence for CAP350 (NM_014810.2,6752-6770).
ggacagtcgaacagaagat

SEQ ID NO: 344082 - DNA, 19 bp, Homo sapiens
  siRNA target sequence for CAP350 (NM_014810.2,6753-6771).
gacagtcgaacagaagatt

SEQ ID NO: 344083 - DNA, 19 bp, Homo sapiens
  siRNA target sequence for CAP350 (NM_014810.2,6757-6775).
gtcgaacagaagattttca

SEQ ID NO: 344084 - DNA, 19 bp, Homo sapiens
  siRNA target sequence for CAP350 (NM_014810.2,6855-6873).
catcttctcaaagaattaa

SEQ ID NO: 344085 - DNA, 19 bp, Homo sapiens
  siRNA target sequence for CAP350 (NM_014810.2,6867-6885).
gaattaaatgccactagta

SEQ ID NO: 344086 - DNA, 19 bp, Homo sapiens
  siRNA target sequence for CAP350 (NM_014810.2,6877-6895).
ccactagtagaattcttga

SEQ ID NO: 344087 - DNA, 19 bp, Homo sapiens
  siRNA target sequence for CAP350 (NM_014810.2,6906-6924).
ggcaaggttggagaatcta

SEQ ID NO: 344088 - DNA, 19 bp, Homo sapiens
  siRNA target sequence for CAP350 (NM_014810.2,6908-6926).
caaggttggagaatctagt

SEQ ID NO: 344089 - DNA, 19 bp, Homo sapiens
  siRNA target sequence for CAP350 (NM_014810.2,7003-7021).
gtaaatctgatgtcttact

SEQ ID NO: 344090 - DNA, 19 bp, Homo sapiens
  siRNA target sequence for CAP350 (NM_014810.2,7038-7056).
cagggagattcatctgaaa

SEQ ID NO: 344091 - DNA, 19 bp, Homo sapiens
  siRNA target sequence for CAP350 (NM_014810.2,7104-7122).
gacctagttggattagcta

SEQ ID NO: 344092 - DNA, 19 bp, Homo sapiens
  siRNA target sequence for CAP350 (NM_014810.2,7120-7138).
ctattgaaaatctccataa

SEQ ID NO: 344093 - DNA, 19 bp, Homo sapiens
  siRNA target sequence for CAP350 (NM_014810.2,7166-7184).
gtcagatcaagatatgaat

SEQ ID NO: 344094 - DNA, 19 bp, Homo sapiens
  siRNA target sequence for CAP350 (NM_014810.2,7168-7186).
cagatcaagatatgaatca

SEQ ID NO: 344095 - DNA, 19 bp, Homo sapiens
  siRNA target sequence for CAP350 (NM_014810.2,7272-7290).
gctcctaaagagataccat

SEQ ID NO: 344096 - DNA, 19 bp, Homo sapiens
  siRNA target sequence for CAP350 (NM_014810.2,7273-7291).
ctcctaaagagataccata

SEQ ID NO: 344097 - DNA, 19 bp, Homo sapiens
  siRNA target sequence for CAP350 (NM_014810.2,7305-7323).
gaagtgtcttctttcaaga

SEQ ID NO: 344098 - DNA, 19 bp, Homo sapiens
  siRNA target sequence for CAP350 (NM_014810.2,7374-7392).
ctgtcactcaggaaagact

SEQ ID NO: 344099 - DNA, 19 bp, Homo sapiens
  siRNA target sequence for CAP350 (NM_014810.2,7393-7411).
ctcagtcttgcagagataa

SEQ ID NO: 344100 - DNA, 19 bp, Homo sapiens
  siRNA target sequence for CAP350 (NM_014810.2,7440-7458).
ggagccactagctttggta

SEQ ID NO: 344101 - DNA, 19 bp, Homo sapiens
  siRNA target sequence for CAP350 (NM_014810.2,7444-7462).
ccactagctttggtagtaa

SEQ ID NO: 344102 - DNA, 19 bp, Homo sapiens
  siRNA target sequence for CAP350 (NM_014810.2,7445-7463).
cactagctttggtagtaat

SEQ ID NO: 344103 - DNA, 19 bp, Homo sapiens
  siRNA target sequence for CAP350 (NM_014810.2,7447-7465).
ctagctttggtagtaatga

SEQ ID NO: 344104 - DNA, 19 bp, Homo sapiens
  siRNA target sequence for CAP350 (NM_014810.2,7490-7508).
gaaaagcctttctatccat

SEQ ID NO: 344105 - DNA, 19 bp, Homo sapiens
  siRNA target sequence for CAP350 (NM_014810.2,7495-7513).
gcctttctatccatagcaa

SEQ ID NO: 344106 - DNA, 19 bp, Homo sapiens
  siRNA target sequence for CAP350 (NM_014810.2,7496-7514).
cctttctatccatagcaat

SEQ ID NO: 344107 - DNA, 19 bp, Homo sapiens
  siRNA target sequence for CAP350 (NM_014810.2,7501-7519).
ctatccatagcaatgttca

SEQ ID NO: 344108 - DNA, 19 bp, Homo sapiens
  siRNA target sequence for CAP350 (NM_014810.2,7505-7523).
ccatagcaatgttcattct

SEQ ID NO: 344109 - DNA, 19 bp, Homo sapiens
  siRNA target sequence for CAP350 (NM_014810.2,7546-7564).
cccctactgagctgatgaa

SEQ ID NO: 344110 - DNA, 19 bp, Homo sapiens
  siRNA target sequence for CAP350 (NM_014810.2,7547-7565).
ccctactgagctgatgaaa

SEQ ID NO: 344111 - DNA, 19 bp, Homo sapiens
  siRNA target sequence for CAP350 (NM_014810.2,7587-7605).
gagcatgaacagcaagtta

SEQ ID NO: 344112 - DNA, 19 bp, Homo sapiens
  siRNA target sequence for CAP350 (NM_014810.2,7632-7650).
cctactgcagacgagttat

SEQ ID NO: 344113 - DNA, 19 bp, Homo sapiens
  siRNA target sequence for CAP350 (NM_014810.2,7633-7651).
ctactgcagacgagttatt

SEQ ID NO: 344114 - DNA, 19 bp, Homo sapiens
  siRNA target sequence for CAP350 (NM_014810.2,7636-7654).
ctgcagacgagttatttga

SEQ ID NO: 344115 - DNA, 19 bp, Homo sapiens
  siRNA target sequence for CAP350 (NM_014810.2,7638-7656).
gcagacgagttatttgatt

SEQ ID NO: 344116 - DNA, 19 bp, Homo sapiens
  siRNA target sequence for CAP350 (NM_014810.2,7696-7714).
caggaattcttcgattcaa

SEQ ID NO: 344117 - DNA, 19 bp, Homo sapiens
  siRNA target sequence for CAP350 (NM_014810.2,7712-7730).
caaaggtgagactagtttt

SEQ ID NO: 344118 - DNA, 19 bp, Homo sapiens
  siRNA target sequence for CAP350 (NM_014810.2,7716-7734).
ggtgagactagttttgcta

SEQ ID NO: 344119 - DNA, 19 bp, Homo sapiens
  siRNA target sequence for CAP350 (NM_014810.2,7721-7739).
gactagttttgctaaagga

SEQ ID NO: 344120 - DNA, 19 bp, Homo sapiens
  siRNA target sequence for CAP350 (NM_014810.2,7748-7766).
cggagtggagttagataaa

SEQ ID NO: 344121 - DNA, 19 bp, Homo sapiens
  siRNA target sequence for CAP350 (NM_014810.2,7858-7876).
ctcacattccagaaaactt

SEQ ID NO: 344122 - DNA, 19 bp, Homo sapiens
  siRNA target sequence for CAP350 (NM_014810.2,7912-7930).
gttactcagatgaacgata

SEQ ID NO: 344123 - DNA, 19 bp, Homo sapiens
  siRNA target sequence for CAP350 (NM_014810.2,7923-7941).
gaacgatatcagtgctata

SEQ ID NO: 344124 - DNA, 19 bp, Homo sapiens
  siRNA target sequence for CAP350 (NM_014810.2,7927-7945).
gatatcagtgctataatca

SEQ ID NO: 344125 - DNA, 19 bp, Homo sapiens
  siRNA target sequence for CAP350 (NM_014810.2,7936-7954).
gctataatcaagagcaaaa

SEQ ID NO: 344126 - DNA, 19 bp, Homo sapiens
  siRNA target sequence for CAP350 (NM_014810.2,8014-8032).
ccctacctagtgtgaatga

SEQ ID NO: 344127 - DNA, 19 bp, Homo sapiens
  siRNA target sequence for CAP350 (NM_014810.2,8020-8038).
ctagtgtgaatgatataga

SEQ ID NO: 344128 - DNA, 19 bp, Homo sapiens
  siRNA target sequence for CAP350 (NM_014810.2,8031-8049).
gatatagaagcctcagtta

SEQ ID NO: 344129 - DNA, 19 bp, Homo sapiens
  siRNA target sequence for CAP350 (NM_014810.2,8037-8055).
gaagcctcagttaatagaa

SEQ ID NO: 344130 - DNA, 19 bp, Homo sapiens
  siRNA target sequence for CAP350 (NM_014810.2,8040-8058).
gcctcagttaatagaagta

SEQ ID NO: 344131 - DNA, 19 bp, Homo sapiens
  siRNA target sequence for CAP350 (NM_014810.2,8179-8197).
ctgatgccacagaaaaggt

SEQ ID NO: 344132 - DNA, 19 bp, Homo sapiens
  siRNA target sequence for CAP350 (NM_014810.2,8211-8229).
gaagatgacactttagaca

SEQ ID NO: 344133 - DNA, 19 bp, Homo sapiens
  siRNA target sequence for CAP350 (NM_014810.2,8214-8232).
gatgacactttagacaata

SEQ ID NO: 344134 - DNA, 19 bp, Homo sapiens
  siRNA target sequence for CAP350 (NM_014810.2,8298-8316).
gcttcagaaaagctttgta

SEQ ID NO: 344135 - DNA, 19 bp, Homo sapiens
  siRNA target sequence for CAP350 (NM_014810.2,8322-8340).
cttctggatcttttaacaa

SEQ ID NO: 344136 - DNA, 19 bp, Homo sapiens
  siRNA target sequence for CAP350 (NM_014810.2,8422-8440).
gcttactgacagacagttt

SEQ ID NO: 344137 - DNA, 19 bp, Homo sapiens
  siRNA target sequence for CAP350 (NM_014810.2,8459-8477).
ggacacagtcaatcaacta

SEQ ID NO: 344138 - DNA, 19 bp, Homo sapiens
  siRNA target sequence for CAP350 (NM_014810.2,8466-8484).
gtcaatcaactacaacaaa

SEQ ID NO: 344139 - DNA, 19 bp, Homo sapiens
  siRNA target sequence for CAP350 (NM_014810.2,8504-8522).
gaaaatccagcttagcaat

SEQ ID NO: 344140 - DNA, 19 bp, Homo sapiens
  siRNA target sequence for CAP350 (NM_014810.2,8532-8550).
cttggtgatgaccaaaaga

SEQ ID NO: 344141 - DNA, 19 bp, Homo sapiens
  siRNA target sequence for CAP350 (NM_014810.2,8561-8579).
ccaagacctatcccaaaat

SEQ ID NO: 344142 - DNA, 19 bp, Homo sapiens
  siRNA target sequence for CAP350 (NM_014810.2,8585-8603).
ggaacagtcgccaagtatt

SEQ ID NO: 344143 - DNA, 19 bp, Homo sapiens
  siRNA target sequence for CAP350 (NM_014810.2,8674-8692).
gaccggagagcccagtatt

SEQ ID NO: 344144 - DNA, 19 bp, Homo sapiens
  siRNA target sequence for CAP350 (NM_014810.2,8678-8696).
ggagagcccagtatttggt

SEQ ID NO: 344145 - DNA, 19 bp, Homo sapiens
  siRNA target sequence for CAP350 (NM_014810.2,8759-8777).
gagcgcgttaggagatgat

SEQ ID NO: 344146 - DNA, 19 bp, Homo sapiens
  siRNA target sequence for CAP350 (NM_014810.2,8761-8779).
gcgcgttaggagatgatca

SEQ ID NO: 344147 - DNA, 19 bp, Homo sapiens
  siRNA target sequence for CAP350 (NM_014810.2,8762-8780).
cgcgttaggagatgatcaa

SEQ ID NO: 344148 - DNA, 19 bp, Homo sapiens
  siRNA target sequence for CAP350 (NM_014810.2,8764-8782).
cgttaggagatgatcaaga

SEQ ID NO: 344149 - DNA, 19 bp, Homo sapiens
  siRNA target sequence for CAP350 (NM_014810.2,8812-8830).
cttctcacaagatccaaaa

SEQ ID NO: 344150 - DNA, 19 bp, Homo sapiens
  siRNA target sequence for CAP350 (NM_014810.2,8837-8855).
ggcagaagaaaccattgta

SEQ ID NO: 344151 - DNA, 19 bp, Homo sapiens
  siRNA target sequence for CAP350 (NM_014810.2,8859-8877).
ctaatggcagaacctaaaa

SEQ ID NO: 344152 - DNA, 19 bp, Homo sapiens
  siRNA target sequence for CAP350 (NM_014810.2,8989-9007).
gccacgatcttcatagcat

SEQ ID NO: 344153 - DNA, 19 bp, Homo sapiens
  siRNA target sequence for CAP350 (NM_014810.2,9000-9018).
catagcatcagtattccta

SEQ ID NO: 344154 - DNA, 19 bp, Homo sapiens
  siRNA target sequence for CAP350 (NM_014810.2,9026-9044).
gcttggctgtgccagtaaa

SEQ ID NO: 344155 - DNA, 19 bp, Homo sapiens
  siRNA target sequence for CAP350 (NM_014810.2,9038-9056).
cagtaaaggtctagatata

SEQ ID NO: 344156 - DNA, 19 bp, Homo sapiens
  siRNA target sequence for CAP350 (NM_014810.2,9040-9058).
gtaaaggtctagatataga

SEQ ID NO: 344157 - DNA, 19 bp, Homo sapiens
  siRNA target sequence for CAP350 (NM_014810.2,9051-9069).
gatatagaaagcactagta

SEQ ID NO: 344158 - DNA, 19 bp, Homo sapiens
  siRNA target sequence for CAP350 (NM_014810.2,9067-9085).
gtaaaagggtctacaaaca

SEQ ID NO: 344159 - DNA, 19 bp, Homo sapiens
  siRNA target sequence for CAP350 (NM_014810.2,9077-9095).
ctacaaacaggcggttttt

SEQ ID NO: 344160 - DNA, 19 bp, Homo sapiens
  siRNA target sequence for CAP350 (NM_014810.2,9080-9098).
caaacaggcggtttttgat

SEQ ID NO: 344161 - DNA, 19 bp, Homo sapiens
  siRNA target sequence for CAP350 (NM_014810.2,9086-9104).
ggcggtttttgatttaaca

SEQ ID NO: 344162 - DNA, 19 bp, Homo sapiens
  siRNA target sequence for CAP350 (NM_014810.2,9087-9105).
gcggtttttgatttaacaa

SEQ ID NO: 344163 - DNA, 19 bp, Homo sapiens
  siRNA target sequence for CAP350 (NM_014810.2,9160-9178).
ggatgaagccatgtagaat

SEQ ID NO: 344164 - DNA, 19 bp, Homo sapiens
  siRNA target sequence for CAP350 (NM_014810.2,9194-9212).
ccgacgagtgaaaaatcca

SEQ ID NO: 344165 - DNA, 19 bp, Homo sapiens
  siRNA target sequence for CAP350 (NM_014810.2,9233-9251).
gagcttcatagcaagtgaa

SEQ ID NO: 344166 - DNA, 19 bp, Homo sapiens
  siRNA target sequence for CAP350 (NM_014810.2,9244-9262).
caagtgaagtactcaagtt

SEQ ID NO: 344167 - DNA, 19 bp, Homo sapiens
  siRNA target sequence for CAP350 (NM_014810.2,9247-9265).
gtgaagtactcaagttgtt

SEQ ID NO: 344168 - DNA, 19 bp, Homo sapiens
  siRNA target sequence for CAP350 (NM_014810.2,9249-9267).
gaagtactcaagttgttca

SEQ ID NO: 344169 - DNA, 19 bp, Homo sapiens
  siRNA target sequence for CAP350 (NM_014810.2,9334-9352).
gagaccgagtggatcatat

SEQ ID NO: 344170 - DNA, 19 bp, Homo sapiens
  siRNA target sequence for CAP350 (NM_014810.2,9428-9446).
gctagccgacgggatcttt

SEQ ID NO: 344171 - DNA, 19 bp, Homo sapiens
  siRNA target sequence for CAP350 (NM_014810.2,9432-9450).
gccgacgggatctttgaga

SEQ ID NO: 344172 - DNA, 19 bp, Homo sapiens
  siRNA target sequence for CAP350 (NM_014810.2,9449-9467).
gaccctgatcaaagatact

SEQ ID NO: 344173 - DNA, 19 bp, Homo sapiens
  siRNA target sequence for CAP350 (NM_014810.2,9451-9469).
ccctgatcaaagatactat

SEQ ID NO: 344174 - DNA, 19 bp, Homo sapiens
  siRNA target sequence for CAP350 (NM_014810.2,9452-9470).
cctgatcaaagatactatt

SEQ ID NO: 344175 - DNA, 19 bp, Homo sapiens
  siRNA target sequence for CAP350 (NM_014810.2,9455-9473).
gatcaaagatactattgat

SEQ ID NO: 344176 - DNA, 19 bp, Homo sapiens
  siRNA target sequence for CAP350 (NM_014810.2,9458-9476).
caaagatactattgatgtt

SEQ ID NO: 344177 - DNA, 19 bp, Homo sapiens
  siRNA target sequence for CAP350 (NM_014810.2,9466-9484).
ctattgatgttctgaatca

SEQ ID NO: 344178 - DNA, 19 bp, Homo sapiens
  siRNA target sequence for KIAA0649 (NM_014811.1,577-595).
gttgctctccagtccaaat

SEQ ID NO: 344179 - DNA, 19 bp, Homo sapiens
  siRNA target sequence for KIAA0649 (NM_014811.1,685-703).
cgggtgcagatgcttatca

SEQ ID NO: 344180 - DNA, 19 bp, Homo sapiens
  siRNA target sequence for KIAA0649 (NM_014811.1,1325-1343).
ccgccaagtcactcttgaa

SEQ ID NO: 344181 - DNA, 19 bp, Homo sapiens
  siRNA target sequence for KIAA0649 (NM_014811.1,1426-1444).
ccccggttagcgaagatga

SEQ ID NO: 344182 - DNA, 19 bp, Homo sapiens
  siRNA target sequence for KIAA0649 (NM_014811.1,1427-1445).
cccggttagcgaagatgaa

SEQ ID NO: 344183 - DNA, 19 bp, Homo sapiens
  siRNA target sequence for KIAA0649 (NM_014811.1,2231-2249).
ctgcccagggtccactttt

SEQ ID NO: 344184 - DNA, 19 bp, Homo sapiens
  siRNA target sequence for KIAA0649 (NM_014811.1,2360-2378).
catccacgcccaagaaaat

SEQ ID NO: 344185 - DNA, 19 bp, Homo sapiens
  siRNA target sequence for KIAA0649 (NM_014811.1,2564-2582).
ggcgcctagacgagaaaga

SEQ ID NO: 344186 - DNA, 19 bp, Homo sapiens
  siRNA target sequence for KIAA0649 (NM_014811.1,2566-2584).
cgcctagacgagaaagaga

SEQ ID NO: 344187 - DNA, 19 bp, Homo sapiens
  siRNA target sequence for KIAA0649 (NM_014811.1,2635-2653).
gccatcaaggacttgttaa

SEQ ID NO: 344188 - DNA, 19 bp, Homo sapiens
  siRNA target sequence for KIAA0649 (NM_014811.1,2726-2744).
cagcccagacgcacttctt

SEQ ID NO: 344189 - DNA, 19 bp, Homo sapiens
  siRNA target sequence for KIAA0649 (NM_014811.1,2959-2977).
gcctccgaagggaatccat

SEQ ID NO: 344190 - DNA, 19 bp, Homo sapiens
  siRNA target sequence for KIAA0649 (NM_014811.1,2960-2978).
cctccgaagggaatccatt

SEQ ID NO: 344191 - DNA, 19 bp, Homo sapiens
  siRNA target sequence for KIAA0649 (NM_014811.1,3102-3120).
gtcagtgagcagttcagaa

SEQ ID NO: 344192 - DNA, 19 bp, Homo sapiens
  siRNA target sequence for KIAA0649 (NM_014811.1,3410-3428).
gcaggagaaatgtttacgt

SEQ ID NO: 344193 - DNA, 19 bp, Homo sapiens
  siRNA target sequence for KIAA0649 (NM_014811.1,4031-4049).
cgggctcggaggaaagcat

SEQ ID NO: 344194 - DNA, 19 bp, Homo sapiens
  siRNA target sequence for KIAA0649 (NM_014811.1,4032-4050).
gggctcggaggaaagcatt

SEQ ID NO: 344195 - DNA, 19 bp, Homo sapiens
  siRNA target sequence for KIAA0649 (NM_014811.1,4034-4052).
gctcggaggaaagcatttt

SEQ ID NO: 344196 - DNA, 19 bp, Homo sapiens
  siRNA target sequence for KIAA0649 (NM_014811.1,4154-4172).
gcggcagctcagtagtgaa

SEQ ID NO: 344197 - DNA, 19 bp, Homo sapiens
  siRNA target sequence for KAB (NM_014812.1,109-127).
cacgagaaatgatttttgt

SEQ ID NO: 344198 - DNA, 19 bp, Homo sapiens
  siRNA target sequence for KAB (NM_014812.1,177-195).
caacacgctgtcatcaact

SEQ ID NO: 344199 - DNA, 19 bp, Homo sapiens
  siRNA target sequence for KAB (NM_014812.1,202-220).
cgtctacggatgagcattt

SEQ ID NO: 344200 - DNA, 19 bp, Homo sapiens
  siRNA target sequence for KAB (NM_014812.1,203-221).
gtctacggatgagcattta

SEQ ID NO: 344201 - DNA, 19 bp, Homo sapiens
  siRNA target sequence for KAB (NM_014812.1,208-226).
cggatgagcatttagtgaa

SEQ ID NO: 344202 - DNA, 19 bp, Homo sapiens
  siRNA target sequence for KAB (NM_014812.1,213-231).
gagcatttagtgaaggatt

SEQ ID NO: 344203 - DNA, 19 bp, Homo sapiens
  siRNA target sequence for KAB (NM_014812.1,268-286).
ggattccggaacagactta

SEQ ID NO: 344204 - DNA, 19 bp, Homo sapiens
  siRNA target sequence for KAB (NM_014812.1,269-287).
gattccggaacagacttat

SEQ ID NO: 344205 - DNA, 19 bp, Homo sapiens
  siRNA target sequence for KAB (NM_014812.1,273-291).
ccggaacagacttatatca

SEQ ID NO: 344206 - DNA, 19 bp, Homo sapiens
  siRNA target sequence for KAB (NM_014812.1,281-299).
gacttatatcaccttgaaa

SEQ ID NO: 344207 - DNA, 19 bp, Homo sapiens
  siRNA target sequence for KAB (NM_014812.1,314-332).
gagatttggatatgataca

SEQ ID NO: 344208 - DNA, 19 bp, Homo sapiens
  siRNA target sequence for KAB (NM_014812.1,316-334).
gatttggatatgatacaaa

SEQ ID NO: 344209 - DNA, 19 bp, Homo sapiens
  siRNA target sequence for KAB (NM_014812.1,321-339).
ggatatgatacaaatcttt

SEQ ID NO: 344210 - DNA, 19 bp, Homo sapiens
  siRNA target sequence for KAB (NM_014812.1,322-340).
gatatgatacaaatctttt

SEQ ID NO: 344211 - DNA, 19 bp, Homo sapiens
  siRNA target sequence for KAB (NM_014812.1,419-437).
ccaaaaatcttcagaatca

SEQ ID NO: 344212 - DNA, 19 bp, Homo sapiens
  siRNA target sequence for KAB (NM_014812.1,459-477).
gccaaaagcatagattcaa

SEQ ID NO: 344213 - DNA, 19 bp, Homo sapiens
  siRNA target sequence for KAB (NM_014812.1,498-516).
gaagtgcagcacaaaacta

SEQ ID NO: 344214 - DNA, 19 bp, Homo sapiens
  siRNA target sequence for KAB (NM_014812.1,523-541).
cactgaaatccgaggaaaa

SEQ ID NO: 344215 - DNA, 19 bp, Homo sapiens
  siRNA target sequence for KAB (NM_014812.1,563-581).
gccccgtggtactccatta

SEQ ID NO: 344216 - DNA, 19 bp, Homo sapiens
  siRNA target sequence for KAB (NM_014812.1,564-582).
ccccgtggtactccattat

SEQ ID NO: 344217 - DNA, 19 bp, Homo sapiens
  siRNA target sequence for KAB (NM_014812.1,565-583).
cccgtggtactccattata

SEQ ID NO: 344218 - DNA, 19 bp, Homo sapiens
  siRNA target sequence for KAB (NM_014812.1,566-584).
ccgtggtactccattatat

SEQ ID NO: 344219 - DNA, 19 bp, Homo sapiens
  siRNA target sequence for KAB (NM_014812.1,704-722).
gcaagttgaggaacaatct

SEQ ID NO: 344220 - DNA, 19 bp, Homo sapiens
  siRNA target sequence for KAB (NM_014812.1,730-748).
caaatgaagaagtactttt

SEQ ID NO: 344221 - DNA, 19 bp, Homo sapiens
  siRNA target sequence for KAB (NM_014812.1,755-773).
ctgtagggaaccaagttat

SEQ ID NO: 344222 - DNA, 19 bp, Homo sapiens
  siRNA target sequence for KAB (NM_014812.1,761-779).
ggaaccaagttattttgaa

SEQ ID NO: 344223 - DNA, 19 bp, Homo sapiens
  siRNA target sequence for KAB (NM_014812.1,817-835).
cagaaagcactattcatga

SEQ ID NO: 344224 - DNA, 19 bp, Homo sapiens
  siRNA target sequence for KAB (NM_014812.1,854-872).
gccaagttcccatataaca

SEQ ID NO: 344225 - DNA, 19 bp, Homo sapiens
  siRNA target sequence for KAB (NM_014812.1,874-892).
gtgcagggcatgcttcatt

SEQ ID NO: 344226 - DNA, 19 bp, Homo sapiens
  siRNA target sequence for KAB (NM_014812.1,879-897).
gggcatgcttcatttacca

SEQ ID NO: 344227 - DNA, 19 bp, Homo sapiens
  siRNA target sequence for KAB (NM_014812.1,881-899).
gcatgcttcatttaccatt

SEQ ID NO: 344228 - DNA, 19 bp, Homo sapiens
  siRNA target sequence for KAB (NM_014812.1,918-936).
ccagggaaggtaactatta

SEQ ID NO: 344229 - DNA, 19 bp, Homo sapiens
  siRNA target sequence for KAB (NM_014812.1,922-940).
ggaaggtaactattagaga

SEQ ID NO: 344230 - DNA, 19 bp, Homo sapiens
  siRNA target sequence for KAB (NM_014812.1,969-987).
cgccacaagtccaagaagt

SEQ ID NO: 344231 - DNA, 19 bp, Homo sapiens
  siRNA target sequence for KAB (NM_014812.1,986-1004).
gtcttctcctggaactcaa

SEQ ID NO: 344232 - DNA, 19 bp, Homo sapiens
  siRNA target sequence for KAB (NM_014812.1,1005-1023).
gacttgctggggattcaaa

SEQ ID NO: 344233 - DNA, 19 bp, Homo sapiens
  siRNA target sequence for KAB (NM_014812.1,1007-1025).
cttgctggggattcaaaca

SEQ ID NO: 344234 - DNA, 19 bp, Homo sapiens
  siRNA target sequence for KAB (NM_014812.1,1034-1052).
ggcacccgaaaacaaagtt

SEQ ID NO: 344235 - DNA, 19 bp, Homo sapiens
  siRNA target sequence for KAB (NM_014812.1,1054-1072).
ctgactggctagcacaaaa

SEQ ID NO: 344236 - DNA, 19 bp, Homo sapiens
  siRNA target sequence for KAB (NM_014812.1,1056-1074).
gactggctagcacaaaaca

SEQ ID NO: 344237 - DNA, 19 bp, Homo sapiens
  siRNA target sequence for KAB (NM_014812.1,1073-1091).
caaccctcctcaaatgcta

SEQ ID NO: 344238 - DNA, 19 bp, Homo sapiens
  siRNA target sequence for KAB (NM_014812.1,1176-1194).
gatggtacgcaaagtgatt

SEQ ID NO: 344239 - DNA, 19 bp, Homo sapiens
  siRNA target sequence for KAB (NM_014812.1,1180-1198).
gtacgcaaagtgattcaga

SEQ ID NO: 344240 - DNA, 19 bp, Homo sapiens
  siRNA target sequence for KAB (NM_014812.1,1234-1252).
caactcttgaggaacactt

SEQ ID NO: 344241 - DNA, 19 bp, Homo sapiens
  siRNA target sequence for KAB (NM_014812.1,1286-1304).
gaaggtccaggctactgaa

SEQ ID NO: 344242 - DNA, 19 bp, Homo sapiens
  siRNA target sequence for KAB (NM_014812.1,1292-1310).
ccaggctactgaaaagcat

SEQ ID NO: 344243 - DNA, 19 bp, Homo sapiens
  siRNA target sequence for KAB (NM_014812.1,1311-1329).
caagaccaagctgttacta

SEQ ID NO: 344244 - DNA, 19 bp, Homo sapiens
  siRNA target sequence for KAB (NM_014812.1,1394-1412).
ggagccatcggtgtcaata

SEQ ID NO: 344245 - DNA, 19 bp, Homo sapiens
  siRNA target sequence for KAB (NM_014812.1,1418-1436).
cctacaaactgcattatta

SEQ ID NO: 344246 - DNA, 19 bp, Homo sapiens
  siRNA target sequence for KAB (NM_014812.1,1468-1486).
gccaggagatggataaaat

SEQ ID NO: 344247 - DNA, 19 bp, Homo sapiens
  siRNA target sequence for KAB (NM_014812.1,1509-1527).
gctacttctgaaaaggata

SEQ ID NO: 344248 - DNA, 19 bp, Homo sapiens
  siRNA target sequence for KAB (NM_014812.1,1545-1563).
gacaagggtacttatacca

SEQ ID NO: 344249 - DNA, 19 bp, Homo sapiens
  siRNA target sequence for KAB (NM_014812.1,1547-1565).
caagggtacttataccatt

SEQ ID NO: 344250 - DNA, 19 bp, Homo sapiens
  siRNA target sequence for KAB (NM_014812.1,1555-1573).
cttataccattgagttaga

SEQ ID NO: 344251 - DNA, 19 bp, Homo sapiens
  siRNA target sequence for KAB (NM_014812.1,1622-1640).
gtttggagtagatgacaat

SEQ ID NO: 344252 - DNA, 19 bp, Homo sapiens
  siRNA target sequence for KAB (NM_014812.1,1632-1650).
gatgacaatcaggattata

SEQ ID NO: 344253 - DNA, 19 bp, Homo sapiens
  siRNA target sequence for KAB (NM_014812.1,1635-1653).
gacaatcaggattataata

SEQ ID NO: 344254 - DNA, 19 bp, Homo sapiens
  siRNA target sequence for KAB (NM_014812.1,1654-1672).
ggcctgttatcaacgaaaa

SEQ ID NO: 344255 - DNA, 19 bp, Homo sapiens
  siRNA target sequence for KAB (NM_014812.1,1659-1677).
gttatcaacgaaaaacata

SEQ ID NO: 344256 - DNA, 19 bp, Homo sapiens
  siRNA target sequence for KAB (NM_014812.1,1970-1988).
gagaaggagacgaactctt

SEQ ID NO: 344257 - DNA, 19 bp, Homo sapiens
  siRNA target sequence for KAB (NM_014812.1,2106-2124).
caggtataccagaaagata

SEQ ID NO: 344258 - DNA, 19 bp, Homo sapiens
  siRNA target sequence for KAB (NM_014812.1,2140-2158).
gacccttgagtaaaatgaa

SEQ ID NO: 344259 - DNA, 19 bp, Homo sapiens
  siRNA target sequence for KAB (NM_014812.1,2156-2174).
gaacagggcagtaaatgga

SEQ ID NO: 344260 - DNA, 19 bp, Homo sapiens
  siRNA target sequence for KAB (NM_014812.1,2330-2348).
gacacctactaaattgtct

SEQ ID NO: 344261 - DNA, 19 bp, Homo sapiens
  siRNA target sequence for KAB (NM_014812.1,2534-2552).
ggaatcctccaagtcatta

SEQ ID NO: 344262 - DNA, 19 bp, Homo sapiens
  siRNA target sequence for KAB (NM_014812.1,2562-2580).
gggagcttcactatagaaa

SEQ ID NO: 344263 - DNA, 19 bp, Homo sapiens
  siRNA target sequence for KAB (NM_014812.1,2563-2581).
ggagcttcactatagaaaa

SEQ ID NO: 344264 - DNA, 19 bp, Homo sapiens
  siRNA target sequence for KAB (NM_014812.1,2564-2582).
gagcttcactatagaaaaa

SEQ ID NO: 344265 - DNA, 19 bp, Homo sapiens
  siRNA target sequence for KAB (NM_014812.1,2590-2608).
caaacatacccatagaact

SEQ ID NO: 344266 - DNA, 19 bp, Homo sapiens
  siRNA target sequence for KAB (NM_014812.1,2594-2612).
catacccatagaacttatt

SEQ ID NO: 344267 - DNA, 19 bp, Homo sapiens
  siRNA target sequence for KAB (NM_014812.1,2607-2625).
cttattccccatataaata

SEQ ID NO: 344268 - DNA, 19 bp, Homo sapiens
  siRNA target sequence for KAB (NM_014812.1,2636-2654).
ctctactccttcttcttta

SEQ ID NO: 344269 - DNA, 19 bp, Homo sapiens
  siRNA target sequence for KAB (NM_014812.1,2643-2661).
ccttcttctttagcattaa

SEQ ID NO: 344270 - DNA, 19 bp, Homo sapiens
  siRNA target sequence for KAB (NM_014812.1,2717-2735).
ggacacaacccttattcta

SEQ ID NO: 344271 - DNA, 19 bp, Homo sapiens
  siRNA target sequence for KAB (NM_014812.1,2718-2736).
gacacaacccttattctaa

SEQ ID NO: 344272 - DNA, 19 bp, Homo sapiens
  siRNA target sequence for KAB (NM_014812.1,2749-2767).
cagtaatggcttttctaga

SEQ ID NO: 344273 - DNA, 19 bp, Homo sapiens
  siRNA target sequence for KAB (NM_014812.1,2769-2787).
gctaaactacgtgaagata

SEQ ID NO: 344274 - DNA, 19 bp, Homo sapiens
  siRNA target sequence for KAB (NM_014812.1,2770-2788).
ctaaactacgtgaagataa

SEQ ID NO: 344275 - DNA, 19 bp, Homo sapiens
  siRNA target sequence for KAB (NM_014812.1,2808-2826).
gatactcccagttataata

SEQ ID NO: 344276 - DNA, 19 bp, Homo sapiens
  siRNA target sequence for KAB (NM_014812.1,2926-2944).
gtttcactagcctctataa

SEQ ID NO: 344277 - DNA, 19 bp, Homo sapiens
  siRNA target sequence for KAB (NM_014812.1,3041-3059).
cacagatgtgggttcaaga

SEQ ID NO: 344278 - DNA, 19 bp, Homo sapiens
  siRNA target sequence for KAB (NM_014812.1,3058-3076).
gagcagatggtcgtaaatt

SEQ ID NO: 344279 - DNA, 19 bp, Homo sapiens
  siRNA target sequence for KAB (NM_014812.1,3102-3120).
cagccctcagtagacttaa

SEQ ID NO: 344280 - DNA, 19 bp, Homo sapiens
  siRNA target sequence for KAB (NM_014812.1,3104-3122).
gccctcagtagacttaaca

SEQ ID NO: 344281 - DNA, 19 bp, Homo sapiens
  siRNA target sequence for KAB (NM_014812.1,3150-3168).
cattctgccatctctgata

SEQ ID NO: 344282 - DNA, 19 bp, Homo sapiens
  siRNA target sequence for KAB (NM_014812.1,3154-3172).
ctgccatctctgatattat

SEQ ID NO: 344283 - DNA, 19 bp, Homo sapiens
  siRNA target sequence for KAB (NM_014812.1,3156-3174).
gccatctctgatattatgt

SEQ ID NO: 344284 - DNA, 19 bp, Homo sapiens
  siRNA target sequence for KAB (NM_014812.1,3231-3249).
gctgatgagcatgtacatt

SEQ ID NO: 344285 - DNA, 19 bp, Homo sapiens
  siRNA target sequence for KAB (NM_014812.1,3265-3283).
gtaaagtaacgaaatctaa

SEQ ID NO: 344286 - DNA, 19 bp, Homo sapiens
  siRNA target sequence for KAB (NM_014812.1,3296-3314).
ggtatctggttcatctagt

SEQ ID NO: 344287 - DNA, 19 bp, Homo sapiens
  siRNA target sequence for KAB (NM_014812.1,3297-3315).
gtatctggttcatctagta

SEQ ID NO: 344288 - DNA, 19 bp, Homo sapiens
  siRNA target sequence for KAB (NM_014812.1,3303-3321).
ggttcatctagtaaatcaa

SEQ ID NO: 344289 - DNA, 19 bp, Homo sapiens
  siRNA target sequence for KAB (NM_014812.1,3435-3453).
gtatccacaacaagttcta

SEQ ID NO: 344290 - DNA, 19 bp, Homo sapiens
  siRNA target sequence for KAB (NM_014812.1,3503-3521).
ggctcagcctcgtagaaca

SEQ ID NO: 344291 - DNA, 19 bp, Homo sapiens
  siRNA target sequence for KAB (NM_014812.1,3549-3567).
gactctgaagcaacaattt

SEQ ID NO: 344292 - DNA, 19 bp, Homo sapiens
  siRNA target sequence for KAB (NM_014812.1,3593-3611).
cgcagaagccatcattaga

SEQ ID NO: 344293 - DNA, 19 bp, Homo sapiens
  siRNA target sequence for KAB (NM_014812.1,3622-3640).
gactagtaccatcagataa

SEQ ID NO: 344294 - DNA, 19 bp, Homo sapiens
  siRNA target sequence for KAB (NM_014812.1,3624-3642).
ctagtaccatcagataaat

SEQ ID NO: 344295 - DNA, 19 bp, Homo sapiens
  siRNA target sequence for KAB (NM_014812.1,3652-3670).
gaattagagctaacagtat

SEQ ID NO: 344296 - DNA, 19 bp, Homo sapiens
  siRNA target sequence for KAB (NM_014812.1,3684-3702).
gactccaaggtcaaaagta

SEQ ID NO: 344297 - DNA, 19 bp, Homo sapiens
  siRNA target sequence for KAB (NM_014812.1,3714-3732).
catggctctgcttcagtaa

SEQ ID NO: 344298 - DNA, 19 bp, Homo sapiens
  siRNA target sequence for KAB (NM_014812.1,3743-3761).
gaggcgctttcctactgat

SEQ ID NO: 344299 - DNA, 19 bp, Homo sapiens
  siRNA target sequence for KAB (NM_014812.1,3749-3767).
ctttcctactgattatgct

SEQ ID NO: 344300 - DNA, 19 bp, Homo sapiens
  siRNA target sequence for KAB (NM_014812.1,3797-3815).
ccgtaattcccctaaacat

SEQ ID NO: 344301 - DNA, 19 bp, Homo sapiens
  siRNA target sequence for KAB (NM_014812.1,3798-3816).
cgtaattcccctaaacata

SEQ ID NO: 344302 - DNA, 19 bp, Homo sapiens
  siRNA target sequence for KAB (NM_014812.1,4047-4065).
gcccctagtaccacagtaa

SEQ ID NO: 344303 - DNA, 19 bp, Homo sapiens
  siRNA target sequence for KIAA0644 (NM_014817.1,704-722).
gcctggagagtctagtcaa

SEQ ID NO: 344304 - DNA, 19 bp, Homo sapiens
  siRNA target sequence for KIAA0644 (NM_014817.1,1262-1280).
ccctatccggggacatctt

SEQ ID NO: 344305 - DNA, 19 bp, Homo sapiens
  siRNA target sequence for KIAA0644 (NM_014817.1,1284-1302).
cgccagcccagccctttat

SEQ ID NO: 344306 - DNA, 19 bp, Homo sapiens
  siRNA target sequence for KIAA0644 (NM_014817.1,1430-1448).
ccctgcgaggcaaatacct

SEQ ID NO: 344307 - DNA, 19 bp, Homo sapiens
  siRNA target sequence for KIAA0644 (NM_014817.1,1436-1454).
gaggcaaatacctggatta

SEQ ID NO: 344308 - DNA, 19 bp, Homo sapiens
  siRNA target sequence for KIAA0644 (NM_014817.1,1617-1635).
gcagcaggggcgatttcta

SEQ ID NO: 344309 - DNA, 19 bp, Homo sapiens
  siRNA target sequence for KIAA0644 (NM_014817.1,1976-1994).
ccgacccatgcgacttcaa

SEQ ID NO: 344310 - DNA, 19 bp, Homo sapiens
  siRNA target sequence for KIAA0644 (NM_014817.1,1981-1999).
ccatgcgacttcaacaagt

SEQ ID NO: 344311 - DNA, 19 bp, Homo sapiens
  siRNA target sequence for KIAA0644 (NM_014817.1,2102-2120).
gcttccgcctgctctttga

SEQ ID NO: 344312 - DNA, 19 bp, Homo sapiens
  siRNA target sequence for TBC1D4 (NM_014832.1,708-726).
cacaaggcgcagcatatct

SEQ ID NO: 344313 - DNA, 19 bp, Homo sapiens
  siRNA target sequence for TBC1D4 (NM_014832.1,842-860).
ccaggttcctgatgttatt

SEQ ID NO: 344314 - DNA, 19 bp, Homo sapiens
  siRNA target sequence for TBC1D4 (NM_014832.1,843-861).
caggttcctgatgttatta

SEQ ID NO: 344315 - DNA, 19 bp, Homo sapiens
  siRNA target sequence for TBC1D4 (NM_014832.1,865-883).
gcataaggcaattatctaa

SEQ ID NO: 344316 - DNA, 19 bp, Homo sapiens
  siRNA target sequence for TBC1D4 (NM_014832.1,1425-1443).
caggttgggcgatttgaga

SEQ ID NO: 344317 - DNA, 19 bp, Homo sapiens
  siRNA target sequence for TBC1D4 (NM_014832.1,1428-1446).
gttgggcgatttgagatta

SEQ ID NO: 344318 - DNA, 19 bp, Homo sapiens
  siRNA target sequence for TBC1D4 (NM_014832.1,1432-1450).
ggcgatttgagattaacct

SEQ ID NO: 344319 - DNA, 19 bp, Homo sapiens
  siRNA target sequence for TBC1D4 (NM_014832.1,1433-1451).
gcgatttgagattaacctt

SEQ ID NO: 344320 - DNA, 19 bp, Homo sapiens
  siRNA target sequence for TBC1D4 (NM_014832.1,1434-1452).
cgatttgagattaacctta

SEQ ID NO: 344321 - DNA, 19 bp, Homo sapiens
  siRNA target sequence for TBC1D4 (NM_014832.1,1454-1472).
cagtccagacactaaatca

SEQ ID NO: 344322 - DNA, 19 bp, Homo sapiens
  siRNA target sequence for TBC1D4 (NM_014832.1,1507-1525).
cttgttctcagggtataaa

SEQ ID NO: 344323 - DNA, 19 bp, Homo sapiens
  siRNA target sequence for TBC1D4 (NM_014832.1,1569-1587).
cctggacttagccagtata

SEQ ID NO: 344324 - DNA, 19 bp, Homo sapiens
  siRNA target sequence for TBC1D4 (NM_014832.1,1570-1588).
ctggacttagccagtatat

SEQ ID NO: 344325 - DNA, 19 bp, Homo sapiens
  siRNA target sequence for TBC1D4 (NM_014832.1,1612-1630).
gcgaatctctggttgatga

SEQ ID NO: 344326 - DNA, 19 bp, Homo sapiens
  siRNA target sequence for TBC1D4 (NM_014832.1,1631-1649).
ggtaatgctgactctgaaa

SEQ ID NO: 344327 - DNA, 19 bp, Homo sapiens
  siRNA target sequence for TBC1D4 (NM_014832.1,1681-1699).
gtgccaagacgcagattaa

SEQ ID NO: 344328 - DNA, 19 bp, Homo sapiens
  siRNA target sequence for TBC1D4 (NM_014832.1,1684-1702).
ccaagacgcagattaaact

SEQ ID NO: 344329 - DNA, 19 bp, Homo sapiens
  siRNA target sequence for TBC1D4 (NM_014832.1,1715-1733).
cccgatgcactctttgcat

SEQ ID NO: 344330 - DNA, 19 bp, Homo sapiens
  siRNA target sequence for TBC1D4 (NM_014832.1,1716-1734).
ccgatgcactctttgcata

SEQ ID NO: 344331 - DNA, 19 bp, Homo sapiens
  siRNA target sequence for TBC1D4 (NM_014832.1,1717-1735).
cgatgcactctttgcataa

SEQ ID NO: 344332 - DNA, 19 bp, Homo sapiens
  siRNA target sequence for TBC1D4 (NM_014832.1,1797-1815).
ctctcatcactgacagata

SEQ ID NO: 344333 - DNA, 19 bp, Homo sapiens
  siRNA target sequence for TBC1D4 (NM_014832.1,1821-1839).
caagctgacatctttgaaa

SEQ ID NO: 344334 - DNA, 19 bp, Homo sapiens
  siRNA target sequence for TBC1D4 (NM_014832.1,1825-1843).
ctgacatctttgaaagagt

SEQ ID NO: 344335 - DNA, 19 bp, Homo sapiens
  siRNA target sequence for TBC1D4 (NM_014832.1,1943-1961).
cggggaaggcccttctact

SEQ ID NO: 344336 - DNA, 19 bp, Homo sapiens
  siRNA target sequence for TBC1D4 (NM_014832.1,1944-1962).
ggggaaggcccttctacta

SEQ ID NO: 344337 - DNA, 19 bp, Homo sapiens
  siRNA target sequence for TBC1D4 (NM_014832.1,1946-1964).
ggaaggcccttctactatt

SEQ ID NO: 344338 - DNA, 19 bp, Homo sapiens
  siRNA target sequence for TBC1D4 (NM_014832.1,1947-1965).
gaaggcccttctactattt

SEQ ID NO: 344339 - DNA, 19 bp, Homo sapiens
  siRNA target sequence for TBC1D4 (NM_014832.1,1996-2014).
gcagtggaaggttcaaact

SEQ ID NO: 344340 - DNA, 19 bp, Homo sapiens
  siRNA target sequence for TBC1D4 (NM_014832.1,1997-2015).
cagtggaaggttcaaactt

SEQ ID NO: 344341 - DNA, 19 bp, Homo sapiens
  siRNA target sequence for TBC1D4 (NM_014832.1,1999-2017).
gtggaaggttcaaacttga

SEQ ID NO: 344342 - DNA, 19 bp, Homo sapiens
  siRNA target sequence for TBC1D4 (NM_014832.1,2002-2020).
gaaggttcaaacttgacat

SEQ ID NO: 344343 - DNA, 19 bp, Homo sapiens
  siRNA target sequence for TBC1D4 (NM_014832.1,2034-2052).
gctaagagatccttaacta

SEQ ID NO: 344344 - DNA, 19 bp, Homo sapiens
  siRNA target sequence for TBC1D4 (NM_014832.1,2241-2259).
gactccccgcagtttcgaa

SEQ ID NO: 344345 - DNA, 19 bp, Homo sapiens
  siRNA target sequence for TBC1D4 (NM_014832.1,2392-2410).
cagttcgacgcatgtacaa

SEQ ID NO: 344346 - DNA, 19 bp, Homo sapiens
  siRNA target sequence for TBC1D4 (NM_014832.1,2401-2419).
gcatgtacaaggagagtaa

SEQ ID NO: 344347 - DNA, 19 bp, Homo sapiens
  siRNA target sequence for TBC1D4 (NM_014832.1,2426-2444).
ctccagtcttccaagtctt

SEQ ID NO: 344348 - DNA, 19 bp, Homo sapiens
  siRNA target sequence for TBC1D4 (NM_014832.1,2515-2533).
gactgtccccacagtatga

SEQ ID NO: 344349 - DNA, 19 bp, Homo sapiens
  siRNA target sequence for TBC1D4 (NM_014832.1,2608-2626).
gcaatgagtccctaagtgt

SEQ ID NO: 344350 - DNA, 19 bp, Homo sapiens
  siRNA target sequence for TBC1D4 (NM_014832.1,2659-2677).
cctggcggcagcgcatttt

SEQ ID NO: 344351 - DNA, 19 bp, Homo sapiens
  siRNA target sequence for TBC1D4 (NM_014832.1,2662-2680).
ggcggcagcgcattttcct

SEQ ID NO: 344352 - DNA, 19 bp, Homo sapiens
  siRNA target sequence for TBC1D4 (NM_014832.1,2958-2976).
ctccagtccagaaaagtta

SEQ ID NO: 344353 - DNA, 19 bp, Homo sapiens
  siRNA target sequence for TBC1D4 (NM_014832.1,2965-2983).
ccagaaaagttaaattaga

SEQ ID NO: 344354 - DNA, 19 bp, Homo sapiens
  siRNA target sequence for TBC1D4 (NM_014832.1,3008-3026).
gaaagaggtcttaataact

SEQ ID NO: 344355 - DNA, 19 bp, Homo sapiens
  siRNA target sequence for TBC1D4 (NM_014832.1,3067-3085).
gtgatatggaagatattca

SEQ ID NO: 344356 - DNA, 19 bp, Homo sapiens
  siRNA target sequence for TBC1D4 (NM_014832.1,3078-3096).
gatattcatactcttctta

SEQ ID NO: 344357 - DNA, 19 bp, Homo sapiens
  siRNA target sequence for TBC1D4 (NM_014832.1,3163-3181).
gacacagattgcctaataa

SEQ ID NO: 344358 - DNA, 19 bp, Homo sapiens
  siRNA target sequence for TBC1D4 (NM_014832.1,3188-3206).
gcctcctgacatatcctat

SEQ ID NO: 344359 - DNA, 19 bp, Homo sapiens
  siRNA target sequence for TBC1D4 (NM_014832.1,3189-3207).
cctcctgacatatcctata

SEQ ID NO: 344360 - DNA, 19 bp, Homo sapiens
  siRNA target sequence for TBC1D4 (NM_014832.1,3190-3208).
ctcctgacatatcctataa

SEQ ID NO: 344361 - DNA, 19 bp, Homo sapiens
  siRNA target sequence for TBC1D4 (NM_014832.1,3193-3211).
ctgacatatcctataagga

SEQ ID NO: 344362 - DNA, 19 bp, Homo sapiens
  siRNA target sequence for TBC1D4 (NM_014832.1,3245-3263).
gattctcgtggatttagga

SEQ ID NO: 344363 - DNA, 19 bp, Homo sapiens
  siRNA target sequence for TBC1D4 (NM_014832.1,3309-3327).
ggacagctgtcactgttta

SEQ ID NO: 344364 - DNA, 19 bp, Homo sapiens
  siRNA target sequence for TBC1D4 (NM_014832.1,3329-3347).
cctcctgaaagcctattct

SEQ ID NO: 344365 - DNA, 19 bp, Homo sapiens
  siRNA target sequence for TBC1D4 (NM_014832.1,3494-3512).
gatgtcgctgcagattcaa

SEQ ID NO: 344366 - DNA, 19 bp, Homo sapiens
  siRNA target sequence for TBC1D4 (NM_014832.1,3499-3517).
cgctgcagattcaaatgta

SEQ ID NO: 344367 - DNA, 19 bp, Homo sapiens
  siRNA target sequence for TBC1D4 (NM_014832.1,3527-3545).
caggctccttcatgactat

SEQ ID NO: 344368 - DNA, 19 bp, Homo sapiens
  siRNA target sequence for TBC1D4 (NM_014832.1,3531-3549).
ctccttcatgactatcaca

SEQ ID NO: 344369 - DNA, 19 bp, Homo sapiens
  siRNA target sequence for TBC1D4 (NM_014832.1,3584-3602).
cagccccagtctttatgct

SEQ ID NO: 344370 - DNA, 19 bp, Homo sapiens
  siRNA target sequence for TBC1D4 (NM_014832.1,3724-3742).
gcagccaagagacacttat

SEQ ID NO: 344371 - DNA, 19 bp, Homo sapiens
  siRNA target sequence for TBC1D4 (NM_014832.1,3725-3743).
cagccaagagacacttata

SEQ ID NO: 344372 - DNA, 19 bp, Homo sapiens
  siRNA target sequence for TBC1D4 (NM_014832.1,3746-3764).
ggaatgtgagagctttgaa

SEQ ID NO: 344373 - DNA, 19 bp, Homo sapiens
  siRNA target sequence for TBC1D4 (NM_014832.1,3788-3806).
cacgctacctgatatgaat

SEQ ID NO: 344374 - DNA, 19 bp, Homo sapiens
  siRNA target sequence for TBC1D4 (NM_014832.1,3792-3810).
ctacctgatatgaatacct

SEQ ID NO: 344375 - DNA, 19 bp, Homo sapiens
  siRNA target sequence for TBC1D4 (NM_014832.1,3872-3890).
ctatgaggtggaatatcat

SEQ ID NO: 344376 - DNA, 19 bp, Homo sapiens
  siRNA target sequence for TBC1D4 (NM_014832.1,3909-3927).
caggaatcttcatattcct

SEQ ID NO: 344377 - DNA, 19 bp, Homo sapiens
  siRNA target sequence for TBC1D4 (NM_014832.1,3961-3979).
gggccaatagccaactgaa

SEQ ID NO: 344378 - DNA, 19 bp, Homo sapiens
  siRNA target sequence for TBC1D4 (NM_014832.1,4066-4084).
cgagagagaccaaaatgaa

SEQ ID NO: 344379 - DNA, 19 bp, Homo sapiens
  siRNA target sequence for TBC1D4 (NM_014832.1,4071-4089).
gagaccaaaatgaagtctt

SEQ ID NO: 344380 - DNA, 19 bp, Homo sapiens
  siRNA target sequence for TBC1D4 (NM_014832.1,4094-4112).
ccggaccctggaacaagaa

SEQ ID NO: 344381 - DNA, 19 bp, Homo sapiens
  siRNA target sequence for TBC1D4 (NM_014832.1,4095-4113).
cggaccctggaacaagaaa

SEQ ID NO: 344382 - DNA, 19 bp, Homo sapiens
  siRNA target sequence for C1orf16 (NM_014837.2,192-210).
gctagttaccgatttggaa

SEQ ID NO: 344383 - DNA, 19 bp, Homo sapiens
  siRNA target sequence for C1orf16 (NM_014837.2,213-231).
cgctttagacaagaaagta

SEQ ID NO: 344384 - DNA, 19 bp, Homo sapiens
  siRNA target sequence for C1orf16 (NM_014837.2,245-263).
ggaatcacgcctttaagaa

SEQ ID NO: 344385 - DNA, 19 bp, Homo sapiens
  siRNA target sequence for C1orf16 (NM_014837.2,246-264).
gaatcacgcctttaagaat

SEQ ID NO: 344386 - DNA, 19 bp, Homo sapiens
  siRNA target sequence for C1orf16 (NM_014837.2,250-268).
cacgcctttaagaatcaga

SEQ ID NO: 344387 - DNA, 19 bp, Homo sapiens
  siRNA target sequence for C1orf16 (NM_014837.2,308-326).
cgaatcggagtgaagttca

SEQ ID NO: 344388 - DNA, 19 bp, Homo sapiens
  siRNA target sequence for C1orf16 (NM_014837.2,319-337).
gaagttcaggcaaaccttt

SEQ ID NO: 344389 - DNA, 19 bp, Homo sapiens
  siRNA target sequence for C1orf16 (NM_014837.2,351-369).
ggcagctagtggcttctat

SEQ ID NO: 344390 - DNA, 19 bp, Homo sapiens
  siRNA target sequence for C1orf16 (NM_014837.2,352-370).
gcagctagtggcttctata

SEQ ID NO: 344391 - DNA, 19 bp, Homo sapiens
  siRNA target sequence for C1orf16 (NM_014837.2,356-374).
ctagtggcttctatactca

SEQ ID NO: 344392 - DNA, 19 bp, Homo sapiens
  siRNA target sequence for C1orf16 (NM_014837.2,363-381).
cttctatactcagttatta

SEQ ID NO: 344393 - DNA, 19 bp, Homo sapiens
  siRNA target sequence for C1orf16 (NM_014837.2,366-384).
ctatactcagttattacaa

SEQ ID NO: 344394 - DNA, 19 bp, Homo sapiens
  siRNA target sequence for C1orf16 (NM_014837.2,392-410).
gtacagtatttaatgtaga

SEQ ID NO: 344395 - DNA, 19 bp, Homo sapiens
  siRNA target sequence for C1orf16 (NM_014837.2,431-449).
cttcccaattgggaattat

SEQ ID NO: 344396 - DNA, 19 bp, Homo sapiens
  siRNA target sequence for C1orf16 (NM_014837.2,492-510).
gtctagctcctgttcctat

SEQ ID NO: 344397 - DNA, 19 bp, Homo sapiens
  siRNA target sequence for C1orf16 (NM_014837.2,494-512).
ctagctcctgttcctatat

SEQ ID NO: 344398 - DNA, 19 bp, Homo sapiens
  siRNA target sequence for C1orf16 (NM_014837.2,541-559).
gacattgctcgatacagaa

SEQ ID NO: 344399 - DNA, 19 bp, Homo sapiens
  siRNA target sequence for C1orf16 (NM_014837.2,614-632).
ccaatggtcagccttataa

SEQ ID NO: 344400 - DNA, 19 bp, Homo sapiens
  siRNA target sequence for C1orf16 (NM_014837.2,619-637).
ggtcagccttataatcagt

SEQ ID NO: 344401 - DNA, 19 bp, Homo sapiens
  siRNA target sequence for C1orf16 (NM_014837.2,620-638).
gtcagccttataatcagtt

SEQ ID NO: 344402 - DNA, 19 bp, Homo sapiens
  siRNA target sequence for C1orf16 (NM_014837.2,664-682).
gaccatctgaccacaattt

SEQ ID NO: 344403 - DNA, 19 bp, Homo sapiens
  siRNA target sequence for C1orf16 (NM_014837.2,670-688).
ctgaccacaattttctact

SEQ ID NO: 344404 - DNA, 19 bp, Homo sapiens
  siRNA target sequence for C1orf16 (NM_014837.2,684-702).
ctactactgcagaagcatt

SEQ ID NO: 344405 - DNA, 19 bp, Homo sapiens
  siRNA target sequence for C1orf16 (NM_014837.2,722-740).
cagctgcctccactaatct

SEQ ID NO: 344406 - DNA, 19 bp, Homo sapiens
  siRNA target sequence for C1orf16 (NM_014837.2,773-791).
gagatgaggtgaaaaccaa

SEQ ID NO: 344407 - DNA, 19 bp, Homo sapiens
  siRNA target sequence for C1orf16 (NM_014837.2,870-888).
gagccctcttcgagagaaa

SEQ ID NO: 344408 - DNA, 19 bp, Homo sapiens
  siRNA target sequence for C1orf16 (NM_014837.2,872-890).
gccctcttcgagagaaatt

SEQ ID NO: 344409 - DNA, 19 bp, Homo sapiens
  siRNA target sequence for C1orf16 (NM_014837.2,910-928).
ctgctattccaaaaagctt

SEQ ID NO: 344410 - DNA, 19 bp, Homo sapiens
  siRNA target sequence for C1orf16 (NM_014837.2,935-953).
ctcagcagttagttcatgt

SEQ ID NO: 344411 - DNA, 19 bp, Homo sapiens
  siRNA target sequence for C1orf16 (NM_014837.2,979-997).
catcaccttcgtgacttta

SEQ ID NO: 344412 - DNA, 19 bp, Homo sapiens
  siRNA target sequence for C1orf16 (NM_014837.2,982-1000).
caccttcgtgactttagca

SEQ ID NO: 344413 - DNA, 19 bp, Homo sapiens
  siRNA target sequence for C1orf16 (NM_014837.2,984-1002).
ccttcgtgactttagcaat

SEQ ID NO: 344414 - DNA, 19 bp, Homo sapiens
  siRNA target sequence for C1orf16 (NM_014837.2,1091-1109).
gcaagtgtcctctacagaa

SEQ ID NO: 344415 - DNA, 19 bp, Homo sapiens
  siRNA target sequence for C1orf16 (NM_014837.2,1163-1181).
ccatggactggctaagact

SEQ ID NO: 344416 - DNA, 19 bp, Homo sapiens
  siRNA target sequence for C1orf16 (NM_014837.2,1212-1230).
ggatgaaagacagtacatt

SEQ ID NO: 344417 - DNA, 19 bp, Homo sapiens
  siRNA target sequence for C1orf16 (NM_014837.2,1276-1294).
gaggacctctcaagtatta

SEQ ID NO: 344418 - DNA, 19 bp, Homo sapiens
  siRNA target sequence for C1orf16 (NM_014837.2,1410-1428).
ccagcaacgacgaatacga

SEQ ID NO: 344419 - DNA, 19 bp, Homo sapiens
  siRNA target sequence for C1orf16 (NM_014837.2,1429-1447).
cagcaacgcttgatctcta

SEQ ID NO: 344420 - DNA, 19 bp, Homo sapiens
  siRNA target sequence for C1orf16 (NM_014837.2,1431-1449).
gcaacgcttgatctctata

SEQ ID NO: 344421 - DNA, 19 bp, Homo sapiens
  siRNA target sequence for C1orf16 (NM_014837.2,1451-1469).
gcaaatggattgctgataa

SEQ ID NO: 344422 - DNA, 19 bp, Homo sapiens
  siRNA target sequence for C1orf16 (NM_014837.2,1452-1470).
caaatggattgctgataat

SEQ ID NO: 344423 - DNA, 19 bp, Homo sapiens
  siRNA target sequence for C1orf16 (NM_014837.2,1478-1496).
ggctgattcagtgtgaaaa

SEQ ID NO: 344424 - DNA, 19 bp, Homo sapiens
  siRNA target sequence for C1orf16 (NM_014837.2,1521-1539).
cacagaaatcccagaatta

SEQ ID NO: 344425 - DNA, 19 bp, Homo sapiens
  siRNA target sequence for C1orf16 (NM_014837.2,1575-1593).
cattctgcaagaaacatct

SEQ ID NO: 344426 - DNA, 19 bp, Homo sapiens
  siRNA target sequence for C1orf16 (NM_014837.2,1630-1648).
ctaaaatcagtgctatcta

SEQ ID NO: 344427 - DNA, 19 bp, Homo sapiens
  siRNA target sequence for C1orf16 (NM_014837.2,1642-1660).
ctatctacaagccgaaatt

SEQ ID NO: 344428 - DNA, 19 bp, Homo sapiens
  siRNA target sequence for C1orf16 (NM_014837.2,1654-1672).
cgaaatttaagcaacaact

SEQ ID NO: 344429 - DNA, 19 bp, Homo sapiens
  siRNA target sequence for C1orf16 (NM_014837.2,1689-1707).
gccagtggttaccttcaaa

SEQ ID NO: 344430 - DNA, 19 bp, Homo sapiens
  siRNA target sequence for C1orf16 (NM_014837.2,1776-1794).
ggactatagcaaaggaata

SEQ ID NO: 344431 - DNA, 19 bp, Homo sapiens
  siRNA target sequence for C1orf16 (NM_014837.2,1915-1933).
cagacagaactaagaaaga

SEQ ID NO: 344432 - DNA, 19 bp, Homo sapiens
  siRNA target sequence for C1orf16 (NM_014837.2,1973-1991).
ccccaactcaagcaagtaa

SEQ ID NO: 344433 - DNA, 19 bp, Homo sapiens
  siRNA target sequence for C1orf16 (NM_014837.2,2081-2099).
cgcctgtggcattttctat

SEQ ID NO: 344434 - DNA, 19 bp, Homo sapiens
  siRNA target sequence for C1orf16 (NM_014837.2,2234-2252).
ctggaccagggccaatgaa

SEQ ID NO: 344435 - DNA, 19 bp, Homo sapiens
  siRNA target sequence for C1orf16 (NM_014837.2,2283-2301).
ccagcaaccccttacatct

SEQ ID NO: 344436 - DNA, 19 bp, Homo sapiens
  siRNA target sequence for C1orf16 (NM_014837.2,2340-2358).
gcaggttcaagctctaact

SEQ ID NO: 344437 - DNA, 19 bp, Homo sapiens
  siRNA target sequence for C1orf16 (NM_014837.2,2532-2550).
gacccaagaccccataaaa

SEQ ID NO: 344438 - DNA, 19 bp, Homo sapiens
  siRNA target sequence for C1orf16 (NM_014837.2,2553-2571).
gtttgagccgtcattgcaa

SEQ ID NO: 344439 - DNA, 19 bp, Homo sapiens
  siRNA target sequence for C1orf16 (NM_014837.2,2622-2640).
catggagccatataaccat

SEQ ID NO: 344440 - DNA, 19 bp, Homo sapiens
  siRNA target sequence for C1orf16 (NM_014837.2,2684-2702).
cctacagcatggctgataa

SEQ ID NO: 344441 - DNA, 19 bp, Homo sapiens
  siRNA target sequence for C1orf16 (NM_014837.2,2788-2806).
cccagaatgccgtttgaga

SEQ ID NO: 344442 - DNA, 19 bp, Homo sapiens
  siRNA target sequence for C1orf16 (NM_014837.2,2789-2807).
ccagaatgccgtttgagaa

SEQ ID NO: 344443 - DNA, 19 bp, Homo sapiens
  siRNA target sequence for C1orf16 (NM_014837.2,2796-2814).
gccgtttgagaaatcctta

SEQ ID NO: 344444 - DNA, 19 bp, Homo sapiens
  siRNA target sequence for C1orf16 (NM_014837.2,2797-2815).
ccgtttgagaaatccttat

SEQ ID NO: 344445 - DNA, 19 bp, Homo sapiens
  siRNA target sequence for C1orf16 (NM_014837.2,2798-2816).
cgtttgagaaatccttatt

SEQ ID NO: 344446 - DNA, 19 bp, Homo sapiens
  siRNA target sequence for C1orf16 (NM_014837.2,2859-2877).
gtccctcaccggattctct

SEQ ID NO: 344447 - DNA, 19 bp, Homo sapiens
  siRNA target sequence for C1orf16 (NM_014837.2,2867-2885).
ccggattctctctcaatca

SEQ ID NO: 344448 - DNA, 19 bp, Homo sapiens
  siRNA target sequence for C1orf16 (NM_014837.2,2884-2902).
caggaaagatacccaaata

SEQ ID NO: 344449 - DNA, 19 bp, Homo sapiens
  siRNA target sequence for C1orf16 (NM_014837.2,2891-2909).
gatacccaaataatagtat

SEQ ID NO: 344450 - DNA, 19 bp, Homo sapiens
  siRNA target sequence for C1orf16 (NM_014837.2,2896-2914).
ccaaataatagtatgttca

SEQ ID NO: 344451 - DNA, 19 bp, Homo sapiens
  siRNA target sequence for C1orf16 (NM_014837.2,2906-2924).
gtatgttcaatgaggtata

SEQ ID NO: 344452 - DNA, 19 bp, Homo sapiens
  siRNA target sequence for C1orf16 (NM_014837.2,3037-3055).
gccagttcagatcattcaa

SEQ ID NO: 344453 - DNA, 19 bp, Homo sapiens
  siRNA target sequence for C1orf16 (NM_014837.2,3039-3057).
cagttcagatcattcaaca

SEQ ID NO: 344454 - DNA, 19 bp, Homo sapiens
  siRNA target sequence for C1orf16 (NM_014837.2,3116-3134).
cacacaaccataattctgt

SEQ ID NO: 344455 - DNA, 19 bp, Homo sapiens
  siRNA target sequence for C1orf16 (NM_014837.2,3131-3149).
ctgttccattctccaattt

SEQ ID NO: 344456 - DNA, 19 bp, Homo sapiens
  siRNA target sequence for C1orf16 (NM_014837.2,3155-3173).
ccattgggactccagataa

SEQ ID NO: 344457 - DNA, 19 bp, Homo sapiens
  siRNA target sequence for C1orf16 (NM_014837.2,3193-3211).
gatcggtggaaaactgata

SEQ ID NO: 344458 - DNA, 19 bp, Homo sapiens
  siRNA target sequence for C1orf16 (NM_014837.2,3222-3240).
gggtgggtttggcattgat

SEQ ID NO: 344459 - DNA, 19 bp, Homo sapiens
  siRNA target sequence for C1orf16 (NM_014837.2,3348-3366).
catggaaagcctaaagtct

SEQ ID NO: 344460 - DNA, 19 bp, Homo sapiens
  siRNA target sequence for C1orf16 (NM_014837.2,3352-3370).
gaaagcctaaagtctatct

SEQ ID NO: 344461 - DNA, 19 bp, Homo sapiens
  siRNA target sequence for PRG1 (NM_014839.2,451-469).
cctgtgcactctggattta

SEQ ID NO: 344462 - DNA, 19 bp, Homo sapiens
  siRNA target sequence for PRG1 (NM_014839.2,556-574).
gctggacctgcaattacga

SEQ ID NO: 344463 - DNA, 19 bp, Homo sapiens
  siRNA target sequence for PRG1 (NM_014839.2,559-577).
ggacctgcaattacgatta

SEQ ID NO: 344464 - DNA, 19 bp, Homo sapiens
  siRNA target sequence for PRG1 (NM_014839.2,563-581).
ctgcaattacgattatggt

SEQ ID NO: 344465 - DNA, 19 bp, Homo sapiens
  siRNA target sequence for PRG1 (NM_014839.2,630-648).
cggactagagcccaacatt

SEQ ID NO: 344466 - DNA, 19 bp, Homo sapiens
  siRNA target sequence for PRG1 (NM_014839.2,695-713).
gattcgttggtgttcatgt

SEQ ID NO: 344467 - DNA, 19 bp, Homo sapiens
  siRNA target sequence for PRG1 (NM_014839.2,703-721).
ggtgttcatgtatttggat

SEQ ID NO: 344468 - DNA, 19 bp, Homo sapiens
  siRNA target sequence for PRG1 (NM_014839.2,726-744).
ctctacagctctcattaca

SEQ ID NO: 344469 - DNA, 19 bp, Homo sapiens
  siRNA target sequence for PRG1 (NM_014839.2,731-749).
cagctctcattacagatat

SEQ ID NO: 344470 - DNA, 19 bp, Homo sapiens
  siRNA target sequence for PRG1 (NM_014839.2,733-751).
gctctcattacagatatca

SEQ ID NO: 344471 - DNA, 19 bp, Homo sapiens
  siRNA target sequence for PRG1 (NM_014839.2,734-752).
ctctcattacagatatcat

SEQ ID NO: 344472 - DNA, 19 bp, Homo sapiens
  siRNA target sequence for PRG1 (NM_014839.2,767-785).
gatatcaagcaccttactt

SEQ ID NO: 344473 - DNA, 19 bp, Homo sapiens
  siRNA target sequence for PRG1 (NM_014839.2,903-921).
gtccttcccttctcaacat

SEQ ID NO: 344474 - DNA, 19 bp, Homo sapiens
  siRNA target sequence for PRG1 (NM_014839.2,941-959).
cagctgtgtatgtttcgat

SEQ ID NO: 344475 - DNA, 19 bp, Homo sapiens
  siRNA target sequence for PRG1 (NM_014839.2,1044-1062).
cgggctaacacggataact

SEQ ID NO: 344476 - DNA, 19 bp, Homo sapiens
  siRNA target sequence for PRG1 (NM_014839.2,1046-1064).
ggctaacacggataactca

SEQ ID NO: 344477 - DNA, 19 bp, Homo sapiens
  siRNA target sequence for PRG1 (NM_014839.2,1052-1070).
cacggataactcagtataa

SEQ ID NO: 344478 - DNA, 19 bp, Homo sapiens
  siRNA target sequence for PRG1 (NM_014839.2,1054-1072).
cggataactcagtataaga

SEQ ID NO: 344479 - DNA, 19 bp, Homo sapiens
  siRNA target sequence for PRG1 (NM_014839.2,1055-1073).
ggataactcagtataagaa

SEQ ID NO: 344480 - DNA, 19 bp, Homo sapiens
  siRNA target sequence for PRG1 (NM_014839.2,1074-1092).
ccacccagttgatgtctat

SEQ ID NO: 344481 - DNA, 19 bp, Homo sapiens
  siRNA target sequence for PRG1 (NM_014839.2,1075-1093).
cacccagttgatgtctatt

SEQ ID NO: 344482 - DNA, 19 bp, Homo sapiens
  siRNA target sequence for PRG1 (NM_014839.2,1089-1107).
ctattgtggctttttaata

SEQ ID NO: 344483 - DNA, 19 bp, Homo sapiens
  siRNA target sequence for PRG1 (NM_014839.2,1112-1130).
gaggaattgcactgtactt

SEQ ID NO: 344484 - DNA, 19 bp, Homo sapiens
  siRNA target sequence for PRG1 (NM_014839.2,1163-1181).
gtgatgagagtatgtttca

SEQ ID NO: 344485 - DNA, 19 bp, Homo sapiens
  siRNA target sequence for PRG1 (NM_014839.2,1202-1220).
ctctgacagacctcaatca

SEQ ID NO: 344486 - DNA, 19 bp, Homo sapiens
  siRNA target sequence for PRG1 (NM_014839.2,1222-1240).
gatcccaaccgacttttat

SEQ ID NO: 344487 - DNA, 19 bp, Homo sapiens
  siRNA target sequence for PRG1 (NM_014839.2,1230-1248).
ccgacttttatctgctaaa

SEQ ID NO: 344488 - DNA, 19 bp, Homo sapiens
  siRNA target sequence for PRG1 (NM_014839.2,1313-1331).
ctagctctctgacaaatct

SEQ ID NO: 344489 - DNA, 19 bp, Homo sapiens
  siRNA target sequence for PRG1 (NM_014839.2,1396-1414).
gttaccttcagcaatacct

SEQ ID NO: 344490 - DNA, 19 bp, Homo sapiens
  siRNA target sequence for PRG1 (NM_014839.2,1512-1530).
ccagtggaagaataagaat

SEQ ID NO: 344491 - DNA, 19 bp, Homo sapiens
  siRNA target sequence for PRG1 (NM_014839.2,1542-1560).
gttgtccttgcaagttata

SEQ ID NO: 344492 - DNA, 19 bp, Homo sapiens
  siRNA target sequence for PRG1 (NM_014839.2,1585-1603).
cccagatccatagaaatga

SEQ ID NO: 344493 - DNA, 19 bp, Homo sapiens
  siRNA target sequence for PRG1 (NM_014839.2,1648-1666).
catggtcctggcaatcagt

SEQ ID NO: 344494 - DNA, 19 bp, Homo sapiens
  siRNA target sequence for PRG1 (NM_014839.2,1657-1675).
ggcaatcagtacctcaaaa

SEQ ID NO: 344495 - DNA, 19 bp, Homo sapiens
  siRNA target sequence for PRG1 (NM_014839.2,1658-1676).
gcaatcagtacctcaaaat

SEQ ID NO: 344496 - DNA, 19 bp, Homo sapiens
  siRNA target sequence for PRG1 (NM_014839.2,1690-1708).
gtccccggatgtaacaaca

SEQ ID NO: 344497 - DNA, 19 bp, Homo sapiens
  siRNA target sequence for PRG1 (NM_014839.2,1822-1840).
gctcgggccaagtggttaa

SEQ ID NO: 344498 - DNA, 19 bp, Homo sapiens
  siRNA target sequence for PRG1 (NM_014839.2,1823-1841).
ctcgggccaagtggttaaa

SEQ ID NO: 344499 - DNA, 19 bp, Homo sapiens
  siRNA target sequence for PRG1 (NM_014839.2,1933-1951).
caaagcagccccaagaaca

SEQ ID NO: 344500 - DNA, 19 bp, Homo sapiens
  siRNA target sequence for PRG1 (NM_014839.2,1978-1996).
ggctccatccgctataaaa

SEQ ID NO: 344501 - DNA, 19 bp, Homo sapiens
  siRNA target sequence for PRG1 (NM_014839.2,2049-2067).
gaacaacaggcccatcata

SEQ ID NO: 344502 - DNA, 19 bp, Homo sapiens
  siRNA target sequence for PRG1 (NM_014839.2,2219-2237).
gcaagagaagcaacattga

SEQ ID NO: 344503 - DNA, 19 bp, Homo sapiens
  siRNA target sequence for PRG1 (NM_014839.2,2248-2266).
catcaccaccacggaatta

SEQ ID NO: 344504 - DNA, 19 bp, Homo sapiens
  siRNA target sequence for PRG1 (NM_014839.2,2311-2329).
gagacgctgtccatttctt

SEQ ID NO: 344505 - DNA, 19 bp, Homo sapiens
  siRNA target sequence for PRG1 (NM_014839.2,2354-2372).
gaaagggcaatatcattct

SEQ ID NO: 344506 - DNA, 19 bp, Homo sapiens
  siRNA target sequence for PRG1 (NM_014839.2,2388-2406).
caacagccccgaaaacact

SEQ ID NO: 344507 - DNA, 19 bp, Homo sapiens
  siRNA target sequence for PRG1 (NM_014839.2,2436-2454).
cacacgggcttataaggat

SEQ ID NO: 344508 - DNA, 19 bp, Homo sapiens
  siRNA target sequence for KIAA0329 (NM_014844.1,235-253).
gatatcagagcctgttaca

SEQ ID NO: 344509 - DNA, 19 bp, Homo sapiens
  siRNA target sequence for KIAA0329 (NM_014844.1,260-278).
gagttctgcccgttgtact

SEQ ID NO: 344510 - DNA, 19 bp, Homo sapiens
  siRNA target sequence for KIAA0329 (NM_014844.1,262-280).
gttctgcccgttgtactat

SEQ ID NO: 344511 - DNA, 19 bp, Homo sapiens
  siRNA target sequence for KIAA0329 (NM_014844.1,384-402).
gcatcggcatgctctatct

SEQ ID NO: 344512 - DNA, 19 bp, Homo sapiens
  siRNA target sequence for KIAA0329 (NM_014844.1,448-466).
gaagacggaatctatcact

SEQ ID NO: 344513 - DNA, 19 bp, Homo sapiens
  siRNA target sequence for KIAA0329 (NM_014844.1,592-610).
cactggtattcacaaaaat

SEQ ID NO: 344514 - DNA, 19 bp, Homo sapiens
  siRNA target sequence for KIAA0329 (NM_014844.1,633-651).
gccccaatggaatgaaatt

SEQ ID NO: 344515 - DNA, 19 bp, Homo sapiens
  siRNA target sequence for KIAA0329 (NM_014844.1,635-653).
cccaatggaatgaaattgt

SEQ ID NO: 344516 - DNA, 19 bp, Homo sapiens
  siRNA target sequence for KIAA0329 (NM_014844.1,701-719).
gaccaggggctctgtaact

SEQ ID NO: 344517 - DNA, 19 bp, Homo sapiens
  siRNA target sequence for KIAA0329 (NM_014844.1,747-765).
ccattgtgcagctggatta

SEQ ID NO: 344518 - DNA, 19 bp, Homo sapiens
  siRNA target sequence for KIAA0329 (NM_014844.1,975-993).
ctgttcaagccacgtttat

SEQ ID NO: 344519 - DNA, 19 bp, Homo sapiens
  siRNA target sequence for KIAA0329 (NM_014844.1,977-995).
gttcaagccacgtttatct

SEQ ID NO: 344520 - DNA, 19 bp, Homo sapiens
  siRNA target sequence for KIAA0329 (NM_014844.1,1090-1108).
cctggggcttgtttcatgt

SEQ ID NO: 344521 - DNA, 19 bp, Homo sapiens
  siRNA target sequence for KIAA0329 (NM_014844.1,1126-1144).
ggtgctgagttggaatgaa

SEQ ID NO: 344522 - DNA, 19 bp, Homo sapiens
  siRNA target sequence for KIAA0329 (NM_014844.1,1132-1150).
gagttggaatgaatatagt

SEQ ID NO: 344523 - DNA, 19 bp, Homo sapiens
  siRNA target sequence for KIAA0329 (NM_014844.1,1137-1155).
ggaatgaatatagtatcta

SEQ ID NO: 344524 - DNA, 19 bp, Homo sapiens
  siRNA target sequence for KIAA0329 (NM_014844.1,1138-1156).
gaatgaatatagtatctat

SEQ ID NO: 344525 - DNA, 19 bp, Homo sapiens
  siRNA target sequence for KIAA0329 (NM_014844.1,1199-1217).
ggatccggtgatattgtgt

SEQ ID NO: 344526 - DNA, 19 bp, Homo sapiens
  siRNA target sequence for KIAA0329 (NM_014844.1,1218-1236).
ctgtttcgtgcacagaaaa

SEQ ID NO: 344527 - DNA, 19 bp, Homo sapiens
  siRNA target sequence for KIAA0329 (NM_014844.1,1224-1242).
cgtgcacagaaaatgaaat

SEQ ID NO: 344528 - DNA, 19 bp, Homo sapiens
  siRNA target sequence for KIAA0329 (NM_014844.1,1256-1274).
ggagataggaacattataa

SEQ ID NO: 344529 - DNA, 19 bp, Homo sapiens
  siRNA target sequence for KIAA0329 (NM_014844.1,1259-1277).
gataggaacattataagaa

SEQ ID NO: 344530 - DNA, 19 bp, Homo sapiens
  siRNA target sequence for KIAA0329 (NM_014844.1,1288-1306).
gcctgaaggattaacatca

SEQ ID NO: 344531 - DNA, 19 bp, Homo sapiens
  siRNA target sequence for KIAA0329 (NM_014844.1,1373-1391).
ctgccaggggccacagttt

SEQ ID NO: 344532 - DNA, 19 bp, Homo sapiens
  siRNA target sequence for KIAA0329 (NM_014844.1,1684-1702).
gacaccctgctccgaattt

SEQ ID NO: 344533 - DNA, 19 bp, Homo sapiens
  siRNA target sequence for KIAA0329 (NM_014844.1,1764-1782).
gcagtagcgtggatcagtt

SEQ ID NO: 344534 - DNA, 19 bp, Homo sapiens
  siRNA target sequence for KIAA0329 (NM_014844.1,1765-1783).
cagtagcgtggatcagtta

SEQ ID NO: 344535 - DNA, 19 bp, Homo sapiens
  siRNA target sequence for KIAA0329 (NM_014844.1,1831-1849).
cggtgtcccacaggaaaat

SEQ ID NO: 344536 - DNA, 19 bp, Homo sapiens
  siRNA target sequence for KIAA0329 (NM_014844.1,1851-1869).
ctgaccccgaaacgtttaa

SEQ ID NO: 344537 - DNA, 19 bp, Homo sapiens
  siRNA target sequence for KIAA0329 (NM_014844.1,2026-2044).
gccgtgtcctgcagatgat

SEQ ID NO: 344538 - DNA, 19 bp, Homo sapiens
  siRNA target sequence for KIAA0329 (NM_014844.1,2298-2316).
gccacctcagcacaaatct

SEQ ID NO: 344539 - DNA, 19 bp, Homo sapiens
  siRNA target sequence for KIAA0329 (NM_014844.1,2300-2318).
cacctcagcacaaatctct

SEQ ID NO: 344540 - DNA, 19 bp, Homo sapiens
  siRNA target sequence for KIAA0329 (NM_014844.1,2454-2472).
ctccacgggatcagacatt

SEQ ID NO: 344541 - DNA, 19 bp, Homo sapiens
  siRNA target sequence for KIAA0329 (NM_014844.1,2456-2474).
ccacgggatcagacattga

SEQ ID NO: 344542 - DNA, 19 bp, Homo sapiens
  siRNA target sequence for KIAA0329 (NM_014844.1,2504-2522).
cacgggcttccttcttcat

SEQ ID NO: 344543 - DNA, 19 bp, Homo sapiens
  siRNA target sequence for KIAA0329 (NM_014844.1,2605-2623).
gctcaagccagatcagttt

SEQ ID NO: 344544 - DNA, 19 bp, Homo sapiens
  siRNA target sequence for KIAA0329 (NM_014844.1,2675-2693).
gtggtctccgagaagtata

SEQ ID NO: 344545 - DNA, 19 bp, Homo sapiens
  siRNA target sequence for KIAA0329 (NM_014844.1,2678-2696).
gtctccgagaagtatatct

SEQ ID NO: 344546 - DNA, 19 bp, Homo sapiens
  siRNA target sequence for KIAA0329 (NM_014844.1,2815-2833).
ctggaagattgaacagaaa

SEQ ID NO: 344547 - DNA, 19 bp, Homo sapiens
  siRNA target sequence for KIAA0329 (NM_014844.1,2949-2967).
ggaccagtggggacctata

SEQ ID NO: 344548 - DNA, 19 bp, Homo sapiens
  siRNA target sequence for KIAA0329 (NM_014844.1,3000-3018).
gtgccagagccgtaaaggt

SEQ ID NO: 344549 - DNA, 19 bp, Homo sapiens
  siRNA target sequence for KIAA0329 (NM_014844.1,3157-3175).
cagcgaaaggcaagcttta

SEQ ID NO: 344550 - DNA, 19 bp, Homo sapiens
  siRNA target sequence for KIAA0329 (NM_014844.1,3244-3262).
gttcagaactggcattatt

SEQ ID NO: 344551 - DNA, 19 bp, Homo sapiens
  siRNA target sequence for KIAA0329 (NM_014844.1,3419-3437).
ctgcgcatggcgttttggt

SEQ ID NO: 344552 - DNA, 19 bp, Homo sapiens
  siRNA target sequence for KIAA0329 (NM_014844.1,3493-3511).
gatctcctcgggcaagaat

SEQ ID NO: 344553 - DNA, 19 bp, Homo sapiens
  siRNA target sequence for KIAA0329 (NM_014844.1,3498-3516).
cctcgggcaagaatgaatt

SEQ ID NO: 344554 - DNA, 19 bp, Homo sapiens
  siRNA target sequence for KIAA0329 (NM_014844.1,3501-3519).
cgggcaagaatgaattcca

SEQ ID NO: 344555 - DNA, 19 bp, Homo sapiens
  siRNA target sequence for KIAA0329 (NM_014844.1,3523-3541).
cgctaagggaagtctcata

SEQ ID NO: 344556 - DNA, 19 bp, Homo sapiens
  siRNA target sequence for KIAA0329 (NM_014844.1,3588-3606).
caaaatgggcctttgtgtt

SEQ ID NO: 344557 - DNA, 19 bp, Homo sapiens
  siRNA target sequence for KIAA0329 (NM_014844.1,3858-3876).
cccagctaggagctgtaaa

SEQ ID NO: 344558 - DNA, 19 bp, Homo sapiens
  siRNA target sequence for KIAA0329 (NM_014844.1,3859-3877).
ccagctaggagctgtaaaa

SEQ ID NO: 344559 - DNA, 19 bp, Homo sapiens
  siRNA target sequence for KIAA0329 (NM_014844.1,3860-3878).
cagctaggagctgtaaaat

SEQ ID NO: 344560 - DNA, 19 bp, Homo sapiens
  siRNA target sequence for KIAA0329 (NM_014844.1,3924-3942).
ccaggggtggagtttactt

SEQ ID NO: 344561 - DNA, 19 bp, Homo sapiens
  siRNA target sequence for KIAA0329 (NM_014844.1,4286-4304).
ggcagcgtgtcgtgtttca

SEQ ID NO: 344562 - DNA, 19 bp, Homo sapiens
  siRNA target sequence for KIAA0274 (NM_014845.4,226-244).
gagactagagctagatact

SEQ ID NO: 344563 - DNA, 19 bp, Homo sapiens
  siRNA target sequence for KIAA0274 (NM_014845.4,228-246).
gactagagctagatacttt

SEQ ID NO: 344564 - DNA, 19 bp, Homo sapiens
  siRNA target sequence for KIAA0274 (NM_014845.4,230-248).
ctagagctagatactttct

SEQ ID NO: 344565 - DNA, 19 bp, Homo sapiens
  siRNA target sequence for KIAA0274 (NM_014845.4,233-251).
gagctagatactttctagt

SEQ ID NO: 344566 - DNA, 19 bp, Homo sapiens
  siRNA target sequence for KIAA0274 (NM_014845.4,257-275).
gcaataatgcagaaacgaa

SEQ ID NO: 344567 - DNA, 19 bp, Homo sapiens
  siRNA target sequence for KIAA0274 (NM_014845.4,258-276).
caataatgcagaaacgaaa

SEQ ID NO: 344568 - DNA, 19 bp, Homo sapiens
  siRNA target sequence for KIAA0274 (NM_014845.4,280-298).
cgtgtcttgaagattgata

SEQ ID NO: 344569 - DNA, 19 bp, Homo sapiens
  siRNA target sequence for KIAA0274 (NM_014845.4,374-392).
gccgcttggatcttggaaa

SEQ ID NO: 344570 - DNA, 19 bp, Homo sapiens
  siRNA target sequence for KIAA0274 (NM_014845.4,375-393).
ccgcttggatcttggaaat

SEQ ID NO: 344571 - DNA, 19 bp, Homo sapiens
  siRNA target sequence for KIAA0274 (NM_014845.4,381-399).
ggatcttggaaatagaaca

SEQ ID NO: 344572 - DNA, 19 bp, Homo sapiens
  siRNA target sequence for KIAA0274 (NM_014845.4,459-477).
gggttttgtcaggttctta

SEQ ID NO: 344573 - DNA, 19 bp, Homo sapiens
  siRNA target sequence for KIAA0274 (NM_014845.4,461-479).
gttttgtcaggttcttaga

SEQ ID NO: 344574 - DNA, 19 bp, Homo sapiens
  siRNA target sequence for KIAA0274 (NM_014845.4,471-489).
gttcttagaaggctattat

SEQ ID NO: 344575 - DNA, 19 bp, Homo sapiens
  siRNA target sequence for KIAA0274 (NM_014845.4,474-492).
cttagaaggctattatatt

SEQ ID NO: 344576 - DNA, 19 bp, Homo sapiens
  siRNA target sequence for KIAA0274 (NM_014845.4,513-531).
gaagatggcggatattgga

SEQ ID NO: 344577 - DNA, 19 bp, Homo sapiens
  siRNA target sequence for KIAA0274 (NM_014845.4,543-561).
ctataaggtcgaagataca

SEQ ID NO: 344578 - DNA, 19 bp, Homo sapiens
  siRNA target sequence for KIAA0274 (NM_014845.4,594-612).
ggttactcatcctgatgaa

SEQ ID NO: 344579 - DNA, 19 bp, Homo sapiens
  siRNA target sequence for KIAA0274 (NM_014845.4,613-631).
gctaggtatctacgaatat

SEQ ID NO: 344580 - DNA, 19 bp, Homo sapiens
  siRNA target sequence for KIAA0274 (NM_014845.4,614-632).
ctaggtatctacgaatatt

SEQ ID NO: 344581 - DNA, 19 bp, Homo sapiens
  siRNA target sequence for KIAA0274 (NM_014845.4,617-635).
ggtatctacgaatatttca

SEQ ID NO: 344582 - DNA, 19 bp, Homo sapiens
  siRNA target sequence for KIAA0274 (NM_014845.4,640-658).
gtggacctatctagcaatt

SEQ ID NO: 344583 - DNA, 19 bp, Homo sapiens
  siRNA target sequence for KIAA0274 (NM_014845.4,643-661).
gacctatctagcaattttt

SEQ ID NO: 344584 - DNA, 19 bp, Homo sapiens
  siRNA target sequence for KIAA0274 (NM_014845.4,646-664).
ctatctagcaatttttact

SEQ ID NO: 344585 - DNA, 19 bp, Homo sapiens
  siRNA target sequence for KIAA0274 (NM_014845.4,686-704).
cccactcacttcaatataa

SEQ ID NO: 344586 - DNA, 19 bp, Homo sapiens
  siRNA target sequence for KIAA0274 (NM_014845.4,726-744).
cctggagatgttaaagtca

SEQ ID NO: 344587 - DNA, 19 bp, Homo sapiens
  siRNA target sequence for KIAA0274 (NM_014845.4,760-778).
cgccaagagagctttgaca

SEQ ID NO: 344588 - DNA, 19 bp, Homo sapiens
  siRNA target sequence for KIAA0274 (NM_014845.4,833-851).
gtagtgagccttatatgaa

SEQ ID NO: 344589 - DNA, 19 bp, Homo sapiens
  siRNA target sequence for KIAA0274 (NM_014845.4,865-883).
ggtgaacttctggatataa

SEQ ID NO: 344590 - DNA, 19 bp, Homo sapiens
  siRNA target sequence for KIAA0274 (NM_014845.4,868-886).
gaacttctggatataatta

SEQ ID NO: 344591 - DNA, 19 bp, Homo sapiens
  siRNA target sequence for KIAA0274 (NM_014845.4,876-894).
ggatataattaaaagtact

SEQ ID NO: 344592 - DNA, 19 bp, Homo sapiens
  siRNA target sequence for KIAA0274 (NM_014845.4,898-916).
catcgtgactggcttttgt

SEQ ID NO: 344593 - DNA, 19 bp, Homo sapiens
  siRNA target sequence for KIAA0274 (NM_014845.4,901-919).
cgtgactggcttttgtata

SEQ ID NO: 344594 - DNA, 19 bp, Homo sapiens
  siRNA target sequence for KIAA0274 (NM_014845.4,929-947).
ggttctgtgggcagtcaaa

SEQ ID NO: 344595 - DNA, 19 bp, Homo sapiens
  siRNA target sequence for KIAA0274 (NM_014845.4,961-979).
ggacgaccagtgtatgtca

SEQ ID NO: 344596 - DNA, 19 bp, Homo sapiens
  siRNA target sequence for KIAA0274 (NM_014845.4,967-985).
ccagtgtatgtcactctaa

SEQ ID NO: 344597 - DNA, 19 bp, Homo sapiens
  siRNA target sequence for KIAA0274 (NM_014845.4,968-986).
cagtgtatgtcactctaat

SEQ ID NO: 344598 - DNA, 19 bp, Homo sapiens
  siRNA target sequence for KIAA0274 (NM_014845.4,972-990).
gtatgtcactctaatagct

SEQ ID NO: 344599 - DNA, 19 bp, Homo sapiens
  siRNA target sequence for KIAA0274 (NM_014845.4,978-996).
cactctaatagctagaaga

SEQ ID NO: 344600 - DNA, 19 bp, Homo sapiens
  siRNA target sequence for KIAA0274 (NM_014845.4,1171-1189).
caggacatttcaactatga

SEQ ID NO: 344601 - DNA, 19 bp, Homo sapiens
  siRNA target sequence for KIAA0274 (NM_014845.4,1188-1206).
gatgcctaaaccacctatt

SEQ ID NO: 344602 - DNA, 19 bp, Homo sapiens
  siRNA target sequence for KIAA0274 (NM_014845.4,1191-1209).
gcctaaaccacctattaca

SEQ ID NO: 344603 - DNA, 19 bp, Homo sapiens
  siRNA target sequence for KIAA0274 (NM_014845.4,1192-1210).
cctaaaccacctattacat

SEQ ID NO: 344604 - DNA, 19 bp, Homo sapiens
  siRNA target sequence for KIAA0274 (NM_014845.4,1193-1211).
ctaaaccacctattacatt

SEQ ID NO: 344605 - DNA, 19 bp, Homo sapiens
  siRNA target sequence for KIAA0274 (NM_014845.4,1357-1375).
gctgctgtgacctatctca

SEQ ID NO: 344606 - DNA, 19 bp, Homo sapiens
  siRNA target sequence for KIAA0274 (NM_014845.4,1363-1381).
gtgacctatctcaaccaat

SEQ ID NO: 344607 - DNA, 19 bp, Homo sapiens
  siRNA target sequence for KIAA0274 (NM_014845.4,1388-1406).
ctcctgagcacactattgt

SEQ ID NO: 344608 - DNA, 19 bp, Homo sapiens
  siRNA target sequence for KIAA0274 (NM_014845.4,1391-1409).
ctgagcacactattgttta

SEQ ID NO: 344609 - DNA, 19 bp, Homo sapiens
  siRNA target sequence for KIAA0274 (NM_014845.4,1393-1411).
gagcacactattgtttata

SEQ ID NO: 344610 - DNA, 19 bp, Homo sapiens
  siRNA target sequence for KIAA0274 (NM_014845.4,1395-1413).
gcacactattgtttatatt

SEQ ID NO: 344611 - DNA, 19 bp, Homo sapiens
  siRNA target sequence for KIAA0274 (NM_014845.4,1426-1444).
gccaagtataccaaaagca

SEQ ID NO: 344612 - DNA, 19 bp, Homo sapiens
  siRNA target sequence for KIAA0274 (NM_014845.4,1442-1460).
gcaagctgtgtaatgttct

SEQ ID NO: 344613 - DNA, 19 bp, Homo sapiens
  siRNA target sequence for KIAA0274 (NM_014845.4,1513-1531).
gtaaaccgccctgattctt

SEQ ID NO: 344614 - DNA, 19 bp, Homo sapiens
  siRNA target sequence for KIAA0274 (NM_014845.4,1649-1667).
ccaacacagcacagtttat

SEQ ID NO: 344615 - DNA, 19 bp, Homo sapiens
  siRNA target sequence for KIAA0274 (NM_014845.4,1686-1704).
ggcctatcagctgtattca

SEQ ID NO: 344616 - DNA, 19 bp, Homo sapiens
  siRNA target sequence for KIAA0274 (NM_014845.4,1713-1731).
gattgacaaacctaatcta

SEQ ID NO: 344617 - DNA, 19 bp, Homo sapiens
  siRNA target sequence for KIAA0274 (NM_014845.4,1723-1741).
cctaatctacagtttgata

SEQ ID NO: 344618 - DNA, 19 bp, Homo sapiens
  siRNA target sequence for KIAA0274 (NM_014845.4,1754-1772).
ggttatttgaggaactcta

SEQ ID NO: 344619 - DNA, 19 bp, Homo sapiens
  siRNA target sequence for KIAA0274 (NM_014845.4,1755-1773).
gttatttgaggaactctat

SEQ ID NO: 344620 - DNA, 19 bp, Homo sapiens
  siRNA target sequence for KIAA0274 (NM_014845.4,1803-1821).
gtatggtggttctcaactt

SEQ ID NO: 344621 - DNA, 19 bp, Homo sapiens
  siRNA target sequence for KIAA0274 (NM_014845.4,1822-1840).
gttcatcgtgtgaaaacct

SEQ ID NO: 344622 - DNA, 19 bp, Homo sapiens
  siRNA target sequence for KIAA0274 (NM_014845.4,1884-1902).
gcaaaccctgtctagatat

SEQ ID NO: 344623 - DNA, 19 bp, Homo sapiens
  siRNA target sequence for KIAA0274 (NM_014845.4,1885-1903).
caaaccctgtctagatatt

SEQ ID NO: 344624 - DNA, 19 bp, Homo sapiens
  siRNA target sequence for KIAA0274 (NM_014845.4,1921-1939).
gatgccgatagacaagatt

SEQ ID NO: 344625 - DNA, 19 bp, Homo sapiens
  siRNA target sequence for KIAA0274 (NM_014845.4,1925-1943).
ccgatagacaagattccat

SEQ ID NO: 344626 - DNA, 19 bp, Homo sapiens
  siRNA target sequence for KIAA0274 (NM_014845.4,1926-1944).
cgatagacaagattccatt

SEQ ID NO: 344627 - DNA, 19 bp, Homo sapiens
  siRNA target sequence for KIAA0274 (NM_014845.4,1931-1949).
gacaagattccattaatct

SEQ ID NO: 344628 - DNA, 19 bp, Homo sapiens
  siRNA target sequence for KIAA0274 (NM_014845.4,1994-2012).
gggagctcccaacagattt

SEQ ID NO: 344629 - DNA, 19 bp, Homo sapiens
  siRNA target sequence for KIAA0274 (NM_014845.4,1995-2013).
ggagctcccaacagatttt

SEQ ID NO: 344630 - DNA, 19 bp, Homo sapiens
  siRNA target sequence for KIAA0274 (NM_014845.4,1996-2014).
gagctcccaacagattttt

SEQ ID NO: 344631 - DNA, 19 bp, Homo sapiens
  siRNA target sequence for KIAA0274 (NM_014845.4,2047-2065).
ccaacaagaagaagttata

SEQ ID NO: 344632 - DNA, 19 bp, Homo sapiens
  siRNA target sequence for KIAA0274 (NM_014845.4,2051-2069).
caagaagaagttatactta

SEQ ID NO: 344633 - DNA, 19 bp, Homo sapiens
  siRNA target sequence for KIAA0274 (NM_014845.4,2075-2093).
ggacaccagaggtgataaa

SEQ ID NO: 344634 - DNA, 19 bp, Homo sapiens
  siRNA target sequence for KIAA0274 (NM_014845.4,2086-2104).
gtgataaagcatttaccat

SEQ ID NO: 344635 - DNA, 19 bp, Homo sapiens
  siRNA target sequence for KIAA0274 (NM_014845.4,2102-2120).
cattgccctatgatgaagt

SEQ ID NO: 344636 - DNA, 19 bp, Homo sapiens
  siRNA target sequence for KIAA0274 (NM_014845.4,2222-2240).
gcagctttgatgatacctt

SEQ ID NO: 344637 - DNA, 19 bp, Homo sapiens
  siRNA target sequence for KIAA0274 (NM_014845.4,2223-2241).
cagctttgatgataccttt

SEQ ID NO: 344638 - DNA, 19 bp, Homo sapiens
  siRNA target sequence for KIAA0274 (NM_014845.4,2279-2297).
ctaagaccgttggaattga

SEQ ID NO: 344639 - DNA, 19 bp, Homo sapiens
  siRNA target sequence for KIAA0274 (NM_014845.4,2314-2332).
gtgcgtaaaccagatgaaa

SEQ ID NO: 344640 - DNA, 19 bp, Homo sapiens
  siRNA target sequence for KIAA0274 (NM_014845.4,2495-2513).
gctccactcccgtgaagat

SEQ ID NO: 344641 - DNA, 19 bp, Homo sapiens
  siRNA target sequence for KIAA0274 (NM_014845.4,2524-2542).
ggagacagtgccaaagtga

SEQ ID NO: 344642 - DNA, 19 bp, Homo sapiens
  siRNA target sequence for KIAA0274 (NM_014845.4,2534-2552).
ccaaagtgaccgagaatgt

SEQ ID NO: 344643 - DNA, 19 bp, Homo sapiens
  siRNA target sequence for KIAA0274 (NM_014845.4,2565-2583).
gaaggagctatatggaatt

SEQ ID NO: 344644 - DNA, 19 bp, Homo sapiens
  siRNA target sequence for KIAA0274 (NM_014845.4,2596-2614).
ggcctctcagaagaagatt

SEQ ID NO: 344645 - DNA, 19 bp, Homo sapiens
  siRNA target sequence for KIAA0274 (NM_014845.4,2651-2669).
gtcaacataaacaagacaa

SEQ ID NO: 344646 - DNA, 19 bp, Homo sapiens
  siRNA target sequence for KIAA0274 (NM_014845.4,2693-2711).
ggtgctcagatggagttat

SEQ ID NO: 344647 - DNA, 19 bp, Homo sapiens
  siRNA target sequence for KIAA0274 (NM_014845.4,2694-2712).
gtgctcagatggagttata

SEQ ID NO: 344648 - DNA, 19 bp, Homo sapiens
  siRNA target sequence for KIAA0274 (NM_014845.4,2696-2714).
gctcagatggagttataaa

SEQ ID NO: 344649 - DNA, 19 bp, Homo sapiens
  siRNA target sequence for KIAA0274 (NM_014845.4,2697-2715).
ctcagatggagttataaaa

SEQ ID NO: 344650 - DNA, 19 bp, Homo sapiens
  siRNA target sequence for KIAA0274 (NM_014845.4,2699-2717).
cagatggagttataaaact

SEQ ID NO: 344651 - DNA, 19 bp, Homo sapiens
  siRNA target sequence for KIAA0274 (NM_014845.4,2701-2719).
gatggagttataaaactaa

SEQ ID NO: 344652 - DNA, 19 bp, Homo sapiens
  siRNA target sequence for KIAA0274 (NM_014845.4,2729-2747).
cggctttctcgcaagataa

SEQ ID NO: 344653 - DNA, 19 bp, Homo sapiens
  siRNA target sequence for KIAA0274 (NM_014845.4,2731-2749).
gctttctcgcaagataaca

SEQ ID NO: 344654 - DNA, 19 bp, Homo sapiens
  siRNA target sequence for KIAA0274 (NM_014845.4,2732-2750).
ctttctcgcaagataacat

SEQ ID NO: 344655 - DNA, 19 bp, Homo sapiens
  siRNA target sequence for KIAA0274 (NM_014845.4,2736-2754).
ctcgcaagataacatctat

SEQ ID NO: 344656 - DNA, 19 bp, Homo sapiens
  siRNA target sequence for KIAA0274 (NM_014845.4,2829-2847).
catgcagcccctaggaaaa

SEQ ID NO: 344657 - DNA, 19 bp, Homo sapiens
  siRNA target sequence for KIAA0196 (NM_014846.1,303-321).
ctgtggccaagcaatccta

SEQ ID NO: 344658 - DNA, 19 bp, Homo sapiens
  siRNA target sequence for KIAA0196 (NM_014846.1,308-326).
gccaagcaatcctaaggat

SEQ ID NO: 344659 - DNA, 19 bp, Homo sapiens
  siRNA target sequence for KIAA0196 (NM_014846.1,363-381).
gagactctctgagtttatt

SEQ ID NO: 344660 - DNA, 19 bp, Homo sapiens
  siRNA target sequence for KIAA0196 (NM_014846.1,386-404).
ctgtgttcaggttaaaaga

SEQ ID NO: 344661 - DNA, 19 bp, Homo sapiens
  siRNA target sequence for KIAA0196 (NM_014846.1,388-406).
gtgttcaggttaaaagaca

SEQ ID NO: 344662 - DNA, 19 bp, Homo sapiens
  siRNA target sequence for KIAA0196 (NM_014846.1,420-438).
gaaatatggagatatcata

SEQ ID NO: 344663 - DNA, 19 bp, Homo sapiens
  siRNA target sequence for KIAA0196 (NM_014846.1,501-519).
gctacaggatttagatgaa

SEQ ID NO: 344664 - DNA, 19 bp, Homo sapiens
  siRNA target sequence for KIAA0196 (NM_014846.1,526-544).
cgtgaaaacaacatagaaa

SEQ ID NO: 344665 - DNA, 19 bp, Homo sapiens
  siRNA target sequence for KIAA0196 (NM_014846.1,541-559).
gaaattgtgaccagatttt

SEQ ID NO: 344666 - DNA, 19 bp, Homo sapiens
  siRNA target sequence for KIAA0196 (NM_014846.1,656-674).
ctgtgcttctcaatgaaga

SEQ ID NO: 344667 - DNA, 19 bp, Homo sapiens
  siRNA target sequence for KIAA0196 (NM_014846.1,692-710).
gtgaagcactgtacttata

SEQ ID NO: 344668 - DNA, 19 bp, Homo sapiens
  siRNA target sequence for KIAA0196 (NM_014846.1,799-817).
cgatcttctgctgattcaa

SEQ ID NO: 344669 - DNA, 19 bp, Homo sapiens
  siRNA target sequence for KIAA0196 (NM_014846.1,800-818).
gatcttctgctgattcaaa

SEQ ID NO: 344670 - DNA, 19 bp, Homo sapiens
  siRNA target sequence for KIAA0196 (NM_014846.1,840-858).
gcttcgaagtacaggttat

SEQ ID NO: 344671 - DNA, 19 bp, Homo sapiens
  siRNA target sequence for KIAA0196 (NM_014846.1,841-859).
cttcgaagtacaggttatt

SEQ ID NO: 344672 - DNA, 19 bp, Homo sapiens
  siRNA target sequence for KIAA0196 (NM_014846.1,955-973).
cgactgagatctgatgata

SEQ ID NO: 344673 - DNA, 19 bp, Homo sapiens
  siRNA target sequence for KIAA0196 (NM_014846.1,982-1000).
caggtctcagcgtatcctt

SEQ ID NO: 344674 - DNA, 19 bp, Homo sapiens
  siRNA target sequence for KIAA0196 (NM_014846.1,1017-1035).
cacagccctggcaaaccaa

SEQ ID NO: 344675 - DNA, 19 bp, Homo sapiens
  siRNA target sequence for KIAA0196 (NM_014846.1,1040-1058).
ccatgctgtacgtgattct

SEQ ID NO: 344676 - DNA, 19 bp, Homo sapiens
  siRNA target sequence for KIAA0196 (NM_014846.1,1081-1099).
cacacccatcaagcaaaaa

SEQ ID NO: 344677 - DNA, 19 bp, Homo sapiens
  siRNA target sequence for KIAA0196 (NM_014846.1,1107-1125).
gatagtggataaatacttt

SEQ ID NO: 344678 - DNA, 19 bp, Homo sapiens
  siRNA target sequence for KIAA0196 (NM_014846.1,1129-1147).
gataattgggtaattagta

SEQ ID NO: 344679 - DNA, 19 bp, Homo sapiens
  siRNA target sequence for KIAA0196 (NM_014846.1,1155-1173).
ggggatcacagttaatcta

SEQ ID NO: 344680 - DNA, 19 bp, Homo sapiens
  siRNA target sequence for KIAA0196 (NM_014846.1,1157-1175).
ggatcacagttaatctagt

SEQ ID NO: 344681 - DNA, 19 bp, Homo sapiens
  siRNA target sequence for KIAA0196 (NM_014846.1,1158-1176).
gatcacagttaatctagta

SEQ ID NO: 344682 - DNA, 19 bp, Homo sapiens
  siRNA target sequence for KIAA0196 (NM_014846.1,1161-1179).
cacagttaatctagtagat

SEQ ID NO: 344683 - DNA, 19 bp, Homo sapiens
  siRNA target sequence for KIAA0196 (NM_014846.1,1223-1241).
ccctggacctttcaaatgt

SEQ ID NO: 344684 - DNA, 19 bp, Homo sapiens
  siRNA target sequence for KIAA0196 (NM_014846.1,1249-1267).
caggcaagcagatatgcta

SEQ ID NO: 344685 - DNA, 19 bp, Homo sapiens
  siRNA target sequence for KIAA0196 (NM_014846.1,1291-1309).
caagtgcagcaatttctaa

SEQ ID NO: 344686 - DNA, 19 bp, Homo sapiens
  siRNA target sequence for KIAA0196 (NM_014846.1,1393-1411).
cgatggctgatgcttcata

SEQ ID NO: 344687 - DNA, 19 bp, Homo sapiens
  siRNA target sequence for KIAA0196 (NM_014846.1,1423-1441).
gcctgtgacccaaacaaca

SEQ ID NO: 344688 - DNA, 19 bp, Homo sapiens
  siRNA target sequence for KIAA0196 (NM_014846.1,1534-1552).
gagtttatactcaaagaga

SEQ ID NO: 344689 - DNA, 19 bp, Homo sapiens
  siRNA target sequence for KIAA0196 (NM_014846.1,1627-1645).
gagcttgctgatgtctttt

SEQ ID NO: 344690 - DNA, 19 bp, Homo sapiens
  siRNA target sequence for KIAA0196 (NM_014846.1,1751-1769).
ctgcgggcagaaaaactgt

SEQ ID NO: 344691 - DNA, 19 bp, Homo sapiens
  siRNA target sequence for KIAA0196 (NM_014846.1,1755-1773).
gggcagaaaaactgtacaa

SEQ ID NO: 344692 - DNA, 19 bp, Homo sapiens
  siRNA target sequence for KIAA0196 (NM_014846.1,1760-1778).
gaaaaactgtacaactgat

SEQ ID NO: 344693 - DNA, 19 bp, Homo sapiens
  siRNA target sequence for KIAA0196 (NM_014846.1,1801-1819).
gaattccaccagttggaat

SEQ ID NO: 344694 - DNA, 19 bp, Homo sapiens
  siRNA target sequence for KIAA0196 (NM_014846.1,1847-1865).
ccgatactcgaaagtttct

SEQ ID NO: 344695 - DNA, 19 bp, Homo sapiens
  siRNA target sequence for KIAA0196 (NM_014846.1,1848-1866).
cgatactcgaaagtttctt

SEQ ID NO: 344696 - DNA, 19 bp, Homo sapiens
  siRNA target sequence for KIAA0196 (NM_014846.1,1937-1955).
ctttcgcttggcagttgat

SEQ ID NO: 344697 - DNA, 19 bp, Homo sapiens
  siRNA target sequence for KIAA0196 (NM_014846.1,1970-1988).
ccatcatgcaagaaagcat

SEQ ID NO: 344698 - DNA, 19 bp, Homo sapiens
  siRNA target sequence for KIAA0196 (NM_014846.1,1993-2011).
gtaaatccatccatggtta

SEQ ID NO: 344699 - DNA, 19 bp, Homo sapiens
  siRNA target sequence for KIAA0196 (NM_014846.1,2000-2018).
catccatggttactaaact

SEQ ID NO: 344700 - DNA, 19 bp, Homo sapiens
  siRNA target sequence for KIAA0196 (NM_014846.1,2017-2035).
ctcagagctaccttcctaa

SEQ ID NO: 344701 - DNA, 19 bp, Homo sapiens
  siRNA target sequence for KIAA0196 (NM_014846.1,2021-2039).
gagctaccttcctaaagct

SEQ ID NO: 344702 - DNA, 19 bp, Homo sapiens
  siRNA target sequence for KIAA0196 (NM_014846.1,2058-2076).
gccccttcttcgtattaat

SEQ ID NO: 344703 - DNA, 19 bp, Homo sapiens
  siRNA target sequence for KIAA0196 (NM_014846.1,2060-2078).
cccttcttcgtattaatca

SEQ ID NO: 344704 - DNA, 19 bp, Homo sapiens
  siRNA target sequence for KIAA0196 (NM_014846.1,2100-2118).
cagcgtgtcacagtactat

SEQ ID NO: 344705 - DNA, 19 bp, Homo sapiens
  siRNA target sequence for KIAA0196 (NM_014846.1,2103-2121).
cgtgtcacagtactattct

SEQ ID NO: 344706 - DNA, 19 bp, Homo sapiens
  siRNA target sequence for KIAA0196 (NM_014846.1,2130-2148).
ggtatcctatgtgagaaaa

SEQ ID NO: 344707 - DNA, 19 bp, Homo sapiens
  siRNA target sequence for KIAA0196 (NM_014846.1,2203-2221).
cttcagacccacgacatta

SEQ ID NO: 344708 - DNA, 19 bp, Homo sapiens
  siRNA target sequence for KIAA0196 (NM_014846.1,2208-2226).
gacccacgacattattgaa

SEQ ID NO: 344709 - DNA, 19 bp, Homo sapiens
  siRNA target sequence for KIAA0196 (NM_014846.1,2210-2228).
cccacgacattattgaagt

SEQ ID NO: 344710 - DNA, 19 bp, Homo sapiens
  siRNA target sequence for KIAA0196 (NM_014846.1,2231-2249).
ctacccgcctggacaaaga

SEQ ID NO: 344711 - DNA, 19 bp, Homo sapiens
  siRNA target sequence for KIAA0196 (NM_014846.1,2234-2252).
cccgcctggacaaagacaa

SEQ ID NO: 344712 - DNA, 19 bp, Homo sapiens
  siRNA target sequence for KIAA0196 (NM_014846.1,2289-2307).
ggttgccaagcttactcat

SEQ ID NO: 344713 - DNA, 19 bp, Homo sapiens
  siRNA target sequence for KIAA0196 (NM_014846.1,2294-2312).
ccaagcttactcatgctat

SEQ ID NO: 344714 - DNA, 19 bp, Homo sapiens
  siRNA target sequence for KIAA0196 (NM_014846.1,2295-2313).
caagcttactcatgctatt

SEQ ID NO: 344715 - DNA, 19 bp, Homo sapiens
  siRNA target sequence for KIAA0196 (NM_014846.1,2324-2342).
ctgaaggcatcttaatgat

SEQ ID NO: 344716 - DNA, 19 bp, Homo sapiens
  siRNA target sequence for KIAA0196 (NM_014846.1,2326-2344).
gaaggcatcttaatgatga

SEQ ID NO: 344717 - DNA, 19 bp, Homo sapiens
  siRNA target sequence for KIAA0196 (NM_014846.1,2340-2358).
gatgaaaacgactttggtt

SEQ ID NO: 344718 - DNA, 19 bp, Homo sapiens
  siRNA target sequence for KIAA0196 (NM_014846.1,2436-2454).
cctgcataggggactgata

SEQ ID NO: 344719 - DNA, 19 bp, Homo sapiens
  siRNA target sequence for KIAA0196 (NM_014846.1,2437-2455).
ctgcataggggactgatat

SEQ ID NO: 344720 - DNA, 19 bp, Homo sapiens
  siRNA target sequence for KIAA0196 (NM_014846.1,2440-2458).
cataggggactgatattca

SEQ ID NO: 344721 - DNA, 19 bp, Homo sapiens
  siRNA target sequence for KIAA0196 (NM_014846.1,2467-2485).
gccaagccaagtgaattga

SEQ ID NO: 344722 - DNA, 19 bp, Homo sapiens
  siRNA target sequence for KIAA0196 (NM_014846.1,2468-2486).
ccaagccaagtgaattgat

SEQ ID NO: 344723 - DNA, 19 bp, Homo sapiens
  siRNA target sequence for KIAA0196 (NM_014846.1,2522-2540).
gattccatcgttcttttga

SEQ ID NO: 344724 - DNA, 19 bp, Homo sapiens
  siRNA target sequence for KIAA0196 (NM_014846.1,2531-2549).
gttcttttgaatacataca

SEQ ID NO: 344725 - DNA, 19 bp, Homo sapiens
  siRNA target sequence for KIAA0196 (NM_014846.1,2553-2571).
ctatgtcaacatttatggt

SEQ ID NO: 344726 - DNA, 19 bp, Homo sapiens
  siRNA target sequence for KIAA0196 (NM_014846.1,2590-2608).
gaagtatctcgtatcataa

SEQ ID NO: 344727 - DNA, 19 bp, Homo sapiens
  siRNA target sequence for KIAA0196 (NM_014846.1,2593-2611).
gtatctcgtatcataaatt

SEQ ID NO: 344728 - DNA, 19 bp, Homo sapiens
  siRNA target sequence for KIAA0196 (NM_014846.1,2597-2615).
ctcgtatcataaattacaa

SEQ ID NO: 344729 - DNA, 19 bp, Homo sapiens
  siRNA target sequence for KIAA0196 (NM_014846.1,2676-2694).
ccagtccactcatattcca

SEQ ID NO: 344730 - DNA, 19 bp, Homo sapiens
  siRNA target sequence for KIAA0196 (NM_014846.1,2677-2695).
cagtccactcatattccaa

SEQ ID NO: 344731 - DNA, 19 bp, Homo sapiens
  siRNA target sequence for KIAA0196 (NM_014846.1,2715-2733).
ggatgagtctgtaacgttt

SEQ ID NO: 344732 - DNA, 19 bp, Homo sapiens
  siRNA target sequence for KIAA0196 (NM_014846.1,2716-2734).
gatgagtctgtaacgttta

SEQ ID NO: 344733 - DNA, 19 bp, Homo sapiens
  siRNA target sequence for KIAA0196 (NM_014846.1,2721-2739).
gtctgtaacgtttattggt

SEQ ID NO: 344734 - DNA, 19 bp, Homo sapiens
  siRNA target sequence for KIAA0196 (NM_014846.1,2737-2755).
ggtcgactctgcagagaaa

SEQ ID NO: 344735 - DNA, 19 bp, Homo sapiens
  siRNA target sequence for KIAA0196 (NM_014846.1,2738-2756).
gtcgactctgcagagaaat

SEQ ID NO: 344736 - DNA, 19 bp, Homo sapiens
  siRNA target sequence for KIAA0196 (NM_014846.1,2799-2817).
gctgaacacttggtatgat

SEQ ID NO: 344737 - DNA, 19 bp, Homo sapiens
  siRNA target sequence for KIAA0196 (NM_014846.1,2800-2818).
ctgaacacttggtatgata

SEQ ID NO: 344738 - DNA, 19 bp, Homo sapiens
  siRNA target sequence for KIAA0196 (NM_014846.1,2810-2828).
ggtatgatatgaaaactca

SEQ ID NO: 344739 - DNA, 19 bp, Homo sapiens
  siRNA target sequence for KIAA0196 (NM_014846.1,2811-2829).
gtatgatatgaaaactcat

SEQ ID NO: 344740 - DNA, 19 bp, Homo sapiens
  siRNA target sequence for KIAA0196 (NM_014846.1,2907-2925).
gcttctgtgctttatgatt

SEQ ID NO: 344741 - DNA, 19 bp, Homo sapiens
  siRNA target sequence for KIAA0196 (NM_014846.1,3021-3039).
cagtcccctaaaaagtatt

SEQ ID NO: 344742 - DNA, 19 bp, Homo sapiens
  siRNA target sequence for KIAA0196 (NM_014846.1,3023-3041).
gtcccctaaaaagtattgt

SEQ ID NO: 344743 - DNA, 19 bp, Homo sapiens
  siRNA target sequence for KIAA0196 (NM_014846.1,3035-3053).
gtattgtcgcaaattcaaa

SEQ ID NO: 344744 - DNA, 19 bp, Homo sapiens
  siRNA target sequence for KIAA0196 (NM_014846.1,3100-3118).
gcgtatctcgaggctataa

SEQ ID NO: 344745 - DNA, 19 bp, Homo sapiens
  siRNA target sequence for KIAA0196 (NM_014846.1,3101-3119).
cgtatctcgaggctataat

SEQ ID NO: 344746 - DNA, 19 bp, Homo sapiens
  siRNA target sequence for KIAA0196 (NM_014846.1,3148-3166).
caacagattgccaatgaat

SEQ ID NO: 344747 - DNA, 19 bp, Homo sapiens
  siRNA target sequence for KIAA0196 (NM_014846.1,3179-3197).
gtcggtttgattctaaaca

SEQ ID NO: 344748 - DNA, 19 bp, Homo sapiens
  siRNA target sequence for KIAA0196 (NM_014846.1,3255-3273).
ctatcaggacccttcactt

SEQ ID NO: 344749 - DNA, 19 bp, Homo sapiens
  siRNA target sequence for KIAA0196 (NM_014846.1,3274-3292).
ccttaccccaaagaagata

SEQ ID NO: 344750 - DNA, 19 bp, Homo sapiens
  siRNA target sequence for KIAA0196 (NM_014846.1,3427-3445).
ccaaaacttcaatacaaca

SEQ ID NO: 344751 - DNA, 19 bp, Homo sapiens
  siRNA target sequence for KIAA0196 (NM_014846.1,3428-3446).
caaaacttcaatacaacaa

SEQ ID NO: 344752 - DNA, 19 bp, Homo sapiens
  siRNA target sequence for KIAA0196 (NM_014846.1,3563-3581).
cgctgattggccagtttat

SEQ ID NO: 344753 - DNA, 19 bp, Homo sapiens
  siRNA target sequence for KIAA0196 (NM_014846.1,3565-3583).
ctgattggccagtttatct

SEQ ID NO: 344754 - DNA, 19 bp, Homo sapiens
  siRNA target sequence for KIAA0196 (NM_014846.1,3600-3618).
gtgtacaagccagaagata

SEQ ID NO: 344755 - DNA, 19 bp, Homo sapiens
  siRNA target sequence for KIAA0196 (NM_014846.1,3664-3682).
gattatgttcggtacacaa

SEQ ID NO: 344756 - DNA, 19 bp, Homo sapiens
  siRNA target sequence for KIAA0196 (NM_014846.1,3703-3721).
gaagcacatgtgcctaatt

SEQ ID NO: 344757 - DNA, 19 bp, Homo sapiens
  siRNA target sequence for KIAA0196 (NM_014846.1,3714-3732).
gcctaatttcatttttgat

SEQ ID NO: 344758 - DNA, 19 bp, Homo sapiens
  siRNA target sequence for NICE-4 (NM_014847.2,137-155).
caggccactgcagaacaaa

SEQ ID NO: 344759 - DNA, 19 bp, Homo sapiens
  siRNA target sequence for NICE-4 (NM_014847.2,211-229).
gaaacaattgattgatatt

SEQ ID NO: 344760 - DNA, 19 bp, Homo sapiens
  siRNA target sequence for NICE-4 (NM_014847.2,289-307).
cagagctatcaatgttctt

SEQ ID NO: 344761 - DNA, 19 bp, Homo sapiens
  siRNA target sequence for NICE-4 (NM_014847.2,381-399).
gtggccagacggaatccaa

SEQ ID NO: 344762 - DNA, 19 bp, Homo sapiens
  siRNA target sequence for NICE-4 (NM_014847.2,424-442).
ccgggacagagactatagt

SEQ ID NO: 344763 - DNA, 19 bp, Homo sapiens
  siRNA target sequence for NICE-4 (NM_014847.2,500-518).
cgaggtcaggaaaatggat

SEQ ID NO: 344764 - DNA, 19 bp, Homo sapiens
  siRNA target sequence for NICE-4 (NM_014847.2,607-625).
gcgaggaggaaggttttct

SEQ ID NO: 344765 - DNA, 19 bp, Homo sapiens
  siRNA target sequence for NICE-4 (NM_014847.2,668-686).
ccagccaatactgatgata

SEQ ID NO: 344766 - DNA, 19 bp, Homo sapiens
  siRNA target sequence for NICE-4 (NM_014847.2,669-687).
cagccaatactgatgataa

SEQ ID NO: 344767 - DNA, 19 bp, Homo sapiens
  siRNA target sequence for NICE-4 (NM_014847.2,671-689).
gccaatactgatgataact

SEQ ID NO: 344768 - DNA, 19 bp, Homo sapiens
  siRNA target sequence for NICE-4 (NM_014847.2,683-701).
gataactatggcaatagca

SEQ ID NO: 344769 - DNA, 19 bp, Homo sapiens
  siRNA target sequence for NICE-4 (NM_014847.2,704-722).
ggcaatacgtggaacaaca

SEQ ID NO: 344770 - DNA, 19 bp, Homo sapiens
  siRNA target sequence for NICE-4 (NM_014847.2,781-799).
ggggactgaagattggaat

SEQ ID NO: 344771 - DNA, 19 bp, Homo sapiens
  siRNA target sequence for NICE-4 (NM_014847.2,854-872).
ctgcctgcggagaatgtga

SEQ ID NO: 344772 - DNA, 19 bp, Homo sapiens
  siRNA target sequence for NICE-4 (NM_014847.2,860-878).
gcggagaatgtgacaatca

SEQ ID NO: 344773 - DNA, 19 bp, Homo sapiens
  siRNA target sequence for NICE-4 (NM_014847.2,934-952).
ggagaatgattcatctaat

SEQ ID NO: 344774 - DNA, 19 bp, Homo sapiens
  siRNA target sequence for NICE-4 (NM_014847.2,986-1004).
cctctggtgttcagtaatt

SEQ ID NO: 344775 - DNA, 19 bp, Homo sapiens
  siRNA target sequence for NICE-4 (NM_014847.2,1068-1086).
gcatgttagggaaaggatt

SEQ ID NO: 344776 - DNA, 19 bp, Homo sapiens
  siRNA target sequence for NICE-4 (NM_014847.2,1089-1107).
gtgatgtcggtgaagctaa

SEQ ID NO: 344777 - DNA, 19 bp, Homo sapiens
  siRNA target sequence for NICE-4 (NM_014847.2,1103-1121).
gctaaaggcggcagtacta

SEQ ID NO: 344778 - DNA, 19 bp, Homo sapiens
  siRNA target sequence for NICE-4 (NM_014847.2,1119-1137).
ctacaggctcccagttctt

SEQ ID NO: 344779 - DNA, 19 bp, Homo sapiens
  siRNA target sequence for NICE-4 (NM_014847.2,1245-1263).
catcactggtgcagtatga

SEQ ID NO: 344780 - DNA, 19 bp, Homo sapiens
  siRNA target sequence for NICE-4 (NM_014847.2,1248-1266).
cactggtgcagtatgattt

SEQ ID NO: 344781 - DNA, 19 bp, Homo sapiens
  siRNA target sequence for NICE-4 (NM_014847.2,1250-1268).
ctggtgcagtatgatttga

SEQ ID NO: 344782 - DNA, 19 bp, Homo sapiens
  siRNA target sequence for NICE-4 (NM_014847.2,1289-1307).
gtgcacagcccctttacaa

SEQ ID NO: 344783 - DNA, 19 bp, Homo sapiens
  siRNA target sequence for NICE-4 (NM_014847.2,1444-1462).
gatgtcgcctggatcttca

SEQ ID NO: 344784 - DNA, 19 bp, Homo sapiens
  siRNA target sequence for NICE-4 (NM_014847.2,1525-1543).
ctccttgacttctaagatt

SEQ ID NO: 344785 - DNA, 19 bp, Homo sapiens
  siRNA target sequence for NICE-4 (NM_014847.2,1631-1649).
gtcctttctgattatgagt

SEQ ID NO: 344786 - DNA, 19 bp, Homo sapiens
  siRNA target sequence for NICE-4 (NM_014847.2,1682-1700).
gctccaagtagcctgtata

SEQ ID NO: 344787 - DNA, 19 bp, Homo sapiens
  siRNA target sequence for NICE-4 (NM_014847.2,1702-1720).
cagcacggccagtgaatca

SEQ ID NO: 344788 - DNA, 19 bp, Homo sapiens
  siRNA target sequence for NICE-4 (NM_014847.2,1778-1796).
cagtcgacaacctatacct

SEQ ID NO: 344789 - DNA, 19 bp, Homo sapiens
  siRNA target sequence for NICE-4 (NM_014847.2,1809-1827).
ctcagggccctctttatga

SEQ ID NO: 344790 - DNA, 19 bp, Homo sapiens
  siRNA target sequence for NICE-4 (NM_014847.2,1922-1940).
caggccacgcagttacaga

SEQ ID NO: 344791 - DNA, 19 bp, Homo sapiens
  siRNA target sequence for NICE-4 (NM_014847.2,1933-1951).
gttacagaccacacaatct

SEQ ID NO: 344792 - DNA, 19 bp, Homo sapiens
  siRNA target sequence for NICE-4 (NM_014847.2,2004-2022).
gcatcccccctctcaatga

SEQ ID NO: 344793 - DNA, 19 bp, Homo sapiens
  siRNA target sequence for NICE-4 (NM_014847.2,2005-2023).
catcccccctctcaatgaa

SEQ ID NO: 344794 - DNA, 19 bp, Homo sapiens
  siRNA target sequence for NICE-4 (NM_014847.2,2041-2059).
cttactgacgacaaccaat

SEQ ID NO: 344795 - DNA, 19 bp, Homo sapiens
  siRNA target sequence for NICE-4 (NM_014847.2,2090-2108).
cacagtgaggagattccaa

SEQ ID NO: 344796 - DNA, 19 bp, Homo sapiens
  siRNA target sequence for NICE-4 (NM_014847.2,2126-2144).
cacagcagcacgttatcta

SEQ ID NO: 344797 - DNA, 19 bp, Homo sapiens
  siRNA target sequence for NICE-4 (NM_014847.2,2149-2167).
gcagaataccctttcatca

SEQ ID NO: 344798 - DNA, 19 bp, Homo sapiens
  siRNA target sequence for NICE-4 (NM_014847.2,2187-2205).
cttcgacatccactctttt

SEQ ID NO: 344799 - DNA, 19 bp, Homo sapiens
  siRNA target sequence for NICE-4 (NM_014847.2,2190-2208).
cgacatccactcttttgca

SEQ ID NO: 344800 - DNA, 19 bp, Homo sapiens
  siRNA target sequence for NICE-4 (NM_014847.2,2225-2243).
gaggcgaatctccattctt

SEQ ID NO: 344801 - DNA, 19 bp, Homo sapiens
  siRNA target sequence for NICE-4 (NM_014847.2,2305-2323).
ctcctccagtctcaatagt

SEQ ID NO: 344802 - DNA, 19 bp, Homo sapiens
  siRNA target sequence for NICE-4 (NM_014847.2,2443-2461).
gttgcctaatccgtatatt

SEQ ID NO: 344803 - DNA, 19 bp, Homo sapiens
  siRNA target sequence for NICE-4 (NM_014847.2,2483-2501).
gcctacccgccacaagtat

SEQ ID NO: 344804 - DNA, 19 bp, Homo sapiens
  siRNA target sequence for NICE-4 (NM_014847.2,2484-2502).
cctacccgccacaagtata

SEQ ID NO: 344805 - DNA, 19 bp, Homo sapiens
  siRNA target sequence for NICE-4 (NM_014847.2,2485-2503).
ctacccgccacaagtatat

SEQ ID NO: 344806 - DNA, 19 bp, Homo sapiens
  siRNA target sequence for NICE-4 (NM_014847.2,2488-2506).
cccgccacaagtatatggt

SEQ ID NO: 344807 - DNA, 19 bp, Homo sapiens
  siRNA target sequence for NICE-4 (NM_014847.2,2489-2507).
ccgccacaagtatatggtt

SEQ ID NO: 344808 - DNA, 19 bp, Homo sapiens
  siRNA target sequence for NICE-4 (NM_014847.2,2490-2508).
cgccacaagtatatggtta

SEQ ID NO: 344809 - DNA, 19 bp, Homo sapiens
  siRNA target sequence for NICE-4 (NM_014847.2,2493-2511).
cacaagtatatggttatga

SEQ ID NO: 344810 - DNA, 19 bp, Homo sapiens
  siRNA target sequence for NICE-4 (NM_014847.2,2521-2539).
gatgcttcagacaagattt

SEQ ID NO: 344811 - DNA, 19 bp, Homo sapiens
  siRNA target sequence for NICE-4 (NM_014847.2,2524-2542).
gcttcagacaagatttcca

SEQ ID NO: 344812 - DNA, 19 bp, Homo sapiens
  siRNA target sequence for NICE-4 (NM_014847.2,2525-2543).
cttcagacaagatttccat

SEQ ID NO: 344813 - DNA, 19 bp, Homo sapiens
  siRNA target sequence for NICE-4 (NM_014847.2,2606-2624).
ctggccagcaacccttatt

SEQ ID NO: 344814 - DNA, 19 bp, Homo sapiens
  siRNA target sequence for NICE-4 (NM_014847.2,2776-2794).
cagcctgccatactataca

SEQ ID NO: 344815 - DNA, 19 bp, Homo sapiens
  siRNA target sequence for NICE-4 (NM_014847.2,2925-2943).
gatatgggtctcatggata

SEQ ID NO: 344816 - DNA, 19 bp, Homo sapiens
  siRNA target sequence for KIAA0476 (NM_014856.1,604-622).
gtgccccagggctacacat

SEQ ID NO: 344817 - DNA, 19 bp, Homo sapiens
  siRNA target sequence for KIAA0476 (NM_014856.1,939-957).
cgagggcactcctcatact

SEQ ID NO: 344818 - DNA, 19 bp, Homo sapiens
  siRNA target sequence for KIAA0476 (NM_014856.1,940-958).
gagggcactcctcatactt

SEQ ID NO: 344819 - DNA, 19 bp, Homo sapiens
  siRNA target sequence for KIAA0476 (NM_014856.1,943-961).
ggcactcctcatacttact

SEQ ID NO: 344820 - DNA, 19 bp, Homo sapiens
  siRNA target sequence for KIAA0476 (NM_014856.1,1003-1021).
gcagtgtacctgtgctata

SEQ ID NO: 344821 - DNA, 19 bp, Homo sapiens
  siRNA target sequence for KIAA0476 (NM_014856.1,1050-1068).
ggtgtacgaggcagttcta

SEQ ID NO: 344822 - DNA, 19 bp, Homo sapiens
  siRNA target sequence for KIAA0476 (NM_014856.1,1080-1098).
caagggccaggctatcaga

SEQ ID NO: 344823 - DNA, 19 bp, Homo sapiens
  siRNA target sequence for KIAA0476 (NM_014856.1,1547-1565).
gccctcgtctcgatgatct

SEQ ID NO: 344824 - DNA, 19 bp, Homo sapiens
  siRNA target sequence for KIAA0476 (NM_014856.1,1548-1566).
ccctcgtctcgatgatctt

SEQ ID NO: 344825 - DNA, 19 bp, Homo sapiens
  siRNA target sequence for KIAA0476 (NM_014856.1,1823-1841).
cagctggaccagacataca

SEQ ID NO: 344826 - DNA, 19 bp, Homo sapiens
  siRNA target sequence for KIAA0476 (NM_014856.1,1825-1843).
gctggaccagacatacact

SEQ ID NO: 344827 - DNA, 19 bp, Homo sapiens
  siRNA target sequence for KIAA0476 (NM_014856.1,2011-2029).
cgagggagctcgtgatgtt

SEQ ID NO: 344828 - DNA, 19 bp, Homo sapiens
  siRNA target sequence for KIAA0476 (NM_014856.1,2016-2034).
gagctcgtgatgttgacaa

SEQ ID NO: 344829 - DNA, 19 bp, Homo sapiens
  siRNA target sequence for KIAA0476 (NM_014856.1,2021-2039).
cgtgatgttgacaaccttt

SEQ ID NO: 344830 - DNA, 19 bp, Homo sapiens
  siRNA target sequence for KIAA0476 (NM_014856.1,2072-2090).
cgctccagccacaaacttt

SEQ ID NO: 344831 - DNA, 19 bp, Homo sapiens
  siRNA target sequence for KIAA0476 (NM_014856.1,2262-2280).
gtgagctcactgtctttat

SEQ ID NO: 344832 - DNA, 19 bp, Homo sapiens
  siRNA target sequence for KIAA0476 (NM_014856.1,2356-2374).
gctacgggctgagttgttt

SEQ ID NO: 344833 - DNA, 19 bp, Homo sapiens
  siRNA target sequence for KIAA0476 (NM_014856.1,2360-2378).
cgggctgagttgtttgagt

SEQ ID NO: 344834 - DNA, 19 bp, Homo sapiens
  siRNA target sequence for KIAA0476 (NM_014856.1,2692-2710).
gcagctctgctcacactat

SEQ ID NO: 344835 - DNA, 19 bp, Homo sapiens
  siRNA target sequence for KIAA0476 (NM_014856.1,2856-2874).
ccaagctccggaatgttgt

SEQ ID NO: 344836 - DNA, 19 bp, Homo sapiens
  siRNA target sequence for KIAA0476 (NM_014856.1,2971-2989).
gcaggtgtcagcacatcaa

SEQ ID NO: 344837 - DNA, 19 bp, Homo sapiens
  siRNA target sequence for KIAA0476 (NM_014856.1,3003-3021).
cccaggcagagccctattt

SEQ ID NO: 344838 - DNA, 19 bp, Homo sapiens
  siRNA target sequence for KIAA0476 (NM_014856.1,3047-3065).
cttcagcgccagactactt

SEQ ID NO: 344839 - DNA, 19 bp, Homo sapiens
  siRNA target sequence for KIAA0476 (NM_014856.1,3165-3183).
ccggtgtggcccacatgat

SEQ ID NO: 344840 - DNA, 19 bp, Homo sapiens
  siRNA target sequence for KIAA0476 (NM_014856.1,3166-3184).
cggtgtggcccacatgata

SEQ ID NO: 344841 - DNA, 19 bp, Homo sapiens
  siRNA target sequence for KIAA0476 (NM_014856.1,3726-3744).
gtgattcgctggtgtatga

SEQ ID NO: 344842 - DNA, 19 bp, Homo sapiens
  siRNA target sequence for KIAA0476 (NM_014856.1,3765-3783).
gggcacctgatgactctaa

SEQ ID NO: 344843 - DNA, 19 bp, Homo sapiens
  siRNA target sequence for KIAA0476 (NM_014856.1,4168-4186).
gctacgcctgcccagtatt

SEQ ID NO: 344844 - DNA, 19 bp, Homo sapiens
  siRNA target sequence for KIAA0476 (NM_014856.1,4317-4335).
gctgcccacctctctatgt

SEQ ID NO: 344845 - DNA, 19 bp, Homo sapiens
  siRNA target sequence for KIAA0476 (NM_014856.1,4429-4447).
gcgccatgttggactcaat

SEQ ID NO: 344846 - DNA, 19 bp, Homo sapiens
  siRNA target sequence for KIAA0476 (NM_014856.1,4431-4449).
gccatgttggactcaatga

SEQ ID NO: 344847 - DNA, 19 bp, Homo sapiens
  siRNA target sequence for KIAA0476 (NM_014856.1,4519-4537).
gggaatctaccgtgagata

SEQ ID NO: 344848 - DNA, 19 bp, Homo sapiens
  siRNA target sequence for KIAA0476 (NM_014856.1,4521-4539).
gaatctaccgtgagatatt

SEQ ID NO: 344849 - DNA, 19 bp, Homo sapiens
  siRNA target sequence for KIAA0476 (NM_014856.1,4685-4703).
gccattgactgccgaaaat

SEQ ID NO: 344850 - DNA, 19 bp, Homo sapiens
  siRNA target sequence for KIAA0476 (NM_014856.1,4693-4711).
ctgccgaaaatgttttgga

SEQ ID NO: 344851 - DNA, 19 bp, Homo sapiens
  siRNA target sequence for HHL (NM_014857.2,195-213).
gtcagagcttcattacaga

SEQ ID NO: 344852 - DNA, 19 bp, Homo sapiens
  siRNA target sequence for HHL (NM_014857.2,201-219).
gcttcattacagaaggtta

SEQ ID NO: 344853 - DNA, 19 bp, Homo sapiens
  siRNA target sequence for HHL (NM_014857.2,212-230).
gaaggttagtggatcatct

SEQ ID NO: 344854 - DNA, 19 bp, Homo sapiens
  siRNA target sequence for HHL (NM_014857.2,229-247).
ctgattctgtggctacaat

SEQ ID NO: 344855 - DNA, 19 bp, Homo sapiens
  siRNA target sequence for HHL (NM_014857.2,278-296).
gtatgcagatgataattct

SEQ ID NO: 344856 - DNA, 19 bp, Homo sapiens
  siRNA target sequence for HHL (NM_014857.2,394-412).
ggccaagcagtcttcttgt

SEQ ID NO: 344857 - DNA, 19 bp, Homo sapiens
  siRNA target sequence for HHL (NM_014857.2,507-525).
ccgtctaacacagaaattt

SEQ ID NO: 344858 - DNA, 19 bp, Homo sapiens
  siRNA target sequence for HHL (NM_014857.2,509-527).
gtctaacacagaaatttct

SEQ ID NO: 344859 - DNA, 19 bp, Homo sapiens
  siRNA target sequence for HHL (NM_014857.2,592-610).
cctacttaggatgtatgaa

SEQ ID NO: 344860 - DNA, 19 bp, Homo sapiens
  siRNA target sequence for HHL (NM_014857.2,600-618).
ggatgtatgaaggtttctt

SEQ ID NO: 344861 - DNA, 19 bp, Homo sapiens
  siRNA target sequence for HHL (NM_014857.2,616-634).
cttccccacgtaatgaagt

SEQ ID NO: 344862 - DNA, 19 bp, Homo sapiens
  siRNA target sequence for HHL (NM_014857.2,619-637).
ccccacgtaatgaagtaga

SEQ ID NO: 344863 - DNA, 19 bp, Homo sapiens
  siRNA target sequence for HHL (NM_014857.2,755-773).
ggagatagcatcttttcca

SEQ ID NO: 344864 - DNA, 19 bp, Homo sapiens
  siRNA target sequence for HHL (NM_014857.2,771-789).
ccaatctataaggtgttat

SEQ ID NO: 344865 - DNA, 19 bp, Homo sapiens
  siRNA target sequence for HHL (NM_014857.2,772-790).
caatctataaggtgttatt

SEQ ID NO: 344866 - DNA, 19 bp, Homo sapiens
  siRNA target sequence for HHL (NM_014857.2,851-869).
ccatggttcggaagaattt

SEQ ID NO: 344867 - DNA, 19 bp, Homo sapiens
  siRNA target sequence for HHL (NM_014857.2,855-873).
ggttcggaagaatttcaga

SEQ ID NO: 344868 - DNA, 19 bp, Homo sapiens
  siRNA target sequence for HHL (NM_014857.2,856-874).
gttcggaagaatttcagat

SEQ ID NO: 344869 - DNA, 19 bp, Homo sapiens
  siRNA target sequence for HHL (NM_014857.2,903-921).
gcagtaagcagaattttgt

SEQ ID NO: 344870 - DNA, 19 bp, Homo sapiens
  siRNA target sequence for HHL (NM_014857.2,991-1009).
cccccgacagtgatgtgtt

SEQ ID NO: 344871 - DNA, 19 bp, Homo sapiens
  siRNA target sequence for HHL (NM_014857.2,993-1011).
cccgacagtgatgtgttta

SEQ ID NO: 344872 - DNA, 19 bp, Homo sapiens
  siRNA target sequence for HHL (NM_014857.2,1018-1036).
gtgtctccttggaggtaaa

SEQ ID NO: 344873 - DNA, 19 bp, Homo sapiens
  siRNA target sequence for HHL (NM_014857.2,1043-1061).
cgatggaaaaggaaacttt

SEQ ID NO: 344874 - DNA, 19 bp, Homo sapiens
  siRNA target sequence for HHL (NM_014857.2,1068-1086).
gtgcctaaggatagagata

SEQ ID NO: 344875 - DNA, 19 bp, Homo sapiens
  siRNA target sequence for HHL (NM_014857.2,1150-1168).
ctaacaaagaattagctat

SEQ ID NO: 344876 - DNA, 19 bp, Homo sapiens
  siRNA target sequence for HHL (NM_014857.2,1154-1172).
caaagaattagctattgaa

SEQ ID NO: 344877 - DNA, 19 bp, Homo sapiens
  siRNA target sequence for HHL (NM_014857.2,1198-1216).
caggtcgaaacgtgaagaa

SEQ ID NO: 344878 - DNA, 19 bp, Homo sapiens
  siRNA target sequence for HHL (NM_014857.2,1200-1218).
ggtcgaaacgtgaagaaca

SEQ ID NO: 344879 - DNA, 19 bp, Homo sapiens
  siRNA target sequence for HHL (NM_014857.2,1214-1232).
gaacagtgacatgcattta

SEQ ID NO: 344880 - DNA, 19 bp, Homo sapiens
  siRNA target sequence for HHL (NM_014857.2,1259-1277).
ctatgatgggagagcttat

SEQ ID NO: 344881 - DNA, 19 bp, Homo sapiens
  siRNA target sequence for HHL (NM_014857.2,1263-1281).
gatgggagagcttatgtca

SEQ ID NO: 344882 - DNA, 19 bp, Homo sapiens
  siRNA target sequence for HHL (NM_014857.2,1328-1346).
cgaggaaaccccaaaagat

SEQ ID NO: 344883 - DNA, 19 bp, Homo sapiens
  siRNA target sequence for HHL (NM_014857.2,1344-1362).
gataagcaagtatacatga

SEQ ID NO: 344884 - DNA, 19 bp, Homo sapiens
  siRNA target sequence for HHL (NM_014857.2,1430-1448).
ccgtgtgtaccctgcaaat

SEQ ID NO: 344885 - DNA, 19 bp, Homo sapiens
  siRNA target sequence for HHL (NM_014857.2,1440-1458).
cctgcaaatgagcgatttt

SEQ ID NO: 344886 - DNA, 19 bp, Homo sapiens
  siRNA target sequence for HHL (NM_014857.2,1466-1484).
cagcagaaagactttcaca

SEQ ID NO: 344887 - DNA, 19 bp, Homo sapiens
  siRNA target sequence for HHL (NM_014857.2,1704-1722).
cctgagaagatcctgtatt

SEQ ID NO: 344888 - DNA, 19 bp, Homo sapiens
  siRNA target sequence for HHL (NM_014857.2,1728-1746).
ggagagttgctaggaaaat

SEQ ID NO: 344889 - DNA, 19 bp, Homo sapiens
  siRNA target sequence for HHL (NM_014857.2,1860-1878).
caggcaatgctggatagat

SEQ ID NO: 344890 - DNA, 19 bp, Homo sapiens
  siRNA target sequence for HHL (NM_014857.2,1915-1933).
gtgttattactcgagatat

SEQ ID NO: 344891 - DNA, 19 bp, Homo sapiens
  siRNA target sequence for HHL (NM_014857.2,1927-1945).
gagatattcatcgtacatt

SEQ ID NO: 344892 - DNA, 19 bp, Homo sapiens
  siRNA target sequence for HHL (NM_014857.2,1942-1960).
catttcccgcacatgatta

SEQ ID NO: 344893 - DNA, 19 bp, Homo sapiens
  siRNA target sequence for HHL (NM_014857.2,1948-1966).
ccgcacatgattactttaa

SEQ ID NO: 344894 - DNA, 19 bp, Homo sapiens
  siRNA target sequence for HHL (NM_014857.2,1949-1967).
cgcacatgattactttaaa

SEQ ID NO: 344895 - DNA, 19 bp, Homo sapiens
  siRNA target sequence for HHL (NM_014857.2,1983-2001).
ggtcaagaatcgctctata

SEQ ID NO: 344896 - DNA, 19 bp, Homo sapiens
  siRNA target sequence for HHL (NM_014857.2,1984-2002).
gtcaagaatcgctctataa

SEQ ID NO: 344897 - DNA, 19 bp, Homo sapiens
  siRNA target sequence for HHL (NM_014857.2,1986-2004).
caagaatcgctctataaga

SEQ ID NO: 344898 - DNA, 19 bp, Homo sapiens
  siRNA target sequence for HHL (NM_014857.2,2129-2147).
gtacgactatggtttgaga

SEQ ID NO: 344899 - DNA, 19 bp, Homo sapiens
  siRNA target sequence for HHL (NM_014857.2,2226-2244).
gacctgcatagccattttt

SEQ ID NO: 344900 - DNA, 19 bp, Homo sapiens
  siRNA target sequence for HHL (NM_014857.2,2255-2273).
cctggaagctcatatgtat

SEQ ID NO: 344901 - DNA, 19 bp, Homo sapiens
  siRNA target sequence for HHL (NM_014857.2,2259-2277).
gaagctcatatgtatgcat

SEQ ID NO: 344902 - DNA, 19 bp, Homo sapiens
  siRNA target sequence for HHL (NM_014857.2,2355-2373).
gagggtttgaacataatct

SEQ ID NO: 344903 - DNA, 19 bp, Homo sapiens
  siRNA target sequence for HHL (NM_014857.2,2363-2381).
gaacataatctttcatgta

SEQ ID NO: 344904 - DNA, 19 bp, Homo sapiens
  siRNA target sequence for HHL (NM_014857.2,2513-2531).
ggcttgcaatattaaagta

SEQ ID NO: 344905 - DNA, 19 bp, Homo sapiens
  siRNA target sequence for KIAA0672 (NM_014859.1,484-502).
gctgacaagcgctccaaaa

SEQ ID NO: 344906 - DNA, 19 bp, Homo sapiens
  siRNA target sequence for KIAA0672 (NM_014859.1,485-503).
ctgacaagcgctccaaaaa

SEQ ID NO: 344907 - DNA, 19 bp, Homo sapiens
  siRNA target sequence for KIAA0672 (NM_014859.1,487-505).
gacaagcgctccaaaaagt

SEQ ID NO: 344908 - DNA, 19 bp, Homo sapiens
  siRNA target sequence for KIAA0672 (NM_014859.1,622-640).
gagctgatacattttgagt

SEQ ID NO: 344909 - DNA, 19 bp, Homo sapiens
  siRNA target sequence for KIAA0672 (NM_014859.1,769-787).
cagcagacttccaagtctt

SEQ ID NO: 344910 - DNA, 19 bp, Homo sapiens
  siRNA target sequence for KIAA0672 (NM_014859.1,889-907).
ctctcagctgatatgtaca

SEQ ID NO: 344911 - DNA, 19 bp, Homo sapiens
  siRNA target sequence for KIAA0672 (NM_014859.1,893-911).
cagctgatatgtacagttt

SEQ ID NO: 344912 - DNA, 19 bp, Homo sapiens
  siRNA target sequence for KIAA0672 (NM_014859.1,896-914).
ctgatatgtacagttttgt

SEQ ID NO: 344913 - DNA, 19 bp, Homo sapiens
  siRNA target sequence for KIAA0672 (NM_014859.1,908-926).
gttttgtggccaaagaaat

SEQ ID NO: 344914 - DNA, 19 bp, Homo sapiens
  siRNA target sequence for KIAA0672 (NM_014859.1,942-960).
ctttcaaacgctaatagaa

SEQ ID NO: 344915 - DNA, 19 bp, Homo sapiens
  siRNA target sequence for KIAA0672 (NM_014859.1,980-998).
ggaagtccctgacactatt

SEQ ID NO: 344916 - DNA, 19 bp, Homo sapiens
  siRNA target sequence for KIAA0672 (NM_014859.1,992-1010).
cactattgcaggctgtatt

SEQ ID NO: 344917 - DNA, 19 bp, Homo sapiens
  siRNA target sequence for KIAA0672 (NM_014859.1,1004-1022).
ctgtattgcctcagatcaa

SEQ ID NO: 344918 - DNA, 19 bp, Homo sapiens
  siRNA target sequence for KIAA0672 (NM_014859.1,1271-1289).
caggagctttgaaatctta

SEQ ID NO: 344919 - DNA, 19 bp, Homo sapiens
  siRNA target sequence for KIAA0672 (NM_014859.1,1381-1399).
caggctctatggaatgctt

SEQ ID NO: 344920 - DNA, 19 bp, Homo sapiens
  siRNA target sequence for KIAA0672 (NM_014859.1,1391-1409).
ggaatgcttgtgaaaagtt

SEQ ID NO: 344921 - DNA, 19 bp, Homo sapiens
  siRNA target sequence for KIAA0672 (NM_014859.1,1412-1430).
ccaaggccaatcacaacaa

SEQ ID NO: 344922 - DNA, 19 bp, Homo sapiens
  siRNA target sequence for KIAA0672 (NM_014859.1,1457-1475).
ccaagctgtcagaatatca

SEQ ID NO: 344923 - DNA, 19 bp, Homo sapiens
  siRNA target sequence for KIAA0672 (NM_014859.1,1458-1476).
caagctgtcagaatatcaa

SEQ ID NO: 344924 - DNA, 19 bp, Homo sapiens
  siRNA target sequence for KIAA0672 (NM_014859.1,1499-1517).
gtaatatggcaattgtttt

SEQ ID NO: 344925 - DNA, 19 bp, Homo sapiens
  siRNA target sequence for KIAA0672 (NM_014859.1,1572-1590).
cacagtgtcgctgcaaatt

SEQ ID NO: 344926 - DNA, 19 bp, Homo sapiens
  siRNA target sequence for KIAA0672 (NM_014859.1,1574-1592).
cagtgtcgctgcaaattgt

SEQ ID NO: 344927 - DNA, 19 bp, Homo sapiens
  siRNA target sequence for KIAA0672 (NM_014859.1,1595-1613).
ggatcattgaacctatcat

SEQ ID NO: 344928 - DNA, 19 bp, Homo sapiens
  siRNA target sequence for KIAA0672 (NM_014859.1,1678-1696).
ccagtacacgtgaaccata

SEQ ID NO: 344929 - DNA, 19 bp, Homo sapiens
  siRNA target sequence for KIAA0672 (NM_014859.1,1679-1697).
cagtacacgtgaaccataa

SEQ ID NO: 344930 - DNA, 19 bp, Homo sapiens
  siRNA target sequence for KIAA0672 (NM_014859.1,1776-1794).
cagcgtcgccacggataat

SEQ ID NO: 344931 - DNA, 19 bp, Homo sapiens
  siRNA target sequence for KIAA0672 (NM_014859.1,1778-1796).
gcgtcgccacggataatat

SEQ ID NO: 344932 - DNA, 19 bp, Homo sapiens
  siRNA target sequence for KIAA0672 (NM_014859.1,1780-1798).
gtcgccacggataatatga

SEQ ID NO: 344933 - DNA, 19 bp, Homo sapiens
  siRNA target sequence for KIAA0672 (NM_014859.1,2053-2071).
gagcgcaccagcacaacaa

SEQ ID NO: 344934 - DNA, 19 bp, Homo sapiens
  siRNA target sequence for KIAA0672 (NM_014859.1,2056-2074).
cgcaccagcacaacaaaaa

SEQ ID NO: 344935 - DNA, 19 bp, Homo sapiens
  siRNA target sequence for KIAA0672 (NM_014859.1,2224-2242).
cacaccctccggaaagttt

SEQ ID NO: 344936 - DNA, 19 bp, Homo sapiens
  siRNA target sequence for KIAA0672 (NM_014859.1,2452-2470).
gtctttacaagcactttga

SEQ ID NO: 344937 - DNA, 19 bp, Homo sapiens
  siRNA target sequence for KIAA0672 (NM_014859.1,2694-2712).
gcggcgacactcagtaact

SEQ ID NO: 344938 - DNA, 19 bp, Homo sapiens
  siRNA target sequence for KIAA0672 (NM_014859.1,2696-2714).
ggcgacactcagtaactga

SEQ ID NO: 344939 - DNA, 19 bp, Homo sapiens
  siRNA target sequence for FAM20B (NM_014864.1,352-370).
cgagtcgtgctgttagcaa

SEQ ID NO: 344940 - DNA, 19 bp, Homo sapiens
  siRNA target sequence for FAM20B (NM_014864.1,452-470).
gggcctttcaccgaatgat

SEQ ID NO: 344941 - DNA, 19 bp, Homo sapiens
  siRNA target sequence for FAM20B (NM_014864.1,454-472).
gcctttcaccgaatgatga

SEQ ID NO: 344942 - DNA, 19 bp, Homo sapiens
  siRNA target sequence for FAM20B (NM_014864.1,604-622).
gccatggccaccaagaaaa

SEQ ID NO: 344943 - DNA, 19 bp, Homo sapiens
  siRNA target sequence for FAM20B (NM_014864.1,660-678).
gaaagccttactgatactt

SEQ ID NO: 344944 - DNA, 19 bp, Homo sapiens
  siRNA target sequence for FAM20B (NM_014864.1,685-703).
ggccagaaagttgttttca

SEQ ID NO: 344945 - DNA, 19 bp, Homo sapiens
  siRNA target sequence for FAM20B (NM_014864.1,745-763).
ccgtatgctggttatgata

SEQ ID NO: 344946 - DNA, 19 bp, Homo sapiens
  siRNA target sequence for FAM20B (NM_014864.1,747-765).
gtatgctggttatgataga

SEQ ID NO: 344947 - DNA, 19 bp, Homo sapiens
  siRNA target sequence for FAM20B (NM_014864.1,775-793).
gaggtagcagcctttcact

SEQ ID NO: 344948 - DNA, 19 bp, Homo sapiens
  siRNA target sequence for FAM20B (NM_014864.1,886-904).
ctgttgagcaccttcctaa

SEQ ID NO: 344949 - DNA, 19 bp, Homo sapiens
  siRNA target sequence for FAM20B (NM_014864.1,968-986).
gtgctgatggagacataat

SEQ ID NO: 344950 - DNA, 19 bp, Homo sapiens
  siRNA target sequence for FAM20B (NM_014864.1,1058-1076).
cttaccgagaaggcaaatt

SEQ ID NO: 344951 - DNA, 19 bp, Homo sapiens
  siRNA target sequence for FAM20B (NM_014864.1,1077-1095).
ggccaggtgggagtatgat

SEQ ID NO: 344952 - DNA, 19 bp, Homo sapiens
  siRNA target sequence for FAM20B (NM_014864.1,1108-1126).
gatgctgtgaagaaaacgt

SEQ ID NO: 344953 - DNA, 19 bp, Homo sapiens
  siRNA target sequence for FAM20B (NM_014864.1,1201-1219).
gaccgccatcactatgaga

SEQ ID NO: 344954 - DNA, 19 bp, Homo sapiens
  siRNA target sequence for FAM20B (NM_014864.1,1309-1327).
cttgcccctctctatcagt

SEQ ID NO: 344955 - DNA, 19 bp, Homo sapiens
  siRNA target sequence for CNAP1 (NM_014865.1,803-821).
gctccccaaatgtatgagt

SEQ ID NO: 344956 - DNA, 19 bp, Homo sapiens
  siRNA target sequence for CNAP1 (NM_014865.1,804-822).
ctccccaaatgtatgagtt

SEQ ID NO: 344957 - DNA, 19 bp, Homo sapiens
  siRNA target sequence for CNAP1 (NM_014865.1,818-836).
gagttccatctgccattat

SEQ ID NO: 344958 - DNA, 19 bp, Homo sapiens
  siRNA target sequence for CNAP1 (NM_014865.1,858-876).
gtggaggggtgaatcagta

SEQ ID NO: 344959 - DNA, 19 bp, Homo sapiens
  siRNA target sequence for CNAP1 (NM_014865.1,861-879).
gaggggtgaatcagtatgt

SEQ ID NO: 344960 - DNA, 19 bp, Homo sapiens
  siRNA target sequence for CNAP1 (NM_014865.1,967-985).
gctgcagcactttgatact

SEQ ID NO: 344961 - DNA, 19 bp, Homo sapiens
  siRNA target sequence for CNAP1 (NM_014865.1,968-986).
ctgcagcactttgatacta

SEQ ID NO: 344962 - DNA, 19 bp, Homo sapiens
  siRNA target sequence for CNAP1 (NM_014865.1,980-998).
gatactatctacagcattt

SEQ ID NO: 344963 - DNA, 19 bp, Homo sapiens
  siRNA target sequence for CNAP1 (NM_014865.1,984-1002).
ctatctacagcattttgca

SEQ ID NO: 344964 - DNA, 19 bp, Homo sapiens
  siRNA target sequence for CNAP1 (NM_014865.1,1000-1018).
gcatcactttcgaagtata

SEQ ID NO: 344965 - DNA, 19 bp, Homo sapiens
  siRNA target sequence for CNAP1 (NM_014865.1,1091-1109).
gctatcctggatgatacaa

SEQ ID NO: 344966 - DNA, 19 bp, Homo sapiens
  siRNA target sequence for CNAP1 (NM_014865.1,1156-1174).
gaactgttatgctctgata

SEQ ID NO: 344967 - DNA, 19 bp, Homo sapiens
  siRNA target sequence for CNAP1 (NM_014865.1,1351-1369).
gtggaaccactcaataatt

SEQ ID NO: 344968 - DNA, 19 bp, Homo sapiens
  siRNA target sequence for CNAP1 (NM_014865.1,1353-1371).
ggaaccactcaataattga

SEQ ID NO: 344969 - DNA, 19 bp, Homo sapiens
  siRNA target sequence for CNAP1 (NM_014865.1,1357-1375).
ccactcaataattgaagaa

SEQ ID NO: 344970 - DNA, 19 bp, Homo sapiens
  siRNA target sequence for CNAP1 (NM_014865.1,1415-1433).
ctggagaatcccaccatta

SEQ ID NO: 344971 - DNA, 19 bp, Homo sapiens
  siRNA target sequence for CNAP1 (NM_014865.1,1453-1471).
cactcgggaagccataaca

SEQ ID NO: 344972 - DNA, 19 bp, Homo sapiens
  siRNA target sequence for CNAP1 (NM_014865.1,1455-1473).
ctcgggaagccataacaca

SEQ ID NO: 344973 - DNA, 19 bp, Homo sapiens
  siRNA target sequence for CNAP1 (NM_014865.1,1484-1502).
gtagccttgacccgttata

SEQ ID NO: 344974 - DNA, 19 bp, Homo sapiens
  siRNA target sequence for CNAP1 (NM_014865.1,1488-1506).
ccttgacccgttataacca

SEQ ID NO: 344975 - DNA, 19 bp, Homo sapiens
  siRNA target sequence for CNAP1 (NM_014865.1,1489-1507).
cttgacccgttataaccat

SEQ ID NO: 344976 - DNA, 19 bp, Homo sapiens
  siRNA target sequence for CNAP1 (NM_014865.1,1494-1512).
cccgttataaccatatgct

SEQ ID NO: 344977 - DNA, 19 bp, Homo sapiens
  siRNA target sequence for CNAP1 (NM_014865.1,1515-1533).
gtgctacagtgaagatcat

SEQ ID NO: 344978 - DNA, 19 bp, Homo sapiens
  siRNA target sequence for CNAP1 (NM_014865.1,1574-1592).
gttgcagccgtgagtctat

SEQ ID NO: 344979 - DNA, 19 bp, Homo sapiens
  siRNA target sequence for CNAP1 (NM_014865.1,1593-1611).
gggcaactgactatggaat

SEQ ID NO: 344980 - DNA, 19 bp, Homo sapiens
  siRNA target sequence for CNAP1 (NM_014865.1,1750-1768).
cagcatgtgcattttgcta

SEQ ID NO: 344981 - DNA, 19 bp, Homo sapiens
  siRNA target sequence for CNAP1 (NM_014865.1,1886-1904).
gaccagttcttggatactt

SEQ ID NO: 344982 - DNA, 19 bp, Homo sapiens
  siRNA target sequence for CNAP1 (NM_014865.1,1888-1906).
ccagttcttggatacttta

SEQ ID NO: 344983 - DNA, 19 bp, Homo sapiens
  siRNA target sequence for CNAP1 (NM_014865.1,2042-2060).
gacaagtcagtgctagtat

SEQ ID NO: 344984 - DNA, 19 bp, Homo sapiens
  siRNA target sequence for CNAP1 (NM_014865.1,2044-2062).
caagtcagtgctagtatgt

SEQ ID NO: 344985 - DNA, 19 bp, Homo sapiens
  siRNA target sequence for CNAP1 (NM_014865.1,2047-2065).
gtcagtgctagtatgtaaa

SEQ ID NO: 344986 - DNA, 19 bp, Homo sapiens
  siRNA target sequence for CNAP1 (NM_014865.1,2086-2104).
cagttttctagccaataat

SEQ ID NO: 344987 - DNA, 19 bp, Homo sapiens
  siRNA target sequence for CNAP1 (NM_014865.1,2347-2365).
gaaaggacgcatctatcaa

SEQ ID NO: 344988 - DNA, 19 bp, Homo sapiens
  siRNA target sequence for CNAP1 (NM_014865.1,2363-2381).
caactgcttgccaaagcta

SEQ ID NO: 344989 - DNA, 19 bp, Homo sapiens
  siRNA target sequence for CNAP1 (NM_014865.1,2373-2391).
ccaaagctagttacaaaaa

SEQ ID NO: 344990 - DNA, 19 bp, Homo sapiens
  siRNA target sequence for CNAP1 (NM_014865.1,2436-2454).
ccgaacccttcagtcatat

SEQ ID NO: 344991 - DNA, 19 bp, Homo sapiens
  siRNA target sequence for CNAP1 (NM_014865.1,2650-2668).
ggagatgctggtacagtat

SEQ ID NO: 344992 - DNA, 19 bp, Homo sapiens
  siRNA target sequence for CNAP1 (NM_014865.1,2683-2701).
cagcttctcccggaagatt

SEQ ID NO: 344993 - DNA, 19 bp, Homo sapiens
  siRNA target sequence for CNAP1 (NM_014865.1,2722-2740).
cagcaagatgatgtatgaa

SEQ ID NO: 344994 - DNA, 19 bp, Homo sapiens
  siRNA target sequence for CNAP1 (NM_014865.1,2734-2752).
gtatgaaaacacaactaca

SEQ ID NO: 344995 - DNA, 19 bp, Homo sapiens
  siRNA target sequence for CNAP1 (NM_014865.1,2866-2884).
ccgggaagccgtgcttaat

SEQ ID NO: 344996 - DNA, 19 bp, Homo sapiens
  siRNA target sequence for CNAP1 (NM_014865.1,2936-2954).
gcccaggctttgattcaga

SEQ ID NO: 344997 - DNA, 19 bp, Homo sapiens
  siRNA target sequence for CNAP1 (NM_014865.1,3192-3210).
gcatagggctggatgagaa

SEQ ID NO: 344998 - DNA, 19 bp, Homo sapiens
  siRNA target sequence for CNAP1 (NM_014865.1,3346-3364).
gcgggagacagtcacaaaa

SEQ ID NO: 344999 - DNA, 19 bp, Homo sapiens
  siRNA target sequence for CNAP1 (NM_014865.1,3411-3429).
cagtgaccctcatttacca

SEQ ID NO: 345000 - DNA, 19 bp, Homo sapiens
  siRNA target sequence for CNAP1 (NM_014865.1,3845-3863).
ccactcttgcttaaagtct

SEQ ID NO: 345001 - DNA, 19 bp, Homo sapiens
  siRNA target sequence for CNAP1 (NM_014865.1,3923-3941).
ggcaagttctgcatgatca

SEQ ID NO: 345002 - DNA, 19 bp, Homo sapiens
  siRNA target sequence for CNAP1 (NM_014865.1,4273-4291).
caagggcaacgcaatctat

SEQ ID NO: 345003 - DNA, 19 bp, Homo sapiens
  siRNA target sequence for CNAP1 (NM_014865.1,4276-4294).
gggcaacgcaatctataat

SEQ ID NO: 345004 - DNA, 19 bp, Homo sapiens
  siRNA target sequence for CNAP1 (NM_014865.1,4278-4296).
gcaacgcaatctataatct

SEQ ID NO: 345005 - DNA, 19 bp, Homo sapiens
  siRNA target sequence for CNAP1 (NM_014865.1,4519-4537).
ccgtaagatgcttgacaat

SEQ ID NO: 345006 - DNA, 19 bp, Homo sapiens
  siRNA target sequence for CNAP1 (NM_014865.1,4520-4538).
cgtaagatgcttgacaatt

SEQ ID NO: 345007 - DNA, 19 bp, Homo sapiens
  siRNA target sequence for CNAP1 (NM_014865.1,4625-4643).
cctgagggcaaggctataa

SEQ ID NO: 345008 - DNA, 19 bp, Homo sapiens
  siRNA target sequence for CNAP1 (NM_014865.1,4630-4648).
gggcaaggctataatagat

SEQ ID NO: 345009 - DNA, 19 bp, Homo sapiens
  siRNA target sequence for CNAP1 (NM_014865.1,4833-4851).
ctacccgtcggcatccaaa

SEQ ID NO: 345010 - DNA, 19 bp, Homo sapiens
  siRNA target sequence for CNAP1 (NM_014865.1,4856-4874).
cagcagcgagcttccaaaa

SEQ ID NO: 345011 - DNA, 19 bp, Homo sapiens
  siRNA target sequence for CNAP1 (NM_014865.1,4945-4963).
cgagacacccaagaaaaca

SEQ ID NO: 345012 - DNA, 19 bp, Homo sapiens
  siRNA target sequence for RNF10 (NM_014868.3,633-651).
gtggatccaagcgttataa

SEQ ID NO: 345013 - DNA, 19 bp, Homo sapiens
  siRNA target sequence for RNF10 (NM_014868.3,654-672).
gcaaacgtgaactttccta

SEQ ID NO: 345014 - DNA, 19 bp, Homo sapiens
  siRNA target sequence for RNF10 (NM_014868.3,764-782).
ggcagcagcaaactcttta

SEQ ID NO: 345015 - DNA, 19 bp, Homo sapiens
  siRNA target sequence for RNF10 (NM_014868.3,824-842).
gctcaacgggcagagttta

SEQ ID NO: 345016 - DNA, 19 bp, Homo sapiens
  siRNA target sequence for RNF10 (NM_014868.3,858-876).
ctggtcctaagaagatcaa

SEQ ID NO: 345017 - DNA, 19 bp, Homo sapiens
  siRNA target sequence for RNF10 (NM_014868.3,883-901).
ccacttgttgaatttcact

SEQ ID NO: 345018 - DNA, 19 bp, Homo sapiens
  siRNA target sequence for RNF10 (NM_014868.3,915-933).
gccagacgggtcactttga

SEQ ID NO: 345019 - DNA, 19 bp, Homo sapiens
  siRNA target sequence for RNF10 (NM_014868.3,916-934).
ccagacgggtcactttgaa

SEQ ID NO: 345020 - DNA, 19 bp, Homo sapiens
  siRNA target sequence for RNF10 (NM_014868.3,972-990).
ggggacataagccttttaa

SEQ ID NO: 345021 - DNA, 19 bp, Homo sapiens
  siRNA target sequence for RNF10 (NM_014868.3,1097-1115).
gaacaagtgcgcatttgta

SEQ ID NO: 345022 - DNA, 19 bp, Homo sapiens
  siRNA target sequence for RNF10 (NM_014868.3,1154-1172).
cctactgcagccaagataa

SEQ ID NO: 345023 - DNA, 19 bp, Homo sapiens
  siRNA target sequence for RNF10 (NM_014868.3,1173-1191).
cccgttgtggacacatctt

SEQ ID NO: 345024 - DNA, 19 bp, Homo sapiens
  siRNA target sequence for RNF10 (NM_014868.3,1175-1193).
cgttgtggacacatcttct

SEQ ID NO: 345025 - DNA, 19 bp, Homo sapiens
  siRNA target sequence for RNF10 (NM_014868.3,1200-1218).
catgcatcctgcactatct

SEQ ID NO: 345026 - DNA, 19 bp, Homo sapiens
  siRNA target sequence for RNF10 (NM_014868.3,1231-1249).
gaagacgtggagtaaatgt

SEQ ID NO: 345027 - DNA, 19 bp, Homo sapiens
  siRNA target sequence for RNF10 (NM_014868.3,1279-1297).
ggatctcaagagtgttgtt

SEQ ID NO: 345028 - DNA, 19 bp, Homo sapiens
  siRNA target sequence for RNF10 (NM_014868.3,1302-1320).
cagagtcacatcagtatgt

SEQ ID NO: 345029 - DNA, 19 bp, Homo sapiens
  siRNA target sequence for RNF10 (NM_014868.3,1306-1324).
gtcacatcagtatgttgtt

SEQ ID NO: 345030 - DNA, 19 bp, Homo sapiens
  siRNA target sequence for RNF10 (NM_014868.3,1319-1337).
gttgttggtgataccatta

SEQ ID NO: 345031 - DNA, 19 bp, Homo sapiens
  siRNA target sequence for RNF10 (NM_014868.3,1322-1340).
gttggtgataccattacga

SEQ ID NO: 345032 - DNA, 19 bp, Homo sapiens
  siRNA target sequence for RNF10 (NM_014868.3,1373-1391).
gtggctttgcccaaatcca

SEQ ID NO: 345033 - DNA, 19 bp, Homo sapiens
  siRNA target sequence for RNF10 (NM_014868.3,1545-1563).
ctcccgagtcctgctttat

SEQ ID NO: 345034 - DNA, 19 bp, Homo sapiens
  siRNA target sequence for RNF10 (NM_014868.3,1548-1566).
ccgagtcctgctttattga

SEQ ID NO: 345035 - DNA, 19 bp, Homo sapiens
  siRNA target sequence for RNF10 (NM_014868.3,1686-1704).
cgaaggagtctgtttttca

SEQ ID NO: 345036 - DNA, 19 bp, Homo sapiens
  siRNA target sequence for RNF10 (NM_014868.3,1715-1733).
ggtgtgctggagtatctgt

SEQ ID NO: 345037 - DNA, 19 bp, Homo sapiens
  siRNA target sequence for RNF10 (NM_014868.3,1732-1750).
gtctgccttcgatgaagaa

SEQ ID NO: 345038 - DNA, 19 bp, Homo sapiens
  siRNA target sequence for RNF10 (NM_014868.3,1870-1888).
ggagttagcagatgacaat

SEQ ID NO: 345039 - DNA, 19 bp, Homo sapiens
  siRNA target sequence for RNF10 (NM_014868.3,1873-1891).
gttagcagatgacaatctt

SEQ ID NO: 345040 - DNA, 19 bp, Homo sapiens
  siRNA target sequence for RNF10 (NM_014868.3,1965-1983).
gctctccttgttactactt

SEQ ID NO: 345041 - DNA, 19 bp, Homo sapiens
  siRNA target sequence for RNF10 (NM_014868.3,1971-1989).
cttgttactacttttacca

SEQ ID NO: 345042 - DNA, 19 bp, Homo sapiens
  siRNA target sequence for RNF10 (NM_014868.3,1992-2010).
cggaagatggacagcatat

SEQ ID NO: 345043 - DNA, 19 bp, Homo sapiens
  siRNA target sequence for RNF10 (NM_014868.3,2133-2151).
gacagcgtcacagatatct

SEQ ID NO: 345044 - DNA, 19 bp, Homo sapiens
  siRNA target sequence for RNF10 (NM_014868.3,2185-2203).
ctgtgaactggctttgcaa

SEQ ID NO: 345045 - DNA, 19 bp, Homo sapiens
  siRNA target sequence for RNF10 (NM_014868.3,2359-2377).
cattcccctcgagaatcta

SEQ ID NO: 345046 - DNA, 19 bp, Homo sapiens
  siRNA target sequence for RNF10 (NM_014868.3,2537-2555).
cagggcagtccctcattct

SEQ ID NO: 345047 - DNA, 19 bp, Homo sapiens
  siRNA target sequence for RNF10 (NM_014868.3,2698-2716).
cgacggggagagtgataat

SEQ ID NO: 345048 - DNA, 19 bp, Homo sapiens
  siRNA target sequence for RNF10 (NM_014868.3,2701-2719).
cggggagagtgataattca

SEQ ID NO: 345049 - DNA, 19 bp, Homo sapiens
  siRNA target sequence for RNF10 (NM_014868.3,2788-2806).
ggacacaccagctacttca

SEQ ID NO: 345050 - DNA, 19 bp, Homo sapiens
  siRNA target sequence for RNF10 (NM_014868.3,2791-2809).
cacaccagctacttcagat

SEQ ID NO: 345051 - DNA, 19 bp, Homo sapiens
  siRNA target sequence for KIAA0763 (NM_014869.1,465-483).
ccttctctaggcaagtgaa

SEQ ID NO: 345052 - DNA, 19 bp, Homo sapiens
  siRNA target sequence for KIAA0763 (NM_014869.1,466-484).
cttctctaggcaagtgaaa

SEQ ID NO: 345053 - DNA, 19 bp, Homo sapiens
  siRNA target sequence for KIAA0763 (NM_014869.1,469-487).
ctctaggcaagtgaaatca

SEQ ID NO: 345054 - DNA, 19 bp, Homo sapiens
  siRNA target sequence for KIAA0763 (NM_014869.1,1280-1298).
gactcgcctgcctttagca

SEQ ID NO: 345055 - DNA, 19 bp, Homo sapiens
  siRNA target sequence for KIAA0763 (NM_014869.1,1290-1308).
cctttagcaacgatgtcat

SEQ ID NO: 345056 - DNA, 19 bp, Homo sapiens
  siRNA target sequence for KIAA0763 (NM_014869.1,1834-1852).
gatgctgatggggatctat

SEQ ID NO: 345057 - DNA, 19 bp, Homo sapiens
  siRNA target sequence for KIAA0763 (NM_014869.1,1837-1855).
gctgatggggatctatgaa

SEQ ID NO: 345058 - DNA, 19 bp, Homo sapiens
  siRNA target sequence for KIAA0763 (NM_014869.1,2004-2022).
gctactgccggctctttga

SEQ ID NO: 345059 - DNA, 19 bp, Homo sapiens
  siRNA target sequence for KIAA0763 (NM_014869.1,2055-2073).
gactacaccagcgagaaat

SEQ ID NO: 345060 - DNA, 19 bp, Homo sapiens
  siRNA target sequence for KIAA0763 (NM_014869.1,2231-2249).
gtccccggagcagatatca

SEQ ID NO: 345061 - DNA, 19 bp, Homo sapiens
  siRNA target sequence for KIAA0763 (NM_014869.1,2233-2251).
ccccggagcagatatcaaa

SEQ ID NO: 345062 - DNA, 19 bp, Homo sapiens
  siRNA target sequence for KIAA0763 (NM_014869.1,2342-2360).
gagaagcacaggatagagt

SEQ ID NO: 345063 - DNA, 19 bp, Homo sapiens
  siRNA target sequence for KIAA0763 (NM_014869.1,2409-2427).
gctctagcctcaaaaagga

SEQ ID NO: 345064 - DNA, 19 bp, Homo sapiens
  siRNA target sequence for MFN2 (NM_014874.1,351-369).
ctatcgtcacagtcaagaa

SEQ ID NO: 345065 - DNA, 19 bp, Homo sapiens
  siRNA target sequence for MFN2 (NM_014874.1,404-422).
ccacttaagcactttgtca

SEQ ID NO: 345066 - DNA, 19 bp, Homo sapiens
  siRNA target sequence for MFN2 (NM_014874.1,433-451).
gaagatcaatggcattttt

SEQ ID NO: 345067 - DNA, 19 bp, Homo sapiens
  siRNA target sequence for MFN2 (NM_014874.1,523-541).
ccccgttaccacagaagaa

SEQ ID NO: 345068 - DNA, 19 bp, Homo sapiens
  siRNA target sequence for MFN2 (NM_014874.1,525-543).
ccgttaccacagaagaaca

SEQ ID NO: 345069 - DNA, 19 bp, Homo sapiens
  siRNA target sequence for MFN2 (NM_014874.1,551-569).
gacgtcaaaggttacctat

SEQ ID NO: 345070 - DNA, 19 bp, Homo sapiens
  siRNA target sequence for MFN2 (NM_014874.1,556-574).
caaaggttacctatccaaa

SEQ ID NO: 345071 - DNA, 19 bp, Homo sapiens
  siRNA target sequence for MFN2 (NM_014874.1,701-719).
ggccacaccaccaattgct

SEQ ID NO: 345072 - DNA, 19 bp, Homo sapiens
  siRNA target sequence for MFN2 (NM_014874.1,702-720).
gccacaccaccaattgctt

SEQ ID NO: 345073 - DNA, 19 bp, Homo sapiens
  siRNA target sequence for MFN2 (NM_014874.1,863-881).
gtgatgtggcccaactcta

SEQ ID NO: 345074 - DNA, 19 bp, Homo sapiens
  siRNA target sequence for MFN2 (NM_014874.1,879-897).
ctaagtgcccacttctgaa

SEQ ID NO: 345075 - DNA, 19 bp, Homo sapiens
  siRNA target sequence for MFN2 (NM_014874.1,913-931).
gatggacagccctggtatt

SEQ ID NO: 345076 - DNA, 19 bp, Homo sapiens
  siRNA target sequence for MFN2 (NM_014874.1,1470-1488).
ctcgggagcagcaggttta

SEQ ID NO: 345077 - DNA, 19 bp, Homo sapiens
  siRNA target sequence for MFN2 (NM_014874.1,1511-1529).
cggcaagaccgactgaaat

SEQ ID NO: 345078 - DNA, 19 bp, Homo sapiens
  siRNA target sequence for MFN2 (NM_014874.1,1512-1530).
ggcaagaccgactgaaatt

SEQ ID NO: 345079 - DNA, 19 bp, Homo sapiens
  siRNA target sequence for MFN2 (NM_014874.1,1520-1538).
cgactgaaatttattgaca

SEQ ID NO: 345080 - DNA, 19 bp, Homo sapiens
  siRNA target sequence for MFN2 (NM_014874.1,1549-1567).
gctcttggctcaagactat

SEQ ID NO: 345081 - DNA, 19 bp, Homo sapiens
  siRNA target sequence for MFN2 (NM_014874.1,1562-1580).
gactataagctgcgaatta

SEQ ID NO: 345082 - DNA, 19 bp, Homo sapiens
  siRNA target sequence for MFN2 (NM_014874.1,1571-1589).
ctgcgaattaagcagatta

SEQ ID NO: 345083 - DNA, 19 bp, Homo sapiens
  siRNA target sequence for MFN2 (NM_014874.1,1647-1665).
ctgtactggtggacgatta

SEQ ID NO: 345084 - DNA, 19 bp, Homo sapiens
  siRNA target sequence for MFN2 (NM_014874.1,1689-1707).
cagtagtcctcaaggttta

SEQ ID NO: 345085 - DNA, 19 bp, Homo sapiens
  siRNA target sequence for MFN2 (NM_014874.1,1694-1712).
gtcctcaaggtttataaga

SEQ ID NO: 345086 - DNA, 19 bp, Homo sapiens
  siRNA target sequence for MFN2 (NM_014874.1,1696-1714).
cctcaaggtttataagaat

SEQ ID NO: 345087 - DNA, 19 bp, Homo sapiens
  siRNA target sequence for MFN2 (NM_014874.1,1843-1861).
gtctgtgcggagtcagata

SEQ ID NO: 345088 - DNA, 19 bp, Homo sapiens
  siRNA target sequence for MFN2 (NM_014874.1,1882-1900).
gtgcttctccctcaactat

SEQ ID NO: 345089 - DNA, 19 bp, Homo sapiens
  siRNA target sequence for MFN2 (NM_014874.1,1884-1902).
gcttctccctcaactatga

SEQ ID NO: 345090 - DNA, 19 bp, Homo sapiens
  siRNA target sequence for MFN2 (NM_014874.1,1894-1912).
caactatgacctaaactgt

SEQ ID NO: 345091 - DNA, 19 bp, Homo sapiens
  siRNA target sequence for MFN2 (NM_014874.1,1971-1989).
ccatgctggtgaataggtt

SEQ ID NO: 345092 - DNA, 19 bp, Homo sapiens
  siRNA target sequence for MFN2 (NM_014874.1,2016-2034).
ccttgatgggctacaatga

SEQ ID NO: 345093 - DNA, 19 bp, Homo sapiens
  siRNA target sequence for MFN2 (NM_014874.1,2108-2126).
caggaggagttcatggttt

SEQ ID NO: 345094 - DNA, 19 bp, Homo sapiens
  siRNA target sequence for KIAA0063 (NM_014876.3,324-342).
gagacaaggccaaatctga

SEQ ID NO: 345095 - DNA, 19 bp, Homo sapiens
  siRNA target sequence for KIAA0063 (NM_014876.3,362-380).
gcagcacccccacaaatct

SEQ ID NO: 345096 - DNA, 19 bp, Homo sapiens
  siRNA target sequence for KIAA0063 (NM_014876.3,506-524).
gtgacacctcacaagaaga

SEQ ID NO: 345097 - DNA, 19 bp, Homo sapiens
  siRNA target sequence for KIAA0063 (NM_014876.3,544-562).
ctacgatgtgaatgtcatt

SEQ ID NO: 345098 - DNA, 19 bp, Homo sapiens
  siRNA target sequence for KIAA0063 (NM_014876.3,624-642).
gtgtcattgccctcactaa

SEQ ID NO: 345099 - DNA, 19 bp, Homo sapiens
  siRNA target sequence for KIAA0063 (NM_014876.3,737-755).
gtgggaggggcctactaca

SEQ ID NO: 345100 - DNA, 19 bp, Homo sapiens
  siRNA target sequence for KIAA0063 (NM_014876.3,799-817).
gagcgagctcaggaagttt

SEQ ID NO: 345101 - DNA, 19 bp, Homo sapiens
  siRNA target sequence for KIAA0020 (NM_014878.3,764-782).
gagtacgcatacaatgaca

SEQ ID NO: 345102 - DNA, 19 bp, Homo sapiens
  siRNA target sequence for KIAA0020 (NM_014878.3,766-784).
gtacgcatacaatgacaaa

SEQ ID NO: 345103 - DNA, 19 bp, Homo sapiens
  siRNA target sequence for KIAA0020 (NM_014878.3,818-836).
gagctctatgggaacacat

SEQ ID NO: 345104 - DNA, 19 bp, Homo sapiens
  siRNA target sequence for KIAA0020 (NM_014878.3,820-838).
gctctatgggaacacattt

SEQ ID NO: 345105 - DNA, 19 bp, Homo sapiens
  siRNA target sequence for KIAA0020 (NM_014878.3,863-881).
cgaactctggacaaagtgt

SEQ ID NO: 345106 - DNA, 19 bp, Homo sapiens
  siRNA target sequence for KIAA0020 (NM_014878.3,864-882).
gaactctggacaaagtgtt

SEQ ID NO: 345107 - DNA, 19 bp, Homo sapiens
  siRNA target sequence for KIAA0020 (NM_014878.3,893-911).
ccagaaaaattagaactta

SEQ ID NO: 345108 - DNA, 19 bp, Homo sapiens
  siRNA target sequence for KIAA0020 (NM_014878.3,949-967).
ccaaaaggaagctgtgatt

SEQ ID NO: 345109 - DNA, 19 bp, Homo sapiens
  siRNA target sequence for KIAA0020 (NM_014878.3,973-991).
ctcattggtgcataaagta

SEQ ID NO: 345110 - DNA, 19 bp, Homo sapiens
  siRNA target sequence for KIAA0020 (NM_014878.3,994-1012).
cttggacttttttacctat

SEQ ID NO: 345111 - DNA, 19 bp, Homo sapiens
  siRNA target sequence for KIAA0020 (NM_014878.3,1178-1196).
gtggctaatggccaatact

SEQ ID NO: 345112 - DNA, 19 bp, Homo sapiens
  siRNA target sequence for KIAA0020 (NM_014878.3,1188-1206).
gccaatactcccatttggt

SEQ ID NO: 345113 - DNA, 19 bp, Homo sapiens
  siRNA target sequence for KIAA0020 (NM_014878.3,1211-1229).
ctggcggcatttgattgta

SEQ ID NO: 345114 - DNA, 19 bp, Homo sapiens
  siRNA target sequence for KIAA0020 (NM_014878.3,1215-1233).
cggcatttgattgtattga

SEQ ID NO: 345115 - DNA, 19 bp, Homo sapiens
  siRNA target sequence for KIAA0020 (NM_014878.3,1216-1234).
ggcatttgattgtattgat

SEQ ID NO: 345116 - DNA, 19 bp, Homo sapiens
  siRNA target sequence for KIAA0020 (NM_014878.3,1223-1241).
gattgtattgatgatacta

SEQ ID NO: 345117 - DNA, 19 bp, Homo sapiens
  siRNA target sequence for KIAA0020 (NM_014878.3,1252-1270).
gcagataatcatatcagaa

SEQ ID NO: 345118 - DNA, 19 bp, Homo sapiens
  siRNA target sequence for KIAA0020 (NM_014878.3,1281-1299).
cattgcctagcatagtaaa

SEQ ID NO: 345119 - DNA, 19 bp, Homo sapiens
  siRNA target sequence for KIAA0020 (NM_014878.3,1287-1305).
ctagcatagtaaatgacaa

SEQ ID NO: 345120 - DNA, 19 bp, Homo sapiens
  siRNA target sequence for KIAA0020 (NM_014878.3,1310-1328).
ggaaggaaggtcctattgt

SEQ ID NO: 345121 - DNA, 19 bp, Homo sapiens
  siRNA target sequence for KIAA0020 (NM_014878.3,1311-1329).
gaaggaaggtcctattgta

SEQ ID NO: 345122 - DNA, 19 bp, Homo sapiens
  siRNA target sequence for KIAA0020 (NM_014878.3,1319-1337).
gtcctattgtacttactaa

SEQ ID NO: 345123 - DNA, 19 bp, Homo sapiens
  siRNA target sequence for KIAA0020 (NM_014878.3,1344-1362).
gagatcctgcacatacagt

SEQ ID NO: 345124 - DNA, 19 bp, Homo sapiens
  siRNA target sequence for KIAA0020 (NM_014878.3,1353-1371).
cacatacagtacgagaaat

SEQ ID NO: 345125 - DNA, 19 bp, Homo sapiens
  siRNA target sequence for KIAA0020 (NM_014878.3,1355-1373).
catacagtacgagaaatca

SEQ ID NO: 345126 - DNA, 19 bp, Homo sapiens
  siRNA target sequence for KIAA0020 (NM_014878.3,1359-1377).
cagtacgagaaatcattga

SEQ ID NO: 345127 - DNA, 19 bp, Homo sapiens
  siRNA target sequence for KIAA0020 (NM_014878.3,1493-1511).
caagaagtggtgctagata

SEQ ID NO: 345128 - DNA, 19 bp, Homo sapiens
  siRNA target sequence for KIAA0020 (NM_014878.3,1496-1514).
gaagtggtgctagataagt

SEQ ID NO: 345129 - DNA, 19 bp, Homo sapiens
  siRNA target sequence for KIAA0020 (NM_014878.3,1561-1579).
cgttcagcctaccatgaat

SEQ ID NO: 345130 - DNA, 19 bp, Homo sapiens
  siRNA target sequence for KIAA0020 (NM_014878.3,1677-1695).
ggttaatagagcaagataa

SEQ ID NO: 345131 - DNA, 19 bp, Homo sapiens
  siRNA target sequence for KIAA0020 (NM_014878.3,1774-1792).
ctgggctagtgtaaatcga

SEQ ID NO: 345132 - DNA, 19 bp, Homo sapiens
  siRNA target sequence for KIAA0020 (NM_014878.3,1899-1917).
gcaccagcaaaggaataga

SEQ ID NO: 345133 - DNA, 19 bp, Homo sapiens
  siRNA target sequence for DCLRE1A (NM_014881.1,943-961).
gacatttgggaatacaaat

SEQ ID NO: 345134 - DNA, 19 bp, Homo sapiens
  siRNA target sequence for DCLRE1A (NM_014881.1,988-1006).
ccaaataatggctctaaaa

SEQ ID NO: 345135 - DNA, 19 bp, Homo sapiens
  siRNA target sequence for DCLRE1A (NM_014881.1,1163-1181).
caagttgtggagatggtat

SEQ ID NO: 345136 - DNA, 19 bp, Homo sapiens
  siRNA target sequence for DCLRE1A (NM_014881.1,1253-1271).
caaagatacgtccagttta

SEQ ID NO: 345137 - DNA, 19 bp, Homo sapiens
  siRNA target sequence for DCLRE1A (NM_014881.1,1257-1275).
gatacgtccagtttatgat

SEQ ID NO: 345138 - DNA, 19 bp, Homo sapiens
  siRNA target sequence for DCLRE1A (NM_014881.1,1273-1291).
gatggatactgtccaaatt

SEQ ID NO: 345139 - DNA, 19 bp, Homo sapiens
  siRNA target sequence for DCLRE1A (NM_014881.1,1325-1343).
cacctcgatggcatgtttt

SEQ ID NO: 345140 - DNA, 19 bp, Homo sapiens
  siRNA target sequence for DCLRE1A (NM_014881.1,1403-1421).
cctcaaccattccttttca

SEQ ID NO: 345141 - DNA, 19 bp, Homo sapiens
  siRNA target sequence for DCLRE1A (NM_014881.1,1465-1483).
ggtgatcatccttttagca

SEQ ID NO: 345142 - DNA, 19 bp, Homo sapiens
  siRNA target sequence for DCLRE1A (NM_014881.1,1497-1515).
gtcaggtggcagtttcagt

SEQ ID NO: 345143 - DNA, 19 bp, Homo sapiens
  siRNA target sequence for DCLRE1A (NM_014881.1,1548-1566).
ggaaagatggtcttcgtat

SEQ ID NO: 345144 - DNA, 19 bp, Homo sapiens
  siRNA target sequence for DCLRE1A (NM_014881.1,1553-1571).
gatggtcttcgtatcagaa

SEQ ID NO: 345145 - DNA, 19 bp, Homo sapiens
  siRNA target sequence for DCLRE1A (NM_014881.1,1562-1580).
cgtatcagaaccaaactga

SEQ ID NO: 345146 - DNA, 19 bp, Homo sapiens
  siRNA target sequence for DCLRE1A (NM_014881.1,1563-1581).
gtatcagaaccaaactgat

SEQ ID NO: 345147 - DNA, 19 bp, Homo sapiens
  siRNA target sequence for DCLRE1A (NM_014881.1,1682-1700).
cccaacaagctctacaatt

SEQ ID NO: 345148 - DNA, 19 bp, Homo sapiens
  siRNA target sequence for DCLRE1A (NM_014881.1,1684-1702).
caacaagctctacaattta

SEQ ID NO: 345149 - DNA, 19 bp, Homo sapiens
  siRNA target sequence for DCLRE1A (NM_014881.1,1690-1708).
gctctacaatttacagatt

SEQ ID NO: 345150 - DNA, 19 bp, Homo sapiens
  siRNA target sequence for DCLRE1A (NM_014881.1,1691-1709).
ctctacaatttacagattt

SEQ ID NO: 345151 - DNA, 19 bp, Homo sapiens
  siRNA target sequence for DCLRE1A (NM_014881.1,1778-1796).
cattgccagaaaatgactt

SEQ ID NO: 345152 - DNA, 19 bp, Homo sapiens
  siRNA target sequence for DCLRE1A (NM_014881.1,1801-1819).
gactgtgaaatctcctatt

SEQ ID NO: 345153 - DNA, 19 bp, Homo sapiens
  siRNA target sequence for DCLRE1A (NM_014881.1,1803-1821).
ctgtgaaatctcctattct

SEQ ID NO: 345154 - DNA, 19 bp, Homo sapiens
  siRNA target sequence for DCLRE1A (NM_014881.1,1865-1883).
cggatgattcacaagaaca

SEQ ID NO: 345155 - DNA, 19 bp, Homo sapiens
  siRNA target sequence for DCLRE1A (NM_014881.1,1913-1931).
gcagcctcgaagaagatga

SEQ ID NO: 345156 - DNA, 19 bp, Homo sapiens
  siRNA target sequence for DCLRE1A (NM_014881.1,1957-1975).
cgacatggtcccttactga

SEQ ID NO: 345157 - DNA, 19 bp, Homo sapiens
  siRNA target sequence for DCLRE1A (NM_014881.1,1998-2016).
caaagtgaacagcttctta

SEQ ID NO: 345158 - DNA, 19 bp, Homo sapiens
  siRNA target sequence for DCLRE1A (NM_014881.1,2013-2031).
cttaactcgggataagtat

SEQ ID NO: 345159 - DNA, 19 bp, Homo sapiens
  siRNA target sequence for DCLRE1A (NM_014881.1,2018-2036).
ctcgggataagtatgatga

SEQ ID NO: 345160 - DNA, 19 bp, Homo sapiens
  siRNA target sequence for DCLRE1A (NM_014881.1,2028-2046).
gtatgatgaaggattgtat

SEQ ID NO: 345161 - DNA, 19 bp, Homo sapiens
  siRNA target sequence for DCLRE1A (NM_014881.1,2032-2050).
gatgaaggattgtatagat

SEQ ID NO: 345162 - DNA, 19 bp, Homo sapiens
  siRNA target sequence for DCLRE1A (NM_014881.1,2038-2056).
ggattgtatagattcaata

SEQ ID NO: 345163 - DNA, 19 bp, Homo sapiens
  siRNA target sequence for DCLRE1A (NM_014881.1,2048-2066).
gattcaatagtctaaatga

SEQ ID NO: 345164 - DNA, 19 bp, Homo sapiens
  siRNA target sequence for DCLRE1A (NM_014881.1,2065-2083).
gatttgtctcaacctattt

SEQ ID NO: 345165 - DNA, 19 bp, Homo sapiens
  siRNA target sequence for DCLRE1A (NM_014881.1,2099-2117).
gtactttgccttatgatct

SEQ ID NO: 345166 - DNA, 19 bp, Homo sapiens
  siRNA target sequence for DCLRE1A (NM_014881.1,2123-2141).
gtactggtggtgattttgt

SEQ ID NO: 345167 - DNA, 19 bp, Homo sapiens
  siRNA target sequence for DCLRE1A (NM_014881.1,2126-2144).
ctggtggtgattttgtgtt

SEQ ID NO: 345168 - DNA, 19 bp, Homo sapiens
  siRNA target sequence for DCLRE1A (NM_014881.1,2185-2203).
catcaggcaactaaagcaa

SEQ ID NO: 345169 - DNA, 19 bp, Homo sapiens
  siRNA target sequence for DCLRE1A (NM_014881.1,2224-2242).
cactcagctcaatcaaata

SEQ ID NO: 345170 - DNA, 19 bp, Homo sapiens
  siRNA target sequence for DCLRE1A (NM_014881.1,2228-2246).
cagctcaatcaaataaaca

SEQ ID NO: 345171 - DNA, 19 bp, Homo sapiens
  siRNA target sequence for DCLRE1A (NM_014881.1,2251-2269).
caggtaattgaagaatcat

SEQ ID NO: 345172 - DNA, 19 bp, Homo sapiens
  siRNA target sequence for DCLRE1A (NM_014881.1,2284-2302).
gtttctcttccgttagtta

SEQ ID NO: 345173 - DNA, 19 bp, Homo sapiens
  siRNA target sequence for DCLRE1A (NM_014881.1,2290-2308).
cttccgttagttaagagtt

SEQ ID NO: 345174 - DNA, 19 bp, Homo sapiens
  siRNA target sequence for DCLRE1A (NM_014881.1,2334-2352).
ggtagaagggtatctttct

SEQ ID NO: 345175 - DNA, 19 bp, Homo sapiens
  siRNA target sequence for DCLRE1A (NM_014881.1,2390-2408).
gtgagaacttgaatgctaa

SEQ ID NO: 345176 - DNA, 19 bp, Homo sapiens
  siRNA target sequence for DCLRE1A (NM_014881.1,2404-2422).
gctaagaataatactaact

SEQ ID NO: 345177 - DNA, 19 bp, Homo sapiens
  siRNA target sequence for DCLRE1A (NM_014881.1,2455-2473).
gtgccagttggtaaagcta

SEQ ID NO: 345178 - DNA, 19 bp, Homo sapiens
  siRNA target sequence for DCLRE1A (NM_014881.1,2459-2477).
cagttggtaaagctacaat

SEQ ID NO: 345179 - DNA, 19 bp, Homo sapiens
  siRNA target sequence for DCLRE1A (NM_014881.1,2506-2524).
cctgctccgaagtatttga

SEQ ID NO: 345180 - DNA, 19 bp, Homo sapiens
  siRNA target sequence for DCLRE1A (NM_014881.1,2509-2527).
gctccgaagtatttgaaaa

SEQ ID NO: 345181 - DNA, 19 bp, Homo sapiens
  siRNA target sequence for DCLRE1A (NM_014881.1,2510-2528).
ctccgaagtatttgaaaat

SEQ ID NO: 345182 - DNA, 19 bp, Homo sapiens
  siRNA target sequence for DCLRE1A (NM_014881.1,2532-2550).
gccttctggtcttaagtat

SEQ ID NO: 345183 - DNA, 19 bp, Homo sapiens
  siRNA target sequence for DCLRE1A (NM_014881.1,2533-2551).
ccttctggtcttaagtata

SEQ ID NO: 345184 - DNA, 19 bp, Homo sapiens
  siRNA target sequence for DCLRE1A (NM_014881.1,2534-2552).
cttctggtcttaagtataa

SEQ ID NO: 345185 - DNA, 19 bp, Homo sapiens
  siRNA target sequence for DCLRE1A (NM_014881.1,2580-2598).
gaagcaaatggatataggt

SEQ ID NO: 345186 - DNA, 19 bp, Homo sapiens
  siRNA target sequence for DCLRE1A (NM_014881.1,2640-2658).
gctaggggaaagtgcatta

SEQ ID NO: 345187 - DNA, 19 bp, Homo sapiens
  siRNA target sequence for DCLRE1A (NM_014881.1,2653-2671).
gcattagaagggataaact

SEQ ID NO: 345188 - DNA, 19 bp, Homo sapiens
  siRNA target sequence for DCLRE1A (NM_014881.1,2654-2672).
cattagaagggataaactt

SEQ ID NO: 345189 - DNA, 19 bp, Homo sapiens
  siRNA target sequence for DCLRE1A (NM_014881.1,2680-2698).
gttccaagtcctaatcaaa

SEQ ID NO: 345190 - DNA, 19 bp, Homo sapiens
  siRNA target sequence for DCLRE1A (NM_014881.1,2749-2767).
gaatttgatgcaagtactt

SEQ ID NO: 345191 - DNA, 19 bp, Homo sapiens
  siRNA target sequence for DCLRE1A (NM_014881.1,2779-2797).
cagctttctgtggaacttt

SEQ ID NO: 345192 - DNA, 19 bp, Homo sapiens
  siRNA target sequence for DCLRE1A (NM_014881.1,2805-2823).
gaggtcacagcgtcaaaaa

SEQ ID NO: 345193 - DNA, 19 bp, Homo sapiens
  siRNA target sequence for DCLRE1A (NM_014881.1,2807-2825).
ggtcacagcgtcaaaaaaa

SEQ ID NO: 345194 - DNA, 19 bp, Homo sapiens
  siRNA target sequence for DCLRE1A (NM_014881.1,2812-2830).
cagcgtcaaaaaaagagat

SEQ ID NO: 345195 - DNA, 19 bp, Homo sapiens
  siRNA target sequence for DCLRE1A (NM_014881.1,2857-2875).
ggagcgtgtcagaagagat

SEQ ID NO: 345196 - DNA, 19 bp, Homo sapiens
  siRNA target sequence for DCLRE1A (NM_014881.1,2873-2891).
gatcagatcaccttattaa

SEQ ID NO: 345197 - DNA, 19 bp, Homo sapiens
  siRNA target sequence for DCLRE1A (NM_014881.1,2881-2899).
caccttattaatacagaat

SEQ ID NO: 345198 - DNA, 19 bp, Homo sapiens
  siRNA target sequence for DCLRE1A (NM_014881.1,2883-2901).
ccttattaatacagaatct

SEQ ID NO: 345199 - DNA, 19 bp, Homo sapiens
  siRNA target sequence for DCLRE1A (NM_014881.1,2896-2914).
gaatctgaagcagtcaatt

SEQ ID NO: 345200 - DNA, 19 bp, Homo sapiens
  siRNA target sequence for DCLRE1A (NM_014881.1,2979-2997).
cccagagtcatctaatgta

SEQ ID NO: 345201 - DNA, 19 bp, Homo sapiens
  siRNA target sequence for DCLRE1A (NM_014881.1,2995-3013).
gtaggaggatcaagaaaaa

SEQ ID NO: 345202 - DNA, 19 bp, Homo sapiens
  siRNA target sequence for DCLRE1A (NM_014881.1,3127-3145).
cattatgctggattgtcta

SEQ ID NO: 345203 - DNA, 19 bp, Homo sapiens
  siRNA target sequence for DCLRE1A (NM_014881.1,3153-3171).
cacatttccagtttattgt

SEQ ID NO: 345204 - DNA, 19 bp, Homo sapiens
  siRNA target sequence for DCLRE1A (NM_014881.1,3163-3181).
gtttattgtagtgagataa

SEQ ID NO: 345205 - DNA, 19 bp, Homo sapiens
  siRNA target sequence for DCLRE1A (NM_014881.1,3244-3262).
gacactgaatgtattgtga

SEQ ID NO: 345206 - DNA, 19 bp, Homo sapiens
  siRNA target sequence for DCLRE1A (NM_014881.1,3261-3279).
gaatggtgtcaaagttgtt

SEQ ID NO: 345207 - DNA, 19 bp, Homo sapiens
  siRNA target sequence for DCLRE1A (NM_014881.1,3332-3350).
ctaatggtactgtcatatt

SEQ ID NO: 345208 - DNA, 19 bp, Homo sapiens
  siRNA target sequence for DCLRE1A (NM_014881.1,3337-3355).
ggtactgtcatattacaca

SEQ ID NO: 345209 - DNA, 19 bp, Homo sapiens
  siRNA target sequence for DCLRE1A (NM_014881.1,3378-3396).
cagcatggaacgttctctt

SEQ ID NO: 345210 - DNA, 19 bp, Homo sapiens
  siRNA target sequence for DCLRE1A (NM_014881.1,3401-3419).
cggaccagaaagtccatat

SEQ ID NO: 345211 - DNA, 19 bp, Homo sapiens
  siRNA target sequence for DCLRE1A (NM_014881.1,3423-3441).
gtacttagataccacatat

SEQ ID NO: 345212 - DNA, 19 bp, Homo sapiens
  siRNA target sequence for DCLRE1A (NM_014881.1,3464-3482).
catctcagcaagaggttat

SEQ ID NO: 345213 - DNA, 19 bp, Homo sapiens
  siRNA target sequence for DCLRE1A (NM_014881.1,3503-3521).
cctttgaggctgtaactct

SEQ ID NO: 345214 - DNA, 19 bp, Homo sapiens
  siRNA target sequence for DCLRE1A (NM_014881.1,3538-3556).
gttgtctgtggcacttact

SEQ ID NO: 345215 - DNA, 19 bp, Homo sapiens
  siRNA target sequence for DCLRE1A (NM_014881.1,3541-3559).
gtctgtggcacttactcta

SEQ ID NO: 345216 - DNA, 19 bp, Homo sapiens
  siRNA target sequence for DCLRE1A (NM_014881.1,3543-3561).
ctgtggcacttactctatt

SEQ ID NO: 345217 - DNA, 19 bp, Homo sapiens
  siRNA target sequence for DCLRE1A (NM_014881.1,3683-3701).
ccgacatgtgcagttcatt

SEQ ID NO: 345218 - DNA, 19 bp, Homo sapiens
  siRNA target sequence for DCLRE1A (NM_014881.1,3687-3705).
catgtgcagttcattggtt

SEQ ID NO: 345219 - DNA, 19 bp, Homo sapiens
  siRNA target sequence for DCLRE1A (NM_014881.1,3712-3730).
ctcccaatgatgcaaatta

SEQ ID NO: 345220 - DNA, 19 bp, Homo sapiens
  siRNA target sequence for DCLRE1A (NM_014881.1,3803-3821).
caggatggacacactctaa

SEQ ID NO: 345221 - DNA, 19 bp, Homo sapiens
  siRNA target sequence for DCLRE1A (NM_014881.1,3814-3832).
cactctaacaagttcacta

SEQ ID NO: 345222 - DNA, 19 bp, Homo sapiens
  siRNA target sequence for DCLRE1A (NM_014881.1,3822-3840).
caagttcactagaatagca

SEQ ID NO: 345223 - DNA, 19 bp, Homo sapiens
  siRNA target sequence for DCLRE1A (NM_014881.1,3943-3961).
ccccagaaaatcataccta

SEQ ID NO: 345224 - DNA, 19 bp, Homo sapiens
  siRNA target sequence for DCLRE1A (NM_014881.1,3970-3988).
gtgggcacctggaaatcta

SEQ ID NO: 345225 - DNA, 19 bp, Homo sapiens
  siRNA target sequence for KIAA0053 (NM_014882.1,430-448).
ccagggctgcatgtatcta

SEQ ID NO: 345226 - DNA, 19 bp, Homo sapiens
  siRNA target sequence for KIAA0053 (NM_014882.1,701-719).
cccatcctggtggagaaat

SEQ ID NO: 345227 - DNA, 19 bp, Homo sapiens
  siRNA target sequence for KIAA0053 (NM_014882.1,1045-1063).
ctgcaggttcctacatgaa

SEQ ID NO: 345228 - DNA, 19 bp, Homo sapiens
  siRNA target sequence for KIAA0053 (NM_014882.1,1047-1065).
gcaggttcctacatgaaat

SEQ ID NO: 345229 - DNA, 19 bp, Homo sapiens
  siRNA target sequence for KIAA0053 (NM_014882.1,1050-1068).
ggttcctacatgaaataca

SEQ ID NO: 345230 - DNA, 19 bp, Homo sapiens
  siRNA target sequence for KIAA0053 (NM_014882.1,1113-1131).
ctgtgattggtgtgaatct

SEQ ID NO: 345231 - DNA, 19 bp, Homo sapiens
  siRNA target sequence for KIAA0053 (NM_014882.1,1151-1169).
gaccctgccgtgatcatga

SEQ ID NO: 345232 - DNA, 19 bp, Homo sapiens
  siRNA target sequence for KIAA0053 (NM_014882.1,1369-1387).
gacaagcgactctgataca

SEQ ID NO: 345233 - DNA, 19 bp, Homo sapiens
  siRNA target sequence for KIAA0053 (NM_014882.1,1426-1444).
ggaggacagcagcaaagta

SEQ ID NO: 345234 - DNA, 19 bp, Homo sapiens
  siRNA target sequence for KIAA0053 (NM_014882.1,1499-1517).
ctccctaaccggaaatgtt

SEQ ID NO: 345235 - DNA, 19 bp, Homo sapiens
  siRNA target sequence for KIAA0053 (NM_014882.1,1502-1520).
cctaaccggaaatgtttct

SEQ ID NO: 345236 - DNA, 19 bp, Homo sapiens
  siRNA target sequence for KIAA0053 (NM_014882.1,1503-1521).
ctaaccggaaatgtttctt

SEQ ID NO: 345237 - DNA, 19 bp, Homo sapiens
  siRNA target sequence for KIAA0053 (NM_014882.1,1539-1557).
gtgccaacagcagcaaaat

SEQ ID NO: 345238 - DNA, 19 bp, Homo sapiens
  siRNA target sequence for KIAA0053 (NM_014882.1,1634-1652).
caagacttgcgccaacttt

SEQ ID NO: 345239 - DNA, 19 bp, Homo sapiens
  siRNA target sequence for KIAA0053 (NM_014882.1,1664-1682).
cggacttccacctacgata

SEQ ID NO: 345240 - DNA, 19 bp, Homo sapiens
  siRNA target sequence for KIAA0053 (NM_014882.1,1665-1683).
ggacttccacctacgataa

SEQ ID NO: 345241 - DNA, 19 bp, Homo sapiens
  siRNA target sequence for KIAA0053 (NM_014882.1,1668-1686).
cttccacctacgataacgt

SEQ ID NO: 345242 - DNA, 19 bp, Homo sapiens
  siRNA target sequence for KIAA0053 (NM_014882.1,1766-1784).
gccagtccaaactctgaaa

SEQ ID NO: 345243 - DNA, 19 bp, Homo sapiens
  siRNA target sequence for KIAA0053 (NM_014882.1,1843-1861).
ccaagagctacgaaaggaa

SEQ ID NO: 345244 - DNA, 19 bp, Homo sapiens
  siRNA target sequence for KIAA0053 (NM_014882.1,1849-1867).
gctacgaaaggaaatagaa

SEQ ID NO: 345245 - DNA, 19 bp, Homo sapiens
  siRNA target sequence for KIAA0053 (NM_014882.1,1869-1887).
cacagaagcaaatgtatga

SEQ ID NO: 345246 - DNA, 19 bp, Homo sapiens
  siRNA target sequence for KIAA0053 (NM_014882.1,1939-1957).
ggtgaggctcaatgaagaa

SEQ ID NO: 345247 - DNA, 19 bp, Homo sapiens
  siRNA target sequence for KIAA0053 (NM_014882.1,2016-2034).
gctcccgggaggatgttga

SEQ ID NO: 345248 - DNA, 19 bp, Homo sapiens
  siRNA target sequence for FAM13A1 (NM_014883.1,278-296).
ctgtcacctttctatttga

SEQ ID NO: 345249 - DNA, 19 bp, Homo sapiens
  siRNA target sequence for FAM13A1 (NM_014883.1,280-298).
gtcacctttctatttgagt

SEQ ID NO: 345250 - DNA, 19 bp, Homo sapiens
  siRNA target sequence for FAM13A1 (NM_014883.1,289-307).
ctatttgagtgctcatgta

SEQ ID NO: 345251 - DNA, 19 bp, Homo sapiens
  siRNA target sequence for FAM13A1 (NM_014883.1,308-326).
ccccaagtcagcaatgtgt

SEQ ID NO: 345252 - DNA, 19 bp, Homo sapiens
  siRNA target sequence for FAM13A1 (NM_014883.1,327-345).
ctgcaaccggagaactctt

SEQ ID NO: 345253 - DNA, 19 bp, Homo sapiens
  siRNA target sequence for FAM13A1 (NM_014883.1,330-348).
caaccggagaactcttaga

SEQ ID NO: 345254 - DNA, 19 bp, Homo sapiens
  siRNA target sequence for FAM13A1 (NM_014883.1,355-373).
catccgatcagctgtagaa

SEQ ID NO: 345255 - DNA, 19 bp, Homo sapiens
  siRNA target sequence for FAM13A1 (NM_014883.1,358-376).
ccgatcagctgtagaacaa

SEQ ID NO: 345256 - DNA, 19 bp, Homo sapiens
  siRNA target sequence for FAM13A1 (NM_014883.1,360-378).
gatcagctgtagaacaaca

SEQ ID NO: 345257 - DNA, 19 bp, Homo sapiens
  siRNA target sequence for FAM13A1 (NM_014883.1,510-528).
ggagagacaagggacttat

SEQ ID NO: 345258 - DNA, 19 bp, Homo sapiens
  siRNA target sequence for FAM13A1 (NM_014883.1,513-531).
gagacaagggacttatcaa

SEQ ID NO: 345259 - DNA, 19 bp, Homo sapiens
  siRNA target sequence for FAM13A1 (NM_014883.1,552-570).
ggttcaaccaccttgatga

SEQ ID NO: 345260 - DNA, 19 bp, Homo sapiens
  siRNA target sequence for FAM13A1 (NM_014883.1,559-577).
ccaccttgatgattgtatt

SEQ ID NO: 345261 - DNA, 19 bp, Homo sapiens
  siRNA target sequence for FAM13A1 (NM_014883.1,593-611).
gtcgaaaaggtacacaaaa

SEQ ID NO: 345262 - DNA, 19 bp, Homo sapiens
  siRNA target sequence for FAM13A1 (NM_014883.1,595-613).
cgaaaaggtacacaaaaat

SEQ ID NO: 345263 - DNA, 19 bp, Homo sapiens
  siRNA target sequence for FAM13A1 (NM_014883.1,644-662).
cctaaacgtcagaaatcca

SEQ ID NO: 345264 - DNA, 19 bp, Homo sapiens
  siRNA target sequence for FAM13A1 (NM_014883.1,650-668).
cgtcagaaatccagtacta

SEQ ID NO: 345265 - DNA, 19 bp, Homo sapiens
  siRNA target sequence for FAM13A1 (NM_014883.1,655-673).
gaaatccagtactaaactt

SEQ ID NO: 345266 - DNA, 19 bp, Homo sapiens
  siRNA target sequence for FAM13A1 (NM_014883.1,660-678).
ccagtactaaactttctga

SEQ ID NO: 345267 - DNA, 19 bp, Homo sapiens
  siRNA target sequence for FAM13A1 (NM_014883.1,692-710).
caggacggtcttgtgaata

SEQ ID NO: 345268 - DNA, 19 bp, Homo sapiens
  siRNA target sequence for FAM13A1 (NM_014883.1,697-715).
cggtcttgtgaatatggaa

SEQ ID NO: 345269 - DNA, 19 bp, Homo sapiens
  siRNA target sequence for FAM13A1 (NM_014883.1,721-739).
caattccacacgatctcat

SEQ ID NO: 345270 - DNA, 19 bp, Homo sapiens
  siRNA target sequence for FAM13A1 (NM_014883.1,744-762).
gaactggacctgatgattt

SEQ ID NO: 345271 - DNA, 19 bp, Homo sapiens
  siRNA target sequence for FAM13A1 (NM_014883.1,764-782).
gaatggatgtctgatgaaa

SEQ ID NO: 345272 - DNA, 19 bp, Homo sapiens
  siRNA target sequence for FAM13A1 (NM_014883.1,943-961).
gactgcattgtgtgatgaa

SEQ ID NO: 345273 - DNA, 19 bp, Homo sapiens
  siRNA target sequence for FAM13A1 (NM_014883.1,1166-1184).
ccaaactcccattctttca

SEQ ID NO: 345274 - DNA, 19 bp, Homo sapiens
  siRNA target sequence for FAM13A1 (NM_014883.1,1246-1264).
ccagctcacacgaaggatt

SEQ ID NO: 345275 - DNA, 19 bp, Homo sapiens
  siRNA target sequence for FAM13A1 (NM_014883.1,1250-1268).
ctcacacgaaggattcaga

SEQ ID NO: 345276 - DNA, 19 bp, Homo sapiens
  siRNA target sequence for FAM13A1 (NM_014883.1,1286-1304).
cggaagtttgaagatagat

SEQ ID NO: 345277 - DNA, 19 bp, Homo sapiens
  siRNA target sequence for FAM13A1 (NM_014883.1,1291-1309).
gtttgaagatagattcgaa

SEQ ID NO: 345278 - DNA, 19 bp, Homo sapiens
  siRNA target sequence for FAM13A1 (NM_014883.1,1350-1368).
ccaatccggaggttctgaa

SEQ ID NO: 345279 - DNA, 19 bp, Homo sapiens
  siRNA target sequence for FAM13A1 (NM_014883.1,1351-1369).
caatccggaggttctgaaa

SEQ ID NO: 345280 - DNA, 19 bp, Homo sapiens
  siRNA target sequence for FAM13A1 (NM_014883.1,1387-1405).
caaattccggagacaactt

SEQ ID NO: 345281 - DNA, 19 bp, Homo sapiens
  siRNA target sequence for FAM13A1 (NM_014883.1,1526-1544).
ctggtggataaagcaataa

SEQ ID NO: 345282 - DNA, 19 bp, Homo sapiens
  siRNA target sequence for FAM13A1 (NM_014883.1,1553-1571).
gttgaagccacattggaat

SEQ ID NO: 345283 - DNA, 19 bp, Homo sapiens
  siRNA target sequence for FAM13A1 (NM_014883.1,1556-1574).
gaagccacattggaatcta

SEQ ID NO: 345284 - DNA, 19 bp, Homo sapiens
  siRNA target sequence for FAM13A1 (NM_014883.1,1616-1634).
cctgaggacattaaggata

SEQ ID NO: 345285 - DNA, 19 bp, Homo sapiens
  siRNA target sequence for FAM13A1 (NM_014883.1,1617-1635).
ctgaggacattaaggatat

SEQ ID NO: 345286 - DNA, 19 bp, Homo sapiens
  siRNA target sequence for FAM13A1 (NM_014883.1,1672-1690).
gcagaaagctctgttatat

SEQ ID NO: 345287 - DNA, 19 bp, Homo sapiens
  siRNA target sequence for FAM13A1 (NM_014883.1,1673-1691).
cagaaagctctgttatatt

SEQ ID NO: 345288 - DNA, 19 bp, Homo sapiens
  siRNA target sequence for FAM13A1 (NM_014883.1,1758-1776).
ggtaccggctggtcaaaca

SEQ ID NO: 345289 - DNA, 19 bp, Homo sapiens
  siRNA target sequence for FAM13A1 (NM_014883.1,1909-1927).
gtcagaagacgatagcaat

SEQ ID NO: 345290 - DNA, 19 bp, Homo sapiens
  siRNA target sequence for FAM13A1 (NM_014883.1,1977-1995).
gctttctggaccaattcga

SEQ ID NO: 345291 - DNA, 19 bp, Homo sapiens
  siRNA target sequence for FAM13A1 (NM_014883.1,2000-2018).
gacgctgatggatttattt

SEQ ID NO: 345292 - DNA, 19 bp, Homo sapiens
  siRNA target sequence for C6orf84 (NM_014895.1,321-339).
ctgatagcttagaaacaaa

SEQ ID NO: 345293 - DNA, 19 bp, Homo sapiens
  siRNA target sequence for C6orf84 (NM_014895.1,350-368).
gtttctgagctcaaccata

SEQ ID NO: 345294 - DNA, 19 bp, Homo sapiens
  siRNA target sequence for C6orf84 (NM_014895.1,382-400).
gggattggacacattagaa

SEQ ID NO: 345295 - DNA, 19 bp, Homo sapiens
  siRNA target sequence for C6orf84 (NM_014895.1,384-402).
gattggacacattagaaga

SEQ ID NO: 345296 - DNA, 19 bp, Homo sapiens
  siRNA target sequence for C6orf84 (NM_014895.1,434-452).
cttgagaaaggcttgacat

SEQ ID NO: 345297 - DNA, 19 bp, Homo sapiens
  siRNA target sequence for C6orf84 (NM_014895.1,445-463).
cttgacatcttccattgat

SEQ ID NO: 345298 - DNA, 19 bp, Homo sapiens
  siRNA target sequence for C6orf84 (NM_014895.1,492-510).
ctaatgactctacacattt

SEQ ID NO: 345299 - DNA, 19 bp, Homo sapiens
  siRNA target sequence for C6orf84 (NM_014895.1,530-548).
caagccaacgcagaactaa

SEQ ID NO: 345300 - DNA, 19 bp, Homo sapiens
  siRNA target sequence for C6orf84 (NM_014895.1,535-553).
caacgcagaactaactgat

SEQ ID NO: 345301 - DNA, 19 bp, Homo sapiens
  siRNA target sequence for C6orf84 (NM_014895.1,629-647).
ggtgcaccgttgactacta

SEQ ID NO: 345302 - DNA, 19 bp, Homo sapiens
  siRNA target sequence for C6orf84 (NM_014895.1,630-648).
gtgcaccgttgactactaa

SEQ ID NO: 345303 - DNA, 19 bp, Homo sapiens
  siRNA target sequence for C6orf84 (NM_014895.1,633-651).
caccgttgactactaaaga

SEQ ID NO: 345304 - DNA, 19 bp, Homo sapiens
  siRNA target sequence for C6orf84 (NM_014895.1,636-654).
cgttgactactaaagatga

SEQ ID NO: 345305 - DNA, 19 bp, Homo sapiens
  siRNA target sequence for C6orf84 (NM_014895.1,637-655).
gttgactactaaagatgaa

SEQ ID NO: 345306 - DNA, 19 bp, Homo sapiens
  siRNA target sequence for C6orf84 (NM_014895.1,656-674).
gagatgccttccaaagaga

SEQ ID NO: 345307 - DNA, 19 bp, Homo sapiens
  siRNA target sequence for C6orf84 (NM_014895.1,658-676).
gatgccttccaaagagaat

SEQ ID NO: 345308 - DNA, 19 bp, Homo sapiens
  siRNA target sequence for C6orf84 (NM_014895.1,667-685).
caaagagaattccaaatca

SEQ ID NO: 345309 - DNA, 19 bp, Homo sapiens
  siRNA target sequence for C6orf84 (NM_014895.1,723-741).
ctggcatgcttgctaatgt

SEQ ID NO: 345310 - DNA, 19 bp, Homo sapiens
  siRNA target sequence for C6orf84 (NM_014895.1,726-744).
gcatgcttgctaatgttgt

SEQ ID NO: 345311 - DNA, 19 bp, Homo sapiens
  siRNA target sequence for C6orf84 (NM_014895.1,746-764).
ctgcttgattcattagact

SEQ ID NO: 345312 - DNA, 19 bp, Homo sapiens
  siRNA target sequence for C6orf84 (NM_014895.1,847-865).
gacaggaacaggtgtttct

SEQ ID NO: 345313 - DNA, 19 bp, Homo sapiens
  siRNA target sequence for C6orf84 (NM_014895.1,886-904).
cgttgaagccctacatcaa

SEQ ID NO: 345314 - DNA, 19 bp, Homo sapiens
  siRNA target sequence for C6orf84 (NM_014895.1,893-911).
gccctacatcaagcttatt

SEQ ID NO: 345315 - DNA, 19 bp, Homo sapiens
  siRNA target sequence for C6orf84 (NM_014895.1,899-917).
catcaagcttattgtcata

SEQ ID NO: 345316 - DNA, 19 bp, Homo sapiens
  siRNA target sequence for C6orf84 (NM_014895.1,922-940).
ccattcattgggagatgaa

SEQ ID NO: 345317 - DNA, 19 bp, Homo sapiens
  siRNA target sequence for C6orf84 (NM_014895.1,1033-1051).
ctctactatggaatctgat

SEQ ID NO: 345318 - DNA, 19 bp, Homo sapiens
  siRNA target sequence for C6orf84 (NM_014895.1,1100-1118).
gggatcagtggttttgatt

SEQ ID NO: 345319 - DNA, 19 bp, Homo sapiens
  siRNA target sequence for C6orf84 (NM_014895.1,1101-1119).
ggatcagtggttttgattt

SEQ ID NO: 345320 - DNA, 19 bp, Homo sapiens
  siRNA target sequence for C6orf84 (NM_014895.1,1218-1236).
cacaacatgtgaacctttt

SEQ ID NO: 345321 - DNA, 19 bp, Homo sapiens
  siRNA target sequence for C6orf84 (NM_014895.1,1220-1238).
caacatgtgaacctttttt

SEQ ID NO: 345322 - DNA, 19 bp, Homo sapiens
  siRNA target sequence for C6orf84 (NM_014895.1,1395-1413).
cattatctcaggatgacaa

SEQ ID NO: 345323 - DNA, 19 bp, Homo sapiens
  siRNA target sequence for C6orf84 (NM_014895.1,1429-1447).
cagatctcaacttagttct

SEQ ID NO: 345324 - DNA, 19 bp, Homo sapiens
  siRNA target sequence for C6orf84 (NM_014895.1,1458-1476).
gggctgtaatgggtaaaca

SEQ ID NO: 345325 - DNA, 19 bp, Homo sapiens
  siRNA target sequence for C6orf84 (NM_014895.1,1500-1518).
gtgcacctcctttacttaa

SEQ ID NO: 345326 - DNA, 19 bp, Homo sapiens
  siRNA target sequence for C6orf84 (NM_014895.1,1502-1520).
gcacctcctttacttaaaa

SEQ ID NO: 345327 - DNA, 19 bp, Homo sapiens
  siRNA target sequence for C6orf84 (NM_014895.1,1578-1596).
gttcaccactcaagatgtt

SEQ ID NO: 345328 - DNA, 19 bp, Homo sapiens
  siRNA target sequence for C6orf84 (NM_014895.1,1639-1657).
caaaaacttgagatcgatt

SEQ ID NO: 345329 - DNA, 19 bp, Homo sapiens
  siRNA target sequence for C6orf84 (NM_014895.1,1764-1782).
ctcgtaagaagtctgaaaa

SEQ ID NO: 345330 - DNA, 19 bp, Homo sapiens
  siRNA target sequence for C6orf84 (NM_014895.1,1903-1921).
gggtgcgcaagccctaatt

SEQ ID NO: 345331 - DNA, 19 bp, Homo sapiens
  siRNA target sequence for C6orf84 (NM_014895.1,1905-1923).
gtgcgcaagccctaattga

SEQ ID NO: 345332 - DNA, 19 bp, Homo sapiens
  siRNA target sequence for C6orf84 (NM_014895.1,2199-2217).
gattatataatcaagtaaa

SEQ ID NO: 345333 - DNA, 19 bp, Homo sapiens
  siRNA target sequence for C6orf84 (NM_014895.1,2248-2266).
ggagcgaatgtttaaggaa

SEQ ID NO: 345334 - DNA, 19 bp, Homo sapiens
  siRNA target sequence for C6orf84 (NM_014895.1,2249-2267).
gagcgaatgtttaaggaaa

SEQ ID NO: 345335 - DNA, 19 bp, Homo sapiens
  siRNA target sequence for C6orf84 (NM_014895.1,2281-2299).
cagtgaggtagcttcctta

SEQ ID NO: 345336 - DNA, 19 bp, Homo sapiens
  siRNA target sequence for C6orf84 (NM_014895.1,2308-2326).
gatgcacaaaagtcgtttt

SEQ ID NO: 345337 - DNA, 19 bp, Homo sapiens
  siRNA target sequence for C6orf84 (NM_014895.1,2312-2330).
cacaaaagtcgttttctgt

SEQ ID NO: 345338 - DNA, 19 bp, Homo sapiens
  siRNA target sequence for C6orf84 (NM_014895.1,2329-2347).
gtctcaagtagttgaagat

SEQ ID NO: 345339 - DNA, 19 bp, Homo sapiens
  siRNA target sequence for C6orf84 (NM_014895.1,2353-2371).
gcccacaagaaatcagaat

SEQ ID NO: 345340 - DNA, 19 bp, Homo sapiens
  siRNA target sequence for C6orf84 (NM_014895.1,2355-2373).
ccacaagaaatcagaattt

SEQ ID NO: 345341 - DNA, 19 bp, Homo sapiens
  siRNA target sequence for C6orf84 (NM_014895.1,2368-2386).
gaattttacagatctgtta

SEQ ID NO: 345342 - DNA, 19 bp, Homo sapiens
  siRNA target sequence for C6orf84 (NM_014895.1,2468-2486).
gaagtagacttcgaaaaaa

SEQ ID NO: 345343 - DNA, 19 bp, Homo sapiens
  siRNA target sequence for C6orf84 (NM_014895.1,2497-2515).
gagggaccaagccaaagat

SEQ ID NO: 345344 - DNA, 19 bp, Homo sapiens
  siRNA target sequence for C6orf84 (NM_014895.1,2499-2517).
gggaccaagccaaagatca

SEQ ID NO: 345345 - DNA, 19 bp, Homo sapiens
  siRNA target sequence for C6orf84 (NM_014895.1,2589-2607).
gtcgtctgcaaaaaagatt

SEQ ID NO: 345346 - DNA, 19 bp, Homo sapiens
  siRNA target sequence for C6orf84 (NM_014895.1,2687-2705).
ctcaaacttgagattgaga

SEQ ID NO: 345347 - DNA, 19 bp, Homo sapiens
  siRNA target sequence for C6orf84 (NM_014895.1,2689-2707).
caaacttgagattgagaaa

SEQ ID NO: 345348 - DNA, 19 bp, Homo sapiens
  siRNA target sequence for C6orf84 (NM_014895.1,2730-2748).
catctattcggcagaagat

SEQ ID NO: 345349 - DNA, 19 bp, Homo sapiens
  siRNA target sequence for C6orf84 (NM_014895.1,2740-2758).
gcagaagatacgcttaaaa

SEQ ID NO: 345350 - DNA, 19 bp, Homo sapiens
  siRNA target sequence for C6orf84 (NM_014895.1,2746-2764).
gatacgcttaaaagataaa

SEQ ID NO: 345351 - DNA, 19 bp, Homo sapiens
  siRNA target sequence for C6orf84 (NM_014895.1,2788-2806).
ggatctggagcgacaagtt

SEQ ID NO: 345352 - DNA, 19 bp, Homo sapiens
  siRNA target sequence for C6orf84 (NM_014895.1,2795-2813).
gagcgacaagttaaggaaa

SEQ ID NO: 345353 - DNA, 19 bp, Homo sapiens
  siRNA target sequence for C6orf84 (NM_014895.1,2810-2828).
gaaatggaagggattctga

SEQ ID NO: 345354 - DNA, 19 bp, Homo sapiens
  siRNA target sequence for C6orf84 (NM_014895.1,2821-2839).
gattctgaagagaagatat

SEQ ID NO: 345355 - DNA, 19 bp, Homo sapiens
  siRNA target sequence for C6orf84 (NM_014895.1,2842-2860).
caattctttacctgcttta

SEQ ID NO: 345356 - DNA, 19 bp, Homo sapiens
  siRNA target sequence for C6orf84 (NM_014895.1,2985-3003).
gtaccatggaacaacagtt

SEQ ID NO: 345357 - DNA, 19 bp, Homo sapiens
  siRNA target sequence for C6orf84 (NM_014895.1,3063-3081).
gcaaattgaatcaacatga

SEQ ID NO: 345358 - DNA, 19 bp, Homo sapiens
  siRNA target sequence for C6orf84 (NM_014895.1,3077-3095).
catgactctcccagaatta

SEQ ID NO: 345359 - DNA, 19 bp, Homo sapiens
  siRNA target sequence for C6orf84 (NM_014895.1,3161-3179).
gccgaaatagacgttctta

SEQ ID NO: 345360 - DNA, 19 bp, Homo sapiens
  siRNA target sequence for C6orf84 (NM_014895.1,3162-3180).
ccgaaatagacgttcttaa

SEQ ID NO: 345361 - DNA, 19 bp, Homo sapiens
  siRNA target sequence for C6orf84 (NM_014895.1,3163-3181).
cgaaatagacgttcttaaa

SEQ ID NO: 345362 - DNA, 19 bp, Homo sapiens
  siRNA target sequence for C6orf84 (NM_014895.1,3192-3210).
ctgaattagacgtcaagaa

SEQ ID NO: 345363 - DNA, 19 bp, Homo sapiens
  siRNA target sequence for C6orf84 (NM_014895.1,3202-3220).
cgtcaagaaaaatgataaa

SEQ ID NO: 345364 - DNA, 19 bp, Homo sapiens
  siRNA target sequence for C6orf84 (NM_014895.1,3260-3278).
caggctcatgctaaagcta

SEQ ID NO: 345365 - DNA, 19 bp, Homo sapiens
  siRNA target sequence for C6orf84 (NM_014895.1,3362-3380).
gacagaagaatgatgctat

SEQ ID NO: 345366 - DNA, 19 bp, Homo sapiens
  siRNA target sequence for C6orf84 (NM_014895.1,3414-3432).
ctgccaaaagggcaaagaa

SEQ ID NO: 345367 - DNA, 19 bp, Homo sapiens
  siRNA target sequence for C6orf84 (NM_014895.1,3442-3460).
gcactcaagtaaaggaaat

SEQ ID NO: 345368 - DNA, 19 bp, Homo sapiens
  siRNA target sequence for C6orf84 (NM_014895.1,3493-3511).
gctgtaccaaccacatact

SEQ ID NO: 345369 - DNA, 19 bp, Homo sapiens
  siRNA target sequence for C6orf84 (NM_014895.1,3499-3517).
ccaaccacatactttcact

SEQ ID NO: 345370 - DNA, 19 bp, Homo sapiens
  siRNA target sequence for C6orf84 (NM_014895.1,3568-3586).
gctagaaggattaatttca

SEQ ID NO: 345371 - DNA, 19 bp, Homo sapiens
  siRNA target sequence for C6orf84 (NM_014895.1,3762-3780).
ctgaactaaatcgtaaaat

SEQ ID NO: 345372 - DNA, 19 bp, Homo sapiens
  siRNA target sequence for C6orf84 (NM_014895.1,3767-3785).
ctaaatcgtaaaatagcaa

SEQ ID NO: 345373 - DNA, 19 bp, Homo sapiens
  siRNA target sequence for C6orf84 (NM_014895.1,3782-3800).
gcaactcaagaggtactta

SEQ ID NO: 345374 - DNA, 19 bp, Homo sapiens
  siRNA target sequence for C6orf84 (NM_014895.1,3783-3801).
caactcaagaggtacttat

SEQ ID NO: 345375 - DNA, 19 bp, Homo sapiens
  siRNA target sequence for C6orf84 (NM_014895.1,3791-3809).
gaggtacttataagacatt

SEQ ID NO: 345376 - DNA, 19 bp, Homo sapiens
  siRNA target sequence for C6orf84 (NM_014895.1,3842-3860).
caagagtctctcgtagttt

SEQ ID NO: 345377 - DNA, 19 bp, Homo sapiens
  siRNA target sequence for C6orf84 (NM_014895.1,3847-3865).
gtctctcgtagtttctgaa

SEQ ID NO: 345378 - DNA, 19 bp, Homo sapiens
  siRNA target sequence for C6orf84 (NM_014895.1,3958-3976).
cgtgggcttagaaaagaaa

SEQ ID NO: 345379 - DNA, 19 bp, Homo sapiens
  siRNA target sequence for C6orf84 (NM_014895.1,4036-4054).
gcaaacacaccaagtagta

SEQ ID NO: 345380 - DNA, 19 bp, Homo sapiens
  siRNA target sequence for C6orf84 (NM_014895.1,4087-4105).
gaaaagactggcacagtta

SEQ ID NO: 345381 - DNA, 19 bp, Homo sapiens
  siRNA target sequence for C6orf84 (NM_014895.1,4123-4141).
gaagttccgcacagaacta

SEQ ID NO: 345382 - DNA, 19 bp, Homo sapiens
  siRNA target sequence for C6orf84 (NM_014895.1,4132-4150).
cacagaactagactcaata

SEQ ID NO: 345383 - DNA, 19 bp, Homo sapiens
  siRNA target sequence for KIAA0977 (NM_014900.1,337-355).
gaatccactgctttcatca

SEQ ID NO: 345384 - DNA, 19 bp, Homo sapiens
  siRNA target sequence for KIAA0977 (NM_014900.1,879-897).
gtcctgccaaatatcacaa

SEQ ID NO: 345385 - DNA, 19 bp, Homo sapiens
  siRNA target sequence for KIAA0977 (NM_014900.1,884-902).
gccaaatatcacaaaacct

SEQ ID NO: 345386 - DNA, 19 bp, Homo sapiens
  siRNA target sequence for KIAA0977 (NM_014900.1,885-903).
ccaaatatcacaaaaccta

SEQ ID NO: 345387 - DNA, 19 bp, Homo sapiens
  siRNA target sequence for KIAA0977 (NM_014900.1,987-1005).
ccctgcaacccctctagta

SEQ ID NO: 345388 - DNA, 19 bp, Homo sapiens
  siRNA target sequence for KIAA0977 (NM_014900.1,988-1006).
cctgcaacccctctagtaa

SEQ ID NO: 345389 - DNA, 19 bp, Homo sapiens
  siRNA target sequence for KIAA0977 (NM_014900.1,989-1007).
ctgcaacccctctagtaaa

SEQ ID NO: 345390 - DNA, 19 bp, Homo sapiens
  siRNA target sequence for KIAA0977 (NM_014900.1,991-1009).
gcaacccctctagtaaata

SEQ ID NO: 345391 - DNA, 19 bp, Homo sapiens
  siRNA target sequence for KIAA0977 (NM_014900.1,992-1010).
caacccctctagtaaataa

SEQ ID NO: 345392 - DNA, 19 bp, Homo sapiens
  siRNA target sequence for KIAA0977 (NM_014900.1,1032-1050).
gtccaataccatttccaaa

SEQ ID NO: 345393 - DNA, 19 bp, Homo sapiens
  siRNA target sequence for KIAA0977 (NM_014900.1,1040-1058).
ccatttccaaaccatatat

SEQ ID NO: 345394 - DNA, 19 bp, Homo sapiens
  siRNA target sequence for KIAA0977 (NM_014900.1,1159-1177).
gagaggcctgcttcttgta

SEQ ID NO: 345395 - DNA, 19 bp, Homo sapiens
  siRNA target sequence for KIAA0977 (NM_014900.1,1168-1186).
gcttcttgtatagtgaaat

SEQ ID NO: 345396 - DNA, 19 bp, Homo sapiens
  siRNA target sequence for KIAA0977 (NM_014900.1,1172-1190).
cttgtatagtgaaatccat

SEQ ID NO: 345397 - DNA, 19 bp, Homo sapiens
  siRNA target sequence for KIAA0977 (NM_014900.1,1193-1211).
gcgtggatgagacagataa

SEQ ID NO: 345398 - DNA, 19 bp, Homo sapiens
  siRNA target sequence for KIAA0977 (NM_014900.1,1266-1284).
gtctgcagggaattcatct

SEQ ID NO: 345399 - DNA, 19 bp, Homo sapiens
  siRNA target sequence for KIAA0977 (NM_014900.1,1334-1352).
cgcatcaaagtgatgaaaa

SEQ ID NO: 345400 - DNA, 19 bp, Homo sapiens
  siRNA target sequence for KIAA0977 (NM_014900.1,1611-1629).
gagtgaagtgcctaaagtt

SEQ ID NO: 345401 - DNA, 19 bp, Homo sapiens
  siRNA target sequence for KIAA0977 (NM_014900.1,1613-1631).
gtgaagtgcctaaagttga

SEQ ID NO: 345402 - DNA, 19 bp, Homo sapiens
  siRNA target sequence for KIAA0977 (NM_014900.1,1650-1668).
gaagtcacaagatattcct

SEQ ID NO: 345403 - DNA, 19 bp, Homo sapiens
  siRNA target sequence for KIAA0977 (NM_014900.1,1672-1690).
gtatctactgatataataa

SEQ ID NO: 345404 - DNA, 19 bp, Homo sapiens
  siRNA target sequence for KIAA0977 (NM_014900.1,1733-1751).
gtggagagttctcacaaaa

SEQ ID NO: 345405 - DNA, 19 bp, Homo sapiens
  siRNA target sequence for KIAA0977 (NM_014900.1,1735-1753).
ggagagttctcacaaaact

SEQ ID NO: 345406 - DNA, 19 bp, Homo sapiens
  siRNA target sequence for KIAA0977 (NM_014900.1,1795-1813).
gaaccacacagtgtagtat

SEQ ID NO: 345407 - DNA, 19 bp, Homo sapiens
  siRNA target sequence for KIAA0977 (NM_014900.1,1799-1817).
cacacagtgtagtatatga

SEQ ID NO: 345408 - DNA, 19 bp, Homo sapiens
  siRNA target sequence for KIAA0977 (NM_014900.1,1801-1819).
cacagtgtagtatatgata

SEQ ID NO: 345409 - DNA, 19 bp, Homo sapiens
  siRNA target sequence for KIAA0977 (NM_014900.1,1833-1851).
gaaggtagttgacagtata

SEQ ID NO: 345410 - DNA, 19 bp, Homo sapiens
  siRNA target sequence for KIAA0977 (NM_014900.1,1840-1858).
gttgacagtataagaaact

SEQ ID NO: 345411 - DNA, 19 bp, Homo sapiens
  siRNA target sequence for KIAA0977 (NM_014900.1,1871-1889).
gcccaaaccaagagaatgt

SEQ ID NO: 345412 - DNA, 19 bp, Homo sapiens
  siRNA target sequence for KIAA0977 (NM_014900.1,2005-2023).
gttgagagaccatcaaact

SEQ ID NO: 345413 - DNA, 19 bp, Homo sapiens
  siRNA target sequence for KIAA0977 (NM_014900.1,2086-2104).
gtaccagatcaaaaactga

SEQ ID NO: 345414 - DNA, 19 bp, Homo sapiens
  siRNA target sequence for KIAA0977 (NM_014900.1,2221-2239).
gtgcaaacttcaaataaca

SEQ ID NO: 345415 - DNA, 19 bp, Homo sapiens
  siRNA target sequence for KIAA0977 (NM_014900.1,2251-2269).
caacactcatgcttaagtt

SEQ ID NO: 345416 - DNA, 19 bp, Homo sapiens
  siRNA target sequence for KIAA0977 (NM_014900.1,2304-2322).
gagtcaaggcaccctaatt

SEQ ID NO: 345417 - DNA, 19 bp, Homo sapiens
  siRNA target sequence for KIAA0977 (NM_014900.1,2311-2329).
ggcaccctaattatacatt

SEQ ID NO: 345418 - DNA, 19 bp, Homo sapiens
  siRNA target sequence for KIAA0977 (NM_014900.1,2313-2331).
caccctaattatacattca

SEQ ID NO: 345419 - DNA, 19 bp, Homo sapiens
  siRNA target sequence for KIAA0977 (NM_014900.1,2315-2333).
ccctaattatacattcaga

SEQ ID NO: 345420 - DNA, 19 bp, Homo sapiens
  siRNA target sequence for KIAA0977 (NM_014900.1,2316-2334).
cctaattatacattcagaa

SEQ ID NO: 345421 - DNA, 19 bp, Homo sapiens
  siRNA target sequence for KIAA0977 (NM_014900.1,2346-2364).
cgtaaaagatccaatttgt

SEQ ID NO: 345422 - DNA, 19 bp, Homo sapiens
  siRNA target sequence for KIAA0977 (NM_014900.1,2363-2381).
gtgcacatggtaatgatga

SEQ ID NO: 345423 - DNA, 19 bp, Homo sapiens
  siRNA target sequence for KIAA0977 (NM_014900.1,2366-2384).
cacatggtaatgatgatct

SEQ ID NO: 345424 - DNA, 19 bp, Homo sapiens
  siRNA target sequence for KIAA0977 (NM_014900.1,2388-2406).
gcctcctgtagataggatt

SEQ ID NO: 345425 - DNA, 19 bp, Homo sapiens
  siRNA target sequence for KIAA0977 (NM_014900.1,2392-2410).
cctgtagataggattgaca

SEQ ID NO: 345426 - DNA, 19 bp, Homo sapiens
  siRNA target sequence for KIAA0977 (NM_014900.1,2395-2413).
gtagataggattgacaaaa

SEQ ID NO: 345427 - DNA, 19 bp, Homo sapiens
  siRNA target sequence for KIAA0977 (NM_014900.1,2398-2416).
gataggattgacaaaaatt

SEQ ID NO: 345428 - DNA, 19 bp, Homo sapiens
  siRNA target sequence for KIAA0977 (NM_014900.1,2488-2506).
gaaattacacgagagtata

SEQ ID NO: 345429 - DNA, 19 bp, Homo sapiens
  siRNA target sequence for KIAA0977 (NM_014900.1,2498-2516).
gagagtatatacccaaaat

SEQ ID NO: 345430 - DNA, 19 bp, Homo sapiens
  siRNA target sequence for KIAA0977 (NM_014900.1,2509-2527).
cccaaaattggcatgacta

SEQ ID NO: 345431 - DNA, 19 bp, Homo sapiens
  siRNA target sequence for KIAA0977 (NM_014900.1,2518-2536).
ggcatgactacttataaaa

SEQ ID NO: 345432 - DNA, 19 bp, Homo sapiens
  siRNA target sequence for KIAA0977 (NM_014900.1,2519-2537).
gcatgactacttataaaat

SEQ ID NO: 345433 - DNA, 19 bp, Homo sapiens
  siRNA target sequence for KIAA0977 (NM_014900.1,2575-2593).
caatcagaaaccatagagt

SEQ ID NO: 345434 - DNA, 19 bp, Homo sapiens
  siRNA target sequence for KIAA0977 (NM_014900.1,2636-2654).
ctcatgagaatgtgaaaga

SEQ ID NO: 345435 - DNA, 19 bp, Homo sapiens
  siRNA target sequence for KIAA0977 (NM_014900.1,2826-2844).
cactggcacagctcctttt

SEQ ID NO: 345436 - DNA, 19 bp, Homo sapiens
  siRNA target sequence for KIAA0977 (NM_014900.1,2836-2854).
gctccttttgcaccaaatt

SEQ ID NO: 345437 - DNA, 19 bp, Homo sapiens
  siRNA target sequence for KIAA0977 (NM_014900.1,3508-3526).
ggcccatcattcactgtta

SEQ ID NO: 345438 - DNA, 19 bp, Homo sapiens
  siRNA target sequence for KIAA0977 (NM_014900.1,3509-3527).
gcccatcattcactgttat

SEQ ID NO: 345439 - DNA, 19 bp, Homo sapiens
  siRNA target sequence for KIAA0977 (NM_014900.1,3511-3529).
ccatcattcactgttatga

SEQ ID NO: 345440 - DNA, 19 bp, Homo sapiens
  siRNA target sequence for KIAA0977 (NM_014900.1,3519-3537).
cactgttatgagacaaagt

SEQ ID NO: 345441 - DNA, 19 bp, Homo sapiens
  siRNA target sequence for KIAA0977 (NM_014900.1,3629-3647).
gggttaccattccatcaaa

SEQ ID NO: 345442 - DNA, 19 bp, Homo sapiens
  siRNA target sequence for KIAA0977 (NM_014900.1,3631-3649).
gttaccattccatcaaata

SEQ ID NO: 345443 - DNA, 19 bp, Homo sapiens
  siRNA target sequence for RNF44 (NM_014901.3,751-769).
gcccgttcatggttgatct

SEQ ID NO: 345444 - DNA, 19 bp, Homo sapiens
  siRNA target sequence for RNF44 (NM_014901.3,891-909).
gcatgctccgtgatgttca

SEQ ID NO: 345445 - DNA, 19 bp, Homo sapiens
  siRNA target sequence for RNF44 (NM_014901.3,1077-1095).
cccctggggcagtttgtgt

SEQ ID NO: 345446 - DNA, 19 bp, Homo sapiens
  siRNA target sequence for RNF44 (NM_014901.3,1274-1292).
ctttggtgtgccatattct

SEQ ID NO: 345447 - DNA, 19 bp, Homo sapiens
  siRNA target sequence for Rab11-FIP2 (NM_014904.1,532-550).
gtggtaccaatgacacata

SEQ ID NO: 345448 - DNA, 19 bp, Homo sapiens
  siRNA target sequence for Rab11-FIP2 (NM_014904.1,534-552).
ggtaccaatgacacataca

SEQ ID NO: 345449 - DNA, 19 bp, Homo sapiens
  siRNA target sequence for Rab11-FIP2 (NM_014904.1,564-582).
ctgggcaaggaaaagtact

SEQ ID NO: 345450 - DNA, 19 bp, Homo sapiens
  siRNA target sequence for Rab11-FIP2 (NM_014904.1,604-622).
cccttgagccagtttggaa

SEQ ID NO: 345451 - DNA, 19 bp, Homo sapiens
  siRNA target sequence for Rab11-FIP2 (NM_014904.1,638-656).
cgagctacctggattgcta

SEQ ID NO: 345452 - DNA, 19 bp, Homo sapiens
  siRNA target sequence for Rab11-FIP2 (NM_014904.1,641-659).
gctacctggattgctaatt

SEQ ID NO: 345453 - DNA, 19 bp, Homo sapiens
  siRNA target sequence for Rab11-FIP2 (NM_014904.1,716-734).
gggtctggataaattttta

SEQ ID NO: 345454 - DNA, 19 bp, Homo sapiens
  siRNA target sequence for Rab11-FIP2 (NM_014904.1,736-754).
ggcaggtggcaatcaatct

SEQ ID NO: 345455 - DNA, 19 bp, Homo sapiens
  siRNA target sequence for Rab11-FIP2 (NM_014904.1,738-756).
caggtggcaatcaatctca

SEQ ID NO: 345456 - DNA, 19 bp, Homo sapiens
  siRNA target sequence for Rab11-FIP2 (NM_014904.1,740-758).
ggtggcaatcaatctcaat

SEQ ID NO: 345457 - DNA, 19 bp, Homo sapiens
  siRNA target sequence for Rab11-FIP2 (NM_014904.1,745-763).
caatcaatctcaatgacat

SEQ ID NO: 345458 - DNA, 19 bp, Homo sapiens
  siRNA target sequence for Rab11-FIP2 (NM_014904.1,797-815).
gtttagattagaatccaaa

SEQ ID NO: 345459 - DNA, 19 bp, Homo sapiens
  siRNA target sequence for Rab11-FIP2 (NM_014904.1,883-901).
ccgcaagtatgtttgactt

SEQ ID NO: 345460 - DNA, 19 bp, Homo sapiens
  siRNA target sequence for Rab11-FIP2 (NM_014904.1,884-902).
cgcaagtatgtttgactta

SEQ ID NO: 345461 - DNA, 19 bp, Homo sapiens
  siRNA target sequence for Rab11-FIP2 (NM_014904.1,922-940).
gatctccttttgcaaagtt

SEQ ID NO: 345462 - DNA, 19 bp, Homo sapiens
  siRNA target sequence for Rab11-FIP2 (NM_014904.1,1016-1034).
catgcccgatgccaatagt

SEQ ID NO: 345463 - DNA, 19 bp, Homo sapiens
  siRNA target sequence for Rab11-FIP2 (NM_014904.1,1019-1037).
gcccgatgccaatagtgaa

SEQ ID NO: 345464 - DNA, 19 bp, Homo sapiens
  siRNA target sequence for Rab11-FIP2 (NM_014904.1,1020-1038).
cccgatgccaatagtgaat

SEQ ID NO: 345465 - DNA, 19 bp, Homo sapiens
  siRNA target sequence for Rab11-FIP2 (NM_014904.1,1021-1039).
ccgatgccaatagtgaatt

SEQ ID NO: 345466 - DNA, 19 bp, Homo sapiens
  siRNA target sequence for Rab11-FIP2 (NM_014904.1,1022-1040).
cgatgccaatagtgaattt

SEQ ID NO: 345467 - DNA, 19 bp, Homo sapiens
  siRNA target sequence for Rab11-FIP2 (NM_014904.1,1552-1570).
gatctgataaacttaacaa

SEQ ID NO: 345468 - DNA, 19 bp, Homo sapiens
  siRNA target sequence for Rab11-FIP2 (NM_014904.1,1786-1804).
gtagtctgacctatgaaga

SEQ ID NO: 345469 - DNA, 19 bp, Homo sapiens
  siRNA target sequence for Rab11-FIP2 (NM_014904.1,1864-1882).
gggaactcgaggactacat

SEQ ID NO: 345470 - DNA, 19 bp, Homo sapiens
  siRNA target sequence for Rab11-FIP2 (NM_014904.1,1956-1974).
gctggcaaattctctaaca

SEQ ID NO: 345471 - DNA, 19 bp, Homo sapiens
  siRNA target sequence for FRMPD1 (NM_014907.1,51-69).
gagctggagaccagtttat

SEQ ID NO: 345472 - DNA, 19 bp, Homo sapiens
  siRNA target sequence for FRMPD1 (NM_014907.1,74-92).
gacacggaaagcacataga

SEQ ID NO: 345473 - DNA, 19 bp, Homo sapiens
  siRNA target sequence for FRMPD1 (NM_014907.1,79-97).
ggaaagcacatagaataga

SEQ ID NO: 345474 - DNA, 19 bp, Homo sapiens
  siRNA target sequence for FRMPD1 (NM_014907.1,202-220).
ctgtgcgacacacagtaaa

SEQ ID NO: 345475 - DNA, 19 bp, Homo sapiens
  siRNA target sequence for FRMPD1 (NM_014907.1,206-224).
gcgacacacagtaaagata

SEQ ID NO: 345476 - DNA, 19 bp, Homo sapiens
  siRNA target sequence for FRMPD1 (NM_014907.1,212-230).
cacagtaaagatagacaaa

SEQ ID NO: 345477 - DNA, 19 bp, Homo sapiens
  siRNA target sequence for FRMPD1 (NM_014907.1,382-400).
gggaacgagcagtcgatat

SEQ ID NO: 345478 - DNA, 19 bp, Homo sapiens
  siRNA target sequence for FRMPD1 (NM_014907.1,383-401).
ggaacgagcagtcgatatt

SEQ ID NO: 345479 - DNA, 19 bp, Homo sapiens
  siRNA target sequence for FRMPD1 (NM_014907.1,549-567).
ggacacagccagggtaatt

SEQ ID NO: 345480 - DNA, 19 bp, Homo sapiens
  siRNA target sequence for FRMPD1 (NM_014907.1,583-601).
ccaacgtgctcaagctata

SEQ ID NO: 345481 - DNA, 19 bp, Homo sapiens
  siRNA target sequence for FRMPD1 (NM_014907.1,617-635).
gaccaaagctttcaagttt

SEQ ID NO: 345482 - DNA, 19 bp, Homo sapiens
  siRNA target sequence for FRMPD1 (NM_014907.1,692-710).
ccgaagtatcgagtacttt

SEQ ID NO: 345483 - DNA, 19 bp, Homo sapiens
  siRNA target sequence for FRMPD1 (NM_014907.1,870-888).
gaccccgtggcctttgaat

SEQ ID NO: 345484 - DNA, 19 bp, Homo sapiens
  siRNA target sequence for FRMPD1 (NM_014907.1,924-942).
gagcgctttgctgtagaaa

SEQ ID NO: 345485 - DNA, 19 bp, Homo sapiens
  siRNA target sequence for FRMPD1 (NM_014907.1,927-945).
cgctttgctgtagaaatga

SEQ ID NO: 345486 - DNA, 19 bp, Homo sapiens
  siRNA target sequence for FRMPD1 (NM_014907.1,1019-1037).
gatctctttaaagtatata

SEQ ID NO: 345487 - DNA, 19 bp, Homo sapiens
  siRNA target sequence for FRMPD1 (NM_014907.1,1049-1067).
gggaatagagaactttata

SEQ ID NO: 345488 - DNA, 19 bp, Homo sapiens
  siRNA target sequence for FRMPD1 (NM_014907.1,1061-1079).
ctttatatctccaacttta

SEQ ID NO: 345489 - DNA, 19 bp, Homo sapiens
  siRNA target sequence for FRMPD1 (NM_014907.1,1072-1090).
caactttactccgaaacat

SEQ ID NO: 345490 - DNA, 19 bp, Homo sapiens
  siRNA target sequence for FRMPD1 (NM_014907.1,1075-1093).
ctttactccgaaacatgaa

SEQ ID NO: 345491 - DNA, 19 bp, Homo sapiens
  siRNA target sequence for FRMPD1 (NM_014907.1,1114-1132).
ccattagcttccacatgaa

SEQ ID NO: 345492 - DNA, 19 bp, Homo sapiens
  siRNA target sequence for FRMPD1 (NM_014907.1,1158-1176).
cgacagaagcaacttattt

SEQ ID NO: 345493 - DNA, 19 bp, Homo sapiens
  siRNA target sequence for FRMPD1 (NM_014907.1,1179-1197).
gctgcccagctacgtttaa

SEQ ID NO: 345494 - DNA, 19 bp, Homo sapiens
  siRNA target sequence for FRMPD1 (NM_014907.1,1180-1198).
ctgcccagctacgtttaaa

SEQ ID NO: 345495 - DNA, 19 bp, Homo sapiens
  siRNA target sequence for FRMPD1 (NM_014907.1,1183-1201).
cccagctacgtttaaatta

SEQ ID NO: 345496 - DNA, 19 bp, Homo sapiens
  siRNA target sequence for FRMPD1 (NM_014907.1,1184-1202).
ccagctacgtttaaattat

SEQ ID NO: 345497 - DNA, 19 bp, Homo sapiens
  siRNA target sequence for FRMPD1 (NM_014907.1,1187-1205).
gctacgtttaaattatcta

SEQ ID NO: 345498 - DNA, 19 bp, Homo sapiens
  siRNA target sequence for FRMPD1 (NM_014907.1,1240-1258).
gaatctttaatgctacttt

SEQ ID NO: 345499 - DNA, 19 bp, Homo sapiens
  siRNA target sequence for FRMPD1 (NM_014907.1,1279-1297).
cctacattgcccttctagt

SEQ ID NO: 345500 - DNA, 19 bp, Homo sapiens
  siRNA target sequence for FRMPD1 (NM_014907.1,1280-1298).
ctacattgcccttctagtt

SEQ ID NO: 345501 - DNA, 19 bp, Homo sapiens
  siRNA target sequence for FRMPD1 (NM_014907.1,1312-1330).
ggattagccaggttatcaa

SEQ ID NO: 345502 - DNA, 19 bp, Homo sapiens
  siRNA target sequence for FRMPD1 (NM_014907.1,1313-1331).
gattagccaggttatcaat

SEQ ID NO: 345503 - DNA, 19 bp, Homo sapiens
  siRNA target sequence for FRMPD1 (NM_014907.1,1410-1428).
gtgagcgtcgtcaaagtgt

SEQ ID NO: 345504 - DNA, 19 bp, Homo sapiens
  siRNA target sequence for FRMPD1 (NM_014907.1,1412-1430).
gagcgtcgtcaaagtgtat

SEQ ID NO: 345505 - DNA, 19 bp, Homo sapiens
  siRNA target sequence for FRMPD1 (NM_014907.1,1414-1432).
gcgtcgtcaaagtgtatct

SEQ ID NO: 345506 - DNA, 19 bp, Homo sapiens
  siRNA target sequence for FRMPD1 (NM_014907.1,1494-1512).
ctgattgctgggtactaca

SEQ ID NO: 345507 - DNA, 19 bp, Homo sapiens
  siRNA target sequence for FRMPD1 (NM_014907.1,1524-1542).
gacccagttacctccattt

SEQ ID NO: 345508 - DNA, 19 bp, Homo sapiens
  siRNA target sequence for FRMPD1 (NM_014907.1,1689-1707).
ccctgcagatcactcataa

SEQ ID NO: 345509 - DNA, 19 bp, Homo sapiens
  siRNA target sequence for FRMPD1 (NM_014907.1,1947-1965).
ctcgcagagagcattgact

SEQ ID NO: 345510 - DNA, 19 bp, Homo sapiens
  siRNA target sequence for FRMPD1 (NM_014907.1,2074-2092).
gtgctgctttggagacatt

SEQ ID NO: 345511 - DNA, 19 bp, Homo sapiens
  siRNA target sequence for FRMPD1 (NM_014907.1,2402-2420).
gcccagagatgtttctact

SEQ ID NO: 345512 - DNA, 19 bp, Homo sapiens
  siRNA target sequence for FRMPD1 (NM_014907.1,2847-2865).
gactctcgagtgtcttcta

SEQ ID NO: 345513 - DNA, 19 bp, Homo sapiens
  siRNA target sequence for FRMPD1 (NM_014907.1,2892-2910).
cccaacaataaagagaatt

SEQ ID NO: 345514 - DNA, 19 bp, Homo sapiens
  siRNA target sequence for FRMPD1 (NM_014907.1,2944-2962).
gcactcctcactgttctaa

SEQ ID NO: 345515 - DNA, 19 bp, Homo sapiens
  siRNA target sequence for FRMPD1 (NM_014907.1,3005-3023).
ccaaatcttacctctatct

SEQ ID NO: 345516 - DNA, 19 bp, Homo sapiens
  siRNA target sequence for FRMPD1 (NM_014907.1,3044-3062).
ccccaaagaaccaaccata

SEQ ID NO: 345517 - DNA, 19 bp, Homo sapiens
  siRNA target sequence for FRMPD1 (NM_014907.1,3131-3149).
caacccaggactaaataat

SEQ ID NO: 345518 - DNA, 19 bp, Homo sapiens
  siRNA target sequence for FRMPD1 (NM_014907.1,3135-3153).
ccaggactaaataatgtct

SEQ ID NO: 345519 - DNA, 19 bp, Homo sapiens
  siRNA target sequence for FRMPD1 (NM_014907.1,3206-3224).
gggattggaatctttttgt

SEQ ID NO: 345520 - DNA, 19 bp, Homo sapiens
  siRNA target sequence for FRMPD1 (NM_014907.1,3287-3305).
gcctagaagtgatgaatgt

SEQ ID NO: 345521 - DNA, 19 bp, Homo sapiens
  siRNA target sequence for FRMPD1 (NM_014907.1,3351-3369).
gagccacaaggacaactat

SEQ ID NO: 345522 - DNA, 19 bp, Homo sapiens
  siRNA target sequence for FRMPD1 (NM_014907.1,3353-3371).
gccacaaggacaactatct

SEQ ID NO: 345523 - DNA, 19 bp, Homo sapiens
  siRNA target sequence for FRMPD1 (NM_014907.1,3355-3373).
cacaaggacaactatctct

SEQ ID NO: 345524 - DNA, 19 bp, Homo sapiens
  siRNA target sequence for FRMPD1 (NM_014907.1,3454-3472).
cgggtgatgtgtcaaataa

SEQ ID NO: 345525 - DNA, 19 bp, Homo sapiens
  siRNA target sequence for FRMPD1 (NM_014907.1,3455-3473).
gggtgatgtgtcaaataat

SEQ ID NO: 345526 - DNA, 19 bp, Homo sapiens
  siRNA target sequence for FRMPD1 (NM_014907.1,3457-3475).
gtgatgtgtcaaataatgt

SEQ ID NO: 345527 - DNA, 19 bp, Homo sapiens
  siRNA target sequence for FRMPD1 (NM_014907.1,3480-3498).
cagactcttgatattagct

SEQ ID NO: 345528 - DNA, 19 bp, Homo sapiens
  siRNA target sequence for FRMPD1 (NM_014907.1,3642-3660).
ctattcgtagagttggatt

SEQ ID NO: 345529 - DNA, 19 bp, Homo sapiens
  siRNA target sequence for FRMPD1 (NM_014907.1,3725-3743).
ggcagaggcacctaaccat

SEQ ID NO: 345530 - DNA, 19 bp, Homo sapiens
  siRNA target sequence for FRMPD1 (NM_014907.1,3776-3794).
ccctgagtgggtctgtttt

SEQ ID NO: 345531 - DNA, 19 bp, Homo sapiens
  siRNA target sequence for FRMPD1 (NM_014907.1,3782-3800).
gtgggtctgttttaatcct

SEQ ID NO: 345532 - DNA, 19 bp, Homo sapiens
  siRNA target sequence for FRMPD1 (NM_014907.1,3839-3857).
ggatcctcacttagaaact

SEQ ID NO: 345533 - DNA, 19 bp, Homo sapiens
  siRNA target sequence for FRMPD1 (NM_014907.1,3840-3858).
gatcctcacttagaaactt

SEQ ID NO: 345534 - DNA, 19 bp, Homo sapiens
  siRNA target sequence for FRMPD1 (NM_014907.1,4215-4233).
gcacccctgtcgaggaaaa

SEQ ID NO: 345535 - DNA, 19 bp, Homo sapiens
  siRNA target sequence for FRMPD1 (NM_014907.1,4361-4379).
ctggggggttggaaacaaa

SEQ ID NO: 345536 - DNA, 19 bp, Homo sapiens
  siRNA target sequence for FRMPD1 (NM_014907.1,4363-4381).
ggggggttggaaacaaaca

SEQ ID NO: 345537 - DNA, 19 bp, Homo sapiens
  siRNA target sequence for FRMPD1 (NM_014907.1,4456-4474).
cgagctgtcggcatgtgat

SEQ ID NO: 345538 - DNA, 19 bp, Homo sapiens
  siRNA target sequence for FRMPD1 (NM_014907.1,4462-4480).
gtcggcatgtgatcagaat

SEQ ID NO: 345539 - DNA, 19 bp, Homo sapiens
  siRNA target sequence for FRMPD1 (NM_014907.1,4682-4700).
ccacgacctgagtgtgaaa

SEQ ID NO: 345540 - DNA, 19 bp, Homo sapiens
  siRNA target sequence for KIAA1036 (NM_014909.2,799-817).
cggaggcgtccccttcttt

SEQ ID NO: 345541 - DNA, 19 bp, Homo sapiens
  siRNA target sequence for KIAA1036 (NM_014909.2,1021-1039).
cagagagctgcagtacaat

SEQ ID NO: 345542 - DNA, 19 bp, Homo sapiens
  siRNA target sequence for KIAA1036 (NM_014909.2,1046-1064).
gggacacagttctttgaaa

SEQ ID NO: 345543 - DNA, 19 bp, Homo sapiens
  siRNA target sequence for KIAA1036 (NM_014909.2,1047-1065).
ggacacagttctttgaaat

SEQ ID NO: 345544 - DNA, 19 bp, Homo sapiens
  siRNA target sequence for KIAA1036 (NM_014909.2,1050-1068).
cacagttctttgaaattaa

SEQ ID NO: 345545 - DNA, 19 bp, Homo sapiens
  siRNA target sequence for KIAA1036 (NM_014909.2,1052-1070).
cagttctttgaaattaaga

SEQ ID NO: 345546 - DNA, 19 bp, Homo sapiens
  siRNA target sequence for KIAA1036 (NM_014909.2,1121-1139).
gaggccctgccaatcaaat

SEQ ID NO: 345547 - DNA, 19 bp, Homo sapiens
  siRNA target sequence for KIAA1036 (NM_014909.2,1148-1166).
gccgtgatcctgggaattt

SEQ ID NO: 345548 - DNA, 19 bp, Homo sapiens
  siRNA target sequence for KIAA1036 (NM_014909.2,1149-1167).
ccgtgatcctgggaattta

SEQ ID NO: 345549 - DNA, 19 bp, Homo sapiens
  siRNA target sequence for KIAA1036 (NM_014909.2,1302-1320).
gcgaggacctgatgtacaa

SEQ ID NO: 345550 - DNA, 19 bp, Homo sapiens
  siRNA target sequence for KIAA1036 (NM_014909.2,1530-1548).
gcgacatgcggctcaagat

SEQ ID NO: 345551 - DNA, 19 bp, Homo sapiens
  siRNA target sequence for KIAA1036 (NM_014909.2,1531-1549).
cgacatgcggctcaagatt

SEQ ID NO: 345552 - DNA, 19 bp, Homo sapiens
  siRNA target sequence for KIAA1036 (NM_014909.2,1585-1603).
ccggaagaaggatgtttct

SEQ ID NO: 345553 - DNA, 19 bp, Homo sapiens
  siRNA target sequence for KIAA1036 (NM_014909.2,1586-1604).
cggaagaaggatgtttctt

SEQ ID NO: 345554 - DNA, 19 bp, Homo sapiens
  siRNA target sequence for KIAA1036 (NM_014909.2,1639-1657).
gaacagccgcagtgaaaga

SEQ ID NO: 345555 - DNA, 19 bp, Homo sapiens
  siRNA target sequence for KIAA1074 (NM_014915.1,610-628).
gtctataatgaggacatat

SEQ ID NO: 345556 - DNA, 19 bp, Homo sapiens
  siRNA target sequence for KIAA1074 (NM_014915.1,784-802).
gaaagcagtcaccaactaa

SEQ ID NO: 345557 - DNA, 19 bp, Homo sapiens
  siRNA target sequence for KIAA1074 (NM_014915.1,789-807).
cagtcaccaactaatttca

SEQ ID NO: 345558 - DNA, 19 bp, Homo sapiens
  siRNA target sequence for KIAA1074 (NM_014915.1,825-843).
gatacctaaacattcttct

SEQ ID NO: 345559 - DNA, 19 bp, Homo sapiens
  siRNA target sequence for KIAA1074 (NM_014915.1,899-917).
gcaaaccgggtgttgatga

SEQ ID NO: 345560 - DNA, 19 bp, Homo sapiens
  siRNA target sequence for KIAA1074 (NM_014915.1,904-922).
ccgggtgttgatgattcat

SEQ ID NO: 345561 - DNA, 19 bp, Homo sapiens
  siRNA target sequence for KIAA1074 (NM_014915.1,934-952).
gatgacgaagacctcaatt

SEQ ID NO: 345562 - DNA, 19 bp, Homo sapiens
  siRNA target sequence for KIAA1074 (NM_014915.1,943-961).
gacctcaattttgatacta

SEQ ID NO: 345563 - DNA, 19 bp, Homo sapiens
  siRNA target sequence for KIAA1074 (NM_014915.1,977-995).
caagcttagcaaagctaat

SEQ ID NO: 345564 - DNA, 19 bp, Homo sapiens
  siRNA target sequence for KIAA1074 (NM_014915.1,1085-1103).
ccgatagtcaagatgaagt

SEQ ID NO: 345565 - DNA, 19 bp, Homo sapiens
  siRNA target sequence for KIAA1074 (NM_014915.1,1121-1139).
ctacaacatcaatcaaagt

SEQ ID NO: 345566 - DNA, 19 bp, Homo sapiens
  siRNA target sequence for KIAA1074 (NM_014915.1,1146-1164).
cttttctcatcctacctat

SEQ ID NO: 345567 - DNA, 19 bp, Homo sapiens
  siRNA target sequence for KIAA1074 (NM_014915.1,1193-1211).
cccacaagtcgttagcaaa

SEQ ID NO: 345568 - DNA, 19 bp, Homo sapiens
  siRNA target sequence for KIAA1074 (NM_014915.1,1208-1226).
caaaccctggtcttatgaa

SEQ ID NO: 345569 - DNA, 19 bp, Homo sapiens
  siRNA target sequence for KIAA1074 (NM_014915.1,1244-1262).
caggcattgcaaaaaaaga

SEQ ID NO: 345570 - DNA, 19 bp, Homo sapiens
  siRNA target sequence for KIAA1074 (NM_014915.1,1314-1332).
caatttgacttatgttgat

SEQ ID NO: 345571 - DNA, 19 bp, Homo sapiens
  siRNA target sequence for KIAA1074 (NM_014915.1,1327-1345).
gttgatgaagtgcacaaaa

SEQ ID NO: 345572 - DNA, 19 bp, Homo sapiens
  siRNA target sequence for KIAA1074 (NM_014915.1,1362-1380).
gatgtccgcattaggatta

SEQ ID NO: 345573 - DNA, 19 bp, Homo sapiens
  siRNA target sequence for KIAA1074 (NM_014915.1,1365-1383).
gtccgcattaggattagga

SEQ ID NO: 345574 - DNA, 19 bp, Homo sapiens
  siRNA target sequence for KIAA1074 (NM_014915.1,1446-1464).
gtatgttgatcctttagct

SEQ ID NO: 345575 - DNA, 19 bp, Homo sapiens
  siRNA target sequence for KIAA1074 (NM_014915.1,1611-1629).
ggagtctcctgagagatat

SEQ ID NO: 345576 - DNA, 19 bp, Homo sapiens
  siRNA target sequence for KIAA1074 (NM_014915.1,1964-1982).
gtggtcctgccttgcaaat

SEQ ID NO: 345577 - DNA, 19 bp, Homo sapiens
  siRNA target sequence for KIAA1074 (NM_014915.1,2015-2033).
ggacctcgaaagaatctgt

SEQ ID NO: 345578 - DNA, 19 bp, Homo sapiens
  siRNA target sequence for KIAA1074 (NM_014915.1,2019-2037).
ctcgaaagaatctgtgaat

SEQ ID NO: 345579 - DNA, 19 bp, Homo sapiens
  siRNA target sequence for KIAA1074 (NM_014915.1,2052-2070).
gaaggccagtttactaact

SEQ ID NO: 345580 - DNA, 19 bp, Homo sapiens
  siRNA target sequence for KIAA1074 (NM_014915.1,2069-2087).
ctggtggcctgctacaagt

SEQ ID NO: 345581 - DNA, 19 bp, Homo sapiens
  siRNA target sequence for KIAA1074 (NM_014915.1,2128-2146).
ggaaggcctactaagaaaa

SEQ ID NO: 345582 - DNA, 19 bp, Homo sapiens
  siRNA target sequence for KIAA1074 (NM_014915.1,2242-2260).
gagctaccccactctagtt

SEQ ID NO: 345583 - DNA, 19 bp, Homo sapiens
  siRNA target sequence for KIAA1074 (NM_014915.1,2248-2266).
ccccactctagttacaaga

SEQ ID NO: 345584 - DNA, 19 bp, Homo sapiens
  siRNA target sequence for KIAA1074 (NM_014915.1,2251-2269).
cactctagttacaagaatt

SEQ ID NO: 345585 - DNA, 19 bp, Homo sapiens
  siRNA target sequence for KIAA1074 (NM_014915.1,2253-2271).
ctctagttacaagaatttt

SEQ ID NO: 345586 - DNA, 19 bp, Homo sapiens
  siRNA target sequence for KIAA1074 (NM_014915.1,2334-2352).
ggatgcagctctttcatgt

SEQ ID NO: 345587 - DNA, 19 bp, Homo sapiens
  siRNA target sequence for KIAA1074 (NM_014915.1,2415-2433).
ggaagacaaggttaatgta

SEQ ID NO: 345588 - DNA, 19 bp, Homo sapiens
  siRNA target sequence for KIAA1074 (NM_014915.1,2421-2439).
caaggttaatgtactacaa

SEQ ID NO: 345589 - DNA, 19 bp, Homo sapiens
  siRNA target sequence for KIAA1074 (NM_014915.1,2503-2521).
cgagaactgtgctctttga

SEQ ID NO: 345590 - DNA, 19 bp, Homo sapiens
  siRNA target sequence for KIAA1074 (NM_014915.1,2520-2538).
gagatttagcttaaaccaa

SEQ ID NO: 345591 - DNA, 19 bp, Homo sapiens
  siRNA target sequence for KIAA1074 (NM_014915.1,2563-2581).
gatacgttgtatgaaaaaa

SEQ ID NO: 345592 - DNA, 19 bp, Homo sapiens
  siRNA target sequence for KIAA1074 (NM_014915.1,2679-2697).
gaggactgtaaaaagtaat

SEQ ID NO: 345593 - DNA, 19 bp, Homo sapiens
  siRNA target sequence for KIAA1074 (NM_014915.1,2872-2890).
gacctatcgcataaaaata

SEQ ID NO: 345594 - DNA, 19 bp, Homo sapiens
  siRNA target sequence for KIAA1074 (NM_014915.1,2875-2893).
ctatcgcataaaaatagca

SEQ ID NO: 345595 - DNA, 19 bp, Homo sapiens
  siRNA target sequence for KIAA1074 (NM_014915.1,2911-2929).
gctatgctaagactagaaa

SEQ ID NO: 345596 - DNA, 19 bp, Homo sapiens
  siRNA target sequence for KIAA1074 (NM_014915.1,2912-2930).
ctatgctaagactagaaat

SEQ ID NO: 345597 - DNA, 19 bp, Homo sapiens
  siRNA target sequence for KIAA1074 (NM_014915.1,3010-3028).
gaccttcagaagactataa

SEQ ID NO: 345598 - DNA, 19 bp, Homo sapiens
  siRNA target sequence for KIAA1074 (NM_014915.1,3012-3030).
ccttcagaagactataaaa

SEQ ID NO: 345599 - DNA, 19 bp, Homo sapiens
  siRNA target sequence for KIAA1074 (NM_014915.1,3052-3070).
caaacaatatcccagtata

SEQ ID NO: 345600 - DNA, 19 bp, Homo sapiens
  siRNA target sequence for KIAA1074 (NM_014915.1,3104-3122).
caatgctaaattctaaact

SEQ ID NO: 345601 - DNA, 19 bp, Homo sapiens
  siRNA target sequence for KIAA1074 (NM_014915.1,3163-3181).
gttgaatcataccattcta

SEQ ID NO: 345602 - DNA, 19 bp, Homo sapiens
  siRNA target sequence for KIAA1074 (NM_014915.1,3166-3184).
gaatcataccattctagat

SEQ ID NO: 345603 - DNA, 19 bp, Homo sapiens
  siRNA target sequence for KIAA1074 (NM_014915.1,3424-3442).
ggtttagaacgggtacaaa

SEQ ID NO: 345604 - DNA, 19 bp, Homo sapiens
  siRNA target sequence for KIAA1074 (NM_014915.1,3425-3443).
gtttagaacgggtacaaaa

SEQ ID NO: 345605 - DNA, 19 bp, Homo sapiens
  siRNA target sequence for KIAA1074 (NM_014915.1,3607-3625).
cacaacaaggctgacaata

SEQ ID NO: 345606 - DNA, 19 bp, Homo sapiens
  siRNA target sequence for KIAA1074 (NM_014915.1,3729-3747).
ggagttaatcagtgaatgt

SEQ ID NO: 345607 - DNA, 19 bp, Homo sapiens
  siRNA target sequence for KIAA1074 (NM_014915.1,3732-3750).
gttaatcagtgaatgtaat

SEQ ID NO: 345608 - DNA, 19 bp, Homo sapiens
  siRNA target sequence for KIAA1074 (NM_014915.1,3740-3758).
gtgaatgtaatcacttaaa

SEQ ID NO: 345609 - DNA, 19 bp, Homo sapiens
  siRNA target sequence for KIAA1074 (NM_014915.1,3829-3847).
ctagctgataccctaaaaa

SEQ ID NO: 345610 - DNA, 19 bp, Homo sapiens
  siRNA target sequence for KIAA1074 (NM_014915.1,3873-3891).
ggaggttacgtcacgttat

SEQ ID NO: 345611 - DNA, 19 bp, Homo sapiens
  siRNA target sequence for KIAA1074 (NM_014915.1,3876-3894).
ggttacgtcacgttatcgt

SEQ ID NO: 345612 - DNA, 19 bp, Homo sapiens
  siRNA target sequence for KIAA1074 (NM_014915.1,3877-3895).
gttacgtcacgttatcgta

SEQ ID NO: 345613 - DNA, 19 bp, Homo sapiens
  siRNA target sequence for KIAA1074 (NM_014915.1,3881-3899).
cgtcacgttatcgtattaa

SEQ ID NO: 345614 - DNA, 19 bp, Homo sapiens
  siRNA target sequence for KIAA1074 (NM_014915.1,3882-3900).
gtcacgttatcgtattaat

SEQ ID NO: 345615 - DNA, 19 bp, Homo sapiens
  siRNA target sequence for KIAA1074 (NM_014915.1,3884-3902).
cacgttatcgtattaattt

SEQ ID NO: 345616 - DNA, 19 bp, Homo sapiens
  siRNA target sequence for KIAA1074 (NM_014915.1,3887-3905).
gttatcgtattaatttaga

SEQ ID NO: 345617 - DNA, 19 bp, Homo sapiens
  siRNA target sequence for KIAA1074 (NM_014915.1,3937-3955).
ggtcaaatcagaaatcaat

SEQ ID NO: 345618 - DNA, 19 bp, Homo sapiens
  siRNA target sequence for KIAA1074 (NM_014915.1,4222-4240).
gagataactggatttaaga

SEQ ID NO: 345619 - DNA, 19 bp, Homo sapiens
  siRNA target sequence for KIAA1074 (NM_014915.1,4316-4334).
ctagtcaatttgaaatgga

SEQ ID NO: 345620 - DNA, 19 bp, Homo sapiens
  siRNA target sequence for KIAA1074 (NM_014915.1,4564-4582).
ggtcaagtcaaacagtata

SEQ ID NO: 345621 - DNA, 19 bp, Homo sapiens
  siRNA target sequence for KIAA1074 (NM_014915.1,4565-4583).
gtcaagtcaaacagtataa

SEQ ID NO: 345622 - DNA, 19 bp, Homo sapiens
  siRNA target sequence for KIAA1074 (NM_014915.1,4660-4678).
gcagcatctcaagaaaact

SEQ ID NO: 345623 - DNA, 19 bp, Homo sapiens
  siRNA target sequence for KIAA1074 (NM_014915.1,4672-4690).
gaaaacttagagcagttta

SEQ ID NO: 345624 - DNA, 19 bp, Homo sapiens
  siRNA target sequence for KIAA1074 (NM_014915.1,4844-4862).
gaaaatctttgtcaagtaa

SEQ ID NO: 345625 - DNA, 19 bp, Homo sapiens
  siRNA target sequence for KIAA1074 (NM_014915.1,4859-4877).
gtaaactaaccaaaactaa

SEQ ID NO: 345626 - DNA, 19 bp, Homo sapiens
  siRNA target sequence for KIAA1074 (NM_014915.1,4864-4882).
ctaaccaaaactaatgaga

SEQ ID NO: 345627 - DNA, 19 bp, Homo sapiens
  siRNA target sequence for KIAA1074 (NM_014915.1,4985-5003).
gaaatcttaataatagttt

SEQ ID NO: 345628 - DNA, 19 bp, Homo sapiens
  siRNA target sequence for KIAA1074 (NM_014915.1,5032-5050).
gaaaacttagtgatctcta

SEQ ID NO: 345629 - DNA, 19 bp, Homo sapiens
  siRNA target sequence for KIAA1074 (NM_014915.1,5043-5061).
gatctctacctcaaatcca

SEQ ID NO: 345630 - DNA, 19 bp, Homo sapiens
  siRNA target sequence for KIAA1074 (NM_014915.1,5059-5077).
ccacgggcttcaaataata

SEQ ID NO: 345631 - DNA, 19 bp, Homo sapiens
  siRNA target sequence for KIAA1074 (NM_014915.1,5062-5080).
cgggcttcaaataatagca

SEQ ID NO: 345632 - DNA, 19 bp, Homo sapiens
  siRNA target sequence for KIAA1074 (NM_014915.1,5063-5081).
gggcttcaaataatagcat

SEQ ID NO: 345633 - DNA, 19 bp, Homo sapiens
  siRNA target sequence for KIAA1074 (NM_014915.1,5190-5208).
gtctactgatgagtcaaat

SEQ ID NO: 345634 - DNA, 19 bp, Homo sapiens
  siRNA target sequence for CHSY1 (NM_014918.3,754-772).
gtcatgaccgcccagaaat

SEQ ID NO: 345635 - DNA, 19 bp, Homo sapiens
  siRNA target sequence for CHSY1 (NM_014918.3,803-821).
gaacatggtccaagacaat

SEQ ID NO: 345636 - DNA, 19 bp, Homo sapiens
  siRNA target sequence for CHSY1 (NM_014918.3,857-875).
ctgacacatctgtaccaat

SEQ ID NO: 345637 - DNA, 19 bp, Homo sapiens
  siRNA target sequence for CHSY1 (NM_014918.3,994-1012).
gatgatgacgtgtacatca

SEQ ID NO: 345638 - DNA, 19 bp, Homo sapiens
  siRNA target sequence for CHSY1 (NM_014918.3,1335-1353).
caaaaaggggtacattaga

SEQ ID NO: 345639 - DNA, 19 bp, Homo sapiens
  siRNA target sequence for CHSY1 (NM_014918.3,1352-1370).
gagatctccataacagtaa

SEQ ID NO: 345640 - DNA, 19 bp, Homo sapiens
  siRNA target sequence for CHSY1 (NM_014918.3,1437-1455).
catgctgagccgcaagata

SEQ ID NO: 345641 - DNA, 19 bp, Homo sapiens
  siRNA target sequence for CHSY1 (NM_014918.3,1461-1479).
gctccgccatcgcacaata

SEQ ID NO: 345642 - DNA, 19 bp, Homo sapiens
  siRNA target sequence for CHSY1 (NM_014918.3,1586-1604).
gccagcgagaggagattct

SEQ ID NO: 345643 - DNA, 19 bp, Homo sapiens
  siRNA target sequence for CHSY1 (NM_014918.3,1746-1764).
gaccagagggcgcatcatt

SEQ ID NO: 345644 - DNA, 19 bp, Homo sapiens
  siRNA target sequence for CHSY1 (NM_014918.3,1748-1766).
ccagagggcgcatcattga

SEQ ID NO: 345645 - DNA, 19 bp, Homo sapiens
  siRNA target sequence for CHSY1 (NM_014918.3,1751-1769).
gagggcgcatcattgactt

SEQ ID NO: 345646 - DNA, 19 bp, Homo sapiens
  siRNA target sequence for CHSY1 (NM_014918.3,1755-1773).
gcgcatcattgacttcaaa

SEQ ID NO: 345647 - DNA, 19 bp, Homo sapiens
  siRNA target sequence for CHSY1 (NM_014918.3,1757-1775).
gcatcattgacttcaaaga

SEQ ID NO: 345648 - DNA, 19 bp, Homo sapiens
  siRNA target sequence for CHSY1 (NM_014918.3,1884-1902).
gaggaggcacgcgtattta

SEQ ID NO: 345649 - DNA, 19 bp, Homo sapiens
  siRNA target sequence for CHSY1 (NM_014918.3,1886-1904).
ggaggcacgcgtatttaca

SEQ ID NO: 345650 - DNA, 19 bp, Homo sapiens
  siRNA target sequence for CHSY1 (NM_014918.3,1959-1977).
gttggccaagagaatcaat

SEQ ID NO: 345651 - DNA, 19 bp, Homo sapiens
  siRNA target sequence for CHSY1 (NM_014918.3,2105-2123).
ctgggcgtttcgacatgtt

SEQ ID NO: 345652 - DNA, 19 bp, Homo sapiens
  siRNA target sequence for CHSY1 (NM_014918.3,2110-2128).
cgtttcgacatgtttgtga

SEQ ID NO: 345653 - DNA, 19 bp, Homo sapiens
  siRNA target sequence for CHSY1 (NM_014918.3,2115-2133).
cgacatgtttgtgagattt

SEQ ID NO: 345654 - DNA, 19 bp, Homo sapiens
  siRNA target sequence for CHSY1 (NM_014918.3,2184-2202).
cgtggttctgcttttcaat

SEQ ID NO: 345655 - DNA, 19 bp, Homo sapiens
  siRNA target sequence for CHSY1 (NM_014918.3,2246-2264).
gagattaccgcattaagta

SEQ ID NO: 345656 - DNA, 19 bp, Homo sapiens
  siRNA target sequence for CHSY1 (NM_014918.3,2329-2347).
gtaggatcctcccagttta

SEQ ID NO: 345657 - DNA, 19 bp, Homo sapiens
  siRNA target sequence for CHSY1 (NM_014918.3,2336-2354).
cctcccagtttaacaatga

SEQ ID NO: 345658 - DNA, 19 bp, Homo sapiens
  siRNA target sequence for CHSY1 (NM_014918.3,2374-2392).
gacgtcgacctcgtgttta

SEQ ID NO: 345659 - DNA, 19 bp, Homo sapiens
  siRNA target sequence for CHSY1 (NM_014918.3,2376-2394).
cgtcgacctcgtgtttact

SEQ ID NO: 345660 - DNA, 19 bp, Homo sapiens
  siRNA target sequence for CHSY1 (NM_014918.3,2377-2395).
gtcgacctcgtgtttacta

SEQ ID NO: 345661 - DNA, 19 bp, Homo sapiens
  siRNA target sequence for CHSY1 (NM_014918.3,2379-2397).
cgacctcgtgtttactaca

SEQ ID NO: 345662 - DNA, 19 bp, Homo sapiens
  siRNA target sequence for CHSY1 (NM_014918.3,2383-2401).
ctcgtgtttactacagaat

SEQ ID NO: 345663 - DNA, 19 bp, Homo sapiens
  siRNA target sequence for CHSY1 (NM_014918.3,2407-2425).
cagcgatgtcgagcaaata

SEQ ID NO: 345664 - DNA, 19 bp, Homo sapiens
  siRNA target sequence for CHSY1 (NM_014918.3,2411-2429).
gatgtcgagcaaatacagt

SEQ ID NO: 345665 - DNA, 19 bp, Homo sapiens
  siRNA target sequence for CHSY1 (NM_014918.3,2473-2491).
gacccaaagattgtttata

SEQ ID NO: 345666 - DNA, 19 bp, Homo sapiens
  siRNA target sequence for CHSY1 (NM_014918.3,2559-2577).
gtttggcatcacgtgtatt

SEQ ID NO: 345667 - DNA, 19 bp, Homo sapiens
  siRNA target sequence for CHSY1 (NM_014918.3,2730-2748).
cttttgtgatcccaatctt

SEQ ID NO: 345668 - DNA, 19 bp, Homo sapiens
  siRNA target sequence for KIAA0970 (NM_014923.2,447-465).
gatatgccccacaggttat

SEQ ID NO: 345669 - DNA, 19 bp, Homo sapiens
  siRNA target sequence for KIAA0970 (NM_014923.2,453-471).
ccccacaggttattgaaga

SEQ ID NO: 345670 - DNA, 19 bp, Homo sapiens
  siRNA target sequence for KIAA0970 (NM_014923.2,472-490).
caatggtgttcgaagagtt

SEQ ID NO: 345671 - DNA, 19 bp, Homo sapiens
  siRNA target sequence for KIAA0970 (NM_014923.2,597-615).
cgcctccaccacgtcatat

SEQ ID NO: 345672 - DNA, 19 bp, Homo sapiens
  siRNA target sequence for KIAA0970 (NM_014923.2,600-618).
ctccaccacgtcatatgta

SEQ ID NO: 345673 - DNA, 19 bp, Homo sapiens
  siRNA target sequence for KIAA0970 (NM_014923.2,632-650).
ggagctggagacatgacaa

SEQ ID NO: 345674 - DNA, 19 bp, Homo sapiens
  siRNA target sequence for KIAA0970 (NM_014923.2,717-735).
gaaggtccaactttagaga

SEQ ID NO: 345675 - DNA, 19 bp, Homo sapiens
  siRNA target sequence for KIAA0970 (NM_014923.2,721-739).
gtccaactttagagatgaa

SEQ ID NO: 345676 - DNA, 19 bp, Homo sapiens
  siRNA target sequence for KIAA0970 (NM_014923.2,732-750).
gagatgaacgatctagtaa

SEQ ID NO: 345677 - DNA, 19 bp, Homo sapiens
  siRNA target sequence for KIAA0970 (NM_014923.2,737-755).
gaacgatctagtaaaacat

SEQ ID NO: 345678 - DNA, 19 bp, Homo sapiens
  siRNA target sequence for KIAA0970 (NM_014923.2,741-759).
gatctagtaaaacatatga

SEQ ID NO: 345679 - DNA, 19 bp, Homo sapiens
  siRNA target sequence for KIAA0970 (NM_014923.2,747-765).
gtaaaacatatgaacgttt

SEQ ID NO: 345680 - DNA, 19 bp, Homo sapiens
  siRNA target sequence for KIAA0970 (NM_014923.2,758-776).
gaacgtttgcagaaaaaat

SEQ ID NO: 345681 - DNA, 19 bp, Homo sapiens
  siRNA target sequence for KIAA0970 (NM_014923.2,840-858).
gcccttctcccattaatga

SEQ ID NO: 345682 - DNA, 19 bp, Homo sapiens
  siRNA target sequence for KIAA0970 (NM_014923.2,843-861).
cttctcccattaatgaaca

SEQ ID NO: 345683 - DNA, 19 bp, Homo sapiens
  siRNA target sequence for KIAA0970 (NM_014923.2,905-923).
ggatcagcaaaaatcaagt

SEQ ID NO: 345684 - DNA, 19 bp, Homo sapiens
  siRNA target sequence for KIAA0970 (NM_014923.2,931-949).
ggggaaaggtggtacacaa

SEQ ID NO: 345685 - DNA, 19 bp, Homo sapiens
  siRNA target sequence for KIAA0970 (NM_014923.2,938-956).
ggtggtacacaagttgata

SEQ ID NO: 345686 - DNA, 19 bp, Homo sapiens
  siRNA target sequence for KIAA0970 (NM_014923.2,942-960).
gtacacaagttgatacaga

SEQ ID NO: 345687 - DNA, 19 bp, Homo sapiens
  siRNA target sequence for KIAA0970 (NM_014923.2,989-1007).
gcatttgaagcacttcttt

SEQ ID NO: 345688 - DNA, 19 bp, Homo sapiens
  siRNA target sequence for KIAA0970 (NM_014923.2,1043-1061).
gcaaggacagtagtactta

SEQ ID NO: 345689 - DNA, 19 bp, Homo sapiens
  siRNA target sequence for KIAA0970 (NM_014923.2,1071-1089).
caccttccagcctcattaa

SEQ ID NO: 345690 - DNA, 19 bp, Homo sapiens
  siRNA target sequence for KIAA0970 (NM_014923.2,1091-1109).
ggtgaaacagatgaaagta

SEQ ID NO: 345691 - DNA, 19 bp, Homo sapiens
  siRNA target sequence for KIAA0970 (NM_014923.2,1112-1130).
gtaccagagctctatggtt

SEQ ID NO: 345692 - DNA, 19 bp, Homo sapiens
  siRNA target sequence for KIAA0970 (NM_014923.2,1116-1134).
cagagctctatggttatga

SEQ ID NO: 345693 - DNA, 19 bp, Homo sapiens
  siRNA target sequence for KIAA0970 (NM_014923.2,1222-1240).
gccagccatggattaccat

SEQ ID NO: 345694 - DNA, 19 bp, Homo sapiens
  siRNA target sequence for KIAA0970 (NM_014923.2,1309-1327).
gagctgtgaacctgatata

SEQ ID NO: 345695 - DNA, 19 bp, Homo sapiens
  siRNA target sequence for KIAA0970 (NM_014923.2,1314-1332).
gtgaacctgatatacctaa

SEQ ID NO: 345696 - DNA, 19 bp, Homo sapiens
  siRNA target sequence for KIAA0970 (NM_014923.2,1346-1364).
gccaatcggaccaaaaatt

SEQ ID NO: 345697 - DNA, 19 bp, Homo sapiens
  siRNA target sequence for KIAA0970 (NM_014923.2,1348-1366).
caatcggaccaaaaattca

SEQ ID NO: 345698 - DNA, 19 bp, Homo sapiens
  siRNA target sequence for KIAA0970 (NM_014923.2,1365-1383).
cactcactttgcaatggaa

SEQ ID NO: 345699 - DNA, 19 bp, Homo sapiens
  siRNA target sequence for KIAA0970 (NM_014923.2,1389-1407).
ctagtgacaatggttctaa

SEQ ID NO: 345700 - DNA, 19 bp, Homo sapiens
  siRNA target sequence for KIAA0970 (NM_014923.2,1474-1492).
gggctcacagaaacaattt

SEQ ID NO: 345701 - DNA, 19 bp, Homo sapiens
  siRNA target sequence for KIAA0970 (NM_014923.2,1475-1493).
ggctcacagaaacaattta

SEQ ID NO: 345702 - DNA, 19 bp, Homo sapiens
  siRNA target sequence for KIAA0970 (NM_014923.2,1476-1494).
gctcacagaaacaatttaa

SEQ ID NO: 345703 - DNA, 19 bp, Homo sapiens
  siRNA target sequence for KIAA0970 (NM_014923.2,1512-1530).
cagcaatgggctgtaaatt

SEQ ID NO: 345704 - DNA, 19 bp, Homo sapiens
  siRNA target sequence for KIAA0970 (NM_014923.2,1514-1532).
gcaatgggctgtaaattca

SEQ ID NO: 345705 - DNA, 19 bp, Homo sapiens
  siRNA target sequence for KIAA0970 (NM_014923.2,1520-1538).
ggctgtaaattcagactat

SEQ ID NO: 345706 - DNA, 19 bp, Homo sapiens
  siRNA target sequence for KIAA0970 (NM_014923.2,1531-1549).
cagactatcggccagaaat

SEQ ID NO: 345707 - DNA, 19 bp, Homo sapiens
  siRNA target sequence for KIAA0970 (NM_014923.2,1535-1553).
ctatcggccagaaatgact

SEQ ID NO: 345708 - DNA, 19 bp, Homo sapiens
  siRNA target sequence for KIAA0970 (NM_014923.2,1557-1575).
gtacaagtggttttagtga

SEQ ID NO: 345709 - DNA, 19 bp, Homo sapiens
  siRNA target sequence for KIAA0970 (NM_014923.2,1572-1590).
gtgaagaagtcttatatta

SEQ ID NO: 345710 - DNA, 19 bp, Homo sapiens
  siRNA target sequence for KIAA0970 (NM_014923.2,1616-1634).
ccagcaagtcctgtattaa

SEQ ID NO: 345711 - DNA, 19 bp, Homo sapiens
  siRNA target sequence for KIAA0970 (NM_014923.2,1619-1637).
gcaagtcctgtattaacca

SEQ ID NO: 345712 - DNA, 19 bp, Homo sapiens
  siRNA target sequence for KIAA0970 (NM_014923.2,1620-1638).
caagtcctgtattaaccaa

SEQ ID NO: 345713 - DNA, 19 bp, Homo sapiens
  siRNA target sequence for KIAA0970 (NM_014923.2,1734-1752).
cttcaggatatggttttaa

SEQ ID NO: 345714 - DNA, 19 bp, Homo sapiens
  siRNA target sequence for KIAA0970 (NM_014923.2,1796-1814).
ctcagacgtagtactaagt

SEQ ID NO: 345715 - DNA, 19 bp, Homo sapiens
  siRNA target sequence for KIAA0970 (NM_014923.2,1802-1820).
cgtagtactaagtataaat

SEQ ID NO: 345716 - DNA, 19 bp, Homo sapiens
  siRNA target sequence for KIAA0970 (NM_014923.2,1813-1831).
gtataaatttaaggttatt

SEQ ID NO: 345717 - DNA, 19 bp, Homo sapiens
  siRNA target sequence for KIAA0970 (NM_014923.2,1854-1872).
gtaatccaagtgaagtagt

SEQ ID NO: 345718 - DNA, 19 bp, Homo sapiens
  siRNA target sequence for KIAA0970 (NM_014923.2,1859-1877).
ccaagtgaagtagtagaat

SEQ ID NO: 345719 - DNA, 19 bp, Homo sapiens
  siRNA target sequence for KIAA0970 (NM_014923.2,1933-1951).
gatacattcacacagtttt

SEQ ID NO: 345720 - DNA, 19 bp, Homo sapiens
  siRNA target sequence for KIAA0970 (NM_014923.2,1982-2000).
ggcggagcaaccatcaata

SEQ ID NO: 345721 - DNA, 19 bp, Homo sapiens
  siRNA target sequence for KIAA0970 (NM_014923.2,2024-2042).
ggttctaacggaaacaaat

SEQ ID NO: 345722 - DNA, 19 bp, Homo sapiens
  siRNA target sequence for KIAA0970 (NM_014923.2,2063-2081).
gctaccagggaacatcttt

SEQ ID NO: 345723 - DNA, 19 bp, Homo sapiens
  siRNA target sequence for KIAA0970 (NM_014923.2,2067-2085).
ccagggaacatctttgtga

SEQ ID NO: 345724 - DNA, 19 bp, Homo sapiens
  siRNA target sequence for KIAA0970 (NM_014923.2,2092-2110).
gaatccaggctgtttctat

SEQ ID NO: 345725 - DNA, 19 bp, Homo sapiens
  siRNA target sequence for KIAA0970 (NM_014923.2,2096-2114).
ccaggctgtttctatcgtt

SEQ ID NO: 345726 - DNA, 19 bp, Homo sapiens
  siRNA target sequence for KIAA0970 (NM_014923.2,2097-2115).
caggctgtttctatcgttt

SEQ ID NO: 345727 - DNA, 19 bp, Homo sapiens
  siRNA target sequence for KIAA0970 (NM_014923.2,2101-2119).
ctgtttctatcgtttacga

SEQ ID NO: 345728 - DNA, 19 bp, Homo sapiens
  siRNA target sequence for KIAA0970 (NM_014923.2,2144-2162).
cagagtgcggtctctgaat

SEQ ID NO: 345729 - DNA, 19 bp, Homo sapiens
  siRNA target sequence for KIAA0970 (NM_014923.2,2202-2220).
gcctccctcccagattaca

SEQ ID NO: 345730 - DNA, 19 bp, Homo sapiens
  siRNA target sequence for KIAA0970 (NM_014923.2,2409-2427).
gactacgtgcagctaacaa

SEQ ID NO: 345731 - DNA, 19 bp, Homo sapiens
  siRNA target sequence for KIAA0970 (NM_014923.2,2411-2429).
ctacgtgcagctaacaaaa

SEQ ID NO: 345732 - DNA, 19 bp, Homo sapiens
  siRNA target sequence for KIAA0970 (NM_014923.2,2434-2452).
gtttggaccattttcagaa

SEQ ID NO: 345733 - DNA, 19 bp, Homo sapiens
  siRNA target sequence for KIAA0970 (NM_014923.2,2500-2518).
ccctcaagtgacatgtaga

SEQ ID NO: 345734 - DNA, 19 bp, Homo sapiens
  siRNA target sequence for KIAA0970 (NM_014923.2,2501-2519).
cctcaagtgacatgtagat

SEQ ID NO: 345735 - DNA, 19 bp, Homo sapiens
  siRNA target sequence for KIAA0970 (NM_014923.2,2544-2562).
gggaggttcctttgagtaa

SEQ ID NO: 345736 - DNA, 19 bp, Homo sapiens
  siRNA target sequence for KIAA0970 (NM_014923.2,2545-2563).
ggaggttcctttgagtaat

SEQ ID NO: 345737 - DNA, 19 bp, Homo sapiens
  siRNA target sequence for KIAA0970 (NM_014923.2,2549-2567).
gttcctttgagtaatggaa

SEQ ID NO: 345738 - DNA, 19 bp, Homo sapiens
  siRNA target sequence for KIAA0970 (NM_014923.2,2606-2624).
gaaggaagtatgcagatat

SEQ ID NO: 345739 - DNA, 19 bp, Homo sapiens
  siRNA target sequence for KIAA0970 (NM_014923.2,2631-2649).
gtgggcctggtctcagtta

SEQ ID NO: 345740 - DNA, 19 bp, Homo sapiens
  siRNA target sequence for KIAA0970 (NM_014923.2,2667-2685).
caccagcaactacctatta

SEQ ID NO: 345741 - DNA, 19 bp, Homo sapiens
  siRNA target sequence for KIAA0970 (NM_014923.2,2713-2731).
gggtgcaggccctttcagt

SEQ ID NO: 345742 - DNA, 19 bp, Homo sapiens
  siRNA target sequence for KIAA0970 (NM_014923.2,2721-2739).
gccctttcagtgaagtagt

SEQ ID NO: 345743 - DNA, 19 bp, Homo sapiens
  siRNA target sequence for KIAA0970 (NM_014923.2,2885-2903).
cttgcctacagcatagact

SEQ ID NO: 345744 - DNA, 19 bp, Homo sapiens
  siRNA target sequence for KIAA0970 (NM_014923.2,2920-2938).
cctaacagtgggaaaggtt

SEQ ID NO: 345745 - DNA, 19 bp, Homo sapiens
  siRNA target sequence for KIAA0970 (NM_014923.2,2921-2939).
ctaacagtgggaaaggtta

SEQ ID NO: 345746 - DNA, 19 bp, Homo sapiens
  siRNA target sequence for KIAA0970 (NM_014923.2,2930-2948).
ggaaaggttacaagctata

SEQ ID NO: 345747 - DNA, 19 bp, Homo sapiens
  siRNA target sequence for KIAA0970 (NM_014923.2,2943-2961).
gctatattatcaacaattt

SEQ ID NO: 345748 - DNA, 19 bp, Homo sapiens
  siRNA target sequence for KIAA0970 (NM_014923.2,2987-3005).
cgaattcaagccttgaata

SEQ ID NO: 345749 - DNA, 19 bp, Homo sapiens
  siRNA target sequence for KIAA0970 (NM_014923.2,3018-3036).
gtcctttcagccatatgat

SEQ ID NO: 345750 - DNA, 19 bp, Homo sapiens
  siRNA target sequence for KIAA0970 (NM_014923.2,3194-3212).
cggtttgtatccctataca

SEQ ID NO: 345751 - DNA, 19 bp, Homo sapiens
  siRNA target sequence for KIAA0970 (NM_014923.2,3196-3214).
gtttgtatccctatacaga

SEQ ID NO: 345752 - DNA, 19 bp, Homo sapiens
  siRNA target sequence for KIAA0970 (NM_014923.2,3216-3234).
gaccatgtcatacatacaa

SEQ ID NO: 345753 - DNA, 19 bp, Homo sapiens
  siRNA target sequence for KIAA0970 (NM_014923.2,3224-3242).
catacatacaaagtacaaa

SEQ ID NO: 345754 - DNA, 19 bp, Homo sapiens
  siRNA target sequence for KIAA0970 (NM_014923.2,3232-3250).
caaagtacaaagacttaat

SEQ ID NO: 345755 - DNA, 19 bp, Homo sapiens
  siRNA target sequence for KIAA0970 (NM_014923.2,3236-3254).
gtacaaagacttaatgagt

SEQ ID NO: 345756 - DNA, 19 bp, Homo sapiens
  siRNA target sequence for KIAA0970 (NM_014923.2,3251-3269).
gagtcaacatcctataaat

SEQ ID NO: 345757 - DNA, 19 bp, Homo sapiens
  siRNA target sequence for KIAA0970 (NM_014923.2,3271-3289).
ctgtattcaagcttgtaat

SEQ ID NO: 345758 - DNA, 19 bp, Homo sapiens
  siRNA target sequence for KIAA0970 (NM_014923.2,3273-3291).
gtattcaagcttgtaatga

SEQ ID NO: 345759 - DNA, 19 bp, Homo sapiens
  siRNA target sequence for KIAA0970 (NM_014923.2,3307-3325).
cctctcccaagaatatatt

SEQ ID NO: 345760 - DNA, 19 bp, Homo sapiens
  siRNA target sequence for KIAA0970 (NM_014923.2,3354-3372).
ccttgaaagcccccaaaat

SEQ ID NO: 345761 - DNA, 19 bp, Homo sapiens
  siRNA target sequence for KIAA0970 (NM_014923.2,3412-3430).
gtgtttacagccaatgaaa

SEQ ID NO: 345762 - DNA, 19 bp, Homo sapiens
  siRNA target sequence for KIAA0970 (NM_014923.2,3427-3445).
gaaaggtgatccagttatt

SEQ ID NO: 345763 - DNA, 19 bp, Homo sapiens
  siRNA target sequence for KIAA0970 (NM_014923.2,3458-3476).
gttatgttgggaaaagatt

SEQ ID NO: 345764 - DNA, 19 bp, Homo sapiens
  siRNA target sequence for KIAA0970 (NM_014923.2,3785-3803).
cagtactttgtaatcaagt

SEQ ID NO: 345765 - DNA, 19 bp, Homo sapiens
  siRNA target sequence for KIAA0831 (NM_014924.2,331-349).
gcaagatgaggattgaaca

SEQ ID NO: 345766 - DNA, 19 bp, Homo sapiens
  siRNA target sequence for KIAA0831 (NM_014924.2,350-368).
gttaaaacaaacaatatgt

SEQ ID NO: 345767 - DNA, 19 bp, Homo sapiens
  siRNA target sequence for KIAA0831 (NM_014924.2,473-491).
gaagattcagaggcataat

SEQ ID NO: 345768 - DNA, 19 bp, Homo sapiens
  siRNA target sequence for KIAA0831 (NM_014924.2,521-539).
gaccattgacttaagaagt

SEQ ID NO: 345769 - DNA, 19 bp, Homo sapiens
  siRNA target sequence for KIAA0831 (NM_014924.2,524-542).
cattgacttaagaagtcat

SEQ ID NO: 345770 - DNA, 19 bp, Homo sapiens
  siRNA target sequence for KIAA0831 (NM_014924.2,561-579).
cttcgacgatcccatatat

SEQ ID NO: 345771 - DNA, 19 bp, Homo sapiens
  siRNA target sequence for KIAA0831 (NM_014924.2,565-583).
gacgatcccatatattaga

SEQ ID NO: 345772 - DNA, 19 bp, Homo sapiens
  siRNA target sequence for KIAA0831 (NM_014924.2,699-717).
gaagcccggaggacaactt

SEQ ID NO: 345773 - DNA, 19 bp, Homo sapiens
  siRNA target sequence for KIAA0831 (NM_014924.2,733-751).
gggtctgtgacgatcacaa

SEQ ID NO: 345774 - DNA, 19 bp, Homo sapiens
  siRNA target sequence for KIAA0831 (NM_014924.2,756-774).
gacaccagcattagcatta

SEQ ID NO: 345775 - DNA, 19 bp, Homo sapiens
  siRNA target sequence for KIAA0831 (NM_014924.2,770-788).
cattacagggccttggatt

SEQ ID NO: 345776 - DNA, 19 bp, Homo sapiens
  siRNA target sequence for KIAA0831 (NM_014924.2,785-803).
gattagcctccctaacaat

SEQ ID NO: 345777 - DNA, 19 bp, Homo sapiens
  siRNA target sequence for KIAA0831 (NM_014924.2,913-931).
caactcagctggtcaacat

SEQ ID NO: 345778 - DNA, 19 bp, Homo sapiens
  siRNA target sequence for KIAA0831 (NM_014924.2,924-942).
gtcaacattctgtctcata

SEQ ID NO: 345779 - DNA, 19 bp, Homo sapiens
  siRNA target sequence for KIAA0831 (NM_014924.2,926-944).
caacattctgtctcatata

SEQ ID NO: 345780 - DNA, 19 bp, Homo sapiens
  siRNA target sequence for KIAA0831 (NM_014924.2,935-953).
gtctcatatacttgatgta

SEQ ID NO: 345781 - DNA, 19 bp, Homo sapiens
  siRNA target sequence for KIAA0831 (NM_014924.2,968-986).
gctctgcaacagtgaattt

SEQ ID NO: 345782 - DNA, 19 bp, Homo sapiens
  siRNA target sequence for KIAA0831 (NM_014924.2,971-989).
ctgcaacagtgaattttgt

SEQ ID NO: 345783 - DNA, 19 bp, Homo sapiens
  siRNA target sequence for KIAA0831 (NM_014924.2,1066-1084).
ctcagcatgtaaatttaga

SEQ ID NO: 345784 - DNA, 19 bp, Homo sapiens
  siRNA target sequence for KIAA0831 (NM_014924.2,1071-1089).
catgtaaatttagatcaat

SEQ ID NO: 345785 - DNA, 19 bp, Homo sapiens
  siRNA target sequence for KIAA0831 (NM_014924.2,1100-1118).
gcataccctcaggaatcta

SEQ ID NO: 345786 - DNA, 19 bp, Homo sapiens
  siRNA target sequence for KIAA0831 (NM_014924.2,1156-1174).
ggtcagggccctttgaagt

SEQ ID NO: 345787 - DNA, 19 bp, Homo sapiens
  siRNA target sequence for KIAA0831 (NM_014924.2,1157-1175).
gtcagggccctttgaagta

SEQ ID NO: 345788 - DNA, 19 bp, Homo sapiens
  siRNA target sequence for KIAA0831 (NM_014924.2,1185-1203).
cttgaggagtccatggaat

SEQ ID NO: 345789 - DNA, 19 bp, Homo sapiens
  siRNA target sequence for KIAA0831 (NM_014924.2,1298-1316).
gcctagtccccggttttgt

SEQ ID NO: 345790 - DNA, 19 bp, Homo sapiens
  siRNA target sequence for KIAA0831 (NM_014924.2,1300-1318).
ctagtccccggttttgtga

SEQ ID NO: 345791 - DNA, 19 bp, Homo sapiens
  siRNA target sequence for KIAA0831 (NM_014924.2,1423-1441).
cggtgacctcctggtttaa

SEQ ID NO: 345792 - DNA, 19 bp, Homo sapiens
  siRNA target sequence for KIAA0831 (NM_014924.2,1427-1445).
gacctcctggtttaaagct

SEQ ID NO: 345793 - DNA, 19 bp, Homo sapiens
  siRNA target sequence for KIAA0831 (NM_014924.2,1429-1447).
cctcctggtttaaagctta

SEQ ID NO: 345794 - DNA, 19 bp, Homo sapiens
  siRNA target sequence for KIAA1002 (NM_014925.2,1134-1152).
gcaacagccacccttgaat

SEQ ID NO: 345795 - DNA, 19 bp, Homo sapiens
  siRNA target sequence for KIAA1002 (NM_014925.2,1135-1153).
caacagccacccttgaata

SEQ ID NO: 345796 - DNA, 19 bp, Homo sapiens
  siRNA target sequence for KIAA1002 (NM_014925.2,1141-1159).
ccacccttgaataatcaca

SEQ ID NO: 345797 - DNA, 19 bp, Homo sapiens
  siRNA target sequence for KIAA1002 (NM_014925.2,1142-1160).
cacccttgaataatcacat

SEQ ID NO: 345798 - DNA, 19 bp, Homo sapiens
  siRNA target sequence for KIAA1002 (NM_014925.2,1448-1466).
ctaactccaaccagcaata

SEQ ID NO: 345799 - DNA, 19 bp, Homo sapiens
  siRNA target sequence for KIAA1002 (NM_014925.2,1452-1470).
ctccaaccagcaatatcga

SEQ ID NO: 345800 - DNA, 19 bp, Homo sapiens
  siRNA target sequence for KIAA1002 (NM_014925.2,1566-1584).
gcagcaggcggcttaccaa

SEQ ID NO: 345801 - DNA, 19 bp, Homo sapiens
  siRNA target sequence for KIAA1002 (NM_014925.2,1575-1593).
ggcttaccaaggcatgatt

SEQ ID NO: 345802 - DNA, 19 bp, Homo sapiens
  siRNA target sequence for KIAA1002 (NM_014925.2,1710-1728).
gggtagtgactcgcaaaat

SEQ ID NO: 345803 - DNA, 19 bp, Homo sapiens
  siRNA target sequence for KIAA1002 (NM_014925.2,1712-1730).
gtagtgactcgcaaaatgt

SEQ ID NO: 345804 - DNA, 19 bp, Homo sapiens
  siRNA target sequence for KIAA1002 (NM_014925.2,1804-1822).
ggggtaccagtgtactata

SEQ ID NO: 345805 - DNA, 19 bp, Homo sapiens
  siRNA target sequence for KIAA1002 (NM_014925.2,1807-1825).
gtaccagtgtactatagca

SEQ ID NO: 345806 - DNA, 19 bp, Homo sapiens
  siRNA target sequence for KIAA1002 (NM_014925.2,1848-1866).
cggtacgagcccttctgta

SEQ ID NO: 345807 - DNA, 19 bp, Homo sapiens
  siRNA target sequence for KIAA1002 (NM_014925.2,2040-2058).
ggtccagtggagtcattgt

SEQ ID NO: 345808 - DNA, 19 bp, Homo sapiens
  siRNA target sequence for KIAA1002 (NM_014925.2,2043-2061).
ccagtggagtcattgtaaa

SEQ ID NO: 345809 - DNA, 19 bp, Homo sapiens
  siRNA target sequence for KIAA1002 (NM_014925.2,2305-2323).
ccattacagtacaatctgt

SEQ ID NO: 345810 - DNA, 19 bp, Homo sapiens
  siRNA target sequence for KIAA1002 (NM_014925.2,2344-2362).
catggccagtcaacttaca

SEQ ID NO: 345811 - DNA, 19 bp, Homo sapiens
  siRNA target sequence for KIAA1002 (NM_014925.2,2641-2659).
gacctcgctgccttgtaca

SEQ ID NO: 345812 - DNA, 19 bp, Homo sapiens
  siRNA target sequence for KIAA1002 (NM_014925.2,2682-2700).
ccccctggctgcccaaaat

SEQ ID NO: 345813 - DNA, 19 bp, Homo sapiens
  siRNA target sequence for KIAA1002 (NM_014925.2,2702-2720).
cctcccttcgtctcaacaa

SEQ ID NO: 345814 - DNA, 19 bp, Homo sapiens
  siRNA target sequence for KIAA1002 (NM_014925.2,2721-2739).
ctccgtgagtcgcttcaaa

SEQ ID NO: 345815 - DNA, 19 bp, Homo sapiens
  siRNA target sequence for KIAA1002 (NM_014925.2,2723-2741).
ccgtgagtcgcttcaaact

SEQ ID NO: 345816 - DNA, 19 bp, Homo sapiens
  siRNA target sequence for KIAA1002 (NM_014925.2,2724-2742).
cgtgagtcgcttcaaactt

SEQ ID NO: 345817 - DNA, 19 bp, Homo sapiens
  siRNA target sequence for KIAA1002 (NM_014925.2,2729-2747).
gtcgcttcaaacttcgaat

SEQ ID NO: 345818 - DNA, 19 bp, Homo sapiens
  siRNA target sequence for SLITRK3 (NM_014926.2,150-168).
gatgttgtggataattctt

SEQ ID NO: 345819 - DNA, 19 bp, Homo sapiens
  siRNA target sequence for SLITRK3 (NM_014926.2,197-215).
ccccgattcccctaataga

SEQ ID NO: 345820 - DNA, 19 bp, Homo sapiens
  siRNA target sequence for SLITRK3 (NM_014926.2,250-268).
ccatgctactgtgaagtta

SEQ ID NO: 345821 - DNA, 19 bp, Homo sapiens
  siRNA target sequence for SLITRK3 (NM_014926.2,251-269).
catgctactgtgaagttaa

SEQ ID NO: 345822 - DNA, 19 bp, Homo sapiens
  siRNA target sequence for SLITRK3 (NM_014926.2,289-307).
cattgtgacagtaaaggat

SEQ ID NO: 345823 - DNA, 19 bp, Homo sapiens
  siRNA target sequence for SLITRK3 (NM_014926.2,295-313).
gacagtaaaggatttacaa

SEQ ID NO: 345824 - DNA, 19 bp, Homo sapiens
  siRNA target sequence for SLITRK3 (NM_014926.2,297-315).
cagtaaaggatttacaaat

SEQ ID NO: 345825 - DNA, 19 bp, Homo sapiens
  siRNA target sequence for SLITRK3 (NM_014926.2,338-356).
ggtcaagaccttttaaact

SEQ ID NO: 345826 - DNA, 19 bp, Homo sapiens
  siRNA target sequence for SLITRK3 (NM_014926.2,470-488).
ctttcaatggtcttaagat

SEQ ID NO: 345827 - DNA, 19 bp, Homo sapiens
  siRNA target sequence for SLITRK3 (NM_014926.2,495-513).
gagactatatctacatgaa

SEQ ID NO: 345828 - DNA, 19 bp, Homo sapiens
  siRNA target sequence for SLITRK3 (NM_014926.2,497-515).
gactatatctacatgaaaa

SEQ ID NO: 345829 - DNA, 19 bp, Homo sapiens
  siRNA target sequence for SLITRK3 (NM_014926.2,546-564).
ccttggcttggaaagtcta

SEQ ID NO: 345830 - DNA, 19 bp, Homo sapiens
  siRNA target sequence for SLITRK3 (NM_014926.2,551-569).
gcttggaaagtctagaata

SEQ ID NO: 345831 - DNA, 19 bp, Homo sapiens
  siRNA target sequence for SLITRK3 (NM_014926.2,585-603).
caatgtcattaaacgtatt

SEQ ID NO: 345832 - DNA, 19 bp, Homo sapiens
  siRNA target sequence for SLITRK3 (NM_014926.2,589-607).
gtcattaaacgtattgaga

SEQ ID NO: 345833 - DNA, 19 bp, Homo sapiens
  siRNA target sequence for SLITRK3 (NM_014926.2,610-628).
ggggcatttcggaacctaa

SEQ ID NO: 345834 - DNA, 19 bp, Homo sapiens
  siRNA target sequence for SLITRK3 (NM_014926.2,613-631).
gcatttcggaacctaagta

SEQ ID NO: 345835 - DNA, 19 bp, Homo sapiens
  siRNA target sequence for SLITRK3 (NM_014926.2,614-632).
catttcggaacctaagtaa

SEQ ID NO: 345836 - DNA, 19 bp, Homo sapiens
  siRNA target sequence for SLITRK3 (NM_014926.2,619-637).
cggaacctaagtaaattga

SEQ ID NO: 345837 - DNA, 19 bp, Homo sapiens
  siRNA target sequence for SLITRK3 (NM_014926.2,666-684).
ccccatgcttccaaccaat

SEQ ID NO: 345838 - DNA, 19 bp, Homo sapiens
  siRNA target sequence for SLITRK3 (NM_014926.2,672-690).
gcttccaaccaatttattt

SEQ ID NO: 345839 - DNA, 19 bp, Homo sapiens
  siRNA target sequence for SLITRK3 (NM_014926.2,715-733).
gacctacgtggaaataggt

SEQ ID NO: 345840 - DNA, 19 bp, Homo sapiens
  siRNA target sequence for SLITRK3 (NM_014926.2,717-735).
cctacgtggaaataggtta

SEQ ID NO: 345841 - DNA, 19 bp, Homo sapiens
  siRNA target sequence for SLITRK3 (NM_014926.2,718-736).
ctacgtggaaataggttaa

SEQ ID NO: 345842 - DNA, 19 bp, Homo sapiens
  siRNA target sequence for SLITRK3 (NM_014926.2,722-740).
gtggaaataggttaaaggt

SEQ ID NO: 345843 - DNA, 19 bp, Homo sapiens
  siRNA target sequence for SLITRK3 (NM_014926.2,848-866).
ggctggaacgcattcctta

SEQ ID NO: 345844 - DNA, 19 bp, Homo sapiens
  siRNA target sequence for SLITRK3 (NM_014926.2,849-867).
gctggaacgcattccttat

SEQ ID NO: 345845 - DNA, 19 bp, Homo sapiens
  siRNA target sequence for SLITRK3 (NM_014926.2,852-870).
ggaacgcattccttatact

SEQ ID NO: 345846 - DNA, 19 bp, Homo sapiens
  siRNA target sequence for SLITRK3 (NM_014926.2,946-964).
gaactctgtcccttgttgt

SEQ ID NO: 345847 - DNA, 19 bp, Homo sapiens
  siRNA target sequence for SLITRK3 (NM_014926.2,997-1015).
ccacattcgtcatcaagta

SEQ ID NO: 345848 - DNA, 19 bp, Homo sapiens
  siRNA target sequence for SLITRK3 (NM_014926.2,998-1016).
cacattcgtcatcaagtaa

SEQ ID NO: 345849 - DNA, 19 bp, Homo sapiens
  siRNA target sequence for SLITRK3 (NM_014926.2,1072-1090).
gcttcttctgtcgaataca

SEQ ID NO: 345850 - DNA, 19 bp, Homo sapiens
  siRNA target sequence for SLITRK3 (NM_014926.2,1073-1091).
cttcttctgtcgaatacaa

SEQ ID NO: 345851 - DNA, 19 bp, Homo sapiens
  siRNA target sequence for SLITRK3 (NM_014926.2,1084-1102).
gaatacaagtcctcaaata

SEQ ID NO: 345852 - DNA, 19 bp, Homo sapiens
  siRNA target sequence for SLITRK3 (NM_014926.2,1148-1166).
ccacctcccaagctttata

SEQ ID NO: 345853 - DNA, 19 bp, Homo sapiens
  siRNA target sequence for SLITRK3 (NM_014926.2,1149-1167).
cacctcccaagctttatat

SEQ ID NO: 345854 - DNA, 19 bp, Homo sapiens
  siRNA target sequence for SLITRK3 (NM_014926.2,1152-1170).
ctcccaagctttatatcct

SEQ ID NO: 345855 - DNA, 19 bp, Homo sapiens
  siRNA target sequence for SLITRK3 (NM_014926.2,1184-1202).
ctcccattgctccttatca

SEQ ID NO: 345856 - DNA, 19 bp, Homo sapiens
  siRNA target sequence for SLITRK3 (NM_014926.2,1186-1204).
cccattgctccttatcaga

SEQ ID NO: 345857 - DNA, 19 bp, Homo sapiens
  siRNA target sequence for SLITRK3 (NM_014926.2,1208-1226).
gaccaccaatccccattat

SEQ ID NO: 345858 - DNA, 19 bp, Homo sapiens
  siRNA target sequence for SLITRK3 (NM_014926.2,1210-1228).
ccaccaatccccattatat

SEQ ID NO: 345859 - DNA, 19 bp, Homo sapiens
  siRNA target sequence for SLITRK3 (NM_014926.2,1235-1253).
ctgggtgtacctgtaattt

SEQ ID NO: 345860 - DNA, 19 bp, Homo sapiens
  siRNA target sequence for SLITRK3 (NM_014926.2,1238-1256).
ggtgtacctgtaatttgca

SEQ ID NO: 345861 - DNA, 19 bp, Homo sapiens
  siRNA target sequence for SLITRK3 (NM_014926.2,1244-1262).
cctgtaatttgcacatcaa

SEQ ID NO: 345862 - DNA, 19 bp, Homo sapiens
  siRNA target sequence for SLITRK3 (NM_014926.2,1286-1304).
gcaaagagcgaggatttaa

SEQ ID NO: 345863 - DNA, 19 bp, Homo sapiens
  siRNA target sequence for SLITRK3 (NM_014926.2,1358-1376).
gtagcaatctgattcagaa

SEQ ID NO: 345864 - DNA, 19 bp, Homo sapiens
  siRNA target sequence for SLITRK3 (NM_014926.2,1423-1441).
catctggggaacaatcgta

SEQ ID NO: 345865 - DNA, 19 bp, Homo sapiens
  siRNA target sequence for SLITRK3 (NM_014926.2,1426-1444).
ctggggaacaatcgtattt

SEQ ID NO: 345866 - DNA, 19 bp, Homo sapiens
  siRNA target sequence for SLITRK3 (NM_014926.2,1430-1448).
ggaacaatcgtatttccta

SEQ ID NO: 345867 - DNA, 19 bp, Homo sapiens
  siRNA target sequence for SLITRK3 (NM_014926.2,1431-1449).
gaacaatcgtatttcctat

SEQ ID NO: 345868 - DNA, 19 bp, Homo sapiens
  siRNA target sequence for SLITRK3 (NM_014926.2,1456-1474).
gatggggcctttatcaact

SEQ ID NO: 345869 - DNA, 19 bp, Homo sapiens
  siRNA target sequence for SLITRK3 (NM_014926.2,1497-1515).
ccttaatggcaacgatata

SEQ ID NO: 345870 - DNA, 19 bp, Homo sapiens
  siRNA target sequence for SLITRK3 (NM_014926.2,1549-1567).
cagagtttgcactacttgt

SEQ ID NO: 345871 - DNA, 19 bp, Homo sapiens
  siRNA target sequence for SLITRK3 (NM_014926.2,1558-1576).
cactacttgtactttgagt

SEQ ID NO: 345872 - DNA, 19 bp, Homo sapiens
  siRNA target sequence for SLITRK3 (NM_014926.2,1563-1581).
cttgtactttgagttcaat

SEQ ID NO: 345873 - DNA, 19 bp, Homo sapiens
  siRNA target sequence for SLITRK3 (NM_014926.2,1613-1631).
gcctcatgcccaacttgaa

SEQ ID NO: 345874 - DNA, 19 bp, Homo sapiens
  siRNA target sequence for SLITRK3 (NM_014926.2,1748-1766).
gtgtcctggaacacttgaa

SEQ ID NO: 345875 - DNA, 19 bp, Homo sapiens
  siRNA target sequence for SLITRK3 (NM_014926.2,1814-1832).
gtgacctggtcccctttaa

SEQ ID NO: 345876 - DNA, 19 bp, Homo sapiens
  siRNA target sequence for SLITRK3 (NM_014926.2,1910-1928).
gtgatgtgcgcactattga

SEQ ID NO: 345877 - DNA, 19 bp, Homo sapiens
  siRNA target sequence for SLITRK3 (NM_014926.2,2021-2039).
ccagtgcatcaccttatga

SEQ ID NO: 345878 - DNA, 19 bp, Homo sapiens
  siRNA target sequence for SLITRK3 (NM_014926.2,2024-2042).
gtgcatcaccttatgagtt

SEQ ID NO: 345879 - DNA, 19 bp, Homo sapiens
  siRNA target sequence for SLITRK3 (NM_014926.2,2275-2293).
ggtggtcgaccaactcttt

SEQ ID NO: 345880 - DNA, 19 bp, Homo sapiens
  siRNA target sequence for SLITRK3 (NM_014926.2,2312-2330).
ctcccgtgggtcatgtgta

SEQ ID NO: 345881 - DNA, 19 bp, Homo sapiens
  siRNA target sequence for SLITRK3 (NM_014926.2,2321-2339).
gtcatgtgtatgagtacat

SEQ ID NO: 345882 - DNA, 19 bp, Homo sapiens
  siRNA target sequence for SLITRK3 (NM_014926.2,2597-2615).
ccatagtgacggtgaatca

SEQ ID NO: 345883 - DNA, 19 bp, Homo sapiens
  siRNA target sequence for SLITRK3 (NM_014926.2,2688-2706).
gttccgccaccatgagaaa

SEQ ID NO: 345884 - DNA, 19 bp, Homo sapiens
  siRNA target sequence for SLITRK3 (NM_014926.2,2750-2768).
gtggcagtatgctactaga

SEQ ID NO: 345885 - DNA, 19 bp, Homo sapiens
  siRNA target sequence for SLITRK3 (NM_014926.2,2868-2886).
catgcaatacccagactta

SEQ ID NO: 345886 - DNA, 19 bp, Homo sapiens
  siRNA target sequence for SLITRK3 (NM_014926.2,2954-2972).
cccaaaaaagtgattacct

SEQ ID NO: 345887 - DNA, 19 bp, Homo sapiens
  siRNA target sequence for SLITRK3 (NM_014926.2,2973-2991).
cgagttaagggccaaactt

SEQ ID NO: 345888 - DNA, 19 bp, Homo sapiens
  siRNA target sequence for SLITRK3 (NM_014926.2,2976-2994).
gttaagggccaaacttcaa

SEQ ID NO: 345889 - DNA, 19 bp, Homo sapiens
  siRNA target sequence for SLITRK3 (NM_014926.2,2981-2999).
gggccaaacttcaaaccaa

SEQ ID NO: 345890 - DNA, 19 bp, Homo sapiens
  siRNA target sequence for SLITRK3 (NM_014926.2,3016-3034).
gtcctggagaagacaacat

SEQ ID NO: 345891 - DNA, 19 bp, Homo sapiens
  siRNA target sequence for KIAA0971 (NM_014929.1,95-113).
gtggagagcaaaatgaata

SEQ ID NO: 345892 - DNA, 19 bp, Homo sapiens
  siRNA target sequence for KIAA0971 (NM_014929.1,136-154).
gaaccttagacaattcagt

SEQ ID NO: 345893 - DNA, 19 bp, Homo sapiens
  siRNA target sequence for KIAA0971 (NM_014929.1,144-162).
gacaattcagtacattagt

SEQ ID NO: 345894 - DNA, 19 bp, Homo sapiens
  siRNA target sequence for KIAA0971 (NM_014929.1,251-269).
cataacagaatgcaatcaa

SEQ ID NO: 345895 - DNA, 19 bp, Homo sapiens
  siRNA target sequence for KIAA0971 (NM_014929.1,262-280).
gcaatcaactgatatcatt

SEQ ID NO: 345896 - DNA, 19 bp, Homo sapiens
  siRNA target sequence for KIAA0971 (NM_014929.1,263-281).
caatcaactgatatcatta

SEQ ID NO: 345897 - DNA, 19 bp, Homo sapiens
  siRNA target sequence for KIAA0971 (NM_014929.1,270-288).
ctgatatcattagatatct

SEQ ID NO: 345898 - DNA, 19 bp, Homo sapiens
  siRNA target sequence for KIAA0971 (NM_014929.1,272-290).
gatatcattagatatctct

SEQ ID NO: 345899 - DNA, 19 bp, Homo sapiens
  siRNA target sequence for KIAA0971 (NM_014929.1,358-376).
ccttagaattgaaagacta

SEQ ID NO: 345900 - DNA, 19 bp, Homo sapiens
  siRNA target sequence for KIAA0971 (NM_014929.1,416-434).
cttgtccctgttgataaat

SEQ ID NO: 345901 - DNA, 19 bp, Homo sapiens
  siRNA target sequence for KIAA0971 (NM_014929.1,421-439).
ccctgttgataaatctgat

SEQ ID NO: 345902 - DNA, 19 bp, Homo sapiens
  siRNA target sequence for KIAA0971 (NM_014929.1,475-493).
ctccaatgaagatgttctt

SEQ ID NO: 345903 - DNA, 19 bp, Homo sapiens
  siRNA target sequence for KIAA0971 (NM_014929.1,514-532).
ccgtatcagcagtagaaaa

SEQ ID NO: 345904 - DNA, 19 bp, Homo sapiens
  siRNA target sequence for KIAA0971 (NM_014929.1,516-534).
gtatcagcagtagaaaact

SEQ ID NO: 345905 - DNA, 19 bp, Homo sapiens
  siRNA target sequence for KIAA0971 (NM_014929.1,558-576).
gtgatgtgttagatgcatt

SEQ ID NO: 345906 - DNA, 19 bp, Homo sapiens
  siRNA target sequence for KIAA0971 (NM_014929.1,560-578).
gatgtgttagatgcatttt

SEQ ID NO: 345907 - DNA, 19 bp, Homo sapiens
  siRNA target sequence for KIAA0971 (NM_014929.1,596-614).
cctagtagcaactatttca

SEQ ID NO: 345908 - DNA, 19 bp, Homo sapiens
  siRNA target sequence for KIAA0971 (NM_014929.1,655-673).
gaagcgctttgaaaaacga

SEQ ID NO: 345909 - DNA, 19 bp, Homo sapiens
  siRNA target sequence for KIAA0971 (NM_014929.1,679-697).
gtttagccaccctgcattt

SEQ ID NO: 345910 - DNA, 19 bp, Homo sapiens
  siRNA target sequence for KIAA0971 (NM_014929.1,704-722).
ctctgtgaacatatgatga

SEQ ID NO: 345911 - DNA, 19 bp, Homo sapiens
  siRNA target sequence for KIAA0971 (NM_014929.1,728-746).
gccaagatcatgcagtata

SEQ ID NO: 345912 - DNA, 19 bp, Homo sapiens
  siRNA target sequence for KIAA0971 (NM_014929.1,729-747).
ccaagatcatgcagtataa

SEQ ID NO: 345913 - DNA, 19 bp, Homo sapiens
  siRNA target sequence for KIAA0971 (NM_014929.1,762-780).
gtcttcacgccatagtgaa

SEQ ID NO: 345914 - DNA, 19 bp, Homo sapiens
  siRNA target sequence for KIAA0971 (NM_014929.1,771-789).
ccatagtgaagcttggaat

SEQ ID NO: 345915 - DNA, 19 bp, Homo sapiens
  siRNA target sequence for KIAA0971 (NM_014929.1,829-847).
gacccaggaacgtatcaat

SEQ ID NO: 345916 - DNA, 19 bp, Homo sapiens
  siRNA target sequence for KIAA0971 (NM_014929.1,831-849).
cccaggaacgtatcaatga

SEQ ID NO: 345917 - DNA, 19 bp, Homo sapiens
  siRNA target sequence for KIAA0971 (NM_014929.1,833-851).
caggaacgtatcaatgagt

SEQ ID NO: 345918 - DNA, 19 bp, Homo sapiens
  siRNA target sequence for KIAA0971 (NM_014929.1,923-941).
ctacgaacgggattcagaa

SEQ ID NO: 345919 - DNA, 19 bp, Homo sapiens
  siRNA target sequence for KIAA0971 (NM_014929.1,930-948).
cgggattcagaatactagt

SEQ ID NO: 345920 - DNA, 19 bp, Homo sapiens
  siRNA target sequence for KIAA0971 (NM_014929.1,931-949).
gggattcagaatactagtt

SEQ ID NO: 345921 - DNA, 19 bp, Homo sapiens
  siRNA target sequence for KIAA0971 (NM_014929.1,995-1013).
gtgatgaagtgtattggaa

SEQ ID NO: 345922 - DNA, 19 bp, Homo sapiens
  siRNA target sequence for KIAA0971 (NM_014929.1,1019-1037).
gcaccgattgctcttaaga

SEQ ID NO: 345923 - DNA, 19 bp, Homo sapiens
  siRNA target sequence for KIAA0971 (NM_014929.1,1055-1073).
gccttgagggaattagaca

SEQ ID NO: 345924 - DNA, 19 bp, Homo sapiens
  siRNA target sequence for KIAA0971 (NM_014929.1,1087-1105).
gaatagccaacacatgttt

SEQ ID NO: 345925 - DNA, 19 bp, Homo sapiens
  siRNA target sequence for KIAA0971 (NM_014929.1,1093-1111).
ccaacacatgtttgaagta

SEQ ID NO: 345926 - DNA, 19 bp, Homo sapiens
  siRNA target sequence for KIAA0971 (NM_014929.1,1120-1138).
catgaatcaccgatctctt

SEQ ID NO: 345927 - DNA, 19 bp, Homo sapiens
  siRNA target sequence for KIAA0971 (NM_014929.1,1123-1141).
gaatcaccgatctcttata

SEQ ID NO: 345928 - DNA, 19 bp, Homo sapiens
  siRNA target sequence for KIAA0971 (NM_014929.1,1158-1176).
gtaaggtggtcctagataa

SEQ ID NO: 345929 - DNA, 19 bp, Homo sapiens
  siRNA target sequence for KIAA0971 (NM_014929.1,1348-1366).
ctttcgacctgttggttta

SEQ ID NO: 345930 - DNA, 19 bp, Homo sapiens
  siRNA target sequence for KIAA0971 (NM_014929.1,1370-1388).
gacctgtttatgaagagaa

SEQ ID NO: 345931 - DNA, 19 bp, Homo sapiens
  siRNA target sequence for KIAA0971 (NM_014929.1,1400-1418).
cctgaatccctaaacatga

SEQ ID NO: 345932 - DNA, 19 bp, Homo sapiens
  siRNA target sequence for KIAA0971 (NM_014929.1,1401-1419).
ctgaatccctaaacatgaa

SEQ ID NO: 345933 - DNA, 19 bp, Homo sapiens
  siRNA target sequence for KIAA0971 (NM_014929.1,1403-1421).
gaatccctaaacatgaaaa

SEQ ID NO: 345934 - DNA, 19 bp, Homo sapiens
  siRNA target sequence for KIAA0971 (NM_014929.1,1423-1441).
cattctatctattcttcat

SEQ ID NO: 345935 - DNA, 19 bp, Homo sapiens
  siRNA target sequence for KIAA0971 (NM_014929.1,1427-1445).
ctatctattcttcatactt

SEQ ID NO: 345936 - DNA, 19 bp, Homo sapiens
  siRNA target sequence for KIAA0971 (NM_014929.1,1449-1467).
cttctctcaatcatgtcta

SEQ ID NO: 345937 - DNA, 19 bp, Homo sapiens
  siRNA target sequence for KIAA0971 (NM_014929.1,1484-1502).
gaacagttcgtggaagtta

SEQ ID NO: 345938 - DNA, 19 bp, Homo sapiens
  siRNA target sequence for KIAA0971 (NM_014929.1,1509-1527).
gtgctctgactggttatct

SEQ ID NO: 345939 - DNA, 19 bp, Homo sapiens
  siRNA target sequence for KIAA0971 (NM_014929.1,1518-1536).
ctggttatcttcacactat

SEQ ID NO: 345940 - DNA, 19 bp, Homo sapiens
  siRNA target sequence for KIAA0971 (NM_014929.1,1520-1538).
ggttatcttcacactattt

SEQ ID NO: 345941 - DNA, 19 bp, Homo sapiens
  siRNA target sequence for KIAA0971 (NM_014929.1,1678-1696).
gcatactttggatacttgt

SEQ ID NO: 345942 - DNA, 19 bp, Homo sapiens
  siRNA target sequence for KIAA0971 (NM_014929.1,1687-1705).
ggatacttgtctaaaactt

SEQ ID NO: 345943 - DNA, 19 bp, Homo sapiens
  siRNA target sequence for KIAA0971 (NM_014929.1,1692-1710).
cttgtctaaaacttgatga

SEQ ID NO: 345944 - DNA, 19 bp, Homo sapiens
  siRNA target sequence for KIAA0971 (NM_014929.1,1763-1781).
ctgccatcgtcacatacaa

SEQ ID NO: 345945 - DNA, 19 bp, Homo sapiens
  siRNA target sequence for KIAA0971 (NM_014929.1,1765-1783).
gccatcgtcacatacaaat

SEQ ID NO: 345946 - DNA, 19 bp, Homo sapiens
  siRNA target sequence for KIAA0971 (NM_014929.1,1770-1788).
cgtcacatacaaatgcaaa

SEQ ID NO: 345947 - DNA, 19 bp, Homo sapiens
  siRNA target sequence for KIAA0971 (NM_014929.1,1820-1838).
ggtgaaggacacttctcaa

SEQ ID NO: 345948 - DNA, 19 bp, Homo sapiens
  siRNA target sequence for KIAA0971 (NM_014929.1,1846-1864).
gcacttgccacacaattat

SEQ ID NO: 345949 - DNA, 19 bp, Homo sapiens
  siRNA target sequence for KIAA0971 (NM_014929.1,1852-1870).
gccacacaattatcatatt

SEQ ID NO: 345950 - DNA, 19 bp, Homo sapiens
  siRNA target sequence for KIAA0971 (NM_014929.1,1946-1964).
gatattcaaaggttgctta

SEQ ID NO: 345951 - DNA, 19 bp, Homo sapiens
  siRNA target sequence for KIAA1115 (NM_014931.1,798-816).
ccagctcgtgtcctttctt

SEQ ID NO: 345952 - DNA, 19 bp, Homo sapiens
  siRNA target sequence for KIAA1115 (NM_014931.1,989-1007).
cgtcgaaggatgagaatca

SEQ ID NO: 345953 - DNA, 19 bp, Homo sapiens
  siRNA target sequence for KIAA1115 (NM_014931.1,990-1008).
gtcgaaggatgagaatcaa

SEQ ID NO: 345954 - DNA, 19 bp, Homo sapiens
  siRNA target sequence for KIAA1115 (NM_014931.1,1135-1153).
cagctcttaagcaacatgt

SEQ ID NO: 345955 - DNA, 19 bp, Homo sapiens
  siRNA target sequence for KIAA1115 (NM_014931.1,1399-1417).
gagccgctacagatgacat

SEQ ID NO: 345956 - DNA, 19 bp, Homo sapiens
  siRNA target sequence for KIAA1115 (NM_014931.1,1541-1559).
ccatgctggacctcttctt

SEQ ID NO: 345957 - DNA, 19 bp, Homo sapiens
  siRNA target sequence for KIAA1115 (NM_014931.1,1561-1579).
cattatgtcttcaacaact

SEQ ID NO: 345958 - DNA, 19 bp, Homo sapiens
  siRNA target sequence for KIAA1115 (NM_014931.1,1648-1666).
cctgagacgcccatccaaa

SEQ ID NO: 345959 - DNA, 19 bp, Homo sapiens
  siRNA target sequence for KIAA1115 (NM_014931.1,1649-1667).
ctgagacgcccatccaaaa

SEQ ID NO: 345960 - DNA, 19 bp, Homo sapiens
  siRNA target sequence for KIAA1115 (NM_014931.1,1662-1680).
ccaaaaccctgttgtgaaa

SEQ ID NO: 345961 - DNA, 19 bp, Homo sapiens
  siRNA target sequence for KIAA1115 (NM_014931.1,1888-1906).
cagtgggaagccttcgtat

SEQ ID NO: 345962 - DNA, 19 bp, Homo sapiens
  siRNA target sequence for KIAA1115 (NM_014931.1,1996-2014).
cggctcaaggagttcaact

SEQ ID NO: 345963 - DNA, 19 bp, Homo sapiens
  siRNA target sequence for KIAA1115 (NM_014931.1,2088-2106).
ccacttcggcttcaatgat

SEQ ID NO: 345964 - DNA, 19 bp, Homo sapiens
  siRNA target sequence for KIAA1115 (NM_014931.1,2130-2148).
gagtgtgaacgcacctttt

SEQ ID NO: 345965 - DNA, 19 bp, Homo sapiens
  siRNA target sequence for KIAA1115 (NM_014931.1,2132-2150).
gtgtgaacgcaccttttga

SEQ ID NO: 345966 - DNA, 19 bp, Homo sapiens
  siRNA target sequence for KIAA1115 (NM_014931.1,2134-2152).
gtgaacgcaccttttgaca

SEQ ID NO: 345967 - DNA, 19 bp, Homo sapiens
  siRNA target sequence for KIAA1115 (NM_014931.1,2198-2216).
ccaacgccaacctacttga

SEQ ID NO: 345968 - DNA, 19 bp, Homo sapiens
  siRNA target sequence for KIAA1115 (NM_014931.1,2202-2220).
cgccaacctacttgagata

SEQ ID NO: 345969 - DNA, 19 bp, Homo sapiens
  siRNA target sequence for KIAA1115 (NM_014931.1,2203-2221).
gccaacctacttgagatat

SEQ ID NO: 345970 - DNA, 19 bp, Homo sapiens
  siRNA target sequence for KIAA1115 (NM_014931.1,2767-2785).
ccttgccaggccttggtta

SEQ ID NO: 345971 - DNA, 19 bp, Homo sapiens
  siRNA target sequence for NLGN1 (NM_014932.2,437-455).
gatgcacgtggccaaatta

SEQ ID NO: 345972 - DNA, 19 bp, Homo sapiens
  siRNA target sequence for NLGN1 (NM_014932.2,440-458).
gcacgtggccaaattatgt

SEQ ID NO: 345973 - DNA, 19 bp, Homo sapiens
  siRNA target sequence for NLGN1 (NM_014932.2,441-459).
cacgtggccaaattatgtt

SEQ ID NO: 345974 - DNA, 19 bp, Homo sapiens
  siRNA target sequence for NLGN1 (NM_014932.2,505-523).
ccattgactctctgtatgt

SEQ ID NO: 345975 - DNA, 19 bp, Homo sapiens
  siRNA target sequence for NLGN1 (NM_014932.2,546-564).
ccatgtgctatcacaaaaa

SEQ ID NO: 345976 - DNA, 19 bp, Homo sapiens
  siRNA target sequence for NLGN1 (NM_014932.2,552-570).
gctatcacaaaaattggat

SEQ ID NO: 345977 - DNA, 19 bp, Homo sapiens
  siRNA target sequence for NLGN1 (NM_014932.2,586-604).
gtggctaccaactttggaa

SEQ ID NO: 345978 - DNA, 19 bp, Homo sapiens
  siRNA target sequence for NLGN1 (NM_014932.2,744-762).
cagaaatgccactcaattt

SEQ ID NO: 345979 - DNA, 19 bp, Homo sapiens
  siRNA target sequence for NLGN1 (NM_014932.2,769-787).
gtgtgtccccagaatatca

SEQ ID NO: 345980 - DNA, 19 bp, Homo sapiens
  siRNA target sequence for NLGN1 (NM_014932.2,771-789).
gtgtccccagaatatcatt

SEQ ID NO: 345981 - DNA, 19 bp, Homo sapiens
  siRNA target sequence for NLGN1 (NM_014932.2,814-832).
cttcctgtgtggtttacta

SEQ ID NO: 345982 - DNA, 19 bp, Homo sapiens
  siRNA target sequence for NLGN1 (NM_014932.2,817-835).
cctgtgtggtttactaata

SEQ ID NO: 345983 - DNA, 19 bp, Homo sapiens
  siRNA target sequence for NLGN1 (NM_014932.2,818-836).
ctgtgtggtttactaataa

SEQ ID NO: 345984 - DNA, 19 bp, Homo sapiens
  siRNA target sequence for NLGN1 (NM_014932.2,872-890).
gcgaagactgcctatattt

SEQ ID NO: 345985 - DNA, 19 bp, Homo sapiens
  siRNA target sequence for NLGN1 (NM_014932.2,873-891).
cgaagactgcctatattta

SEQ ID NO: 345986 - DNA, 19 bp, Homo sapiens
  siRNA target sequence for NLGN1 (NM_014932.2,877-895).
gactgcctatatttaaata

SEQ ID NO: 345987 - DNA, 19 bp, Homo sapiens
  siRNA target sequence for NLGN1 (NM_014932.2,901-919).
gtcccgactgaggatgata

SEQ ID NO: 345988 - DNA, 19 bp, Homo sapiens
  siRNA target sequence for NLGN1 (NM_014932.2,903-921).
cccgactgaggatgatatt

SEQ ID NO: 345989 - DNA, 19 bp, Homo sapiens
  siRNA target sequence for NLGN1 (NM_014932.2,983-1001).
gtactggaaatttatatga

SEQ ID NO: 345990 - DNA, 19 bp, Homo sapiens
  siRNA target sequence for NLGN1 (NM_014932.2,1004-1022).
gaagtgtcttggcaagtta

SEQ ID NO: 345991 - DNA, 19 bp, Homo sapiens
  siRNA target sequence for NLGN1 (NM_014932.2,1063-1081).
gtactcggtttcttgagta

SEQ ID NO: 345992 - DNA, 19 bp, Homo sapiens
  siRNA target sequence for NLGN1 (NM_014932.2,1112-1130).
gactccttgatctcataca

SEQ ID NO: 345993 - DNA, 19 bp, Homo sapiens
  siRNA target sequence for NLGN1 (NM_014932.2,1139-1157).
gatggactagtgaaaacat

SEQ ID NO: 345994 - DNA, 19 bp, Homo sapiens
  siRNA target sequence for NLGN1 (NM_014932.2,1169-1187).
gtggtgaccccttaagaat

SEQ ID NO: 345995 - DNA, 19 bp, Homo sapiens
  siRNA target sequence for NLGN1 (NM_014932.2,1171-1189).
ggtgaccccttaagaatca

SEQ ID NO: 345996 - DNA, 19 bp, Homo sapiens
  siRNA target sequence for NLGN1 (NM_014932.2,1177-1195).
cccttaagaatcactgttt

SEQ ID NO: 345997 - DNA, 19 bp, Homo sapiens
  siRNA target sequence for NLGN1 (NM_014932.2,1230-1248).
gctgactttatcccattat

SEQ ID NO: 345998 - DNA, 19 bp, Homo sapiens
  siRNA target sequence for NLGN1 (NM_014932.2,1231-1249).
ctgactttatcccattatt

SEQ ID NO: 345999 - DNA, 19 bp, Homo sapiens
  siRNA target sequence for NLGN1 (NM_014932.2,1328-1346).
gctgggctgttagttttca

SEQ ID NO: 346000 - DNA, 19 bp, Homo sapiens
  siRNA target sequence for NLGN1 (NM_014932.2,1329-1347).
ctgggctgttagttttcaa

SEQ ID NO: 346001 - DNA, 19 bp, Homo sapiens
  siRNA target sequence for NLGN1 (NM_014932.2,1349-1367).
ctgcaaaatatgctagaat

SEQ ID NO: 346002 - DNA, 19 bp, Homo sapiens
  siRNA target sequence for NLGN1 (NM_014932.2,1384-1402).
ggttgcaatgtttcagata

SEQ ID NO: 346003 - DNA, 19 bp, Homo sapiens
  siRNA target sequence for NLGN1 (NM_014932.2,1389-1407).
caatgtttcagatacagta

SEQ ID NO: 346004 - DNA, 19 bp, Homo sapiens
  siRNA target sequence for NLGN1 (NM_014932.2,1397-1415).
cagatacagtagagttagt

SEQ ID NO: 346005 - DNA, 19 bp, Homo sapiens
  siRNA target sequence for NLGN1 (NM_014932.2,1431-1449).
gaagccttacaaagaactt

SEQ ID NO: 346006 - DNA, 19 bp, Homo sapiens
  siRNA target sequence for NLGN1 (NM_014932.2,1554-1572).
gtttctcaactatgatata

SEQ ID NO: 346007 - DNA, 19 bp, Homo sapiens
  siRNA target sequence for NLGN1 (NM_014932.2,1558-1576).
ctcaactatgatataatgt

SEQ ID NO: 346008 - DNA, 19 bp, Homo sapiens
  siRNA target sequence for NLGN1 (NM_014932.2,1592-1610).
gggaagggttaaaatttgt

SEQ ID NO: 346009 - DNA, 19 bp, Homo sapiens
  siRNA target sequence for NLGN1 (NM_014932.2,1624-1642).
gatagcgatgatggtatat

SEQ ID NO: 346010 - DNA, 19 bp, Homo sapiens
  siRNA target sequence for NLGN1 (NM_014932.2,1643-1661).
cagctagtgattttgactt

SEQ ID NO: 346011 - DNA, 19 bp, Homo sapiens
  siRNA target sequence for NLGN1 (NM_014932.2,1838-1856).
cagcggatcttcactcaaa

SEQ ID NO: 346012 - DNA, 19 bp, Homo sapiens
  siRNA target sequence for NLGN1 (NM_014932.2,1840-1858).
gcggatcttcactcaaact

SEQ ID NO: 346013 - DNA, 19 bp, Homo sapiens
  siRNA target sequence for NLGN1 (NM_014932.2,1841-1859).
cggatcttcactcaaactt

SEQ ID NO: 346014 - DNA, 19 bp, Homo sapiens
  siRNA target sequence for NLGN1 (NM_014932.2,1842-1860).
ggatcttcactcaaacttt

SEQ ID NO: 346015 - DNA, 19 bp, Homo sapiens
  siRNA target sequence for NLGN1 (NM_014932.2,1861-1879).
ggttcacctacgtacttct

SEQ ID NO: 346016 - DNA, 19 bp, Homo sapiens
  siRNA target sequence for NLGN1 (NM_014932.2,1862-1880).
gttcacctacgtacttcta

SEQ ID NO: 346017 - DNA, 19 bp, Homo sapiens
  siRNA target sequence for NLGN1 (NM_014932.2,1974-1992).
gattggccctacagagtta

SEQ ID NO: 346018 - DNA, 19 bp, Homo sapiens
  siRNA target sequence for NLGN1 (NM_014932.2,2022-2040).
gatgctgagtgcagttgta

SEQ ID NO: 346019 - DNA, 19 bp, Homo sapiens
  siRNA target sequence for NLGN1 (NM_014932.2,2026-2044).
ctgagtgcagttgtaatga

SEQ ID NO: 346020 - DNA, 19 bp, Homo sapiens
  siRNA target sequence for NLGN1 (NM_014932.2,2049-2067).
ctggacaaattttgctaaa

SEQ ID NO: 346021 - DNA, 19 bp, Homo sapiens
  siRNA target sequence for NLGN1 (NM_014932.2,2052-2070).
gacaaattttgctaaaact

SEQ ID NO: 346022 - DNA, 19 bp, Homo sapiens
  siRNA target sequence for NLGN1 (NM_014932.2,2089-2107).
gtccctcaagacacgaaat

SEQ ID NO: 346023 - DNA, 19 bp, Homo sapiens
  siRNA target sequence for NLGN1 (NM_014932.2,2092-2110).
cctcaagacacgaaattca

SEQ ID NO: 346024 - DNA, 19 bp, Homo sapiens
  siRNA target sequence for NLGN1 (NM_014932.2,2093-2111).
ctcaagacacgaaattcat

SEQ ID NO: 346025 - DNA, 19 bp, Homo sapiens
  siRNA target sequence for NLGN1 (NM_014932.2,2102-2120).
cgaaattcattcataccaa

SEQ ID NO: 346026 - DNA, 19 bp, Homo sapiens
  siRNA target sequence for NLGN1 (NM_014932.2,2181-2199).
ccatattggattaaaacca

SEQ ID NO: 346027 - DNA, 19 bp, Homo sapiens
  siRNA target sequence for NLGN1 (NM_014932.2,2250-2268).
ggtacctcatctgcataat

SEQ ID NO: 346028 - DNA, 19 bp, Homo sapiens
  siRNA target sequence for NLGN1 (NM_014932.2,2255-2273).
ctcatctgcataatctcaa

SEQ ID NO: 346029 - DNA, 19 bp, Homo sapiens
  siRNA target sequence for NLGN1 (NM_014932.2,2284-2302).
cagtatacctctacaacaa

SEQ ID NO: 346030 - DNA, 19 bp, Homo sapiens
  siRNA target sequence for NLGN1 (NM_014932.2,2286-2304).
gtatacctctacaacaact

SEQ ID NO: 346031 - DNA, 19 bp, Homo sapiens
  siRNA target sequence for NLGN1 (NM_014932.2,2291-2309).
cctctacaacaactaaagt

SEQ ID NO: 346032 - DNA, 19 bp, Homo sapiens
  siRNA target sequence for NLGN1 (NM_014932.2,2311-2329).
ccatcaactgacatcactt

SEQ ID NO: 346033 - DNA, 19 bp, Homo sapiens
  siRNA target sequence for NLGN1 (NM_014932.2,2388-2406).
ggatgatcccaaacaacaa

SEQ ID NO: 346034 - DNA, 19 bp, Homo sapiens
  siRNA target sequence for NLGN1 (NM_014932.2,2448-2466).
gctgagtgtcactattgca

SEQ ID NO: 346035 - DNA, 19 bp, Homo sapiens
  siRNA target sequence for NLGN1 (NM_014932.2,2568-2586).
gcgcactactaccaatgat

SEQ ID NO: 346036 - DNA, 19 bp, Homo sapiens
  siRNA target sequence for NLGN1 (NM_014932.2,2690-2708).
ccgcctgtcccccagatta

SEQ ID NO: 346037 - DNA, 19 bp, Homo sapiens
  siRNA target sequence for NLGN1 (NM_014932.2,2692-2710).
gcctgtcccccagattaca

SEQ ID NO: 346038 - DNA, 19 bp, Homo sapiens
  siRNA target sequence for NLGN1 (NM_014932.2,2702-2720).
cagattacacactagctat

SEQ ID NO: 346039 - DNA, 19 bp, Homo sapiens
  siRNA target sequence for NLGN1 (NM_014932.2,2723-2741).
ggaggtcacctgatgatgt

SEQ ID NO: 346040 - DNA, 19 bp, Homo sapiens
  siRNA target sequence for NLGN1 (NM_014932.2,2724-2742).
gaggtcacctgatgatgtt

SEQ ID NO: 346041 - DNA, 19 bp, Homo sapiens
  siRNA target sequence for NLGN1 (NM_014932.2,2734-2752).
gatgatgttcccttaatga

SEQ ID NO: 346042 - DNA, 19 bp, Homo sapiens
  siRNA target sequence for NLGN1 (NM_014932.2,2800-2818).
cccttacacacattcaata

SEQ ID NO: 346043 - DNA, 19 bp, Homo sapiens
  siRNA target sequence for NLGN1 (NM_014932.2,2802-2820).
cttacacacattcaataca

SEQ ID NO: 346044 - DNA, 19 bp, Homo sapiens
  siRNA target sequence for DZIP1 (NM_014934.2,845-863).
ggcagcggattggttttca

SEQ ID NO: 346045 - DNA, 19 bp, Homo sapiens
  siRNA target sequence for DZIP1 (NM_014934.2,1406-1424).
cgaggccaaagccaactat

SEQ ID NO: 346046 - DNA, 19 bp, Homo sapiens
  siRNA target sequence for DZIP1 (NM_014934.2,1407-1425).
gaggccaaagccaactatt

SEQ ID NO: 346047 - DNA, 19 bp, Homo sapiens
  siRNA target sequence for DZIP1 (NM_014934.2,1411-1429).
ccaaagccaactattacca

SEQ ID NO: 346048 - DNA, 19 bp, Homo sapiens
  siRNA target sequence for DZIP1 (NM_014934.2,1421-1439).
ctattaccagtgccatttt

SEQ ID NO: 346049 - DNA, 19 bp, Homo sapiens
  siRNA target sequence for DZIP1 (NM_014934.2,1491-1509).
cgccacactgaagaaaatt

SEQ ID NO: 346050 - DNA, 19 bp, Homo sapiens
  siRNA target sequence for DZIP1 (NM_014934.2,1552-1570).
ggagtgagatcgtcgtatt

SEQ ID NO: 346051 - DNA, 19 bp, Homo sapiens
  siRNA target sequence for DZIP1 (NM_014934.2,1555-1573).
gtgagatcgtcgtattgaa

SEQ ID NO: 346052 - DNA, 19 bp, Homo sapiens
  siRNA target sequence for DZIP1 (NM_014934.2,1631-1649).
cagattctccaaggaatat

SEQ ID NO: 346053 - DNA, 19 bp, Homo sapiens
  siRNA target sequence for DZIP1 (NM_014934.2,1715-1733).
ggagaaactagttgatgaa

SEQ ID NO: 346054 - DNA, 19 bp, Homo sapiens
  siRNA target sequence for DZIP1 (NM_014934.2,1773-1791).
gaattaacttcgaagaatt

SEQ ID NO: 346055 - DNA, 19 bp, Homo sapiens
  siRNA target sequence for DZIP1 (NM_014934.2,1792-1810).
cagcattagaatatcaact

SEQ ID NO: 346056 - DNA, 19 bp, Homo sapiens
  siRNA target sequence for DZIP1 (NM_014934.2,1835-1853).
gcagatcaagtccaacata

SEQ ID NO: 346057 - DNA, 19 bp, Homo sapiens
  siRNA target sequence for DZIP1 (NM_014934.2,1844-1862).
gtccaacataggcacatta

SEQ ID NO: 346058 - DNA, 19 bp, Homo sapiens
  siRNA target sequence for DZIP1 (NM_014934.2,1903-1921).
cccaggatttccataatgt

SEQ ID NO: 346059 - DNA, 19 bp, Homo sapiens
  siRNA target sequence for DZIP1 (NM_014934.2,1905-1923).
caggatttccataatgtca

SEQ ID NO: 346060 - DNA, 19 bp, Homo sapiens
  siRNA target sequence for DZIP1 (NM_014934.2,1920-1938).
gtcatgcagcttcttgata

SEQ ID NO: 346061 - DNA, 19 bp, Homo sapiens
  siRNA target sequence for DZIP1 (NM_014934.2,1963-1981).
gagttcaagctattcatca

SEQ ID NO: 346062 - DNA, 19 bp, Homo sapiens
  siRNA target sequence for DZIP1 (NM_014934.2,2002-2020).
gtcggctcctgtcacatat

SEQ ID NO: 346063 - DNA, 19 bp, Homo sapiens
  siRNA target sequence for DZIP1 (NM_014934.2,2005-2023).
ggctcctgtcacatataga

SEQ ID NO: 346064 - DNA, 19 bp, Homo sapiens
  siRNA target sequence for DZIP1 (NM_014934.2,2007-2025).
ctcctgtcacatatagaga

SEQ ID NO: 346065 - DNA, 19 bp, Homo sapiens
  siRNA target sequence for DZIP1 (NM_014934.2,2032-2050).
gaacctcaatgatagatga

SEQ ID NO: 346066 - DNA, 19 bp, Homo sapiens
  siRNA target sequence for DZIP1 (NM_014934.2,2035-2053).
cctcaatgatagatgatct

SEQ ID NO: 346067 - DNA, 19 bp, Homo sapiens
  siRNA target sequence for DZIP1 (NM_014934.2,2117-2135).
gaatgagctgattataact

SEQ ID NO: 346068 - DNA, 19 bp, Homo sapiens
  siRNA target sequence for DZIP1 (NM_014934.2,2156-2174).
ctttacctgtaatccatta

SEQ ID NO: 346069 - DNA, 19 bp, Homo sapiens
  siRNA target sequence for DZIP1 (NM_014934.2,2162-2180).
ctgtaatccattaaacagt

SEQ ID NO: 346070 - DNA, 19 bp, Homo sapiens
  siRNA target sequence for DZIP1 (NM_014934.2,2211-2229).
ctgcacactttggaaacta

SEQ ID NO: 346071 - DNA, 19 bp, Homo sapiens
  siRNA target sequence for DZIP1 (NM_014934.2,2260-2278).
cattctcgtcgcacatact

SEQ ID NO: 346072 - DNA, 19 bp, Homo sapiens
  siRNA target sequence for DZIP1 (NM_014934.2,2269-2287).
cgcacatactggaaccaat

SEQ ID NO: 346073 - DNA, 19 bp, Homo sapiens
  siRNA target sequence for DZIP1 (NM_014934.2,2270-2288).
gcacatactggaaccaata

SEQ ID NO: 346074 - DNA, 19 bp, Homo sapiens
  siRNA target sequence for DZIP1 (NM_014934.2,2384-2402).
cctcactaagggactaaga

SEQ ID NO: 346075 - DNA, 19 bp, Homo sapiens
  siRNA target sequence for DZIP1 (NM_014934.2,2385-2403).
ctcactaagggactaagaa

SEQ ID NO: 346076 - DNA, 19 bp, Homo sapiens
  siRNA target sequence for DZIP1 (NM_014934.2,2389-2407).
ctaagggactaagaacaat

SEQ ID NO: 346077 - DNA, 19 bp, Homo sapiens
  siRNA target sequence for DZIP1 (NM_014934.2,2435-2453).
ggaaaccttggggattaat

SEQ ID NO: 346078 - DNA, 19 bp, Homo sapiens
  siRNA target sequence for DZIP1 (NM_014934.2,2444-2462).
ggggattaatgcagatata

SEQ ID NO: 346079 - DNA, 19 bp, Homo sapiens
  siRNA target sequence for DZIP1 (NM_014934.2,2447-2465).
gattaatgcagatatacgt

SEQ ID NO: 346080 - DNA, 19 bp, Homo sapiens
  siRNA target sequence for DZIP1 (NM_014934.2,2467-2485).
gcatttcaagtgatcagtt

SEQ ID NO: 346081 - DNA, 19 bp, Homo sapiens
  siRNA target sequence for DZIP1 (NM_014934.2,2476-2494).
gtgatcagttgcatagagt

SEQ ID NO: 346082 - DNA, 19 bp, Homo sapiens
  siRNA target sequence for DZIP1 (NM_014934.2,2526-2544).
caagaaagagaaataccta

SEQ ID NO: 346083 - DNA, 19 bp, Homo sapiens
  siRNA target sequence for DZIP1 (NM_014934.2,2658-2676).
ggagaagtacccaaaatga

SEQ ID NO: 346084 - DNA, 19 bp, Homo sapiens
  siRNA target sequence for DZIP1 (NM_014934.2,2772-2790).
gatccttttcccagaaagt

SEQ ID NO: 346085 - DNA, 19 bp, Homo sapiens
  siRNA target sequence for DZIP1 (NM_014934.2,2781-2799).
cccagaaagtcttcaacta

SEQ ID NO: 346086 - DNA, 19 bp, Homo sapiens
  siRNA target sequence for DZIP1 (NM_014934.2,2782-2800).
ccagaaagtcttcaactat

SEQ ID NO: 346087 - DNA, 19 bp, Homo sapiens
  siRNA target sequence for DZIP1 (NM_014934.2,2990-3008).
cgcaggagtcgccgttaaa

SEQ ID NO: 346088 - DNA, 19 bp, Homo sapiens
  siRNA target sequence for DZIP1 (NM_014934.2,2991-3009).
gcaggagtcgccgttaaaa

SEQ ID NO: 346089 - DNA, 19 bp, Homo sapiens
  siRNA target sequence for DZIP1 (NM_014934.2,3003-3021).
gttaaaacacctactgaaa

SEQ ID NO: 346090 - DNA, 19 bp, Homo sapiens
  siRNA target sequence for DZIP1 (NM_014934.2,3064-3082).
cagtcggtggaactaatgt

SEQ ID NO: 346091 - DNA, 19 bp, Homo sapiens
  siRNA target sequence for DZIP1 (NM_014934.2,3076-3094).
ctaatgtccctgagatgtt

SEQ ID NO: 346092 - DNA, 19 bp, Homo sapiens
  siRNA target sequence for PEPP3 (NM_014935.2,679-697).
gccggaaacacacgtttaa

SEQ ID NO: 346093 - DNA, 19 bp, Homo sapiens
  siRNA target sequence for PEPP3 (NM_014935.2,711-729).
ggggtccgcacctacttct

SEQ ID NO: 346094 - DNA, 19 bp, Homo sapiens
  siRNA target sequence for PEPP3 (NM_014935.2,712-730).
gggtccgcacctacttctt

SEQ ID NO: 346095 - DNA, 19 bp, Homo sapiens
  siRNA target sequence for PEPP3 (NM_014935.2,1221-1239).
cgcaccaaccctgacaaaa

SEQ ID NO: 346096 - DNA, 19 bp, Homo sapiens
  siRNA target sequence for PEPP3 (NM_014935.2,1222-1240).
gcaccaaccctgacaaaat

SEQ ID NO: 346097 - DNA, 19 bp, Homo sapiens
  siRNA target sequence for PEPP3 (NM_014935.2,1223-1241).
caccaaccctgacaaaatt

SEQ ID NO: 346098 - DNA, 19 bp, Homo sapiens
  siRNA target sequence for PEPP3 (NM_014935.2,1352-1370).
cagggtccctgagtactat

SEQ ID NO: 346099 - DNA, 19 bp, Homo sapiens
  siRNA target sequence for PEPP3 (NM_014935.2,1385-1403).
ccagtaccccgatgattat

SEQ ID NO: 346100 - DNA, 19 bp, Homo sapiens
  siRNA target sequence for PEPP3 (NM_014935.2,1393-1411).
ccgatgattatcagtacta

SEQ ID NO: 346101 - DNA, 19 bp, Homo sapiens
  siRNA target sequence for PEPP3 (NM_014935.2,1600-1618).
cccggcagccagtctatta

SEQ ID NO: 346102 - DNA, 19 bp, Homo sapiens
  siRNA target sequence for PEPP3 (NM_014935.2,1601-1619).
ccggcagccagtctattat

SEQ ID NO: 346103 - DNA, 19 bp, Homo sapiens
  siRNA target sequence for PEPP3 (NM_014935.2,1603-1621).
ggcagccagtctattatga

SEQ ID NO: 346104 - DNA, 19 bp, Homo sapiens
  siRNA target sequence for PEPP3 (NM_014935.2,1604-1622).
gcagccagtctattatgat

SEQ ID NO: 346105 - DNA, 19 bp, Homo sapiens
  siRNA target sequence for PEPP3 (NM_014935.2,1744-1762).
cacccagtgcccgttttga

SEQ ID NO: 346106 - DNA, 19 bp, Homo sapiens
  siRNA target sequence for PEPP3 (NM_014935.2,1774-1792).
ctcgcagtgaggacatcta

SEQ ID NO: 346107 - DNA, 19 bp, Homo sapiens
  siRNA target sequence for PEPP3 (NM_014935.2,2069-2087).
gctgcgacacaaaaaggat

SEQ ID NO: 346108 - DNA, 19 bp, Homo sapiens
  siRNA target sequence for PEPP3 (NM_014935.2,2070-2088).
ctgcgacacaaaaaggatt

SEQ ID NO: 346109 - DNA, 19 bp, Homo sapiens
  siRNA target sequence for PEPP3 (NM_014935.2,2149-2167).
caaacagcaccatagagta

SEQ ID NO: 346110 - DNA, 19 bp, Homo sapiens
  siRNA target sequence for PEPP3 (NM_014935.2,2212-2230).
gggagcagctcaatttgga

SEQ ID NO: 346111 - DNA, 19 bp, Homo sapiens
  siRNA target sequence for PEPP3 (NM_014935.2,2246-2264).
gctgaaccggcaaatccaa

SEQ ID NO: 346112 - DNA, 19 bp, Homo sapiens
  siRNA target sequence for PEPP3 (NM_014935.2,2603-2621).
ggcagctctcaacaaagtt

SEQ ID NO: 346113 - DNA, 19 bp, Homo sapiens
  siRNA target sequence for PEPP3 (NM_014935.2,2628-2646).
gtgccccctcggacaaaat

SEQ ID NO: 346114 - DNA, 19 bp, Homo sapiens
  siRNA target sequence for PEPP3 (NM_014935.2,2776-2794).
gcgtggaggagcagattga

SEQ ID NO: 346115 - DNA, 19 bp, Homo sapiens
  siRNA target sequence for PEPP3 (NM_014935.2,2917-2935).
gcatccatgaggtagacat

SEQ ID NO: 346116 - DNA, 19 bp, Homo sapiens
  siRNA target sequence for PEPP3 (NM_014935.2,3029-3047).
gctagagccccagcattat

SEQ ID NO: 346117 - DNA, 19 bp, Homo sapiens
  siRNA target sequence for PEPP3 (NM_014935.2,3173-3191).
gaggatcaagacactcatt

SEQ ID NO: 346118 - DNA, 19 bp, Homo sapiens
  siRNA target sequence for INPP5F (NM_014937.2,253-271).
gctccgacccgctactgat

SEQ ID NO: 346119 - DNA, 19 bp, Homo sapiens
  siRNA target sequence for INPP5F (NM_014937.2,256-274).
ccgacccgctactgatcta

SEQ ID NO: 346120 - DNA, 19 bp, Homo sapiens
  siRNA target sequence for INPP5F (NM_014937.2,258-276).
gacccgctactgatctact

SEQ ID NO: 346121 - DNA, 19 bp, Homo sapiens
  siRNA target sequence for INPP5F (NM_014937.2,261-279).
ccgctactgatctacttct

SEQ ID NO: 346122 - DNA, 19 bp, Homo sapiens
  siRNA target sequence for INPP5F (NM_014937.2,262-280).
cgctactgatctacttctt

SEQ ID NO: 346123 - DNA, 19 bp, Homo sapiens
  siRNA target sequence for INPP5F (NM_014937.2,351-369).
catggtggcttattctaat

SEQ ID NO: 346124 - DNA, 19 bp, Homo sapiens
  siRNA target sequence for INPP5F (NM_014937.2,402-420).
gagaccatgaggtctgtaa

SEQ ID NO: 346125 - DNA, 19 bp, Homo sapiens
  siRNA target sequence for INPP5F (NM_014937.2,406-424).
ccatgaggtctgtaaagtt

SEQ ID NO: 346126 - DNA, 19 bp, Homo sapiens
  siRNA target sequence for INPP5F (NM_014937.2,437-455).
gtgctctcactttctgaaa

SEQ ID NO: 346127 - DNA, 19 bp, Homo sapiens
  siRNA target sequence for INPP5F (NM_014937.2,442-460).
ctcactttctgaaatggaa

SEQ ID NO: 346128 - DNA, 19 bp, Homo sapiens
  siRNA target sequence for INPP5F (NM_014937.2,482-500).
ctctgtaagaagcatcatt

SEQ ID NO: 346129 - DNA, 19 bp, Homo sapiens
  siRNA target sequence for INPP5F (NM_014937.2,494-512).
catcattttggtattaaca

SEQ ID NO: 346130 - DNA, 19 bp, Homo sapiens
  siRNA target sequence for INPP5F (NM_014937.2,515-533).
ccagagaagatcataccat

SEQ ID NO: 346131 - DNA, 19 bp, Homo sapiens
  siRNA target sequence for INPP5F (NM_014937.2,534-552).
ctcctgatgactcaaagtt

SEQ ID NO: 346132 - DNA, 19 bp, Homo sapiens
  siRNA target sequence for INPP5F (NM_014937.2,537-555).
ctgatgactcaaagtttct

SEQ ID NO: 346133 - DNA, 19 bp, Homo sapiens
  siRNA target sequence for INPP5F (NM_014937.2,562-580).
gacctttacgcatattaaa

SEQ ID NO: 346134 - DNA, 19 bp, Homo sapiens
  siRNA target sequence for INPP5F (NM_014937.2,583-601).
caatgtgtctgctcctaat

SEQ ID NO: 346135 - DNA, 19 bp, Homo sapiens
  siRNA target sequence for INPP5F (NM_014937.2,607-625).
gaaagttaaggaaagtaaa

SEQ ID NO: 346136 - DNA, 19 bp, Homo sapiens
  siRNA target sequence for INPP5F (NM_014937.2,680-698).
gactcagaatccttttatt

SEQ ID NO: 346137 - DNA, 19 bp, Homo sapiens
  siRNA target sequence for INPP5F (NM_014937.2,778-796).
ggttgatgaccgatttttt

SEQ ID NO: 346138 - DNA, 19 bp, Homo sapiens
  siRNA target sequence for INPP5F (NM_014937.2,779-797).
gttgatgaccgattttttt

SEQ ID NO: 346139 - DNA, 19 bp, Homo sapiens
  siRNA target sequence for INPP5F (NM_014937.2,862-880).
ccccatgatccaaggtttt

SEQ ID NO: 346140 - DNA, 19 bp, Homo sapiens
  siRNA target sequence for INPP5F (NM_014937.2,864-882).
ccatgatccaaggttttgt

SEQ ID NO: 346141 - DNA, 19 bp, Homo sapiens
  siRNA target sequence for INPP5F (NM_014937.2,963-981).
ccacctgtgtagatgatat

SEQ ID NO: 346142 - DNA, 19 bp, Homo sapiens
  siRNA target sequence for INPP5F (NM_014937.2,1029-1047).
gagcaggaatgcgctataa

SEQ ID NO: 346143 - DNA, 19 bp, Homo sapiens
  siRNA target sequence for INPP5F (NM_014937.2,1034-1052).
ggaatgcgctataaacgaa

SEQ ID NO: 346144 - DNA, 19 bp, Homo sapiens
  siRNA target sequence for INPP5F (NM_014937.2,1093-1111).
gactgagcagttgattcat

SEQ ID NO: 346145 - DNA, 19 bp, Homo sapiens
  siRNA target sequence for INPP5F (NM_014937.2,1095-1113).
ctgagcagttgattcatgt

SEQ ID NO: 346146 - DNA, 19 bp, Homo sapiens
  siRNA target sequence for INPP5F (NM_014937.2,1099-1117).
gcagttgattcatgttcat

SEQ ID NO: 346147 - DNA, 19 bp, Homo sapiens
  siRNA target sequence for INPP5F (NM_014937.2,1172-1190).
caggttgggtatcgatata

SEQ ID NO: 346148 - DNA, 19 bp, Homo sapiens
  siRNA target sequence for INPP5F (NM_014937.2,1245-1263).
cccatttcgaagaacaact

SEQ ID NO: 346149 - DNA, 19 bp, Homo sapiens
  siRNA target sequence for INPP5F (NM_014937.2,1340-1358).
ctgaagcaagtgttgcttt

SEQ ID NO: 346150 - DNA, 19 bp, Homo sapiens
  siRNA target sequence for INPP5F (NM_014937.2,1349-1367).
gtgttgcttttcaacaact

SEQ ID NO: 346151 - DNA, 19 bp, Homo sapiens
  siRNA target sequence for INPP5F (NM_014937.2,1366-1384).
ctcacacctcacttacgtt

SEQ ID NO: 346152 - DNA, 19 bp, Homo sapiens
  siRNA target sequence for INPP5F (NM_014937.2,1372-1390).
cctcacttacgtttcgttt

SEQ ID NO: 346153 - DNA, 19 bp, Homo sapiens
  siRNA target sequence for INPP5F (NM_014937.2,1409-1427).
cgaggaatgaagtttgaga

SEQ ID NO: 346154 - DNA, 19 bp, Homo sapiens
  siRNA target sequence for INPP5F (NM_014937.2,1513-1531).
gcaggaagggatttttcgt

SEQ ID NO: 346155 - DNA, 19 bp, Homo sapiens
  siRNA target sequence for INPP5F (NM_014937.2,1522-1540).
gatttttcgtgttaattgt

SEQ ID NO: 346156 - DNA, 19 bp, Homo sapiens
  siRNA target sequence for INPP5F (NM_014937.2,1603-1621).
gcagctgaaaaaattaggt

SEQ ID NO: 346157 - DNA, 19 bp, Homo sapiens
  siRNA target sequence for INPP5F (NM_014937.2,1672-1690).
gataatgtgggccaataat

SEQ ID NO: 346158 - DNA, 19 bp, Homo sapiens
  siRNA target sequence for INPP5F (NM_014937.2,1730-1748).
ctgaagggtgactttacaa

SEQ ID NO: 346159 - DNA, 19 bp, Homo sapiens
  siRNA target sequence for INPP5F (NM_014937.2,1765-1783).
gttagcaggagttatgaaa

SEQ ID NO: 346160 - DNA, 19 bp, Homo sapiens
  siRNA target sequence for INPP5F (NM_014937.2,1813-1831).
cctcaaccgatttaaggat

SEQ ID NO: 346161 - DNA, 19 bp, Homo sapiens
  siRNA target sequence for INPP5F (NM_014937.2,1819-1837).
ccgatttaaggatgcttat

SEQ ID NO: 346162 - DNA, 19 bp, Homo sapiens
  siRNA target sequence for INPP5F (NM_014937.2,1820-1838).
cgatttaaggatgcttata

SEQ ID NO: 346163 - DNA, 19 bp, Homo sapiens
  siRNA target sequence for INPP5F (NM_014937.2,1833-1851).
cttataggcaagctgttat

SEQ ID NO: 346164 - DNA, 19 bp, Homo sapiens
  siRNA target sequence for INPP5F (NM_014937.2,1871-1889).
ccagtgacagaagatcttt

SEQ ID NO: 346165 - DNA, 19 bp, Homo sapiens
  siRNA target sequence for INPP5F (NM_014937.2,1913-1931).
gaacatgaagctttgcata

SEQ ID NO: 346166 - DNA, 19 bp, Homo sapiens
  siRNA target sequence for INPP5F (NM_014937.2,1965-1983).
gccagctcttacaaagtta

SEQ ID NO: 346167 - DNA, 19 bp, Homo sapiens
  siRNA target sequence for INPP5F (NM_014937.2,1990-2008).
gttactactgcctgatgat

SEQ ID NO: 346168 - DNA, 19 bp, Homo sapiens
  siRNA target sequence for INPP5F (NM_014937.2,2116-2134).
cgtggcctattatgatgat

SEQ ID NO: 346169 - DNA, 19 bp, Homo sapiens
  siRNA target sequence for INPP5F (NM_014937.2,2152-2170).
ccagtatcaacgactaagt

SEQ ID NO: 346170 - DNA, 19 bp, Homo sapiens
  siRNA target sequence for INPP5F (NM_014937.2,2155-2173).
gtatcaacgactaagtcta

SEQ ID NO: 346171 - DNA, 19 bp, Homo sapiens
  siRNA target sequence for INPP5F (NM_014937.2,2159-2177).
caacgactaagtctagaaa

SEQ ID NO: 346172 - DNA, 19 bp, Homo sapiens
  siRNA target sequence for INPP5F (NM_014937.2,2169-2187).
gtctagaaaacctggaaaa

SEQ ID NO: 346173 - DNA, 19 bp, Homo sapiens
  siRNA target sequence for INPP5F (NM_014937.2,2204-2222).
gaacccactctttttggta

SEQ ID NO: 346174 - DNA, 19 bp, Homo sapiens
  siRNA target sequence for INPP5F (NM_014937.2,2379-2397).
gatcggatttacccataat

SEQ ID NO: 346175 - DNA, 19 bp, Homo sapiens
  siRNA target sequence for INPP5F (NM_014937.2,2424-2442).
gtaaacctcacgaagacat

SEQ ID NO: 346176 - DNA, 19 bp, Homo sapiens
  siRNA target sequence for INPP5F (NM_014937.2,2432-2450).
cacgaagacatcattggta

SEQ ID NO: 346177 - DNA, 19 bp, Homo sapiens
  siRNA target sequence for INPP5F (NM_014937.2,2538-2556).
ccaaatccaatgtaaatat

SEQ ID NO: 346178 - DNA, 19 bp, Homo sapiens
  siRNA target sequence for INPP5F (NM_014937.2,2567-2585).
cgaaagctaggaaacttta

SEQ ID NO: 346179 - DNA, 19 bp, Homo sapiens
  siRNA target sequence for INPP5F (NM_014937.2,2603-2621).
gttaactttctaaaaccaa

SEQ ID NO: 346180 - DNA, 19 bp, Homo sapiens
  siRNA target sequence for INPP5F (NM_014937.2,2636-2654).
ctttggaaatcagatagta

SEQ ID NO: 346181 - DNA, 19 bp, Homo sapiens
  siRNA target sequence for INPP5F (NM_014937.2,2648-2666).
gatagtagtcttgaaacta

SEQ ID NO: 346182 - DNA, 19 bp, Homo sapiens
  siRNA target sequence for INPP5F (NM_014937.2,2711-2729).
ggggacatgtcttcagata

SEQ ID NO: 346183 - DNA, 19 bp, Homo sapiens
  siRNA target sequence for INPP5F (NM_014937.2,2713-2731).
ggacatgtcttcagataat

SEQ ID NO: 346184 - DNA, 19 bp, Homo sapiens
  siRNA target sequence for INPP5F (NM_014937.2,2750-2768).
gaattccttacaaattcta

SEQ ID NO: 346185 - DNA, 19 bp, Homo sapiens
  siRNA target sequence for INPP5F (NM_014937.2,2784-2802).
ggcagctagctaactcatt

SEQ ID NO: 346186 - DNA, 19 bp, Homo sapiens
  siRNA target sequence for INPP5F (NM_014937.2,2785-2803).
gcagctagctaactcatta

SEQ ID NO: 346187 - DNA, 19 bp, Homo sapiens
  siRNA target sequence for INPP5F (NM_014937.2,2806-2824).
gagtgtagggccaatagat

SEQ ID NO: 346188 - DNA, 19 bp, Homo sapiens
  siRNA target sequence for INPP5F (NM_014937.2,2808-2826).
gtgtagggccaatagatta

SEQ ID NO: 346189 - DNA, 19 bp, Homo sapiens
  siRNA target sequence for INPP5F (NM_014937.2,2831-2849).
cttcctagttgtggtatta

SEQ ID NO: 346190 - DNA, 19 bp, Homo sapiens
  siRNA target sequence for INPP5F (NM_014937.2,2888-2906).
cttagcagcacagatagta

SEQ ID NO: 346191 - DNA, 19 bp, Homo sapiens
  siRNA target sequence for INPP5F (NM_014937.2,2912-2930).
catgctccttcagagatta

SEQ ID NO: 346192 - DNA, 19 bp, Homo sapiens
  siRNA target sequence for INPP5F (NM_014937.2,2991-3009).
ctgctggcgacgtacacat

SEQ ID NO: 346193 - DNA, 19 bp, Homo sapiens
  siRNA target sequence for INPP5F (NM_014937.2,2993-3011).
gctggcgacgtacacatat

SEQ ID NO: 346194 - DNA, 19 bp, Homo sapiens
  siRNA target sequence for INPP5F (NM_014937.2,2994-3012).
ctggcgacgtacacatatt

SEQ ID NO: 346195 - DNA, 19 bp, Homo sapiens
  siRNA target sequence for INPP5F (NM_014937.2,2996-3014).
ggcgacgtacacatattga

SEQ ID NO: 346196 - DNA, 19 bp, Homo sapiens
  siRNA target sequence for INPP5F (NM_014937.2,2998-3016).
cgacgtacacatattgact

SEQ ID NO: 346197 - DNA, 19 bp, Homo sapiens
  siRNA target sequence for INPP5F (NM_014937.2,3115-3133).
ggctagtcaggaaagaaat

SEQ ID NO: 346198 - DNA, 19 bp, Homo sapiens
  siRNA target sequence for INPP5F (NM_014937.2,3139-3157).
gaccaatcaagtttcaaat

SEQ ID NO: 346199 - DNA, 19 bp, Homo sapiens
  siRNA target sequence for INPP5F (NM_014937.2,3153-3171).
caaatgaaacccaatcaga

SEQ ID NO: 346200 - DNA, 19 bp, Homo sapiens
  siRNA target sequence for INPP5F (NM_014937.2,3195-3213).
ggccatcgcaattagatgt

SEQ ID NO: 346201 - DNA, 19 bp, Homo sapiens
  siRNA target sequence for INPP5F (NM_014937.2,3224-3242).
gcaacaggcccacagtttt

SEQ ID NO: 346202 - DNA, 19 bp, Homo sapiens
  siRNA target sequence for INPP5F (NM_014937.2,3225-3243).
caacaggcccacagttttt

SEQ ID NO: 346203 - DNA, 19 bp, Homo sapiens
  siRNA target sequence for INPP5F (NM_014937.2,3294-3312).
cttccagcatgcttgaact

SEQ ID NO: 346204 - DNA, 19 bp, Homo sapiens
  siRNA target sequence for INPP5F (NM_014937.2,3400-3418).
ggtccaggttgctagtatt

SEQ ID NO: 346205 - DNA, 19 bp, Homo sapiens
  siRNA target sequence for INPP5F (NM_014937.2,3401-3419).
gtccaggttgctagtatta

SEQ ID NO: 346206 - DNA, 19 bp, Homo sapiens
  siRNA target sequence for INPP5F (NM_014937.2,3486-3504).
ctgaaatcattaatcaagt

SEQ ID NO: 346207 - DNA, 19 bp, Homo sapiens
  siRNA target sequence for INPP5F (NM_014937.2,3503-3521).
gtccagcaaaatgaactta

SEQ ID NO: 346208 - DNA, 19 bp, Homo sapiens
  siRNA target sequence for INPP5F (NM_014937.2,3505-3523).
ccagcaaaatgaacttaaa

SEQ ID NO: 346209 - DNA, 19 bp, Homo sapiens
  siRNA target sequence for INPP5F (NM_014937.2,3544-3562).
gacacggataattcagatt

SEQ ID NO: 346210 - DNA, 19 bp, Homo sapiens
  siRNA target sequence for MONDOA (NM_014938.2,298-316).
gacacggtcaacaaacaga

SEQ ID NO: 346211 - DNA, 19 bp, Homo sapiens
  siRNA target sequence for MONDOA (NM_014938.2,385-403).
ctcttcgagtgcatgactt

SEQ ID NO: 346212 - DNA, 19 bp, Homo sapiens
  siRNA target sequence for MONDOA (NM_014938.2,472-490).
gacaagatccggctcaata

SEQ ID NO: 346213 - DNA, 19 bp, Homo sapiens
  siRNA target sequence for MONDOA (NM_014938.2,474-492).
caagatccggctcaataat

SEQ ID NO: 346214 - DNA, 19 bp, Homo sapiens
  siRNA target sequence for MONDOA (NM_014938.2,638-656).
gccgcatcgagattgtgat

SEQ ID NO: 346215 - DNA, 19 bp, Homo sapiens
  siRNA target sequence for MONDOA (NM_014938.2,652-670).
gtgatccgggagtatcaca

SEQ ID NO: 346216 - DNA, 19 bp, Homo sapiens
  siRNA target sequence for MONDOA (NM_014938.2,739-757).
gacgatgacatgctgtatt

SEQ ID NO: 346217 - DNA, 19 bp, Homo sapiens
  siRNA target sequence for MONDOA (NM_014938.2,933-951).
gatccagccgggactgatt

SEQ ID NO: 346218 - DNA, 19 bp, Homo sapiens
  siRNA target sequence for MONDOA (NM_014938.2,1010-1028).
cttctagccgctccatttt

SEQ ID NO: 346219 - DNA, 19 bp, Homo sapiens
  siRNA target sequence for MONDOA (NM_014938.2,1214-1232).
ctgaggacccgtttatcca

SEQ ID NO: 346220 - DNA, 19 bp, Homo sapiens
  siRNA target sequence for MONDOA (NM_014938.2,1338-1356).
ctcccccgtgttaccatta

SEQ ID NO: 346221 - DNA, 19 bp, Homo sapiens
  siRNA target sequence for MONDOA (NM_014938.2,1340-1358).
cccccgtgttaccattagt

SEQ ID NO: 346222 - DNA, 19 bp, Homo sapiens
  siRNA target sequence for MONDOA (NM_014938.2,1341-1359).
ccccgtgttaccattagtt

SEQ ID NO: 346223 - DNA, 19 bp, Homo sapiens
  siRNA target sequence for MONDOA (NM_014938.2,1419-1437).
gtttgctggagtcaacaaa

SEQ ID NO: 346224 - DNA, 19 bp, Homo sapiens
  siRNA target sequence for MONDOA (NM_014938.2,1594-1612).
ccccagccacggttaactt

SEQ ID NO: 346225 - DNA, 19 bp, Homo sapiens
  siRNA target sequence for MONDOA (NM_014938.2,1750-1768).
ccacaagcggtgatcatga

SEQ ID NO: 346226 - DNA, 19 bp, Homo sapiens
  siRNA target sequence for MONDOA (NM_014938.2,2093-2111).
ctcaatctccccagaacaa

SEQ ID NO: 346227 - DNA, 19 bp, Homo sapiens
  siRNA target sequence for MONDOA (NM_014938.2,2479-2497).
cggaccttgcagaattgga

SEQ ID NO: 346228 - DNA, 19 bp, Homo sapiens
  siRNA target sequence for MONDOA (NM_014938.2,2629-2647).
ctcaggccgatggtattga

SEQ ID NO: 346229 - DNA, 19 bp, Homo sapiens
  siRNA target sequence for ANKRD6 (NM_014942.1,269-287).
ccagggtagcggttaccaa

SEQ ID NO: 346230 - DNA, 19 bp, Homo sapiens
  siRNA target sequence for ANKRD6 (NM_014942.1,359-377).
ctggctgcgaccttgatgt

SEQ ID NO: 346231 - DNA, 19 bp, Homo sapiens
  siRNA target sequence for ANKRD6 (NM_014942.1,666-684).
cgctgacctcaaaaataat

SEQ ID NO: 346232 - DNA, 19 bp, Homo sapiens
  siRNA target sequence for ANKRD6 (NM_014942.1,705-723).
cgttgctgcgcgctataat

SEQ ID NO: 346233 - DNA, 19 bp, Homo sapiens
  siRNA target sequence for ANKRD6 (NM_014942.1,710-728).
ctgcgcgctataatcactt

SEQ ID NO: 346234 - DNA, 19 bp, Homo sapiens
  siRNA target sequence for ANKRD6 (NM_014942.1,804-822).
cgttgctgctgccctaaat

SEQ ID NO: 346235 - DNA, 19 bp, Homo sapiens
  siRNA target sequence for ANKRD6 (NM_014942.1,812-830).
ctgccctaaatcacaagaa

SEQ ID NO: 346236 - DNA, 19 bp, Homo sapiens
  siRNA target sequence for ANKRD6 (NM_014942.1,859-877).
gcagatacgaccattgtta

SEQ ID NO: 346237 - DNA, 19 bp, Homo sapiens
  siRNA target sequence for ANKRD6 (NM_014942.1,1162-1180).
gctcataatcaccctaaaa

SEQ ID NO: 346238 - DNA, 19 bp, Homo sapiens
  siRNA target sequence for ANKRD6 (NM_014942.1,1231-1249).
gcgtatcagctctacacat

SEQ ID NO: 346239 - DNA, 19 bp, Homo sapiens
  siRNA target sequence for ANKRD6 (NM_014942.1,1232-1250).
cgtatcagctctacacatt

SEQ ID NO: 346240 - DNA, 19 bp, Homo sapiens
  siRNA target sequence for ANKRD6 (NM_014942.1,1273-1291).
gtgatgcaggcaccaataa

SEQ ID NO: 346241 - DNA, 19 bp, Homo sapiens
  siRNA target sequence for ANKRD6 (NM_014942.1,1275-1293).
gatgcaggcaccaataaat

SEQ ID NO: 346242 - DNA, 19 bp, Homo sapiens
  siRNA target sequence for ANKRD6 (NM_014942.1,1298-1316).
gtcgatgtgaacctctaat

SEQ ID NO: 346243 - DNA, 19 bp, Homo sapiens
  siRNA target sequence for ANKRD6 (NM_014942.1,1304-1322).
gtgaacctctaatcaacaa

SEQ ID NO: 346244 - DNA, 19 bp, Homo sapiens
  siRNA target sequence for ANKRD6 (NM_014942.1,1372-1390).
ggatcggttcaggacaaaa

SEQ ID NO: 346245 - DNA, 19 bp, Homo sapiens
  siRNA target sequence for ANKRD6 (NM_014942.1,1373-1391).
gatcggttcaggacaaaat

SEQ ID NO: 346246 - DNA, 19 bp, Homo sapiens
  siRNA target sequence for ANKRD6 (NM_014942.1,1455-1473).
gatggttgagcgactttct

SEQ ID NO: 346247 - DNA, 19 bp, Homo sapiens
  siRNA target sequence for ANKRD6 (NM_014942.1,1575-1593).
ctggtgcatgttaaagatt

SEQ ID NO: 346248 - DNA, 19 bp, Homo sapiens
  siRNA target sequence for ANKRD6 (NM_014942.1,1673-1691).
caggtgtggaccaattagt

SEQ ID NO: 346249 - DNA, 19 bp, Homo sapiens
  siRNA target sequence for ANKRD6 (NM_014942.1,1850-1868).
ccttgctacccatgaatga

SEQ ID NO: 346250 - DNA, 19 bp, Homo sapiens
  siRNA target sequence for ANKRD6 (NM_014942.1,1912-1930).
ggcactcaaactaagaagt

SEQ ID NO: 346251 - DNA, 19 bp, Homo sapiens
  siRNA target sequence for ANKRD6 (NM_014942.1,2056-2074).
ctggagcttacccagtatt

SEQ ID NO: 346252 - DNA, 19 bp, Homo sapiens
  siRNA target sequence for ANKRD6 (NM_014942.1,2106-2124).
gtggtatgaaaggaagatt

SEQ ID NO: 346253 - DNA, 19 bp, Homo sapiens
  siRNA target sequence for ANKRD6 (NM_014942.1,2161-2179).
caagataaggctacattga

SEQ ID NO: 346254 - DNA, 19 bp, Homo sapiens
  siRNA target sequence for ANKRD6 (NM_014942.1,2174-2192).
cattgaaggaacacattaa

SEQ ID NO: 346255 - DNA, 19 bp, Homo sapiens
  siRNA target sequence for KIAA0907 (NM_014949.1,251-269).
gctgaaaccaactcagaat

SEQ ID NO: 346256 - DNA, 19 bp, Homo sapiens
  siRNA target sequence for KIAA0907 (NM_014949.1,291-309).
cctggcaaaggcctaacta

SEQ ID NO: 346257 - DNA, 19 bp, Homo sapiens
  siRNA target sequence for KIAA0907 (NM_014949.1,303-321).
ctaactagcaataaaagca

SEQ ID NO: 346258 - DNA, 19 bp, Homo sapiens
  siRNA target sequence for KIAA0907 (NM_014949.1,335-353).
ggtagctgaagtagaaatt

SEQ ID NO: 346259 - DNA, 19 bp, Homo sapiens
  siRNA target sequence for KIAA0907 (NM_014949.1,407-425).
cgagatcagccgacttagt

SEQ ID NO: 346260 - DNA, 19 bp, Homo sapiens
  siRNA target sequence for KIAA0907 (NM_014949.1,444-462).
cgagggaggttcatgacaa

SEQ ID NO: 346261 - DNA, 19 bp, Homo sapiens
  siRNA target sequence for KIAA0907 (NM_014949.1,486-504).
ccaggggatcgtccattat

SEQ ID NO: 346262 - DNA, 19 bp, Homo sapiens
  siRNA target sequence for KIAA0907 (NM_014949.1,487-505).
caggggatcgtccattata

SEQ ID NO: 346263 - DNA, 19 bp, Homo sapiens
  siRNA target sequence for KIAA0907 (NM_014949.1,496-514).
gtccattatatcttcatgt

SEQ ID NO: 346264 - DNA, 19 bp, Homo sapiens
  siRNA target sequence for KIAA0907 (NM_014949.1,520-538).
gccagacacgggaattagt

SEQ ID NO: 346265 - DNA, 19 bp, Homo sapiens
  siRNA target sequence for KIAA0907 (NM_014949.1,547-565).
ctgtaaaccggatcaaaga

SEQ ID NO: 346266 - DNA, 19 bp, Homo sapiens
  siRNA target sequence for KIAA0907 (NM_014949.1,549-567).
gtaaaccggatcaaagaaa

SEQ ID NO: 346267 - DNA, 19 bp, Homo sapiens
  siRNA target sequence for KIAA0907 (NM_014949.1,600-618).
ggaacaagtccaactttta

SEQ ID NO: 346268 - DNA, 19 bp, Homo sapiens
  siRNA target sequence for KIAA0907 (NM_014949.1,625-643).
caacagtaactgtctatca

SEQ ID NO: 346269 - DNA, 19 bp, Homo sapiens
  siRNA target sequence for KIAA0907 (NM_014949.1,698-716).
ccagtcagggatgcattat

SEQ ID NO: 346270 - DNA, 19 bp, Homo sapiens
  siRNA target sequence for KIAA0907 (NM_014949.1,701-719).
gtcagggatgcattatgtt

SEQ ID NO: 346271 - DNA, 19 bp, Homo sapiens
  siRNA target sequence for KIAA0907 (NM_014949.1,786-804).
ggtccaggctgctcctatt

SEQ ID NO: 346272 - DNA, 19 bp, Homo sapiens
  siRNA target sequence for KIAA0907 (NM_014949.1,886-904).
gagaagcttttgaacctat

SEQ ID NO: 346273 - DNA, 19 bp, Homo sapiens
  siRNA target sequence for KIAA0907 (NM_014949.1,988-1006).
ctgaatactctagatttgt

SEQ ID NO: 346274 - DNA, 19 bp, Homo sapiens
  siRNA target sequence for KIAA0907 (NM_014949.1,1000-1018).
gatttgtgaatcagattaa

SEQ ID NO: 346275 - DNA, 19 bp, Homo sapiens
  siRNA target sequence for KIAA0907 (NM_014949.1,1047-1065).
caaccctctgctataagta

SEQ ID NO: 346276 - DNA, 19 bp, Homo sapiens
  siRNA target sequence for KIAA0907 (NM_014949.1,1077-1095).
caaccaccatattatccat

SEQ ID NO: 346277 - DNA, 19 bp, Homo sapiens
  siRNA target sequence for KIAA0907 (NM_014949.1,1157-1175).
ctacggagtaccaagcata

SEQ ID NO: 346278 - DNA, 19 bp, Homo sapiens
  siRNA target sequence for KIAA0907 (NM_014949.1,1206-1224).
gtcttgccggcattaccta

SEQ ID NO: 346279 - DNA, 19 bp, Homo sapiens
  siRNA target sequence for KIAA0907 (NM_014949.1,1246-1264).
cacaatacccgataacaca

SEQ ID NO: 346280 - DNA, 19 bp, Homo sapiens
  siRNA target sequence for KIAA0907 (NM_014949.1,1301-1319).
gggtggtccttttattcct

SEQ ID NO: 346281 - DNA, 19 bp, Homo sapiens
  siRNA target sequence for KIAA0907 (NM_014949.1,1464-1482).
cagcatggacccattcata

SEQ ID NO: 346282 - DNA, 19 bp, Homo sapiens
  siRNA target sequence for KIAA0907 (NM_014949.1,1467-1485).
catggacccattcatatga

SEQ ID NO: 346283 - DNA, 19 bp, Homo sapiens
  siRNA target sequence for KIAA0907 (NM_014949.1,1470-1488).
ggacccattcatatgacta

SEQ ID NO: 346284 - DNA, 19 bp, Homo sapiens
  siRNA target sequence for KIAA0907 (NM_014949.1,1479-1497).
catatgactaatttaggta

SEQ ID NO: 346285 - DNA, 19 bp, Homo sapiens
  siRNA target sequence for KIAA0907 (NM_014949.1,1501-1519).
gcttctccagtcagaatga

SEQ ID NO: 346286 - DNA, 19 bp, Homo sapiens
  siRNA target sequence for KIAA0907 (NM_014949.1,1507-1525).
ccagtcagaatgagattga

SEQ ID NO: 346287 - DNA, 19 bp, Homo sapiens
  siRNA target sequence for ZBTB1 (NM_014950.1,290-308).
gtccttcagcagctaaaca

SEQ ID NO: 346288 - DNA, 19 bp, Homo sapiens
  siRNA target sequence for ZBTB1 (NM_014950.1,339-357).
gctgtattgcaattgatga

SEQ ID NO: 346289 - DNA, 19 bp, Homo sapiens
  siRNA target sequence for ZBTB1 (NM_014950.1,394-412).
ctgtagctcctattttaga

SEQ ID NO: 346290 - DNA, 19 bp, Homo sapiens
  siRNA target sequence for ZBTB1 (NM_014950.1,424-442).
gaaccatcagcatagtact

SEQ ID NO: 346291 - DNA, 19 bp, Homo sapiens
  siRNA target sequence for ZBTB1 (NM_014950.1,474-492).
gtgcagaatgttttgatct

SEQ ID NO: 346292 - DNA, 19 bp, Homo sapiens
  siRNA target sequence for ZBTB1 (NM_014950.1,568-586).
ctacctacagctatacaat

SEQ ID NO: 346293 - DNA, 19 bp, Homo sapiens
  siRNA target sequence for ZBTB1 (NM_014950.1,571-589).
cctacagctatacaatgtt

SEQ ID NO: 346294 - DNA, 19 bp, Homo sapiens
  siRNA target sequence for ZBTB1 (NM_014950.1,583-601).
caatgttcctgactgttta

SEQ ID NO: 346295 - DNA, 19 bp, Homo sapiens
  siRNA target sequence for ZBTB1 (NM_014950.1,607-625).
catccaggatgcagattgt

SEQ ID NO: 346296 - DNA, 19 bp, Homo sapiens
  siRNA target sequence for ZBTB1 (NM_014950.1,617-635).
gcagattgttctagttcaa

SEQ ID NO: 346297 - DNA, 19 bp, Homo sapiens
  siRNA target sequence for ZBTB1 (NM_014950.1,748-766).
gccaagttcaacggtaaat

SEQ ID NO: 346298 - DNA, 19 bp, Homo sapiens
  siRNA target sequence for ZBTB1 (NM_014950.1,1177-1195).
cacagtggagtctgaaata

SEQ ID NO: 346299 - DNA, 19 bp, Homo sapiens
  siRNA target sequence for ZBTB1 (NM_014950.1,1250-1268).
gagccagaagatattccta

SEQ ID NO: 346300 - DNA, 19 bp, Homo sapiens
  siRNA target sequence for ZBTB1 (NM_014950.1,1269-1287).
cagatgaactgaaagactt

SEQ ID NO: 346301 - DNA, 19 bp, Homo sapiens
  siRNA target sequence for ZBTB1 (NM_014950.1,1327-1345).
cactgacaatgatgaatta

SEQ ID NO: 346302 - DNA, 19 bp, Homo sapiens
  siRNA target sequence for ZBTB1 (NM_014950.1,1329-1347).
ctgacaatgatgaattaga

SEQ ID NO: 346303 - DNA, 19 bp, Homo sapiens
  siRNA target sequence for ZBTB1 (NM_014950.1,1361-1379).
gagccattttatagatact

SEQ ID NO: 346304 - DNA, 19 bp, Homo sapiens
  siRNA target sequence for ZBTB1 (NM_014950.1,1454-1472).
gaaagaggtggtttagaga

SEQ ID NO: 346305 - DNA, 19 bp, Homo sapiens
  siRNA target sequence for ZBTB1 (NM_014950.1,1460-1478).
ggtggtttagagaatatga

SEQ ID NO: 346306 - DNA, 19 bp, Homo sapiens
  siRNA target sequence for ZBTB1 (NM_014950.1,1489-1507).
caacagcagtccagtacaa

SEQ ID NO: 346307 - DNA, 19 bp, Homo sapiens
  siRNA target sequence for ZBTB1 (NM_014950.1,1532-1550).
gagctgtgtggacttacaa

SEQ ID NO: 346308 - DNA, 19 bp, Homo sapiens
  siRNA target sequence for ZBTB1 (NM_014950.1,1534-1552).
gctgtgtggacttacaata

SEQ ID NO: 346309 - DNA, 19 bp, Homo sapiens
  siRNA target sequence for ZBTB1 (NM_014950.1,1574-1592).
cattacttagccaaacaca

SEQ ID NO: 346310 - DNA, 19 bp, Homo sapiens
  siRNA target sequence for ZBTB1 (NM_014950.1,1614-1632).
gtaaatgtggacaaatact

SEQ ID NO: 346311 - DNA, 19 bp, Homo sapiens
  siRNA target sequence for ZBTB1 (NM_014950.1,1671-1689).
gtggcgagccccaagatct

SEQ ID NO: 346312 - DNA, 19 bp, Homo sapiens
  siRNA target sequence for ZBTB1 (NM_014950.1,1755-1773).
ccgaaataagagatatgtt

SEQ ID NO: 346313 - DNA, 19 bp, Homo sapiens
  siRNA target sequence for ZBTB1 (NM_014950.1,1790-1808).
gattttagggacaatcatt

SEQ ID NO: 346314 - DNA, 19 bp, Homo sapiens
  siRNA target sequence for ZBTB1 (NM_014950.1,1858-1876).
cccttttcgatgtcctaat

SEQ ID NO: 346315 - DNA, 19 bp, Homo sapiens
  siRNA target sequence for ZBTB1 (NM_014950.1,1859-1877).
ccttttcgatgtcctaatt

SEQ ID NO: 346316 - DNA, 19 bp, Homo sapiens
  siRNA target sequence for ZBTB1 (NM_014950.1,1881-1899).
gccagcgttttgaaactga

SEQ ID NO: 346317 - DNA, 19 bp, Homo sapiens
  siRNA target sequence for ZBTB1 (NM_014950.1,1904-1922).
ctagtggttgaacatatgt

SEQ ID NO: 346318 - DNA, 19 bp, Homo sapiens
  siRNA target sequence for ZBTB1 (NM_014950.1,1907-1925).
gtggttgaacatatgtcta

SEQ ID NO: 346319 - DNA, 19 bp, Homo sapiens
  siRNA target sequence for ZBTB1 (NM_014950.1,1921-1939).
gtctagctgcttagatcaa

SEQ ID NO: 346320 - DNA, 19 bp, Homo sapiens
  siRNA target sequence for ZBTB1 (NM_014950.1,1923-1941).
ctagctgcttagatcaaga

SEQ ID NO: 346321 - DNA, 19 bp, Homo sapiens
  siRNA target sequence for ZBTB1 (NM_014950.1,1984-2002).
cagacgaaagcatttttgt

SEQ ID NO: 346322 - DNA, 19 bp, Homo sapiens
  siRNA target sequence for ZBTB1 (NM_014950.1,1986-2004).
gacgaaagcatttttgtaa

SEQ ID NO: 346323 - DNA, 19 bp, Homo sapiens
  siRNA target sequence for ZBTB1 (NM_014950.1,2077-2095).
gtttgtttgtcaaacatgt

SEQ ID NO: 346324 - DNA, 19 bp, Homo sapiens
  siRNA target sequence for ZBTB1 (NM_014950.1,2122-2140).
gttgcgactgcacaatgat

SEQ ID NO: 346325 - DNA, 19 bp, Homo sapiens
  siRNA target sequence for ZBTB1 (NM_014950.1,2163-2181).
gtgaaatagggccttctaa

SEQ ID NO: 346326 - DNA, 19 bp, Homo sapiens
  siRNA target sequence for KIAA1052 (NM_014956.1,584-602).
gccaacgggcagtctatgt

SEQ ID NO: 346327 - DNA, 19 bp, Homo sapiens
  siRNA target sequence for KIAA1052 (NM_014956.1,663-681).
caacttctggggccattaa

SEQ ID NO: 346328 - DNA, 19 bp, Homo sapiens
  siRNA target sequence for KIAA1052 (NM_014956.1,757-775).
ctcattagccccagttcat

SEQ ID NO: 346329 - DNA, 19 bp, Homo sapiens
  siRNA target sequence for KIAA1052 (NM_014956.1,941-959).
ggtctcttgggctccatat

SEQ ID NO: 346330 - DNA, 19 bp, Homo sapiens
  siRNA target sequence for KIAA1052 (NM_014956.1,942-960).
gtctcttgggctccatata

SEQ ID NO: 346331 - DNA, 19 bp, Homo sapiens
  siRNA target sequence for KIAA1052 (NM_014956.1,1053-1071).
caagtgagcctcttaggaa

SEQ ID NO: 346332 - DNA, 19 bp, Homo sapiens
  siRNA target sequence for KIAA1052 (NM_014956.1,1680-1698).
cactgggaatagaagacaa

SEQ ID NO: 346333 - DNA, 19 bp, Homo sapiens
  siRNA target sequence for KIAA1052 (NM_014956.1,1751-1769).
ctggaggagaggtaccata

SEQ ID NO: 346334 - DNA, 19 bp, Homo sapiens
  siRNA target sequence for KIAA1052 (NM_014956.1,2408-2426).
gcagatgaggaccaaatca

SEQ ID NO: 346335 - DNA, 19 bp, Homo sapiens
  siRNA target sequence for KIAA1052 (NM_014956.1,3151-3169).
ccttgaaaccagagctaaa

SEQ ID NO: 346336 - DNA, 19 bp, Homo sapiens
  siRNA target sequence for KIAA1052 (NM_014956.1,3346-3364).
gcagctccgagaaattctt

SEQ ID NO: 346337 - DNA, 19 bp, Homo sapiens
  siRNA target sequence for KIAA1052 (NM_014956.1,3349-3367).
gctccgagaaattcttgat

SEQ ID NO: 346338 - DNA, 19 bp, Homo sapiens
  siRNA target sequence for KIAA1052 (NM_014956.1,3561-3579).
ggaaatcccttggaacaaa

SEQ ID NO: 346339 - DNA, 19 bp, Homo sapiens
  siRNA target sequence for KIAA1052 (NM_014956.1,3586-3604).
caaagaggtgtcttcttct

SEQ ID NO: 346340 - DNA, 19 bp, Homo sapiens
  siRNA target sequence for KIAA1052 (NM_014956.1,3615-3633).
gcaaggaggacttatactt

SEQ ID NO: 346341 - DNA, 19 bp, Homo sapiens
  siRNA target sequence for KIAA1052 (NM_014956.1,4045-4063).
cctgagcagtgaaagttct

SEQ ID NO: 346342 - DNA, 19 bp, Homo sapiens
  siRNA target sequence for KIAA1052 (NM_014956.1,4297-4315).
gttctcagccttatcatct

SEQ ID NO: 346343 - DNA, 19 bp, Homo sapiens
  siRNA target sequence for KIAA1052 (NM_014956.1,4409-4427).
gagaagtggcgcaagtatt

SEQ ID NO: 346344 - DNA, 19 bp, Homo sapiens
  siRNA target sequence for KIAA1052 (NM_014956.1,4411-4429).
gaagtggcgcaagtatttt

SEQ ID NO: 346345 - DNA, 19 bp, Homo sapiens
  siRNA target sequence for KIAA1052 (NM_014956.1,4414-4432).
gtggcgcaagtattttcca

SEQ ID NO: 346346 - DNA, 19 bp, Homo sapiens
  siRNA target sequence for KIAA1052 (NM_014956.1,4557-4575).
ccacctttcagggcataat

SEQ ID NO: 346347 - DNA, 19 bp, Homo sapiens
  siRNA target sequence for KIAA1052 (NM_014956.1,4558-4576).
cacctttcagggcataatt

SEQ ID NO: 346348 - DNA, 19 bp, Homo sapiens
  siRNA target sequence for KIAA1052 (NM_014956.1,4594-4612).
gctggaacgtgtcaagaat

SEQ ID NO: 346349 - DNA, 19 bp, Homo sapiens
  siRNA target sequence for KIAA1052 (NM_014956.1,4644-4662).
ccaagccaaaagctacttt

SEQ ID NO: 346350 - DNA, 19 bp, Homo sapiens
  siRNA target sequence for RIPX (NM_014961.1,610-628).
gaccatctacctttgcaaa

SEQ ID NO: 346351 - DNA, 19 bp, Homo sapiens
  siRNA target sequence for RIPX (NM_014961.1,612-630).
ccatctacctttgcaaatt

SEQ ID NO: 346352 - DNA, 19 bp, Homo sapiens
  siRNA target sequence for RIPX (NM_014961.1,743-761).
cgcatgaacctcatgaaca

SEQ ID NO: 346353 - DNA, 19 bp, Homo sapiens
  siRNA target sequence for RIPX (NM_014961.1,878-896).
catggcttgaaagctaaaa

SEQ ID NO: 346354 - DNA, 19 bp, Homo sapiens
  siRNA target sequence for RIPX (NM_014961.1,905-923).
ctcggacaaaataaatcct

SEQ ID NO: 346355 - DNA, 19 bp, Homo sapiens
  siRNA target sequence for RIPX (NM_014961.1,973-991).
gataacagcaagtgttaaa

SEQ ID NO: 346356 - DNA, 19 bp, Homo sapiens
  siRNA target sequence for RIPX (NM_014961.1,1035-1053).
ggcttcgtttggcattaat

SEQ ID NO: 346357 - DNA, 19 bp, Homo sapiens
  siRNA target sequence for RIPX (NM_014961.1,1174-1192).
ggtgggtctgaatgtcatt

SEQ ID NO: 346358 - DNA, 19 bp, Homo sapiens
  siRNA target sequence for RIPX (NM_014961.1,1177-1195).
gggtctgaatgtcattgat

SEQ ID NO: 346359 - DNA, 19 bp, Homo sapiens
  siRNA target sequence for RIPX (NM_014961.1,1267-1285).
ggacgggaacagcagtaaa

SEQ ID NO: 346360 - DNA, 19 bp, Homo sapiens
  siRNA target sequence for RIPX (NM_014961.1,1270-1288).
cgggaacagcagtaaaggt

SEQ ID NO: 346361 - DNA, 19 bp, Homo sapiens
  siRNA target sequence for RIPX (NM_014961.1,1271-1289).
gggaacagcagtaaaggta

SEQ ID NO: 346362 - DNA, 19 bp, Homo sapiens
  siRNA target sequence for RIPX (NM_014961.1,1292-1310).
gaaggagacggtcagatta

SEQ ID NO: 346363 - DNA, 19 bp, Homo sapiens
  siRNA target sequence for RIPX (NM_014961.1,1302-1320).
gtcagattactgcaattct

SEQ ID NO: 346364 - DNA, 19 bp, Homo sapiens
  siRNA target sequence for RIPX (NM_014961.1,1324-1342).
ccagaagaactatgtagaa

SEQ ID NO: 346365 - DNA, 19 bp, Homo sapiens
  siRNA target sequence for RIPX (NM_014961.1,1343-1361).
gaactgaacagacatttga

SEQ ID NO: 346366 - DNA, 19 bp, Homo sapiens
  siRNA target sequence for RIPX (NM_014961.1,1384-1402).
ggcaaaagtagatgcatta

SEQ ID NO: 346367 - DNA, 19 bp, Homo sapiens
  siRNA target sequence for RIPX (NM_014961.1,1386-1404).
caaaagtagatgcattaga

SEQ ID NO: 346368 - DNA, 19 bp, Homo sapiens
  siRNA target sequence for RIPX (NM_014961.1,1447-1465).
caacaggatcattacctta

SEQ ID NO: 346369 - DNA, 19 bp, Homo sapiens
  siRNA target sequence for RIPX (NM_014961.1,1452-1470).
ggatcattaccttacaaga

SEQ ID NO: 346370 - DNA, 19 bp, Homo sapiens
  siRNA target sequence for RIPX (NM_014961.1,1453-1471).
gatcattaccttacaagaa

SEQ ID NO: 346371 - DNA, 19 bp, Homo sapiens
  siRNA target sequence for RIPX (NM_014961.1,1594-1612).
gacacaattacgattggat

SEQ ID NO: 346372 - DNA, 19 bp, Homo sapiens
  siRNA target sequence for RIPX (NM_014961.1,1801-1819).
gaaaagtgaactaaacagt

SEQ ID NO: 346373 - DNA, 19 bp, Homo sapiens
  siRNA target sequence for RIPX (NM_014961.1,1820-1838).
cgcttggaagagaagacta

SEQ ID NO: 346374 - DNA, 19 bp, Homo sapiens
  siRNA target sequence for RIPX (NM_014961.1,1841-1859).
cagatggctgctaccatta

SEQ ID NO: 346375 - DNA, 19 bp, Homo sapiens
  siRNA target sequence for RIPX (NM_014961.1,1843-1861).
gatggctgctaccattaaa

SEQ ID NO: 346376 - DNA, 19 bp, Homo sapiens
  siRNA target sequence for RIPX (NM_014961.1,1846-1864).
ggctgctaccattaaacaa

SEQ ID NO: 346377 - DNA, 19 bp, Homo sapiens
  siRNA target sequence for RIPX (NM_014961.1,1848-1866).
ctgctaccattaaacaact

SEQ ID NO: 346378 - DNA, 19 bp, Homo sapiens
  siRNA target sequence for RIPX (NM_014961.1,1895-1913).
caggcaaagaccttaaata

SEQ ID NO: 346379 - DNA, 19 bp, Homo sapiens
  siRNA target sequence for RIPX (NM_014961.1,1897-1915).
ggcaaagaccttaaatagt

SEQ ID NO: 346380 - DNA, 19 bp, Homo sapiens
  siRNA target sequence for KIAA0963 (NM_014963.1,637-655).
ccccctccacccacgataa

SEQ ID NO: 346381 - DNA, 19 bp, Homo sapiens
  siRNA target sequence for KIAA0963 (NM_014963.1,640-658).
cctccacccacgataagct

SEQ ID NO: 346382 - DNA, 19 bp, Homo sapiens
  siRNA target sequence for KIAA0963 (NM_014963.1,682-700).
caggcttcgaggactttct

SEQ ID NO: 346383 - DNA, 19 bp, Homo sapiens
  siRNA target sequence for KIAA0963 (NM_014963.1,1206-1224).
cacgcgctcagcaagatca

SEQ ID NO: 346384 - DNA, 19 bp, Homo sapiens
  siRNA target sequence for KIAA0963 (NM_014963.1,1370-1388).
gttcgacgagtgtcacaaa

SEQ ID NO: 346385 - DNA, 19 bp, Homo sapiens
  siRNA target sequence for KIAA0963 (NM_014963.1,1491-1509).
gagcctcggaacatgatct

SEQ ID NO: 346386 - DNA, 19 bp, Homo sapiens
  siRNA target sequence for KIAA0963 (NM_014963.1,1494-1512).
cctcggaacatgatctaca

SEQ ID NO: 346387 - DNA, 19 bp, Homo sapiens
  siRNA target sequence for KIAA0963 (NM_014963.1,1497-1515).
cggaacatgatctacatga

SEQ ID NO: 346388 - DNA, 19 bp, Homo sapiens
  siRNA target sequence for KIAA0963 (NM_014963.1,1541-1559).
cacacccttccggaacttt

SEQ ID NO: 346389 - DNA, 19 bp, Homo sapiens
  siRNA target sequence for KIAA0963 (NM_014963.1,1708-1726).
ccttcgagtgcgtctacaa

SEQ ID NO: 346390 - DNA, 19 bp, Homo sapiens
  siRNA target sequence for KIAA0963 (NM_014963.1,1830-1848).
gcacaccagcgcttcttca

SEQ ID NO: 346391 - DNA, 19 bp, Homo sapiens
  siRNA target sequence for KIAA0963 (NM_014963.1,1831-1849).
cacaccagcgcttcttcaa

SEQ ID NO: 346392 - DNA, 19 bp, Homo sapiens
  siRNA target sequence for KIAA0963 (NM_014963.1,1833-1851).
caccagcgcttcttcaagt

SEQ ID NO: 346393 - DNA, 19 bp, Homo sapiens
  siRNA target sequence for KIAA0963 (NM_014963.1,1835-1853).
ccagcgcttcttcaagtat

SEQ ID NO: 346394 - DNA, 19 bp, Homo sapiens
  siRNA target sequence for KIAA0963 (NM_014963.1,1839-1857).
cgcttcttcaagtatctgt

SEQ ID NO: 346395 - DNA, 19 bp, Homo sapiens
  siRNA target sequence for KIAA0963 (NM_014963.1,2021-2039).
cgtgttcctgtcgctaatt

SEQ ID NO: 346396 - DNA, 19 bp, Homo sapiens
  siRNA target sequence for KIAA0963 (NM_014963.1,2888-2906).
cctcagcaagtacaacttt

SEQ ID NO: 346397 - DNA, 19 bp, Homo sapiens
  siRNA target sequence for KIAA0963 (NM_014963.1,2959-2977).
gccagactgagaacaaagt

SEQ ID NO: 346398 - DNA, 19 bp, Homo sapiens
  siRNA target sequence for KIAA0963 (NM_014963.1,3253-3271).
ccggtatcgaggagatcta

SEQ ID NO: 346399 - DNA, 19 bp, Homo sapiens
  siRNA target sequence for KIAA0963 (NM_014963.1,3694-3712).
ggctgcggcaccactacat

SEQ ID NO: 346400 - DNA, 19 bp, Homo sapiens
  siRNA target sequence for EPN2 (NM_014964.2,416-434).
gacgacttcgtctatcaga

SEQ ID NO: 346401 - DNA, 19 bp, Homo sapiens
  siRNA target sequence for EPN2 (NM_014964.2,449-467).
catcgtgaacaattactca

SEQ ID NO: 346402 - DNA, 19 bp, Homo sapiens
  siRNA target sequence for EPN2 (NM_014964.2,782-800).
gcgtgagaagtcaaagcaa

SEQ ID NO: 346403 - DNA, 19 bp, Homo sapiens
  siRNA target sequence for EPN2 (NM_014964.2,842-860).
gagggcccaggctctcaaa

SEQ ID NO: 346404 - DNA, 19 bp, Homo sapiens
  siRNA target sequence for EPN2 (NM_014964.2,846-864).
gcccaggctctcaaaacca

SEQ ID NO: 346405 - DNA, 19 bp, Homo sapiens
  siRNA target sequence for EPN2 (NM_014964.2,847-865).
cccaggctctcaaaaccaa

SEQ ID NO: 346406 - DNA, 19 bp, Homo sapiens
  siRNA target sequence for EPN2 (NM_014964.2,1310-1328).
gggtgatgacctcagatta

SEQ ID NO: 346407 - DNA, 19 bp, Homo sapiens
  siRNA target sequence for EPN2 (NM_014964.2,1348-1366).
gccgaagggacacagttaa

SEQ ID NO: 346408 - DNA, 19 bp, Homo sapiens
  siRNA target sequence for EPN2 (NM_014964.2,1349-1367).
ccgaagggacacagttaaa

SEQ ID NO: 346409 - DNA, 19 bp, Homo sapiens
  siRNA target sequence for EPN2 (NM_014964.2,1350-1368).
cgaagggacacagttaaaa

SEQ ID NO: 346410 - DNA, 19 bp, Homo sapiens
  siRNA target sequence for EPN2 (NM_014964.2,1406-1424).
gactacgctgttggattta

SEQ ID NO: 346411 - DNA, 19 bp, Homo sapiens
  siRNA target sequence for EPN2 (NM_014964.2,1408-1426).
ctacgctgttggatttaat

SEQ ID NO: 346412 - DNA, 19 bp, Homo sapiens
  siRNA target sequence for EPN2 (NM_014964.2,1411-1429).
cgctgttggatttaatgga

SEQ ID NO: 346413 - DNA, 19 bp, Homo sapiens
  siRNA target sequence for EPN2 (NM_014964.2,1523-1541).
ggctcctgcgagtacttca

SEQ ID NO: 346414 - DNA, 19 bp, Homo sapiens
  siRNA target sequence for EPN2 (NM_014964.2,1748-1766).
gctcttcagtaatctgaat

SEQ ID NO: 346415 - DNA, 19 bp, Homo sapiens
  siRNA target sequence for EPN2 (NM_014964.2,1845-1863).
ccatcccaaaacaatggaa

SEQ ID NO: 346416 - DNA, 19 bp, Homo sapiens
  siRNA target sequence for EPN2 (NM_014964.2,2132-2150).
ggggaccagcacatccttt

SEQ ID NO: 346417 - DNA, 19 bp, Homo sapiens
  siRNA target sequence for EPN2 (NM_014964.2,2250-2268).
ggccctgcaatgatgaaca

SEQ ID NO: 346418 - DNA, 19 bp, Homo sapiens
  siRNA target sequence for EPN2 (NM_014964.2,2251-2269).
gccctgcaatgatgaacat

SEQ ID NO: 346419 - DNA, 19 bp, Homo sapiens
  siRNA target sequence for KIAA1018 (NM_014967.1,254-272).
gggaaacctcctgacaaaa

SEQ ID NO: 346420 - DNA, 19 bp, Homo sapiens
  siRNA target sequence for KIAA1018 (NM_014967.1,277-295).
gcctcgtagaagcttatca

SEQ ID NO: 346421 - DNA, 19 bp, Homo sapiens
  siRNA target sequence for KIAA1018 (NM_014967.1,278-296).
cctcgtagaagcttatcaa

SEQ ID NO: 346422 - DNA, 19 bp, Homo sapiens
  siRNA target sequence for KIAA1018 (NM_014967.1,279-297).
ctcgtagaagcttatcaat

SEQ ID NO: 346423 - DNA, 19 bp, Homo sapiens
  siRNA target sequence for KIAA1018 (NM_014967.1,327-345).
ctattatttcgtgttttaa

SEQ ID NO: 346424 - DNA, 19 bp, Homo sapiens
  siRNA target sequence for KIAA1018 (NM_014967.1,375-393).
ccgtttgcagtaaaatggt

SEQ ID NO: 346425 - DNA, 19 bp, Homo sapiens
  siRNA target sequence for KIAA1018 (NM_014967.1,384-402).
gtaaaatggtgcctagata

SEQ ID NO: 346426 - DNA, 19 bp, Homo sapiens
  siRNA target sequence for KIAA1018 (NM_014967.1,391-409).
ggtgcctagatatgactta

SEQ ID NO: 346427 - DNA, 19 bp, Homo sapiens
  siRNA target sequence for KIAA1018 (NM_014967.1,392-410).
gtgcctagatatgacttaa

SEQ ID NO: 346428 - DNA, 19 bp, Homo sapiens
  siRNA target sequence for KIAA1018 (NM_014967.1,413-431).
cggcaccttgatgaaatgt

SEQ ID NO: 346429 - DNA, 19 bp, Homo sapiens
  siRNA target sequence for KIAA1018 (NM_014967.1,464-482).
gggcaggttggcttaataa

SEQ ID NO: 346430 - DNA, 19 bp, Homo sapiens
  siRNA target sequence for KIAA1018 (NM_014967.1,465-483).
ggcaggttggcttaataaa

SEQ ID NO: 346431 - DNA, 19 bp, Homo sapiens
  siRNA target sequence for KIAA1018 (NM_014967.1,466-484).
gcaggttggcttaataaat

SEQ ID NO: 346432 - DNA, 19 bp, Homo sapiens
  siRNA target sequence for KIAA1018 (NM_014967.1,467-485).
caggttggcttaataaatt

SEQ ID NO: 346433 - DNA, 19 bp, Homo sapiens
  siRNA target sequence for KIAA1018 (NM_014967.1,527-545).
gatgtaacacctaagaagt

SEQ ID NO: 346434 - DNA, 19 bp, Homo sapiens
  siRNA target sequence for KIAA1018 (NM_014967.1,610-628).
gaagatcagtccctacttt

SEQ ID NO: 346435 - DNA, 19 bp, Homo sapiens
  siRNA target sequence for KIAA1018 (NM_014967.1,613-631).
gatcagtccctactttaaa

SEQ ID NO: 346436 - DNA, 19 bp, Homo sapiens
  siRNA target sequence for KIAA1018 (NM_014967.1,643-661).
ggtgtgcaaaaatcaagat

SEQ ID NO: 346437 - DNA, 19 bp, Homo sapiens
  siRNA target sequence for KIAA1018 (NM_014967.1,659-677).
gatgagctgagaaatcgta

SEQ ID NO: 346438 - DNA, 19 bp, Homo sapiens
  siRNA target sequence for KIAA1018 (NM_014967.1,667-685).
gagaaatcgtagtgtgaaa

SEQ ID NO: 346439 - DNA, 19 bp, Homo sapiens
  siRNA target sequence for KIAA1018 (NM_014967.1,669-687).
gaaatcgtagtgtgaaagt

SEQ ID NO: 346440 - DNA, 19 bp, Homo sapiens
  siRNA target sequence for KIAA1018 (NM_014967.1,674-692).
cgtagtgtgaaagtcattt

SEQ ID NO: 346441 - DNA, 19 bp, Homo sapiens
  siRNA target sequence for KIAA1018 (NM_014967.1,697-715).
gggaagcctagcatctaaa

SEQ ID NO: 346442 - DNA, 19 bp, Homo sapiens
  siRNA target sequence for KIAA1018 (NM_014967.1,699-717).
gaagcctagcatctaaatt

SEQ ID NO: 346443 - DNA, 19 bp, Homo sapiens
  siRNA target sequence for KIAA1018 (NM_014967.1,730-748).
cgtaaaggctaaaaaatca

SEQ ID NO: 346444 - DNA, 19 bp, Homo sapiens
  siRNA target sequence for KIAA1018 (NM_014967.1,792-810).
ccaaatccacagttgttaa

SEQ ID NO: 346445 - DNA, 19 bp, Homo sapiens
  siRNA target sequence for KIAA1018 (NM_014967.1,806-824).
gttaagagcctgattgata

SEQ ID NO: 346446 - DNA, 19 bp, Homo sapiens
  siRNA target sequence for KIAA1018 (NM_014967.1,883-901).
cgtgtttaaatgtgattct

SEQ ID NO: 346447 - DNA, 19 bp, Homo sapiens
  siRNA target sequence for KIAA1018 (NM_014967.1,1016-1034).
gataatgcgatcatgttat

SEQ ID NO: 346448 - DNA, 19 bp, Homo sapiens
  siRNA target sequence for KIAA1018 (NM_014967.1,1043-1061).
gatttcactcttaggaata

SEQ ID NO: 346449 - DNA, 19 bp, Homo sapiens
  siRNA target sequence for KIAA1018 (NM_014967.1,1132-1150).
ggcatgtcattgtgaagaa

SEQ ID NO: 346450 - DNA, 19 bp, Homo sapiens
  siRNA target sequence for KIAA1018 (NM_014967.1,1199-1217).
gaggcaaaatctcatagtt

SEQ ID NO: 346451 - DNA, 19 bp, Homo sapiens
  siRNA target sequence for KIAA1018 (NM_014967.1,1264-1282).
gcaggatgacagttgctta

SEQ ID NO: 346452 - DNA, 19 bp, Homo sapiens
  siRNA target sequence for KIAA1018 (NM_014967.1,1265-1283).
caggatgacagttgcttaa

SEQ ID NO: 346453 - DNA, 19 bp, Homo sapiens
  siRNA target sequence for KIAA1018 (NM_014967.1,1275-1293).
gttgcttaaacaatgatat

SEQ ID NO: 346454 - DNA, 19 bp, Homo sapiens
  siRNA target sequence for KIAA1018 (NM_014967.1,1347-1365).
caaccggtcatccttacta

SEQ ID NO: 346455 - DNA, 19 bp, Homo sapiens
  siRNA target sequence for KIAA1018 (NM_014967.1,1390-1408).
gaaaaccgtacttgagaat

SEQ ID NO: 346456 - DNA, 19 bp, Homo sapiens
  siRNA target sequence for KIAA1018 (NM_014967.1,1395-1413).
ccgtacttgagaatgaaga

SEQ ID NO: 346457 - DNA, 19 bp, Homo sapiens
  siRNA target sequence for KIAA1018 (NM_014967.1,1439-1457).
gagaagggaattgtaacta

SEQ ID NO: 346458 - DNA, 19 bp, Homo sapiens
  siRNA target sequence for KIAA1018 (NM_014967.1,1441-1459).
gaagggaattgtaactaaa

SEQ ID NO: 346459 - DNA, 19 bp, Homo sapiens
  siRNA target sequence for KIAA1018 (NM_014967.1,1444-1462).
gggaattgtaactaaattt

SEQ ID NO: 346460 - DNA, 19 bp, Homo sapiens
  siRNA target sequence for KIAA1018 (NM_014967.1,1473-1491).
cagctactggtcagaagtt

SEQ ID NO: 346461 - DNA, 19 bp, Homo sapiens
  siRNA target sequence for KIAA1018 (NM_014967.1,1475-1493).
gctactggtcagaagttat

SEQ ID NO: 346462 - DNA, 19 bp, Homo sapiens
  siRNA target sequence for KIAA1018 (NM_014967.1,1500-1518).
ggctctttcaacgtaaatt

SEQ ID NO: 346463 - DNA, 19 bp, Homo sapiens
  siRNA target sequence for KIAA1018 (NM_014967.1,1501-1519).
gctctttcaacgtaaatta

SEQ ID NO: 346464 - DNA, 19 bp, Homo sapiens
  siRNA target sequence for KIAA1018 (NM_014967.1,1502-1520).
ctctttcaacgtaaattaa

SEQ ID NO: 346465 - DNA, 19 bp, Homo sapiens
  siRNA target sequence for KIAA1018 (NM_014967.1,1511-1529).
cgtaaattaagctggatta

SEQ ID NO: 346466 - DNA, 19 bp, Homo sapiens
  siRNA target sequence for KIAA1018 (NM_014967.1,1512-1530).
gtaaattaagctggattaa

SEQ ID NO: 346467 - DNA, 19 bp, Homo sapiens
  siRNA target sequence for KIAA1018 (NM_014967.1,1524-1542).
ggattaagatgaccaaatt

SEQ ID NO: 346468 - DNA, 19 bp, Homo sapiens
  siRNA target sequence for KIAA1018 (NM_014967.1,1531-1549).
gatgaccaaattagagtat

SEQ ID NO: 346469 - DNA, 19 bp, Homo sapiens
  siRNA target sequence for KIAA1018 (NM_014967.1,1534-1552).
gaccaaattagagtatgaa

SEQ ID NO: 346470 - DNA, 19 bp, Homo sapiens
  siRNA target sequence for KIAA1018 (NM_014967.1,1550-1568).
gaagagattgccttagact

SEQ ID NO: 346471 - DNA, 19 bp, Homo sapiens
  siRNA target sequence for KIAA1018 (NM_014967.1,1553-1571).
gagattgccttagacttaa

SEQ ID NO: 346472 - DNA, 19 bp, Homo sapiens
  siRNA target sequence for KIAA1018 (NM_014967.1,1555-1573).
gattgccttagacttaaca

SEQ ID NO: 346473 - DNA, 19 bp, Homo sapiens
  siRNA target sequence for KIAA1018 (NM_014967.1,1572-1590).
cacctgtgattgaagaatt

SEQ ID NO: 346474 - DNA, 19 bp, Homo sapiens
  siRNA target sequence for KIAA1018 (NM_014967.1,1593-1611).
cgaatgcaggctttctaca

SEQ ID NO: 346475 - DNA, 19 bp, Homo sapiens
  siRNA target sequence for KIAA1018 (NM_014967.1,1601-1619).
ggctttctacagacagaat

SEQ ID NO: 346476 - DNA, 19 bp, Homo sapiens
  siRNA target sequence for KIAA1018 (NM_014967.1,1727-1745).
ctggtggacgcctttctca

SEQ ID NO: 346477 - DNA, 19 bp, Homo sapiens
  siRNA target sequence for KIAA1018 (NM_014967.1,1729-1747).
ggtggacgcctttctcaaa

SEQ ID NO: 346478 - DNA, 19 bp, Homo sapiens
  siRNA target sequence for KIAA1018 (NM_014967.1,1730-1748).
gtggacgcctttctcaaat

SEQ ID NO: 346479 - DNA, 19 bp, Homo sapiens
  siRNA target sequence for KIAA1018 (NM_014967.1,1770-1788).
gcacttggggcaagaataa

SEQ ID NO: 346480 - DNA, 19 bp, Homo sapiens
  siRNA target sequence for KIAA1018 (NM_014967.1,1780-1798).
caagaataagcctggaatt

SEQ ID NO: 346481 - DNA, 19 bp, Homo sapiens
  siRNA target sequence for KIAA1018 (NM_014967.1,1783-1801).
gaataagcctggaattggt

SEQ ID NO: 346482 - DNA, 19 bp, Homo sapiens
  siRNA target sequence for KIAA1018 (NM_014967.1,1833-1851).
ctggacagtcagtacgaat

SEQ ID NO: 346483 - DNA, 19 bp, Homo sapiens
  siRNA target sequence for KIAA1018 (NM_014967.1,1838-1856).
cagtcagtacgaatctgta

SEQ ID NO: 346484 - DNA, 19 bp, Homo sapiens
  siRNA target sequence for KIAA1018 (NM_014967.1,1840-1858).
gtcagtacgaatctgtaaa

SEQ ID NO: 346485 - DNA, 19 bp, Homo sapiens
  siRNA target sequence for KIAA1018 (NM_014967.1,1880-1898).
cgcatcttgctactgtttt

SEQ ID NO: 346486 - DNA, 19 bp, Homo sapiens
  siRNA target sequence for KIAA1018 (NM_014967.1,1979-1997).
ggccgaatggagtttccta

SEQ ID NO: 346487 - DNA, 19 bp, Homo sapiens
  siRNA target sequence for KIAA1018 (NM_014967.1,1983-2001).
gaatggagtttcctagtta

SEQ ID NO: 346488 - DNA, 19 bp, Homo sapiens
  siRNA target sequence for KIAA1018 (NM_014967.1,2033-2051).
gacagagatgatcttatca

SEQ ID NO: 346489 - DNA, 19 bp, Homo sapiens
  siRNA target sequence for KIAA1018 (NM_014967.1,2037-2055).
gagatgatcttatcagata

SEQ ID NO: 346490 - DNA, 19 bp, Homo sapiens
  siRNA target sequence for KIAA1018 (NM_014967.1,2069-2087).
cacatgctgagtgacattt

SEQ ID NO: 346491 - DNA, 19 bp, Homo sapiens
  siRNA target sequence for KIAA1018 (NM_014967.1,2128-2146).
gctcgctcagtgtgcaaaa

SEQ ID NO: 346492 - DNA, 19 bp, Homo sapiens
  siRNA target sequence for KIAA1018 (NM_014967.1,2129-2147).
ctcgctcagtgtgcaaaaa

SEQ ID NO: 346493 - DNA, 19 bp, Homo sapiens
  siRNA target sequence for KIAA1018 (NM_014967.1,2150-2168).
gattggaacagactgaaaa

SEQ ID NO: 346494 - DNA, 19 bp, Homo sapiens
  siRNA target sequence for KIAA1018 (NM_014967.1,2204-2222).
ctcttcctgcggtgtttca

SEQ ID NO: 346495 - DNA, 19 bp, Homo sapiens
  siRNA target sequence for KIAA1018 (NM_014967.1,2206-2224).
cttcctgcggtgtttcact

SEQ ID NO: 346496 - DNA, 19 bp, Homo sapiens
  siRNA target sequence for KIAA1018 (NM_014967.1,2253-2271).
ctcggtttgtggaaatact

SEQ ID NO: 346497 - DNA, 19 bp, Homo sapiens
  siRNA target sequence for KIAA1018 (NM_014967.1,2272-2290).
gcagagacttcacatgtat

SEQ ID NO: 346498 - DNA, 19 bp, Homo sapiens
  siRNA target sequence for KIAA1018 (NM_014967.1,2365-2383).
ggatcgactggcccttaat

SEQ ID NO: 346499 - DNA, 19 bp, Homo sapiens
  siRNA target sequence for KIAA1018 (NM_014967.1,2366-2384).
gatcgactggcccttaatt

SEQ ID NO: 346500 - DNA, 19 bp, Homo sapiens
  siRNA target sequence for KIAA1018 (NM_014967.1,2370-2388).
gactggcccttaatttaca

SEQ ID NO: 346501 - DNA, 19 bp, Homo sapiens
  siRNA target sequence for KIAA1018 (NM_014967.1,2403-2421).
gcctggaaccgactatcaa

SEQ ID NO: 346502 - DNA, 19 bp, Homo sapiens
  siRNA target sequence for KIAA1018 (NM_014967.1,2405-2423).
ctggaaccgactatcaagt

SEQ ID NO: 346503 - DNA, 19 bp, Homo sapiens
  siRNA target sequence for KIAA1018 (NM_014967.1,2460-2478).
cgggacaccgcctttcact

SEQ ID NO: 346504 - DNA, 19 bp, Homo sapiens
  siRNA target sequence for KIAA1018 (NM_014967.1,2504-2522).
gagtctccgagctgtaaaa

SEQ ID NO: 346505 - DNA, 19 bp, Homo sapiens
  siRNA target sequence for KIAA1018 (NM_014967.1,2510-2528).
ccgagctgtaaaaagttca

SEQ ID NO: 346506 - DNA, 19 bp, Homo sapiens
  siRNA target sequence for KIAA1018 (NM_014967.1,2511-2529).
cgagctgtaaaaagttcaa

SEQ ID NO: 346507 - DNA, 19 bp, Homo sapiens
  siRNA target sequence for KIAA1018 (NM_014967.1,3138-3156).
cccagagccgtcactttaa

SEQ ID NO: 346508 - DNA, 19 bp, Homo sapiens
  siRNA target sequence for KIAA1018 (NM_014967.1,3175-3193).
ccccaatgatcgtctttca

SEQ ID NO: 346509 - DNA, 19 bp, Homo sapiens
  siRNA target sequence for KIAA1018 (NM_014967.1,3177-3195).
ccaatgatcgtctttcaca

SEQ ID NO: 346510 - DNA, 19 bp, Homo sapiens
  siRNA target sequence for KIAA1018 (NM_014967.1,3178-3196).
caatgatcgtctttcacat

SEQ ID NO: 346511 - DNA, 19 bp, Homo sapiens
  siRNA target sequence for KIAA0893 (NM_014969.3,294-312).
ggttgaaatcattaagcta

SEQ ID NO: 346512 - DNA, 19 bp, Homo sapiens
  siRNA target sequence for KIAA0893 (NM_014969.3,295-313).
gttgaaatcattaagctaa

SEQ ID NO: 346513 - DNA, 19 bp, Homo sapiens
  siRNA target sequence for KIAA0893 (NM_014969.3,366-384).
gaaggaaagtggagtcata

SEQ ID NO: 346514 - DNA, 19 bp, Homo sapiens
  siRNA target sequence for KIAA0893 (NM_014969.3,388-406).
ggcctgttttcagatgata

SEQ ID NO: 346515 - DNA, 19 bp, Homo sapiens
  siRNA target sequence for KIAA0893 (NM_014969.3,469-487).
cctctagaatgtatggaaa

SEQ ID NO: 346516 - DNA, 19 bp, Homo sapiens
  siRNA target sequence for KIAA0893 (NM_014969.3,493-511).
gacaaaaaaaggtttcgtt

SEQ ID NO: 346517 - DNA, 19 bp, Homo sapiens
  siRNA target sequence for KIAA0893 (NM_014969.3,503-521).
ggtttcgttatattatcct

SEQ ID NO: 346518 - DNA, 19 bp, Homo sapiens
  siRNA target sequence for KIAA0893 (NM_014969.3,1355-1373).
cagaatgtcacagtattta

SEQ ID NO: 346519 - DNA, 19 bp, Homo sapiens
  siRNA target sequence for KIAA0893 (NM_014969.3,1383-1401).
ccctgagcgaagtgataca

SEQ ID NO: 346520 - DNA, 19 bp, Homo sapiens
  siRNA target sequence for KIAA0893 (NM_014969.3,1418-1436).
ggcctatcggcagtgaaat

SEQ ID NO: 346521 - DNA, 19 bp, Homo sapiens
  siRNA target sequence for KIAA0893 (NM_014969.3,1440-1458).
gggccagagttcagtttca

SEQ ID NO: 346522 - DNA, 19 bp, Homo sapiens
  siRNA target sequence for KIAA0893 (NM_014969.3,2162-2180).
gtgcctatccagatgtaat

SEQ ID NO: 346523 - DNA, 19 bp, Homo sapiens
  siRNA target sequence for KIAA0893 (NM_014969.3,2165-2183).
cctatccagatgtaattga

SEQ ID NO: 346524 - DNA, 19 bp, Homo sapiens
  siRNA target sequence for KIAA0893 (NM_014969.3,2166-2184).
ctatccagatgtaattgat

SEQ ID NO: 346525 - DNA, 19 bp, Homo sapiens
  siRNA target sequence for KIAA0893 (NM_014969.3,2208-2226).
gcagccggtggtacgtttt

SEQ ID NO: 346526 - DNA, 19 bp, Homo sapiens
  siRNA target sequence for KIAA0893 (NM_014969.3,2209-2227).
cagccggtggtacgtttta

SEQ ID NO: 346527 - DNA, 19 bp, Homo sapiens
  siRNA target sequence for KIAA0893 (NM_014969.3,2211-2229).
gccggtggtacgttttaaa

SEQ ID NO: 346528 - DNA, 19 bp, Homo sapiens
  siRNA target sequence for KIAA0893 (NM_014969.3,2212-2230).
ccggtggtacgttttaaaa

SEQ ID NO: 346529 - DNA, 19 bp, Homo sapiens
  siRNA target sequence for KIAA0893 (NM_014969.3,2215-2233).
gtggtacgttttaaaagga

SEQ ID NO: 346530 - DNA, 19 bp, Homo sapiens
  siRNA target sequence for KIAA0893 (NM_014969.3,2217-2235).
ggtacgttttaaaaggaat

SEQ ID NO: 346531 - DNA, 19 bp, Homo sapiens
  siRNA target sequence for KIAA0893 (NM_014969.3,2218-2236).
gtacgttttaaaaggaata

SEQ ID NO: 346532 - DNA, 19 bp, Homo sapiens
  siRNA target sequence for KIAA0893 (NM_014969.3,2242-2260).
cataaaggatccatttact

SEQ ID NO: 346533 - DNA, 19 bp, Homo sapiens
  siRNA target sequence for KIAA0893 (NM_014969.3,2273-2291).
gtccttgtgggcagttatt

SEQ ID NO: 346534 - DNA, 19 bp, Homo sapiens
  siRNA target sequence for KIAA0893 (NM_014969.3,2359-2377).
ggaccagatctggaattta

SEQ ID NO: 346535 - DNA, 19 bp, Homo sapiens
  siRNA target sequence for KIAA0893 (NM_014969.3,2425-2443).
gaaagcggaggagctattt

SEQ ID NO: 346536 - DNA, 19 bp, Homo sapiens
  siRNA target sequence for KIAA0893 (NM_014969.3,2429-2447).
gcggaggagctattttaat

SEQ ID NO: 346537 - DNA, 19 bp, Homo sapiens
  siRNA target sequence for KIAA0893 (NM_014969.3,2430-2448).
cggaggagctattttaata

SEQ ID NO: 346538 - DNA, 19 bp, Homo sapiens
  siRNA target sequence for KIAA0893 (NM_014969.3,2452-2470).
gctggagcaggggattgta

SEQ ID NO: 346539 - DNA, 19 bp, Homo sapiens
  siRNA target sequence for KIAA0893 (NM_014969.3,2456-2474).
gagcaggggattgtaacat

SEQ ID NO: 346540 - DNA, 19 bp, Homo sapiens
  siRNA target sequence for KIAA0893 (NM_014969.3,2458-2476).
gcaggggattgtaacattt

SEQ ID NO: 346541 - DNA, 19 bp, Homo sapiens
  siRNA target sequence for KIAA0893 (NM_014969.3,2461-2479).
ggggattgtaacatttata

SEQ ID NO: 346542 - DNA, 19 bp, Homo sapiens
  siRNA target sequence for KIAA0893 (NM_014969.3,2498-2516).
gacagggcctccatgcttt

SEQ ID NO: 346543 - DNA, 19 bp, Homo sapiens
  siRNA target sequence for KIAA0893 (NM_014969.3,2502-2520).
gggcctccatgctttgagt

SEQ ID NO: 346544 - DNA, 19 bp, Homo sapiens
  siRNA target sequence for KIAA0893 (NM_014969.3,2532-2550).
gcatattttagcactttat

SEQ ID NO: 346545 - DNA, 19 bp, Homo sapiens
  siRNA target sequence for KIAA0893 (NM_014969.3,2632-2650).
cgtgttgttggcacaacat

SEQ ID NO: 346546 - DNA, 19 bp, Homo sapiens
  siRNA target sequence for KIAA0893 (NM_014969.3,2706-2724).
cttagccacaggtcaagaa

SEQ ID NO: 346547 - DNA, 19 bp, Homo sapiens
  siRNA target sequence for KIAA0893 (NM_014969.3,2710-2728).
gccacaggtcaagaagatt

SEQ ID NO: 346548 - DNA, 19 bp, Homo sapiens
  siRNA target sequence for KIAA0893 (NM_014969.3,2725-2743).
gattctagctgcatgttgt

SEQ ID NO: 346549 - DNA, 19 bp, Homo sapiens
  siRNA target sequence for KIAA0893 (NM_014969.3,2729-2747).
ctagctgcatgttgtatga

SEQ ID NO: 346550 - DNA, 19 bp, Homo sapiens
  siRNA target sequence for KIAA0893 (NM_014969.3,2733-2751).
ctgcatgttgtatgacata

SEQ ID NO: 346551 - DNA, 19 bp, Homo sapiens
  siRNA target sequence for KIAA0893 (NM_014969.3,2736-2754).
catgttgtatgacataaga

SEQ ID NO: 346552 - DNA, 19 bp, Homo sapiens
  siRNA target sequence for KIAA0893 (NM_014969.3,2762-2780).
gaatggtacaaagttatca

SEQ ID NO: 346553 - DNA, 19 bp, Homo sapiens
  siRNA target sequence for KIAA0893 (NM_014969.3,2832-2850).
cttgctaacaggctcttat

SEQ ID NO: 346554 - DNA, 19 bp, Homo sapiens
  siRNA target sequence for KIAA0893 (NM_014969.3,2840-2858).
caggctcttatgatatgaa

SEQ ID NO: 346555 - DNA, 19 bp, Homo sapiens
  siRNA target sequence for KIAA0893 (NM_014969.3,2891-2909).
ccaagcagcttcctatcat

SEQ ID NO: 346556 - DNA, 19 bp, Homo sapiens
  siRNA target sequence for KIAA1049 (NM_014972.1,277-295).
cgcttcgagctgataaaca

SEQ ID NO: 346557 - DNA, 19 bp, Homo sapiens
  siRNA target sequence for KIAA1049 (NM_014972.1,278-296).
gcttcgagctgataaacat

SEQ ID NO: 346558 - DNA, 19 bp, Homo sapiens
  siRNA target sequence for KIAA1049 (NM_014972.1,384-402).
gggtcagcgtggaaacaca

SEQ ID NO: 346559 - DNA, 19 bp, Homo sapiens
  siRNA target sequence for KIAA1049 (NM_014972.1,524-542).
cggaaaacggactagaaga

SEQ ID NO: 346560 - DNA, 19 bp, Homo sapiens
  siRNA target sequence for KIAA1049 (NM_014972.1,525-543).
ggaaaacggactagaagat

SEQ ID NO: 346561 - DNA, 19 bp, Homo sapiens
  siRNA target sequence for KIAA1049 (NM_014972.1,526-544).
gaaaacggactagaagata

SEQ ID NO: 346562 - DNA, 19 bp, Homo sapiens
  siRNA target sequence for KIAA1049 (NM_014972.1,902-920).
ctatggagccgaacaacat

SEQ ID NO: 346563 - DNA, 19 bp, Homo sapiens
  siRNA target sequence for KIAA1049 (NM_014972.1,975-993).
cgatgcctgccgctttcaa

SEQ ID NO: 346564 - DNA, 19 bp, Homo sapiens
  siRNA target sequence for KIAA1049 (NM_014972.1,1332-1350).
gtcccagctccctaatttt

SEQ ID NO: 346565 - DNA, 19 bp, Homo sapiens
  siRNA target sequence for KIAA1049 (NM_014972.1,1358-1376).
ctgttccactggcgtattt

SEQ ID NO: 346566 - DNA, 19 bp, Homo sapiens
  siRNA target sequence for KIAA1049 (NM_014972.1,1546-1564).
ggacccaatgctgaaataa

SEQ ID NO: 346567 - DNA, 19 bp, Homo sapiens
  siRNA target sequence for KIAA1049 (NM_014972.1,1741-1759).
cagcgtgcacccaggaata

SEQ ID NO: 346568 - DNA, 19 bp, Homo sapiens
  siRNA target sequence for KIAA1049 (NM_014972.1,1830-1848).
gtctgtgatggggtttgat

SEQ ID NO: 346569 - DNA, 19 bp, Homo sapiens
  siRNA target sequence for KIAA1049 (NM_014972.1,1855-1873).
cctccttcggacacaatct

SEQ ID NO: 346570 - DNA, 19 bp, Homo sapiens
  siRNA target sequence for KIAA1049 (NM_014972.1,1856-1874).
ctccttcggacacaatcta

SEQ ID NO: 346571 - DNA, 19 bp, Homo sapiens
  siRNA target sequence for KIAA1049 (NM_014972.1,1940-1958).
ggtcactgttgccaaacta

SEQ ID NO: 346572 - DNA, 19 bp, Homo sapiens
  siRNA target sequence for KIAA1049 (NM_014972.1,1945-1963).
ctgttgccaaactatacca

SEQ ID NO: 346573 - DNA, 19 bp, Homo sapiens
  siRNA target sequence for PCNX (NM_014982.1,607-625).
cttctaccatgattatagt

SEQ ID NO: 346574 - DNA, 19 bp, Homo sapiens
  siRNA target sequence for PCNX (NM_014982.1,652-670).
ctgttttcattgttctgaa

SEQ ID NO: 346575 - DNA, 19 bp, Homo sapiens
  siRNA target sequence for PCNX (NM_014982.1,720-738).
gataggactgcaaatgagt

SEQ ID NO: 346576 - DNA, 19 bp, Homo sapiens
  siRNA target sequence for PCNX (NM_014982.1,740-758).
cacggatcagcgaaccaaa

SEQ ID NO: 346577 - DNA, 19 bp, Homo sapiens
  siRNA target sequence for PCNX (NM_014982.1,759-777).
gctgaacaaggcaactgtt

SEQ ID NO: 346578 - DNA, 19 bp, Homo sapiens
  siRNA target sequence for PCNX (NM_014982.1,903-921).
ccaagcaaccagattggat

SEQ ID NO: 346579 - DNA, 19 bp, Homo sapiens
  siRNA target sequence for PCNX (NM_014982.1,982-1000).
cttctgatgatatcagttt

SEQ ID NO: 346580 - DNA, 19 bp, Homo sapiens
  siRNA target sequence for PCNX (NM_014982.1,1147-1165).
gggacttcagtgacaaagt

SEQ ID NO: 346581 - DNA, 19 bp, Homo sapiens
  siRNA target sequence for PCNX (NM_014982.1,1164-1182).
gtgaacctgccaagtcata

SEQ ID NO: 346582 - DNA, 19 bp, Homo sapiens
  siRNA target sequence for PCNX (NM_014982.1,1237-1255).
cttctcttgtacctttaca

SEQ ID NO: 346583 - DNA, 19 bp, Homo sapiens
  siRNA target sequence for PCNX (NM_014982.1,1254-1272).
cactcacactcttatagaa

SEQ ID NO: 346584 - DNA, 19 bp, Homo sapiens
  siRNA target sequence for PCNX (NM_014982.1,1256-1274).
ctcacactcttatagaaaa

SEQ ID NO: 346585 - DNA, 19 bp, Homo sapiens
  siRNA target sequence for PCNX (NM_014982.1,1329-1347).
gacacttcactgaatgatt

SEQ ID NO: 346586 - DNA, 19 bp, Homo sapiens
  siRNA target sequence for PCNX (NM_014982.1,1361-1379).
gcaaagacgtggattagat

SEQ ID NO: 346587 - DNA, 19 bp, Homo sapiens
  siRNA target sequence for PCNX (NM_014982.1,1577-1595).
gagtagtgggtcaacagaa

SEQ ID NO: 346588 - DNA, 19 bp, Homo sapiens
  siRNA target sequence for PCNX (NM_014982.1,1582-1600).
gtgggtcaacagaaagcta

SEQ ID NO: 346589 - DNA, 19 bp, Homo sapiens
  siRNA target sequence for PCNX (NM_014982.1,1609-1627).
gaacggaccgggacactaa

SEQ ID NO: 346590 - DNA, 19 bp, Homo sapiens
  siRNA target sequence for PCNX (NM_014982.1,1613-1631).
ggaccgggacactaacagt

SEQ ID NO: 346591 - DNA, 19 bp, Homo sapiens
  siRNA target sequence for PCNX (NM_014982.1,1614-1632).
gaccgggacactaacagta

SEQ ID NO: 346592 - DNA, 19 bp, Homo sapiens
  siRNA target sequence for PCNX (NM_014982.1,1630-1648).
gtactgtcagcagctataa

SEQ ID NO: 346593 - DNA, 19 bp, Homo sapiens
  siRNA target sequence for PCNX (NM_014982.1,1658-1676).
gaccagctcaactcacata

SEQ ID NO: 346594 - DNA, 19 bp, Homo sapiens
  siRNA target sequence for PCNX (NM_014982.1,1660-1678).
ccagctcaactcacataga

SEQ ID NO: 346595 - DNA, 19 bp, Homo sapiens
  siRNA target sequence for PCNX (NM_014982.1,1694-1712).
gcatgaggagtctcctaaa

SEQ ID NO: 346596 - DNA, 19 bp, Homo sapiens
  siRNA target sequence for PCNX (NM_014982.1,1790-1808).
gactagcagtgaaaagatt

SEQ ID NO: 346597 - DNA, 19 bp, Homo sapiens
  siRNA target sequence for PCNX (NM_014982.1,1926-1944).
ccccatgcaaatgaattta

SEQ ID NO: 346598 - DNA, 19 bp, Homo sapiens
  siRNA target sequence for PCNX (NM_014982.1,2066-2084).
ggatgttcgacctaaatct

SEQ ID NO: 346599 - DNA, 19 bp, Homo sapiens
  siRNA target sequence for PCNX (NM_014982.1,2067-2085).
gatgttcgacctaaatctt

SEQ ID NO: 346600 - DNA, 19 bp, Homo sapiens
  siRNA target sequence for PCNX (NM_014982.1,2070-2088).
gttcgacctaaatcttcta

SEQ ID NO: 346601 - DNA, 19 bp, Homo sapiens
  siRNA target sequence for PCNX (NM_014982.1,2148-2166).
cgggctagcagttttgatt

SEQ ID NO: 346602 - DNA, 19 bp, Homo sapiens
  siRNA target sequence for PCNX (NM_014982.1,2151-2169).
gctagcagttttgattcaa

SEQ ID NO: 346603 - DNA, 19 bp, Homo sapiens
  siRNA target sequence for PCNX (NM_014982.1,2170-2188).
gccggcatagggactatgt

SEQ ID NO: 346604 - DNA, 19 bp, Homo sapiens
  siRNA target sequence for PCNX (NM_014982.1,2171-2189).
ccggcatagggactatgtt

SEQ ID NO: 346605 - DNA, 19 bp, Homo sapiens
  siRNA target sequence for PCNX (NM_014982.1,2216-2234).
gccacacagtgctatattt

SEQ ID NO: 346606 - DNA, 19 bp, Homo sapiens
  siRNA target sequence for PCNX (NM_014982.1,2270-2288).
gagtagagcatcaagtgtt

SEQ ID NO: 346607 - DNA, 19 bp, Homo sapiens
  siRNA target sequence for PCNX (NM_014982.1,2380-2398).
ccaaacacactcataaaga

SEQ ID NO: 346608 - DNA, 19 bp, Homo sapiens
  siRNA target sequence for PCNX (NM_014982.1,2466-2484).
gcaacacgacggacttcta

SEQ ID NO: 346609 - DNA, 19 bp, Homo sapiens
  siRNA target sequence for PCNX (NM_014982.1,2475-2493).
cggacttctagcacaaata

SEQ ID NO: 346610 - DNA, 19 bp, Homo sapiens
  siRNA target sequence for PCNX (NM_014982.1,2477-2495).
gacttctagcacaaatagt

SEQ ID NO: 346611 - DNA, 19 bp, Homo sapiens
  siRNA target sequence for PCNX (NM_014982.1,2534-2552).
cacagtagcatgtttgaat

SEQ ID NO: 346612 - DNA, 19 bp, Homo sapiens
  siRNA target sequence for PCNX (NM_014982.1,2637-2655).
ctagatgagctatctttat

SEQ ID NO: 346613 - DNA, 19 bp, Homo sapiens
  siRNA target sequence for PCNX (NM_014982.1,2661-2679).
cgggcttcccagttagaga

SEQ ID NO: 346614 - DNA, 19 bp, Homo sapiens
  siRNA target sequence for PCNX (NM_014982.1,2682-2700).
gtcactcgatctaggaata

SEQ ID NO: 346615 - DNA, 19 bp, Homo sapiens
  siRNA target sequence for PCNX (NM_014982.1,2686-2704).
ctcgatctaggaatagctt

SEQ ID NO: 346616 - DNA, 19 bp, Homo sapiens
  siRNA target sequence for PCNX (NM_014982.1,2770-2788).
gcgaggaggcagtgtcatt

SEQ ID NO: 346617 - DNA, 19 bp, Homo sapiens
  siRNA target sequence for PCNX (NM_014982.1,2792-2810).
ccgtgaacgcagcacattt

SEQ ID NO: 346618 - DNA, 19 bp, Homo sapiens
  siRNA target sequence for PCNX (NM_014982.1,2793-2811).
cgtgaacgcagcacattta

SEQ ID NO: 346619 - DNA, 19 bp, Homo sapiens
  siRNA target sequence for PCNX (NM_014982.1,3011-3029).
ccacttagaagcatcacat

SEQ ID NO: 346620 - DNA, 19 bp, Homo sapiens
  siRNA target sequence for PCNX (NM_014982.1,3021-3039).
gcatcacatgacaatgcat

SEQ ID NO: 346621 - DNA, 19 bp, Homo sapiens
  siRNA target sequence for PCNX (NM_014982.1,3112-3130).
gtgatatgtcacttgtgaa

SEQ ID NO: 346622 - DNA, 19 bp, Homo sapiens
  siRNA target sequence for PCNX (NM_014982.1,3190-3208).
gttctacctcagttcgatt

SEQ ID NO: 346623 - DNA, 19 bp, Homo sapiens
  siRNA target sequence for PCNX (NM_014982.1,3193-3211).
ctacctcagttcgatttta

SEQ ID NO: 346624 - DNA, 19 bp, Homo sapiens
  siRNA target sequence for PCNX (NM_014982.1,3229-3247).
ctctcccacagattcgatt

SEQ ID NO: 346625 - DNA, 19 bp, Homo sapiens
  siRNA target sequence for PCNX (NM_014982.1,3233-3251).
cccacagattcgattgaat

SEQ ID NO: 346626 - DNA, 19 bp, Homo sapiens
  siRNA target sequence for PCNX (NM_014982.1,3234-3252).
ccacagattcgattgaata

SEQ ID NO: 346627 - DNA, 19 bp, Homo sapiens
  siRNA target sequence for PCNX (NM_014982.1,3239-3257).
gattcgattgaatagacta

SEQ ID NO: 346628 - DNA, 19 bp, Homo sapiens
  siRNA target sequence for PCNX (NM_014982.1,3243-3261).
cgattgaatagactattga

SEQ ID NO: 346629 - DNA, 19 bp, Homo sapiens
  siRNA target sequence for PCNX (NM_014982.1,3307-3325).
ctgacttggcagctactta

SEQ ID NO: 346630 - DNA, 19 bp, Homo sapiens
  siRNA target sequence for PCNX (NM_014982.1,3343-3361).
ctgcccaaaaggttaaaca

SEQ ID NO: 346631 - DNA, 19 bp, Homo sapiens
  siRNA target sequence for PCNX (NM_014982.1,3345-3363).
gcccaaaaggttaaacact

SEQ ID NO: 346632 - DNA, 19 bp, Homo sapiens
  siRNA target sequence for PCNX (NM_014982.1,3346-3364).
cccaaaaggttaaacacta

SEQ ID NO: 346633 - DNA, 19 bp, Homo sapiens
  siRNA target sequence for PCNX (NM_014982.1,3347-3365).
ccaaaaggttaaacactat

SEQ ID NO: 346634 - DNA, 19 bp, Homo sapiens
  siRNA target sequence for PCNX (NM_014982.1,3360-3378).
cactattatcgcttttgga

SEQ ID NO: 346635 - DNA, 19 bp, Homo sapiens
  siRNA target sequence for PCNX (NM_014982.1,3421-3439).
cacttttggccctgtttga

SEQ ID NO: 346636 - DNA, 19 bp, Homo sapiens
  siRNA target sequence for PCNX (NM_014982.1,3423-3441).
cttttggccctgtttgata

SEQ ID NO: 346637 - DNA, 19 bp, Homo sapiens
  siRNA target sequence for PCNX (NM_014982.1,3428-3446).
ggccctgtttgatagaaat

SEQ ID NO: 346638 - DNA, 19 bp, Homo sapiens
  siRNA target sequence for PCNX (NM_014982.1,3431-3449).
cctgtttgatagaaatcgt

SEQ ID NO: 346639 - DNA, 19 bp, Homo sapiens
  siRNA target sequence for PCNX (NM_014982.1,3505-3523).
gatctattcttctcataca

SEQ ID NO: 346640 - DNA, 19 bp, Homo sapiens
  siRNA target sequence for PCNX (NM_014982.1,3522-3540).
caaggattcttcagagata

SEQ ID NO: 346641 - DNA, 19 bp, Homo sapiens
  siRNA target sequence for PCNX (NM_014982.1,3577-3595).
gtcaatactcactgcttaa

SEQ ID NO: 346642 - DNA, 19 bp, Homo sapiens
  siRNA target sequence for PCNX (NM_014982.1,3596-3614).
gagtgttcaaccagattct

SEQ ID NO: 346643 - DNA, 19 bp, Homo sapiens
  siRNA target sequence for PCNX (NM_014982.1,3625-3643).
gacatggtcataatcgtat

SEQ ID NO: 346644 - DNA, 19 bp, Homo sapiens
  siRNA target sequence for PCNX (NM_014982.1,3639-3657).
cgtatcattgcctacagta

SEQ ID NO: 346645 - DNA, 19 bp, Homo sapiens
  siRNA target sequence for PCNX (NM_014982.1,3649-3667).
cctacagtagaccagttta

SEQ ID NO: 346646 - DNA, 19 bp, Homo sapiens
  siRNA target sequence for PCNX (NM_014982.1,3650-3668).
ctacagtagaccagtttat

SEQ ID NO: 346647 - DNA, 19 bp, Homo sapiens
  siRNA target sequence for PCNX (NM_014982.1,3673-3691).
gcatatgttgcggtcttat

SEQ ID NO: 346648 - DNA, 19 bp, Homo sapiens
  siRNA target sequence for PCNX (NM_014982.1,3722-3740).
gactgcaaccaagttcaaa

SEQ ID NO: 346649 - DNA, 19 bp, Homo sapiens
  siRNA target sequence for PCNX (NM_014982.1,3726-3744).
gcaaccaagttcaaattat

SEQ ID NO: 346650 - DNA, 19 bp, Homo sapiens
  siRNA target sequence for PCNX (NM_014982.1,3760-3778).
ccaatccactggtgtttat

SEQ ID NO: 346651 - DNA, 19 bp, Homo sapiens
  siRNA target sequence for PCNX (NM_014982.1,3761-3779).
caatccactggtgtttata

SEQ ID NO: 346652 - DNA, 19 bp, Homo sapiens
  siRNA target sequence for PCNX (NM_014982.1,3787-3805).
gggatttagttatagtgtt

SEQ ID NO: 346653 - DNA, 19 bp, Homo sapiens
  siRNA target sequence for PCNX (NM_014982.1,3808-3826).
cactctgtttcccaatagt

SEQ ID NO: 346654 - DNA, 19 bp, Homo sapiens
  siRNA target sequence for PCNX (NM_014982.1,3845-3863).
gcctcaggtgaatacattt

SEQ ID NO: 346655 - DNA, 19 bp, Homo sapiens
  siRNA target sequence for PCNX (NM_014982.1,3847-3865).
ctcaggtgaatacatttgt

SEQ ID NO: 346656 - DNA, 19 bp, Homo sapiens
  siRNA target sequence for PCNX (NM_014982.1,3887-3905).
ggatattcatatttttggt

SEQ ID NO: 346657 - DNA, 19 bp, Homo sapiens
  siRNA target sequence for PCNX (NM_014982.1,3903-3921).
ggtggtaatgccactacaa

SEQ ID NO: 346658 - DNA, 19 bp, Homo sapiens
  siRNA target sequence for PCNX (NM_014982.1,3922-3940).
gcctgcttgcagcacttta

SEQ ID NO: 346659 - DNA, 19 bp, Homo sapiens
  siRNA target sequence for PCNX (NM_014982.1,3924-3942).
ctgcttgcagcactttaca

SEQ ID NO: 346660 - DNA, 19 bp, Homo sapiens
  siRNA target sequence for PCNX (NM_014982.1,3926-3944).
gcttgcagcactttacagt

SEQ ID NO: 346661 - DNA, 19 bp, Homo sapiens
  siRNA target sequence for PCNX (NM_014982.1,3960-3978).
gttgcagtagccttattgt

SEQ ID NO: 346662 - DNA, 19 bp, Homo sapiens
  siRNA target sequence for PCNX (NM_014982.1,3969-3987).
gccttattgtatggattat

SEQ ID NO: 346663 - DNA, 19 bp, Homo sapiens
  siRNA target sequence for PCNX (NM_014982.1,4009-4027).
cttgggatggccagcatat

SEQ ID NO: 346664 - DNA, 19 bp, Homo sapiens
  siRNA target sequence for PCNX (NM_014982.1,4013-4031).
ggatggccagcatattcca

SEQ ID NO: 346665 - DNA, 19 bp, Homo sapiens
  siRNA target sequence for PCNX (NM_014982.1,4023-4041).
catattccagtacttttct

SEQ ID NO: 346666 - DNA, 19 bp, Homo sapiens
  siRNA target sequence for PCNX (NM_014982.1,4096-4114).
gtgatccatctgtactttt

SEQ ID NO: 346667 - DNA, 19 bp, Homo sapiens
  siRNA target sequence for PCNX (NM_014982.1,4167-4185).
gaccctctatctgaagtaa

SEQ ID NO: 346668 - DNA, 19 bp, Homo sapiens
  siRNA target sequence for PCNX (NM_014982.1,4169-4187).
ccctctatctgaagtaaaa

SEQ ID NO: 346669 - DNA, 19 bp, Homo sapiens
  siRNA target sequence for PCNX (NM_014982.1,4218-4236).
gttagtgagcgattacagt

SEQ ID NO: 346670 - DNA, 19 bp, Homo sapiens
  siRNA target sequence for PCNX (NM_014982.1,4233-4251).
cagtctgacctggtagtat

SEQ ID NO: 346671 - DNA, 19 bp, Homo sapiens
  siRNA target sequence for PCNX (NM_014982.1,4237-4255).
ctgacctggtagtatgcat

SEQ ID NO: 346672 - DNA, 19 bp, Homo sapiens
  siRNA target sequence for PCNX (NM_014982.1,4241-4259).
cctggtagtatgcattgta

SEQ ID NO: 346673 - DNA, 19 bp, Homo sapiens
  siRNA target sequence for PCNX (NM_014982.1,4242-4260).
ctggtagtatgcattgtaa

SEQ ID NO: 346674 - DNA, 19 bp, Homo sapiens
  siRNA target sequence for PCNX (NM_014982.1,4244-4262).
ggtagtatgcattgtaatt

SEQ ID NO: 346675 - DNA, 19 bp, Homo sapiens
  siRNA target sequence for PCNX (NM_014982.1,4315-4333).
ctgccctcaagtatgtgtt

SEQ ID NO: 346676 - DNA, 19 bp, Homo sapiens
  siRNA target sequence for PCNX (NM_014982.1,4374-4392).
gtgctgcctcaagttagaa

SEQ ID NO: 346677 - DNA, 19 bp, Homo sapiens
  siRNA target sequence for PCNX (NM_014982.1,4398-4416).
ctaccatggcactgtttct

SEQ ID NO: 346678 - DNA, 19 bp, Homo sapiens
  siRNA target sequence for PCNX (NM_014982.1,4427-4445).
gctaaagacactagagtat

SEQ ID NO: 346679 - DNA, 19 bp, Homo sapiens
  siRNA target sequence for PCNX (NM_014982.1,4435-4453).
cactagagtataatcagta

SEQ ID NO: 346680 - DNA, 19 bp, Homo sapiens
  siRNA target sequence for PCNX (NM_014982.1,4461-4479).
cgaaatgcagccactatga

SEQ ID NO: 346681 - DNA, 19 bp, Homo sapiens
  siRNA target sequence for PCNX (NM_014982.1,4462-4480).
gaaatgcagccactatgat

SEQ ID NO: 346682 - DNA, 19 bp, Homo sapiens
  siRNA target sequence for PCNX (NM_014982.1,4562-4580).
cagcagtgcagagacaatt

SEQ ID NO: 346683 - DNA, 19 bp, Homo sapiens
  siRNA target sequence for PCNX (NM_014982.1,4603-4621).
cagaattaggtgctttaat

SEQ ID NO: 346684 - DNA, 19 bp, Homo sapiens
  siRNA target sequence for PCNX (NM_014982.1,4643-4661).
gttgctacgatcctctttt

SEQ ID NO: 346685 - DNA, 19 bp, Homo sapiens
  siRNA target sequence for PCNX (NM_014982.1,4647-4665).
ctacgatcctcttttagca

SEQ ID NO: 346686 - DNA, 19 bp, Homo sapiens
  siRNA target sequence for PCNX (NM_014982.1,4657-4675).
cttttagcagccctacata

SEQ ID NO: 346687 - DNA, 19 bp, Homo sapiens
  siRNA target sequence for PCNX (NM_014982.1,4663-4681).
gcagccctacatatcagta

SEQ ID NO: 346688 - DNA, 19 bp, Homo sapiens
  siRNA target sequence for PCNX (NM_014982.1,4664-4682).
cagccctacatatcagtat

SEQ ID NO: 346689 - DNA, 19 bp, Homo sapiens
  siRNA target sequence for PCNX (NM_014982.1,4666-4684).
gccctacatatcagtatgt

SEQ ID NO: 346690 - DNA, 19 bp, Homo sapiens
  siRNA target sequence for PCNX (NM_014982.1,4668-4686).
cctacatatcagtatgtta

SEQ ID NO: 346691 - DNA, 19 bp, Homo sapiens
  siRNA target sequence for PCNX (NM_014982.1,4745-4763).
gctgttggatctcttcttt

SEQ ID NO: 346692 - DNA, 19 bp, Homo sapiens
  siRNA target sequence for PCNX (NM_014982.1,4781-4799).
caagctttgggaactactt

SEQ ID NO: 346693 - DNA, 19 bp, Homo sapiens
  siRNA target sequence for PCNX (NM_014982.1,4784-4802).
gctttgggaactactttat

SEQ ID NO: 346694 - DNA, 19 bp, Homo sapiens
  siRNA target sequence for PCNX (NM_014982.1,4785-4803).
ctttgggaactactttata

SEQ ID NO: 346695 - DNA, 19 bp, Homo sapiens
  siRNA target sequence for PCNX (NM_014982.1,4808-4826).
gcagtttgtgtatacctat

SEQ ID NO: 346696 - DNA, 19 bp, Homo sapiens
  siRNA target sequence for PCNX (NM_014982.1,4809-4827).
cagtttgtgtatacctata

SEQ ID NO: 346697 - DNA, 19 bp, Homo sapiens
  siRNA target sequence for PCNX (NM_014982.1,4955-4973).
ctttctgggaagtgcaata

SEQ ID NO: 346698 - DNA, 19 bp, Homo sapiens
  siRNA target sequence for PCNX (NM_014982.1,4959-4977).
ctgggaagtgcaatattca

SEQ ID NO: 346699 - DNA, 19 bp, Homo sapiens
  siRNA target sequence for PCNX (NM_014982.1,5009-5027).
ggagagagactataacaca

SEQ ID NO: 346700 - DNA, 19 bp, Homo sapiens
  siRNA target sequence for PCNX (NM_014982.1,5010-5028).
gagagagactataacacaa

SEQ ID NO: 346701 - DNA, 19 bp, Homo sapiens
  siRNA target sequence for PCNX (NM_014982.1,5012-5030).
gagagactataacacaaaa

SEQ ID NO: 346702 - DNA, 19 bp, Homo sapiens
  siRNA target sequence for PCNX (NM_014982.1,5031-5049).
cgagtggatcattcaaata

SEQ ID NO: 346703 - DNA, 19 bp, Homo sapiens
  siRNA target sequence for PCNX (NM_014982.1,5034-5052).
gtggatcattcaaatacca

SEQ ID NO: 346704 - DNA, 19 bp, Homo sapiens
  siRNA target sequence for PCNX (NM_014982.1,5057-5075).
ggcttcccagcttgataga

SEQ ID NO: 346705 - DNA, 19 bp, Homo sapiens
  siRNA target sequence for PCNX (NM_014982.1,5058-5076).
gcttcccagcttgatagaa

SEQ ID NO: 346706 - DNA, 19 bp, Homo sapiens
  siRNA target sequence for PCNX (NM_014982.1,5108-5126).
catcttttatgagcattta

SEQ ID NO: 346707 - DNA, 19 bp, Homo sapiens
  siRNA target sequence for PCNX (NM_014982.1,5146-5164).
gcctctgtggtgatttgct

SEQ ID NO: 346708 - DNA, 19 bp, Homo sapiens
  siRNA target sequence for PCNX (NM_014982.1,5147-5165).
cctctgtggtgatttgcta

SEQ ID NO: 346709 - DNA, 19 bp, Homo sapiens
  siRNA target sequence for PCNX (NM_014982.1,5188-5206).
gtacaggggactgtttcat

SEQ ID NO: 346710 - DNA, 19 bp, Homo sapiens
  siRNA target sequence for PCNX (NM_014982.1,5204-5222).
catccttgcctctgactat

SEQ ID NO: 346711 - DNA, 19 bp, Homo sapiens
  siRNA target sequence for PCNX (NM_014982.1,5215-5233).
ctgactatctcaatgcatt

SEQ ID NO: 346712 - DNA, 19 bp, Homo sapiens
  siRNA target sequence for PCNX (NM_014982.1,5230-5248).
cattagtacaccttataga

SEQ ID NO: 346713 - DNA, 19 bp, Homo sapiens
  siRNA target sequence for PCNX (NM_014982.1,5254-5272).
gcaatggtctggtcacttt

SEQ ID NO: 346714 - DNA, 19 bp, Homo sapiens
  siRNA target sequence for PCNX (NM_014982.1,5274-5292).
cagctgcggggacttgaat

SEQ ID NO: 346715 - DNA, 19 bp, Homo sapiens
  siRNA target sequence for PCNX (NM_014982.1,5277-5295).
ctgcggggacttgaattca

SEQ ID NO: 346716 - DNA, 19 bp, Homo sapiens
  siRNA target sequence for PCNX (NM_014982.1,5279-5297).
gcggggacttgaattcaga

SEQ ID NO: 346717 - DNA, 19 bp, Homo sapiens
  siRNA target sequence for PCNX (NM_014982.1,5429-5447).
gctagcttgggaagtgata

SEQ ID NO: 346718 - DNA, 19 bp, Homo sapiens
  siRNA target sequence for PCNX (NM_014982.1,5439-5457).
gaagtgatagtcacaaagt

SEQ ID NO: 346719 - DNA, 19 bp, Homo sapiens
  siRNA target sequence for PCNX (NM_014982.1,5442-5460).
gtgatagtcacaaagtaca

SEQ ID NO: 346720 - DNA, 19 bp, Homo sapiens
  siRNA target sequence for PCNX (NM_014982.1,5444-5462).
gatagtcacaaagtacatt

SEQ ID NO: 346721 - DNA, 19 bp, Homo sapiens
  siRNA target sequence for PCNX (NM_014982.1,5494-5512).
ctgcttctatgcttcaagt

SEQ ID NO: 346722 - DNA, 19 bp, Homo sapiens
  siRNA target sequence for PCNX (NM_014982.1,5513-5531).
ctttgatcttcggaaagta

SEQ ID NO: 346723 - DNA, 19 bp, Homo sapiens
  siRNA target sequence for PCNX (NM_014982.1,5547-5565).
gtcaagggtatcatttatt

SEQ ID NO: 346724 - DNA, 19 bp, Homo sapiens
  siRNA target sequence for PCNX (NM_014982.1,5549-5567).
caagggtatcatttattat

SEQ ID NO: 346725 - DNA, 19 bp, Homo sapiens
  siRNA target sequence for PCNX (NM_014982.1,5633-5651).
gtgtgctgatcgcaattat

SEQ ID NO: 346726 - DNA, 19 bp, Homo sapiens
  siRNA target sequence for PCNX (NM_014982.1,5655-5673).
gatgtggacccgaccttta

SEQ ID NO: 346727 - DNA, 19 bp, Homo sapiens
  siRNA target sequence for PCNX (NM_014982.1,5660-5678).
ggacccgacctttaatcca

SEQ ID NO: 346728 - DNA, 19 bp, Homo sapiens
  siRNA target sequence for PCNX (NM_014982.1,5661-5679).
gacccgacctttaatccaa

SEQ ID NO: 346729 - DNA, 19 bp, Homo sapiens
  siRNA target sequence for PCNX (NM_014982.1,5665-5683).
cgacctttaatccaaacat

SEQ ID NO: 346730 - DNA, 19 bp, Homo sapiens
  siRNA target sequence for PCNX (NM_014982.1,5666-5684).
gacctttaatccaaacatt

SEQ ID NO: 346731 - DNA, 19 bp, Homo sapiens
  siRNA target sequence for PCNX (NM_014982.1,5702-5720).
ccgactggcaggcatatct

SEQ ID NO: 346732 - DNA, 19 bp, Homo sapiens
  siRNA target sequence for PCNX (NM_014982.1,5703-5721).
cgactggcaggcatatcta

SEQ ID NO: 346733 - DNA, 19 bp, Homo sapiens
  siRNA target sequence for PCNX (NM_014982.1,5713-5731).
gcatatctagggagagttt

SEQ ID NO: 346734 - DNA, 19 bp, Homo sapiens
  siRNA target sequence for PCNX (NM_014982.1,5724-5742).
gagagtttctgtgtgattt

SEQ ID NO: 346735 - DNA, 19 bp, Homo sapiens
  siRNA target sequence for PCNX (NM_014982.1,5809-5827).
ccctagtgactctctgtta

SEQ ID NO: 346736 - DNA, 19 bp, Homo sapiens
  siRNA target sequence for PCNX (NM_014982.1,5810-5828).
cctagtgactctctgttat

SEQ ID NO: 346737 - DNA, 19 bp, Homo sapiens
  siRNA target sequence for PCNX (NM_014982.1,5859-5877).
gggactgcatcccatcata

SEQ ID NO: 346738 - DNA, 19 bp, Homo sapiens
  siRNA target sequence for PCNX (NM_014982.1,5860-5878).
ggactgcatcccatcatat

SEQ ID NO: 346739 - DNA, 19 bp, Homo sapiens
  siRNA target sequence for PCNX (NM_014982.1,5870-5888).
ccatcatatgtccagtaat

SEQ ID NO: 346740 - DNA, 19 bp, Homo sapiens
  siRNA target sequence for PCNX (NM_014982.1,5892-5910).
gagtcattcctctatggat

SEQ ID NO: 346741 - DNA, 19 bp, Homo sapiens
  siRNA target sequence for PCNX (NM_014982.1,5907-5925).
ggattgcatgccctattta

SEQ ID NO: 346742 - DNA, 19 bp, Homo sapiens
  siRNA target sequence for PCNX (NM_014982.1,5931-5949).
gatttccgtatttcttcaa

SEQ ID NO: 346743 - DNA, 19 bp, Homo sapiens
  siRNA target sequence for PCNX (NM_014982.1,5936-5954).
ccgtatttcttcaattcga

SEQ ID NO: 346744 - DNA, 19 bp, Homo sapiens
  siRNA target sequence for PCNX (NM_014982.1,5970-5988).
gctgacatggaattgctaa

SEQ ID NO: 346745 - DNA, 19 bp, Homo sapiens
  siRNA target sequence for PCNX (NM_014982.1,5973-5991).
gacatggaattgctaagaa

SEQ ID NO: 346746 - DNA, 19 bp, Homo sapiens
  siRNA target sequence for PCNX (NM_014982.1,6006-6024).
gggatccgtatgtccatta

SEQ ID NO: 346747 - DNA, 19 bp, Homo sapiens
  siRNA target sequence for PCNX (NM_014982.1,6007-6025).
ggatccgtatgtccattaa

SEQ ID NO: 346748 - DNA, 19 bp, Homo sapiens
  siRNA target sequence for PCNX (NM_014982.1,6008-6026).
gatccgtatgtccattaaa

SEQ ID NO: 346749 - DNA, 19 bp, Homo sapiens
  siRNA target sequence for PCNX (NM_014982.1,6068-6086).
ccctactgtgctctatgaa

SEQ ID NO: 346750 - DNA, 19 bp, Homo sapiens
  siRNA target sequence for PCNX (NM_014982.1,6077-6095).
gctctatgaagccatagta

SEQ ID NO: 346751 - DNA, 19 bp, Homo sapiens
  siRNA target sequence for PCNX (NM_014982.1,6078-6096).
ctctatgaagccatagtat

SEQ ID NO: 346752 - DNA, 19 bp, Homo sapiens
  siRNA target sequence for PCNX (NM_014982.1,6080-6098).
ctatgaagccatagtatct

SEQ ID NO: 346753 - DNA, 19 bp, Homo sapiens
  siRNA target sequence for PCNX (NM_014982.1,6248-6266).
gagcttcagggtcattaaa

SEQ ID NO: 346754 - DNA, 19 bp, Homo sapiens
  siRNA target sequence for PCNX (NM_014982.1,6250-6268).
gcttcagggtcattaaagt

SEQ ID NO: 346755 - DNA, 19 bp, Homo sapiens
  siRNA target sequence for PCNX (NM_014982.1,6254-6272).
cagggtcattaaagtgaat

SEQ ID NO: 346756 - DNA, 19 bp, Homo sapiens
  siRNA target sequence for PCNX (NM_014982.1,6256-6274).
gggtcattaaagtgaataa

SEQ ID NO: 346757 - DNA, 19 bp, Homo sapiens
  siRNA target sequence for PCNX (NM_014982.1,6308-6326).
gcaggagcttgtttttcta

SEQ ID NO: 346758 - DNA, 19 bp, Homo sapiens
  siRNA target sequence for PCNX (NM_014982.1,6386-6404).
gataaactcatcttgtgat

SEQ ID NO: 346759 - DNA, 19 bp, Homo sapiens
  siRNA target sequence for PCNX (NM_014982.1,6394-6412).
catcttgtgatcaacctat

SEQ ID NO: 346760 - DNA, 19 bp, Homo sapiens
  siRNA target sequence for PCNX (NM_014982.1,6409-6427).
ctattggctacccaatctt

SEQ ID NO: 346761 - DNA, 19 bp, Homo sapiens
  siRNA target sequence for PCNX (NM_014982.1,6458-6476).
cagccacgaacagcttaaa

SEQ ID NO: 346762 - DNA, 19 bp, Homo sapiens
  siRNA target sequence for PCNX (NM_014982.1,6462-6480).
cacgaacagcttaaagaca

SEQ ID NO: 346763 - DNA, 19 bp, Homo sapiens
  siRNA target sequence for PCNX (NM_014982.1,6464-6482).
cgaacagcttaaagacatt

SEQ ID NO: 346764 - DNA, 19 bp, Homo sapiens
  siRNA target sequence for PCNX (NM_014982.1,6537-6555).
cacaggcttaggaaaggtt

SEQ ID NO: 346765 - DNA, 19 bp, Homo sapiens
  siRNA target sequence for PCNX (NM_014982.1,6553-6571).
gttgcggagctggatgtaa

SEQ ID NO: 346766 - DNA, 19 bp, Homo sapiens
  siRNA target sequence for PCNX (NM_014982.1,6557-6575).
cggagctggatgtaacagt

SEQ ID NO: 346767 - DNA, 19 bp, Homo sapiens
  siRNA target sequence for PCNX (NM_014982.1,6576-6594).
ggtggcaatattgaagatt

SEQ ID NO: 346768 - DNA, 19 bp, Homo sapiens
  siRNA target sequence for PCNX (NM_014982.1,6662-6680).
cgtgacccagggaagcatt

SEQ ID NO: 346769 - DNA, 19 bp, Homo sapiens
  siRNA target sequence for PCNX (NM_014982.1,6885-6903).
ccttgtcggcgctcttcta

SEQ ID NO: 346770 - DNA, 19 bp, Homo sapiens
  siRNA target sequence for PCNX (NM_014982.1,6907-6925).
gtcagatatcgcttcgaaa

SEQ ID NO: 346771 - DNA, 19 bp, Homo sapiens
  siRNA target sequence for PCNX (NM_014982.1,6951-6969).
ctgtcgatggtgaaccaaa

SEQ ID NO: 346772 - DNA, 19 bp, Homo sapiens
  siRNA target sequence for PCNX (NM_014982.1,6955-6973).
cgatggtgaaccaaatgga

SEQ ID NO: 346773 - DNA, 19 bp, Homo sapiens
  siRNA target sequence for PCNX (NM_014982.1,7121-7139).
gccaggcaacaccttaagt

SEQ ID NO: 346774 - DNA, 19 bp, Homo sapiens
  siRNA target sequence for PCNX (NM_014982.1,7133-7151).
cttaagtcctgccaacaat

SEQ ID NO: 346775 - DNA, 19 bp, Homo sapiens
  siRNA target sequence for PCNX (NM_014982.1,7138-7156).
gtcctgccaacaattcaca

SEQ ID NO: 346776 - DNA, 19 bp, Homo sapiens
  siRNA target sequence for PCNX (NM_014982.1,7166-7184).
ggcagaagtgatttacaga

SEQ ID NO: 346777 - DNA, 19 bp, Homo sapiens
  siRNA target sequence for PCNX (NM_014982.1,7218-7236).
gggatcaacctgtctaaaa

SEQ ID NO: 346778 - DNA, 19 bp, Homo sapiens
  siRNA target sequence for PCNX (NM_014982.1,7401-7419).
ctggtccagattgatgata

SEQ ID NO: 346779 - DNA, 19 bp, Homo sapiens
  siRNA target sequence for PCNX (NM_014982.1,7403-7421).
ggtccagattgatgataaa

SEQ ID NO: 346780 - DNA, 19 bp, Homo sapiens
  siRNA target sequence for PCNX (NM_014982.1,7404-7422).
gtccagattgatgataaat

SEQ ID NO: 346781 - DNA, 19 bp, Homo sapiens
  siRNA target sequence for KIAA1117 (NM_015018.2,268-286).
cagaagagctggagttatt

SEQ ID NO: 346782 - DNA, 19 bp, Homo sapiens
  siRNA target sequence for KIAA1117 (NM_015018.2,319-337).
caattgacaaagcactaaa

SEQ ID NO: 346783 - DNA, 19 bp, Homo sapiens
  siRNA target sequence for KIAA1117 (NM_015018.2,498-516).
catcggaaggcgcttgaaa

SEQ ID NO: 346784 - DNA, 19 bp, Homo sapiens
  siRNA target sequence for KIAA1117 (NM_015018.2,501-519).
cggaaggcgcttgaaacat

SEQ ID NO: 346785 - DNA, 19 bp, Homo sapiens
  siRNA target sequence for KIAA1117 (NM_015018.2,502-520).
ggaaggcgcttgaaacata

SEQ ID NO: 346786 - DNA, 19 bp, Homo sapiens
  siRNA target sequence for KIAA1117 (NM_015018.2,503-521).
gaaggcgcttgaaacatat

SEQ ID NO: 346787 - DNA, 19 bp, Homo sapiens
  siRNA target sequence for KIAA1117 (NM_015018.2,507-525).
gcgcttgaaacatatgaaa

SEQ ID NO: 346788 - DNA, 19 bp, Homo sapiens
  siRNA target sequence for KIAA1117 (NM_015018.2,555-573).
cttgccaaagatctttttt

SEQ ID NO: 346789 - DNA, 19 bp, Homo sapiens
  siRNA target sequence for KIAA1117 (NM_015018.2,631-649).
cattgctcagtttgtatga

SEQ ID NO: 346790 - DNA, 19 bp, Homo sapiens
  siRNA target sequence for KIAA1117 (NM_015018.2,687-705).
ggtctacagggattgctta

SEQ ID NO: 346791 - DNA, 19 bp, Homo sapiens
  siRNA target sequence for KIAA1117 (NM_015018.2,695-713).
gggattgcttactggtatt

SEQ ID NO: 346792 - DNA, 19 bp, Homo sapiens
  siRNA target sequence for KIAA1117 (NM_015018.2,738-756).
gagtactatgagagaacaa

SEQ ID NO: 346793 - DNA, 19 bp, Homo sapiens
  siRNA target sequence for KIAA1117 (NM_015018.2,853-871).
ctggaatcacgtatgttct

SEQ ID NO: 346794 - DNA, 19 bp, Homo sapiens
  siRNA target sequence for KIAA1117 (NM_015018.2,863-881).
gtatgttcttgcccattta

SEQ ID NO: 346795 - DNA, 19 bp, Homo sapiens
  siRNA target sequence for KIAA1117 (NM_015018.2,867-885).
gttcttgcccatttaaaca

SEQ ID NO: 346796 - DNA, 19 bp, Homo sapiens
  siRNA target sequence for KIAA1117 (NM_015018.2,922-940).
gcagtgatattgagctaat

SEQ ID NO: 346797 - DNA, 19 bp, Homo sapiens
  siRNA target sequence for KIAA1117 (NM_015018.2,925-943).
gtgatattgagctaatggt

SEQ ID NO: 346798 - DNA, 19 bp, Homo sapiens
  siRNA target sequence for KIAA1117 (NM_015018.2,941-959).
ggtagaagcagtaagtact

SEQ ID NO: 346799 - DNA, 19 bp, Homo sapiens
  siRNA target sequence for KIAA1117 (NM_015018.2,942-960).
gtagaagcagtaagtactt

SEQ ID NO: 346800 - DNA, 19 bp, Homo sapiens
  siRNA target sequence for KIAA1117 (NM_015018.2,965-983).
gcaggactcaagtgtactt

SEQ ID NO: 346801 - DNA, 19 bp, Homo sapiens
  siRNA target sequence for KIAA1117 (NM_015018.2,997-1015).
cactggacctcatactctt

SEQ ID NO: 346802 - DNA, 19 bp, Homo sapiens
  siRNA target sequence for KIAA1117 (NM_015018.2,1041-1059).
gccactcgaccggatatga

SEQ ID NO: 346803 - DNA, 19 bp, Homo sapiens
  siRNA target sequence for KIAA1117 (NM_015018.2,1042-1060).
ccactcgaccggatatgat

SEQ ID NO: 346804 - DNA, 19 bp, Homo sapiens
  siRNA target sequence for KIAA1117 (NM_015018.2,1053-1071).
gatatgatcaggatcttgt

SEQ ID NO: 346805 - DNA, 19 bp, Homo sapiens
  siRNA target sequence for KIAA1117 (NM_015018.2,1070-1088).
gtcagcagcccttcatgta

SEQ ID NO: 346806 - DNA, 19 bp, Homo sapiens
  siRNA target sequence for KIAA1117 (NM_015018.2,1072-1090).
cagcagcccttcatgtagt

SEQ ID NO: 346807 - DNA, 19 bp, Homo sapiens
  siRNA target sequence for KIAA1117 (NM_015018.2,1091-1109).
gctaaggagggatatgtct

SEQ ID NO: 346808 - DNA, 19 bp, Homo sapiens
  siRNA target sequence for KIAA1117 (NM_015018.2,1097-1115).
gagggatatgtctctgaat

SEQ ID NO: 346809 - DNA, 19 bp, Homo sapiens
  siRNA target sequence for KIAA1117 (NM_015018.2,1101-1119).
gatatgtctctgaatcgaa

SEQ ID NO: 346810 - DNA, 19 bp, Homo sapiens
  siRNA target sequence for KIAA1117 (NM_015018.2,1108-1126).
ctctgaatcgaagacttta

SEQ ID NO: 346811 - DNA, 19 bp, Homo sapiens
  siRNA target sequence for KIAA1117 (NM_015018.2,1112-1130).
gaatcgaagactttatgca

SEQ ID NO: 346812 - DNA, 19 bp, Homo sapiens
  siRNA target sequence for KIAA1117 (NM_015018.2,1178-1196).
cacaagacacagtaatcct

SEQ ID NO: 346813 - DNA, 19 bp, Homo sapiens
  siRNA target sequence for KIAA1117 (NM_015018.2,1206-1224).
gccacttactatttcacta

SEQ ID NO: 346814 - DNA, 19 bp, Homo sapiens
  siRNA target sequence for KIAA1117 (NM_015018.2,1250-1268).
ggcaatggtgggaatctta

SEQ ID NO: 346815 - DNA, 19 bp, Homo sapiens
  siRNA target sequence for KIAA1117 (NM_015018.2,1252-1270).
caatggtgggaatcttaca

SEQ ID NO: 346816 - DNA, 19 bp, Homo sapiens
  siRNA target sequence for KIAA1117 (NM_015018.2,1259-1277).
gggaatcttacaagtgaat

SEQ ID NO: 346817 - DNA, 19 bp, Homo sapiens
  siRNA target sequence for KIAA1117 (NM_015018.2,1297-1315).
ctctaatgcaggatctaaa

SEQ ID NO: 346818 - DNA, 19 bp, Homo sapiens
  siRNA target sequence for KIAA1117 (NM_015018.2,1351-1369).
ctgagctaggacctgtaat

SEQ ID NO: 346819 - DNA, 19 bp, Homo sapiens
  siRNA target sequence for KIAA1117 (NM_015018.2,1355-1373).
gctaggacctgtaattcta

SEQ ID NO: 346820 - DNA, 19 bp, Homo sapiens
  siRNA target sequence for KIAA1117 (NM_015018.2,1360-1378).
gacctgtaattctagaaga

SEQ ID NO: 346821 - DNA, 19 bp, Homo sapiens
  siRNA target sequence for KIAA1117 (NM_015018.2,1380-1398).
gtcctgattgaagtgttta

SEQ ID NO: 346822 - DNA, 19 bp, Homo sapiens
  siRNA target sequence for KIAA1117 (NM_015018.2,1402-1420).
cattatattctcaatgcaa

SEQ ID NO: 346823 - DNA, 19 bp, Homo sapiens
  siRNA target sequence for KIAA1117 (NM_015018.2,1524-1542).
gctaaccttctctttaatt

SEQ ID NO: 346824 - DNA, 19 bp, Homo sapiens
  siRNA target sequence for KIAA1117 (NM_015018.2,1543-1561).
ccttcgaaccttattatat

SEQ ID NO: 346825 - DNA, 19 bp, Homo sapiens
  siRNA target sequence for KIAA1117 (NM_015018.2,1575-1593).
gcacgctggtttgaagaat

SEQ ID NO: 346826 - DNA, 19 bp, Homo sapiens
  siRNA target sequence for KIAA1117 (NM_015018.2,1625-1643).
gattggacctggagatagt

SEQ ID NO: 346827 - DNA, 19 bp, Homo sapiens
  siRNA target sequence for KIAA1117 (NM_015018.2,1642-1660).
gtaatgactcatctgaatt

SEQ ID NO: 346828 - DNA, 19 bp, Homo sapiens
  siRNA target sequence for KIAA1117 (NM_015018.2,1656-1674).
gaattacagctgaccaatt

SEQ ID NO: 346829 - DNA, 19 bp, Homo sapiens
  siRNA target sequence for KIAA1117 (NM_015018.2,1678-1696).
gcttactggtggatttttt

SEQ ID NO: 346830 - DNA, 19 bp, Homo sapiens
  siRNA target sequence for KIAA1117 (NM_015018.2,1707-1725).
gtttctttgcctactagaa

SEQ ID NO: 346831 - DNA, 19 bp, Homo sapiens
  siRNA target sequence for KIAA1117 (NM_015018.2,1737-1755).
ctgtgtcaggagacttaca

SEQ ID NO: 346832 - DNA, 19 bp, Homo sapiens
  siRNA target sequence for KIAA1117 (NM_015018.2,1741-1759).
gtcaggagacttacattga

SEQ ID NO: 346833 - DNA, 19 bp, Homo sapiens
  siRNA target sequence for KIAA1117 (NM_015018.2,1821-1839).
ctccagacattgcacttat

SEQ ID NO: 346834 - DNA, 19 bp, Homo sapiens
  siRNA target sequence for KIAA1117 (NM_015018.2,1863-1881).
ctctgctcaaagatcctta

SEQ ID NO: 346835 - DNA, 19 bp, Homo sapiens
  siRNA target sequence for KIAA1117 (NM_015018.2,1886-1904).
ggttcagcctccactgtta

SEQ ID NO: 346836 - DNA, 19 bp, Homo sapiens
  siRNA target sequence for KIAA1117 (NM_015018.2,1887-1905).
gttcagcctccactgttat

SEQ ID NO: 346837 - DNA, 19 bp, Homo sapiens
  siRNA target sequence for KIAA1117 (NM_015018.2,1935-1953).
ccaagtgggcagaacaatt

SEQ ID NO: 346838 - DNA, 19 bp, Homo sapiens
  siRNA target sequence for KIAA1117 (NM_015018.2,2088-2106).
gcagaccgaactgatgata

SEQ ID NO: 346839 - DNA, 19 bp, Homo sapiens
  siRNA target sequence for KIAA1117 (NM_015018.2,2089-2107).
cagaccgaactgatgatat

SEQ ID NO: 346840 - DNA, 19 bp, Homo sapiens
  siRNA target sequence for KIAA1117 (NM_015018.2,2139-2157).
gctgccatcccaattggta

SEQ ID NO: 346841 - DNA, 19 bp, Homo sapiens
  siRNA target sequence for KIAA1117 (NM_015018.2,2294-2312).
ggagtatgtccaacagttt

SEQ ID NO: 346842 - DNA, 19 bp, Homo sapiens
  siRNA target sequence for KIAA1117 (NM_015018.2,2363-2381).
gtctttggctacagaacat

SEQ ID NO: 346843 - DNA, 19 bp, Homo sapiens
  siRNA target sequence for KIAA1117 (NM_015018.2,2387-2405).
ggatcttggtcgagaacaa

SEQ ID NO: 346844 - DNA, 19 bp, Homo sapiens
  siRNA target sequence for KIAA1117 (NM_015018.2,2553-2571).
gctgaggggaaccatacat

SEQ ID NO: 346845 - DNA, 19 bp, Homo sapiens
  siRNA target sequence for KIAA1117 (NM_015018.2,2561-2579).
gaaccatacatcagagtta

SEQ ID NO: 346846 - DNA, 19 bp, Homo sapiens
  siRNA target sequence for KIAA1117 (NM_015018.2,2565-2583).
catacatcagagttacgtt

SEQ ID NO: 346847 - DNA, 19 bp, Homo sapiens
  siRNA target sequence for KIAA1117 (NM_015018.2,2572-2590).
cagagttacgttctgaaaa

SEQ ID NO: 346848 - DNA, 19 bp, Homo sapiens
  siRNA target sequence for KIAA1117 (NM_015018.2,2574-2592).
gagttacgttctgaaaaat

SEQ ID NO: 346849 - DNA, 19 bp, Homo sapiens
  siRNA target sequence for KIAA1117 (NM_015018.2,2674-2692).
gtgttcagagtgttgctat

SEQ ID NO: 346850 - DNA, 19 bp, Homo sapiens
  siRNA target sequence for KIAA1117 (NM_015018.2,2676-2694).
gttcagagtgttgctattt

SEQ ID NO: 346851 - DNA, 19 bp, Homo sapiens
  siRNA target sequence for KIAA1117 (NM_015018.2,2681-2699).
gagtgttgctatttcacta

SEQ ID NO: 346852 - DNA, 19 bp, Homo sapiens
  siRNA target sequence for KIAA1117 (NM_015018.2,2689-2707).
ctatttcactagttatgga

SEQ ID NO: 346853 - DNA, 19 bp, Homo sapiens
  siRNA target sequence for KIAA1117 (NM_015018.2,2768-2786).
gcctgcacaacccttaagt

SEQ ID NO: 346854 - DNA, 19 bp, Homo sapiens
  siRNA target sequence for KIAA1117 (NM_015018.2,2834-2852).
gggcaatctgaggtacata

SEQ ID NO: 346855 - DNA, 19 bp, Homo sapiens
  siRNA target sequence for KIAA1117 (NM_015018.2,2873-2891).
caagcatgtagctttaaca

SEQ ID NO: 346856 - DNA, 19 bp, Homo sapiens
  siRNA target sequence for KIAA1117 (NM_015018.2,2877-2895).
catgtagctttaacattgt

SEQ ID NO: 346857 - DNA, 19 bp, Homo sapiens
  siRNA target sequence for KIAA1117 (NM_015018.2,2938-2956).
gtgtggaactattttatca

SEQ ID NO: 346858 - DNA, 19 bp, Homo sapiens
  siRNA target sequence for KIAA1117 (NM_015018.2,2987-3005).
ctgtgaggatgttataagt

SEQ ID NO: 346859 - DNA, 19 bp, Homo sapiens
  siRNA target sequence for KIAA1117 (NM_015018.2,2997-3015).
gttataagtcagcagttaa

SEQ ID NO: 346860 - DNA, 19 bp, Homo sapiens
  siRNA target sequence for KIAA1117 (NM_015018.2,3009-3027).
cagttaacccataaagata

SEQ ID NO: 346861 - DNA, 19 bp, Homo sapiens
  siRNA target sequence for KIAA1117 (NM_015018.2,3060-3078).
gcagttctttggcatctaa

SEQ ID NO: 346862 - DNA, 19 bp, Homo sapiens
  siRNA target sequence for KIAA1117 (NM_015018.2,3079-3097).
cgagagatctccatataaa

SEQ ID NO: 346863 - DNA, 19 bp, Homo sapiens
  siRNA target sequence for KIAA1117 (NM_015018.2,3130-3148).
ggtcactgttcatcatgtt

SEQ ID NO: 346864 - DNA, 19 bp, Homo sapiens
  siRNA target sequence for KIAA1117 (NM_015018.2,3146-3164).
gttagatagccttaacagt

SEQ ID NO: 346865 - DNA, 19 bp, Homo sapiens
  siRNA target sequence for KIAA1117 (NM_015018.2,3161-3179).
cagtctcgatggttctact

SEQ ID NO: 346866 - DNA, 19 bp, Homo sapiens
  siRNA target sequence for KIAA1117 (NM_015018.2,3210-3228).
gtcctacaaagacatgata

SEQ ID NO: 346867 - DNA, 19 bp, Homo sapiens
  siRNA target sequence for KIAA1117 (NM_015018.2,3212-3230).
cctacaaagacatgatatt

SEQ ID NO: 346868 - DNA, 19 bp, Homo sapiens
  siRNA target sequence for KIAA1117 (NM_015018.2,3257-3275).
gctcctgcttcatccaaaa

SEQ ID NO: 346869 - DNA, 19 bp, Homo sapiens
  siRNA target sequence for KIAA1117 (NM_015018.2,3258-3276).
ctcctgcttcatccaaaaa

SEQ ID NO: 346870 - DNA, 19 bp, Homo sapiens
  siRNA target sequence for KIAA1117 (NM_015018.2,3303-3321).
caagcagaacgttattgga

SEQ ID NO: 346871 - DNA, 19 bp, Homo sapiens
  siRNA target sequence for KIAA1117 (NM_015018.2,3306-3324).
gcagaacgttattggaata

SEQ ID NO: 346872 - DNA, 19 bp, Homo sapiens
  siRNA target sequence for KIAA1117 (NM_015018.2,3354-3372).
gacaagcatttcatgcaaa

SEQ ID NO: 346873 - DNA, 19 bp, Homo sapiens
  siRNA target sequence for KIAA1117 (NM_015018.2,3385-3403).
gcaatgtgagccaagtaca

SEQ ID NO: 346874 - DNA, 19 bp, Homo sapiens
  siRNA target sequence for KIAA1117 (NM_015018.2,3396-3414).
caagtacaactcatcacat

SEQ ID NO: 346875 - DNA, 19 bp, Homo sapiens
  siRNA target sequence for KIAA1117 (NM_015018.2,3436-3454).
cacttaccatggatgaaat

SEQ ID NO: 346876 - DNA, 19 bp, Homo sapiens
  siRNA target sequence for KIAA1117 (NM_015018.2,3613-3631).
ctggggacaacttgagtta

SEQ ID NO: 346877 - DNA, 19 bp, Homo sapiens
  siRNA target sequence for KIAA1117 (NM_015018.2,3623-3641).
cttgagttacgaagttgat

SEQ ID NO: 346878 - DNA, 19 bp, Homo sapiens
  siRNA target sequence for KIAA1117 (NM_015018.2,3658-3676).
cccaagaggattctcaaat

SEQ ID NO: 346879 - DNA, 19 bp, Homo sapiens
  siRNA target sequence for KIAA1117 (NM_015018.2,3702-3720).
gatgttcaacaggtagtat

SEQ ID NO: 346880 - DNA, 19 bp, Homo sapiens
  siRNA target sequence for KIAA1117 (NM_015018.2,3728-3746).
gatatgtaaagttgtaagt

SEQ ID NO: 346881 - DNA, 19 bp, Homo sapiens
  siRNA target sequence for KIAA1117 (NM_015018.2,3765-3783).
gcatcagttacatctcaat

SEQ ID NO: 346882 - DNA, 19 bp, Homo sapiens
  siRNA target sequence for KIAA1117 (NM_015018.2,3769-3787).
cagttacatctcaattaga

SEQ ID NO: 346883 - DNA, 19 bp, Homo sapiens
  siRNA target sequence for KIAA1117 (NM_015018.2,3775-3793).
catctcaattagaaattga

SEQ ID NO: 346884 - DNA, 19 bp, Homo sapiens
  siRNA target sequence for KIAA1117 (NM_015018.2,3805-3823).
caaagtgcagtgatataga

SEQ ID NO: 346885 - DNA, 19 bp, Homo sapiens
  siRNA target sequence for KIAA1117 (NM_015018.2,4020-4038).
gcttccatagaaaccaaat

SEQ ID NO: 346886 - DNA, 19 bp, Homo sapiens
  siRNA target sequence for KIAA1117 (NM_015018.2,4104-4122).
gagaaggaaacaatagtta

SEQ ID NO: 346887 - DNA, 19 bp, Homo sapiens
  siRNA target sequence for KIAA1117 (NM_015018.2,4182-4200).
gatgacaagaaaaaatctt

SEQ ID NO: 346888 - DNA, 19 bp, Homo sapiens
  siRNA target sequence for KIAA1117 (NM_015018.2,4212-4230).
ctcaaacaaaccagtgtat

SEQ ID NO: 346889 - DNA, 19 bp, Homo sapiens
  siRNA target sequence for KIAA1117 (NM_015018.2,4235-4253).
cagtgatggtctggattta

SEQ ID NO: 346890 - DNA, 19 bp, Homo sapiens
  siRNA target sequence for KIAA1117 (NM_015018.2,4273-4291).
gagagggagacatttctga

SEQ ID NO: 346891 - DNA, 19 bp, Homo sapiens
  siRNA target sequence for KIAA1117 (NM_015018.2,4321-4339).
ctcgaaaatctcccaattt

SEQ ID NO: 346892 - DNA, 19 bp, Homo sapiens
  siRNA target sequence for KIAA1117 (NM_015018.2,4330-4348).
ctcccaatttcaacattca

SEQ ID NO: 346893 - DNA, 19 bp, Homo sapiens
  siRNA target sequence for KIAA1117 (NM_015018.2,4377-4395).
ctccagttgtatgattcat

SEQ ID NO: 346894 - DNA, 19 bp, Homo sapiens
  siRNA target sequence for KIAA1117 (NM_015018.2,4436-4454).
gaaaactaaccctatagct

SEQ ID NO: 346895 - DNA, 19 bp, Homo sapiens
  siRNA target sequence for KIAA1117 (NM_015018.2,4441-4459).
ctaaccctatagcttttgt

SEQ ID NO: 346896 - DNA, 19 bp, Homo sapiens
  siRNA target sequence for KIAA1117 (NM_015018.2,4445-4463).
ccctatagcttttgtaaat

SEQ ID NO: 346897 - DNA, 19 bp, Homo sapiens
  siRNA target sequence for KIAA1117 (NM_015018.2,4466-4484).
catttcaactactagtgta

SEQ ID NO: 346898 - DNA, 19 bp, Homo sapiens
  siRNA target sequence for KIAA1117 (NM_015018.2,4510-4528).
ctctccttcagaatctatt

SEQ ID NO: 346899 - DNA, 19 bp, Homo sapiens
  siRNA target sequence for KIAA1117 (NM_015018.2,4534-4552).
gacaccggatttctgttat

SEQ ID NO: 346900 - DNA, 19 bp, Homo sapiens
  siRNA target sequence for KIAA1117 (NM_015018.2,4574-4592).
cattccagtggactcaaat

SEQ ID NO: 346901 - DNA, 19 bp, Homo sapiens
  siRNA target sequence for KIAA1117 (NM_015018.2,4578-4596).
ccagtggactcaaatcata

SEQ ID NO: 346902 - DNA, 19 bp, Homo sapiens
  siRNA target sequence for KIAA1117 (NM_015018.2,4593-4611).
cataacttccggagttcta

SEQ ID NO: 346903 - DNA, 19 bp, Homo sapiens
  siRNA target sequence for KIAA1117 (NM_015018.2,4601-4619).
ccggagttctatgtacata

SEQ ID NO: 346904 - DNA, 19 bp, Homo sapiens
  siRNA target sequence for KIAA1117 (NM_015018.2,4604-4622).
gagttctatgtacatagaa

SEQ ID NO: 346905 - DNA, 19 bp, Homo sapiens
  siRNA target sequence for KIAA1117 (NM_015018.2,4626-4644).
cttatttctctctgcttat

SEQ ID NO: 346906 - DNA, 19 bp, Homo sapiens
  siRNA target sequence for KIAA1117 (NM_015018.2,4665-4683).
ccaactcatgtcaaggtta

SEQ ID NO: 346907 - DNA, 19 bp, Homo sapiens
  siRNA target sequence for KIAA1117 (NM_015018.2,4701-4719).
ggcaatcgaaacatgcaaa

SEQ ID NO: 346908 - DNA, 19 bp, Homo sapiens
  siRNA target sequence for KIAA1117 (NM_015018.2,4702-4720).
gcaatcgaaacatgcaaat

SEQ ID NO: 346909 - DNA, 19 bp, Homo sapiens
  siRNA target sequence for KIAA1117 (NM_015018.2,4757-4775).
gctggcaaaagtaatagaa

SEQ ID NO: 346910 - DNA, 19 bp, Homo sapiens
  siRNA target sequence for KIAA1117 (NM_015018.2,4783-4801).
cgaagggtttccctagttt

SEQ ID NO: 346911 - DNA, 19 bp, Homo sapiens
  siRNA target sequence for KIAA1117 (NM_015018.2,4814-4832).
gttatctaagtgcaaagtt

SEQ ID NO: 346912 - DNA, 19 bp, Homo sapiens
  siRNA target sequence for KIAA1117 (NM_015018.2,4848-4866).
cattgtttgctgtcatcta

SEQ ID NO: 346913 - DNA, 19 bp, Homo sapiens
  siRNA target sequence for KIAA1117 (NM_015018.2,4946-4964).
cagccttattaatttctca

SEQ ID NO: 346914 - DNA, 19 bp, Homo sapiens
  siRNA target sequence for KIAA1117 (NM_015018.2,4990-5008).
cgttgcagtcacaacttct

SEQ ID NO: 346915 - DNA, 19 bp, Homo sapiens
  siRNA target sequence for KIAA1117 (NM_015018.2,5015-5033).
gcttcagaggctgattgtt

SEQ ID NO: 346916 - DNA, 19 bp, Homo sapiens
  siRNA target sequence for KIAA1117 (NM_015018.2,5023-5041).
ggctgattgttctagaaca

SEQ ID NO: 346917 - DNA, 19 bp, Homo sapiens
  siRNA target sequence for KIAA1117 (NM_015018.2,5115-5133).
ccccatcaacccatgactt

SEQ ID NO: 346918 - DNA, 19 bp, Homo sapiens
  siRNA target sequence for KIAA1117 (NM_015018.2,5147-5165).
gcatgctcagccaatcaca

SEQ ID NO: 346919 - DNA, 19 bp, Homo sapiens
  siRNA target sequence for KIAA1117 (NM_015018.2,5177-5195).
gttcctctgtgcagtgata

SEQ ID NO: 346920 - DNA, 19 bp, Homo sapiens
  siRNA target sequence for KIAA1117 (NM_015018.2,5233-5251).
cacaatggattggtttaat

SEQ ID NO: 346921 - DNA, 19 bp, Homo sapiens
  siRNA target sequence for KIAA1117 (NM_015018.2,5283-5301).
ctgcagagagtggttgttt

SEQ ID NO: 346922 - DNA, 19 bp, Homo sapiens
  siRNA target sequence for KIAA1117 (NM_015018.2,5285-5303).
gcagagagtggttgtttct

SEQ ID NO: 346923 - DNA, 19 bp, Homo sapiens
  siRNA target sequence for KIAA1117 (NM_015018.2,5318-5336).
gtgcagaaatttagataat

SEQ ID NO: 346924 - DNA, 19 bp, Homo sapiens
  siRNA target sequence for KIAA1117 (NM_015018.2,5398-5416).
caattattccaccagatat

SEQ ID NO: 346925 - DNA, 19 bp, Homo sapiens
  siRNA target sequence for KIAA1117 (NM_015018.2,5406-5424).
ccaccagatatgattctta

SEQ ID NO: 346926 - DNA, 19 bp, Homo sapiens
  siRNA target sequence for KIAA1117 (NM_015018.2,5468-5486).
ggatccaactacacagtat

SEQ ID NO: 346927 - DNA, 19 bp, Homo sapiens
  siRNA target sequence for KIAA1117 (NM_015018.2,5544-5562).
ctctcaatccttcatatga

SEQ ID NO: 346928 - DNA, 19 bp, Homo sapiens
  siRNA target sequence for KIAA1117 (NM_015018.2,5548-5566).
caatccttcatatgatcat

SEQ ID NO: 346929 - DNA, 19 bp, Homo sapiens
  siRNA target sequence for KIAA1117 (NM_015018.2,5595-5613).
ctgcatcaagctgattctt

SEQ ID NO: 346930 - DNA, 19 bp, Homo sapiens
  siRNA target sequence for KIAA1117 (NM_015018.2,5639-5657).
cgcatctcttaccactatt

SEQ ID NO: 346931 - DNA, 19 bp, Homo sapiens
  siRNA target sequence for KIAA1117 (NM_015018.2,5641-5659).
catctcttaccactattaa

SEQ ID NO: 346932 - DNA, 19 bp, Homo sapiens
  siRNA target sequence for KIAA1117 (NM_015018.2,5644-5662).
ctcttaccactattaatct

SEQ ID NO: 346933 - DNA, 19 bp, Homo sapiens
  siRNA target sequence for KIAA1117 (NM_015018.2,5675-5693).
gaacttgagacaacagatt

SEQ ID NO: 346934 - DNA, 19 bp, Homo sapiens
  siRNA target sequence for KIAA1117 (NM_015018.2,5685-5703).
caacagattcttgaattgt

SEQ ID NO: 346935 - DNA, 19 bp, Homo sapiens
  siRNA target sequence for KIAA1117 (NM_015018.2,5841-5859).
gaattggttcgttcaatca

SEQ ID NO: 346936 - DNA, 19 bp, Homo sapiens
  siRNA target sequence for KIAA1117 (NM_015018.2,5967-5985).
cagtttttctatgcttata

SEQ ID NO: 346937 - DNA, 19 bp, Homo sapiens
  siRNA target sequence for KIAA1117 (NM_015018.2,6019-6037).
gctgggcgtcactgttgat

SEQ ID NO: 346938 - DNA, 19 bp, Homo sapiens
  siRNA target sequence for KIAA1117 (NM_015018.2,6020-6038).
ctgggcgtcactgttgata

SEQ ID NO: 346939 - DNA, 19 bp, Homo sapiens
  siRNA target sequence for KIAA1117 (NM_015018.2,6022-6040).
gggcgtcactgttgatact

SEQ ID NO: 346940 - DNA, 19 bp, Homo sapiens
  siRNA target sequence for KIAA1117 (NM_015018.2,6028-6046).
cactgttgatacttctgaa

SEQ ID NO: 346941 - DNA, 19 bp, Homo sapiens
  siRNA target sequence for KIAA1117 (NM_015018.2,6093-6111).
cttggggttctgaatgagt

SEQ ID NO: 346942 - DNA, 19 bp, Homo sapiens
  siRNA target sequence for KIAA1117 (NM_015018.2,6164-6182).
ggatgtaactcacaaaata

SEQ ID NO: 346943 - DNA, 19 bp, Homo sapiens
  siRNA target sequence for KIAA1117 (NM_015018.2,6185-6203).
ggatgcaattggtgcaatt

SEQ ID NO: 346944 - DNA, 19 bp, Homo sapiens
  siRNA target sequence for KIAA1117 (NM_015018.2,6229-6247).
catggctgcgacgaaatct

SEQ ID NO: 346945 - DNA, 19 bp, Homo sapiens
  siRNA target sequence for KIAA1117 (NM_015018.2,6232-6250).
ggctgcgacgaaatcttga

SEQ ID NO: 346946 - DNA, 19 bp, Homo sapiens
  siRNA target sequence for KIAA1117 (NM_015018.2,6233-6251).
gctgcgacgaaatcttgaa

SEQ ID NO: 346947 - DNA, 19 bp, Homo sapiens
  siRNA target sequence for KIAA1117 (NM_015018.2,6236-6254).
gcgacgaaatcttgaagtt

SEQ ID NO: 346948 - DNA, 19 bp, Homo sapiens
  siRNA target sequence for KIAA1117 (NM_015018.2,6238-6256).
gacgaaatcttgaagttaa

SEQ ID NO: 346949 - DNA, 19 bp, Homo sapiens
  siRNA target sequence for KIAA1117 (NM_015018.2,6298-6316).
ctgatgttgaagatatgtt

SEQ ID NO: 346950 - DNA, 19 bp, Homo sapiens
  siRNA target sequence for KIAA1117 (NM_015018.2,6325-6343).
caatggaaaccgcaaacat

SEQ ID NO: 346951 - DNA, 19 bp, Homo sapiens
  siRNA target sequence for KIAA1117 (NM_015018.2,6341-6359).
cataactccttctgtatat

SEQ ID NO: 346952 - DNA, 19 bp, Homo sapiens
  siRNA target sequence for KIAA1117 (NM_015018.2,6361-6379).
gtgtccatgcattgacatt

SEQ ID NO: 346953 - DNA, 19 bp, Homo sapiens
  siRNA target sequence for KIAA1117 (NM_015018.2,6387-6405).
gaggttttggctcatcttt

SEQ ID NO: 346954 - DNA, 19 bp, Homo sapiens
  siRNA target sequence for KIAA1117 (NM_015018.2,6434-6452).
ggagcgggttattccttta

SEQ ID NO: 346955 - DNA, 19 bp, Homo sapiens
  siRNA target sequence for KIAA1117 (NM_015018.2,6437-6455).
gcgggttattcctttactt

SEQ ID NO: 346956 - DNA, 19 bp, Homo sapiens
  siRNA target sequence for KIAA1117 (NM_015018.2,6439-6457).
gggttattcctttacttgt

SEQ ID NO: 346957 - DNA, 19 bp, Homo sapiens
  siRNA target sequence for KIAA1117 (NM_015018.2,6502-6520).
cacataatgcccctagtta

SEQ ID NO: 346958 - DNA, 19 bp, Homo sapiens
  siRNA target sequence for KIAA1117 (NM_015018.2,6536-6554).
gctgctcagcagtcttagt

SEQ ID NO: 346959 - DNA, 19 bp, Homo sapiens
  siRNA target sequence for KIAA1117 (NM_015018.2,6547-6565).
gtcttagtgggtatcagta

SEQ ID NO: 346960 - DNA, 19 bp, Homo sapiens
  siRNA target sequence for KIAA1117 (NM_015018.2,6568-6586).
cacggagagcttggaaaaa

SEQ ID NO: 346961 - DNA, 19 bp, Homo sapiens
  siRNA target sequence for KIAA1117 (NM_015018.2,6626-6644).
gatggatgcctcttgtgtt

SEQ ID NO: 346962 - DNA, 19 bp, Homo sapiens
  siRNA target sequence for KIAA1117 (NM_015018.2,6655-6673).
gagcaattatggacaatct

SEQ ID NO: 346963 - DNA, 19 bp, Homo sapiens
  siRNA target sequence for KIAA1117 (NM_015018.2,6657-6675).
gcaattatggacaatctga

SEQ ID NO: 346964 - DNA, 19 bp, Homo sapiens
  siRNA target sequence for KIAA1117 (NM_015018.2,6658-6676).
caattatggacaatctgat

SEQ ID NO: 346965 - DNA, 19 bp, Homo sapiens
  siRNA target sequence for KIAA1117 (NM_015018.2,6668-6686).
caatctgatgacacatgat

SEQ ID NO: 346966 - DNA, 19 bp, Homo sapiens
  siRNA target sequence for KIAA1117 (NM_015018.2,6672-6690).
ctgatgacacatgataaaa

SEQ ID NO: 346967 - DNA, 19 bp, Homo sapiens
  siRNA target sequence for KIAA1117 (NM_015018.2,6727-6745).
ctcaaagcagttcacttaa

SEQ ID NO: 346968 - DNA, 19 bp, Homo sapiens
  siRNA target sequence for KIAA1117 (NM_015018.2,6739-6757).
cacttaatctctttgcaaa

SEQ ID NO: 346969 - DNA, 19 bp, Homo sapiens
  siRNA target sequence for KIAA1117 (NM_015018.2,6777-6795).
cagagagctatgcttctta

SEQ ID NO: 346970 - DNA, 19 bp, Homo sapiens
  siRNA target sequence for KIAA1117 (NM_015018.2,6779-6797).
gagagctatgcttcttaaa

SEQ ID NO: 346971 - DNA, 19 bp, Homo sapiens
  siRNA target sequence for KIAA1117 (NM_015018.2,6788-6806).
gcttcttaaaagattagca

SEQ ID NO: 346972 - DNA, 19 bp, Homo sapiens
  siRNA target sequence for KIAA1117 (NM_015018.2,6789-6807).
cttcttaaaagattagcat

SEQ ID NO: 346973 - DNA, 19 bp, Homo sapiens
  siRNA target sequence for KIAA1117 (NM_015018.2,6979-6997).
ggcctaccatgattacaga

SEQ ID NO: 346974 - DNA, 19 bp, Homo sapiens
  siRNA target sequence for KIAA1117 (NM_015018.2,6980-6998).
gcctaccatgattacagaa

SEQ ID NO: 346975 - DNA, 19 bp, Homo sapiens
  siRNA target sequence for KIAA1117 (NM_015018.2,6985-7003).
ccatgattacagaacttgt

SEQ ID NO: 346976 - DNA, 19 bp, Homo sapiens
  siRNA target sequence for KIAA1117 (NM_015018.2,7028-7046).
ggaactcactgctgatgaa

SEQ ID NO: 346977 - DNA, 19 bp, Homo sapiens
  siRNA target sequence for KIAA1117 (NM_015018.2,7104-7122).
ggtaatggcttctctactt

SEQ ID NO: 346978 - DNA, 19 bp, Homo sapiens
  siRNA target sequence for KIAA1117 (NM_015018.2,7111-7129).
gcttctctacttcatataa

SEQ ID NO: 346979 - DNA, 19 bp, Homo sapiens
  siRNA target sequence for KIAA1117 (NM_015018.2,7132-7150).
gccagcggtggttaaacct

SEQ ID NO: 346980 - DNA, 19 bp, Homo sapiens
  siRNA target sequence for KIAA1117 (NM_015018.2,7138-7156).
ggtggttaaacctctatct

SEQ ID NO: 346981 - DNA, 19 bp, Homo sapiens
  siRNA target sequence for KIAA1117 (NM_015018.2,7223-7241).
gtaccgatgggcctttatt

SEQ ID NO: 346982 - DNA, 19 bp, Homo sapiens
  siRNA target sequence for KIAA1117 (NM_015018.2,7285-7303).
gtatacatcaacgagaatt

SEQ ID NO: 346983 - DNA, 19 bp, Homo sapiens
  siRNA target sequence for KIAA1117 (NM_015018.2,7313-7331).
cgtggtacgactagcaaaa

SEQ ID NO: 346984 - DNA, 19 bp, Homo sapiens
  siRNA target sequence for KIAA1117 (NM_015018.2,7316-7334).
ggtacgactagcaaaactt

SEQ ID NO: 346985 - DNA, 19 bp, Homo sapiens
  siRNA target sequence for KIAA1117 (NM_015018.2,7445-7463).
gctcctgccgttcttcaat

SEQ ID NO: 346986 - DNA, 19 bp, Homo sapiens
  siRNA target sequence for KIAA1117 (NM_015018.2,7522-7540).
gtcctatcctctactcaaa

SEQ ID NO: 346987 - DNA, 19 bp, Homo sapiens
  siRNA target sequence for FNBP1 (NM_015033.1,224-242).
cacacagtggggaattgat

SEQ ID NO: 346988 - DNA, 19 bp, Homo sapiens
  siRNA target sequence for FNBP1 (NM_015033.1,235-253).
gaattgatattcttgagaa

SEQ ID NO: 346989 - DNA, 19 bp, Homo sapiens
  siRNA target sequence for FNBP1 (NM_015033.1,360-378).
gaagaatacaagtatacgt

SEQ ID NO: 346990 - DNA, 19 bp, Homo sapiens
  siRNA target sequence for FNBP1 (NM_015033.1,371-389).
gtatacgtcatgtaaagct

SEQ ID NO: 346991 - DNA, 19 bp, Homo sapiens
  siRNA target sequence for FNBP1 (NM_015033.1,376-394).
cgtcatgtaaagctttcat

SEQ ID NO: 346992 - DNA, 19 bp, Homo sapiens
  siRNA target sequence for FNBP1 (NM_015033.1,422-440).
cgcagggcagcatgaagtt

SEQ ID NO: 346993 - DNA, 19 bp, Homo sapiens
  siRNA target sequence for FNBP1 (NM_015033.1,424-442).
cagggcagcatgaagttat

SEQ ID NO: 346994 - DNA, 19 bp, Homo sapiens
  siRNA target sequence for FNBP1 (NM_015033.1,426-444).
gggcagcatgaagttatct

SEQ ID NO: 346995 - DNA, 19 bp, Homo sapiens
  siRNA target sequence for FNBP1 (NM_015033.1,473-491).
ggacttggcacgctatgtt

SEQ ID NO: 346996 - DNA, 19 bp, Homo sapiens
  siRNA target sequence for FNBP1 (NM_015033.1,563-581).
ctggaagcagcttgaatct

SEQ ID NO: 346997 - DNA, 19 bp, Homo sapiens
  siRNA target sequence for FNBP1 (NM_015033.1,569-587).
gcagcttgaatctagtaaa

SEQ ID NO: 346998 - DNA, 19 bp, Homo sapiens
  siRNA target sequence for FNBP1 (NM_015033.1,580-598).
ctagtaaaaggcgatttga

SEQ ID NO: 346999 - DNA, 19 bp, Homo sapiens
  siRNA target sequence for FNBP1 (NM_015033.1,592-610).
gatttgaacgcgattgcaa

SEQ ID NO: 347000 - DNA, 19 bp, Homo sapiens
  siRNA target sequence for FNBP1 (NM_015033.1,622-640).
gggcgcagcagtactttga

SEQ ID NO: 347001 - DNA, 19 bp, Homo sapiens
  siRNA target sequence for FNBP1 (NM_015033.1,624-642).
gcgcagcagtactttgaga

SEQ ID NO: 347002 - DNA, 19 bp, Homo sapiens
  siRNA target sequence for FNBP1 (NM_015033.1,665-683).
cacaaaagcggatgttgaa

SEQ ID NO: 347003 - DNA, 19 bp, Homo sapiens
  siRNA target sequence for FNBP1 (NM_015033.1,667-685).
caaaagcggatgttgaaaa

SEQ ID NO: 347004 - DNA, 19 bp, Homo sapiens
  siRNA target sequence for FNBP1 (NM_015033.1,688-706).
cccgacaacaagctcaaat

SEQ ID NO: 347005 - DNA, 19 bp, Homo sapiens
  siRNA target sequence for FNBP1 (NM_015033.1,689-707).
ccgacaacaagctcaaata

SEQ ID NO: 347006 - DNA, 19 bp, Homo sapiens
  siRNA target sequence for FNBP1 (NM_015033.1,917-935).
cctggatggaatagtaaaa

SEQ ID NO: 347007 - DNA, 19 bp, Homo sapiens
  siRNA target sequence for FNBP1 (NM_015033.1,930-948).
gtaaaagcagccgaatcaa

SEQ ID NO: 347008 - DNA, 19 bp, Homo sapiens
  siRNA target sequence for FNBP1 (NM_015033.1,971-989).
gctggtaatagaagcttat

SEQ ID NO: 347009 - DNA, 19 bp, Homo sapiens
  siRNA target sequence for FNBP1 (NM_015033.1,972-990).
ctggtaatagaagcttata

SEQ ID NO: 347010 - DNA, 19 bp, Homo sapiens
  siRNA target sequence for FNBP1 (NM_015033.1,1050-1068).
cgcactgtgtcagataaca

SEQ ID NO: 347011 - DNA, 19 bp, Homo sapiens
  siRNA target sequence for FNBP1 (NM_015033.1,1133-1151).
gttatggccgttcatcaaa

SEQ ID NO: 347012 - DNA, 19 bp, Homo sapiens
  siRNA target sequence for FNBP1 (NM_015033.1,1160-1178).
gcttatgtcccttttaaca

SEQ ID NO: 347013 - DNA, 19 bp, Homo sapiens
  siRNA target sequence for FNBP1 (NM_015033.1,1386-1404).
ctcccacctgaacaaagaa

SEQ ID NO: 347014 - DNA, 19 bp, Homo sapiens
  siRNA target sequence for FNBP1 (NM_015033.1,1419-1437).
cagaaagtcgatgagttaa

SEQ ID NO: 347015 - DNA, 19 bp, Homo sapiens
  siRNA target sequence for FNBP1 (NM_015033.1,1421-1439).
gaaagtcgatgagttaaat

SEQ ID NO: 347016 - DNA, 19 bp, Homo sapiens
  siRNA target sequence for FNBP1 (NM_015033.1,1464-1482).
caaagagatgccataacaa

SEQ ID NO: 347017 - DNA, 19 bp, Homo sapiens
  siRNA target sequence for FNBP1 (NM_015033.1,1527-1545).
gccagtttggatcacaaat

SEQ ID NO: 347018 - DNA, 19 bp, Homo sapiens
  siRNA target sequence for FNBP1 (NM_015033.1,1556-1574).
cagccaaaatatagagaaa

SEQ ID NO: 347019 - DNA, 19 bp, Homo sapiens
  siRNA target sequence for FNBP1 (NM_015033.1,1558-1576).
gccaaaatatagagaaact

SEQ ID NO: 347020 - DNA, 19 bp, Homo sapiens
  siRNA target sequence for FNBP1 (NM_015033.1,1578-1596).
cgagtagagacccagaaat

SEQ ID NO: 347021 - DNA, 19 bp, Homo sapiens
  siRNA target sequence for FNBP1 (NM_015033.1,1579-1597).
gagtagagacccagaaatt

SEQ ID NO: 347022 - DNA, 19 bp, Homo sapiens
  siRNA target sequence for FNBP1 (NM_015033.1,1686-1704).
ccacccacagtcaacaact

SEQ ID NO: 347023 - DNA, 19 bp, Homo sapiens
  siRNA target sequence for FNBP1 (NM_015033.1,1724-1742).
cccagatggcagttacaca

SEQ ID NO: 347024 - DNA, 19 bp, Homo sapiens
  siRNA target sequence for FNBP1 (NM_015033.1,1772-1790).
ggtgctggccacggatttt

SEQ ID NO: 347025 - DNA, 19 bp, Homo sapiens
  siRNA target sequence for FNBP1 (NM_015033.1,1852-1870).
catttgaaggtcagaatga

SEQ ID NO: 347026 - DNA, 19 bp, Homo sapiens
  siRNA target sequence for FNBP1 (NM_015033.1,1863-1881).
cagaatgaaggaacgattt

SEQ ID NO: 347027 - DNA, 19 bp, Homo sapiens
  siRNA target sequence for FNBP1 (NM_015033.1,1873-1891).
gaacgatttccgtagttga

SEQ ID NO: 347028 - DNA, 19 bp, Homo sapiens
  siRNA target sequence for FNBP1 (NM_015033.1,1940-1958).
ccgcattcggagaaatgaa

SEQ ID NO: 347029 - DNA, 19 bp, Homo sapiens
  siRNA target sequence for FNBP1 (NM_015033.1,1984-2002).
catatgtcgaagtctgttt

SEQ ID NO: 347030 - DNA, 19 bp, Homo sapiens
  siRNA target sequence for PIP5K3 (NM_015040.1,191-209).
cactggactctgctaatga

SEQ ID NO: 347031 - DNA, 19 bp, Homo sapiens
  siRNA target sequence for PIP5K3 (NM_015040.1,241-259).
ctcacacactttaaacctt

SEQ ID NO: 347032 - DNA, 19 bp, Homo sapiens
  siRNA target sequence for PIP5K3 (NM_015040.1,257-275).
ctttgactcctgatcaaga

SEQ ID NO: 347033 - DNA, 19 bp, Homo sapiens
  siRNA target sequence for PIP5K3 (NM_015040.1,271-289).
caagatgagccccctttta

SEQ ID NO: 347034 - DNA, 19 bp, Homo sapiens
  siRNA target sequence for PIP5K3 (NM_015040.1,310-328).
gtaaatctctttcgtttta

SEQ ID NO: 347035 - DNA, 19 bp, Homo sapiens
  siRNA target sequence for PIP5K3 (NM_015040.1,422-440).
ggtcacccacaccttataa

SEQ ID NO: 347036 - DNA, 19 bp, Homo sapiens
  siRNA target sequence for PIP5K3 (NM_015040.1,469-487).
cgctcttcagcattagaca

SEQ ID NO: 347037 - DNA, 19 bp, Homo sapiens
  siRNA target sequence for PIP5K3 (NM_015040.1,630-648).
gccagatagccaatgtaaa

SEQ ID NO: 347038 - DNA, 19 bp, Homo sapiens
  siRNA target sequence for PIP5K3 (NM_015040.1,658-676).
gactgtagtgagaaattta

SEQ ID NO: 347039 - DNA, 19 bp, Homo sapiens
  siRNA target sequence for PIP5K3 (NM_015040.1,723-741).
ctgcagtcgttgctgtaat

SEQ ID NO: 347040 - DNA, 19 bp, Homo sapiens
  siRNA target sequence for PIP5K3 (NM_015040.1,725-743).
gcagtcgttgctgtaatca

SEQ ID NO: 347041 - DNA, 19 bp, Homo sapiens
  siRNA target sequence for PIP5K3 (NM_015040.1,726-744).
cagtcgttgctgtaatcaa

SEQ ID NO: 347042 - DNA, 19 bp, Homo sapiens
  siRNA target sequence for PIP5K3 (NM_015040.1,728-746).
gtcgttgctgtaatcaaga

SEQ ID NO: 347043 - DNA, 19 bp, Homo sapiens
  siRNA target sequence for PIP5K3 (NM_015040.1,783-801).
ccgagcttgcacatattgt

SEQ ID NO: 347044 - DNA, 19 bp, Homo sapiens
  siRNA target sequence for PIP5K3 (NM_015040.1,784-802).
cgagcttgcacatattgta

SEQ ID NO: 347045 - DNA, 19 bp, Homo sapiens
  siRNA target sequence for PIP5K3 (NM_015040.1,791-809).
gcacatattgtagaaaaat

SEQ ID NO: 347046 - DNA, 19 bp, Homo sapiens
  siRNA target sequence for PIP5K3 (NM_015040.1,803-821).
gaaaaatagccttaagtta

SEQ ID NO: 347047 - DNA, 19 bp, Homo sapiens
  siRNA target sequence for PIP5K3 (NM_015040.1,861-879).
gaatgctctttcagattct

SEQ ID NO: 347048 - DNA, 19 bp, Homo sapiens
  siRNA target sequence for PIP5K3 (NM_015040.1,940-958).
gccagccgtaacatatttt

SEQ ID NO: 347049 - DNA, 19 bp, Homo sapiens
  siRNA target sequence for PIP5K3 (NM_015040.1,944-962).
gccgtaacatatttttaga

SEQ ID NO: 347050 - DNA, 19 bp, Homo sapiens
  siRNA target sequence for PIP5K3 (NM_015040.1,967-985).
gatttggcctggcaaagtt

SEQ ID NO: 347051 - DNA, 19 bp, Homo sapiens
  siRNA target sequence for PIP5K3 (NM_015040.1,972-990).
ggcctggcaaagtttgatt

SEQ ID NO: 347052 - DNA, 19 bp, Homo sapiens
  siRNA target sequence for PIP5K3 (NM_015040.1,974-992).
cctggcaaagtttgattca

SEQ ID NO: 347053 - DNA, 19 bp, Homo sapiens
  siRNA target sequence for PIP5K3 (NM_015040.1,975-993).
ctggcaaagtttgattcat

SEQ ID NO: 347054 - DNA, 19 bp, Homo sapiens
  siRNA target sequence for PIP5K3 (NM_015040.1,1002-1020).
ctcaaatactcctctttca

SEQ ID NO: 347055 - DNA, 19 bp, Homo sapiens
  siRNA target sequence for PIP5K3 (NM_015040.1,1019-1037).
caacaagacttgtatctgt

SEQ ID NO: 347056 - DNA, 19 bp, Homo sapiens
  siRNA target sequence for PIP5K3 (NM_015040.1,1073-1091).
gatcagccagcattactaa

SEQ ID NO: 347057 - DNA, 19 bp, Homo sapiens
  siRNA target sequence for PIP5K3 (NM_015040.1,1115-1133).
ctcctatggtaccttcata

SEQ ID NO: 347058 - DNA, 19 bp, Homo sapiens
  siRNA target sequence for PIP5K3 (NM_015040.1,1118-1136).
ctatggtaccttcatatga

SEQ ID NO: 347059 - DNA, 19 bp, Homo sapiens
  siRNA target sequence for PIP5K3 (NM_015040.1,1151-1169).
cccaggctaaccgaacata

SEQ ID NO: 347060 - DNA, 19 bp, Homo sapiens
  siRNA target sequence for PIP5K3 (NM_015040.1,1152-1170).
ccaggctaaccgaacatat

SEQ ID NO: 347061 - DNA, 19 bp, Homo sapiens
  siRNA target sequence for PIP5K3 (NM_015040.1,1155-1173).
ggctaaccgaacatatgtt

SEQ ID NO: 347062 - DNA, 19 bp, Homo sapiens
  siRNA target sequence for PIP5K3 (NM_015040.1,1156-1174).
gctaaccgaacatatgtta

SEQ ID NO: 347063 - DNA, 19 bp, Homo sapiens
  siRNA target sequence for PIP5K3 (NM_015040.1,1191-1209).
ggatgaacgcaaaattctt

SEQ ID NO: 347064 - DNA, 19 bp, Homo sapiens
  siRNA target sequence for PIP5K3 (NM_015040.1,1282-1300).
caccgctactggttgagaa

SEQ ID NO: 347065 - DNA, 19 bp, Homo sapiens
  siRNA target sequence for PIP5K3 (NM_015040.1,1302-1320).
gcatcccaactgcattgta

SEQ ID NO: 347066 - DNA, 19 bp, Homo sapiens
  siRNA target sequence for PIP5K3 (NM_015040.1,1314-1332).
cattgtaggaaaggaatta

SEQ ID NO: 347067 - DNA, 19 bp, Homo sapiens
  siRNA target sequence for PIP5K3 (NM_015040.1,1371-1389).
ggcacaagctatagcaatt

SEQ ID NO: 347068 - DNA, 19 bp, Homo sapiens
  siRNA target sequence for PIP5K3 (NM_015040.1,1411-1429).
cgttggctggattgtgtta

SEQ ID NO: 347069 - DNA, 19 bp, Homo sapiens
  siRNA target sequence for PIP5K3 (NM_015040.1,1415-1433).
ggctggattgtgttagtca

SEQ ID NO: 347070 - DNA, 19 bp, Homo sapiens
  siRNA target sequence for PIP5K3 (NM_015040.1,1416-1434).
gctggattgtgttagtcat

SEQ ID NO: 347071 - DNA, 19 bp, Homo sapiens
  siRNA target sequence for PIP5K3 (NM_015040.1,1430-1448).
gtcatcacgaccagctttt

SEQ ID NO: 347072 - DNA, 19 bp, Homo sapiens
  siRNA target sequence for PIP5K3 (NM_015040.1,1432-1450).
catcacgaccagcttttca

SEQ ID NO: 347073 - DNA, 19 bp, Homo sapiens
  siRNA target sequence for PIP5K3 (NM_015040.1,1453-1471).
gatgagtatgcgctgtata

SEQ ID NO: 347074 - DNA, 19 bp, Homo sapiens
  siRNA target sequence for PIP5K3 (NM_015040.1,1479-1497).
gcagagtacagaattttct

SEQ ID NO: 347075 - DNA, 19 bp, Homo sapiens
  siRNA target sequence for PIP5K3 (NM_015040.1,1552-1570).
ccatcctggtttaaagaca

SEQ ID NO: 347076 - DNA, 19 bp, Homo sapiens
  siRNA target sequence for PIP5K3 (NM_015040.1,1604-1622).
ctgaagaaggtgacgataa

SEQ ID NO: 347077 - DNA, 19 bp, Homo sapiens
  siRNA target sequence for PIP5K3 (NM_015040.1,1606-1624).
gaagaaggtgacgataatt

SEQ ID NO: 347078 - DNA, 19 bp, Homo sapiens
  siRNA target sequence for PIP5K3 (NM_015040.1,1615-1633).
gacgataatttggctaatt

SEQ ID NO: 347079 - DNA, 19 bp, Homo sapiens
  siRNA target sequence for PIP5K3 (NM_015040.1,1617-1635).
cgataatttggctaattct

SEQ ID NO: 347080 - DNA, 19 bp, Homo sapiens
  siRNA target sequence for PIP5K3 (NM_015040.1,1688-1706).
gtgactcagccgcttctat

SEQ ID NO: 347081 - DNA, 19 bp, Homo sapiens
  siRNA target sequence for PIP5K3 (NM_015040.1,1690-1708).
gactcagccgcttctatca

SEQ ID NO: 347082 - DNA, 19 bp, Homo sapiens
  siRNA target sequence for PIP5K3 (NM_015040.1,1732-1750).
gtgaacttccatatcaaga

SEQ ID NO: 347083 - DNA, 19 bp, Homo sapiens
  siRNA target sequence for PIP5K3 (NM_015040.1,1789-1807).
gaccaaaaagagtatttga

SEQ ID NO: 347084 - DNA, 19 bp, Homo sapiens
  siRNA target sequence for PIP5K3 (NM_015040.1,1791-1809).
ccaaaaagagtatttgatt

SEQ ID NO: 347085 - DNA, 19 bp, Homo sapiens
  siRNA target sequence for PIP5K3 (NM_015040.1,1822-1840).
ggacaacagctctcaataa

SEQ ID NO: 347086 - DNA, 19 bp, Homo sapiens
  siRNA target sequence for PIP5K3 (NM_015040.1,1835-1853).
caataagtgacgctttcat

SEQ ID NO: 347087 - DNA, 19 bp, Homo sapiens
  siRNA target sequence for PIP5K3 (NM_015040.1,1843-1861).
gacgctttcatcaaagaat

SEQ ID NO: 347088 - DNA, 19 bp, Homo sapiens
  siRNA target sequence for PIP5K3 (NM_015040.1,1873-1891).
cgccgagtagaggaaaaat

SEQ ID NO: 347089 - DNA, 19 bp, Homo sapiens
  siRNA target sequence for PIP5K3 (NM_015040.1,1913-1931).
ctttgggctggcatcataa

SEQ ID NO: 347090 - DNA, 19 bp, Homo sapiens
  siRNA target sequence for PIP5K3 (NM_015040.1,1980-1998).
gaggttgctttcagctaat

SEQ ID NO: 347091 - DNA, 19 bp, Homo sapiens
  siRNA target sequence for PIP5K3 (NM_015040.1,1994-2012).
ctaatcataaccacatgat

SEQ ID NO: 347092 - DNA, 19 bp, Homo sapiens
  siRNA target sequence for PIP5K3 (NM_015040.1,2054-2072).
catcttggagggacatcat

SEQ ID NO: 347093 - DNA, 19 bp, Homo sapiens
  siRNA target sequence for PIP5K3 (NM_015040.1,2063-2081).
gggacatcatcgtgtcatt

SEQ ID NO: 347094 - DNA, 19 bp, Homo sapiens
  siRNA target sequence for PIP5K3 (NM_015040.1,2102-2120).
cagtccgacctgatgtcaa

SEQ ID NO: 347095 - DNA, 19 bp, Homo sapiens
  siRNA target sequence for PIP5K3 (NM_015040.1,2136-2154).
catggatatccgtcagttt

SEQ ID NO: 347096 - DNA, 19 bp, Homo sapiens
  siRNA target sequence for PIP5K3 (NM_015040.1,2203-2221).
gtcaatggctttgtttgta

SEQ ID NO: 347097 - DNA, 19 bp, Homo sapiens
  siRNA target sequence for PIP5K3 (NM_015040.1,2288-2306).
gttccattgagtatctcta

SEQ ID NO: 347098 - DNA, 19 bp, Homo sapiens
  siRNA target sequence for PIP5K3 (NM_015040.1,2327-2345).
cttgcattgatcctattgt

SEQ ID NO: 347099 - DNA, 19 bp, Homo sapiens
  siRNA target sequence for PIP5K3 (NM_015040.1,2379-2397).
ccagcgaatagttgatgtt

SEQ ID NO: 347100 - DNA, 19 bp, Homo sapiens
  siRNA target sequence for PIP5K3 (NM_015040.1,2409-2427).
ggttcttgttgagaaaaca

SEQ ID NO: 347101 - DNA, 19 bp, Homo sapiens
  siRNA target sequence for PIP5K3 (NM_015040.1,2435-2453).
ggattgcccaggacatgtt

SEQ ID NO: 347102 - DNA, 19 bp, Homo sapiens
  siRNA target sequence for PIP5K3 (NM_015040.1,2465-2483).
gcattactttggtcattaa

SEQ ID NO: 347103 - DNA, 19 bp, Homo sapiens
  siRNA target sequence for PIP5K3 (NM_015040.1,2471-2489).
ctttggtcattaatgtaaa

SEQ ID NO: 347104 - DNA, 19 bp, Homo sapiens
  siRNA target sequence for PIP5K3 (NM_015040.1,2475-2493).
ggtcattaatgtaaagtca

SEQ ID NO: 347105 - DNA, 19 bp, Homo sapiens
  siRNA target sequence for PIP5K3 (NM_015040.1,2492-2510).
cacaagttttggaacgaat

SEQ ID NO: 347106 - DNA, 19 bp, Homo sapiens
  siRNA target sequence for PIP5K3 (NM_015040.1,2522-2540).
cccaaggtgatttagtgat

SEQ ID NO: 347107 - DNA, 19 bp, Homo sapiens
  siRNA target sequence for PIP5K3 (NM_015040.1,2527-2545).
ggtgatttagtgatgtcaa

SEQ ID NO: 347108 - DNA, 19 bp, Homo sapiens
  siRNA target sequence for PIP5K3 (NM_015040.1,2528-2546).
gtgatttagtgatgtcaat

SEQ ID NO: 347109 - DNA, 19 bp, Homo sapiens
  siRNA target sequence for PIP5K3 (NM_015040.1,2547-2565).
ggaccagctgcttacgaaa

SEQ ID NO: 347110 - DNA, 19 bp, Homo sapiens
  siRNA target sequence for PIP5K3 (NM_015040.1,2576-2594).
gcacttgtcacaaatttta

SEQ ID NO: 347111 - DNA, 19 bp, Homo sapiens
  siRNA target sequence for PIP5K3 (NM_015040.1,2577-2595).
cacttgtcacaaattttat

SEQ ID NO: 347112 - DNA, 19 bp, Homo sapiens
  siRNA target sequence for PIP5K3 (NM_015040.1,2608-2626).
cagttgcctaatgaacaaa

SEQ ID NO: 347113 - DNA, 19 bp, Homo sapiens
  siRNA target sequence for PIP5K3 (NM_015040.1,2662-2680).
cacctaggctgtacaatca

SEQ ID NO: 347114 - DNA, 19 bp, Homo sapiens
  siRNA target sequence for PIP5K3 (NM_015040.1,2713-2731).
cgagttaaggagatcctaa

SEQ ID NO: 347115 - DNA, 19 bp, Homo sapiens
  siRNA target sequence for PIP5K3 (NM_015040.1,2714-2732).
gagttaaggagatcctaat

SEQ ID NO: 347116 - DNA, 19 bp, Homo sapiens
  siRNA target sequence for PIP5K3 (NM_015040.1,2716-2734).
gttaaggagatcctaatat

SEQ ID NO: 347117 - DNA, 19 bp, Homo sapiens
  siRNA target sequence for PIP5K3 (NM_015040.1,2739-2757).
gatctgtgttgcttatcat

SEQ ID NO: 347118 - DNA, 19 bp, Homo sapiens
  siRNA target sequence for PIP5K3 (NM_015040.1,2750-2768).
cttatcattctcaactaga

SEQ ID NO: 347119 - DNA, 19 bp, Homo sapiens
  siRNA target sequence for PIP5K3 (NM_015040.1,2759-2777).
ctcaactagaaatatcctt

SEQ ID NO: 347120 - DNA, 19 bp, Homo sapiens
  siRNA target sequence for PIP5K3 (NM_015040.1,2794-2812).
gctatgcctcccacattaa

SEQ ID NO: 347121 - DNA, 19 bp, Homo sapiens
  siRNA target sequence for PIP5K3 (NM_015040.1,2795-2813).
ctatgcctcccacattaat

SEQ ID NO: 347122 - DNA, 19 bp, Homo sapiens
  siRNA target sequence for PIP5K3 (NM_015040.1,2825-2843).
cattccattccctgattga

SEQ ID NO: 347123 - DNA, 19 bp, Homo sapiens
  siRNA target sequence for PIP5K3 (NM_015040.1,2922-2940).
gtctctgccctgtgatgat

SEQ ID NO: 347124 - DNA, 19 bp, Homo sapiens
  siRNA target sequence for PIP5K3 (NM_015040.1,3015-3033).
ctctgtgaagcatcaagaa

SEQ ID NO: 347125 - DNA, 19 bp, Homo sapiens
  siRNA target sequence for PIP5K3 (NM_015040.1,3019-3037).
gtgaagcatcaagaacata

SEQ ID NO: 347126 - DNA, 19 bp, Homo sapiens
  siRNA target sequence for PIP5K3 (NM_015040.1,3079-3097).
gcacctgtaccggaatcat

SEQ ID NO: 347127 - DNA, 19 bp, Homo sapiens
  siRNA target sequence for PIP5K3 (NM_015040.1,3080-3098).
cacctgtaccggaatcatt

SEQ ID NO: 347128 - DNA, 19 bp, Homo sapiens
  siRNA target sequence for PIP5K3 (NM_015040.1,3082-3100).
cctgtaccggaatcattgt

SEQ ID NO: 347129 - DNA, 19 bp, Homo sapiens
  siRNA target sequence for PIP5K3 (NM_015040.1,3083-3101).
ctgtaccggaatcattgtt

SEQ ID NO: 347130 - DNA, 19 bp, Homo sapiens
  siRNA target sequence for PIP5K3 (NM_015040.1,3181-3199).
gatcccaaaagccagataa

SEQ ID NO: 347131 - DNA, 19 bp, Homo sapiens
  siRNA target sequence for PIP5K3 (NM_015040.1,3220-3238).
caggatgacactggattat

SEQ ID NO: 347132 - DNA, 19 bp, Homo sapiens
  siRNA target sequence for PIP5K3 (NM_015040.1,3230-3248).
ctggattatatgttactga

SEQ ID NO: 347133 - DNA, 19 bp, Homo sapiens
  siRNA target sequence for PIP5K3 (NM_015040.1,3253-3271).
gtcacctcctctgaagata

SEQ ID NO: 347134 - DNA, 19 bp, Homo sapiens
  siRNA target sequence for PIP5K3 (NM_015040.1,3268-3286).
gataaacgaaagacttatt

SEQ ID NO: 347135 - DNA, 19 bp, Homo sapiens
  siRNA target sequence for PIP5K3 (NM_015040.1,3348-3366).
ccgagaaccctttctttta

SEQ ID NO: 347136 - DNA, 19 bp, Homo sapiens
  siRNA target sequence for PIP5K3 (NM_015040.1,3355-3373).
ccctttcttttaactgaaa

SEQ ID NO: 347137 - DNA, 19 bp, Homo sapiens
  siRNA target sequence for PIP5K3 (NM_015040.1,3383-3401).
gatgctctacccgagatta

SEQ ID NO: 347138 - DNA, 19 bp, Homo sapiens
  siRNA target sequence for PIP5K3 (NM_015040.1,3422-3440).
ggtctcctctcctcaataa

SEQ ID NO: 347139 - DNA, 19 bp, Homo sapiens
  siRNA target sequence for PIP5K3 (NM_015040.1,3499-3517).
cttcagggcatgaatggaa

SEQ ID NO: 347140 - DNA, 19 bp, Homo sapiens
  siRNA target sequence for PIP5K3 (NM_015040.1,3518-3536).
gtattcaggccaagtctat

SEQ ID NO: 347141 - DNA, 19 bp, Homo sapiens
  siRNA target sequence for PIP5K3 (NM_015040.1,3556-3574).
gagctagtgagcactagaa

SEQ ID NO: 347142 - DNA, 19 bp, Homo sapiens
  siRNA target sequence for PIP5K3 (NM_015040.1,3558-3576).
gctagtgagcactagaatt

SEQ ID NO: 347143 - DNA, 19 bp, Homo sapiens
  siRNA target sequence for PIP5K3 (NM_015040.1,3596-3614).
gccagagcttgggtagaat

SEQ ID NO: 347144 - DNA, 19 bp, Homo sapiens
  siRNA target sequence for PIP5K3 (NM_015040.1,3685-3703).
gatgcatcaagtacttcaa

SEQ ID NO: 347145 - DNA, 19 bp, Homo sapiens
  siRNA target sequence for PIP5K3 (NM_015040.1,3786-3804).
ctgtctgaatcccattaat

SEQ ID NO: 347146 - DNA, 19 bp, Homo sapiens
  siRNA target sequence for PIP5K3 (NM_015040.1,3788-3806).
gtctgaatcccattaatca

SEQ ID NO: 347147 - DNA, 19 bp, Homo sapiens
  siRNA target sequence for PIP5K3 (NM_015040.1,3867-3885).
ctgtgtcagtccttggatt

SEQ ID NO: 347148 - DNA, 19 bp, Homo sapiens
  siRNA target sequence for PIP5K3 (NM_015040.1,3875-3893).
gtccttggattgtaacaat

SEQ ID NO: 347149 - DNA, 19 bp, Homo sapiens
  siRNA target sequence for PIP5K3 (NM_015040.1,3881-3899).
ggattgtaacaatggaatt

SEQ ID NO: 347150 - DNA, 19 bp, Homo sapiens
  siRNA target sequence for PIP5K3 (NM_015040.1,4081-4099).
cagcatacaattcttacat

SEQ ID NO: 347151 - DNA, 19 bp, Homo sapiens
  siRNA target sequence for PIP5K3 (NM_015040.1,4155-4173).
gtcctggtctatgtcattt

SEQ ID NO: 347152 - DNA, 19 bp, Homo sapiens
  siRNA target sequence for PIP5K3 (NM_015040.1,4241-4259).
gtcactccatccatcatga

SEQ ID NO: 347153 - DNA, 19 bp, Homo sapiens
  siRNA target sequence for PIP5K3 (NM_015040.1,4245-4263).
ctccatccatcatgattat

SEQ ID NO: 347154 - DNA, 19 bp, Homo sapiens
  siRNA target sequence for PIP5K3 (NM_015040.1,4285-4303).
cagatggtggcgtctttca

SEQ ID NO: 347155 - DNA, 19 bp, Homo sapiens
  siRNA target sequence for PIP5K3 (NM_015040.1,4290-4308).
ggtggcgtctttcagttat

SEQ ID NO: 347156 - DNA, 19 bp, Homo sapiens
  siRNA target sequence for PIP5K3 (NM_015040.1,4293-4311).
ggcgtctttcagttattct

SEQ ID NO: 347157 - DNA, 19 bp, Homo sapiens
  siRNA target sequence for PIP5K3 (NM_015040.1,4313-4331).
ccattcggcttcttgaagt

SEQ ID NO: 347158 - DNA, 19 bp, Homo sapiens
  siRNA target sequence for PIP5K3 (NM_015040.1,4314-4332).
cattcggcttcttgaagta

SEQ ID NO: 347159 - DNA, 19 bp, Homo sapiens
  siRNA target sequence for PIP5K3 (NM_015040.1,4342-4360).
ctccccaaaatattcatta

SEQ ID NO: 347160 - DNA, 19 bp, Homo sapiens
  siRNA target sequence for PIP5K3 (NM_015040.1,4364-4382).
gtcaggccccattaaaagt

SEQ ID NO: 347161 - DNA, 19 bp, Homo sapiens
  siRNA target sequence for PIP5K3 (NM_015040.1,4366-4384).
caggccccattaaaagtgt

SEQ ID NO: 347162 - DNA, 19 bp, Homo sapiens
  siRNA target sequence for PIP5K3 (NM_015040.1,4428-4446).
ggtatatgttgccattgat

SEQ ID NO: 347163 - DNA, 19 bp, Homo sapiens
  siRNA target sequence for PIP5K3 (NM_015040.1,4456-4474).
gcatctttgaaaactgata

SEQ ID NO: 347164 - DNA, 19 bp, Homo sapiens
  siRNA target sequence for PIP5K3 (NM_015040.1,4464-4482).
gaaaactgatacatttagt

SEQ ID NO: 347165 - DNA, 19 bp, Homo sapiens
  siRNA target sequence for PIP5K3 (NM_015040.1,4534-4552).
gaaggtgagttcaagaact

SEQ ID NO: 347166 - DNA, 19 bp, Homo sapiens
  siRNA target sequence for PIP5K3 (NM_015040.1,4663-4681).
ctgcaagcttggaataaca

SEQ ID NO: 347167 - DNA, 19 bp, Homo sapiens
  siRNA target sequence for PIP5K3 (NM_015040.1,4683-4701).
gttgcaggaccttttccaa

SEQ ID NO: 347168 - DNA, 19 bp, Homo sapiens
  siRNA target sequence for PIP5K3 (NM_015040.1,4789-4807).
gcatctccacggaatattt

SEQ ID NO: 347169 - DNA, 19 bp, Homo sapiens
  siRNA target sequence for PIP5K3 (NM_015040.1,4834-4852).
gaggatcgcttcttaacaa

SEQ ID NO: 347170 - DNA, 19 bp, Homo sapiens
  siRNA target sequence for PIP5K3 (NM_015040.1,4836-4854).
ggatcgcttcttaacaact

SEQ ID NO: 347171 - DNA, 19 bp, Homo sapiens
  siRNA target sequence for PIP5K3 (NM_015040.1,4837-4855).
gatcgcttcttaacaactt

SEQ ID NO: 347172 - DNA, 19 bp, Homo sapiens
  siRNA target sequence for PIP5K3 (NM_015040.1,4864-4882).
cagagctccaccagttcta

SEQ ID NO: 347173 - DNA, 19 bp, Homo sapiens
  siRNA target sequence for PIP5K3 (NM_015040.1,4869-4887).
ctccaccagttctactcat

SEQ ID NO: 347174 - DNA, 19 bp, Homo sapiens
  siRNA target sequence for PIP5K3 (NM_015040.1,4877-4895).
gttctactcatctccaatt

SEQ ID NO: 347175 - DNA, 19 bp, Homo sapiens
  siRNA target sequence for PIP5K3 (NM_015040.1,4898-4916).
ctacgccacctgaagtcat

SEQ ID NO: 347176 - DNA, 19 bp, Homo sapiens
  siRNA target sequence for PIP5K3 (NM_015040.1,4964-4982).
gttccgaagatgtgtttga

SEQ ID NO: 347177 - DNA, 19 bp, Homo sapiens
  siRNA target sequence for PIP5K3 (NM_015040.1,5000-5018).
ccacagacagccaagtgaa

SEQ ID NO: 347178 - DNA, 19 bp, Homo sapiens
  siRNA target sequence for PIP5K3 (NM_015040.1,5062-5080).
ggaaatagctataatccta

SEQ ID NO: 347179 - DNA, 19 bp, Homo sapiens
  siRNA target sequence for PIP5K3 (NM_015040.1,5063-5081).
gaaatagctataatcctat

SEQ ID NO: 347180 - DNA, 19 bp, Homo sapiens
  siRNA target sequence for PIP5K3 (NM_015040.1,5069-5087).
gctataatcctattccatt

SEQ ID NO: 347181 - DNA, 19 bp, Homo sapiens
  siRNA target sequence for PIP5K3 (NM_015040.1,5099-5117).
cagataaacactacttaat

SEQ ID NO: 347182 - DNA, 19 bp, Homo sapiens
  siRNA target sequence for PIP5K3 (NM_015040.1,5101-5119).
gataaacactacttaatgt

SEQ ID NO: 347183 - DNA, 19 bp, Homo sapiens
  siRNA target sequence for PIP5K3 (NM_015040.1,5176-5194).
gcttttgctctcagttgta

SEQ ID NO: 347184 - DNA, 19 bp, Homo sapiens
  siRNA target sequence for PIP5K3 (NM_015040.1,5182-5200).
gctctcagttgtaaagaat

SEQ ID NO: 347185 - DNA, 19 bp, Homo sapiens
  siRNA target sequence for PIP5K3 (NM_015040.1,5259-5277).
gcttccaacaaatagtact

SEQ ID NO: 347186 - DNA, 19 bp, Homo sapiens
  siRNA target sequence for PIP5K3 (NM_015040.1,5281-5299).
gatagcagaccaaagagta

SEQ ID NO: 347187 - DNA, 19 bp, Homo sapiens
  siRNA target sequence for PIP5K3 (NM_015040.1,5297-5315).
gtagcagccctatcagatt

SEQ ID NO: 347188 - DNA, 19 bp, Homo sapiens
  siRNA target sequence for PIP5K3 (NM_015040.1,5337-5355).
gacaaatcgtacaacagaa

SEQ ID NO: 347189 - DNA, 19 bp, Homo sapiens
  siRNA target sequence for PIP5K3 (NM_015040.1,5386-5404).
ggaatgttgtccttcttca

SEQ ID NO: 347190 - DNA, 19 bp, Homo sapiens
  siRNA target sequence for PIP5K3 (NM_015040.1,5454-5472).
cttacgtggagcagatagt

SEQ ID NO: 347191 - DNA, 19 bp, Homo sapiens
  siRNA target sequence for PIP5K3 (NM_015040.1,5502-5520).
ggaggggaccgagaatcaa

SEQ ID NO: 347192 - DNA, 19 bp, Homo sapiens
  siRNA target sequence for PIP5K3 (NM_015040.1,5522-5540).
gcgttgagcctcaagatga

SEQ ID NO: 347193 - DNA, 19 bp, Homo sapiens
  siRNA target sequence for PIP5K3 (NM_015040.1,5523-5541).
cgttgagcctcaagatgaa

SEQ ID NO: 347194 - DNA, 19 bp, Homo sapiens
  siRNA target sequence for PIP5K3 (NM_015040.1,5641-5659).
gcgggagagtttcataaga

SEQ ID NO: 347195 - DNA, 19 bp, Homo sapiens
  siRNA target sequence for PIP5K3 (NM_015040.1,5642-5660).
cgggagagtttcataagat

SEQ ID NO: 347196 - DNA, 19 bp, Homo sapiens
  siRNA target sequence for PIP5K3 (NM_015040.1,5686-5704).
gaagaagatttcattcgtt

SEQ ID NO: 347197 - DNA, 19 bp, Homo sapiens
  siRNA target sequence for PIP5K3 (NM_015040.1,5764-5782).
gcaactgaggatgatagat

SEQ ID NO: 347198 - DNA, 19 bp, Homo sapiens
  siRNA target sequence for PIP5K3 (NM_015040.1,5833-5851).
gcaccacattacttcaatt

SEQ ID NO: 347199 - DNA, 19 bp, Homo sapiens
  siRNA target sequence for PIP5K3 (NM_015040.1,5834-5852).
caccacattacttcaatta

SEQ ID NO: 347200 - DNA, 19 bp, Homo sapiens
  siRNA target sequence for PIP5K3 (NM_015040.1,5858-5876).
caaatgctgttcaacaaaa

SEQ ID NO: 347201 - DNA, 19 bp, Homo sapiens
  siRNA target sequence for PIP5K3 (NM_015040.1,5882-5900).
ccacggcgttggccaaaat

SEQ ID NO: 347202 - DNA, 19 bp, Homo sapiens
  siRNA target sequence for PIP5K3 (NM_015040.1,5883-5901).
cacggcgttggccaaaatt

SEQ ID NO: 347203 - DNA, 19 bp, Homo sapiens
  siRNA target sequence for PIP5K3 (NM_015040.1,5885-5903).
cggcgttggccaaaattct

SEQ ID NO: 347204 - DNA, 19 bp, Homo sapiens
  siRNA target sequence for PIP5K3 (NM_015040.1,5886-5904).
ggcgttggccaaaattctt

SEQ ID NO: 347205 - DNA, 19 bp, Homo sapiens
  siRNA target sequence for PIP5K3 (NM_015040.1,5906-5924).
gagtttacagaattggtta

SEQ ID NO: 347206 - DNA, 19 bp, Homo sapiens
  siRNA target sequence for PIP5K3 (NM_015040.1,5959-5977).
gatctccttgtcatggaaa

SEQ ID NO: 347207 - DNA, 19 bp, Homo sapiens
  siRNA target sequence for PIP5K3 (NM_015040.1,5980-5998).
cttttctacgggagaaaga

SEQ ID NO: 347208 - DNA, 19 bp, Homo sapiens
  siRNA target sequence for PIP5K3 (NM_015040.1,6013-6031).
gatttgaagggctctctta

SEQ ID NO: 347209 - DNA, 19 bp, Homo sapiens
  siRNA target sequence for PIP5K3 (NM_015040.1,6076-6094).
gtggtcctgctagatgaaa

SEQ ID NO: 347210 - DNA, 19 bp, Homo sapiens
  siRNA target sequence for PIP5K3 (NM_015040.1,6113-6131).
gagacaaccctctatatat

SEQ ID NO: 347211 - DNA, 19 bp, Homo sapiens
  siRNA target sequence for PIP5K3 (NM_015040.1,6117-6135).
caaccctctatatattcgt

SEQ ID NO: 347212 - DNA, 19 bp, Homo sapiens
  siRNA target sequence for PIP5K3 (NM_015040.1,6154-6172).
ctgagaacctcgatccata

SEQ ID NO: 347213 - DNA, 19 bp, Homo sapiens
  siRNA target sequence for PIP5K3 (NM_015040.1,6158-6176).
gaacctcgatccatagtga

SEQ ID NO: 347214 - DNA, 19 bp, Homo sapiens
  siRNA target sequence for PIP5K3 (NM_015040.1,6191-6209).
ctagccacctcattataga

SEQ ID NO: 347215 - DNA, 19 bp, Homo sapiens
  siRNA target sequence for PIP5K3 (NM_015040.1,6220-6238).
ctggttgggcgagatgata

SEQ ID NO: 347216 - DNA, 19 bp, Homo sapiens
  siRNA target sequence for PIP5K3 (NM_015040.1,6222-6240).
ggttgggcgagatgatact

SEQ ID NO: 347217 - DNA, 19 bp, Homo sapiens
  siRNA target sequence for PIP5K3 (NM_015040.1,6239-6257).
ctagcaatgagctagtagt

SEQ ID NO: 347218 - DNA, 19 bp, Homo sapiens
  siRNA target sequence for PIP5K3 (NM_015040.1,6247-6265).
gagctagtagttggaatta

SEQ ID NO: 347219 - DNA, 19 bp, Homo sapiens
  siRNA target sequence for PIP5K3 (NM_015040.1,6268-6286).
gattatattcgaacattta

SEQ ID NO: 347220 - DNA, 19 bp, Homo sapiens
  siRNA target sequence for PIP5K3 (NM_015040.1,6290-6308).
gggacaaaaagcttgagat

SEQ ID NO: 347221 - DNA, 19 bp, Homo sapiens
  siRNA target sequence for PIP5K3 (NM_015040.1,6392-6410).
gtgaggcaatggacaagta

SEQ ID NO: 347222 - DNA, 19 bp, Homo sapiens
  siRNA target sequence for KIAA0625 (NM_015046.4,224-242).
ccaccattgacttcctaaa

SEQ ID NO: 347223 - DNA, 19 bp, Homo sapiens
  siRNA target sequence for KIAA0625 (NM_015046.4,258-276).
cactccgtccggtgaattt

SEQ ID NO: 347224 - DNA, 19 bp, Homo sapiens
  siRNA target sequence for KIAA0625 (NM_015046.4,260-278).
ctccgtccggtgaatttca

SEQ ID NO: 347225 - DNA, 19 bp, Homo sapiens
  siRNA target sequence for KIAA0625 (NM_015046.4,262-280).
ccgtccggtgaatttcaaa

SEQ ID NO: 347226 - DNA, 19 bp, Homo sapiens
  siRNA target sequence for KIAA0625 (NM_015046.4,379-397).
gaaaccttacgtctcataa

SEQ ID NO: 347227 - DNA, 19 bp, Homo sapiens
  siRNA target sequence for KIAA0625 (NM_015046.4,383-401).
ccttacgtctcataaatca

SEQ ID NO: 347228 - DNA, 19 bp, Homo sapiens
  siRNA target sequence for KIAA0625 (NM_015046.4,444-462).
gttatatatagtagacaat

SEQ ID NO: 347229 - DNA, 19 bp, Homo sapiens
  siRNA target sequence for KIAA0625 (NM_015046.4,565-583).
gaacgtgttaacgagttat

SEQ ID NO: 347230 - DNA, 19 bp, Homo sapiens
  siRNA target sequence for KIAA0625 (NM_015046.4,620-638).
gctcctttcaggtgtttga

SEQ ID NO: 347231 - DNA, 19 bp, Homo sapiens
  siRNA target sequence for KIAA0625 (NM_015046.4,688-706).
cggcgttgggctatcttga

SEQ ID NO: 347232 - DNA, 19 bp, Homo sapiens
  siRNA target sequence for KIAA0625 (NM_015046.4,723-741).
gaaagtggacagagatgat

SEQ ID NO: 347233 - DNA, 19 bp, Homo sapiens
  siRNA target sequence for KIAA0625 (NM_015046.4,783-801).
cattgagttggggctttta

SEQ ID NO: 347234 - DNA, 19 bp, Homo sapiens
  siRNA target sequence for KIAA0625 (NM_015046.4,804-822).
gagtccagacatttatact

SEQ ID NO: 347235 - DNA, 19 bp, Homo sapiens
  siRNA target sequence for KIAA0625 (NM_015046.4,858-876).
gccctcacacatgtatgat

SEQ ID NO: 347236 - DNA, 19 bp, Homo sapiens
  siRNA target sequence for KIAA0625 (NM_015046.4,859-877).
ccctcacacatgtatgata

SEQ ID NO: 347237 - DNA, 19 bp, Homo sapiens
  siRNA target sequence for KIAA0625 (NM_015046.4,861-879).
ctcacacatgtatgatact

SEQ ID NO: 347238 - DNA, 19 bp, Homo sapiens
  siRNA target sequence for KIAA0625 (NM_015046.4,878-896).
ctaccaactacaaaagcta

SEQ ID NO: 347239 - DNA, 19 bp, Homo sapiens
  siRNA target sequence for KIAA0625 (NM_015046.4,954-972).
gttgttgggctcagacaaa

SEQ ID NO: 347240 - DNA, 19 bp, Homo sapiens
  siRNA target sequence for KIAA0625 (NM_015046.4,957-975).
gttgggctcagacaaacaa

SEQ ID NO: 347241 - DNA, 19 bp, Homo sapiens
  siRNA target sequence for KIAA0625 (NM_015046.4,1046-1064).
ggccagcgttacactgttt

SEQ ID NO: 347242 - DNA, 19 bp, Homo sapiens
  siRNA target sequence for KIAA0625 (NM_015046.4,1052-1070).
cgttacactgttttatggt

SEQ ID NO: 347243 - DNA, 19 bp, Homo sapiens
  siRNA target sequence for KIAA0625 (NM_015046.4,1098-1116).
ctggggtcaacttatggat

SEQ ID NO: 347244 - DNA, 19 bp, Homo sapiens
  siRNA target sequence for KIAA0625 (NM_015046.4,1117-1135).
cctattgtggcatttcaaa

SEQ ID NO: 347245 - DNA, 19 bp, Homo sapiens
  siRNA target sequence for KIAA0625 (NM_015046.4,1126-1144).
gcatttcaaaccattatca

SEQ ID NO: 347246 - DNA, 19 bp, Homo sapiens
  siRNA target sequence for KIAA0625 (NM_015046.4,1188-1206).
ctctgtaaggaccaagtta

SEQ ID NO: 347247 - DNA, 19 bp, Homo sapiens
  siRNA target sequence for KIAA0625 (NM_015046.4,1238-1256).
cttgcagccagatcgtata

SEQ ID NO: 347248 - DNA, 19 bp, Homo sapiens
  siRNA target sequence for KIAA0625 (NM_015046.4,1241-1259).
gcagccagatcgtatacaa

SEQ ID NO: 347249 - DNA, 19 bp, Homo sapiens
  siRNA target sequence for KIAA0625 (NM_015046.4,1242-1260).
cagccagatcgtatacaat

SEQ ID NO: 347250 - DNA, 19 bp, Homo sapiens
  siRNA target sequence for KIAA0625 (NM_015046.4,1244-1262).
gccagatcgtatacaatta

SEQ ID NO: 347251 - DNA, 19 bp, Homo sapiens
  siRNA target sequence for KIAA0625 (NM_015046.4,1313-1331).
cagattattgtcctaacat

SEQ ID NO: 347252 - DNA, 19 bp, Homo sapiens
  siRNA target sequence for KIAA0625 (NM_015046.4,1325-1343).
ctaacatgtatgaagaaat

SEQ ID NO: 347253 - DNA, 19 bp, Homo sapiens
  siRNA target sequence for KIAA0625 (NM_015046.4,1349-1367).
cattagccagtgtacttca

SEQ ID NO: 347254 - DNA, 19 bp, Homo sapiens
  siRNA target sequence for KIAA0625 (NM_015046.4,1358-1376).
gtgtacttcagtcagatat

SEQ ID NO: 347255 - DNA, 19 bp, Homo sapiens
  siRNA target sequence for KIAA0625 (NM_015046.4,1370-1388).
cagatattggtcaagacat

SEQ ID NO: 347256 - DNA, 19 bp, Homo sapiens
  siRNA target sequence for KIAA0625 (NM_015046.4,1381-1399).
caagacatgcgtgttcata

SEQ ID NO: 347257 - DNA, 19 bp, Homo sapiens
  siRNA target sequence for KIAA0625 (NM_015046.4,1432-1450).
cagtccctcatggatctta

SEQ ID NO: 347258 - DNA, 19 bp, Homo sapiens
  siRNA target sequence for KIAA0625 (NM_015046.4,1438-1456).
ctcatggatcttaaggatt

SEQ ID NO: 347259 - DNA, 19 bp, Homo sapiens
  siRNA target sequence for KIAA0625 (NM_015046.4,1470-1488).
catagcacaggttgttaat

SEQ ID NO: 347260 - DNA, 19 bp, Homo sapiens
  siRNA target sequence for KIAA0625 (NM_015046.4,1581-1599).
gattgaactgcatagaaat

SEQ ID NO: 347261 - DNA, 19 bp, Homo sapiens
  siRNA target sequence for KIAA0625 (NM_015046.4,1642-1660).
gtggaagccgtcgtcaaat

SEQ ID NO: 347262 - DNA, 19 bp, Homo sapiens
  siRNA target sequence for KIAA0625 (NM_015046.4,1644-1662).
ggaagccgtcgtcaaatgt

SEQ ID NO: 347263 - DNA, 19 bp, Homo sapiens
  siRNA target sequence for KIAA0625 (NM_015046.4,1690-1708).
cggagttctgagaaatcat

SEQ ID NO: 347264 - DNA, 19 bp, Homo sapiens
  siRNA target sequence for KIAA0625 (NM_015046.4,1726-1744).
ggaacagcaatgatatctt

SEQ ID NO: 347265 - DNA, 19 bp, Homo sapiens
  siRNA target sequence for KIAA0625 (NM_015046.4,1764-1782).
gccatctaactctgtacaa

SEQ ID NO: 347266 - DNA, 19 bp, Homo sapiens
  siRNA target sequence for KIAA0625 (NM_015046.4,1766-1784).
catctaactctgtacaact

SEQ ID NO: 347267 - DNA, 19 bp, Homo sapiens
  siRNA target sequence for KIAA0625 (NM_015046.4,1773-1791).
ctctgtacaacttgcttat

SEQ ID NO: 347268 - DNA, 19 bp, Homo sapiens
  siRNA target sequence for KIAA0625 (NM_015046.4,1786-1804).
gcttatgtgcagctgatta

SEQ ID NO: 347269 - DNA, 19 bp, Homo sapiens
  siRNA target sequence for KIAA0625 (NM_015046.4,1800-1818).
gattagaagtctccttaaa

SEQ ID NO: 347270 - DNA, 19 bp, Homo sapiens
  siRNA target sequence for KIAA0625 (NM_015046.4,1808-1826).
gtctccttaaagaaggtta

SEQ ID NO: 347271 - DNA, 19 bp, Homo sapiens
  siRNA target sequence for KIAA0625 (NM_015046.4,1860-1878).
ctgggataagctcaactta

SEQ ID NO: 347272 - DNA, 19 bp, Homo sapiens
  siRNA target sequence for KIAA0625 (NM_015046.4,1862-1880).
gggataagctcaacttatt

SEQ ID NO: 347273 - DNA, 19 bp, Homo sapiens
  siRNA target sequence for KIAA0625 (NM_015046.4,1900-1918).
ctaggttggcagttgacta

SEQ ID NO: 347274 - DNA, 19 bp, Homo sapiens
  siRNA target sequence for KIAA0625 (NM_015046.4,1981-1999).
gcacctccatgtaacactt

SEQ ID NO: 347275 - DNA, 19 bp, Homo sapiens
  siRNA target sequence for KIAA0625 (NM_015046.4,1985-2003).
ctccatgtaacacttttgt

SEQ ID NO: 347276 - DNA, 19 bp, Homo sapiens
  siRNA target sequence for KIAA0625 (NM_015046.4,2067-2085).
ggggaagacgtctagaaaa

SEQ ID NO: 347277 - DNA, 19 bp, Homo sapiens
  siRNA target sequence for KIAA0625 (NM_015046.4,2069-2087).
ggaagacgtctagaaaaga

SEQ ID NO: 347278 - DNA, 19 bp, Homo sapiens
  siRNA target sequence for KIAA0625 (NM_015046.4,2157-2175).
gatcaaagcagataacact

SEQ ID NO: 347279 - DNA, 19 bp, Homo sapiens
  siRNA target sequence for KIAA0625 (NM_015046.4,2172-2190).
cactatagaaggtgacaat

SEQ ID NO: 347280 - DNA, 19 bp, Homo sapiens
  siRNA target sequence for KIAA0625 (NM_015046.4,2235-2253).
cttagctgggtcatgctta

SEQ ID NO: 347281 - DNA, 19 bp, Homo sapiens
  siRNA target sequence for KIAA0625 (NM_015046.4,2249-2267).
gcttaaagcagagtagtaa

SEQ ID NO: 347282 - DNA, 19 bp, Homo sapiens
  siRNA target sequence for KIAA0625 (NM_015046.4,2358-2376).
ggactgtacttcaagaaat

SEQ ID NO: 347283 - DNA, 19 bp, Homo sapiens
  siRNA target sequence for KIAA0625 (NM_015046.4,2388-2406).
gggatgtgacagaggaata

SEQ ID NO: 347284 - DNA, 19 bp, Homo sapiens
  siRNA target sequence for KIAA0625 (NM_015046.4,2397-2415).
cagaggaataatagtatca

SEQ ID NO: 347285 - DNA, 19 bp, Homo sapiens
  siRNA target sequence for KIAA0625 (NM_015046.4,2410-2428).
gtatcaacacgtttgttga

SEQ ID NO: 347286 - DNA, 19 bp, Homo sapiens
  siRNA target sequence for KIAA0625 (NM_015046.4,2419-2437).
cgtttgttgactgattcta

SEQ ID NO: 347287 - DNA, 19 bp, Homo sapiens
  siRNA target sequence for KIAA0625 (NM_015046.4,2494-2512).
gatgctcttgctaaaacct

SEQ ID NO: 347288 - DNA, 19 bp, Homo sapiens
  siRNA target sequence for KIAA0625 (NM_015046.4,2551-2569).
gcaaagttatcacatgtaa

SEQ ID NO: 347289 - DNA, 19 bp, Homo sapiens
  siRNA target sequence for KIAA0625 (NM_015046.4,2589-2607).
gagtactttggtcgataat

SEQ ID NO: 347290 - DNA, 19 bp, Homo sapiens
  siRNA target sequence for KIAA0625 (NM_015046.4,2594-2612).
ctttggtcgataatactat

SEQ ID NO: 347291 - DNA, 19 bp, Homo sapiens
  siRNA target sequence for KIAA0625 (NM_015046.4,2598-2616).
ggtcgataatactatcaat

SEQ ID NO: 347292 - DNA, 19 bp, Homo sapiens
  siRNA target sequence for KIAA0625 (NM_015046.4,2599-2617).
gtcgataatactatcaatt

SEQ ID NO: 347293 - DNA, 19 bp, Homo sapiens
  siRNA target sequence for KIAA0625 (NM_015046.4,2723-2741).
gtggtgttctggatgataa

SEQ ID NO: 347294 - DNA, 19 bp, Homo sapiens
  siRNA target sequence for KIAA0625 (NM_015046.4,2725-2743).
ggtgttctggatgataaga

SEQ ID NO: 347295 - DNA, 19 bp, Homo sapiens
  siRNA target sequence for KIAA0625 (NM_015046.4,2726-2744).
gtgttctggatgataagaa

SEQ ID NO: 347296 - DNA, 19 bp, Homo sapiens
  siRNA target sequence for KIAA0625 (NM_015046.4,2918-2936).
ctccctttaaagatcttat

SEQ ID NO: 347297 - DNA, 19 bp, Homo sapiens
  siRNA target sequence for KIAA0625 (NM_015046.4,2920-2938).
ccctttaaagatcttatga

SEQ ID NO: 347298 - DNA, 19 bp, Homo sapiens
  siRNA target sequence for KIAA0625 (NM_015046.4,2937-2955).
gactgtacctgaatcaaga

SEQ ID NO: 347299 - DNA, 19 bp, Homo sapiens
  siRNA target sequence for KIAA0625 (NM_015046.4,3015-3033).
ccctgacatcagtcctaaa

SEQ ID NO: 347300 - DNA, 19 bp, Homo sapiens
  siRNA target sequence for KIAA0625 (NM_015046.4,3016-3034).
cctgacatcagtcctaaat

SEQ ID NO: 347301 - DNA, 19 bp, Homo sapiens
  siRNA target sequence for KIAA0625 (NM_015046.4,3028-3046).
cctaaatctgacaccttaa

SEQ ID NO: 347302 - DNA, 19 bp, Homo sapiens
  siRNA target sequence for KIAA0625 (NM_015046.4,3063-3081).
cagagaccttcacaaatta

SEQ ID NO: 347303 - DNA, 19 bp, Homo sapiens
  siRNA target sequence for KIAA0625 (NM_015046.4,3091-3109).
gctcaagccagtgttatta

SEQ ID NO: 347304 - DNA, 19 bp, Homo sapiens
  siRNA target sequence for KIAA0625 (NM_015046.4,3094-3112).
caagccagtgttattacgt

SEQ ID NO: 347305 - DNA, 19 bp, Homo sapiens
  siRNA target sequence for KIAA0625 (NM_015046.4,3142-3160).
cagctgcaaaggaaagtaa

SEQ ID NO: 347306 - DNA, 19 bp, Homo sapiens
  siRNA target sequence for KIAA0625 (NM_015046.4,3209-3227).
cctcccgtggacaggttat

SEQ ID NO: 347307 - DNA, 19 bp, Homo sapiens
  siRNA target sequence for KIAA0625 (NM_015046.4,3212-3230).
cccgtggacaggttattat

SEQ ID NO: 347308 - DNA, 19 bp, Homo sapiens
  siRNA target sequence for KIAA0625 (NM_015046.4,3213-3231).
ccgtggacaggttattatt

SEQ ID NO: 347309 - DNA, 19 bp, Homo sapiens
  siRNA target sequence for KIAA0625 (NM_015046.4,3214-3232).
cgtggacaggttattatta

SEQ ID NO: 347310 - DNA, 19 bp, Homo sapiens
  siRNA target sequence for KIAA0625 (NM_015046.4,3333-3351).
cgtttcaacagttaatagt

SEQ ID NO: 347311 - DNA, 19 bp, Homo sapiens
  siRNA target sequence for KIAA0625 (NM_015046.4,3334-3352).
gtttcaacagttaatagta

SEQ ID NO: 347312 - DNA, 19 bp, Homo sapiens
  siRNA target sequence for KIAA0625 (NM_015046.4,3386-3404).
cagagactctttttcagtt

SEQ ID NO: 347313 - DNA, 19 bp, Homo sapiens
  siRNA target sequence for KIAA0625 (NM_015046.4,3469-3487).
gatcatccagacgataata

SEQ ID NO: 347314 - DNA, 19 bp, Homo sapiens
  siRNA target sequence for KIAA0625 (NM_015046.4,3472-3490).
catccagacgataataatt

SEQ ID NO: 347315 - DNA, 19 bp, Homo sapiens
  siRNA target sequence for KIAA0625 (NM_015046.4,3476-3494).
cagacgataataattcagt

SEQ ID NO: 347316 - DNA, 19 bp, Homo sapiens
  siRNA target sequence for KIAA0625 (NM_015046.4,3519-3537).
ggctcctatagccaatact

SEQ ID NO: 347317 - DNA, 19 bp, Homo sapiens
  siRNA target sequence for KIAA0625 (NM_015046.4,3520-3538).
gctcctatagccaatacta

SEQ ID NO: 347318 - DNA, 19 bp, Homo sapiens
  siRNA target sequence for KIAA0625 (NM_015046.4,3544-3562).
ggtcagggttgtacagatt

SEQ ID NO: 347319 - DNA, 19 bp, Homo sapiens
  siRNA target sequence for KIAA0625 (NM_015046.4,3545-3563).
gtcagggttgtacagatta

SEQ ID NO: 347320 - DNA, 19 bp, Homo sapiens
  siRNA target sequence for KIAA0625 (NM_015046.4,3549-3567).
gggttgtacagattatgta

SEQ ID NO: 347321 - DNA, 19 bp, Homo sapiens
  siRNA target sequence for KIAA0625 (NM_015046.4,3550-3568).
ggttgtacagattatgtat

SEQ ID NO: 347322 - DNA, 19 bp, Homo sapiens
  siRNA target sequence for KIAA0625 (NM_015046.4,3554-3572).
gtacagattatgtatctga

SEQ ID NO: 347323 - DNA, 19 bp, Homo sapiens
  siRNA target sequence for KIAA0625 (NM_015046.4,3733-3751).
gagggccagtctgatacta

SEQ ID NO: 347324 - DNA, 19 bp, Homo sapiens
  siRNA target sequence for KIAA0625 (NM_015046.4,3735-3753).
gggccagtctgatactaat

SEQ ID NO: 347325 - DNA, 19 bp, Homo sapiens
  siRNA target sequence for KIAA0625 (NM_015046.4,3736-3754).
ggccagtctgatactaata

SEQ ID NO: 347326 - DNA, 19 bp, Homo sapiens
  siRNA target sequence for KIAA0625 (NM_015046.4,3737-3755).
gccagtctgatactaataa

SEQ ID NO: 347327 - DNA, 19 bp, Homo sapiens
  siRNA target sequence for KIAA0625 (NM_015046.4,3741-3759).
gtctgatactaataagaga

SEQ ID NO: 347328 - DNA, 19 bp, Homo sapiens
  siRNA target sequence for KIAA0625 (NM_015046.4,3798-3816).
gacttcaactcccaattca

SEQ ID NO: 347329 - DNA, 19 bp, Homo sapiens
  siRNA target sequence for KIAA0625 (NM_015046.4,3806-3824).
ctcccaattcacgtattca

SEQ ID NO: 347330 - DNA, 19 bp, Homo sapiens
  siRNA target sequence for KIAA0625 (NM_015046.4,3808-3826).
cccaattcacgtattcaga

SEQ ID NO: 347331 - DNA, 19 bp, Homo sapiens
  siRNA target sequence for KIAA0625 (NM_015046.4,3829-3847).
gccactacggtttcacaaa

SEQ ID NO: 347332 - DNA, 19 bp, Homo sapiens
  siRNA target sequence for KIAA0625 (NM_015046.4,3830-3848).
ccactacggtttcacaaaa

SEQ ID NO: 347333 - DNA, 19 bp, Homo sapiens
  siRNA target sequence for KIAA0625 (NM_015046.4,3861-3879).
gctttgtacttgtacagaa

SEQ ID NO: 347334 - DNA, 19 bp, Homo sapiens
  siRNA target sequence for KIAA0625 (NM_015046.4,3963-3981).
cctaagttgtagaacaact

SEQ ID NO: 347335 - DNA, 19 bp, Homo sapiens
  siRNA target sequence for KIAA0625 (NM_015046.4,3974-3992).
gaacaactcctgctatagt

SEQ ID NO: 347336 - DNA, 19 bp, Homo sapiens
  siRNA target sequence for KIAA0625 (NM_015046.4,3986-4004).
ctatagtgccgccaaagaa

SEQ ID NO: 347337 - DNA, 19 bp, Homo sapiens
  siRNA target sequence for KIAA0625 (NM_015046.4,3993-4011).
gccgccaaagaaatttcgt

SEQ ID NO: 347338 - DNA, 19 bp, Homo sapiens
  siRNA target sequence for KIAA0625 (NM_015046.4,4061-4079).
gtcctcgtaaggcatatga

SEQ ID NO: 347339 - DNA, 19 bp, Homo sapiens
  siRNA target sequence for KIAA0625 (NM_015046.4,4063-4081).
cctcgtaaggcatatgagt

SEQ ID NO: 347340 - DNA, 19 bp, Homo sapiens
  siRNA target sequence for KIAA0625 (NM_015046.4,4064-4082).
ctcgtaaggcatatgagtt

SEQ ID NO: 347341 - DNA, 19 bp, Homo sapiens
  siRNA target sequence for KIAA0625 (NM_015046.4,4085-4103).
cccagcggtctttggatta

SEQ ID NO: 347342 - DNA, 19 bp, Homo sapiens
  siRNA target sequence for KIAA0625 (NM_015046.4,4086-4104).
ccagcggtctttggattat

SEQ ID NO: 347343 - DNA, 19 bp, Homo sapiens
  siRNA target sequence for KIAA0625 (NM_015046.4,4089-4107).
gcggtctttggattatgta

SEQ ID NO: 347344 - DNA, 19 bp, Homo sapiens
  siRNA target sequence for KIAA0625 (NM_015046.4,4141-4159).
gtagttgatacccgaaaaa

SEQ ID NO: 347345 - DNA, 19 bp, Homo sapiens
  siRNA target sequence for KIAA0625 (NM_015046.4,4144-4162).
gttgatacccgaaaaaaga

SEQ ID NO: 347346 - DNA, 19 bp, Homo sapiens
  siRNA target sequence for KIAA0625 (NM_015046.4,4147-4165).
gatacccgaaaaaagacta

SEQ ID NO: 347347 - DNA, 19 bp, Homo sapiens
  siRNA target sequence for KIAA0625 (NM_015046.4,4152-4170).
ccgaaaaaagactaaatta

SEQ ID NO: 347348 - DNA, 19 bp, Homo sapiens
  siRNA target sequence for KIAA0625 (NM_015046.4,4185-4203).
cctgtctgtcagaaataat

SEQ ID NO: 347349 - DNA, 19 bp, Homo sapiens
  siRNA target sequence for KIAA0625 (NM_015046.4,4186-4204).
ctgtctgtcagaaataata

SEQ ID NO: 347350 - DNA, 19 bp, Homo sapiens
  siRNA target sequence for KIAA0625 (NM_015046.4,4217-4235).
ctagtcaagaacttcagat

SEQ ID NO: 347351 - DNA, 19 bp, Homo sapiens
  siRNA target sequence for KIAA0625 (NM_015046.4,4317-4335).
gtcacatacagcacagaat

SEQ ID NO: 347352 - DNA, 19 bp, Homo sapiens
  siRNA target sequence for KIAA0625 (NM_015046.4,4354-4372).
gaatctgataggtcagatt

SEQ ID NO: 347353 - DNA, 19 bp, Homo sapiens
  siRNA target sequence for KIAA0625 (NM_015046.4,4393-4411).
gaggtacttgccaacagta

SEQ ID NO: 347354 - DNA, 19 bp, Homo sapiens
  siRNA target sequence for KIAA0625 (NM_015046.4,4473-4491).
gtctccagcaactgatgat

SEQ ID NO: 347355 - DNA, 19 bp, Homo sapiens
  siRNA target sequence for KIAA0625 (NM_015046.4,4509-4527).
gtgtgattctgtagtgtta

SEQ ID NO: 347356 - DNA, 19 bp, Homo sapiens
  siRNA target sequence for KIAA0625 (NM_015046.4,4535-4553).
cagtaccaacaaatgaagt

SEQ ID NO: 347357 - DNA, 19 bp, Homo sapiens
  siRNA target sequence for KIAA0625 (NM_015046.4,4537-4555).
gtaccaacaaatgaagtaa

SEQ ID NO: 347358 - DNA, 19 bp, Homo sapiens
  siRNA target sequence for KIAA0625 (NM_015046.4,4598-4616).
cagcacgtcatatagagat

SEQ ID NO: 347359 - DNA, 19 bp, Homo sapiens
  siRNA target sequence for KIAA0625 (NM_015046.4,4657-4675).
gcagaggaagataacttat

SEQ ID NO: 347360 - DNA, 19 bp, Homo sapiens
  siRNA target sequence for KIAA0625 (NM_015046.4,4696-4714).
gaagatatggatttatgtt

SEQ ID NO: 347361 - DNA, 19 bp, Homo sapiens
  siRNA target sequence for KIAA0625 (NM_015046.4,4717-4735).
caaatggagaatgacaatt

SEQ ID NO: 347362 - DNA, 19 bp, Homo sapiens
  siRNA target sequence for KIAA0625 (NM_015046.4,4771-4789).
gttgaggttgaagaagatt

SEQ ID NO: 347363 - DNA, 19 bp, Homo sapiens
  siRNA target sequence for KIAA0625 (NM_015046.4,4798-4816).
cggcctcagttggaatctt

SEQ ID NO: 347364 - DNA, 19 bp, Homo sapiens
  siRNA target sequence for KIAA0625 (NM_015046.4,4799-4817).
ggcctcagttggaatcttt

SEQ ID NO: 347365 - DNA, 19 bp, Homo sapiens
  siRNA target sequence for KIAA0625 (NM_015046.4,4820-4838).
gtggcacaaagtgtaagta

SEQ ID NO: 347366 - DNA, 19 bp, Homo sapiens
  siRNA target sequence for KIAA0625 (NM_015046.4,4822-4840).
ggcacaaagtgtaagtaca

SEQ ID NO: 347367 - DNA, 19 bp, Homo sapiens
  siRNA target sequence for KIAA0625 (NM_015046.4,4823-4841).
gcacaaagtgtaagtacaa

SEQ ID NO: 347368 - DNA, 19 bp, Homo sapiens
  siRNA target sequence for KIAA0625 (NM_015046.4,4824-4842).
cacaaagtgtaagtacaaa

SEQ ID NO: 347369 - DNA, 19 bp, Homo sapiens
  siRNA target sequence for KIAA0625 (NM_015046.4,4832-4850).
gtaagtacaaagattgtct

SEQ ID NO: 347370 - DNA, 19 bp, Homo sapiens
  siRNA target sequence for KIAA0625 (NM_015046.4,4859-4877).
caaaaaaccagggtgaata

SEQ ID NO: 347371 - DNA, 19 bp, Homo sapiens
  siRNA target sequence for KIAA0625 (NM_015046.4,4873-4891).
gaatactgcccaaaacact

SEQ ID NO: 347372 - DNA, 19 bp, Homo sapiens
  siRNA target sequence for KIAA0625 (NM_015046.4,4909-4927).
gatgaagatgtatttcgta

SEQ ID NO: 347373 - DNA, 19 bp, Homo sapiens
  siRNA target sequence for KIAA0625 (NM_015046.4,4943-4961).
ctcctgcatctaaaccttt

SEQ ID NO: 347374 - DNA, 19 bp, Homo sapiens
  siRNA target sequence for KIAA0625 (NM_015046.4,4964-4982).
gacctaccactaagatttt

SEQ ID NO: 347375 - DNA, 19 bp, Homo sapiens
  siRNA target sequence for KIAA0625 (NM_015046.4,5002-5020).
cgaattgctggtctttcta

SEQ ID NO: 347376 - DNA, 19 bp, Homo sapiens
  siRNA target sequence for KIAA0625 (NM_015046.4,5041-5059).
gcactttcaccgtctctaa

SEQ ID NO: 347377 - DNA, 19 bp, Homo sapiens
  siRNA target sequence for KIAA0625 (NM_015046.4,5042-5060).
cactttcaccgtctctaaa

SEQ ID NO: 347378 - DNA, 19 bp, Homo sapiens
  siRNA target sequence for KIAA0625 (NM_015046.4,5076-5094).
gatacagtcgattttgaaa

SEQ ID NO: 347379 - DNA, 19 bp, Homo sapiens
  siRNA target sequence for KIAA0625 (NM_015046.4,5134-5152).
ggtgaaatgaagaattcgt

SEQ ID NO: 347380 - DNA, 19 bp, Homo sapiens
  siRNA target sequence for KIAA0625 (NM_015046.4,5145-5163).
gaattcgtgcaatgttctt

SEQ ID NO: 347381 - DNA, 19 bp, Homo sapiens
  siRNA target sequence for KIAA0625 (NM_015046.4,5167-5185).
cctcagtctccgaataatt

SEQ ID NO: 347382 - DNA, 19 bp, Homo sapiens
  siRNA target sequence for KIAA0625 (NM_015046.4,5170-5188).
cagtctccgaataattcca

SEQ ID NO: 347383 - DNA, 19 bp, Homo sapiens
  siRNA target sequence for KIAA0625 (NM_015046.4,5190-5208).
caggcaaggttgcaaagtt

SEQ ID NO: 347384 - DNA, 19 bp, Homo sapiens
  siRNA target sequence for KIAA0625 (NM_015046.4,5275-5293).
gtctctgacaccttcgtta

SEQ ID NO: 347385 - DNA, 19 bp, Homo sapiens
  siRNA target sequence for KIAA0625 (NM_015046.4,5277-5295).
ctctgacaccttcgttaaa

SEQ ID NO: 347386 - DNA, 19 bp, Homo sapiens
  siRNA target sequence for KIAA0625 (NM_015046.4,5279-5297).
ctgacaccttcgttaaaga

SEQ ID NO: 347387 - DNA, 19 bp, Homo sapiens
  siRNA target sequence for KIAA0625 (NM_015046.4,5348-5366).
cccctgcaagtctttgtca

SEQ ID NO: 347388 - DNA, 19 bp, Homo sapiens
  siRNA target sequence for KIAA0625 (NM_015046.4,5378-5396).
gacctgtgcctgtcagatt

SEQ ID NO: 347389 - DNA, 19 bp, Homo sapiens
  siRNA target sequence for KIAA0625 (NM_015046.4,5430-5448).
ccctttgatggtattgaat

SEQ ID NO: 347390 - DNA, 19 bp, Homo sapiens
  siRNA target sequence for KIAA0625 (NM_015046.4,5439-5457).
ggtattgaatacttttgaa

SEQ ID NO: 347391 - DNA, 19 bp, Homo sapiens
  siRNA target sequence for KIAA0625 (NM_015046.4,5475-5493).
gctcaactctccaaataga

SEQ ID NO: 347392 - DNA, 19 bp, Homo sapiens
  siRNA target sequence for KIAA0625 (NM_015046.4,5511-5529).
gcaagtacgaaaatttcct

SEQ ID NO: 347393 - DNA, 19 bp, Homo sapiens
  siRNA target sequence for KIAA0625 (NM_015046.4,5527-5545).
cctgccgattatataaaat

SEQ ID NO: 347394 - DNA, 19 bp, Homo sapiens
  siRNA target sequence for KIAA0625 (NM_015046.4,5528-5546).
ctgccgattatataaaata

SEQ ID NO: 347395 - DNA, 19 bp, Homo sapiens
  siRNA target sequence for KIAA0625 (NM_015046.4,5530-5548).
gccgattatataaaatact

SEQ ID NO: 347396 - DNA, 19 bp, Homo sapiens
  siRNA target sequence for KIAA0625 (NM_015046.4,5547-5565).
ctgggagtttgcagtttat

SEQ ID NO: 347397 - DNA, 19 bp, Homo sapiens
  siRNA target sequence for KIAA0625 (NM_015046.4,5557-5575).
gcagtttatctggaagaat

SEQ ID NO: 347398 - DNA, 19 bp, Homo sapiens
  siRNA target sequence for KIAA0625 (NM_015046.4,5584-5602).
gctaaacagctttatccaa

SEQ ID NO: 347399 - DNA, 19 bp, Homo sapiens
  siRNA target sequence for KIAA0625 (NM_015046.4,5610-5628).
cgatttggtgtttttagct

SEQ ID NO: 347400 - DNA, 19 bp, Homo sapiens
  siRNA target sequence for KIAA0625 (NM_015046.4,5680-5698).
gatctccacgaatatcatt

SEQ ID NO: 347401 - DNA, 19 bp, Homo sapiens
  siRNA target sequence for KIAA0625 (NM_015046.4,5733-5751).
catgcgtaatgggaaaact

SEQ ID NO: 347402 - DNA, 19 bp, Homo sapiens
  siRNA target sequence for KIAA0625 (NM_015046.4,5769-5787).
ccagactcaagagaacttt

SEQ ID NO: 347403 - DNA, 19 bp, Homo sapiens
  siRNA target sequence for KIAA0625 (NM_015046.4,5792-5810).
ccaatttaaacgaacttgt

SEQ ID NO: 347404 - DNA, 19 bp, Homo sapiens
  siRNA target sequence for KIAA0625 (NM_015046.4,5811-5829).
gaattgtattgtaatcagt

SEQ ID NO: 347405 - DNA, 19 bp, Homo sapiens
  siRNA target sequence for KIAA0625 (NM_015046.4,5826-5844).
cagttctctggtaactaca

SEQ ID NO: 347406 - DNA, 19 bp, Homo sapiens
  siRNA target sequence for KIAA0625 (NM_015046.4,5917-5935).
cctatggacttctgtacaa

SEQ ID NO: 347407 - DNA, 19 bp, Homo sapiens
  siRNA target sequence for KIAA0625 (NM_015046.4,5918-5936).
ctatggacttctgtacaaa

SEQ ID NO: 347408 - DNA, 19 bp, Homo sapiens
  siRNA target sequence for KIAA0625 (NM_015046.4,5951-5969).
caacatctgagagaattat

SEQ ID NO: 347409 - DNA, 19 bp, Homo sapiens
  siRNA target sequence for KIAA0625 (NM_015046.4,5961-5979).
gagaattattgcgtactta

SEQ ID NO: 347410 - DNA, 19 bp, Homo sapiens
  siRNA target sequence for KIAA0625 (NM_015046.4,5971-5989).
gcgtacttaagagatttca

SEQ ID NO: 347411 - DNA, 19 bp, Homo sapiens
  siRNA target sequence for KIAA0625 (NM_015046.4,5981-5999).
gagatttcaatgaagatca

SEQ ID NO: 347412 - DNA, 19 bp, Homo sapiens
  siRNA target sequence for KIAA0625 (NM_015046.4,5983-6001).
gatttcaatgaagatcaaa

SEQ ID NO: 347413 - DNA, 19 bp, Homo sapiens
  siRNA target sequence for KIAA0625 (NM_015046.4,6020-6038).
catatgctatggtgaaaca

SEQ ID NO: 347414 - DNA, 19 bp, Homo sapiens
  siRNA target sequence for KIAA0625 (NM_015046.4,6033-6051).
gaaacactcaccatcagtt

SEQ ID NO: 347415 - DNA, 19 bp, Homo sapiens
  siRNA target sequence for KIAA0625 (NM_015046.4,6148-6166).
gggcattcagacgaaaact

SEQ ID NO: 347416 - DNA, 19 bp, Homo sapiens
  siRNA target sequence for KIAA0625 (NM_015046.4,6198-6216).
cgtgtgtgcaccttccaat

SEQ ID NO: 347417 - DNA, 19 bp, Homo sapiens
  siRNA target sequence for KIAA0625 (NM_015046.4,6292-6310).
ggaaactgtggagatataa

SEQ ID NO: 347418 - DNA, 19 bp, Homo sapiens
  siRNA target sequence for KIAA0625 (NM_015046.4,6299-6317).
gtggagatataaatttagt

SEQ ID NO: 347419 - DNA, 19 bp, Homo sapiens
  siRNA target sequence for KIAA0625 (NM_015046.4,6319-6337).
cgactgggtccagaaaagt

SEQ ID NO: 347420 - DNA, 19 bp, Homo sapiens
  siRNA target sequence for KIAA0625 (NM_015046.4,6412-6430).
catgttcaggcgatgcata

SEQ ID NO: 347421 - DNA, 19 bp, Homo sapiens
  siRNA target sequence for KIAA0625 (NM_015046.4,6489-6507).
ccgaggtggacgggaaata

SEQ ID NO: 347422 - DNA, 19 bp, Homo sapiens
  siRNA target sequence for KIAA0625 (NM_015046.4,6493-6511).
ggtggacgggaaatacaga

SEQ ID NO: 347423 - DNA, 19 bp, Homo sapiens
  siRNA target sequence for KIAA0625 (NM_015046.4,6559-6577).
gaacttgcttctaaaatta

SEQ ID NO: 347424 - DNA, 19 bp, Homo sapiens
  siRNA target sequence for KIAA0625 (NM_015046.4,6586-6604).
caaggacgcccacagaaaa

SEQ ID NO: 347425 - DNA, 19 bp, Homo sapiens
  siRNA target sequence for KIAA0625 (NM_015046.4,6651-6669).
gagcacaagtggtggttta

SEQ ID NO: 347426 - DNA, 19 bp, Homo sapiens
  siRNA target sequence for KIAA0625 (NM_015046.4,6653-6671).
gcacaagtggtggtttact

SEQ ID NO: 347427 - DNA, 19 bp, Homo sapiens
  siRNA target sequence for KIAA0625 (NM_015046.4,6654-6672).
cacaagtggtggtttacta

SEQ ID NO: 347428 - DNA, 19 bp, Homo sapiens
  siRNA target sequence for KIAA0625 (NM_015046.4,6733-6751).
gctggacagtcttgtgaaa

SEQ ID NO: 347429 - DNA, 19 bp, Homo sapiens
  siRNA target sequence for KIAA0625 (NM_015046.4,6820-6838).
cctccgacagtcatctcta

SEQ ID NO: 347430 - DNA, 19 bp, Homo sapiens
  siRNA target sequence for KIAA0625 (NM_015046.4,6821-6839).
ctccgacagtcatctctat

SEQ ID NO: 347431 - DNA, 19 bp, Homo sapiens
  siRNA target sequence for KIAA0625 (NM_015046.4,6857-6875).
gctacgaccagtcaatgat

SEQ ID NO: 347432 - DNA, 19 bp, Homo sapiens
  siRNA target sequence for KIAA0625 (NM_015046.4,6924-6942).
cagcaggctgcccattcta

SEQ ID NO: 347433 - DNA, 19 bp, Homo sapiens
  siRNA target sequence for KIAA0625 (NM_015046.4,6960-6978).
caggatgcatccagacata

SEQ ID NO: 347434 - DNA, 19 bp, Homo sapiens
  siRNA target sequence for KIAA0625 (NM_015046.4,6987-7005).
cccttctaattatgtttat

SEQ ID NO: 347435 - DNA, 19 bp, Homo sapiens
  siRNA target sequence for KIAA0625 (NM_015046.4,6988-7006).
ccttctaattatgtttata

SEQ ID NO: 347436 - DNA, 19 bp, Homo sapiens
  siRNA target sequence for KIAA0625 (NM_015046.4,7030-7048).
cagacagaagccattcgat

SEQ ID NO: 347437 - DNA, 19 bp, Homo sapiens
  siRNA target sequence for KIAA0625 (NM_015046.4,7036-7054).
gaagccattcgatgttcat

SEQ ID NO: 347438 - DNA, 19 bp, Homo sapiens
  siRNA target sequence for KIAA0625 (NM_015046.4,7041-7059).
cattcgatgttcatcagat

SEQ ID NO: 347439 - DNA, 19 bp, Homo sapiens
  siRNA target sequence for KIAA0625 (NM_015046.4,7052-7070).
catcagattggccatttca

SEQ ID NO: 347440 - DNA, 19 bp, Homo sapiens
  siRNA target sequence for KIAA0625 (NM_015046.4,7062-7080).
gccatttcagccatacctt

SEQ ID NO: 347441 - DNA, 19 bp, Homo sapiens
  siRNA target sequence for KIAA0625 (NM_015046.4,7103-7121).
cagaaagacgggataatga

SEQ ID NO: 347442 - DNA, 19 bp, Homo sapiens
  siRNA target sequence for KIAA0625 (NM_015046.4,7105-7123).
gaaagacgggataatgact

SEQ ID NO: 347443 - DNA, 19 bp, Homo sapiens
  siRNA target sequence for KIAA0625 (NM_015046.4,7109-7127).
gacgggataatgactcata

SEQ ID NO: 347444 - DNA, 19 bp, Homo sapiens
  siRNA target sequence for KIAA0625 (NM_015046.4,7111-7129).
cgggataatgactcatata

SEQ ID NO: 347445 - DNA, 19 bp, Homo sapiens
  siRNA target sequence for KIAA0625 (NM_015046.4,7112-7130).
gggataatgactcatatat

SEQ ID NO: 347446 - DNA, 19 bp, Homo sapiens
  siRNA target sequence for KIAA0625 (NM_015046.4,7113-7131).
ggataatgactcatatata

SEQ ID NO: 347447 - DNA, 19 bp, Homo sapiens
  siRNA target sequence for KIAA0625 (NM_015046.4,7114-7132).
gataatgactcatatataa

SEQ ID NO: 347448 - DNA, 19 bp, Homo sapiens
  siRNA target sequence for KIAA0625 (NM_015046.4,7204-7222).
cgaaacattggcataataa

SEQ ID NO: 347449 - DNA, 19 bp, Homo sapiens
  siRNA target sequence for KIAA0625 (NM_015046.4,7209-7227).
cattggcataataactcat

SEQ ID NO: 347450 - DNA, 19 bp, Homo sapiens
  siRNA target sequence for KIAA0625 (NM_015046.4,7213-7231).
ggcataataactcattaca

SEQ ID NO: 347451 - DNA, 19 bp, Homo sapiens
  siRNA target sequence for KIAA0625 (NM_015046.4,7214-7232).
gcataataactcattacaa

SEQ ID NO: 347452 - DNA, 19 bp, Homo sapiens
  siRNA target sequence for KIAA0625 (NM_015046.4,7235-7253).
cccagaagacgatgattca

SEQ ID NO: 347453 - DNA, 19 bp, Homo sapiens
  siRNA target sequence for KIAA0625 (NM_015046.4,7244-7262).
cgatgattcagaaggattt

SEQ ID NO: 347454 - DNA, 19 bp, Homo sapiens
  siRNA target sequence for KIAA0625 (NM_015046.4,7264-7282).
gacaaagagttcgatagaa

SEQ ID NO: 347455 - DNA, 19 bp, Homo sapiens
  siRNA target sequence for KIAA0625 (NM_015046.4,7322-7340).
gtcggcagaaggattgtgt

SEQ ID NO: 347456 - DNA, 19 bp, Homo sapiens
  siRNA target sequence for KIAA0625 (NM_015046.4,7324-7342).
cggcagaaggattgtgtta

SEQ ID NO: 347457 - DNA, 19 bp, Homo sapiens
  siRNA target sequence for KIAA0625 (NM_015046.4,7352-7370).
gtgtcagagcaaatagcat

SEQ ID NO: 347458 - DNA, 19 bp, Homo sapiens
  siRNA target sequence for KIAA0625 (NM_015046.4,7397-7415).
gtttgcagagattgaatgt

SEQ ID NO: 347459 - DNA, 19 bp, Homo sapiens
  siRNA target sequence for KIAA0625 (NM_015046.4,7512-7530).
gaagcgtggtgccattatt

SEQ ID NO: 347460 - DNA, 19 bp, Homo sapiens
  siRNA target sequence for KIAA0625 (NM_015046.4,7516-7534).
cgtggtgccattattaaga

SEQ ID NO: 347461 - DNA, 19 bp, Homo sapiens
  siRNA target sequence for KIAA0625 (NM_015046.4,7533-7551).
gacctgtgacaaaaactat

SEQ ID NO: 347462 - DNA, 19 bp, Homo sapiens
  siRNA target sequence for KIAA0625 (NM_015046.4,7542-7560).
caaaaactatagacatgat

SEQ ID NO: 347463 - DNA, 19 bp, Homo sapiens
  siRNA target sequence for KIAA0625 (NM_015046.4,7553-7571).
gacatgatgcagtgaagat

SEQ ID NO: 347464 - DNA, 19 bp, Homo sapiens
  siRNA target sequence for KIAA0625 (NM_015046.4,8034-8052).
cacgtgtcagagcaaatgt

SEQ ID NO: 347465 - DNA, 19 bp, Homo sapiens
  siRNA target sequence for KIAA0625 (NM_015046.4,8036-8054).
cgtgtcagagcaaatgtga

SEQ ID NO: 347466 - DNA, 19 bp, Homo sapiens
  siRNA target sequence for KIAA0090 (NM_015047.1,118-136).
ccaagtgggcaagtttgat

SEQ ID NO: 347467 - DNA, 19 bp, Homo sapiens
  siRNA target sequence for KIAA0090 (NM_015047.1,248-266).
cgaactggggagatcttgt

SEQ ID NO: 347468 - DNA, 19 bp, Homo sapiens
  siRNA target sequence for KIAA0090 (NM_015047.1,365-383).
cgttcctgggagactaaca

SEQ ID NO: 347469 - DNA, 19 bp, Homo sapiens
  siRNA target sequence for KIAA0090 (NM_015047.1,389-407).
ggcctgaactgggagataa

SEQ ID NO: 347470 - DNA, 19 bp, Homo sapiens
  siRNA target sequence for KIAA0090 (NM_015047.1,632-650).
gtgaacattgtcaagttta

SEQ ID NO: 347471 - DNA, 19 bp, Homo sapiens
  siRNA target sequence for KIAA0090 (NM_015047.1,674-692).
cagcaggttagggtttcaa

SEQ ID NO: 347472 - DNA, 19 bp, Homo sapiens
  siRNA target sequence for KIAA0090 (NM_015047.1,768-786).
cacgttccctccaaacttt

SEQ ID NO: 347473 - DNA, 19 bp, Homo sapiens
  siRNA target sequence for KIAA0090 (NM_015047.1,826-844).
gcagtctctcgacttagaa

SEQ ID NO: 347474 - DNA, 19 bp, Homo sapiens
  siRNA target sequence for KIAA0090 (NM_015047.1,827-845).
cagtctctcgacttagaat

SEQ ID NO: 347475 - DNA, 19 bp, Homo sapiens
  siRNA target sequence for KIAA0090 (NM_015047.1,829-847).
gtctctcgacttagaattt

SEQ ID NO: 347476 - DNA, 19 bp, Homo sapiens
  siRNA target sequence for KIAA0090 (NM_015047.1,833-851).
ctcgacttagaatttggaa

SEQ ID NO: 347477 - DNA, 19 bp, Homo sapiens
  siRNA target sequence for KIAA0090 (NM_015047.1,944-962).
gctctgctgcagtaccatt

SEQ ID NO: 347478 - DNA, 19 bp, Homo sapiens
  siRNA target sequence for KIAA0090 (NM_015047.1,945-963).
ctctgctgcagtaccatta

SEQ ID NO: 347479 - DNA, 19 bp, Homo sapiens
  siRNA target sequence for KIAA0090 (NM_015047.1,965-983).
ggaacgctgagtttgctta

SEQ ID NO: 347480 - DNA, 19 bp, Homo sapiens
  siRNA target sequence for KIAA0090 (NM_015047.1,966-984).
gaacgctgagtttgcttaa

SEQ ID NO: 347481 - DNA, 19 bp, Homo sapiens
  siRNA target sequence for KIAA0090 (NM_015047.1,969-987).
cgctgagtttgcttaaaaa

SEQ ID NO: 347482 - DNA, 19 bp, Homo sapiens
  siRNA target sequence for KIAA0090 (NM_015047.1,1048-1066).
catggcctgtcggaatgaa

SEQ ID NO: 347483 - DNA, 19 bp, Homo sapiens
  siRNA target sequence for KIAA0090 (NM_015047.1,1113-1131).
cggagaagtctagttcaaa

SEQ ID NO: 347484 - DNA, 19 bp, Homo sapiens
  siRNA target sequence for KIAA0090 (NM_015047.1,1199-1217).
ctgctggacaccacgataa

SEQ ID NO: 347485 - DNA, 19 bp, Homo sapiens
  siRNA target sequence for KIAA0090 (NM_015047.1,1201-1219).
gctggacaccacgataaca

SEQ ID NO: 347486 - DNA, 19 bp, Homo sapiens
  siRNA target sequence for KIAA0090 (NM_015047.1,1202-1220).
ctggacaccacgataacat

SEQ ID NO: 347487 - DNA, 19 bp, Homo sapiens
  siRNA target sequence for KIAA0090 (NM_015047.1,1244-1262).
cggcctgagcggctgtata

SEQ ID NO: 347488 - DNA, 19 bp, Homo sapiens
  siRNA target sequence for KIAA0090 (NM_015047.1,1245-1263).
ggcctgagcggctgtatat

SEQ ID NO: 347489 - DNA, 19 bp, Homo sapiens
  siRNA target sequence for KIAA0090 (NM_015047.1,1248-1266).
ctgagcggctgtatatcca

SEQ ID NO: 347490 - DNA, 19 bp, Homo sapiens
  siRNA target sequence for KIAA0090 (NM_015047.1,1319-1337).
gaggatcatctgctacttt

SEQ ID NO: 347491 - DNA, 19 bp, Homo sapiens
  siRNA target sequence for KIAA0090 (NM_015047.1,1503-1521).
gcctctcgtctcagcttat

SEQ ID NO: 347492 - DNA, 19 bp, Homo sapiens
  siRNA target sequence for KIAA0090 (NM_015047.1,1581-1599).
ggagtcagattaagaatga

SEQ ID NO: 347493 - DNA, 19 bp, Homo sapiens
  siRNA target sequence for KIAA0090 (NM_015047.1,1584-1602).
gtcagattaagaatgagat

SEQ ID NO: 347494 - DNA, 19 bp, Homo sapiens
  siRNA target sequence for KIAA0090 (NM_015047.1,1708-1726).
cctgtggaaacagtatcta

SEQ ID NO: 347495 - DNA, 19 bp, Homo sapiens
  siRNA target sequence for KIAA0090 (NM_015047.1,1718-1736).
cagtatctacccaatgtca

SEQ ID NO: 347496 - DNA, 19 bp, Homo sapiens
  siRNA target sequence for KIAA0090 (NM_015047.1,1822-1840).
caaggagtcgggaatgagt

SEQ ID NO: 347497 - DNA, 19 bp, Homo sapiens
  siRNA target sequence for KIAA0090 (NM_015047.1,1831-1849).
gggaatgagttctctgtat

SEQ ID NO: 347498 - DNA, 19 bp, Homo sapiens
  siRNA target sequence for KIAA0090 (NM_015047.1,1964-1982).
ctgttgatagatgatgaat

SEQ ID NO: 347499 - DNA, 19 bp, Homo sapiens
  siRNA target sequence for KIAA0090 (NM_015047.1,2001-2019).
cagccactcggaatgtctt

SEQ ID NO: 347500 - DNA, 19 bp, Homo sapiens
  siRNA target sequence for KIAA0090 (NM_015047.1,2077-2095).
gggacggctgtgtggatat

SEQ ID NO: 347501 - DNA, 19 bp, Homo sapiens
  siRNA target sequence for KIAA0090 (NM_015047.1,2088-2106).
gtggatatcggcttcgaaa

SEQ ID NO: 347502 - DNA, 19 bp, Homo sapiens
  siRNA target sequence for KIAA0090 (NM_015047.1,2139-2157).
ccattcccccagaagtaca

SEQ ID NO: 347503 - DNA, 19 bp, Homo sapiens
  siRNA target sequence for KIAA0090 (NM_015047.1,2228-2246).
cgcagtgtgctctacaaga

SEQ ID NO: 347504 - DNA, 19 bp, Homo sapiens
  siRNA target sequence for KIAA0090 (NM_015047.1,2294-2312).
caccatgagcgcaccttta

SEQ ID NO: 347505 - DNA, 19 bp, Homo sapiens
  siRNA target sequence for KIAA0090 (NM_015047.1,2296-2314).
ccatgagcgcacctttatt

SEQ ID NO: 347506 - DNA, 19 bp, Homo sapiens
  siRNA target sequence for KIAA0090 (NM_015047.1,2334-2352).
gcgtcactgggcgtatcat

SEQ ID NO: 347507 - DNA, 19 bp, Homo sapiens
  siRNA target sequence for KIAA0090 (NM_015047.1,2335-2353).
cgtcactgggcgtatcatt

SEQ ID NO: 347508 - DNA, 19 bp, Homo sapiens
  siRNA target sequence for KIAA0090 (NM_015047.1,2441-2459).
gctcggcgcaacgagttta

SEQ ID NO: 347509 - DNA, 19 bp, Homo sapiens
  siRNA target sequence for KIAA0090 (NM_015047.1,2460-2478).
ccgtactggagctctatga

SEQ ID NO: 347510 - DNA, 19 bp, Homo sapiens
  siRNA target sequence for KIAA0090 (NM_015047.1,2540-2558).
gtcctccagcagtcctata

SEQ ID NO: 347511 - DNA, 19 bp, Homo sapiens
  siRNA target sequence for KIAA0090 (NM_015047.1,2543-2561).
ctccagcagtcctatatct

SEQ ID NO: 347512 - DNA, 19 bp, Homo sapiens
  siRNA target sequence for KIAA0090 (NM_015047.1,2692-2710).
cgagatcccaacagaacaa

SEQ ID NO: 347513 - DNA, 19 bp, Homo sapiens
  siRNA target sequence for KIAA0090 (NM_015047.1,2722-2740).
gaacttaatcccgtattct

SEQ ID NO: 347514 - DNA, 19 bp, Homo sapiens
  siRNA target sequence for KIAA0090 (NM_015047.1,2739-2757).
ctccagatgtacagataca

SEQ ID NO: 347515 - DNA, 19 bp, Homo sapiens
  siRNA target sequence for KIAA0090 (NM_015047.1,2756-2774).
cacgcagagcgattcatca

SEQ ID NO: 347516 - DNA, 19 bp, Homo sapiens
  siRNA target sequence for KIAA0090 (NM_015047.1,2759-2777).
gcagagcgattcatcaact

SEQ ID NO: 347517 - DNA, 19 bp, Homo sapiens
  siRNA target sequence for KIAA0090 (NM_015047.1,2760-2778).
cagagcgattcatcaacta

SEQ ID NO: 347518 - DNA, 19 bp, Homo sapiens
  siRNA target sequence for KIAA0090 (NM_015047.1,2762-2780).
gagcgattcatcaactata

SEQ ID NO: 347519 - DNA, 19 bp, Homo sapiens
  siRNA target sequence for KIAA0090 (NM_015047.1,2793-2811).
ctcgaatgcgaggtatcta

SEQ ID NO: 347520 - DNA, 19 bp, Homo sapiens
  siRNA target sequence for KIAA0090 (NM_015047.1,2795-2813).
cgaatgcgaggtatctaca

SEQ ID NO: 347521 - DNA, 19 bp, Homo sapiens
  siRNA target sequence for KIAA0090 (NM_015047.1,2825-2843).
ggtctggagtccacttgtt

SEQ ID NO: 347522 - DNA, 19 bp, Homo sapiens
  siRNA target sequence for KIAA0090 (NM_015047.1,2830-2848).
ggagtccacttgtttggtt

SEQ ID NO: 347523 - DNA, 19 bp, Homo sapiens
  siRNA target sequence for KIAA0090 (NM_015047.1,2852-2870).
gcctatggtttggacattt

SEQ ID NO: 347524 - DNA, 19 bp, Homo sapiens
  siRNA target sequence for KIAA0090 (NM_015047.1,2853-2871).
cctatggtttggacattta

SEQ ID NO: 347525 - DNA, 19 bp, Homo sapiens
  siRNA target sequence for KIAA0090 (NM_015047.1,2905-2923).
cgttctgaaggatgactat

SEQ ID NO: 347526 - DNA, 19 bp, Homo sapiens
  siRNA target sequence for KIAA0090 (NM_015047.1,2960-2978).
gtttttgccaccatgatca

SEQ ID NO: 347527 - DNA, 19 bp, Homo sapiens
  siRNA target sequence for ELKS (NM_015064.2,500-518).
caccgtcgaaccaacagta

SEQ ID NO: 347528 - DNA, 19 bp, Homo sapiens
  siRNA target sequence for ELKS (NM_015064.2,559-577).
gaaaaccctttcaatggaa

SEQ ID NO: 347529 - DNA, 19 bp, Homo sapiens
  siRNA target sequence for ELKS (NM_015064.2,609-627).
cctctggccctatgtatct

SEQ ID NO: 347530 - DNA, 19 bp, Homo sapiens
  siRNA target sequence for ELKS (NM_015064.2,610-628).
ctctggccctatgtatcta

SEQ ID NO: 347531 - DNA, 19 bp, Homo sapiens
  siRNA target sequence for ELKS (NM_015064.2,727-745).
gggtagtagccccaatata

SEQ ID NO: 347532 - DNA, 19 bp, Homo sapiens
  siRNA target sequence for ELKS (NM_015064.2,761-779).
gctagtgacaccatagcat

SEQ ID NO: 347533 - DNA, 19 bp, Homo sapiens
  siRNA target sequence for ELKS (NM_015064.2,762-780).
ctagtgacaccatagcatt

SEQ ID NO: 347534 - DNA, 19 bp, Homo sapiens
  siRNA target sequence for ELKS (NM_015064.2,833-851).
cttcgtcaggcgagagata

SEQ ID NO: 347535 - DNA, 19 bp, Homo sapiens
  siRNA target sequence for ELKS (NM_015064.2,836-854).
cgtcaggcgagagataaca

SEQ ID NO: 347536 - DNA, 19 bp, Homo sapiens
  siRNA target sequence for ELKS (NM_015064.2,843-861).
cgagagataacacaatcat

SEQ ID NO: 347537 - DNA, 19 bp, Homo sapiens
  siRNA target sequence for ELKS (NM_015064.2,934-952).
gagcaaattgagttcttca

SEQ ID NO: 347538 - DNA, 19 bp, Homo sapiens
  siRNA target sequence for ELKS (NM_015064.2,1019-1037).
gcttccaaaatcaccattt

SEQ ID NO: 347539 - DNA, 19 bp, Homo sapiens
  siRNA target sequence for ELKS (NM_015064.2,1165-1183).
gactggcgaaccttgtgta

SEQ ID NO: 347540 - DNA, 19 bp, Homo sapiens
  siRNA target sequence for ELKS (NM_015064.2,1249-1267).
gtttcttcttcgaaagaca

SEQ ID NO: 347541 - DNA, 19 bp, Homo sapiens
  siRNA target sequence for ELKS (NM_015064.2,1310-1328).
ctaaatgctcgggatgaat

SEQ ID NO: 347542 - DNA, 19 bp, Homo sapiens
  siRNA target sequence for ELKS (NM_015064.2,1316-1334).
gctcgggatgaatccatta

SEQ ID NO: 347543 - DNA, 19 bp, Homo sapiens
  siRNA target sequence for ELKS (NM_015064.2,1317-1335).
ctcgggatgaatccattaa

SEQ ID NO: 347544 - DNA, 19 bp, Homo sapiens
  siRNA target sequence for ELKS (NM_015064.2,1319-1337).
cgggatgaatccattaaga

SEQ ID NO: 347545 - DNA, 19 bp, Homo sapiens
  siRNA target sequence for ELKS (NM_015064.2,1430-1448).
cacgttcatcacctagaaa

SEQ ID NO: 347546 - DNA, 19 bp, Homo sapiens
  siRNA target sequence for ELKS (NM_015064.2,1492-1510).
ggagatgcatcgaaggttt

SEQ ID NO: 347547 - DNA, 19 bp, Homo sapiens
  siRNA target sequence for ELKS (NM_015064.2,1498-1516).
gcatcgaaggtttgagaat

SEQ ID NO: 347548 - DNA, 19 bp, Homo sapiens
  siRNA target sequence for ELKS (NM_015064.2,1544-1562).
ctgcaaactgttattgaga

SEQ ID NO: 347549 - DNA, 19 bp, Homo sapiens
  siRNA target sequence for ELKS (NM_015064.2,1688-1706).
gtgtatcggagccattcta

SEQ ID NO: 347550 - DNA, 19 bp, Homo sapiens
  siRNA target sequence for ELKS (NM_015064.2,1694-1712).
cggagccattctaaattta

SEQ ID NO: 347551 - DNA, 19 bp, Homo sapiens
  siRNA target sequence for ELKS (NM_015064.2,1698-1716).
gccattctaaatttatgaa

SEQ ID NO: 347552 - DNA, 19 bp, Homo sapiens
  siRNA target sequence for ELKS (NM_015064.2,1699-1717).
ccattctaaatttatgaaa

SEQ ID NO: 347553 - DNA, 19 bp, Homo sapiens
  siRNA target sequence for ELKS (NM_015064.2,1818-1836).
gtaaacagcacattgaagt

SEQ ID NO: 347554 - DNA, 19 bp, Homo sapiens
  siRNA target sequence for ELKS (NM_015064.2,1919-1937).
gagaaggaaaccatgttga

SEQ ID NO: 347555 - DNA, 19 bp, Homo sapiens
  siRNA target sequence for ELKS (NM_015064.2,2024-2042).
gtgaaggagcggaaggtta

SEQ ID NO: 347556 - DNA, 19 bp, Homo sapiens
  siRNA target sequence for ELKS (NM_015064.2,2029-2047).
ggagcggaaggttaatgtt

SEQ ID NO: 347557 - DNA, 19 bp, Homo sapiens
  siRNA target sequence for ELKS (NM_015064.2,2032-2050).
gcggaaggttaatgttctt

SEQ ID NO: 347558 - DNA, 19 bp, Homo sapiens
  siRNA target sequence for ELKS (NM_015064.2,2098-2116).
gcagatgagcagcttgaaa

SEQ ID NO: 347559 - DNA, 19 bp, Homo sapiens
  siRNA target sequence for ELKS (NM_015064.2,2194-2212).
gaaagagcggacaattgaa

SEQ ID NO: 347560 - DNA, 19 bp, Homo sapiens
  siRNA target sequence for ELKS (NM_015064.2,2202-2220).
ggacaattgaacgcttaaa

SEQ ID NO: 347561 - DNA, 19 bp, Homo sapiens
  siRNA target sequence for ELKS (NM_015064.2,2257-2275).
ggaaattgataactacaaa

SEQ ID NO: 347562 - DNA, 19 bp, Homo sapiens
  siRNA target sequence for ELKS (NM_015064.2,2258-2276).
gaaattgataactacaaaa

SEQ ID NO: 347563 - DNA, 19 bp, Homo sapiens
  siRNA target sequence for ELKS (NM_015064.2,2319-2337).
gcgacctttcagagaaaga

SEQ ID NO: 347564 - DNA, 19 bp, Homo sapiens
  siRNA target sequence for ELKS (NM_015064.2,2377-2395).
ggcatcctcaggactgaaa

SEQ ID NO: 347565 - DNA, 19 bp, Homo sapiens
  siRNA target sequence for ELKS (NM_015064.2,2378-2396).
gcatcctcaggactgaaaa

SEQ ID NO: 347566 - DNA, 19 bp, Homo sapiens
  siRNA target sequence for ELKS (NM_015064.2,2382-2400).
cctcaggactgaaaaagga

SEQ ID NO: 347567 - DNA, 19 bp, Homo sapiens
  siRNA target sequence for ELKS (NM_015064.2,2398-2416).
ggactcacggcttaagaca

SEQ ID NO: 347568 - DNA, 19 bp, Homo sapiens
  siRNA target sequence for ELKS (NM_015064.2,2406-2424).
ggcttaagacactagagat

SEQ ID NO: 347569 - DNA, 19 bp, Homo sapiens
  siRNA target sequence for ELKS (NM_015064.2,2453-2471).
ctgaaaatggaatcacaat

SEQ ID NO: 347570 - DNA, 19 bp, Homo sapiens
  siRNA target sequence for ELKS (NM_015064.2,2551-2569).
gatcaccaggtacaaagat

SEQ ID NO: 347571 - DNA, 19 bp, Homo sapiens
  siRNA target sequence for ELKS (NM_015064.2,2554-2572).
caccaggtacaaagatgaa

SEQ ID NO: 347572 - DNA, 19 bp, Homo sapiens
  siRNA target sequence for ELKS (NM_015064.2,2557-2575).
caggtacaaagatgaatct

SEQ ID NO: 347573 - DNA, 19 bp, Homo sapiens
  siRNA target sequence for ELKS (NM_015064.2,2581-2599).
ggcccaggcagaagttgat

SEQ ID NO: 347574 - DNA, 19 bp, Homo sapiens
  siRNA target sequence for ELKS (NM_015064.2,2701-2719).
gaataagaaggtagcaaat

SEQ ID NO: 347575 - DNA, 19 bp, Homo sapiens
  siRNA target sequence for ELKS (NM_015064.2,2749-2767).
gaagagtgcacaaatgtta

SEQ ID NO: 347576 - DNA, 19 bp, Homo sapiens
  siRNA target sequence for ELKS (NM_015064.2,2778-2796).
gacgacgggaggacaatct

SEQ ID NO: 347577 - DNA, 19 bp, Homo sapiens
  siRNA target sequence for ELKS (NM_015064.2,2780-2798).
cgacgggaggacaatctca

SEQ ID NO: 347578 - DNA, 19 bp, Homo sapiens
  siRNA target sequence for ELKS (NM_015064.2,2851-2869).
ggtaaagcaggaactagaa

SEQ ID NO: 347579 - DNA, 19 bp, Homo sapiens
  siRNA target sequence for ELKS (NM_015064.2,2860-2878).
ggaactagaatccatgaaa

SEQ ID NO: 347580 - DNA, 19 bp, Homo sapiens
  siRNA target sequence for ELKS (NM_015064.2,2917-2935).
ggaaactcacttgactaat

SEQ ID NO: 347581 - DNA, 19 bp, Homo sapiens
  siRNA target sequence for ELKS (NM_015064.2,3038-3056).
gagctttcgtcctctaaga

SEQ ID NO: 347582 - DNA, 19 bp, Homo sapiens
  siRNA target sequence for ELKS (NM_015064.2,3121-3139).
gcagcagacgcaaaatcga

SEQ ID NO: 347583 - DNA, 19 bp, Homo sapiens
  siRNA target sequence for ELKS (NM_015064.2,3122-3140).
cagcagacgcaaaatcgaa

SEQ ID NO: 347584 - DNA, 19 bp, Homo sapiens
  siRNA target sequence for ELKS (NM_015064.2,3187-3205).
ccattccaatcaaacaaat

SEQ ID NO: 347585 - DNA, 19 bp, Homo sapiens
  siRNA target sequence for ELKS (NM_015064.2,3192-3210).
ccaatcaaacaaatcacaa

SEQ ID NO: 347586 - DNA, 19 bp, Homo sapiens
  siRNA target sequence for SLAC2-B (NM_015065.1,107-125).
gttcctccggcgtttgatt

SEQ ID NO: 347587 - DNA, 19 bp, Homo sapiens
  siRNA target sequence for SLAC2-B (NM_015065.1,110-128).
cctccggcgtttgatttca

SEQ ID NO: 347588 - DNA, 19 bp, Homo sapiens
  siRNA target sequence for SLAC2-B (NM_015065.1,113-131).
ccggcgtttgatttcagtt

SEQ ID NO: 347589 - DNA, 19 bp, Homo sapiens
  siRNA target sequence for SLAC2-B (NM_015065.1,312-330).
cagatgttagccaaatgtt

SEQ ID NO: 347590 - DNA, 19 bp, Homo sapiens
  siRNA target sequence for SLAC2-B (NM_015065.1,357-375).
gtaaggagatggcaaaaaa

SEQ ID NO: 347591 - DNA, 19 bp, Homo sapiens
  siRNA target sequence for SLAC2-B (NM_015065.1,377-395).
gatccgatagaattaccta

SEQ ID NO: 347592 - DNA, 19 bp, Homo sapiens
  siRNA target sequence for SLAC2-B (NM_015065.1,392-410).
cctacatcaagatctaaaa

SEQ ID NO: 347593 - DNA, 19 bp, Homo sapiens
  siRNA target sequence for SLAC2-B (NM_015065.1,393-411).
ctacatcaagatctaaaaa

SEQ ID NO: 347594 - DNA, 19 bp, Homo sapiens
  siRNA target sequence for SLAC2-B (NM_015065.1,396-414).
catcaagatctaaaaatgt

SEQ ID NO: 347595 - DNA, 19 bp, Homo sapiens
  siRNA target sequence for SLAC2-B (NM_015065.1,454-472).
gagcttcagatcgtcattt

SEQ ID NO: 347596 - DNA, 19 bp, Homo sapiens
  siRNA target sequence for SLAC2-B (NM_015065.1,457-475).
cttcagatcgtcatttgct

SEQ ID NO: 347597 - DNA, 19 bp, Homo sapiens
  siRNA target sequence for SLAC2-B (NM_015065.1,585-603).
ctgtgcaggcaaaaatata

SEQ ID NO: 347598 - DNA, 19 bp, Homo sapiens
  siRNA target sequence for SLAC2-B (NM_015065.1,587-605).
gtgcaggcaaaaatataca

SEQ ID NO: 347599 - DNA, 19 bp, Homo sapiens
  siRNA target sequence for SLAC2-B (NM_015065.1,592-610).
ggcaaaaatatacaattca

SEQ ID NO: 347600 - DNA, 19 bp, Homo sapiens
  siRNA target sequence for SLAC2-B (NM_015065.1,623-641).
catctagttgacagtacat

SEQ ID NO: 347601 - DNA, 19 bp, Homo sapiens
  siRNA target sequence for SLAC2-B (NM_015065.1,770-788).
gcaagctcagtgaatacca

SEQ ID NO: 347602 - DNA, 19 bp, Homo sapiens
  siRNA target sequence for SLAC2-B (NM_015065.1,787-805).
cagaacacccctcaactat

SEQ ID NO: 347603 - DNA, 19 bp, Homo sapiens
  siRNA target sequence for SLAC2-B (NM_015065.1,796-814).
cctcaactatggatcaaga

SEQ ID NO: 347604 - DNA, 19 bp, Homo sapiens
  siRNA target sequence for SLAC2-B (NM_015065.1,797-815).
ctcaactatggatcaagaa

SEQ ID NO: 347605 - DNA, 19 bp, Homo sapiens
  siRNA target sequence for SLAC2-B (NM_015065.1,818-836).
cagttcggtcacttttatt

SEQ ID NO: 347606 - DNA, 19 bp, Homo sapiens
  siRNA target sequence for SLAC2-B (NM_015065.1,851-869).
catggtaatatcacagaaa

SEQ ID NO: 347607 - DNA, 19 bp, Homo sapiens
  siRNA target sequence for SLAC2-B (NM_015065.1,894-912).
cttccaatatgtctatcta

SEQ ID NO: 347608 - DNA, 19 bp, Homo sapiens
  siRNA target sequence for SLAC2-B (NM_015065.1,897-915).
ccaatatgtctatctatga

SEQ ID NO: 347609 - DNA, 19 bp, Homo sapiens
  siRNA target sequence for SLAC2-B (NM_015065.1,933-951).
ctcctagggaaggttttaa

SEQ ID NO: 347610 - DNA, 19 bp, Homo sapiens
  siRNA target sequence for SLAC2-B (NM_015065.1,940-958).
ggaaggttttaaaaccttt

SEQ ID NO: 347611 - DNA, 19 bp, Homo sapiens
  siRNA target sequence for SLAC2-B (NM_015065.1,966-984).
ggacaagcacaatttatga

SEQ ID NO: 347612 - DNA, 19 bp, Homo sapiens
  siRNA target sequence for SLAC2-B (NM_015065.1,967-985).
gacaagcacaatttatgat

SEQ ID NO: 347613 - DNA, 19 bp, Homo sapiens
  siRNA target sequence for SLAC2-B (NM_015065.1,969-987).
caagcacaatttatgatat

SEQ ID NO: 347614 - DNA, 19 bp, Homo sapiens
  siRNA target sequence for SLAC2-B (NM_015065.1,972-990).
gcacaatttatgatatgta

SEQ ID NO: 347615 - DNA, 19 bp, Homo sapiens
  siRNA target sequence for SLAC2-B (NM_015065.1,999-1017).
gggagcccagagtctttaa

SEQ ID NO: 347616 - DNA, 19 bp, Homo sapiens
  siRNA target sequence for SLAC2-B (NM_015065.1,1196-1214).
cctttatcatccatcatat

SEQ ID NO: 347617 - DNA, 19 bp, Homo sapiens
  siRNA target sequence for SLAC2-B (NM_015065.1,1293-1311).
ccgctgacaagtatgtgta

SEQ ID NO: 347618 - DNA, 19 bp, Homo sapiens
  siRNA target sequence for SLAC2-B (NM_015065.1,1317-1335).
ggggttttcaggagaataa

SEQ ID NO: 347619 - DNA, 19 bp, Homo sapiens
  siRNA target sequence for SLAC2-B (NM_015065.1,1319-1337).
ggttttcaggagaataaga

SEQ ID NO: 347620 - DNA, 19 bp, Homo sapiens
  siRNA target sequence for SLAC2-B (NM_015065.1,1347-1365).
cgtaccattcacagaatgt

SEQ ID NO: 347621 - DNA, 19 bp, Homo sapiens
  siRNA target sequence for SLAC2-B (NM_015065.1,1348-1366).
gtaccattcacagaatgtt

SEQ ID NO: 347622 - DNA, 19 bp, Homo sapiens
  siRNA target sequence for SLAC2-B (NM_015065.1,1364-1382).
gtttaccaacgtgttagtt

SEQ ID NO: 347623 - DNA, 19 bp, Homo sapiens
  siRNA target sequence for SLAC2-B (NM_015065.1,1369-1387).
ccaacgtgttagtttaaat

SEQ ID NO: 347624 - DNA, 19 bp, Homo sapiens
  siRNA target sequence for SLAC2-B (NM_015065.1,1404-1422).
caatgagtcccgacacttt

SEQ ID NO: 347625 - DNA, 19 bp, Homo sapiens
  siRNA target sequence for SLAC2-B (NM_015065.1,1410-1428).
gtcccgacacttttgagaa

SEQ ID NO: 347626 - DNA, 19 bp, Homo sapiens
  siRNA target sequence for SLAC2-B (NM_015065.1,1577-1595).
catcgaagcaggaaatcat

SEQ ID NO: 347627 - DNA, 19 bp, Homo sapiens
  siRNA target sequence for SLAC2-B (NM_015065.1,1580-1598).
cgaagcaggaaatcattca

SEQ ID NO: 347628 - DNA, 19 bp, Homo sapiens
  siRNA target sequence for SLAC2-B (NM_015065.1,1663-1681).
ccataatgtttcttctgaa

SEQ ID NO: 347629 - DNA, 19 bp, Homo sapiens
  siRNA target sequence for SLAC2-B (NM_015065.1,1742-1760).
catccttggcagtttgatt

SEQ ID NO: 347630 - DNA, 19 bp, Homo sapiens
  siRNA target sequence for SLAC2-B (NM_015065.1,1767-1785).
gatccacactggatagcat

SEQ ID NO: 347631 - DNA, 19 bp, Homo sapiens
  siRNA target sequence for SLAC2-B (NM_015065.1,1790-1808).
gtatcacatggtaatgaga

SEQ ID NO: 347632 - DNA, 19 bp, Homo sapiens
  siRNA target sequence for SLAC2-B (NM_015065.1,1809-1827).
cccagttgactcctcattt

SEQ ID NO: 347633 - DNA, 19 bp, Homo sapiens
  siRNA target sequence for SLAC2-B (NM_015065.1,2295-2313).
cagggatctcaaactcttt

SEQ ID NO: 347634 - DNA, 19 bp, Homo sapiens
  siRNA target sequence for SLAC2-B (NM_015065.1,2304-2322).
caaactctttacctgattt

SEQ ID NO: 347635 - DNA, 19 bp, Homo sapiens
  siRNA target sequence for SLAC2-B (NM_015065.1,2356-2374).
caacgggtttggttttaat

SEQ ID NO: 347636 - DNA, 19 bp, Homo sapiens
  siRNA target sequence for SLAC2-B (NM_015065.1,2480-2498).
gataagaggtttactgaaa

SEQ ID NO: 347637 - DNA, 19 bp, Homo sapiens
  siRNA target sequence for SLAC2-B (NM_015065.1,2583-2601).
gtcaccaggaattaactgt

SEQ ID NO: 347638 - DNA, 19 bp, Homo sapiens
  siRNA target sequence for SLAC2-B (NM_015065.1,2622-2640).
gaattattacaaataacca

SEQ ID NO: 347639 - DNA, 19 bp, Homo sapiens
  siRNA target sequence for SLAC2-B (NM_015065.1,2649-2667).
ctgcactgactgatactca

SEQ ID NO: 347640 - DNA, 19 bp, Homo sapiens
  siRNA target sequence for SLAC2-B (NM_015065.1,2651-2669).
gcactgactgatactcaaa

SEQ ID NO: 347641 - DNA, 19 bp, Homo sapiens
  siRNA target sequence for SLAC2-B (NM_015065.1,2656-2674).
gactgatactcaaaatgca

SEQ ID NO: 347642 - DNA, 19 bp, Homo sapiens
  siRNA target sequence for SLAC2-B (NM_015065.1,2712-2730).
cctcgtgtgattctttaga

SEQ ID NO: 347643 - DNA, 19 bp, Homo sapiens
  siRNA target sequence for SLAC2-B (NM_015065.1,2715-2733).
cgtgtgattctttagatct

SEQ ID NO: 347644 - DNA, 19 bp, Homo sapiens
  siRNA target sequence for SLAC2-B (NM_015065.1,2880-2898).
ggaagaaccaaaagaatca

SEQ ID NO: 347645 - DNA, 19 bp, Homo sapiens
  siRNA target sequence for SLAC2-B (NM_015065.1,2981-2999).
cattcacactctcctttta

SEQ ID NO: 347646 - DNA, 19 bp, Homo sapiens
  siRNA target sequence for SLAC2-B (NM_015065.1,3028-3046).
gcatcatatatcctgtatt

SEQ ID NO: 347647 - DNA, 19 bp, Homo sapiens
  siRNA target sequence for SLAC2-B (NM_015065.1,3042-3060).
gtattgaaaagttaagcaa

SEQ ID NO: 347648 - DNA, 19 bp, Homo sapiens
  siRNA target sequence for SLAC2-B (NM_015065.1,3096-3114).
ggagcctcattgaagcaaa

SEQ ID NO: 347649 - DNA, 19 bp, Homo sapiens
  siRNA target sequence for SLAC2-B (NM_015065.1,3100-3118).
cctcattgaagcaaatcaa

SEQ ID NO: 347650 - DNA, 19 bp, Homo sapiens
  siRNA target sequence for SLAC2-B (NM_015065.1,3126-3144).
ccaaagtttctgaacttga

SEQ ID NO: 347651 - DNA, 19 bp, Homo sapiens
  siRNA target sequence for SLAC2-B (NM_015065.1,3275-3293).
gatgcaatggggaactata

SEQ ID NO: 347652 - DNA, 19 bp, Homo sapiens
  siRNA target sequence for SLAC2-B (NM_015065.1,3278-3296).
gcaatggggaactatatgt

SEQ ID NO: 347653 - DNA, 19 bp, Homo sapiens
  siRNA target sequence for SLAC2-B (NM_015065.1,3320-3338).
cctgagtcagcgaatgaat

SEQ ID NO: 347654 - DNA, 19 bp, Homo sapiens
  siRNA target sequence for SLAC2-B (NM_015065.1,3323-3341).
gagtcagcgaatgaatgtt

SEQ ID NO: 347655 - DNA, 19 bp, Homo sapiens
  siRNA target sequence for SLAC2-B (NM_015065.1,3382-3400).
cacagagagaatgacaaat

SEQ ID NO: 347656 - DNA, 19 bp, Homo sapiens
  siRNA target sequence for SLAC2-B (NM_015065.1,3413-3431).
ggatctacttccgttagaa

SEQ ID NO: 347657 - DNA, 19 bp, Homo sapiens
  siRNA target sequence for SLAC2-B (NM_015065.1,3414-3432).
gatctacttccgttagaaa

SEQ ID NO: 347658 - DNA, 19 bp, Homo sapiens
  siRNA target sequence for SLAC2-B (NM_015065.1,3451-3469).
catcaacagggctatgtca

SEQ ID NO: 347659 - DNA, 19 bp, Homo sapiens
  siRNA target sequence for SLAC2-B (NM_015065.1,3561-3579).
gggcttgggagagaatcat

SEQ ID NO: 347660 - DNA, 19 bp, Homo sapiens
  siRNA target sequence for SLAC2-B (NM_015065.1,3562-3580).
ggcttgggagagaatcatt

SEQ ID NO: 347661 - DNA, 19 bp, Homo sapiens
  siRNA target sequence for SLAC2-B (NM_015065.1,3563-3581).
gcttgggagagaatcatta

SEQ ID NO: 347662 - DNA, 19 bp, Homo sapiens
  siRNA target sequence for SLAC2-B (NM_015065.1,3615-3633).
gttctttaaccaaaagaca

SEQ ID NO: 347663 - DNA, 19 bp, Homo sapiens
  siRNA target sequence for SLAC2-B (NM_015065.1,3691-3709).
caggagaagtgtatttgct

SEQ ID NO: 347664 - DNA, 19 bp, Homo sapiens
  siRNA target sequence for SLAC2-B (NM_015065.1,3761-3779).
cgtgggaaaacattacata

SEQ ID NO: 347665 - DNA, 19 bp, Homo sapiens
  siRNA target sequence for SLAC2-B (NM_015065.1,3787-3805).
gacgactagtacgttttct

SEQ ID NO: 347666 - DNA, 19 bp, Homo sapiens
  siRNA target sequence for SLAC2-B (NM_015065.1,3789-3807).
cgactagtacgttttctgt

SEQ ID NO: 347667 - DNA, 19 bp, Homo sapiens
  siRNA target sequence for SLAC2-B (NM_015065.1,3790-3808).
gactagtacgttttctgtt

SEQ ID NO: 347668 - DNA, 19 bp, Homo sapiens
  siRNA target sequence for SLAC2-B (NM_015065.1,3834-3852).
gtctggaggtggtctcaat

SEQ ID NO: 347669 - DNA, 19 bp, Homo sapiens
  siRNA target sequence for SLAC2-B (NM_015065.1,3844-3862).
ggtctcaatatattacact

SEQ ID NO: 347670 - DNA, 19 bp, Homo sapiens
  siRNA target sequence for SLAC2-B (NM_015065.1,3895-3913).
cctccttcaacagtataca

SEQ ID NO: 347671 - DNA, 19 bp, Homo sapiens
  siRNA target sequence for SLAC2-B (NM_015065.1,3898-3916).
ccttcaacagtatacacaa

SEQ ID NO: 347672 - DNA, 19 bp, Homo sapiens
  siRNA target sequence for SLAC2-B (NM_015065.1,3944-3962).
caagtggagactgaaacat

SEQ ID NO: 347673 - DNA, 19 bp, Homo sapiens
  siRNA target sequence for SLAC2-B (NM_015065.1,3966-3984).
ctaacgctttagaaaaaga

SEQ ID NO: 347674 - DNA, 19 bp, Homo sapiens
  siRNA target sequence for SLAC2-B (NM_015065.1,3983-4001).
gacaaacagaattattcta

SEQ ID NO: 347675 - DNA, 19 bp, Homo sapiens
  siRNA target sequence for SLAC2-B (NM_015065.1,4022-4040).
ccttcatgtgaaaatctaa

SEQ ID NO: 347676 - DNA, 19 bp, Homo sapiens
  siRNA target sequence for SLAC2-B (NM_015065.1,4026-4044).
catgtgaaaatctaaagat

SEQ ID NO: 347677 - DNA, 19 bp, Homo sapiens
  siRNA target sequence for SLAC2-B (NM_015065.1,4065-4083).
cgctcaccactgaaaatat

SEQ ID NO: 347678 - DNA, 19 bp, Homo sapiens
  siRNA target sequence for SLAC2-B (NM_015065.1,4113-4131).
ccctagctcctacattaca

SEQ ID NO: 347679 - DNA, 19 bp, Homo sapiens
  siRNA target sequence for SLAC2-B (NM_015065.1,4218-4236).
cacctctaggtgattcaga

SEQ ID NO: 347680 - DNA, 19 bp, Homo sapiens
  siRNA target sequence for SLAC2-B (NM_015065.1,4294-4312).
gcttcagagaaaaaatgta

SEQ ID NO: 347681 - DNA, 19 bp, Homo sapiens
  siRNA target sequence for SLAC2-B (NM_015065.1,4340-4358).
caatccattaattcaagta

SEQ ID NO: 347682 - DNA, 19 bp, Homo sapiens
  siRNA target sequence for SLAC2-B (NM_015065.1,4403-4421).
ggaaattcccaaactagaa

SEQ ID NO: 347683 - DNA, 19 bp, Homo sapiens
  siRNA target sequence for SLAC2-B (NM_015065.1,4448-4466).
ggtagagccattccattta

SEQ ID NO: 347684 - DNA, 19 bp, Homo sapiens
  siRNA target sequence for SLAC2-B (NM_015065.1,4572-4590).
gccaaaaaatgactaataa

SEQ ID NO: 347685 - DNA, 19 bp, Homo sapiens
  siRNA target sequence for SLAC2-B (NM_015065.1,4624-4642).
ccttactccagcattgcat

SEQ ID NO: 347686 - DNA, 19 bp, Homo sapiens
  siRNA target sequence for SLAC2-B (NM_015065.1,4629-4647).
ctccagcattgcataaact

SEQ ID NO: 347687 - DNA, 19 bp, Homo sapiens
  siRNA target sequence for SLAC2-B (NM_015065.1,4665-4683).
ctcagtcagatgaaccaaa

SEQ ID NO: 347688 - DNA, 19 bp, Homo sapiens
  siRNA target sequence for SLAC2-B (NM_015065.1,4669-4687).
gtcagatgaaccaaactta

SEQ ID NO: 347689 - DNA, 19 bp, Homo sapiens
  siRNA target sequence for SLAC2-B (NM_015065.1,4755-4773).
ggaaggctgaagatgaaat

SEQ ID NO: 347690 - DNA, 19 bp, Homo sapiens
  siRNA target sequence for SLAC2-B (NM_015065.1,4840-4858).
cctagtaaagggggaaaat

SEQ ID NO: 347691 - DNA, 19 bp, Homo sapiens
  siRNA target sequence for SLAC2-B (NM_015065.1,4852-4870).
ggaaaatagatcttcagtt

SEQ ID NO: 347692 - DNA, 19 bp, Homo sapiens
  siRNA target sequence for SLAC2-B (NM_015065.1,4878-4896).
gattggcagccatgtctaa

SEQ ID NO: 347693 - DNA, 19 bp, Homo sapiens
  siRNA target sequence for SLAC2-B (NM_015065.1,4938-4956).
gacatgtagctactatctt

SEQ ID NO: 347694 - DNA, 19 bp, Homo sapiens
  siRNA target sequence for SLAC2-B (NM_015065.1,4980-4998).
gctttgaccatttatctct

SEQ ID NO: 347695 - DNA, 19 bp, Homo sapiens
  siRNA target sequence for SLAC2-B (NM_015065.1,5027-5045).
cctgagcctactccaaaat

SEQ ID NO: 347696 - DNA, 19 bp, Homo sapiens
  siRNA target sequence for SLAC2-B (NM_015065.1,5156-5174).
gtcagcaaccagaagtcta

SEQ ID NO: 347697 - DNA, 19 bp, Homo sapiens
  siRNA target sequence for SLAC2-B (NM_015065.1,5167-5185).
gaagtctaacagcatttca

SEQ ID NO: 347698 - DNA, 19 bp, Homo sapiens
  siRNA target sequence for SLAC2-B (NM_015065.1,5170-5188).
gtctaacagcatttcacaa

SEQ ID NO: 347699 - DNA, 19 bp, Homo sapiens
  siRNA target sequence for SLAC2-B (NM_015065.1,5184-5202).
cacaacgacatcagaatga

SEQ ID NO: 347700 - DNA, 19 bp, Homo sapiens
  siRNA target sequence for SLAC2-B (NM_015065.1,5186-5204).
caacgacatcagaatgagt

SEQ ID NO: 347701 - DNA, 19 bp, Homo sapiens
  siRNA target sequence for SLAC2-B (NM_015065.1,5189-5207).
cgacatcagaatgagttta

SEQ ID NO: 347702 - DNA, 19 bp, Homo sapiens
  siRNA target sequence for SLAC2-B (NM_015065.1,5190-5208).
gacatcagaatgagtttaa

SEQ ID NO: 347703 - DNA, 19 bp, Homo sapiens
  siRNA target sequence for SLAC2-B (NM_015065.1,5225-5243).
ccatcaaagcatgagaatt

SEQ ID NO: 347704 - DNA, 19 bp, Homo sapiens
  siRNA target sequence for SLAC2-B (NM_015065.1,5291-5309).
ccatcacccatcacattca

SEQ ID NO: 347705 - DNA, 19 bp, Homo sapiens
  siRNA target sequence for SLAC2-B (NM_015065.1,5400-5418).
gtccactggccagttttct

SEQ ID NO: 347706 - DNA, 19 bp, Homo sapiens
  siRNA target sequence for SLAC2-B (NM_015065.1,5463-5481).
cacacctctatcgttcaaa

SEQ ID NO: 347707 - DNA, 19 bp, Homo sapiens
  siRNA target sequence for SLAC2-B (NM_015065.1,5465-5483).
cacctctatcgttcaaaga

SEQ ID NO: 347708 - DNA, 19 bp, Homo sapiens
  siRNA target sequence for SLAC2-B (NM_015065.1,5468-5486).
ctctatcgttcaaagagtt

SEQ ID NO: 347709 - DNA, 19 bp, Homo sapiens
  siRNA target sequence for SLAC2-B (NM_015065.1,5470-5488).
ctatcgttcaaagagttta

SEQ ID NO: 347710 - DNA, 19 bp, Homo sapiens
  siRNA target sequence for SLAC2-B (NM_015065.1,5507-5525).
ggcgatctactacgaaaaa

SEQ ID NO: 347711 - DNA, 19 bp, Homo sapiens
  siRNA target sequence for SLAC2-B (NM_015065.1,5540-5558).
gtcagggagcgccattttt

SEQ ID NO: 347712 - DNA, 19 bp, Homo sapiens
  siRNA target sequence for SLAC2-B (NM_015065.1,5542-5560).
cagggagcgccatttttct

SEQ ID NO: 347713 - DNA, 19 bp, Homo sapiens
  siRNA target sequence for SLAC2-B (NM_015065.1,5544-5562).
gggagcgccatttttctga

SEQ ID NO: 347714 - DNA, 19 bp, Homo sapiens
  siRNA target sequence for SLAC2-B (NM_015065.1,5545-5563).
ggagcgccatttttctgaa

SEQ ID NO: 347715 - DNA, 19 bp, Homo sapiens
  siRNA target sequence for SLAC2-B (NM_015065.1,5627-5645).
gggtacagtcgaagattca

SEQ ID NO: 347716 - DNA, 19 bp, Homo sapiens
  siRNA target sequence for SLAC2-B (NM_015065.1,5629-5647).
gtacagtcgaagattcaga

SEQ ID NO: 347717 - DNA, 19 bp, Homo sapiens
  siRNA target sequence for SLAC2-B (NM_015065.1,5719-5737).
caggtctgcaatatctata

SEQ ID NO: 347718 - DNA, 19 bp, Homo sapiens
  siRNA target sequence for SLAC2-B (NM_015065.1,5721-5739).
ggtctgcaatatctatata

SEQ ID NO: 347719 - DNA, 19 bp, Homo sapiens
  siRNA target sequence for SLAC2-B (NM_015065.1,5808-5826).
cacttacacaaggaagatt

SEQ ID NO: 347720 - DNA, 19 bp, Homo sapiens
  siRNA target sequence for SLAC2-B (NM_015065.1,5848-5866).
gaaccctggcttcctaaaa

SEQ ID NO: 347721 - DNA, 19 bp, Homo sapiens
  siRNA target sequence for SLAC2-B (NM_015065.1,5853-5871).
ctggcttcctaaaagatga

SEQ ID NO: 347722 - DNA, 19 bp, Homo sapiens
  siRNA target sequence for SLAC2-B (NM_015065.1,5891-5909).
ccctcagagtcattaagct

SEQ ID NO: 347723 - DNA, 19 bp, Homo sapiens
  siRNA target sequence for SLAC2-B (NM_015065.1,5897-5915).
gagtcattaagctcaaatt

SEQ ID NO: 347724 - DNA, 19 bp, Homo sapiens
  siRNA target sequence for SLAC2-B (NM_015065.1,5955-5973).
gtgaaccgcttaatatcta

SEQ ID NO: 347725 - DNA, 19 bp, Homo sapiens
  siRNA target sequence for OAZ (NM_015069.1,700-718).
gacctgcagtgcattcact

SEQ ID NO: 347726 - DNA, 19 bp, Homo sapiens
  siRNA target sequence for OAZ (NM_015069.1,746-764).
cactgctcgcccatatcca

SEQ ID NO: 347727 - DNA, 19 bp, Homo sapiens
  siRNA target sequence for OAZ (NM_015069.1,770-788).
cccacgccaaccagaaaca

SEQ ID NO: 347728 - DNA, 19 bp, Homo sapiens
  siRNA target sequence for OAZ (NM_015069.1,772-790).
cacgccaaccagaaacaca

SEQ ID NO: 347729 - DNA, 19 bp, Homo sapiens
  siRNA target sequence for OAZ (NM_015069.1,1061-1079).
gttccaagcgggactttaa

SEQ ID NO: 347730 - DNA, 19 bp, Homo sapiens
  siRNA target sequence for OAZ (NM_015069.1,1281-1299).
gatgttcgccgacatcaat

SEQ ID NO: 347731 - DNA, 19 bp, Homo sapiens
  siRNA target sequence for OAZ (NM_015069.1,1347-1365).
cccctctgacggtaataat

SEQ ID NO: 347732 - DNA, 19 bp, Homo sapiens
  siRNA target sequence for OAZ (NM_015069.1,1350-1368).
ctctgacggtaataatgct

SEQ ID NO: 347733 - DNA, 19 bp, Homo sapiens
  siRNA target sequence for OAZ (NM_015069.1,1711-1729).
gagtatccttgcaatcaat

SEQ ID NO: 347734 - DNA, 19 bp, Homo sapiens
  siRNA target sequence for OAZ (NM_015069.1,1861-1879).
ctgacagtgcattacatga

SEQ ID NO: 347735 - DNA, 19 bp, Homo sapiens
  siRNA target sequence for OAZ (NM_015069.1,1880-1898).
ccacgtcgacccactatgt

SEQ ID NO: 347736 - DNA, 19 bp, Homo sapiens
  siRNA target sequence for OAZ (NM_015069.1,2116-2134).
caggtgcacgtcaaacaca

SEQ ID NO: 347737 - DNA, 19 bp, Homo sapiens
  siRNA target sequence for OAZ (NM_015069.1,2231-2249).
gcaagaagtataactgtaa

SEQ ID NO: 347738 - DNA, 19 bp, Homo sapiens
  siRNA target sequence for OAZ (NM_015069.1,2610-2628).
caagtgcaacgtttgttca

SEQ ID NO: 347739 - DNA, 19 bp, Homo sapiens
  siRNA target sequence for OAZ (NM_015069.1,2620-2638).
gtttgttcacggactttct

SEQ ID NO: 347740 - DNA, 19 bp, Homo sapiens
  siRNA target sequence for OAZ (NM_015069.1,2912-2930).
ccacgcttgagctcaagat

SEQ ID NO: 347741 - DNA, 19 bp, Homo sapiens
  siRNA target sequence for OAZ (NM_015069.1,3189-3207).
cgagtgcagtgtcaagttt

SEQ ID NO: 347742 - DNA, 19 bp, Homo sapiens
  siRNA target sequence for OAZ (NM_015069.1,3378-3396).
cgttgccaaccacatgatt

SEQ ID NO: 347743 - DNA, 19 bp, Homo sapiens
  siRNA target sequence for OAZ (NM_015069.1,3404-3422).
gcatcaaccacgagtgtaa

SEQ ID NO: 347744 - DNA, 19 bp, Homo sapiens
  siRNA target sequence for KIAA0853 (NM_015070.2,101-119).
ggaaaataccaagactata

SEQ ID NO: 347745 - DNA, 19 bp, Homo sapiens
  siRNA target sequence for KIAA0853 (NM_015070.2,133-151).
cccgaagacccagtgtatt

SEQ ID NO: 347746 - DNA, 19 bp, Homo sapiens
  siRNA target sequence for KIAA0853 (NM_015070.2,134-152).
ccgaagacccagtgtattt

SEQ ID NO: 347747 - DNA, 19 bp, Homo sapiens
  siRNA target sequence for KIAA0853 (NM_015070.2,136-154).
gaagacccagtgtatttga

SEQ ID NO: 347748 - DNA, 19 bp, Homo sapiens
  siRNA target sequence for KIAA0853 (NM_015070.2,217-235).
gcaactgcctctatggaaa

SEQ ID NO: 347749 - DNA, 19 bp, Homo sapiens
  siRNA target sequence for KIAA0853 (NM_015070.2,257-275).
cccttcacctcgtggtaaa

SEQ ID NO: 347750 - DNA, 19 bp, Homo sapiens
  siRNA target sequence for KIAA0853 (NM_015070.2,262-280).
cacctcgtggtaaaggtta

SEQ ID NO: 347751 - DNA, 19 bp, Homo sapiens
  siRNA target sequence for KIAA0853 (NM_015070.2,276-294).
ggttatagcagcaattata

SEQ ID NO: 347752 - DNA, 19 bp, Homo sapiens
  siRNA target sequence for KIAA0853 (NM_015070.2,313-331).
ctacaggggatcttagaga

SEQ ID NO: 347753 - DNA, 19 bp, Homo sapiens
  siRNA target sequence for KIAA0853 (NM_015070.2,318-336).
ggggatcttagagaaagaa

SEQ ID NO: 347754 - DNA, 19 bp, Homo sapiens
  siRNA target sequence for KIAA0853 (NM_015070.2,321-339).
gatcttagagaaagaatga

SEQ ID NO: 347755 - DNA, 19 bp, Homo sapiens
  siRNA target sequence for KIAA0853 (NM_015070.2,366-384).
gagccccagaaacgaaata

SEQ ID NO: 347756 - DNA, 19 bp, Homo sapiens
  siRNA target sequence for KIAA0853 (NM_015070.2,368-386).
gccccagaaacgaaataca

SEQ ID NO: 347757 - DNA, 19 bp, Homo sapiens
  siRNA target sequence for KIAA0853 (NM_015070.2,558-576).
gaattgtcattggaaatga

SEQ ID NO: 347758 - DNA, 19 bp, Homo sapiens
  siRNA target sequence for KIAA0853 (NM_015070.2,666-684).
ccagaagtggttagatcaa

SEQ ID NO: 347759 - DNA, 19 bp, Homo sapiens
  siRNA target sequence for KIAA0853 (NM_015070.2,699-717).
ccttctctaagaaagtcta

SEQ ID NO: 347760 - DNA, 19 bp, Homo sapiens
  siRNA target sequence for KIAA0853 (NM_015070.2,760-778).
ctagcaagaaagataggaa

SEQ ID NO: 347761 - DNA, 19 bp, Homo sapiens
  siRNA target sequence for KIAA0853 (NM_015070.2,968-986).
cagaggacgagattttgaa

SEQ ID NO: 347762 - DNA, 19 bp, Homo sapiens
  siRNA target sequence for KIAA0853 (NM_015070.2,1035-1053).
cagcatcattctcctatat

SEQ ID NO: 347763 - DNA, 19 bp, Homo sapiens
  siRNA target sequence for KIAA0853 (NM_015070.2,1087-1105).
gatcatctattcaaagaca

SEQ ID NO: 347764 - DNA, 19 bp, Homo sapiens
  siRNA target sequence for KIAA0853 (NM_015070.2,1154-1172).
gacactaactccaccttta

SEQ ID NO: 347765 - DNA, 19 bp, Homo sapiens
  siRNA target sequence for KIAA0853 (NM_015070.2,1184-1202).
ctctccttatccttcacat

SEQ ID NO: 347766 - DNA, 19 bp, Homo sapiens
  siRNA target sequence for KIAA0853 (NM_015070.2,1383-1401).
caggatcagagctcttcta

SEQ ID NO: 347767 - DNA, 19 bp, Homo sapiens
  siRNA target sequence for KIAA0853 (NM_015070.2,1385-1403).
ggatcagagctcttctaga

SEQ ID NO: 347768 - DNA, 19 bp, Homo sapiens
  siRNA target sequence for KIAA0853 (NM_015070.2,1547-1565).
ccgtgatcccagagattct

SEQ ID NO: 347769 - DNA, 19 bp, Homo sapiens
  siRNA target sequence for KIAA0853 (NM_015070.2,1573-1591).
ctcgtgatgcccatgacta

SEQ ID NO: 347770 - DNA, 19 bp, Homo sapiens
  siRNA target sequence for KIAA0853 (NM_015070.2,1617-1635).
catcgaaaggaggatacat

SEQ ID NO: 347771 - DNA, 19 bp, Homo sapiens
  siRNA target sequence for KIAA0853 (NM_015070.2,1652-1670).
gagttatggccgaaaccat

SEQ ID NO: 347772 - DNA, 19 bp, Homo sapiens
  siRNA target sequence for KIAA0853 (NM_015070.2,1654-1672).
gttatggccgaaaccattt

SEQ ID NO: 347773 - DNA, 19 bp, Homo sapiens
  siRNA target sequence for KIAA0853 (NM_015070.2,1687-1705).
ctcgtacggaaataaggaa

SEQ ID NO: 347774 - DNA, 19 bp, Homo sapiens
  siRNA target sequence for KIAA0853 (NM_015070.2,1719-1737).
gagtctcgaagtgaaatta

SEQ ID NO: 347775 - DNA, 19 bp, Homo sapiens
  siRNA target sequence for KIAA0853 (NM_015070.2,1723-1741).
ctcgaagtgaaattagaaa

SEQ ID NO: 347776 - DNA, 19 bp, Homo sapiens
  siRNA target sequence for KIAA0853 (NM_015070.2,1763-1781).
ggggagggttcctgagtta

SEQ ID NO: 347777 - DNA, 19 bp, Homo sapiens
  siRNA target sequence for KIAA0853 (NM_015070.2,1802-1820).
ctcaagaggttctcaaatt

SEQ ID NO: 347778 - DNA, 19 bp, Homo sapiens
  siRNA target sequence for KIAA0853 (NM_015070.2,1804-1822).
caagaggttctcaaattga

SEQ ID NO: 347779 - DNA, 19 bp, Homo sapiens
  siRNA target sequence for KIAA0853 (NM_015070.2,1821-1839).
gatagtcacagtagtaata

SEQ ID NO: 347780 - DNA, 19 bp, Homo sapiens
  siRNA target sequence for KIAA0853 (NM_015070.2,1825-1843).
gtcacagtagtaatagcaa

SEQ ID NO: 347781 - DNA, 19 bp, Homo sapiens
  siRNA target sequence for KIAA0853 (NM_015070.2,1829-1847).
cagtagtaatagcaactat

SEQ ID NO: 347782 - DNA, 19 bp, Homo sapiens
  siRNA target sequence for KIAA0853 (NM_015070.2,1831-1849).
gtagtaatagcaactatca

SEQ ID NO: 347783 - DNA, 19 bp, Homo sapiens
  siRNA target sequence for KIAA0853 (NM_015070.2,1834-1852).
gtaatagcaactatcatga

SEQ ID NO: 347784 - DNA, 19 bp, Homo sapiens
  siRNA target sequence for KIAA0853 (NM_015070.2,1859-1877).
ggaaactcgaagtagctat

SEQ ID NO: 347785 - DNA, 19 bp, Homo sapiens
  siRNA target sequence for KIAA0853 (NM_015070.2,1914-1932).
gatcaagcaagggattctt

SEQ ID NO: 347786 - DNA, 19 bp, Homo sapiens
  siRNA target sequence for KIAA0853 (NM_015070.2,2489-2507).
gatccgagaagataggaat

SEQ ID NO: 347787 - DNA, 19 bp, Homo sapiens
  siRNA target sequence for KIAA0853 (NM_015070.2,2493-2511).
cgagaagataggaatccaa

SEQ ID NO: 347788 - DNA, 19 bp, Homo sapiens
  siRNA target sequence for KIAA0853 (NM_015070.2,2536-2554).
caaagaagcgctatagaaa

SEQ ID NO: 347789 - DNA, 19 bp, Homo sapiens
  siRNA target sequence for KIAA0853 (NM_015070.2,2621-2639).
ctacaacagtggagatgat

SEQ ID NO: 347790 - DNA, 19 bp, Homo sapiens
  siRNA target sequence for KIAA0853 (NM_015070.2,2624-2642).
caacagtggagatgataaa

SEQ ID NO: 347791 - DNA, 19 bp, Homo sapiens
  siRNA target sequence for KIAA0853 (NM_015070.2,2656-2674).
gactcttgagccaagttgt

SEQ ID NO: 347792 - DNA, 19 bp, Homo sapiens
  siRNA target sequence for KIAA0853 (NM_015070.2,2738-2756).
gaaagaggaggatcgtaaa

SEQ ID NO: 347793 - DNA, 19 bp, Homo sapiens
  siRNA target sequence for KIAA0853 (NM_015070.2,2776-2794).
caaggcgctacgaagaaca

SEQ ID NO: 347794 - DNA, 19 bp, Homo sapiens
  siRNA target sequence for KIAA0853 (NM_015070.2,2867-2885).
gcgtgcacaggacattata

SEQ ID NO: 347795 - DNA, 19 bp, Homo sapiens
  siRNA target sequence for KIAA0853 (NM_015070.2,2922-2940).
cgagctcatgatgaaaaca

SEQ ID NO: 347796 - DNA, 19 bp, Homo sapiens
  siRNA target sequence for KIAA0853 (NM_015070.2,3162-3180).
ccacggactccccctataa

SEQ ID NO: 347797 - DNA, 19 bp, Homo sapiens
  siRNA target sequence for KIAA0853 (NM_015070.2,3167-3185).
gactccccctataacaact

SEQ ID NO: 347798 - DNA, 19 bp, Homo sapiens
  siRNA target sequence for KIAA0853 (NM_015070.2,3169-3187).
ctccccctataacaactaa

SEQ ID NO: 347799 - DNA, 19 bp, Homo sapiens
  siRNA target sequence for KIAA0853 (NM_015070.2,3172-3190).
cccctataacaactaaaga

SEQ ID NO: 347800 - DNA, 19 bp, Homo sapiens
  siRNA target sequence for KIAA0853 (NM_015070.2,3551-3569).
ccacagaacacgagtagaa

SEQ ID NO: 347801 - DNA, 19 bp, Homo sapiens
  siRNA target sequence for KIAA0853 (NM_015070.2,3559-3577).
cacgagtagaaaaagtaga

SEQ ID NO: 347802 - DNA, 19 bp, Homo sapiens
  siRNA target sequence for KIAA0853 (NM_015070.2,3578-3596).
gacgcctcacgtgactata

SEQ ID NO: 347803 - DNA, 19 bp, Homo sapiens
  siRNA target sequence for KIAA0853 (NM_015070.2,3580-3598).
cgcctcacgtgactataga

SEQ ID NO: 347804 - DNA, 19 bp, Homo sapiens
  siRNA target sequence for KIAA0853 (NM_015070.2,3581-3599).
gcctcacgtgactatagaa

SEQ ID NO: 347805 - DNA, 19 bp, Homo sapiens
  siRNA target sequence for KIAA0853 (NM_015070.2,3608-3626).
gcatcgcaagcctatggat

SEQ ID NO: 347806 - DNA, 19 bp, Homo sapiens
  siRNA target sequence for KIAA0853 (NM_015070.2,3612-3630).
cgcaagcctatggatcaaa

SEQ ID NO: 347807 - DNA, 19 bp, Homo sapiens
  siRNA target sequence for KIAA0853 (NM_015070.2,3613-3631).
gcaagcctatggatcaaaa

SEQ ID NO: 347808 - DNA, 19 bp, Homo sapiens
  siRNA target sequence for KIAA0853 (NM_015070.2,3690-3708).
cgctccccatccaatgatt

SEQ ID NO: 347809 - DNA, 19 bp, Homo sapiens
  siRNA target sequence for KIAA0853 (NM_015070.2,3692-3710).
ctccccatccaatgattca

SEQ ID NO: 347810 - DNA, 19 bp, Homo sapiens
  siRNA target sequence for KIAA0853 (NM_015070.2,3809-3827).
gagaaaatctaggattgat

SEQ ID NO: 347811 - DNA, 19 bp, Homo sapiens
  siRNA target sequence for KIAA0853 (NM_015070.2,3817-3835).
ctaggattgatcagttaaa

SEQ ID NO: 347812 - DNA, 19 bp, Homo sapiens
  siRNA target sequence for KIAA0853 (NM_015070.2,3843-3861).
gaacccagtcgaagtactt

SEQ ID NO: 347813 - DNA, 19 bp, Homo sapiens
  siRNA target sequence for KIAA0853 (NM_015070.2,3846-3864).
cccagtcgaagtacttctt

SEQ ID NO: 347814 - DNA, 19 bp, Homo sapiens
  siRNA target sequence for KIAA0853 (NM_015070.2,3848-3866).
cagtcgaagtacttcttca

SEQ ID NO: 347815 - DNA, 19 bp, Homo sapiens
  siRNA target sequence for KIAA0853 (NM_015070.2,3921-3939).
cgacaggtccattcaagat

SEQ ID NO: 347816 - DNA, 19 bp, Homo sapiens
  siRNA target sequence for KIAA0853 (NM_015070.2,4070-4088).
caacagggatcgagataga

SEQ ID NO: 347817 - DNA, 19 bp, Homo sapiens
  siRNA target sequence for KIAA0853 (NM_015070.2,4147-4165).
gagagagactaatttctga

SEQ ID NO: 347818 - DNA, 19 bp, Homo sapiens
  siRNA target sequence for KIAA0853 (NM_015070.2,4153-4171).
gactaatttctgattctgt

SEQ ID NO: 347819 - DNA, 19 bp, Homo sapiens
  siRNA target sequence for KIAA0853 (NM_015070.2,4209-4227).
gagagttctcaaatagagt

SEQ ID NO: 347820 - DNA, 19 bp, Homo sapiens
  siRNA target sequence for KIAA0853 (NM_015070.2,4308-4326).
gataaagagagaatggata

SEQ ID NO: 347821 - DNA, 19 bp, Homo sapiens
  siRNA target sequence for KIAA0853 (NM_015070.2,4403-4421).
cgagtccaagttagatgat

SEQ ID NO: 347822 - DNA, 19 bp, Homo sapiens
  siRNA target sequence for KIAA0853 (NM_015070.2,4466-4484).
cagtgatgacgaactagat

SEQ ID NO: 347823 - DNA, 19 bp, Homo sapiens
  siRNA target sequence for KIAA0853 (NM_015070.2,4468-4486).
gtgatgacgaactagatga

SEQ ID NO: 347824 - DNA, 19 bp, Homo sapiens
  siRNA target sequence for KIAA0853 (NM_015070.2,4538-4556).
gatgccagatcccttagat

SEQ ID NO: 347825 - DNA, 19 bp, Homo sapiens
  siRNA target sequence for KIAA0853 (NM_015070.2,4549-4567).
ccttagatgtgatagatgt

SEQ ID NO: 347826 - DNA, 19 bp, Homo sapiens
  siRNA target sequence for KIAA0853 (NM_015070.2,4641-4659).
cctggagctgttatgctaa

SEQ ID NO: 347827 - DNA, 19 bp, Homo sapiens
  siRNA target sequence for KIAA0853 (NM_015070.2,4645-4663).
gagctgttatgctaagagt

SEQ ID NO: 347828 - DNA, 19 bp, Homo sapiens
  siRNA target sequence for KIAA0853 (NM_015070.2,4713-4731).
gaaacatgtcagagacttt

SEQ ID NO: 347829 - DNA, 19 bp, Homo sapiens
  siRNA target sequence for KIAA0853 (NM_015070.2,4740-4758).
cccaaaggtagtttcattt

SEQ ID NO: 347830 - DNA, 19 bp, Homo sapiens
  siRNA target sequence for CDK11 (NM_015076.2,183-201).
caaggcgaggcggaaagat

SEQ ID NO: 347831 - DNA, 19 bp, Homo sapiens
  siRNA target sequence for CDK11 (NM_015076.2,188-206).
cgaggcggaaagatggaaa

SEQ ID NO: 347832 - DNA, 19 bp, Homo sapiens
  siRNA target sequence for CDK11 (NM_015076.2,208-226).
gatgaaaaggaatatgcat

SEQ ID NO: 347833 - DNA, 19 bp, Homo sapiens
  siRNA target sequence for CDK11 (NM_015076.2,217-235).
gaatatgcattgaagcaaa

SEQ ID NO: 347834 - DNA, 19 bp, Homo sapiens
  siRNA target sequence for CDK11 (NM_015076.2,258-276).
gtcggcttgtagagagatt

SEQ ID NO: 347835 - DNA, 19 bp, Homo sapiens
  siRNA target sequence for CDK11 (NM_015076.2,298-316).
caccctaatgtgattgcat

SEQ ID NO: 347836 - DNA, 19 bp, Homo sapiens
  siRNA target sequence for CDK11 (NM_015076.2,357-375).
gctgctgtttgattatgca

SEQ ID NO: 347837 - DNA, 19 bp, Homo sapiens
  siRNA target sequence for CDK11 (NM_015076.2,382-400).
gacttgtggcatattatta

SEQ ID NO: 347838 - DNA, 19 bp, Homo sapiens
  siRNA target sequence for CDK11 (NM_015076.2,402-420).
gtttcaccgtgcatcaaaa

SEQ ID NO: 347839 - DNA, 19 bp, Homo sapiens
  siRNA target sequence for CDK11 (NM_015076.2,406-424).
caccgtgcatcaaaagcaa

SEQ ID NO: 347840 - DNA, 19 bp, Homo sapiens
  siRNA target sequence for CDK11 (NM_015076.2,408-426).
ccgtgcatcaaaagcaaat

SEQ ID NO: 347841 - DNA, 19 bp, Homo sapiens
  siRNA target sequence for CDK11 (NM_015076.2,409-427).
cgtgcatcaaaagcaaata

SEQ ID NO: 347842 - DNA, 19 bp, Homo sapiens
  siRNA target sequence for CDK11 (NM_015076.2,410-428).
gtgcatcaaaagcaaataa

SEQ ID NO: 347843 - DNA, 19 bp, Homo sapiens
  siRNA target sequence for CDK11 (NM_015076.2,435-453).
catgcagttgccaagatct

SEQ ID NO: 347844 - DNA, 19 bp, Homo sapiens
  siRNA target sequence for CDK11 (NM_015076.2,444-462).
gccaagatctatggttaaa

SEQ ID NO: 347845 - DNA, 19 bp, Homo sapiens
  siRNA target sequence for CDK11 (NM_015076.2,449-467).
gatctatggttaaatcctt

SEQ ID NO: 347846 - DNA, 19 bp, Homo sapiens
  siRNA target sequence for CDK11 (NM_015076.2,464-482).
ccttactttaccagattct

SEQ ID NO: 347847 - DNA, 19 bp, Homo sapiens
  siRNA target sequence for CDK11 (NM_015076.2,465-483).
cttactttaccagattctt

SEQ ID NO: 347848 - DNA, 19 bp, Homo sapiens
  siRNA target sequence for CDK11 (NM_015076.2,535-553).
ccagcaaatatcctagtaa

SEQ ID NO: 347849 - DNA, 19 bp, Homo sapiens
  siRNA target sequence for CDK11 (NM_015076.2,599-617).
gttttgccagattattcaa

SEQ ID NO: 347850 - DNA, 19 bp, Homo sapiens
  siRNA target sequence for CDK11 (NM_015076.2,652-670).
gtagttgtgacattttggt

SEQ ID NO: 347851 - DNA, 19 bp, Homo sapiens
  siRNA target sequence for CDK11 (NM_015076.2,669-687).
gtatcgggctccagaactt

SEQ ID NO: 347852 - DNA, 19 bp, Homo sapiens
  siRNA target sequence for CDK11 (NM_015076.2,756-774).
gttgacttcggaacctatt

SEQ ID NO: 347853 - DNA, 19 bp, Homo sapiens
  siRNA target sequence for CDK11 (NM_015076.2,759-777).
gacttcggaacctattttt

SEQ ID NO: 347854 - DNA, 19 bp, Homo sapiens
  siRNA target sequence for CDK11 (NM_015076.2,761-779).
cttcggaacctatttttca

SEQ ID NO: 347855 - DNA, 19 bp, Homo sapiens
  siRNA target sequence for CDK11 (NM_015076.2,778-796).
cactgtcgtcaggaagata

SEQ ID NO: 347856 - DNA, 19 bp, Homo sapiens
  siRNA target sequence for CDK11 (NM_015076.2,780-798).
ctgtcgtcaggaagatata

SEQ ID NO: 347857 - DNA, 19 bp, Homo sapiens
  siRNA target sequence for CDK11 (NM_015076.2,782-800).
gtcgtcaggaagatataaa

SEQ ID NO: 347858 - DNA, 19 bp, Homo sapiens
  siRNA target sequence for CDK11 (NM_015076.2,807-825).
caatccctttcatcatgat

SEQ ID NO: 347859 - DNA, 19 bp, Homo sapiens
  siRNA target sequence for CDK11 (NM_015076.2,826-844).
caactggatcggatattta

SEQ ID NO: 347860 - DNA, 19 bp, Homo sapiens
  siRNA target sequence for CDK11 (NM_015076.2,904-922).
cccacacttcaaaaagact

SEQ ID NO: 347861 - DNA, 19 bp, Homo sapiens
  siRNA target sequence for CDK11 (NM_015076.2,940-958).
gccaacagtagcctcataa

SEQ ID NO: 347862 - DNA, 19 bp, Homo sapiens
  siRNA target sequence for CDK11 (NM_015076.2,947-965).
gtagcctcataaagtacat

SEQ ID NO: 347863 - DNA, 19 bp, Homo sapiens
  siRNA target sequence for CDK11 (NM_015076.2,1086-1104).
ggaccctttgccaacatta

SEQ ID NO: 347864 - DNA, 19 bp, Homo sapiens
  siRNA target sequence for CDK11 (NM_015076.2,1089-1107).
ccctttgccaacattagat

SEQ ID NO: 347865 - DNA, 19 bp, Homo sapiens
  siRNA target sequence for CDK11 (NM_015076.2,1114-1132).
gccggctgccagattccat

SEQ ID NO: 347866 - DNA, 19 bp, Homo sapiens
  siRNA target sequence for CDK11 (NM_015076.2,1115-1133).
ccggctgccagattccata

SEQ ID NO: 347867 - DNA, 19 bp, Homo sapiens
  siRNA target sequence for CDK11 (NM_015076.2,1134-1152).
ccccaaacgagaattcctt

SEQ ID NO: 347868 - DNA, 19 bp, Homo sapiens
  siRNA target sequence for CDK11 (NM_015076.2,1404-1422).
gccttcaggcgcaaactca

SEQ ID NO: 347869 - DNA, 19 bp, Homo sapiens
  siRNA target sequence for KIAA0861 (NM_015078.2,158-176).
ctcatgtcgatgaaattat

SEQ ID NO: 347870 - DNA, 19 bp, Homo sapiens
  siRNA target sequence for KIAA0861 (NM_015078.2,203-221).
cggtggagataatagaaca

SEQ ID NO: 347871 - DNA, 19 bp, Homo sapiens
  siRNA target sequence for KIAA0861 (NM_015078.2,228-246).
cagacaatttgccattctt

SEQ ID NO: 347872 - DNA, 19 bp, Homo sapiens
  siRNA target sequence for KIAA0861 (NM_015078.2,322-340).
gaagacttcctgaatgtca

SEQ ID NO: 347873 - DNA, 19 bp, Homo sapiens
  siRNA target sequence for KIAA0861 (NM_015078.2,370-388).
gaggctgccagcattggat

SEQ ID NO: 347874 - DNA, 19 bp, Homo sapiens
  siRNA target sequence for KIAA0861 (NM_015078.2,386-404).
gattcattgttgttatcga

SEQ ID NO: 347875 - DNA, 19 bp, Homo sapiens
  siRNA target sequence for KIAA0861 (NM_015078.2,459-477).
ggcatttccaggaaactta

SEQ ID NO: 347876 - DNA, 19 bp, Homo sapiens
  siRNA target sequence for KIAA0861 (NM_015078.2,497-515).
gtccatctcgctttatcca

SEQ ID NO: 347877 - DNA, 19 bp, Homo sapiens
  siRNA target sequence for KIAA0861 (NM_015078.2,516-534).
gaggacattcactgacatt

SEQ ID NO: 347878 - DNA, 19 bp, Homo sapiens
  siRNA target sequence for KIAA0861 (NM_015078.2,525-543).
cactgacattggcattaaa

SEQ ID NO: 347879 - DNA, 19 bp, Homo sapiens
  siRNA target sequence for KIAA0861 (NM_015078.2,535-553).
ggcattaaatactatcgaa

SEQ ID NO: 347880 - DNA, 19 bp, Homo sapiens
  siRNA target sequence for KIAA0861 (NM_015078.2,536-554).
gcattaaatactatcgaaa

SEQ ID NO: 347881 - DNA, 19 bp, Homo sapiens
  siRNA target sequence for KIAA0861 (NM_015078.2,550-568).
cgaaatgagtttaaaacga

SEQ ID NO: 347882 - DNA, 19 bp, Homo sapiens
  siRNA target sequence for KIAA0861 (NM_015078.2,566-584).
cgaaagtgccgatcatcat

SEQ ID NO: 347883 - DNA, 19 bp, Homo sapiens
  siRNA target sequence for KIAA0861 (NM_015078.2,571-589).
gtgccgatcatcatggtaa

SEQ ID NO: 347884 - DNA, 19 bp, Homo sapiens
  siRNA target sequence for KIAA0861 (NM_015078.2,574-592).
ccgatcatcatggtaaact

SEQ ID NO: 347885 - DNA, 19 bp, Homo sapiens
  siRNA target sequence for KIAA0861 (NM_015078.2,607-625).
cacggctacatcgacaaaa

SEQ ID NO: 347886 - DNA, 19 bp, Homo sapiens
  siRNA target sequence for KIAA0861 (NM_015078.2,627-645).
ccaactgacccgggaatta

SEQ ID NO: 347887 - DNA, 19 bp, Homo sapiens
  siRNA target sequence for KIAA0861 (NM_015078.2,666-684).
ccacggtcagtgggtaaat

SEQ ID NO: 347888 - DNA, 19 bp, Homo sapiens
  siRNA target sequence for KIAA0861 (NM_015078.2,688-706).
cgcactgccatcgaaaact

SEQ ID NO: 347889 - DNA, 19 bp, Homo sapiens
  siRNA target sequence for KIAA0861 (NM_015078.2,689-707).
gcactgccatcgaaaactt

SEQ ID NO: 347890 - DNA, 19 bp, Homo sapiens
  siRNA target sequence for KIAA0861 (NM_015078.2,690-708).
cactgccatcgaaaacttt

SEQ ID NO: 347891 - DNA, 19 bp, Homo sapiens
  siRNA target sequence for KIAA0861 (NM_015078.2,914-932).
gtcccaacagcaaactcaa

SEQ ID NO: 347892 - DNA, 19 bp, Homo sapiens
  siRNA target sequence for KIAA0861 (NM_015078.2,917-935).
ccaacagcaaactcaatct

SEQ ID NO: 347893 - DNA, 19 bp, Homo sapiens
  siRNA target sequence for KIAA0861 (NM_015078.2,936-954).
caaccaacttgagaatgta

SEQ ID NO: 347894 - DNA, 19 bp, Homo sapiens
  siRNA target sequence for KIAA0861 (NM_015078.2,939-957).
ccaacttgagaatgtaact

SEQ ID NO: 347895 - DNA, 19 bp, Homo sapiens
  siRNA target sequence for KIAA0861 (NM_015078.2,940-958).
caacttgagaatgtaacta

SEQ ID NO: 347896 - DNA, 19 bp, Homo sapiens
  siRNA target sequence for KIAA0861 (NM_015078.2,959-977).
ccatggaaaggttattagt

SEQ ID NO: 347897 - DNA, 19 bp, Homo sapiens
  siRNA target sequence for KIAA0861 (NM_015078.2,963-981).
ggaaaggttattagttcaa

SEQ ID NO: 347898 - DNA, 19 bp, Homo sapiens
  siRNA target sequence for KIAA0861 (NM_015078.2,1021-1039).
gagcatcatctgaagctta

SEQ ID NO: 347899 - DNA, 19 bp, Homo sapiens
  siRNA target sequence for KIAA0861 (NM_015078.2,1047-1065).
cctacaactacagcatttt

SEQ ID NO: 347900 - DNA, 19 bp, Homo sapiens
  siRNA target sequence for KIAA0861 (NM_015078.2,1059-1077).
gcattttgagcacgatttt

SEQ ID NO: 347901 - DNA, 19 bp, Homo sapiens
  siRNA target sequence for KIAA0861 (NM_015078.2,1240-1258).
ggggaccagctcatccaaa

SEQ ID NO: 347902 - DNA, 19 bp, Homo sapiens
  siRNA target sequence for KIAA0861 (NM_015078.2,1251-1269).
catccaaagccaccattat

SEQ ID NO: 347903 - DNA, 19 bp, Homo sapiens
  siRNA target sequence for KIAA0861 (NM_015078.2,1312-1330).
ctctgtgacgatttcatca

SEQ ID NO: 347904 - DNA, 19 bp, Homo sapiens
  siRNA target sequence for KIAA0861 (NM_015078.2,1314-1332).
ctgtgacgatttcatcaat

SEQ ID NO: 347905 - DNA, 19 bp, Homo sapiens
  siRNA target sequence for KIAA0861 (NM_015078.2,1365-1383).
gtccttagagtttcataga

SEQ ID NO: 347906 - DNA, 19 bp, Homo sapiens
  siRNA target sequence for KIAA0861 (NM_015078.2,1367-1385).
ccttagagtttcatagaca

SEQ ID NO: 347907 - DNA, 19 bp, Homo sapiens
  siRNA target sequence for KIAA0861 (NM_015078.2,1460-1478).
ctcgagaaggggttgatat

SEQ ID NO: 347908 - DNA, 19 bp, Homo sapiens
  siRNA target sequence for KIAA0861 (NM_015078.2,1711-1729).
cctgagtcttcaccaaaat

SEQ ID NO: 347909 - DNA, 19 bp, Homo sapiens
  siRNA target sequence for KIAA0861 (NM_015078.2,1787-1805).
gaacgtctgaggaacctta

SEQ ID NO: 347910 - DNA, 19 bp, Homo sapiens
  siRNA target sequence for KIAA0861 (NM_015078.2,1947-1965).
ccgcaggcgcattatacgt

SEQ ID NO: 347911 - DNA, 19 bp, Homo sapiens
  siRNA target sequence for KIAA0861 (NM_015078.2,1971-1989).
gcttgagactgaagagatt

SEQ ID NO: 347912 - DNA, 19 bp, Homo sapiens
  siRNA target sequence for KIAA0861 (NM_015078.2,1972-1990).
cttgagactgaagagattt

SEQ ID NO: 347913 - DNA, 19 bp, Homo sapiens
  siRNA target sequence for KIAA0861 (NM_015078.2,2055-2073).
gcatctaattccagatgtt

SEQ ID NO: 347914 - DNA, 19 bp, Homo sapiens
  siRNA target sequence for KIAA0861 (NM_015078.2,2101-2119).
gggaatattagagaacttt

SEQ ID NO: 347915 - DNA, 19 bp, Homo sapiens
  siRNA target sequence for KIAA0861 (NM_015078.2,2102-2120).
ggaatattagagaacttta

SEQ ID NO: 347916 - DNA, 19 bp, Homo sapiens
  siRNA target sequence for KIAA0861 (NM_015078.2,2128-2146).
cacaacaggacttttctaa

SEQ ID NO: 347917 - DNA, 19 bp, Homo sapiens
  siRNA target sequence for KIAA0861 (NM_015078.2,2130-2148).
caacaggacttttctaaaa

SEQ ID NO: 347918 - DNA, 19 bp, Homo sapiens
  siRNA target sequence for KIAA0861 (NM_015078.2,2182-2200).
ctggcacattgctttctca

SEQ ID NO: 347919 - DNA, 19 bp, Homo sapiens
  siRNA target sequence for KIAA0861 (NM_015078.2,2307-2325).
gcgccaactggatcacaat

SEQ ID NO: 347920 - DNA, 19 bp, Homo sapiens
  siRNA target sequence for KIAA0861 (NM_015078.2,2309-2327).
gccaactggatcacaatct

SEQ ID NO: 347921 - DNA, 19 bp, Homo sapiens
  siRNA target sequence for KIAA0861 (NM_015078.2,2427-2445).
gatagacccaggtgaacta

SEQ ID NO: 347922 - DNA, 19 bp, Homo sapiens
  siRNA target sequence for KIAA0861 (NM_015078.2,2489-2507).
cattctcaactgaactaca

SEQ ID NO: 347923 - DNA, 19 bp, Homo sapiens
  siRNA target sequence for KIAA0861 (NM_015078.2,2563-2581).
ctagcagcagtgactgaat

SEQ ID NO: 347924 - DNA, 19 bp, Homo sapiens
  siRNA target sequence for KIAA0861 (NM_015078.2,2576-2594).
ctgaatgtccggacgatat

SEQ ID NO: 347925 - DNA, 19 bp, Homo sapiens
  siRNA target sequence for KIAA0861 (NM_015078.2,2582-2600).
gtccggacgatattggaaa

SEQ ID NO: 347926 - DNA, 19 bp, Homo sapiens
  siRNA target sequence for KIAA0861 (NM_015078.2,2585-2603).
cggacgatattggaaaact

SEQ ID NO: 347927 - DNA, 19 bp, Homo sapiens
  siRNA target sequence for KIAA0861 (NM_015078.2,2586-2604).
ggacgatattggaaaacta

SEQ ID NO: 347928 - DNA, 19 bp, Homo sapiens
  siRNA target sequence for KIAA0861 (NM_015078.2,2642-2660).
caattcacaaggatcgtta

SEQ ID NO: 347929 - DNA, 19 bp, Homo sapiens
  siRNA target sequence for KIAA0861 (NM_015078.2,2647-2665).
cacaaggatcgttataaaa

SEQ ID NO: 347930 - DNA, 19 bp, Homo sapiens
  siRNA target sequence for KIAA0861 (NM_015078.2,2667-2685).
gaaggatttgattcgattt

SEQ ID NO: 347931 - DNA, 19 bp, Homo sapiens
  siRNA target sequence for KIAA0861 (NM_015078.2,2690-2708).
ccagccagaggcaaatcta

SEQ ID NO: 347932 - DNA, 19 bp, Homo sapiens
  siRNA target sequence for KIAA0861 (NM_015078.2,2700-2718).
gcaaatctacctatttgaa

SEQ ID NO: 347933 - DNA, 19 bp, Homo sapiens
  siRNA target sequence for KIAA0861 (NM_015078.2,2720-2738).
ggggaatagtgttctgtaa

SEQ ID NO: 347934 - DNA, 19 bp, Homo sapiens
  siRNA target sequence for KIAA0861 (NM_015078.2,2728-2746).
gtgttctgtaagatacgaa

SEQ ID NO: 347935 - DNA, 19 bp, Homo sapiens
  siRNA target sequence for KIAA0861 (NM_015078.2,2773-2791).
cctcattacagcttcaaga

SEQ ID NO: 347936 - DNA, 19 bp, Homo sapiens
  siRNA target sequence for KIAA0861 (NM_015078.2,2799-2817).
gaagctgatgacactttca

SEQ ID NO: 347937 - DNA, 19 bp, Homo sapiens
  siRNA target sequence for KIAA0861 (NM_015078.2,2802-2820).
gctgatgacactttcaatt

SEQ ID NO: 347938 - DNA, 19 bp, Homo sapiens
  siRNA target sequence for KIAA0861 (NM_015078.2,2856-2874).
gattgccagtcgaaatgga

SEQ ID NO: 347939 - DNA, 19 bp, Homo sapiens
  siRNA target sequence for KIAA0861 (NM_015078.2,2866-2884).
cgaaatggacttgagaaat

SEQ ID NO: 347940 - DNA, 19 bp, Homo sapiens
  siRNA target sequence for KIAA0861 (NM_015078.2,2924-2942).
ggttttcagaaataagtaa

SEQ ID NO: 347941 - DNA, 19 bp, Homo sapiens
  siRNA target sequence for KIAA0861 (NM_015078.2,3025-3043).
ggatccggaccatggatta

SEQ ID NO: 347942 - DNA, 19 bp, Homo sapiens
  siRNA target sequence for KIAA0861 (NM_015078.2,3026-3044).
gatccggaccatggattaa

SEQ ID NO: 347943 - DNA, 19 bp, Homo sapiens
  siRNA target sequence for SPG20 (NM_015087.3,122-140).
cctgctgaaattaagatca

SEQ ID NO: 347944 - DNA, 19 bp, Homo sapiens
  siRNA target sequence for SPG20 (NM_015087.3,136-154).
gatcatcagagaagcatat

SEQ ID NO: 347945 - DNA, 19 bp, Homo sapiens
  siRNA target sequence for SPG20 (NM_015087.3,182-200).
ggtctgaatacagatgaat

SEQ ID NO: 347946 - DNA, 19 bp, Homo sapiens
  siRNA target sequence for SPG20 (NM_015087.3,187-205).
gaatacagatgaattaggt

SEQ ID NO: 347947 - DNA, 19 bp, Homo sapiens
  siRNA target sequence for SPG20 (NM_015087.3,215-233).
gaagcaaagaactactata

SEQ ID NO: 347948 - DNA, 19 bp, Homo sapiens
  siRNA target sequence for SPG20 (NM_015087.3,229-247).
ctataagcaaggaatagga

SEQ ID NO: 347949 - DNA, 19 bp, Homo sapiens
  siRNA target sequence for SPG20 (NM_015087.3,315-333).
ctagacagatgcaacagaa

SEQ ID NO: 347950 - DNA, 19 bp, Homo sapiens
  siRNA target sequence for SPG20 (NM_015087.3,361-379).
caccaggctggaaattcta

SEQ ID NO: 347951 - DNA, 19 bp, Homo sapiens
  siRNA target sequence for SPG20 (NM_015087.3,363-381).
ccaggctggaaattctaga

SEQ ID NO: 347952 - DNA, 19 bp, Homo sapiens
  siRNA target sequence for SPG20 (NM_015087.3,394-412).
cacttctctgcagaatgat

SEQ ID NO: 347953 - DNA, 19 bp, Homo sapiens
  siRNA target sequence for SPG20 (NM_015087.3,430-448).
gttatatccagaatttcca

SEQ ID NO: 347954 - DNA, 19 bp, Homo sapiens
  siRNA target sequence for SPG20 (NM_015087.3,478-496).
gcctcagtcttttagttca

SEQ ID NO: 347955 - DNA, 19 bp, Homo sapiens
  siRNA target sequence for SPG20 (NM_015087.3,500-518).
cctcagcatgctgaagtaa

SEQ ID NO: 347956 - DNA, 19 bp, Homo sapiens
  siRNA target sequence for SPG20 (NM_015087.3,569-587).
ctgtctttaccatcacaaa

SEQ ID NO: 347957 - DNA, 19 bp, Homo sapiens
  siRNA target sequence for SPG20 (NM_015087.3,636-654).
gtcactacactgtatccta

SEQ ID NO: 347958 - DNA, 19 bp, Homo sapiens
  siRNA target sequence for SPG20 (NM_015087.3,681-699).
cagttggagaggagtttta

SEQ ID NO: 347959 - DNA, 19 bp, Homo sapiens
  siRNA target sequence for SPG20 (NM_015087.3,687-705).
gagaggagttttataggaa

SEQ ID NO: 347960 - DNA, 19 bp, Homo sapiens
  siRNA target sequence for SPG20 (NM_015087.3,691-709).
ggagttttataggaatcat

SEQ ID NO: 347961 - DNA, 19 bp, Homo sapiens
  siRNA target sequence for SPG20 (NM_015087.3,752-770).
gaattgattttgataccaa

SEQ ID NO: 347962 - DNA, 19 bp, Homo sapiens
  siRNA target sequence for SPG20 (NM_015087.3,767-785).
ccaaatggagtacagattt

SEQ ID NO: 347963 - DNA, 19 bp, Homo sapiens
  siRNA target sequence for SPG20 (NM_015087.3,808-826).
ggttagtgcaccttcgtat

SEQ ID NO: 347964 - DNA, 19 bp, Homo sapiens
  siRNA target sequence for SPG20 (NM_015087.3,828-846).
ctgggtaccttcgaattgt

SEQ ID NO: 347965 - DNA, 19 bp, Homo sapiens
  siRNA target sequence for SPG20 (NM_015087.3,830-848).
gggtaccttcgaattgtga

SEQ ID NO: 347966 - DNA, 19 bp, Homo sapiens
  siRNA target sequence for SPG20 (NM_015087.3,840-858).
gaattgtgaggtttttgga

SEQ ID NO: 347967 - DNA, 19 bp, Homo sapiens
  siRNA target sequence for SPG20 (NM_015087.3,845-863).
gtgaggtttttggataatt

SEQ ID NO: 347968 - DNA, 19 bp, Homo sapiens
  siRNA target sequence for SPG20 (NM_015087.3,847-865).
gaggtttttggataattct

SEQ ID NO: 347969 - DNA, 19 bp, Homo sapiens
  siRNA target sequence for SPG20 (NM_015087.3,864-882).
ctctcgatacggttctaaa

SEQ ID NO: 347970 - DNA, 19 bp, Homo sapiens
  siRNA target sequence for SPG20 (NM_015087.3,883-901).
ccgtcctcccgggtttctt

SEQ ID NO: 347971 - DNA, 19 bp, Homo sapiens
  siRNA target sequence for SPG20 (NM_015087.3,913-931).
ctggttatatcctctagtt

SEQ ID NO: 347972 - DNA, 19 bp, Homo sapiens
  siRNA target sequence for SPG20 (NM_015087.3,923-941).
cctctagttcctgatagat

SEQ ID NO: 347973 - DNA, 19 bp, Homo sapiens
  siRNA target sequence for SPG20 (NM_015087.3,960-978).
ctgcgggagcctacatgtt

SEQ ID NO: 347974 - DNA, 19 bp, Homo sapiens
  siRNA target sequence for SPG20 (NM_015087.3,976-994).
gtttcctgatacaatgcta

SEQ ID NO: 347975 - DNA, 19 bp, Homo sapiens
  siRNA target sequence for SPG20 (NM_015087.3,1021-1039).
cgtcctgtcctctgagtta

SEQ ID NO: 347976 - DNA, 19 bp, Homo sapiens
  siRNA target sequence for SPG20 (NM_015087.3,1058-1076).
ctctttgaggatctgttaa

SEQ ID NO: 347977 - DNA, 19 bp, Homo sapiens
  siRNA target sequence for SPG20 (NM_015087.3,1139-1157).
caaatccctggaagaacta

SEQ ID NO: 347978 - DNA, 19 bp, Homo sapiens
  siRNA target sequence for SPG20 (NM_015087.3,1160-1178).
ccctcctctgaccaactaa

SEQ ID NO: 347979 - DNA, 19 bp, Homo sapiens
  siRNA target sequence for SPG20 (NM_015087.3,1165-1183).
ctctgaccaactaaaagaa

SEQ ID NO: 347980 - DNA, 19 bp, Homo sapiens
  siRNA target sequence for SPG20 (NM_015087.3,1225-1243).
ggatgtacgtcataaagga

SEQ ID NO: 347981 - DNA, 19 bp, Homo sapiens
  siRNA target sequence for SPG20 (NM_015087.3,1258-1276).
ggctaaagatacttcaagt

SEQ ID NO: 347982 - DNA, 19 bp, Homo sapiens
  siRNA target sequence for SPG20 (NM_015087.3,1363-1381).
ggctcacaacattttgtca

SEQ ID NO: 347983 - DNA, 19 bp, Homo sapiens
  siRNA target sequence for SPG20 (NM_015087.3,1392-1410).
gggtgagttggggtttagt

SEQ ID NO: 347984 - DNA, 19 bp, Homo sapiens
  siRNA target sequence for SPG20 (NM_015087.3,1394-1412).
gtgagttggggtttagtca

SEQ ID NO: 347985 - DNA, 19 bp, Homo sapiens
  siRNA target sequence for SPG20 (NM_015087.3,1511-1529).
gtcaccaagggactttata

SEQ ID NO: 347986 - DNA, 19 bp, Homo sapiens
  siRNA target sequence for SPG20 (NM_015087.3,1513-1531).
caccaagggactttatata

SEQ ID NO: 347987 - DNA, 19 bp, Homo sapiens
  siRNA target sequence for SPG20 (NM_015087.3,1584-1602).
gagtttgcactgtagcaaa

SEQ ID NO: 347988 - DNA, 19 bp, Homo sapiens
  siRNA target sequence for SPG20 (NM_015087.3,1652-1670).
cttgttccagaatctctta

SEQ ID NO: 347989 - DNA, 19 bp, Homo sapiens
  siRNA target sequence for SPG20 (NM_015087.3,1711-1729).
ggttgtagcagcaagtagt

SEQ ID NO: 347990 - DNA, 19 bp, Homo sapiens
  siRNA target sequence for SPG20 (NM_015087.3,1743-1761).
caactgtctggcaaggatt

SEQ ID NO: 347991 - DNA, 19 bp, Homo sapiens
  siRNA target sequence for SPG20 (NM_015087.3,1748-1766).
gtctggcaaggattggaat

SEQ ID NO: 347992 - DNA, 19 bp, Homo sapiens
  siRNA target sequence for SPG20 (NM_015087.3,1769-1787).
gcagctaaatgcatcgtta

SEQ ID NO: 347993 - DNA, 19 bp, Homo sapiens
  siRNA target sequence for SPG20 (NM_015087.3,1770-1788).
cagctaaatgcatcgttaa

SEQ ID NO: 347994 - DNA, 19 bp, Homo sapiens
  siRNA target sequence for SPG20 (NM_015087.3,1772-1790).
gctaaatgcatcgttaaca

SEQ ID NO: 347995 - DNA, 19 bp, Homo sapiens
  siRNA target sequence for SPG20 (NM_015087.3,1773-1791).
ctaaatgcatcgttaacaa

SEQ ID NO: 347996 - DNA, 19 bp, Homo sapiens
  siRNA target sequence for SPG20 (NM_015087.3,1780-1798).
catcgttaacaatgtttca

SEQ ID NO: 347997 - DNA, 19 bp, Homo sapiens
  siRNA target sequence for SPG20 (NM_015087.3,1806-1824).
ctgtacaaactgtcagata

SEQ ID NO: 347998 - DNA, 19 bp, Homo sapiens
  siRNA target sequence for SPG20 (NM_015087.3,1808-1826).
gtacaaactgtcagataca

SEQ ID NO: 347999 - DNA, 19 bp, Homo sapiens
  siRNA target sequence for SPG20 (NM_015087.3,1821-1839).
gatacaaatacggatataa

SEQ ID NO: 348000 - DNA, 19 bp, Homo sapiens
  siRNA target sequence for SPG20 (NM_015087.3,1825-1843).
caaatacggatataatgca

SEQ ID NO: 348001 - DNA, 19 bp, Homo sapiens
  siRNA target sequence for SPG20 (NM_015087.3,1867-1885).
ggattctgcggtcaatgtt

SEQ ID NO: 348002 - DNA, 19 bp, Homo sapiens
  siRNA target sequence for SPG20 (NM_015087.3,1886-1904).
ggcgtaactgcctacaata

SEQ ID NO: 348003 - DNA, 19 bp, Homo sapiens
  siRNA target sequence for SPG20 (NM_015087.3,1887-1905).
gcgtaactgcctacaatat

SEQ ID NO: 348004 - DNA, 19 bp, Homo sapiens
  siRNA target sequence for SPG20 (NM_015087.3,1888-1906).
cgtaactgcctacaatatt

SEQ ID NO: 348005 - DNA, 19 bp, Homo sapiens
  siRNA target sequence for SPG20 (NM_015087.3,1889-1907).
gtaactgcctacaatatta

SEQ ID NO: 348006 - DNA, 19 bp, Homo sapiens
  siRNA target sequence for SPG20 (NM_015087.3,1896-1914).
cctacaatattaacaacat

SEQ ID NO: 348007 - DNA, 19 bp, Homo sapiens
  siRNA target sequence for SPG20 (NM_015087.3,1972-1990).
ggactatcagatagttgat

SEQ ID NO: 348008 - DNA, 19 bp, Homo sapiens
  siRNA target sequence for CAMTA2 (NM_015099.2,217-235).
gagaggctacggtggaata

SEQ ID NO: 348009 - DNA, 19 bp, Homo sapiens
  siRNA target sequence for CAMTA2 (NM_015099.2,219-237).
gaggctacggtggaataca

SEQ ID NO: 348010 - DNA, 19 bp, Homo sapiens
  siRNA target sequence for CAMTA2 (NM_015099.2,221-239).
ggctacggtggaatacaaa

SEQ ID NO: 348011 - DNA, 19 bp, Homo sapiens
  siRNA target sequence for CAMTA2 (NM_015099.2,222-240).
gctacggtggaatacaaat

SEQ ID NO: 348012 - DNA, 19 bp, Homo sapiens
  siRNA target sequence for CAMTA2 (NM_015099.2,438-456).
gggcatggagtgtctctat

SEQ ID NO: 348013 - DNA, 19 bp, Homo sapiens
  siRNA target sequence for CAMTA2 (NM_015099.2,580-598).
ggctgcagccccatctttt

SEQ ID NO: 348014 - DNA, 19 bp, Homo sapiens
  siRNA target sequence for CAMTA2 (NM_015099.2,868-886).
gtggagccccgagctttaa

SEQ ID NO: 348015 - DNA, 19 bp, Homo sapiens
  siRNA target sequence for CAMTA2 (NM_015099.2,1229-1247).
cctttgaccctgatcgttt

SEQ ID NO: 348016 - DNA, 19 bp, Homo sapiens
  siRNA target sequence for CAMTA2 (NM_015099.2,1230-1248).
ctttgaccctgatcgtttt

SEQ ID NO: 348017 - DNA, 19 bp, Homo sapiens
  siRNA target sequence for CAMTA2 (NM_015099.2,1234-1252).
gaccctgatcgttttctca

SEQ ID NO: 348018 - DNA, 19 bp, Homo sapiens
  siRNA target sequence for CAMTA2 (NM_015099.2,1260-1278).
ccagaggggccagacatat

SEQ ID NO: 348019 - DNA, 19 bp, Homo sapiens
  siRNA target sequence for CAMTA2 (NM_015099.2,1605-1623).
gcccttcagtctttcatca

SEQ ID NO: 348020 - DNA, 19 bp, Homo sapiens
  siRNA target sequence for CAMTA2 (NM_015099.2,1619-1637).
catcattcccagaccttat

SEQ ID NO: 348021 - DNA, 19 bp, Homo sapiens
  siRNA target sequence for CAMTA2 (NM_015099.2,1794-1812).
gcattactcctgtgtcttt

SEQ ID NO: 348022 - DNA, 19 bp, Homo sapiens
  siRNA target sequence for CAMTA2 (NM_015099.2,2016-2034).
gttccggatgtccatacta

SEQ ID NO: 348023 - DNA, 19 bp, Homo sapiens
  siRNA target sequence for CAMTA2 (NM_015099.2,2353-2371).
ccgctcaacgtggatcatt

SEQ ID NO: 348024 - DNA, 19 bp, Homo sapiens
  siRNA target sequence for CAMTA2 (NM_015099.2,2354-2372).
cgctcaacgtggatcattt

SEQ ID NO: 348025 - DNA, 19 bp, Homo sapiens
  siRNA target sequence for CAMTA2 (NM_015099.2,2662-2680).
gtcacgtcagcctattcta

SEQ ID NO: 348026 - DNA, 19 bp, Homo sapiens
  siRNA target sequence for CAMTA2 (NM_015099.2,2664-2682).
cacgtcagcctattctagt

SEQ ID NO: 348027 - DNA, 19 bp, Homo sapiens
  siRNA target sequence for CAMTA2 (NM_015099.2,2894-2912).
cacaggctgtggatgtgat

SEQ ID NO: 348028 - DNA, 19 bp, Homo sapiens
  siRNA target sequence for CAMTA2 (NM_015099.2,3158-3176).
cctcctgggcagagtttct

SEQ ID NO: 348029 - DNA, 19 bp, Homo sapiens
  siRNA target sequence for CAMTA2 (NM_015099.2,3193-3211).
ggcaagatggaaagtgatt

SEQ ID NO: 348030 - DNA, 19 bp, Homo sapiens
  siRNA target sequence for CAMTA2 (NM_015099.2,3216-3234).
cctgctgacactatcagat

SEQ ID NO: 348031 - DNA, 19 bp, Homo sapiens
  siRNA target sequence for CAMTA2 (NM_015099.2,3237-3255).
cgagcagcgggaactgtat

SEQ ID NO: 348032 - DNA, 19 bp, Homo sapiens
  siRNA target sequence for CAMTA2 (NM_015099.2,3278-3296).
cggccttccgaaagtacaa

SEQ ID NO: 348033 - DNA, 19 bp, Homo sapiens
  siRNA target sequence for CAMTA2 (NM_015099.2,3385-3403).
cttaagtttgcactctata

SEQ ID NO: 348034 - DNA, 19 bp, Homo sapiens
  siRNA target sequence for CAMTA2 (NM_015099.2,3610-3628).
gcagcccggaagatcatga

SEQ ID NO: 348035 - DNA, 19 bp, Homo sapiens
  siRNA target sequence for KIAA0399 (NM_015113.2,503-521).
gggtgatgggacagttgat

SEQ ID NO: 348036 - DNA, 19 bp, Homo sapiens
  siRNA target sequence for KIAA0399 (NM_015113.2,584-602).
ccacatcatcagacaacta

SEQ ID NO: 348037 - DNA, 19 bp, Homo sapiens
  siRNA target sequence for KIAA0399 (NM_015113.2,622-640).
caggtttcacagacatatt

SEQ ID NO: 348038 - DNA, 19 bp, Homo sapiens
  siRNA target sequence for KIAA0399 (NM_015113.2,649-667).
cgaaggagggccttgatat

SEQ ID NO: 348039 - DNA, 19 bp, Homo sapiens
  siRNA target sequence for KIAA0399 (NM_015113.2,654-672).
gagggccttgatattcact

SEQ ID NO: 348040 - DNA, 19 bp, Homo sapiens
  siRNA target sequence for KIAA0399 (NM_015113.2,825-843).
cctggagatctaactagaa

SEQ ID NO: 348041 - DNA, 19 bp, Homo sapiens
  siRNA target sequence for KIAA0399 (NM_015113.2,844-862).
gtccagagatggataaact

SEQ ID NO: 348042 - DNA, 19 bp, Homo sapiens
  siRNA target sequence for KIAA0399 (NM_015113.2,847-865).
cagagatggataaactcaa

SEQ ID NO: 348043 - DNA, 19 bp, Homo sapiens
  siRNA target sequence for KIAA0399 (NM_015113.2,904-922).
ccaactcggcagacattga

SEQ ID NO: 348044 - DNA, 19 bp, Homo sapiens
  siRNA target sequence for KIAA0399 (NM_015113.2,1093-1111).
ggaatgccagcgatcttca

SEQ ID NO: 348045 - DNA, 19 bp, Homo sapiens
  siRNA target sequence for KIAA0399 (NM_015113.2,1185-1203).
cagctctatgtccagatta

SEQ ID NO: 348046 - DNA, 19 bp, Homo sapiens
  siRNA target sequence for KIAA0399 (NM_015113.2,1188-1206).
ctctatgtccagattaaca

SEQ ID NO: 348047 - DNA, 19 bp, Homo sapiens
  siRNA target sequence for KIAA0399 (NM_015113.2,1224-1242).
gatggctgcgacactagaa

SEQ ID NO: 348048 - DNA, 19 bp, Homo sapiens
  siRNA target sequence for KIAA0399 (NM_015113.2,1228-1246).
gctgcgacactagaattca

SEQ ID NO: 348049 - DNA, 19 bp, Homo sapiens
  siRNA target sequence for KIAA0399 (NM_015113.2,1229-1247).
ctgcgacactagaattcat

SEQ ID NO: 348050 - DNA, 19 bp, Homo sapiens
  siRNA target sequence for KIAA0399 (NM_015113.2,1349-1367).
ggcttctatggagacaaat

SEQ ID NO: 348051 - DNA, 19 bp, Homo sapiens
  siRNA target sequence for KIAA0399 (NM_015113.2,1440-1458).
ccaggatctacagatttct

SEQ ID NO: 348052 - DNA, 19 bp, Homo sapiens
  siRNA target sequence for KIAA0399 (NM_015113.2,1528-1546).
ctaccccagaggtagaact

SEQ ID NO: 348053 - DNA, 19 bp, Homo sapiens
  siRNA target sequence for KIAA0399 (NM_015113.2,1576-1594).
gaagtgttgccaaagtcat

SEQ ID NO: 348054 - DNA, 19 bp, Homo sapiens
  siRNA target sequence for KIAA0399 (NM_015113.2,1688-1706).
cctcaaatatggtaaacct

SEQ ID NO: 348055 - DNA, 19 bp, Homo sapiens
  siRNA target sequence for KIAA0399 (NM_015113.2,1762-1780).
ccgaaaacctccttgttga

SEQ ID NO: 348056 - DNA, 19 bp, Homo sapiens
  siRNA target sequence for KIAA0399 (NM_015113.2,1763-1781).
cgaaaacctccttgttgaa

SEQ ID NO: 348057 - DNA, 19 bp, Homo sapiens
  siRNA target sequence for KIAA0399 (NM_015113.2,1783-1801).
cgtggacaagggatggttt

SEQ ID NO: 348058 - DNA, 19 bp, Homo sapiens
  siRNA target sequence for KIAA0399 (NM_015113.2,1784-1802).
gtggacaagggatggtttt

SEQ ID NO: 348059 - DNA, 19 bp, Homo sapiens
  siRNA target sequence for KIAA0399 (NM_015113.2,1803-1821).
cttacggaaactggaaaaa

SEQ ID NO: 348060 - DNA, 19 bp, Homo sapiens
  siRNA target sequence for KIAA0399 (NM_015113.2,1873-1891).
cacagataagaattatggt

SEQ ID NO: 348061 - DNA, 19 bp, Homo sapiens
  siRNA target sequence for KIAA0399 (NM_015113.2,1921-1939).
ggttggtgtttgcctataa

SEQ ID NO: 348062 - DNA, 19 bp, Homo sapiens
  siRNA target sequence for KIAA0399 (NM_015113.2,1926-1944).
gtgtttgcctataactcat

SEQ ID NO: 348063 - DNA, 19 bp, Homo sapiens
  siRNA target sequence for KIAA0399 (NM_015113.2,1960-1978).
gtgcggaagaacacttcaa

SEQ ID NO: 348064 - DNA, 19 bp, Homo sapiens
  siRNA target sequence for KIAA0399 (NM_015113.2,1981-1999).
ggtttgaaaaatatgacaa

SEQ ID NO: 348065 - DNA, 19 bp, Homo sapiens
  siRNA target sequence for KIAA0399 (NM_015113.2,2012-2030).
ggagctcaggcaatttgta

SEQ ID NO: 348066 - DNA, 19 bp, Homo sapiens
  siRNA target sequence for KIAA0399 (NM_015113.2,2039-2057).
gattggttgctcatctgat

SEQ ID NO: 348067 - DNA, 19 bp, Homo sapiens
  siRNA target sequence for KIAA0399 (NM_015113.2,2325-2343).
ctcaggacccttcagttta

SEQ ID NO: 348068 - DNA, 19 bp, Homo sapiens
  siRNA target sequence for KIAA0399 (NM_015113.2,2329-2347).
ggacccttcagtttatcca

SEQ ID NO: 348069 - DNA, 19 bp, Homo sapiens
  siRNA target sequence for KIAA0399 (NM_015113.2,2463-2481).
caaaacccgagggaagaat

SEQ ID NO: 348070 - DNA, 19 bp, Homo sapiens
  siRNA target sequence for KIAA0399 (NM_015113.2,2567-2585).
ggaaaaggctccaatccaa

SEQ ID NO: 348071 - DNA, 19 bp, Homo sapiens
  siRNA target sequence for KIAA0399 (NM_015113.2,2568-2586).
gaaaaggctccaatccaaa

SEQ ID NO: 348072 - DNA, 19 bp, Homo sapiens
  siRNA target sequence for KIAA0399 (NM_015113.2,2662-2680).
ctgtgcccatggagatact

SEQ ID NO: 348073 - DNA, 19 bp, Homo sapiens
  siRNA target sequence for KIAA0399 (NM_015113.2,2720-2738).
catcttctttcctaatcga

SEQ ID NO: 348074 - DNA, 19 bp, Homo sapiens
  siRNA target sequence for KIAA0399 (NM_015113.2,2743-2761).
cccgacggaaccatctctt

SEQ ID NO: 348075 - DNA, 19 bp, Homo sapiens
  siRNA target sequence for KIAA0399 (NM_015113.2,2754-2772).
catctcttcaccatgatga

SEQ ID NO: 348076 - DNA, 19 bp, Homo sapiens
  siRNA target sequence for KIAA0399 (NM_015113.2,2818-2836).
gttcactgtgcacgtattt

SEQ ID NO: 348077 - DNA, 19 bp, Homo sapiens
  siRNA target sequence for KIAA0399 (NM_015113.2,2949-2967).
cgagagtgcgagctgttaa

SEQ ID NO: 348078 - DNA, 19 bp, Homo sapiens
  siRNA target sequence for KIAA0399 (NM_015113.2,2950-2968).
gagagtgcgagctgttaat

SEQ ID NO: 348079 - DNA, 19 bp, Homo sapiens
  siRNA target sequence for KIAA0399 (NM_015113.2,3093-3111).
gccgtggaccttattgaaa

SEQ ID NO: 348080 - DNA, 19 bp, Homo sapiens
  siRNA target sequence for KIAA0399 (NM_015113.2,3098-3116).
ggaccttattgaaaaatat

SEQ ID NO: 348081 - DNA, 19 bp, Homo sapiens
  siRNA target sequence for KIAA0399 (NM_015113.2,3173-3191).
cagtggaaaaaccatagta

SEQ ID NO: 348082 - DNA, 19 bp, Homo sapiens
  siRNA target sequence for KIAA0399 (NM_015113.2,3175-3193).
gtggaaaaaccatagtaga

SEQ ID NO: 348083 - DNA, 19 bp, Homo sapiens
  siRNA target sequence for KIAA0399 (NM_015113.2,3225-3243).
gctcgtcaactggttatct

SEQ ID NO: 348084 - DNA, 19 bp, Homo sapiens
  siRNA target sequence for KIAA0399 (NM_015113.2,3226-3244).
ctcgtcaactggttatctt

SEQ ID NO: 348085 - DNA, 19 bp, Homo sapiens
  siRNA target sequence for KIAA0399 (NM_015113.2,3387-3405).
cagcctgtggtgttacata

SEQ ID NO: 348086 - DNA, 19 bp, Homo sapiens
  siRNA target sequence for KIAA0399 (NM_015113.2,3402-3420).
catacgtggacgaaggaat

SEQ ID NO: 348087 - DNA, 19 bp, Homo sapiens
  siRNA target sequence for KIAA0399 (NM_015113.2,3416-3434).
ggaatctgcccacaactat

SEQ ID NO: 348088 - DNA, 19 bp, Homo sapiens
  siRNA target sequence for KIAA0399 (NM_015113.2,3450-3468).
gaggtatccgtctttgtta

SEQ ID NO: 348089 - DNA, 19 bp, Homo sapiens
  siRNA target sequence for KIAA0399 (NM_015113.2,3469-3487).
gcccaggggcaacctattt

SEQ ID NO: 348090 - DNA, 19 bp, Homo sapiens
  siRNA target sequence for KIAA0399 (NM_015113.2,3472-3490).
caggggcaacctattttga

SEQ ID NO: 348091 - DNA, 19 bp, Homo sapiens
  siRNA target sequence for KIAA0399 (NM_015113.2,3500-3518).
cgatgacaggtgtgaaact

SEQ ID NO: 348092 - DNA, 19 bp, Homo sapiens
  siRNA target sequence for KIAA0399 (NM_015113.2,3517-3535).
ctgaaaaaaggtatgatta

SEQ ID NO: 348093 - DNA, 19 bp, Homo sapiens
  siRNA target sequence for KIAA0399 (NM_015113.2,3527-3545).
gtatgattatctggaattt

SEQ ID NO: 348094 - DNA, 19 bp, Homo sapiens
  siRNA target sequence for KIAA0399 (NM_015113.2,3551-3569).
cgctagaggtcggaaaaca

SEQ ID NO: 348095 - DNA, 19 bp, Homo sapiens
  siRNA target sequence for KIAA0399 (NM_015113.2,3568-3586).
cacgctatgacacaaaagt

SEQ ID NO: 348096 - DNA, 19 bp, Homo sapiens
  siRNA target sequence for KIAA0399 (NM_015113.2,3668-3686).
caacgaatggggctacaaa

SEQ ID NO: 348097 - DNA, 19 bp, Homo sapiens
  siRNA target sequence for KIAA0399 (NM_015113.2,3808-3826).
gccagttaggaagtaacat

SEQ ID NO: 348098 - DNA, 19 bp, Homo sapiens
  siRNA target sequence for KIAA0399 (NM_015113.2,3828-3846).
gtagtacctcaggcaaaaa

SEQ ID NO: 348099 - DNA, 19 bp, Homo sapiens
  siRNA target sequence for KIAA0399 (NM_015113.2,3901-3919).
gtccagagttggaattaga

SEQ ID NO: 348100 - DNA, 19 bp, Homo sapiens
  siRNA target sequence for KIAA0399 (NM_015113.2,3936-3954).
cacccacaccggaatagta

SEQ ID NO: 348101 - DNA, 19 bp, Homo sapiens
  siRNA target sequence for KIAA0399 (NM_015113.2,3946-3964).
ggaatagtaaggaggttaa

SEQ ID NO: 348102 - DNA, 19 bp, Homo sapiens
  siRNA target sequence for KIAA0399 (NM_015113.2,3977-3995).
cgacccctgccgccatttt

SEQ ID NO: 348103 - DNA, 19 bp, Homo sapiens
  siRNA target sequence for KIAA0399 (NM_015113.2,3980-3998).
cccctgccgccattttctt

SEQ ID NO: 348104 - DNA, 19 bp, Homo sapiens
  siRNA target sequence for KIAA0399 (NM_015113.2,3985-4003).
gccgccattttcttcttga

SEQ ID NO: 348105 - DNA, 19 bp, Homo sapiens
  siRNA target sequence for KIAA0399 (NM_015113.2,4041-4059).
ccatattcagaacttttca

SEQ ID NO: 348106 - DNA, 19 bp, Homo sapiens
  siRNA target sequence for KIAA0399 (NM_015113.2,4067-4085).
catacaggcatgtagaaaa

SEQ ID NO: 348107 - DNA, 19 bp, Homo sapiens
  siRNA target sequence for KIAA0399 (NM_015113.2,4091-4109).
cccaaagacagatatagtt

SEQ ID NO: 348108 - DNA, 19 bp, Homo sapiens
  siRNA target sequence for KIAA0399 (NM_015113.2,4111-4129).
ctggttccactattgatca

SEQ ID NO: 348109 - DNA, 19 bp, Homo sapiens
  siRNA target sequence for KIAA0399 (NM_015113.2,4160-4178).
gtatcgcactccagattta

SEQ ID NO: 348110 - DNA, 19 bp, Homo sapiens
  siRNA target sequence for KIAA0399 (NM_015113.2,4165-4183).
gcactccagatttatatga

SEQ ID NO: 348111 - DNA, 19 bp, Homo sapiens
  siRNA target sequence for KIAA0399 (NM_015113.2,4256-4274).
ggcagatgggattcgaata

SEQ ID NO: 348112 - DNA, 19 bp, Homo sapiens
  siRNA target sequence for KIAA0399 (NM_015113.2,4257-4275).
gcagatgggattcgaatat

SEQ ID NO: 348113 - DNA, 19 bp, Homo sapiens
  siRNA target sequence for KIAA0399 (NM_015113.2,4269-4287).
cgaatatggatgttagaga

SEQ ID NO: 348114 - DNA, 19 bp, Homo sapiens
  siRNA target sequence for KIAA0399 (NM_015113.2,4270-4288).
gaatatggatgttagagat

SEQ ID NO: 348115 - DNA, 19 bp, Homo sapiens
  siRNA target sequence for KIAA0399 (NM_015113.2,4391-4409).
gaagagtcttctattacta

SEQ ID NO: 348116 - DNA, 19 bp, Homo sapiens
  siRNA target sequence for KIAA0399 (NM_015113.2,4416-4434).
ctgcccacgggcataagtt

SEQ ID NO: 348117 - DNA, 19 bp, Homo sapiens
  siRNA target sequence for KIAA0399 (NM_015113.2,4418-4436).
gcccacgggcataagttca

SEQ ID NO: 348118 - DNA, 19 bp, Homo sapiens
  siRNA target sequence for KIAA0399 (NM_015113.2,4421-4439).
cacgggcataagttcaaaa

SEQ ID NO: 348119 - DNA, 19 bp, Homo sapiens
  siRNA target sequence for KIAA0399 (NM_015113.2,4423-4441).
cgggcataagttcaaaaga

SEQ ID NO: 348120 - DNA, 19 bp, Homo sapiens
  siRNA target sequence for KIAA0399 (NM_015113.2,4424-4442).
gggcataagttcaaaagaa

SEQ ID NO: 348121 - DNA, 19 bp, Homo sapiens
  siRNA target sequence for KIAA0399 (NM_015113.2,4454-4472).
gttggagactgctgatgaa

SEQ ID NO: 348122 - DNA, 19 bp, Homo sapiens
  siRNA target sequence for KIAA0399 (NM_015113.2,4725-4743).
cggctgctctcctttcgat

SEQ ID NO: 348123 - DNA, 19 bp, Homo sapiens
  siRNA target sequence for KIAA0399 (NM_015113.2,4800-4818).
gacgtcatggacttcatta

SEQ ID NO: 348124 - DNA, 19 bp, Homo sapiens
  siRNA target sequence for KIAA0399 (NM_015113.2,4892-4910).
ggaagtcctgaagataact

SEQ ID NO: 348125 - DNA, 19 bp, Homo sapiens
  siRNA target sequence for KIAA0399 (NM_015113.2,4946-4964).
cttccatccacctttcata

SEQ ID NO: 348126 - DNA, 19 bp, Homo sapiens
  siRNA target sequence for KIAA0399 (NM_015113.2,4949-4967).
ccatccacctttcatactt

SEQ ID NO: 348127 - DNA, 19 bp, Homo sapiens
  siRNA target sequence for KIAA0399 (NM_015113.2,4985-5003).
gacctgtcagaaagatttt

SEQ ID NO: 348128 - DNA, 19 bp, Homo sapiens
  siRNA target sequence for KIAA0399 (NM_015113.2,5052-5070).
gaaattcgagacacttact

SEQ ID NO: 348129 - DNA, 19 bp, Homo sapiens
  siRNA target sequence for KIAA0399 (NM_015113.2,5063-5081).
cacttactatcaacttgtt

SEQ ID NO: 348130 - DNA, 19 bp, Homo sapiens
  siRNA target sequence for KIAA0399 (NM_015113.2,5065-5083).
cttactatcaacttgttct

SEQ ID NO: 348131 - DNA, 19 bp, Homo sapiens
  siRNA target sequence for KIAA0399 (NM_015113.2,5069-5087).
ctatcaacttgttctgttt

SEQ ID NO: 348132 - DNA, 19 bp, Homo sapiens
  siRNA target sequence for KIAA0399 (NM_015113.2,5159-5177).
gacagccctgcttcatctt

SEQ ID NO: 348133 - DNA, 19 bp, Homo sapiens
  siRNA target sequence for KIAA0399 (NM_015113.2,5198-5216).
caatgatctcgccttcttt

SEQ ID NO: 348134 - DNA, 19 bp, Homo sapiens
  siRNA target sequence for KIAA0399 (NM_015113.2,5205-5223).
ctcgccttctttgttgata

SEQ ID NO: 348135 - DNA, 19 bp, Homo sapiens
  siRNA target sequence for KIAA0399 (NM_015113.2,5252-5270).
gtcacaggagaatataagt

SEQ ID NO: 348136 - DNA, 19 bp, Homo sapiens
  siRNA target sequence for KIAA0399 (NM_015113.2,5291-5309).
ccaatggagtgaagaagat

SEQ ID NO: 348137 - DNA, 19 bp, Homo sapiens
  siRNA target sequence for KIAA0399 (NM_015113.2,5322-5340).
gccaagcagaattcagaat

SEQ ID NO: 348138 - DNA, 19 bp, Homo sapiens
  siRNA target sequence for KIAA0399 (NM_015113.2,5351-5369).
gtgtcaggatggcatgttt

SEQ ID NO: 348139 - DNA, 19 bp, Homo sapiens
  siRNA target sequence for KIAA0399 (NM_015113.2,5370-5388).
gaggcctggtatgaaaaaa

SEQ ID NO: 348140 - DNA, 19 bp, Homo sapiens
  siRNA target sequence for KIAA0399 (NM_015113.2,5372-5390).
ggcctggtatgaaaaaata

SEQ ID NO: 348141 - DNA, 19 bp, Homo sapiens
  siRNA target sequence for KIAA0399 (NM_015113.2,5440-5458).
gctactgtgacctgttaaa

SEQ ID NO: 348142 - DNA, 19 bp, Homo sapiens
  siRNA target sequence for KIAA0399 (NM_015113.2,5441-5459).
ctactgtgacctgttaaat

SEQ ID NO: 348143 - DNA, 19 bp, Homo sapiens
  siRNA target sequence for KIAA0399 (NM_015113.2,5529-5547).
gacatggatctctgcaaaa

SEQ ID NO: 348144 - DNA, 19 bp, Homo sapiens
  siRNA target sequence for KIAA0399 (NM_015113.2,5625-5643).
cactgccagggtttgatca

SEQ ID NO: 348145 - DNA, 19 bp, Homo sapiens
  siRNA target sequence for KIAA0399 (NM_015113.2,5662-5680).
gcaatgtttgcgatgactt

SEQ ID NO: 348146 - DNA, 19 bp, Homo sapiens
  siRNA target sequence for KIAA0399 (NM_015113.2,5698-5716).
gctatgcagcgaagaaata

SEQ ID NO: 348147 - DNA, 19 bp, Homo sapiens
  siRNA target sequence for KIAA0399 (NM_015113.2,5752-5770).
cccacccaatggtaaccat

SEQ ID NO: 348148 - DNA, 19 bp, Homo sapiens
  siRNA target sequence for KIAA0399 (NM_015113.2,5791-5809).
ggctcatccagccatatat

SEQ ID NO: 348149 - DNA, 19 bp, Homo sapiens
  siRNA target sequence for KIAA0399 (NM_015113.2,5799-5817).
cagccatatatccataact

SEQ ID NO: 348150 - DNA, 19 bp, Homo sapiens
  siRNA target sequence for KIAA0399 (NM_015113.2,5989-6007).
gccttaaagctctagcttt

SEQ ID NO: 348151 - DNA, 19 bp, Homo sapiens
  siRNA target sequence for KIAA0399 (NM_015113.2,6028-6046).
gggactcgagcctagaaga

SEQ ID NO: 348152 - DNA, 19 bp, Homo sapiens
  siRNA target sequence for KIAA0399 (NM_015113.2,6198-6216).
gcagataaaggtgtatcat

SEQ ID NO: 348153 - DNA, 19 bp, Homo sapiens
  siRNA target sequence for KIAA0399 (NM_015113.2,6201-6219).
gataaaggtgtatcattat

SEQ ID NO: 348154 - DNA, 19 bp, Homo sapiens
  siRNA target sequence for KIAA0399 (NM_015113.2,6386-6404).
gaggattttgggattacta

SEQ ID NO: 348155 - DNA, 19 bp, Homo sapiens
  siRNA target sequence for KIAA0399 (NM_015113.2,6436-6454).
ccacggttcccctgataga

SEQ ID NO: 348156 - DNA, 19 bp, Homo sapiens
  siRNA target sequence for KIAA0399 (NM_015113.2,6500-6518).
cgcaggccacctgaatgaa

SEQ ID NO: 348157 - DNA, 19 bp, Homo sapiens
  siRNA target sequence for KIAA0399 (NM_015113.2,6537-6555).
ggtcttctcggccagttaa

SEQ ID NO: 348158 - DNA, 19 bp, Homo sapiens
  siRNA target sequence for KIAA0399 (NM_015113.2,6538-6556).
gtcttctcggccagttaat

SEQ ID NO: 348159 - DNA, 19 bp, Homo sapiens
  siRNA target sequence for KIAA0399 (NM_015113.2,6540-6558).
cttctcggccagttaatta

SEQ ID NO: 348160 - DNA, 19 bp, Homo sapiens
  siRNA target sequence for KIAA0399 (NM_015113.2,6600-6618).
gtcctctcagccaaacaca

SEQ ID NO: 348161 - DNA, 19 bp, Homo sapiens
  siRNA target sequence for KIAA0399 (NM_015113.2,6772-6790).
cactgtggcgtgatgtcat

SEQ ID NO: 348162 - DNA, 19 bp, Homo sapiens
  siRNA target sequence for KIAA0399 (NM_015113.2,6896-6914).
gggaacccgctgcgtttat

SEQ ID NO: 348163 - DNA, 19 bp, Homo sapiens
  siRNA target sequence for KIAA0399 (NM_015113.2,6897-6915).
ggaacccgctgcgtttata

SEQ ID NO: 348164 - DNA, 19 bp, Homo sapiens
  siRNA target sequence for KIAA0399 (NM_015113.2,6898-6916).
gaacccgctgcgtttatat

SEQ ID NO: 348165 - DNA, 19 bp, Homo sapiens
  siRNA target sequence for KIAA0399 (NM_015113.2,6901-6919).
cccgctgcgtttatatgga

SEQ ID NO: 348166 - DNA, 19 bp, Homo sapiens
  siRNA target sequence for KIAA0399 (NM_015113.2,6902-6920).
ccgctgcgtttatatggat

SEQ ID NO: 348167 - DNA, 19 bp, Homo sapiens
  siRNA target sequence for KIAA0399 (NM_015113.2,6903-6921).
cgctgcgtttatatggata

SEQ ID NO: 348168 - DNA, 19 bp, Homo sapiens
  siRNA target sequence for KIAA0399 (NM_015113.2,6904-6922).
gctgcgtttatatggataa

SEQ ID NO: 348169 - DNA, 19 bp, Homo sapiens
  siRNA target sequence for KIAA0399 (NM_015113.2,6925-6943).
ccaatgaaccccataatgt

SEQ ID NO: 348170 - DNA, 19 bp, Homo sapiens
  siRNA target sequence for KIAA0399 (NM_015113.2,6933-6951).
ccccataatgtgatcatct

SEQ ID NO: 348171 - DNA, 19 bp, Homo sapiens
  siRNA target sequence for KIAA0399 (NM_015113.2,6934-6952).
cccataatgtgatcatctt

SEQ ID NO: 348172 - DNA, 19 bp, Homo sapiens
  siRNA target sequence for KIAA0399 (NM_015113.2,6974-6992).
cagggctgtgattgttgat

SEQ ID NO: 348173 - DNA, 19 bp, Homo sapiens
  siRNA target sequence for KIAA0399 (NM_015113.2,6983-7001).
gattgttgatgtcaaaact

SEQ ID NO: 348174 - DNA, 19 bp, Homo sapiens
  siRNA target sequence for KIAA0399 (NM_015113.2,7187-7205).
ggccctgaaaggattgtat

SEQ ID NO: 348175 - DNA, 19 bp, Homo sapiens
  siRNA target sequence for KIAA0399 (NM_015113.2,7189-7207).
ccctgaaaggattgtataa

SEQ ID NO: 348176 - DNA, 19 bp, Homo sapiens
  siRNA target sequence for KIAA0399 (NM_015113.2,7190-7208).
cctgaaaggattgtataaa

SEQ ID NO: 348177 - DNA, 19 bp, Homo sapiens
  siRNA target sequence for KIAA0399 (NM_015113.2,7191-7209).
ctgaaaggattgtataaaa

SEQ ID NO: 348178 - DNA, 19 bp, Homo sapiens
  siRNA target sequence for KIAA0399 (NM_015113.2,7360-7378).
cctcaaaaaaggagatcaa

SEQ ID NO: 348179 - DNA, 19 bp, Homo sapiens
  siRNA target sequence for KIAA0399 (NM_015113.2,7589-7607).
gatgaaaaagaccgattat

SEQ ID NO: 348180 - DNA, 19 bp, Homo sapiens
  siRNA target sequence for KIAA0399 (NM_015113.2,7619-7637).
ggttcagaagaggtttgat

SEQ ID NO: 348181 - DNA, 19 bp, Homo sapiens
  siRNA target sequence for KIAA0399 (NM_015113.2,7683-7701).
cggtggcagcccagtaaga

SEQ ID NO: 348182 - DNA, 19 bp, Homo sapiens
  siRNA target sequence for KIAA0399 (NM_015113.2,7905-7923).
gagctgaactgcaagagta

SEQ ID NO: 348183 - DNA, 19 bp, Homo sapiens
  siRNA target sequence for KIAA0399 (NM_015113.2,8064-8082).
gcccatatgacctacattt

SEQ ID NO: 348184 - DNA, 19 bp, Homo sapiens
  siRNA target sequence for KIAA0399 (NM_015113.2,8065-8083).
cccatatgacctacatttt

SEQ ID NO: 348185 - DNA, 19 bp, Homo sapiens
  siRNA target sequence for KIAA0399 (NM_015113.2,8236-8254).
cgaaacacccgtataacaa

SEQ ID NO: 348186 - DNA, 19 bp, Homo sapiens
  siRNA target sequence for KIAA0399 (NM_015113.2,8241-8259).
cacccgtataacaacaaca

SEQ ID NO: 348187 - DNA, 19 bp, Homo sapiens
  siRNA target sequence for KIAA0399 (NM_015113.2,8260-8278).
ccaacttcgaggataaagt

SEQ ID NO: 348188 - DNA, 19 bp, Homo sapiens
  siRNA target sequence for KIAA0399 (NM_015113.2,8267-8285).
cgaggataaagttcacatt

SEQ ID NO: 348189 - DNA, 19 bp, Homo sapiens
  siRNA target sequence for KIAA0399 (NM_015113.2,8290-8308).
gtgccatctacctctcaat

SEQ ID NO: 348190 - DNA, 19 bp, Homo sapiens
  siRNA target sequence for KIAA0399 (NM_015113.2,8292-8310).
gccatctacctctcaatca

SEQ ID NO: 348191 - DNA, 19 bp, Homo sapiens
  siRNA target sequence for KIAA0399 (NM_015113.2,8294-8312).
catctacctctcaatcaaa

SEQ ID NO: 348192 - DNA, 19 bp, Homo sapiens
  siRNA target sequence for KIAA0399 (NM_015113.2,8482-8500).
ccgagtggggctacagatt

SEQ ID NO: 348193 - DNA, 19 bp, Homo sapiens
  siRNA target sequence for KIAA0399 (NM_015113.2,8639-8657).
gactggccatcaacgatta

SEQ ID NO: 348194 - DNA, 19 bp, Homo sapiens
  siRNA target sequence for KIAA0399 (NM_015113.2,8641-8659).
ctggccatcaacgattaaa

SEQ ID NO: 348195 - DNA, 19 bp, Homo sapiens
  siRNA target sequence for KIAA0399 (NM_015113.2,8713-8731).
gtgaccttgcgctgttgaa

SEQ ID NO: 348196 - DNA, 19 bp, Homo sapiens
  siRNA target sequence for KIAA0399 (NM_015113.2,8733-8751).
cccctgtggcagctcttta

SEQ ID NO: 348197 - DNA, 19 bp, Homo sapiens
  siRNA target sequence for KIAA0276 (NM_015115.1,319-337).
ctctggagatgatttatct

SEQ ID NO: 348198 - DNA, 19 bp, Homo sapiens
  siRNA target sequence for KIAA0276 (NM_015115.1,377-395).
gattcgactagaataaaga

SEQ ID NO: 348199 - DNA, 19 bp, Homo sapiens
  siRNA target sequence for KIAA0276 (NM_015115.1,473-491).
cctgaaggcatggagaaat

SEQ ID NO: 348200 - DNA, 19 bp, Homo sapiens
  siRNA target sequence for KIAA0276 (NM_015115.1,512-530).
gaaccagaaaacgtagtta

SEQ ID NO: 348201 - DNA, 19 bp, Homo sapiens
  siRNA target sequence for KIAA0276 (NM_015115.1,516-534).
cagaaaacgtagttatgct

SEQ ID NO: 348202 - DNA, 19 bp, Homo sapiens
  siRNA target sequence for KIAA0276 (NM_015115.1,618-636).
gtgatacaacagaaaaact

SEQ ID NO: 348203 - DNA, 19 bp, Homo sapiens
  siRNA target sequence for KIAA0276 (NM_015115.1,713-731).
gactttgcacggcaatcaa

SEQ ID NO: 348204 - DNA, 19 bp, Homo sapiens
  siRNA target sequence for KIAA0276 (NM_015115.1,715-733).
ctttgcacggcaatcaaaa

SEQ ID NO: 348205 - DNA, 19 bp, Homo sapiens
  siRNA target sequence for KIAA0276 (NM_015115.1,719-737).
gcacggcaatcaaaataca

SEQ ID NO: 348206 - DNA, 19 bp, Homo sapiens
  siRNA target sequence for KIAA0276 (NM_015115.1,720-738).
cacggcaatcaaaatacaa

SEQ ID NO: 348207 - DNA, 19 bp, Homo sapiens
  siRNA target sequence for KIAA0276 (NM_015115.1,760-778).
gtgcaatgtcctagagttt

SEQ ID NO: 348208 - DNA, 19 bp, Homo sapiens
  siRNA target sequence for KIAA0276 (NM_015115.1,773-791).
gagtttagcagaacaatta

SEQ ID NO: 348209 - DNA, 19 bp, Homo sapiens
  siRNA target sequence for KIAA0276 (NM_015115.1,775-793).
gtttagcagaacaattaat

SEQ ID NO: 348210 - DNA, 19 bp, Homo sapiens
  siRNA target sequence for KIAA0276 (NM_015115.1,822-840).
gagcatggccagttttgtt

SEQ ID NO: 348211 - DNA, 19 bp, Homo sapiens
  siRNA target sequence for ALMS1 (NM_015120.2,296-314).
cccagcatctggaaagtat

SEQ ID NO: 348212 - DNA, 19 bp, Homo sapiens
  siRNA target sequence for ALMS1 (NM_015120.2,442-460).
ccattgacctgtcatgtat

SEQ ID NO: 348213 - DNA, 19 bp, Homo sapiens
  siRNA target sequence for ALMS1 (NM_015120.2,452-470).
gtcatgtatggcaacagat

SEQ ID NO: 348214 - DNA, 19 bp, Homo sapiens
  siRNA target sequence for ALMS1 (NM_015120.2,457-475).
gtatggcaacagatagtat

SEQ ID NO: 348215 - DNA, 19 bp, Homo sapiens
  siRNA target sequence for ALMS1 (NM_015120.2,461-479).
ggcaacagatagtatatca

SEQ ID NO: 348216 - DNA, 19 bp, Homo sapiens
  siRNA target sequence for ALMS1 (NM_015120.2,482-500).
gcaatagtagaacacaaat

SEQ ID NO: 348217 - DNA, 19 bp, Homo sapiens
  siRNA target sequence for ALMS1 (NM_015120.2,483-501).
caatagtagaacacaaatt

SEQ ID NO: 348218 - DNA, 19 bp, Homo sapiens
  siRNA target sequence for ALMS1 (NM_015120.2,642-660).
gagaacggaagatactgaa

SEQ ID NO: 348219 - DNA, 19 bp, Homo sapiens
  siRNA target sequence for ALMS1 (NM_015120.2,679-697).
ctggaggagggcatattga

SEQ ID NO: 348220 - DNA, 19 bp, Homo sapiens
  siRNA target sequence for ALMS1 (NM_015120.2,689-707).
gcatattgacgcaatcaga

SEQ ID NO: 348221 - DNA, 19 bp, Homo sapiens
  siRNA target sequence for ALMS1 (NM_015120.2,690-708).
catattgacgcaatcagaa

SEQ ID NO: 348222 - DNA, 19 bp, Homo sapiens
  siRNA target sequence for ALMS1 (NM_015120.2,743-761).
gttctccactgctagtcat

SEQ ID NO: 348223 - DNA, 19 bp, Homo sapiens
  siRNA target sequence for ALMS1 (NM_015120.2,751-769).
ctgctagtcatacaagata

SEQ ID NO: 348224 - DNA, 19 bp, Homo sapiens
  siRNA target sequence for ALMS1 (NM_015120.2,827-845).
cgcctgattctttatttca

SEQ ID NO: 348225 - DNA, 19 bp, Homo sapiens
  siRNA target sequence for ALMS1 (NM_015120.2,844-862).
catcaaagtgaactaagtt

SEQ ID NO: 348226 - DNA, 19 bp, Homo sapiens
  siRNA target sequence for ALMS1 (NM_015120.2,917-935).
gaccatcggaagttagtga

SEQ ID NO: 348227 - DNA, 19 bp, Homo sapiens
  siRNA target sequence for ALMS1 (NM_015120.2,961-979).
gtagcttcagacttagcaa

SEQ ID NO: 348228 - DNA, 19 bp, Homo sapiens
  siRNA target sequence for ALMS1 (NM_015120.2,977-995).
caagcagtcgctttagtgt

SEQ ID NO: 348229 - DNA, 19 bp, Homo sapiens
  siRNA target sequence for ALMS1 (NM_015120.2,981-999).
cagtcgctttagtgtatct

SEQ ID NO: 348230 - DNA, 19 bp, Homo sapiens
  siRNA target sequence for ALMS1 (NM_015120.2,983-1001).
gtcgctttagtgtatctca

SEQ ID NO: 348231 - DNA, 19 bp, Homo sapiens
  siRNA target sequence for ALMS1 (NM_015120.2,1077-1095).
gactatttcgtctgttgat

SEQ ID NO: 348232 - DNA, 19 bp, Homo sapiens
  siRNA target sequence for ALMS1 (NM_015120.2,1079-1097).
ctatttcgtctgttgatga

SEQ ID NO: 348233 - DNA, 19 bp, Homo sapiens
  siRNA target sequence for ALMS1 (NM_015120.2,1085-1103).
cgtctgttgatgaactgaa

SEQ ID NO: 348234 - DNA, 19 bp, Homo sapiens
  siRNA target sequence for ALMS1 (NM_015120.2,1110-1128).
caaagactgtgatcgttat

SEQ ID NO: 348235 - DNA, 19 bp, Homo sapiens
  siRNA target sequence for ALMS1 (NM_015120.2,1118-1136).
gtgatcgttatgatgatct

SEQ ID NO: 348236 - DNA, 19 bp, Homo sapiens
  siRNA target sequence for ALMS1 (NM_015120.2,1120-1138).
gatcgttatgatgatcttt

SEQ ID NO: 348237 - DNA, 19 bp, Homo sapiens
  siRNA target sequence for ALMS1 (NM_015120.2,1123-1141).
cgttatgatgatctttgtt

SEQ ID NO: 348238 - DNA, 19 bp, Homo sapiens
  siRNA target sequence for ALMS1 (NM_015120.2,1129-1147).
gatgatctttgttcatata

SEQ ID NO: 348239 - DNA, 19 bp, Homo sapiens
  siRNA target sequence for ALMS1 (NM_015120.2,1176-1194).
gtggcctgaaaacaattta

SEQ ID NO: 348240 - DNA, 19 bp, Homo sapiens
  siRNA target sequence for ALMS1 (NM_015120.2,1216-1234).
gttgcaacttcatttgaca

SEQ ID NO: 348241 - DNA, 19 bp, Homo sapiens
  siRNA target sequence for ALMS1 (NM_015120.2,1366-1384).
gttgagtctgacgtcatta

SEQ ID NO: 348242 - DNA, 19 bp, Homo sapiens
  siRNA target sequence for ALMS1 (NM_015120.2,1385-1403).
ctctggatggcctaaatga

SEQ ID NO: 348243 - DNA, 19 bp, Homo sapiens
  siRNA target sequence for ALMS1 (NM_015120.2,1408-1426).
gctgttgtatgcagtgaaa

SEQ ID NO: 348244 - DNA, 19 bp, Homo sapiens
  siRNA target sequence for ALMS1 (NM_015120.2,1454-1472).
caagagagtcggaatatca

SEQ ID NO: 348245 - DNA, 19 bp, Homo sapiens
  siRNA target sequence for ALMS1 (NM_015120.2,1464-1482).
ggaatatcactcttcagat

SEQ ID NO: 348246 - DNA, 19 bp, Homo sapiens
  siRNA target sequence for ALMS1 (NM_015120.2,1515-1533).
gccaaaggctcctaaacat

SEQ ID NO: 348247 - DNA, 19 bp, Homo sapiens
  siRNA target sequence for ALMS1 (NM_015120.2,1516-1534).
ccaaaggctcctaaacatt

SEQ ID NO: 348248 - DNA, 19 bp, Homo sapiens
  siRNA target sequence for ALMS1 (NM_015120.2,1521-1539).
ggctcctaaacatttaaaa

SEQ ID NO: 348249 - DNA, 19 bp, Homo sapiens
  siRNA target sequence for ALMS1 (NM_015120.2,1553-1571).
ctaaaggaggcatagctaa

SEQ ID NO: 348250 - DNA, 19 bp, Homo sapiens
  siRNA target sequence for ALMS1 (NM_015120.2,1558-1576).
ggaggcatagctaaagtta

SEQ ID NO: 348251 - DNA, 19 bp, Homo sapiens
  siRNA target sequence for ALMS1 (NM_015120.2,1562-1580).
gcatagctaaagttactca

SEQ ID NO: 348252 - DNA, 19 bp, Homo sapiens
  siRNA target sequence for ALMS1 (NM_015120.2,1568-1586).
ctaaagttactcaatccaa

SEQ ID NO: 348253 - DNA, 19 bp, Homo sapiens
  siRNA target sequence for ALMS1 (NM_015120.2,1573-1591).
gttactcaatccaacttga

SEQ ID NO: 348254 - DNA, 19 bp, Homo sapiens
  siRNA target sequence for ALMS1 (NM_015120.2,1671-1689).
ggctgtaagttctctagaa

SEQ ID NO: 348255 - DNA, 19 bp, Homo sapiens
  siRNA target sequence for ALMS1 (NM_015120.2,1675-1693).
gtaagttctctagaaacta

SEQ ID NO: 348256 - DNA, 19 bp, Homo sapiens
  siRNA target sequence for ALMS1 (NM_015120.2,1700-1718).
gtcaacacactgatactct

SEQ ID NO: 348257 - DNA, 19 bp, Homo sapiens
  siRNA target sequence for ALMS1 (NM_015120.2,1709-1727).
ctgatactctcaaccaaaa

SEQ ID NO: 348258 - DNA, 19 bp, Homo sapiens
  siRNA target sequence for ALMS1 (NM_015120.2,1711-1729).
gatactctcaaccaaaaga

SEQ ID NO: 348259 - DNA, 19 bp, Homo sapiens
  siRNA target sequence for ALMS1 (NM_015120.2,2013-2031).
gttaccagagagtaactta

SEQ ID NO: 348260 - DNA, 19 bp, Homo sapiens
  siRNA target sequence for ALMS1 (NM_015120.2,2077-2095).
cagaagacgggaataccta

SEQ ID NO: 348261 - DNA, 19 bp, Homo sapiens
  siRNA target sequence for ALMS1 (NM_015120.2,2082-2100).
gacgggaatacctacagta

SEQ ID NO: 348262 - DNA, 19 bp, Homo sapiens
  siRNA target sequence for ALMS1 (NM_015120.2,2108-2126).
catcccactcacatgtaga

SEQ ID NO: 348263 - DNA, 19 bp, Homo sapiens
  siRNA target sequence for ALMS1 (NM_015120.2,2176-2194).
gatcaggctctgaaagtct

SEQ ID NO: 348264 - DNA, 19 bp, Homo sapiens
  siRNA target sequence for ALMS1 (NM_015120.2,2295-2313).
gttcgcagacagtcatcaa

SEQ ID NO: 348265 - DNA, 19 bp, Homo sapiens
  siRNA target sequence for ALMS1 (NM_015120.2,2320-2338).
gagactcttactaaagttt

SEQ ID NO: 348266 - DNA, 19 bp, Homo sapiens
  siRNA target sequence for ALMS1 (NM_015120.2,2508-2526).
gactggcctaccaacagta

SEQ ID NO: 348267 - DNA, 19 bp, Homo sapiens
  siRNA target sequence for ALMS1 (NM_015120.2,2727-2745).
gaccttacccaatagtcat

SEQ ID NO: 348268 - DNA, 19 bp, Homo sapiens
  siRNA target sequence for ALMS1 (NM_015120.2,2730-2748).
cttacccaatagtcatcta

SEQ ID NO: 348269 - DNA, 19 bp, Homo sapiens
  siRNA target sequence for ALMS1 (NM_015120.2,2815-2833).
gcaccatctagtttctact

SEQ ID NO: 348270 - DNA, 19 bp, Homo sapiens
  siRNA target sequence for ALMS1 (NM_015120.2,2950-2968).
ccaacagtgtcctctaatt

SEQ ID NO: 348271 - DNA, 19 bp, Homo sapiens
  siRNA target sequence for ALMS1 (NM_015120.2,2973-2991).
ctcacatagcgagaaatct

SEQ ID NO: 348272 - DNA, 19 bp, Homo sapiens
  siRNA target sequence for ALMS1 (NM_015120.2,2981-2999).
gcgagaaatctagtgtttt

SEQ ID NO: 348273 - DNA, 19 bp, Homo sapiens
  siRNA target sequence for ALMS1 (NM_015120.2,2983-3001).
gagaaatctagtgttttct

SEQ ID NO: 348274 - DNA, 19 bp, Homo sapiens
  siRNA target sequence for ALMS1 (NM_015120.2,3021-3039).
cagtgatctacctagagaa

SEQ ID NO: 348275 - DNA, 19 bp, Homo sapiens
  siRNA target sequence for ALMS1 (NM_015120.2,3163-3181).
gatagttatgcaactgaaa

SEQ ID NO: 348276 - DNA, 19 bp, Homo sapiens
  siRNA target sequence for ALMS1 (NM_015120.2,3264-3282).
gagggagaagcctagtgtt

SEQ ID NO: 348277 - DNA, 19 bp, Homo sapiens
  siRNA target sequence for ALMS1 (NM_015120.2,3285-3303).
gtacccacaggtgttatca

SEQ ID NO: 348278 - DNA, 19 bp, Homo sapiens
  siRNA target sequence for ALMS1 (NM_015120.2,3377-3395).
cagcagtaccgtctacttt

SEQ ID NO: 348279 - DNA, 19 bp, Homo sapiens
  siRNA target sequence for ALMS1 (NM_015120.2,3379-3397).
gcagtaccgtctactttct

SEQ ID NO: 348280 - DNA, 19 bp, Homo sapiens
  siRNA target sequence for ALMS1 (NM_015120.2,3380-3398).
cagtaccgtctactttcta

SEQ ID NO: 348281 - DNA, 19 bp, Homo sapiens
  siRNA target sequence for ALMS1 (NM_015120.2,3580-3598).
gccttgccaggtactcata

SEQ ID NO: 348282 - DNA, 19 bp, Homo sapiens
  siRNA target sequence for ALMS1 (NM_015120.2,4690-4708).
gcaaagtctggcagtttct

SEQ ID NO: 348283 - DNA, 19 bp, Homo sapiens
  siRNA target sequence for ALMS1 (NM_015120.2,4707-4725).
ctaccaactggcattgcta

SEQ ID NO: 348284 - DNA, 19 bp, Homo sapiens
  siRNA target sequence for ALMS1 (NM_015120.2,4716-4734).
ggcattgctaggtagtcaa

SEQ ID NO: 348285 - DNA, 19 bp, Homo sapiens
  siRNA target sequence for ALMS1 (NM_015120.2,4717-4735).
gcattgctaggtagtcaaa

SEQ ID NO: 348286 - DNA, 19 bp, Homo sapiens
  siRNA target sequence for ALMS1 (NM_015120.2,4718-4736).
cattgctaggtagtcaaat

SEQ ID NO: 348287 - DNA, 19 bp, Homo sapiens
  siRNA target sequence for ALMS1 (NM_015120.2,4893-4911).
gaaagtttccattgtttct

SEQ ID NO: 348288 - DNA, 19 bp, Homo sapiens
  siRNA target sequence for ALMS1 (NM_015120.2,4906-4924).
gtttctggacctactgaaa

SEQ ID NO: 348289 - DNA, 19 bp, Homo sapiens
  siRNA target sequence for ALMS1 (NM_015120.2,4935-4953).
cataccagcaggaccttta

SEQ ID NO: 348290 - DNA, 19 bp, Homo sapiens
  siRNA target sequence for ALMS1 (NM_015120.2,4939-4957).
ccagcaggacctttaggtt

SEQ ID NO: 348291 - DNA, 19 bp, Homo sapiens
  siRNA target sequence for ALMS1 (NM_015120.2,5004-5022).
gctagacagtcctctaaat

SEQ ID NO: 348292 - DNA, 19 bp, Homo sapiens
  siRNA target sequence for ALMS1 (NM_015120.2,5005-5023).
ctagacagtcctctaaata

SEQ ID NO: 348293 - DNA, 19 bp, Homo sapiens
  siRNA target sequence for ALMS1 (NM_015120.2,5067-5085).
gaagactgagacattacca

SEQ ID NO: 348294 - DNA, 19 bp, Homo sapiens
  siRNA target sequence for ALMS1 (NM_015120.2,5113-5131).
gggaagcctgtcattttct

SEQ ID NO: 348295 - DNA, 19 bp, Homo sapiens
  siRNA target sequence for ALMS1 (NM_015120.2,5221-5239).
ccatcagtatcctctagtt

SEQ ID NO: 348296 - DNA, 19 bp, Homo sapiens
  siRNA target sequence for ALMS1 (NM_015120.2,5225-5243).
cagtatcctctagtttata

SEQ ID NO: 348297 - DNA, 19 bp, Homo sapiens
  siRNA target sequence for ALMS1 (NM_015120.2,5231-5249).
cctctagtttatactcata

SEQ ID NO: 348298 - DNA, 19 bp, Homo sapiens
  siRNA target sequence for ALMS1 (NM_015120.2,5288-5306).
cagacagtgagctaactca

SEQ ID NO: 348299 - DNA, 19 bp, Homo sapiens
  siRNA target sequence for ALMS1 (NM_015120.2,5292-5310).
cagtgagctaactcaagaa

SEQ ID NO: 348300 - DNA, 19 bp, Homo sapiens
  siRNA target sequence for ALMS1 (NM_015120.2,5352-5370).
gactgggttatctactgta

SEQ ID NO: 348301 - DNA, 19 bp, Homo sapiens
  siRNA target sequence for ALMS1 (NM_015120.2,5356-5374).
gggttatctactgtaactt

SEQ ID NO: 348302 - DNA, 19 bp, Homo sapiens
  siRNA target sequence for ALMS1 (NM_015120.2,5559-5577).
gcgagagttgccgcatttt

SEQ ID NO: 348303 - DNA, 19 bp, Homo sapiens
  siRNA target sequence for ALMS1 (NM_015120.2,5560-5578).
cgagagttgccgcatttta

SEQ ID NO: 348304 - DNA, 19 bp, Homo sapiens
  siRNA target sequence for ALMS1 (NM_015120.2,5565-5583).
gttgccgcattttactgaa

SEQ ID NO: 348305 - DNA, 19 bp, Homo sapiens
  siRNA target sequence for ALMS1 (NM_015120.2,5667-5685).
gagagagcactctgtcatt

SEQ ID NO: 348306 - DNA, 19 bp, Homo sapiens
  siRNA target sequence for ALMS1 (NM_015120.2,5671-5689).
gagcactctgtcatttctt

SEQ ID NO: 348307 - DNA, 19 bp, Homo sapiens
  siRNA target sequence for ALMS1 (NM_015120.2,5704-5722).
ccagatcttactgaagtaa

SEQ ID NO: 348308 - DNA, 19 bp, Homo sapiens
  siRNA target sequence for ALMS1 (NM_015120.2,5808-5826).
gaaggccagtatttttcat

SEQ ID NO: 348309 - DNA, 19 bp, Homo sapiens
  siRNA target sequence for ALMS1 (NM_015120.2,5904-5922).
gataccaacagtaccttta

SEQ ID NO: 348310 - DNA, 19 bp, Homo sapiens
  siRNA target sequence for ALMS1 (NM_015120.2,5909-5927).
caacagtacctttaagtta

SEQ ID NO: 348311 - DNA, 19 bp, Homo sapiens
  siRNA target sequence for ALMS1 (NM_015120.2,5943-5961).
gaagcccagtgttatctct

SEQ ID NO: 348312 - DNA, 19 bp, Homo sapiens
  siRNA target sequence for ALMS1 (NM_015120.2,6049-6067).
ccaataggactgtctagtt

SEQ ID NO: 348313 - DNA, 19 bp, Homo sapiens
  siRNA target sequence for ALMS1 (NM_015120.2,6068-6086).
cctactcacattcacataa

SEQ ID NO: 348314 - DNA, 19 bp, Homo sapiens
  siRNA target sequence for ALMS1 (NM_015120.2,6099-6117).
gatttcaactgtgcatata

SEQ ID NO: 348315 - DNA, 19 bp, Homo sapiens
  siRNA target sequence for ALMS1 (NM_015120.2,6142-6160).
ccagcagctacccttagtt

SEQ ID NO: 348316 - DNA, 19 bp, Homo sapiens
  siRNA target sequence for ALMS1 (NM_015120.2,6154-6172).
cttagttcctactcacaaa

SEQ ID NO: 348317 - DNA, 19 bp, Homo sapiens
  siRNA target sequence for ALMS1 (NM_015120.2,6229-6247).
cagacagcttttcatagtt

SEQ ID NO: 348318 - DNA, 19 bp, Homo sapiens
  siRNA target sequence for ALMS1 (NM_015120.2,6235-6253).
gcttttcatagttcctatt

SEQ ID NO: 348319 - DNA, 19 bp, Homo sapiens
  siRNA target sequence for ALMS1 (NM_015120.2,6241-6259).
catagttcctattctcaaa

SEQ ID NO: 348320 - DNA, 19 bp, Homo sapiens
  siRNA target sequence for ALMS1 (NM_015120.2,6262-6280).
gtaaagcccaatattttat

SEQ ID NO: 348321 - DNA, 19 bp, Homo sapiens
  siRNA target sequence for ALMS1 (NM_015120.2,6288-6306).
gcagttgccagatagagat

SEQ ID NO: 348322 - DNA, 19 bp, Homo sapiens
  siRNA target sequence for ALMS1 (NM_015120.2,6291-6309).
gttgccagatagagatcaa

SEQ ID NO: 348323 - DNA, 19 bp, Homo sapiens
  siRNA target sequence for ALMS1 (NM_015120.2,6296-6314).
cagatagagatcaaagtaa

SEQ ID NO: 348324 - DNA, 19 bp, Homo sapiens
  siRNA target sequence for ALMS1 (NM_015120.2,6307-6325).
caaagtaaaggtattctaa

SEQ ID NO: 348325 - DNA, 19 bp, Homo sapiens
  siRNA target sequence for ALMS1 (NM_015120.2,6343-6361).
gaactaactgatgtgaata

SEQ ID NO: 348326 - DNA, 19 bp, Homo sapiens
  siRNA target sequence for ALMS1 (NM_015120.2,6429-6447).
ggaattgccaggtagtcat

SEQ ID NO: 348327 - DNA, 19 bp, Homo sapiens
  siRNA target sequence for ALMS1 (NM_015120.2,6454-6472).
gaagatgtgctgaaggttt

SEQ ID NO: 348328 - DNA, 19 bp, Homo sapiens
  siRNA target sequence for ALMS1 (NM_015120.2,6460-6478).
gtgctgaaggtttcaacaa

SEQ ID NO: 348329 - DNA, 19 bp, Homo sapiens
  siRNA target sequence for ALMS1 (NM_015120.2,6531-6549).
cttttcacatcgagagaaa

SEQ ID NO: 348330 - DNA, 19 bp, Homo sapiens
  siRNA target sequence for ALMS1 (NM_015120.2,6658-6676).
gttccctctggtacttact

SEQ ID NO: 348331 - DNA, 19 bp, Homo sapiens
  siRNA target sequence for ALMS1 (NM_015120.2,6721-6739).
ctaatagataatttgaatt

SEQ ID NO: 348332 - DNA, 19 bp, Homo sapiens
  siRNA target sequence for ALMS1 (NM_015120.2,6752-6770).
gtgttagctcaaataatgt

SEQ ID NO: 348333 - DNA, 19 bp, Homo sapiens
  siRNA target sequence for ALMS1 (NM_015120.2,6787-6805).
gctgatgacagagttgtaa

SEQ ID NO: 348334 - DNA, 19 bp, Homo sapiens
  siRNA target sequence for ALMS1 (NM_015120.2,6788-6806).
ctgatgacagagttgtaat

SEQ ID NO: 348335 - DNA, 19 bp, Homo sapiens
  siRNA target sequence for ALMS1 (NM_015120.2,6889-6907).
gaaattcggacacttttga

SEQ ID NO: 348336 - DNA, 19 bp, Homo sapiens
  siRNA target sequence for ALMS1 (NM_015120.2,6924-6942).
ggcactgaaacgatgcaat

SEQ ID NO: 348337 - DNA, 19 bp, Homo sapiens
  siRNA target sequence for ALMS1 (NM_015120.2,6925-6943).
gcactgaaacgatgcaatt

SEQ ID NO: 348338 - DNA, 19 bp, Homo sapiens
  siRNA target sequence for ALMS1 (NM_015120.2,6926-6944).
cactgaaacgatgcaattt

SEQ ID NO: 348339 - DNA, 19 bp, Homo sapiens
  siRNA target sequence for ALMS1 (NM_015120.2,6958-6976).
gcccgtttcagagatatta

SEQ ID NO: 348340 - DNA, 19 bp, Homo sapiens
  siRNA target sequence for ALMS1 (NM_015120.2,6960-6978).
ccgtttcagagatattagt

SEQ ID NO: 348341 - DNA, 19 bp, Homo sapiens
  siRNA target sequence for ALMS1 (NM_015120.2,6962-6980).
gtttcagagatattagtga

SEQ ID NO: 348342 - DNA, 19 bp, Homo sapiens
  siRNA target sequence for ALMS1 (NM_015120.2,7026-7044).
ctcttccacgggtgtatct

SEQ ID NO: 348343 - DNA, 19 bp, Homo sapiens
  siRNA target sequence for ALMS1 (NM_015120.2,7028-7046).
cttccacgggtgtatctaa

SEQ ID NO: 348344 - DNA, 19 bp, Homo sapiens
  siRNA target sequence for ALMS1 (NM_015120.2,7032-7050).
cacgggtgtatctaatggt

SEQ ID NO: 348345 - DNA, 19 bp, Homo sapiens
  siRNA target sequence for ALMS1 (NM_015120.2,7037-7055).
gtgtatctaatggtgattt

SEQ ID NO: 348346 - DNA, 19 bp, Homo sapiens
  siRNA target sequence for ALMS1 (NM_015120.2,7117-7135).
ggcacacagacgaatttga

SEQ ID NO: 348347 - DNA, 19 bp, Homo sapiens
  siRNA target sequence for ALMS1 (NM_015120.2,7140-7158).
ccggagaggcattgaaaat

SEQ ID NO: 348348 - DNA, 19 bp, Homo sapiens
  siRNA target sequence for ALMS1 (NM_015120.2,7141-7159).
cggagaggcattgaaaatt

SEQ ID NO: 348349 - DNA, 19 bp, Homo sapiens
  siRNA target sequence for ALMS1 (NM_015120.2,7161-7179).
ggagtttattagttcaact

SEQ ID NO: 348350 - DNA, 19 bp, Homo sapiens
  siRNA target sequence for ALMS1 (NM_015120.2,7205-7223).
cagagagcaaagtcagtat

SEQ ID NO: 348351 - DNA, 19 bp, Homo sapiens
  siRNA target sequence for ALMS1 (NM_015120.2,7225-7243).
gcattagaagaaactctta

SEQ ID NO: 348352 - DNA, 19 bp, Homo sapiens
  siRNA target sequence for ALMS1 (NM_015120.2,7301-7319).
ccattgggaataaaattat

SEQ ID NO: 348353 - DNA, 19 bp, Homo sapiens
  siRNA target sequence for ALMS1 (NM_015120.2,7323-7341).
ccctatgatgactgtcata

SEQ ID NO: 348354 - DNA, 19 bp, Homo sapiens
  siRNA target sequence for ALMS1 (NM_015120.2,7324-7342).
cctatgatgactgtcataa

SEQ ID NO: 348355 - DNA, 19 bp, Homo sapiens
  siRNA target sequence for ALMS1 (NM_015120.2,7325-7343).
ctatgatgactgtcataaa

SEQ ID NO: 348356 - DNA, 19 bp, Homo sapiens
  siRNA target sequence for ALMS1 (NM_015120.2,7332-7350).
gactgtcataaaaagtgat

SEQ ID NO: 348357 - DNA, 19 bp, Homo sapiens
  siRNA target sequence for ALMS1 (NM_015120.2,7383-7401).
ctgctcgtgggacagtaat

SEQ ID NO: 348358 - DNA, 19 bp, Homo sapiens
  siRNA target sequence for ALMS1 (NM_015120.2,7385-7403).
gctcgtgggacagtaattt

SEQ ID NO: 348359 - DNA, 19 bp, Homo sapiens
  siRNA target sequence for ALMS1 (NM_015120.2,7386-7404).
ctcgtgggacagtaattta

SEQ ID NO: 348360 - DNA, 19 bp, Homo sapiens
  siRNA target sequence for ALMS1 (NM_015120.2,7389-7407).
gtgggacagtaatttacca

SEQ ID NO: 348361 - DNA, 19 bp, Homo sapiens
  siRNA target sequence for ALMS1 (NM_015120.2,7423-7441).
gtttctgatgttcttctaa

SEQ ID NO: 348362 - DNA, 19 bp, Homo sapiens
  siRNA target sequence for ALMS1 (NM_015120.2,7463-7481).
ccaagacaagtataacaga

SEQ ID NO: 348363 - DNA, 19 bp, Homo sapiens
  siRNA target sequence for ALMS1 (NM_015120.2,7464-7482).
caagacaagtataacagat

SEQ ID NO: 348364 - DNA, 19 bp, Homo sapiens
  siRNA target sequence for ALMS1 (NM_015120.2,7522-7540).
ggtggtagcagtgtagatt

SEQ ID NO: 348365 - DNA, 19 bp, Homo sapiens
  siRNA target sequence for ALMS1 (NM_015120.2,7526-7544).
gtagcagtgtagattcact

SEQ ID NO: 348366 - DNA, 19 bp, Homo sapiens
  siRNA target sequence for ALMS1 (NM_015120.2,7541-7559).
cactggctgcacatgtgaa

SEQ ID NO: 348367 - DNA, 19 bp, Homo sapiens
  siRNA target sequence for ALMS1 (NM_015120.2,7580-7598).
cctcactgaatcatgctaa

SEQ ID NO: 348368 - DNA, 19 bp, Homo sapiens
  siRNA target sequence for ALMS1 (NM_015120.2,7639-7657).
cgagcacatgcctggaata

SEQ ID NO: 348369 - DNA, 19 bp, Homo sapiens
  siRNA target sequence for ALMS1 (NM_015120.2,7640-7658).
gagcacatgcctggaatat

SEQ ID NO: 348370 - DNA, 19 bp, Homo sapiens
  siRNA target sequence for ALMS1 (NM_015120.2,7649-7667).
cctggaatatgaagttcaa

SEQ ID NO: 348371 - DNA, 19 bp, Homo sapiens
  siRNA target sequence for ALMS1 (NM_015120.2,7662-7680).
gttcaatttagcacatgat

SEQ ID NO: 348372 - DNA, 19 bp, Homo sapiens
  siRNA target sequence for ALMS1 (NM_015120.2,7684-7702).
ggatactccatttcagaat

SEQ ID NO: 348373 - DNA, 19 bp, Homo sapiens
  siRNA target sequence for ALMS1 (NM_015120.2,7861-7879).
ggatgtttccggactctaa

SEQ ID NO: 348374 - DNA, 19 bp, Homo sapiens
  siRNA target sequence for ALMS1 (NM_015120.2,7869-7887).
ccggactctaacttctgaa

SEQ ID NO: 348375 - DNA, 19 bp, Homo sapiens
  siRNA target sequence for ALMS1 (NM_015120.2,7885-7903).
gaacatccacaactagata

SEQ ID NO: 348376 - DNA, 19 bp, Homo sapiens
  siRNA target sequence for ALMS1 (NM_015120.2,7906-7924).
cacccttgtgctttcagat

SEQ ID NO: 348377 - DNA, 19 bp, Homo sapiens
  siRNA target sequence for ALMS1 (NM_015120.2,7927-7945).
gctggaccctcagaaatga

SEQ ID NO: 348378 - DNA, 19 bp, Homo sapiens
  siRNA target sequence for ALMS1 (NM_015120.2,7973-7991).
gcagagccaagcatgtcaa

SEQ ID NO: 348379 - DNA, 19 bp, Homo sapiens
  siRNA target sequence for ALMS1 (NM_015120.2,7978-7996).
gccaagcatgtcaaccttt

SEQ ID NO: 348380 - DNA, 19 bp, Homo sapiens
  siRNA target sequence for ALMS1 (NM_015120.2,8011-8029).
cagaacaactcccatttca

SEQ ID NO: 348381 - DNA, 19 bp, Homo sapiens
  siRNA target sequence for ALMS1 (NM_015120.2,8013-8031).
gaacaactcccatttcaaa

SEQ ID NO: 348382 - DNA, 19 bp, Homo sapiens
  siRNA target sequence for ALMS1 (NM_015120.2,8036-8054).
ggaattccttgcagttaaa

SEQ ID NO: 348383 - DNA, 19 bp, Homo sapiens
  siRNA target sequence for ALMS1 (NM_015120.2,8063-8081).
ccccatttcagaactttat

SEQ ID NO: 348384 - DNA, 19 bp, Homo sapiens
  siRNA target sequence for ALMS1 (NM_015120.2,8064-8082).
cccatttcagaactttata

SEQ ID NO: 348385 - DNA, 19 bp, Homo sapiens
  siRNA target sequence for ALMS1 (NM_015120.2,8113-8131).
cgaatgccattcgatgaaa

SEQ ID NO: 348386 - DNA, 19 bp, Homo sapiens
  siRNA target sequence for ALMS1 (NM_015120.2,8114-8132).
gaatgccattcgatgaaaa

SEQ ID NO: 348387 - DNA, 19 bp, Homo sapiens
  siRNA target sequence for ALMS1 (NM_015120.2,8144-8162).
ggctgtcagaattagtaga

SEQ ID NO: 348388 - DNA, 19 bp, Homo sapiens
  siRNA target sequence for ALMS1 (NM_015120.2,8145-8163).
gctgtcagaattagtagaa

SEQ ID NO: 348389 - DNA, 19 bp, Homo sapiens
  siRNA target sequence for ALMS1 (NM_015120.2,8219-8237).
ccccagaacccatgaaaaa

SEQ ID NO: 348390 - DNA, 19 bp, Homo sapiens
  siRNA target sequence for ALMS1 (NM_015120.2,8266-8284).
caccgacattctaaatgca

SEQ ID NO: 348391 - DNA, 19 bp, Homo sapiens
  siRNA target sequence for ALMS1 (NM_015120.2,8288-8306).
ccaattcctctgttgttaa

SEQ ID NO: 348392 - DNA, 19 bp, Homo sapiens
  siRNA target sequence for ALMS1 (NM_015120.2,8349-8367).
gggggtatttaattctcat

SEQ ID NO: 348393 - DNA, 19 bp, Homo sapiens
  siRNA target sequence for ALMS1 (NM_015120.2,8350-8368).
ggggtatttaattctcatt

SEQ ID NO: 348394 - DNA, 19 bp, Homo sapiens
  siRNA target sequence for ALMS1 (NM_015120.2,8436-8454).
gcatagtaattcacaagat

SEQ ID NO: 348395 - DNA, 19 bp, Homo sapiens
  siRNA target sequence for ALMS1 (NM_015120.2,8437-8455).
catagtaattcacaagata

SEQ ID NO: 348396 - DNA, 19 bp, Homo sapiens
  siRNA target sequence for ALMS1 (NM_015120.2,8493-8511).
ccaaaaattacctgttgat

SEQ ID NO: 348397 - DNA, 19 bp, Homo sapiens
  siRNA target sequence for ALMS1 (NM_015120.2,8517-8535).
gcgttcttttcaagaagaa

SEQ ID NO: 348398 - DNA, 19 bp, Homo sapiens
  siRNA target sequence for ALMS1 (NM_015120.2,8554-8572).
gattttacaggcagtcatt

SEQ ID NO: 348399 - DNA, 19 bp, Homo sapiens
  siRNA target sequence for ALMS1 (NM_015120.2,8580-8598).
cagtaccagggcaaattgt

SEQ ID NO: 348400 - DNA, 19 bp, Homo sapiens
  siRNA target sequence for ALMS1 (NM_015120.2,8611-8629).
gaaattcagatttctgata

SEQ ID NO: 348401 - DNA, 19 bp, Homo sapiens
  siRNA target sequence for ALMS1 (NM_015120.2,8626-8644).
gataaccatacccttatta

SEQ ID NO: 348402 - DNA, 19 bp, Homo sapiens
  siRNA target sequence for ALMS1 (NM_015120.2,8664-8682).
caccctaggagtaaacaga

SEQ ID NO: 348403 - DNA, 19 bp, Homo sapiens
  siRNA target sequence for ALMS1 (NM_015120.2,8690-8708).
ccagactaggagtaaaaga

SEQ ID NO: 348404 - DNA, 19 bp, Homo sapiens
  siRNA target sequence for ALMS1 (NM_015120.2,8709-8727).
gaagaatgtaactataact

SEQ ID NO: 348405 - DNA, 19 bp, Homo sapiens
  siRNA target sequence for ALMS1 (NM_015120.2,8828-8846).
ctcctcaacatcaggatta

SEQ ID NO: 348406 - DNA, 19 bp, Homo sapiens
  siRNA target sequence for ALMS1 (NM_015120.2,8904-8922).
gtgcaaagccccatatgta

SEQ ID NO: 348407 - DNA, 19 bp, Homo sapiens
  siRNA target sequence for ALMS1 (NM_015120.2,8912-8930).
ccccatatgtagatcatca

SEQ ID NO: 348408 - DNA, 19 bp, Homo sapiens
  siRNA target sequence for ALMS1 (NM_015120.2,8913-8931).
cccatatgtagatcatcaa

SEQ ID NO: 348409 - DNA, 19 bp, Homo sapiens
  siRNA target sequence for ALMS1 (NM_015120.2,8914-8932).
ccatatgtagatcatcaaa

SEQ ID NO: 348410 - DNA, 19 bp, Homo sapiens
  siRNA target sequence for ALMS1 (NM_015120.2,8962-8980).
ggtcaggattctatagctt

SEQ ID NO: 348411 - DNA, 19 bp, Homo sapiens
  siRNA target sequence for ALMS1 (NM_015120.2,9021-9039).
caaagcgccaggtgtagat

SEQ ID NO: 348412 - DNA, 19 bp, Homo sapiens
  siRNA target sequence for ALMS1 (NM_015120.2,9029-9047).
caggtgtagatgaccaaat

SEQ ID NO: 348413 - DNA, 19 bp, Homo sapiens
  siRNA target sequence for ALMS1 (NM_015120.2,9172-9190).
cagtcagccccaaatcact

SEQ ID NO: 348414 - DNA, 19 bp, Homo sapiens
  siRNA target sequence for ALMS1 (NM_015120.2,9215-9233).
ctcctccttcaaatagaaa

SEQ ID NO: 348415 - DNA, 19 bp, Homo sapiens
  siRNA target sequence for ALMS1 (NM_015120.2,9235-9253).
gcactttcttgtgttcata

SEQ ID NO: 348416 - DNA, 19 bp, Homo sapiens
  siRNA target sequence for ALMS1 (NM_015120.2,9238-9256).
ctttcttgtgttcatataa

SEQ ID NO: 348417 - DNA, 19 bp, Homo sapiens
  siRNA target sequence for ALMS1 (NM_015120.2,9285-9303).
ggatagtggaactttagat

SEQ ID NO: 348418 - DNA, 19 bp, Homo sapiens
  siRNA target sequence for ALMS1 (NM_015120.2,9339-9357).
gaggatgaatagtgagttt

SEQ ID NO: 348419 - DNA, 19 bp, Homo sapiens
  siRNA target sequence for ALMS1 (NM_015120.2,9393-9411).
ggaaccaacctccaaatta

SEQ ID NO: 348420 - DNA, 19 bp, Homo sapiens
  siRNA target sequence for ALMS1 (NM_015120.2,9427-9445).
gtagcacaggatcaagaat

SEQ ID NO: 348421 - DNA, 19 bp, Homo sapiens
  siRNA target sequence for ALMS1 (NM_015120.2,9451-9469).
ggttttctaggacctaaat

SEQ ID NO: 348422 - DNA, 19 bp, Homo sapiens
  siRNA target sequence for ALMS1 (NM_015120.2,9518-9536).
ctattactcaggacttgaa

SEQ ID NO: 348423 - DNA, 19 bp, Homo sapiens
  siRNA target sequence for ALMS1 (NM_015120.2,9550-9568).
cagaatagccagatagtaa

SEQ ID NO: 348424 - DNA, 19 bp, Homo sapiens
  siRNA target sequence for ALMS1 (NM_015120.2,9821-9839).
gcaaagctcctgtcaagtt

SEQ ID NO: 348425 - DNA, 19 bp, Homo sapiens
  siRNA target sequence for ALMS1 (NM_015120.2,9854-9872).
cagtccaacaggttacttt

SEQ ID NO: 348426 - DNA, 19 bp, Homo sapiens
  siRNA target sequence for ALMS1 (NM_015120.2,9922-9940).
ggtagtaccaagatgtatt

SEQ ID NO: 348427 - DNA, 19 bp, Homo sapiens
  siRNA target sequence for ALMS1 (NM_015120.2,9926-9944).
gtaccaagatgtattatgt

SEQ ID NO: 348428 - DNA, 19 bp, Homo sapiens
  siRNA target sequence for ALMS1 (NM_015120.2,10053-10071).
ggtgctaggcacaagagat

SEQ ID NO: 348429 - DNA, 19 bp, Homo sapiens
  siRNA target sequence for ALMS1 (NM_015120.2,10056-10074).
gctaggcacaagagatgat

SEQ ID NO: 348430 - DNA, 19 bp, Homo sapiens
  siRNA target sequence for ALMS1 (NM_015120.2,10075-10093).
gacctctcagccactgtta

SEQ ID NO: 348431 - DNA, 19 bp, Homo sapiens
  siRNA target sequence for ALMS1 (NM_015120.2,10082-10100).
cagccactgttaacattaa

SEQ ID NO: 348432 - DNA, 19 bp, Homo sapiens
  siRNA target sequence for ALMS1 (NM_015120.2,10121-10139).
gtaagagggtagtgactaa

SEQ ID NO: 348433 - DNA, 19 bp, Homo sapiens
  siRNA target sequence for ALMS1 (NM_015120.2,10190-10208).
cctcagttcaagtgctaat

SEQ ID NO: 348434 - DNA, 19 bp, Homo sapiens
  siRNA target sequence for ALMS1 (NM_015120.2,10219-10237).
gagaacctctcagacaaaa

SEQ ID NO: 348435 - DNA, 19 bp, Homo sapiens
  siRNA target sequence for ALMS1 (NM_015120.2,10417-10435).
gagatccataggaagaaga

SEQ ID NO: 348436 - DNA, 19 bp, Homo sapiens
  siRNA target sequence for ALMS1 (NM_015120.2,10446-10464).
ggaagcctggccaaacaat

SEQ ID NO: 348437 - DNA, 19 bp, Homo sapiens
  siRNA target sequence for ALMS1 (NM_015120.2,10447-10465).
gaagcctggccaaacaata

SEQ ID NO: 348438 - DNA, 19 bp, Homo sapiens
  siRNA target sequence for ALMS1 (NM_015120.2,10468-10486).
gaatccctacagatcaata

SEQ ID NO: 348439 - DNA, 19 bp, Homo sapiens
  siRNA target sequence for ALMS1 (NM_015120.2,10472-10490).
ccctacagatcaatattga

SEQ ID NO: 348440 - DNA, 19 bp, Homo sapiens
  siRNA target sequence for ALMS1 (NM_015120.2,10489-10507).
gaagagtccgaatgtcatt

SEQ ID NO: 348441 - DNA, 19 bp, Homo sapiens
  siRNA target sequence for ALMS1 (NM_015120.2,10494-10512).
gtccgaatgtcattcagaa

SEQ ID NO: 348442 - DNA, 19 bp, Homo sapiens
  siRNA target sequence for ALMS1 (NM_015120.2,10496-10514).
ccgaatgtcattcagaatt

SEQ ID NO: 348443 - DNA, 19 bp, Homo sapiens
  siRNA target sequence for ALMS1 (NM_015120.2,10497-10515).
cgaatgtcattcagaattt

SEQ ID NO: 348444 - DNA, 19 bp, Homo sapiens
  siRNA target sequence for ALMS1 (NM_015120.2,10541-10559).
ggtcagcaaagttttacat

SEQ ID NO: 348445 - DNA, 19 bp, Homo sapiens
  siRNA target sequence for ALMS1 (NM_015120.2,10542-10560).
gtcagcaaagttttacatt

SEQ ID NO: 348446 - DNA, 19 bp, Homo sapiens
  siRNA target sequence for ALMS1 (NM_015120.2,10576-10594).
ctaccaagtgatcaagata

SEQ ID NO: 348447 - DNA, 19 bp, Homo sapiens
  siRNA target sequence for ALMS1 (NM_015120.2,10579-10597).
ccaagtgatcaagatattt

SEQ ID NO: 348448 - DNA, 19 bp, Homo sapiens
  siRNA target sequence for ALMS1 (NM_015120.2,10591-10609).
gatatttgccatgaatctt

SEQ ID NO: 348449 - DNA, 19 bp, Homo sapiens
  siRNA target sequence for ALMS1 (NM_015120.2,10612-10630).
ggaaagagtgttttcatga

SEQ ID NO: 348450 - DNA, 19 bp, Homo sapiens
  siRNA target sequence for ALMS1 (NM_015120.2,10629-10647).
gagacattcttggaaagat

SEQ ID NO: 348451 - DNA, 19 bp, Homo sapiens
  siRNA target sequence for ALMS1 (NM_015120.2,10656-10674).
gcatcatccagacaaacat

SEQ ID NO: 348452 - DNA, 19 bp, Homo sapiens
  siRNA target sequence for ALMS1 (NM_015120.2,10693-10711).
cctcttccttatcaaaaca

SEQ ID NO: 348453 - DNA, 19 bp, Homo sapiens
  siRNA target sequence for ALMS1 (NM_015120.2,10710-10728).
catggacaagactaagaca

SEQ ID NO: 348454 - DNA, 19 bp, Homo sapiens
  siRNA target sequence for ALMS1 (NM_015120.2,10716-10734).
caagactaagacagattat

SEQ ID NO: 348455 - DNA, 19 bp, Homo sapiens
  siRNA target sequence for ALMS1 (NM_015120.2,10780-10798).
gaagtgatggatactacta

SEQ ID NO: 348456 - DNA, 19 bp, Homo sapiens
  siRNA target sequence for ALMS1 (NM_015120.2,10783-10801).
gtgatggatactactaaaa

SEQ ID NO: 348457 - DNA, 19 bp, Homo sapiens
  siRNA target sequence for ALMS1 (NM_015120.2,10785-10803).
gatggatactactaaaagt

SEQ ID NO: 348458 - DNA, 19 bp, Homo sapiens
  siRNA target sequence for ALMS1 (NM_015120.2,10796-10814).
ctaaaagtcaagttagaga

SEQ ID NO: 348459 - DNA, 19 bp, Homo sapiens
  siRNA target sequence for ALMS1 (NM_015120.2,10804-10822).
caagttagagattatccaa

SEQ ID NO: 348460 - DNA, 19 bp, Homo sapiens
  siRNA target sequence for ALMS1 (NM_015120.2,10885-10903).
cagcacactgtgagtttga

SEQ ID NO: 348461 - DNA, 19 bp, Homo sapiens
  siRNA target sequence for ALMS1 (NM_015120.2,10887-10905).
gcacactgtgagtttgaat

SEQ ID NO: 348462 - DNA, 19 bp, Homo sapiens
  siRNA target sequence for ALMS1 (NM_015120.2,11019-11037).
gaatccaatcacacattct

SEQ ID NO: 348463 - DNA, 19 bp, Homo sapiens
  siRNA target sequence for ALMS1 (NM_015120.2,11077-11095).
gaacgaagtgtgaaggaat

SEQ ID NO: 348464 - DNA, 19 bp, Homo sapiens
  siRNA target sequence for ALMS1 (NM_015120.2,11177-11195).
gcgagcttaaaaaaagcaa

SEQ ID NO: 348465 - DNA, 19 bp, Homo sapiens
  siRNA target sequence for ALMS1 (NM_015120.2,11278-11296).
cagccaggttttaattata

SEQ ID NO: 348466 - DNA, 19 bp, Homo sapiens
  siRNA target sequence for ALMS1 (NM_015120.2,11281-11299).
ccaggttttaattatataa

SEQ ID NO: 348467 - DNA, 19 bp, Homo sapiens
  siRNA target sequence for ALMS1 (NM_015120.2,11368-11386).
ctttccggcaccacttcta

SEQ ID NO: 348468 - DNA, 19 bp, Homo sapiens
  siRNA target sequence for ALMS1 (NM_015120.2,11384-11402).
ctactgtcgaatcagatat

SEQ ID NO: 348469 - DNA, 19 bp, Homo sapiens
  siRNA target sequence for ALMS1 (NM_015120.2,11387-11405).
ctgtcgaatcagatatatt

SEQ ID NO: 348470 - DNA, 19 bp, Homo sapiens
  siRNA target sequence for ALMS1 (NM_015120.2,11389-11407).
gtcgaatcagatatattga

SEQ ID NO: 348471 - DNA, 19 bp, Homo sapiens
  siRNA target sequence for ALMS1 (NM_015120.2,11447-11465).
gctctgtttccactattga

SEQ ID NO: 348472 - DNA, 19 bp, Homo sapiens
  siRNA target sequence for ALMS1 (NM_015120.2,11486-11504).
cttttggccatgaaagagt

SEQ ID NO: 348473 - DNA, 19 bp, Homo sapiens
  siRNA target sequence for ALMS1 (NM_015120.2,11492-11510).
gccatgaaagagtatgctt

SEQ ID NO: 348474 - DNA, 19 bp, Homo sapiens
  siRNA target sequence for ALMS1 (NM_015120.2,11511-11529).
gtcacccagacgaattaaa

SEQ ID NO: 348475 - DNA, 19 bp, Homo sapiens
  siRNA target sequence for ALMS1 (NM_015120.2,11521-11539).
cgaattaaattatatagca

SEQ ID NO: 348476 - DNA, 19 bp, Homo sapiens
  siRNA target sequence for ALMS1 (NM_015120.2,11550-11568).
ccaacagaggagatacctt

SEQ ID NO: 348477 - DNA, 19 bp, Homo sapiens
  siRNA target sequence for ALMS1 (NM_015120.2,11649-11667).
catccaggtagcaaaccat

SEQ ID NO: 348478 - DNA, 19 bp, Homo sapiens
  siRNA target sequence for ALMS1 (NM_015120.2,11656-11674).
gtagcaaaccatgtgattt

SEQ ID NO: 348479 - DNA, 19 bp, Homo sapiens
  siRNA target sequence for ALMS1 (NM_015120.2,11690-11708).
cctcttctgccagtagttt

SEQ ID NO: 348480 - DNA, 19 bp, Homo sapiens
  siRNA target sequence for ALMS1 (NM_015120.2,11815-11833).
cgagatgttgggataactt

SEQ ID NO: 348481 - DNA, 19 bp, Homo sapiens
  siRNA target sequence for ALMS1 (NM_015120.2,12030-12048).
ggaaaacgtgcctaacact

SEQ ID NO: 348482 - DNA, 19 bp, Homo sapiens
  siRNA target sequence for ALMS1 (NM_015120.2,12031-12049).
gaaaacgtgcctaacactt

SEQ ID NO: 348483 - DNA, 19 bp, Homo sapiens
  siRNA target sequence for ALMS1 (NM_015120.2,12260-12278).
gctctggggagcggataaa

SEQ ID NO: 348484 - DNA, 19 bp, Homo sapiens
  siRNA target sequence for ALMS1 (NM_015120.2,12459-12477).
gaggtccaaacggatttat

SEQ ID NO: 348485 - DNA, 19 bp, Homo sapiens
  siRNA target sequence for ALMS1 (NM_015120.2,12461-12479).
ggtccaaacggatttatga

SEQ ID NO: 348486 - DNA, 19 bp, Homo sapiens
  siRNA target sequence for ALMS1 (NM_015120.2,12545-12563).
ggctgcgagcccagctata

SEQ ID NO: 348487 - DNA, 19 bp, Homo sapiens
  siRNA target sequence for ALMS1 (NM_015120.2,12546-12564).
gctgcgagcccagctatat

SEQ ID NO: 348488 - DNA, 19 bp, Homo sapiens
  siRNA target sequence for ALMS1 (NM_015120.2,12555-12573).
ccagctatataaaaagaga

SEQ ID NO: 348489 - DNA, 19 bp, Homo sapiens
  siRNA target sequence for ALMS1 (NM_015120.2,12570-12588).
gagagtgaccaatcaactt

SEQ ID NO: 348490 - DNA, 19 bp, Homo sapiens
  siRNA target sequence for ALMS1 (NM_015120.2,12572-12590).
gagtgaccaatcaacttct

SEQ ID NO: 348491 - DNA, 19 bp, Homo sapiens
  siRNA target sequence for MCLC (NM_015127.2,141-159).
gttgctggtagctggttat

SEQ ID NO: 348492 - DNA, 19 bp, Homo sapiens
  siRNA target sequence for MCLC (NM_015127.2,152-170).
ctggttatgctcatgatga

SEQ ID NO: 348493 - DNA, 19 bp, Homo sapiens
  siRNA target sequence for MCLC (NM_015127.2,184-202).
cccacagacatgcttaact

SEQ ID NO: 348494 - DNA, 19 bp, Homo sapiens
  siRNA target sequence for MCLC (NM_015127.2,268-286).
gtcagtcctgacttgtcat

SEQ ID NO: 348495 - DNA, 19 bp, Homo sapiens
  siRNA target sequence for MCLC (NM_015127.2,322-340).
gattctttaacttataaga

SEQ ID NO: 348496 - DNA, 19 bp, Homo sapiens
  siRNA target sequence for MCLC (NM_015127.2,434-452).
gaaagcttggactttttca

SEQ ID NO: 348497 - DNA, 19 bp, Homo sapiens
  siRNA target sequence for MCLC (NM_015127.2,438-456).
gcttggactttttcatgat

SEQ ID NO: 348498 - DNA, 19 bp, Homo sapiens
  siRNA target sequence for MCLC (NM_015127.2,473-491).
ggcgattcgaagattcctt

SEQ ID NO: 348499 - DNA, 19 bp, Homo sapiens
  siRNA target sequence for MCLC (NM_015127.2,474-492).
gcgattcgaagattccttt

SEQ ID NO: 348500 - DNA, 19 bp, Homo sapiens
  siRNA target sequence for MCLC (NM_015127.2,489-507).
ctttggagtggatccatat

SEQ ID NO: 348501 - DNA, 19 bp, Homo sapiens
  siRNA target sequence for MCLC (NM_015127.2,494-512).
gagtggatccatataatgt

SEQ ID NO: 348502 - DNA, 19 bp, Homo sapiens
  siRNA target sequence for MCLC (NM_015127.2,503-521).
catataatgtgttaatggt

SEQ ID NO: 348503 - DNA, 19 bp, Homo sapiens
  siRNA target sequence for MCLC (NM_015127.2,534-552).
gctctgcatcgtggtttta

SEQ ID NO: 348504 - DNA, 19 bp, Homo sapiens
  siRNA target sequence for MCLC (NM_015127.2,590-608).
ctcagttgagacgtgtttt

SEQ ID NO: 348505 - DNA, 19 bp, Homo sapiens
  siRNA target sequence for MCLC (NM_015127.2,592-610).
cagttgagacgtgttttaa

SEQ ID NO: 348506 - DNA, 19 bp, Homo sapiens
  siRNA target sequence for MCLC (NM_015127.2,624-642).
gttcagtttgggatggaat

SEQ ID NO: 348507 - DNA, 19 bp, Homo sapiens
  siRNA target sequence for MCLC (NM_015127.2,691-709).
gccaagatggagccattaa

SEQ ID NO: 348508 - DNA, 19 bp, Homo sapiens
  siRNA target sequence for MCLC (NM_015127.2,754-772).
gaatggtttagaagttcat

SEQ ID NO: 348509 - DNA, 19 bp, Homo sapiens
  siRNA target sequence for MCLC (NM_015127.2,764-782).
gaagttcatggacctataa

SEQ ID NO: 348510 - DNA, 19 bp, Homo sapiens
  siRNA target sequence for MCLC (NM_015127.2,767-785).
gttcatggacctataagga

SEQ ID NO: 348511 - DNA, 19 bp, Homo sapiens
  siRNA target sequence for MCLC (NM_015127.2,783-801).
ggatgacccatgccaaaaa

SEQ ID NO: 348512 - DNA, 19 bp, Homo sapiens
  siRNA target sequence for MCLC (NM_015127.2,787-805).
gacccatgccaaaaatact

SEQ ID NO: 348513 - DNA, 19 bp, Homo sapiens
  siRNA target sequence for MCLC (NM_015127.2,789-807).
cccatgccaaaaatactat

SEQ ID NO: 348514 - DNA, 19 bp, Homo sapiens
  siRNA target sequence for MCLC (NM_015127.2,791-809).
catgccaaaaatactatga

SEQ ID NO: 348515 - DNA, 19 bp, Homo sapiens
  siRNA target sequence for MCLC (NM_015127.2,817-835).
ctagtcaaccctatttggt

SEQ ID NO: 348516 - DNA, 19 bp, Homo sapiens
  siRNA target sequence for MCLC (NM_015127.2,884-902).
cggagccattgaagcatat

SEQ ID NO: 348517 - DNA, 19 bp, Homo sapiens
  siRNA target sequence for MCLC (NM_015127.2,961-979).
catcttccagtgctgataa

SEQ ID NO: 348518 - DNA, 19 bp, Homo sapiens
  siRNA target sequence for MCLC (NM_015127.2,964-982).
cttccagtgctgataatta

SEQ ID NO: 348519 - DNA, 19 bp, Homo sapiens
  siRNA target sequence for MCLC (NM_015127.2,1027-1045).
gttcatgtgctgagacata

SEQ ID NO: 348520 - DNA, 19 bp, Homo sapiens
  siRNA target sequence for MCLC (NM_015127.2,1078-1096).
cttcggccacgggatagaa

SEQ ID NO: 348521 - DNA, 19 bp, Homo sapiens
  siRNA target sequence for MCLC (NM_015127.2,1104-1122).
ggaggaaattgattataga

SEQ ID NO: 348522 - DNA, 19 bp, Homo sapiens
  siRNA target sequence for MCLC (NM_015127.2,1136-1154).
caggtgatgccgatttcca

SEQ ID NO: 348523 - DNA, 19 bp, Homo sapiens
  siRNA target sequence for MCLC (NM_015127.2,1141-1159).
gatgccgatttccattata

SEQ ID NO: 348524 - DNA, 19 bp, Homo sapiens
  siRNA target sequence for MCLC (NM_015127.2,1186-1204).
ggcccttatgccaaaacgt

SEQ ID NO: 348525 - DNA, 19 bp, Homo sapiens
  siRNA target sequence for MCLC (NM_015127.2,1187-1205).
gcccttatgccaaaacgta

SEQ ID NO: 348526 - DNA, 19 bp, Homo sapiens
  siRNA target sequence for MCLC (NM_015127.2,1188-1206).
cccttatgccaaaacgtat

SEQ ID NO: 348527 - DNA, 19 bp, Homo sapiens
  siRNA target sequence for MCLC (NM_015127.2,1235-1253).
gagatgttgacttgagatt

SEQ ID NO: 348528 - DNA, 19 bp, Homo sapiens
  siRNA target sequence for MCLC (NM_015127.2,1281-1299).
gctccgggcatttgatgta

SEQ ID NO: 348529 - DNA, 19 bp, Homo sapiens
  siRNA target sequence for MCLC (NM_015127.2,1328-1346).
cggtggtacccagtcataa

SEQ ID NO: 348530 - DNA, 19 bp, Homo sapiens
  siRNA target sequence for MCLC (NM_015127.2,1330-1348).
gtggtacccagtcataaat

SEQ ID NO: 348531 - DNA, 19 bp, Homo sapiens
  siRNA target sequence for MCLC (NM_015127.2,1332-1350).
ggtacccagtcataaatca

SEQ ID NO: 348532 - DNA, 19 bp, Homo sapiens
  siRNA target sequence for MCLC (NM_015127.2,1349-1367).
cacctgttttggatacaaa

SEQ ID NO: 348533 - DNA, 19 bp, Homo sapiens
  siRNA target sequence for MCLC (NM_015127.2,1395-1413).
ggaaggcacaccgaaagaa

SEQ ID NO: 348534 - DNA, 19 bp, Homo sapiens
  siRNA target sequence for M-RIP (NM_015134.1,72-90).
gagaacccgtgcaggaaat

SEQ ID NO: 348535 - DNA, 19 bp, Homo sapiens
  siRNA target sequence for M-RIP (NM_015134.1,175-193).
cgcaggcaaaacccattta

SEQ ID NO: 348536 - DNA, 19 bp, Homo sapiens
  siRNA target sequence for M-RIP (NM_015134.1,262-280).
ggcagcgacggttcttcat

SEQ ID NO: 348537 - DNA, 19 bp, Homo sapiens
  siRNA target sequence for M-RIP (NM_015134.1,267-285).
cgacggttcttcatccttt

SEQ ID NO: 348538 - DNA, 19 bp, Homo sapiens
  siRNA target sequence for M-RIP (NM_015134.1,268-286).
gacggttcttcatccttta

SEQ ID NO: 348539 - DNA, 19 bp, Homo sapiens
  siRNA target sequence for M-RIP (NM_015134.1,304-322).
gctacgccctggatgagat

SEQ ID NO: 348540 - DNA, 19 bp, Homo sapiens
  siRNA target sequence for M-RIP (NM_015134.1,390-408).
cgcacgggccagaagttct

SEQ ID NO: 348541 - DNA, 19 bp, Homo sapiens
  siRNA target sequence for M-RIP (NM_015134.1,427-445).
ctgagaaggagcatttcat

SEQ ID NO: 348542 - DNA, 19 bp, Homo sapiens
  siRNA target sequence for M-RIP (NM_015134.1,789-807).
gaggagagcgccatgagta

SEQ ID NO: 348543 - DNA, 19 bp, Homo sapiens
  siRNA target sequence for M-RIP (NM_015134.1,840-858).
gtggagagcggctacttct

SEQ ID NO: 348544 - DNA, 19 bp, Homo sapiens
  siRNA target sequence for M-RIP (NM_015134.1,1085-1103).
gcgggacttcaccaatgaa

SEQ ID NO: 348545 - DNA, 19 bp, Homo sapiens
  siRNA target sequence for M-RIP (NM_015134.1,1201-1219).
cgcccgacctgctgaattt

SEQ ID NO: 348546 - DNA, 19 bp, Homo sapiens
  siRNA target sequence for M-RIP (NM_015134.1,1203-1221).
cccgacctgctgaatttca

SEQ ID NO: 348547 - DNA, 19 bp, Homo sapiens
  siRNA target sequence for M-RIP (NM_015134.1,1204-1222).
ccgacctgctgaatttcaa

SEQ ID NO: 348548 - DNA, 19 bp, Homo sapiens
  siRNA target sequence for M-RIP (NM_015134.1,1231-1249).
ggctgactaagcagtatga

SEQ ID NO: 348549 - DNA, 19 bp, Homo sapiens
  siRNA target sequence for M-RIP (NM_015134.1,1285-1303).
ccgatcaaagcctgagata

SEQ ID NO: 348550 - DNA, 19 bp, Homo sapiens
  siRNA target sequence for M-RIP (NM_015134.1,1290-1308).
caaagcctgagatactaca

SEQ ID NO: 348551 - DNA, 19 bp, Homo sapiens
  siRNA target sequence for M-RIP (NM_015134.1,1333-1351).
ccgacttggatggagaaat

SEQ ID NO: 348552 - DNA, 19 bp, Homo sapiens
  siRNA target sequence for M-RIP (NM_015134.1,1355-1373).
cttgtccgcatgttacgat

SEQ ID NO: 348553 - DNA, 19 bp, Homo sapiens
  siRNA target sequence for M-RIP (NM_015134.1,1404-1422).
ggcttccagatacatacaa

SEQ ID NO: 348554 - DNA, 19 bp, Homo sapiens
  siRNA target sequence for M-RIP (NM_015134.1,1405-1423).
gcttccagatacatacaaa

SEQ ID NO: 348555 - DNA, 19 bp, Homo sapiens
  siRNA target sequence for M-RIP (NM_015134.1,1668-1686).
cgctccaagacctttgact

SEQ ID NO: 348556 - DNA, 19 bp, Homo sapiens
  siRNA target sequence for M-RIP (NM_015134.1,2443-2461).
gcgtcaactcggatgttga

SEQ ID NO: 348557 - DNA, 19 bp, Homo sapiens
  siRNA target sequence for M-RIP (NM_015134.1,2765-2783).
cttattgcgggtaaaggaa

SEQ ID NO: 348558 - DNA, 19 bp, Homo sapiens
  siRNA target sequence for M-RIP (NM_015134.1,2839-2857).
cggcactgcgggacaagaa

SEQ ID NO: 348559 - DNA, 19 bp, Homo sapiens
  siRNA target sequence for M-RIP (NM_015134.1,2841-2859).
gcactgcgggacaagaagt

SEQ ID NO: 348560 - DNA, 19 bp, Homo sapiens
  siRNA target sequence for M-RIP (NM_015134.1,2842-2860).
cactgcgggacaagaagta

SEQ ID NO: 348561 - DNA, 19 bp, Homo sapiens
  siRNA target sequence for M-RIP (NM_015134.1,2863-2881).
caagtgacaagtacaaaga

SEQ ID NO: 348562 - DNA, 19 bp, Homo sapiens
  siRNA target sequence for M-RIP (NM_015134.1,2995-3013).
ccacggtgtccggatatga

SEQ ID NO: 348563 - DNA, 19 bp, Homo sapiens
  siRNA target sequence for M-RIP (NM_015134.1,2996-3014).
cacggtgtccggatatgat

SEQ ID NO: 348564 - DNA, 19 bp, Homo sapiens
  siRNA target sequence for M-RIP (NM_015134.1,2998-3016).
cggtgtccggatatgatat

SEQ ID NO: 348565 - DNA, 19 bp, Homo sapiens
  siRNA target sequence for M-RIP (NM_015134.1,2999-3017).
ggtgtccggatatgatata

SEQ ID NO: 348566 - DNA, 19 bp, Homo sapiens
  siRNA target sequence for M-RIP (NM_015134.1,3000-3018).
gtgtccggatatgatataa

SEQ ID NO: 348567 - DNA, 19 bp, Homo sapiens
  siRNA target sequence for M-RIP (NM_015134.1,3012-3030).
gatataatgaaatctaaaa

SEQ ID NO: 348568 - DNA, 19 bp, Homo sapiens
  siRNA target sequence for M-RIP (NM_015134.1,3035-3053).
ccctgacttcttgaagaaa

SEQ ID NO: 348569 - DNA, 19 bp, Homo sapiens
  siRNA target sequence for M-RIP (NM_015134.1,3129-3147).
cggttgaagctctttgaat

SEQ ID NO: 348570 - DNA, 19 bp, Homo sapiens
  siRNA target sequence for KIAA0252 (NM_015138.2,451-469).
ctcttccagttcagattca

SEQ ID NO: 348571 - DNA, 19 bp, Homo sapiens
  siRNA target sequence for KIAA0252 (NM_015138.2,584-602).
ctgttcaatcgcatagaga

SEQ ID NO: 348572 - DNA, 19 bp, Homo sapiens
  siRNA target sequence for KIAA0252 (NM_015138.2,827-845).
cgagaaaaacgaaagaaca

SEQ ID NO: 348573 - DNA, 19 bp, Homo sapiens
  siRNA target sequence for KIAA0252 (NM_015138.2,949-967).
ccgctcatcacgaacatca

SEQ ID NO: 348574 - DNA, 19 bp, Homo sapiens
  siRNA target sequence for KIAA0252 (NM_015138.2,1039-1057).
gaatcgggttcgattatca

SEQ ID NO: 348575 - DNA, 19 bp, Homo sapiens
  siRNA target sequence for KIAA0252 (NM_015138.2,1050-1068).
gattatcacggcataagct

SEQ ID NO: 348576 - DNA, 19 bp, Homo sapiens
  siRNA target sequence for KIAA0252 (NM_015138.2,1084-1102).
catgcccttctttgctaaa

SEQ ID NO: 348577 - DNA, 19 bp, Homo sapiens
  siRNA target sequence for KIAA0252 (NM_015138.2,1087-1105).
gcccttctttgctaaaact

SEQ ID NO: 348578 - DNA, 19 bp, Homo sapiens
  siRNA target sequence for KIAA0252 (NM_015138.2,1211-1229).
ctaggtggcaccagaacaa

SEQ ID NO: 348579 - DNA, 19 bp, Homo sapiens
  siRNA target sequence for KIAA0252 (NM_015138.2,1215-1233).
gtggcaccagaacaaacaa

SEQ ID NO: 348580 - DNA, 19 bp, Homo sapiens
  siRNA target sequence for KIAA0252 (NM_015138.2,1265-1283).
cgcgtgttccgtttagagt

SEQ ID NO: 348581 - DNA, 19 bp, Homo sapiens
  siRNA target sequence for KIAA0252 (NM_015138.2,1266-1284).
gcgtgttccgtttagagtt

SEQ ID NO: 348582 - DNA, 19 bp, Homo sapiens
  siRNA target sequence for KIAA0252 (NM_015138.2,1267-1285).
cgtgttccgtttagagttt

SEQ ID NO: 348583 - DNA, 19 bp, Homo sapiens
  siRNA target sequence for KIAA0252 (NM_015138.2,1286-1304).
gtctcaaaccaagaattca

SEQ ID NO: 348584 - DNA, 19 bp, Homo sapiens
  siRNA target sequence for KIAA0252 (NM_015138.2,1305-1323).
ccgaaagtgagtttatgaa

SEQ ID NO: 348585 - DNA, 19 bp, Homo sapiens
  siRNA target sequence for KIAA0252 (NM_015138.2,1354-1372).
gcagttgcccactctagat

SEQ ID NO: 348586 - DNA, 19 bp, Homo sapiens
  siRNA target sequence for KIAA0252 (NM_015138.2,1361-1379).
cccactctagatgaaatca

SEQ ID NO: 348587 - DNA, 19 bp, Homo sapiens
  siRNA target sequence for KIAA0252 (NM_015138.2,1362-1380).
ccactctagatgaaatcaa

SEQ ID NO: 348588 - DNA, 19 bp, Homo sapiens
  siRNA target sequence for KIAA0252 (NM_015138.2,1363-1381).
cactctagatgaaatcaat

SEQ ID NO: 348589 - DNA, 19 bp, Homo sapiens
  siRNA target sequence for KIAA0252 (NM_015138.2,1395-1413).
ctattaaagaagctcttaa

SEQ ID NO: 348590 - DNA, 19 bp, Homo sapiens
  siRNA target sequence for KIAA0252 (NM_015138.2,1423-1441).
caatgatcaggacattgaa

SEQ ID NO: 348591 - DNA, 19 bp, Homo sapiens
  siRNA target sequence for KIAA0252 (NM_015138.2,1479-1497).
cacccaactacgctatgaa

SEQ ID NO: 348592 - DNA, 19 bp, Homo sapiens
  siRNA target sequence for KIAA0252 (NM_015138.2,1482-1500).
ccaactacgctatgaagaa

SEQ ID NO: 348593 - DNA, 19 bp, Homo sapiens
  siRNA target sequence for KIAA0252 (NM_015138.2,1552-1570).
caaggccaaacaaatccaa

SEQ ID NO: 348594 - DNA, 19 bp, Homo sapiens
  siRNA target sequence for KIAA0252 (NM_015138.2,1613-1631).
cgccagcggaccaagaaca

SEQ ID NO: 348595 - DNA, 19 bp, Homo sapiens
  siRNA target sequence for KIAA0252 (NM_015138.2,1614-1632).
gccagcggaccaagaacat

SEQ ID NO: 348596 - DNA, 19 bp, Homo sapiens
  siRNA target sequence for KIAA0252 (NM_015138.2,1615-1633).
ccagcggaccaagaacata

SEQ ID NO: 348597 - DNA, 19 bp, Homo sapiens
  siRNA target sequence for KIAA0252 (NM_015138.2,1616-1634).
cagcggaccaagaacatat

SEQ ID NO: 348598 - DNA, 19 bp, Homo sapiens
  siRNA target sequence for KIAA0252 (NM_015138.2,1627-1645).
gaacatatccgctatcagt

SEQ ID NO: 348599 - DNA, 19 bp, Homo sapiens
  siRNA target sequence for KIAA0252 (NM_015138.2,1635-1653).
ccgctatcagttacatcaa

SEQ ID NO: 348600 - DNA, 19 bp, Homo sapiens
  siRNA target sequence for KIAA0252 (NM_015138.2,1663-1681).
ccgggagtggaacattgta

SEQ ID NO: 348601 - DNA, 19 bp, Homo sapiens
  siRNA target sequence for KIAA0252 (NM_015138.2,1710-1728).
gtcacaacatgaaaaacca

SEQ ID NO: 348602 - DNA, 19 bp, Homo sapiens
  siRNA target sequence for KIAA0252 (NM_015138.2,1762-1780).
gcctaccatcgtttctaat

SEQ ID NO: 348603 - DNA, 19 bp, Homo sapiens
  siRNA target sequence for KIAA0252 (NM_015138.2,1763-1781).
cctaccatcgtttctaatt

SEQ ID NO: 348604 - DNA, 19 bp, Homo sapiens
  siRNA target sequence for KIAA0252 (NM_015138.2,1876-1894).
gggtcaaggcaaagataaa

SEQ ID NO: 348605 - DNA, 19 bp, Homo sapiens
  siRNA target sequence for KIAA0252 (NM_015138.2,1889-1907).
gataaagatttgaattcta

SEQ ID NO: 348606 - DNA, 19 bp, Homo sapiens
  siRNA target sequence for KIAA0252 (NM_015138.2,1915-1933).
cagtgacctctcagaagat

SEQ ID NO: 348607 - DNA, 19 bp, Homo sapiens
  siRNA target sequence for KIAA0252 (NM_015138.2,1936-1954).
gttcaaagtacacgatttt

SEQ ID NO: 348608 - DNA, 19 bp, Homo sapiens
  siRNA target sequence for KIAA0252 (NM_015138.2,2062-2080).
ggaagactacaaaaaacga

SEQ ID NO: 348609 - DNA, 19 bp, Homo sapiens
  siRNA target sequence for KIAA0582 (NM_015147.1,1011-1029).
gatctgcttgactatactt

SEQ ID NO: 348610 - DNA, 19 bp, Homo sapiens
  siRNA target sequence for KIAA0582 (NM_015147.1,1108-1126).
gggtagacctggatagctt

SEQ ID NO: 348611 - DNA, 19 bp, Homo sapiens
  siRNA target sequence for KIAA0582 (NM_015147.1,1137-1155).
ccagcaagcaccctcaaat

SEQ ID NO: 348612 - DNA, 19 bp, Homo sapiens
  siRNA target sequence for KIAA0582 (NM_015147.1,1222-1240).
gagagccaagccttaagca

SEQ ID NO: 348613 - DNA, 19 bp, Homo sapiens
  siRNA target sequence for KIAA0582 (NM_015147.1,1372-1390).
cgaaggaccggctgactat

SEQ ID NO: 348614 - DNA, 19 bp, Homo sapiens
  siRNA target sequence for KIAA0582 (NM_015147.1,1373-1391).
gaaggaccggctgactata

SEQ ID NO: 348615 - DNA, 19 bp, Homo sapiens
  siRNA target sequence for KIAA0582 (NM_015147.1,1570-1588).
ctcggctgacacagacatt

SEQ ID NO: 348616 - DNA, 19 bp, Homo sapiens
  siRNA target sequence for KIAA0582 (NM_015147.1,1572-1590).
cggctgacacagacatttt

SEQ ID NO: 348617 - DNA, 19 bp, Homo sapiens
  siRNA target sequence for KIAA0582 (NM_015147.1,1613-1631).
ctgctggctgtataatgtt

SEQ ID NO: 348618 - DNA, 19 bp, Homo sapiens
  siRNA target sequence for KIAA0582 (NM_015147.1,1656-1674).
gcagccaggtccaatctta

SEQ ID NO: 348619 - DNA, 19 bp, Homo sapiens
  siRNA target sequence for KIAA0582 (NM_015147.1,1659-1677).
gccaggtccaatcttacaa

SEQ ID NO: 348620 - DNA, 19 bp, Homo sapiens
  siRNA target sequence for KIAA0582 (NM_015147.1,1661-1679).
caggtccaatcttacaagt

SEQ ID NO: 348621 - DNA, 19 bp, Homo sapiens
  siRNA target sequence for KIAA0582 (NM_015147.1,1671-1689).
cttacaagtctcaagtctt

SEQ ID NO: 348622 - DNA, 19 bp, Homo sapiens
  siRNA target sequence for KIAA0582 (NM_015147.1,1704-1722).
cggcaatttaagaaagata

SEQ ID NO: 348623 - DNA, 19 bp, Homo sapiens
  siRNA target sequence for KIAA0582 (NM_015147.1,1706-1724).
gcaatttaagaaagatata

SEQ ID NO: 348624 - DNA, 19 bp, Homo sapiens
  siRNA target sequence for KIAA0582 (NM_015147.1,1744-1762).
cggagagtgtcttacagaa

SEQ ID NO: 348625 - DNA, 19 bp, Homo sapiens
  siRNA target sequence for KIAA0582 (NM_015147.1,1790-1808).
ggagaacaccccagtttta

SEQ ID NO: 348626 - DNA, 19 bp, Homo sapiens
  siRNA target sequence for KIAA0582 (NM_015147.1,1866-1884).
cgcctgtatgactctatct

SEQ ID NO: 348627 - DNA, 19 bp, Homo sapiens
  siRNA target sequence for KIAA0582 (NM_015147.1,1915-1933).
cccttatccctgacaaaaa

SEQ ID NO: 348628 - DNA, 19 bp, Homo sapiens
  siRNA target sequence for KIAA0638 (NM_015157.1,360-378).
gctctcaataggaaccaaa

SEQ ID NO: 348629 - DNA, 19 bp, Homo sapiens
  siRNA target sequence for KIAA0638 (NM_015157.1,439-457).
caggcaaagggctgaaagt

SEQ ID NO: 348630 - DNA, 19 bp, Homo sapiens
  siRNA target sequence for KIAA0638 (NM_015157.1,653-671).
caatgcctgcactattgat

SEQ ID NO: 348631 - DNA, 19 bp, Homo sapiens
  siRNA target sequence for KIAA0638 (NM_015157.1,736-754).
ccttccttcgctttaacca

SEQ ID NO: 348632 - DNA, 19 bp, Homo sapiens
  siRNA target sequence for KIAA0638 (NM_015157.1,826-844).
ctgttcctgcagaatcaga

SEQ ID NO: 348633 - DNA, 19 bp, Homo sapiens
  siRNA target sequence for KIAA0638 (NM_015157.1,828-846).
gttcctgcagaatcagaaa

SEQ ID NO: 348634 - DNA, 19 bp, Homo sapiens
  siRNA target sequence for KIAA0638 (NM_015157.1,1019-1037).
gtcaccgatggctaatggt

SEQ ID NO: 348635 - DNA, 19 bp, Homo sapiens
  siRNA target sequence for KIAA0638 (NM_015157.1,1432-1450).
ccatcagcctgagtgaata

SEQ ID NO: 348636 - DNA, 19 bp, Homo sapiens
  siRNA target sequence for KIAA0638 (NM_015157.1,1625-1643).
ggtgggccgaacattttca

SEQ ID NO: 348637 - DNA, 19 bp, Homo sapiens
  siRNA target sequence for KIAA0638 (NM_015157.1,1979-1997).
cagtctgggctctcttact

SEQ ID NO: 348638 - DNA, 19 bp, Homo sapiens
  siRNA target sequence for KIAA0638 (NM_015157.1,2071-2089).
gggagcggaaaaatagcat

SEQ ID NO: 348639 - DNA, 19 bp, Homo sapiens
  siRNA target sequence for KIAA0638 (NM_015157.1,2587-2605).
cccgagaggccgaaatgga

SEQ ID NO: 348640 - DNA, 19 bp, Homo sapiens
  siRNA target sequence for KIAA0638 (NM_015157.1,2743-2761).
ccctggagactgagacaaa

SEQ ID NO: 348641 - DNA, 19 bp, Homo sapiens
  siRNA target sequence for KIAA0638 (NM_015157.1,2980-2998).
ccttacagctgctgcaaaa

SEQ ID NO: 348642 - DNA, 19 bp, Homo sapiens
  siRNA target sequence for KIAA0638 (NM_015157.1,3070-3088).
ccacatcgaccctcaaaga

SEQ ID NO: 348643 - DNA, 19 bp, Homo sapiens
  siRNA target sequence for KIAA0638 (NM_015157.1,3073-3091).
catcgaccctcaaagagat

SEQ ID NO: 348644 - DNA, 19 bp, Homo sapiens
  siRNA target sequence for KIAA0638 (NM_015157.1,3104-3122).
gctccctgctgtagactta

SEQ ID NO: 348645 - DNA, 19 bp, Homo sapiens
  siRNA target sequence for KIAA0638 (NM_015157.1,3217-3235).
cccgtcagctgcaggttta

SEQ ID NO: 348646 - DNA, 19 bp, Homo sapiens
  siRNA target sequence for KIAA0638 (NM_015157.1,3607-3625).
ctctcatgcaccactctat

SEQ ID NO: 348647 - DNA, 19 bp, Homo sapiens
  siRNA target sequence for KIAA0638 (NM_015157.1,3611-3629).
catgcaccactctatccta

SEQ ID NO: 348648 - DNA, 19 bp, Homo sapiens
  siRNA target sequence for KIAA0638 (NM_015157.1,4132-4150).
gtggctacttggtcaagat

SEQ ID NO: 348649 - DNA, 19 bp, Homo sapiens
  siRNA target sequence for KIAA0638 (NM_015157.1,4205-4223).
gcgcaccctttcctattat

SEQ ID NO: 348650 - DNA, 19 bp, Homo sapiens
  siRNA target sequence for KIAA0638 (NM_015157.1,4245-4263).
ctgaagggagtcatctatt

SEQ ID NO: 348651 - DNA, 19 bp, Homo sapiens
  siRNA target sequence for KIAA0638 (NM_015157.1,4381-4399).
cccatgaccggctgtacta

SEQ ID NO: 348652 - DNA, 19 bp, Homo sapiens
  siRNA target sequence for KIAA0638 (NM_015157.1,4464-4482).
ggctacactcagttcatga

SEQ ID NO: 348653 - DNA, 19 bp, Homo sapiens
  siRNA target sequence for KIAA0638 (NM_015157.1,4465-4483).
gctacactcagttcatgaa

SEQ ID NO: 348654 - DNA, 19 bp, Homo sapiens
  siRNA target sequence for ANKRD15 (NM_015158.1,722-740).
gaatggataccaaggtaat

SEQ ID NO: 348655 - DNA, 19 bp, Homo sapiens
  siRNA target sequence for ANKRD15 (NM_015158.1,989-1007).
ctcacagctgaaaaaccaa

SEQ ID NO: 348656 - DNA, 19 bp, Homo sapiens
  siRNA target sequence for ANKRD15 (NM_015158.1,1010-1028).
ggctgcatcccagatcaat

SEQ ID NO: 348657 - DNA, 19 bp, Homo sapiens
  siRNA target sequence for ANKRD15 (NM_015158.1,1014-1032).
gcatcccagatcaatgtct

SEQ ID NO: 348658 - DNA, 19 bp, Homo sapiens
  siRNA target sequence for ANKRD15 (NM_015158.1,1038-1056).
gtgaggaagcggtcctata

SEQ ID NO: 348659 - DNA, 19 bp, Homo sapiens
  siRNA target sequence for ANKRD15 (NM_015158.1,1040-1058).
gaggaagcggtcctatagt

SEQ ID NO: 348660 - DNA, 19 bp, Homo sapiens
  siRNA target sequence for ANKRD15 (NM_015158.1,1110-1128).
ggggaattatacattgact

SEQ ID NO: 348661 - DNA, 19 bp, Homo sapiens
  siRNA target sequence for ANKRD15 (NM_015158.1,1162-1180).
gcacgcagaggataaagga

SEQ ID NO: 348662 - DNA, 19 bp, Homo sapiens
  siRNA target sequence for ANKRD15 (NM_015158.1,1293-1311).
ggtgccgaggagaacatga

SEQ ID NO: 348663 - DNA, 19 bp, Homo sapiens
  siRNA target sequence for ANKRD15 (NM_015158.1,1371-1389).
cttgttgagatgagaaatt

SEQ ID NO: 348664 - DNA, 19 bp, Homo sapiens
  siRNA target sequence for ANKRD15 (NM_015158.1,1454-1472).
gcaacagcagaccatagaa

SEQ ID NO: 348665 - DNA, 19 bp, Homo sapiens
  siRNA target sequence for ANKRD15 (NM_015158.1,1487-1505).
gatctatcgcctagaagta

SEQ ID NO: 348666 - DNA, 19 bp, Homo sapiens
  siRNA target sequence for ANKRD15 (NM_015158.1,1524-1542).
catgaccgggagatgacta

SEQ ID NO: 348667 - DNA, 19 bp, Homo sapiens
  siRNA target sequence for ANKRD15 (NM_015158.1,1564-1582).
ctgctggatcgaggaaaaa

SEQ ID NO: 348668 - DNA, 19 bp, Homo sapiens
  siRNA target sequence for ANKRD15 (NM_015158.1,1567-1585).
ctggatcgaggaaaaaggt

SEQ ID NO: 348669 - DNA, 19 bp, Homo sapiens
  siRNA target sequence for ANKRD15 (NM_015158.1,1573-1591).
cgaggaaaaaggttgacaa

SEQ ID NO: 348670 - DNA, 19 bp, Homo sapiens
  siRNA target sequence for ANKRD15 (NM_015158.1,1602-1620).
gcccagccgcttgttttca

SEQ ID NO: 348671 - DNA, 19 bp, Homo sapiens
  siRNA target sequence for ANKRD15 (NM_015158.1,1604-1622).
ccagccgcttgttttcagt

SEQ ID NO: 348672 - DNA, 19 bp, Homo sapiens
  siRNA target sequence for ANKRD15 (NM_015158.1,1605-1623).
cagccgcttgttttcagta

SEQ ID NO: 348673 - DNA, 19 bp, Homo sapiens
  siRNA target sequence for ANKRD15 (NM_015158.1,1766-1784).
gcctgagctgcctatgaat

SEQ ID NO: 348674 - DNA, 19 bp, Homo sapiens
  siRNA target sequence for ANKRD15 (NM_015158.1,1770-1788).
gagctgcctatgaattggt

SEQ ID NO: 348675 - DNA, 19 bp, Homo sapiens
  siRNA target sequence for ANKRD15 (NM_015158.1,1934-1952).
gacaaacttgaatctcaaa

SEQ ID NO: 348676 - DNA, 19 bp, Homo sapiens
  siRNA target sequence for ANKRD15 (NM_015158.1,1967-1985).
cggttgtggagattgttct

SEQ ID NO: 348677 - DNA, 19 bp, Homo sapiens
  siRNA target sequence for ANKRD15 (NM_015158.1,2160-2178).
gagtcctgcaccaacactt

SEQ ID NO: 348678 - DNA, 19 bp, Homo sapiens
  siRNA target sequence for ANKRD15 (NM_015158.1,2250-2268).
cgtgtcaaggacatcaact

SEQ ID NO: 348679 - DNA, 19 bp, Homo sapiens
  siRNA target sequence for ANKRD15 (NM_015158.1,2368-2386).
ggcagataaatattaacga

SEQ ID NO: 348680 - DNA, 19 bp, Homo sapiens
  siRNA target sequence for ANKRD15 (NM_015158.1,2686-2704).
gcaccctgtcgtctatcaa

SEQ ID NO: 348681 - DNA, 19 bp, Homo sapiens
  siRNA target sequence for ANKRD15 (NM_015158.1,2702-2720).
caactctgtcatgaaatct

SEQ ID NO: 348682 - DNA, 19 bp, Homo sapiens
  siRNA target sequence for ANKRD15 (NM_015158.1,2792-2810).
gggatatacctgtaagtgt

SEQ ID NO: 348683 - DNA, 19 bp, Homo sapiens
  siRNA target sequence for ANKRD15 (NM_015158.1,2971-2989).
gcctctatgcatgtacaaa

SEQ ID NO: 348684 - DNA, 19 bp, Homo sapiens
  siRNA target sequence for ANKRD15 (NM_015158.1,2973-2991).
ctctatgcatgtacaaaca

SEQ ID NO: 348685 - DNA, 19 bp, Homo sapiens
  siRNA target sequence for ANKRD15 (NM_015158.1,3068-3086).
gtttgttggcattaatgga

SEQ ID NO: 348686 - DNA, 19 bp, Homo sapiens
  siRNA target sequence for ANKRD15 (NM_015158.1,3084-3102).
ggagggtatgaaacaactt

SEQ ID NO: 348687 - DNA, 19 bp, Homo sapiens
  siRNA target sequence for ANKRD15 (NM_015158.1,3155-3173).
gtgtgatgtcattgagtat

SEQ ID NO: 348688 - DNA, 19 bp, Homo sapiens
  siRNA target sequence for ANKRD15 (NM_015158.1,3233-3251).
ccatgcagttaatattgaa

SEQ ID NO: 348689 - DNA, 19 bp, Homo sapiens
  siRNA target sequence for ANKRD15 (NM_015158.1,3355-3373).
ctgcatgcaacttactgaa

SEQ ID NO: 348690 - DNA, 19 bp, Homo sapiens
  siRNA target sequence for ANKRD15 (NM_015158.1,3357-3375).
gcatgcaacttactgaaaa

SEQ ID NO: 348691 - DNA, 19 bp, Homo sapiens
  siRNA target sequence for ANKRD15 (NM_015158.1,3397-3415).
ctttgaccagcaaagatat

SEQ ID NO: 348692 - DNA, 19 bp, Homo sapiens
  siRNA target sequence for ANKRD15 (NM_015158.1,3485-3503).
catggtgggggactacata

SEQ ID NO: 348693 - DNA, 19 bp, Homo sapiens
  siRNA target sequence for ANKRD15 (NM_015158.1,3528-3546).
gatgtcctccgctatgtca

SEQ ID NO: 348694 - DNA, 19 bp, Homo sapiens
  siRNA target sequence for ANKRD15 (NM_015158.1,3811-3829).
gtcacggacggatagacat

SEQ ID NO: 348695 - DNA, 19 bp, Homo sapiens
  siRNA target sequence for ANKRD15 (NM_015158.1,3985-4003).
gcagcactgcgctctcaat

SEQ ID NO: 348696 - DNA, 19 bp, Homo sapiens
  siRNA target sequence for ANKRD15 (NM_015158.1,4043-4061).
gtatgcccatgtcaacttt

SEQ ID NO: 348697 - DNA, 19 bp, Homo sapiens
  siRNA target sequence for ANKRD15 (NM_015158.1,4047-4065).
gcccatgtcaactttgcaa

SEQ ID NO: 348698 - DNA, 19 bp, Homo sapiens
  siRNA target sequence for ANKRD15 (NM_015158.1,4049-4067).
ccatgtcaactttgcaaaa

SEQ ID NO: 348699 - DNA, 19 bp, Homo sapiens
  siRNA target sequence for ANKRD15 (NM_015158.1,4118-4136).
cacccaccgaggttcattt

SEQ ID NO: 348700 - DNA, 19 bp, Homo sapiens
  siRNA target sequence for ANKRD15 (NM_015158.1,4120-4138).
cccaccgaggttcatttga

SEQ ID NO: 348701 - DNA, 19 bp, Homo sapiens
  siRNA target sequence for ANKRD15 (NM_015158.1,4121-4139).
ccaccgaggttcatttgat

SEQ ID NO: 348702 - DNA, 19 bp, Homo sapiens
  siRNA target sequence for ANKRD15 (NM_015158.1,4122-4140).
caccgaggttcatttgatt

SEQ ID NO: 348703 - DNA, 19 bp, Homo sapiens
  siRNA target sequence for XTP2 (NM_015172.2,314-332).
gtatgcaacactcagttta

SEQ ID NO: 348704 - DNA, 19 bp, Homo sapiens
  siRNA target sequence for XTP2 (NM_015172.2,318-336).
gcaacactcagtttattta

SEQ ID NO: 348705 - DNA, 19 bp, Homo sapiens
  siRNA target sequence for XTP2 (NM_015172.2,373-391).
ccacagctcgacatggatt

SEQ ID NO: 348706 - DNA, 19 bp, Homo sapiens
  siRNA target sequence for XTP2 (NM_015172.2,374-392).
cacagctcgacatggatta

SEQ ID NO: 348707 - DNA, 19 bp, Homo sapiens
  siRNA target sequence for XTP2 (NM_015172.2,376-394).
cagctcgacatggattaca

SEQ ID NO: 348708 - DNA, 19 bp, Homo sapiens
  siRNA target sequence for XTP2 (NM_015172.2,388-406).
gattacagagtcttggaaa

SEQ ID NO: 348709 - DNA, 19 bp, Homo sapiens
  siRNA target sequence for XTP2 (NM_015172.2,399-417).
cttggaaaagtcggtattt

SEQ ID NO: 348710 - DNA, 19 bp, Homo sapiens
  siRNA target sequence for XTP2 (NM_015172.2,439-457).
ctaacctcccaagtcttaa

SEQ ID NO: 348711 - DNA, 19 bp, Homo sapiens
  siRNA target sequence for XTP2 (NM_015172.2,471-489).
ggcaatgatcctaatgtaa

SEQ ID NO: 348712 - DNA, 19 bp, Homo sapiens
  siRNA target sequence for XTP2 (NM_015172.2,829-847).
cttcgtcatctgatcaaga

SEQ ID NO: 348713 - DNA, 19 bp, Homo sapiens
  siRNA target sequence for XTP2 (NM_015172.2,889-907).
cagagcaaaatgatatcct

SEQ ID NO: 348714 - DNA, 19 bp, Homo sapiens
  siRNA target sequence for XTP2 (NM_015172.2,937-955).
gtcctccacaggctaaact

SEQ ID NO: 348715 - DNA, 19 bp, Homo sapiens
  siRNA target sequence for XTP2 (NM_015172.2,972-990).
gctctcgcttcccagtata

SEQ ID NO: 348716 - DNA, 19 bp, Homo sapiens
  siRNA target sequence for XTP2 (NM_015172.2,982-1000).
cccagtatagagctatgat

SEQ ID NO: 348717 - DNA, 19 bp, Homo sapiens
  siRNA target sequence for XTP2 (NM_015172.2,993-1011).
gctatgatgcctccttata

SEQ ID NO: 348718 - DNA, 19 bp, Homo sapiens
  siRNA target sequence for XTP2 (NM_015172.2,994-1012).
ctatgatgcctccttatat

SEQ ID NO: 348719 - DNA, 19 bp, Homo sapiens
  siRNA target sequence for XTP2 (NM_015172.2,1020-1038).
cagtatccgaggatgacat

SEQ ID NO: 348720 - DNA, 19 bp, Homo sapiens
  siRNA target sequence for XTP2 (NM_015172.2,1022-1040).
gtatccgaggatgacatat

SEQ ID NO: 348721 - DNA, 19 bp, Homo sapiens
  siRNA target sequence for XTP2 (NM_015172.2,1034-1052).
gacatatcctcctctacat

SEQ ID NO: 348722 - DNA, 19 bp, Homo sapiens
  siRNA target sequence for XTP2 (NM_015172.2,1047-1065).
ctacatggtcccatgagat

SEQ ID NO: 348723 - DNA, 19 bp, Homo sapiens
  siRNA target sequence for XTP2 (NM_015172.2,1140-1158).
gaacgcccatccattctta

SEQ ID NO: 348724 - DNA, 19 bp, Homo sapiens
  siRNA target sequence for XTP2 (NM_015172.2,1175-1193).
ggagcttgataaatttgat

SEQ ID NO: 348725 - DNA, 19 bp, Homo sapiens
  siRNA target sequence for XTP2 (NM_015172.2,1228-1246).
gtgctcagatggaagtaga

SEQ ID NO: 348726 - DNA, 19 bp, Homo sapiens
  siRNA target sequence for XTP2 (NM_015172.2,1230-1248).
gctcagatggaagtagatt

SEQ ID NO: 348727 - DNA, 19 bp, Homo sapiens
  siRNA target sequence for XTP2 (NM_015172.2,1288-1306).
gaagtaacagtcctaaaga

SEQ ID NO: 348728 - DNA, 19 bp, Homo sapiens
  siRNA target sequence for XTP2 (NM_015172.2,1408-1426).
cccaaccatcagtagcaaa

SEQ ID NO: 348729 - DNA, 19 bp, Homo sapiens
  siRNA target sequence for XTP2 (NM_015172.2,1409-1427).
ccaaccatcagtagcaaaa

SEQ ID NO: 348730 - DNA, 19 bp, Homo sapiens
  siRNA target sequence for XTP2 (NM_015172.2,1458-1476).
caggaacgtggaacatctt

SEQ ID NO: 348731 - DNA, 19 bp, Homo sapiens
  siRNA target sequence for XTP2 (NM_015172.2,1460-1478).
ggaacgtggaacatcttca

SEQ ID NO: 348732 - DNA, 19 bp, Homo sapiens
  siRNA target sequence for XTP2 (NM_015172.2,1601-1619).
gaagcaaagacgaagacaa

SEQ ID NO: 348733 - DNA, 19 bp, Homo sapiens
  siRNA target sequence for XTP2 (NM_015172.2,1611-1629).
cgaagacaacaatcagaaa

SEQ ID NO: 348734 - DNA, 19 bp, Homo sapiens
  siRNA target sequence for XTP2 (NM_015172.2,1704-1722).
gcttgtgcggagaaactga

SEQ ID NO: 348735 - DNA, 19 bp, Homo sapiens
  siRNA target sequence for XTP2 (NM_015172.2,1705-1723).
cttgtgcggagaaactgaa

SEQ ID NO: 348736 - DNA, 19 bp, Homo sapiens
  siRNA target sequence for XTP2 (NM_015172.2,1710-1728).
gcggagaaactgaaacgat

SEQ ID NO: 348737 - DNA, 19 bp, Homo sapiens
  siRNA target sequence for XTP2 (NM_015172.2,1809-1827).
cgtgagaaagaacttgaaa

SEQ ID NO: 348738 - DNA, 19 bp, Homo sapiens
  siRNA target sequence for XTP2 (NM_015172.2,1965-1983).
ctagaacggcagaaagaaa

SEQ ID NO: 348739 - DNA, 19 bp, Homo sapiens
  siRNA target sequence for XTP2 (NM_015172.2,2133-2151).
gaggaggaacccgttttca

SEQ ID NO: 348740 - DNA, 19 bp, Homo sapiens
  siRNA target sequence for XTP2 (NM_015172.2,2135-2153).
ggaggaacccgttttcact

SEQ ID NO: 348741 - DNA, 19 bp, Homo sapiens
  siRNA target sequence for XTP2 (NM_015172.2,2160-2178).
gacagcaatcgcagtgaaa

SEQ ID NO: 348742 - DNA, 19 bp, Homo sapiens
  siRNA target sequence for XTP2 (NM_015172.2,2165-2183).
caatcgcagtgaaaaggaa

SEQ ID NO: 348743 - DNA, 19 bp, Homo sapiens
  siRNA target sequence for XTP2 (NM_015172.2,2241-2259).
gtattatctggctatttca

SEQ ID NO: 348744 - DNA, 19 bp, Homo sapiens
  siRNA target sequence for XTP2 (NM_015172.2,2336-2354).
gcaacagcaaggtgtactt

SEQ ID NO: 348745 - DNA, 19 bp, Homo sapiens
  siRNA target sequence for XTP2 (NM_015172.2,2543-2561).
cattcatcctggaatgatt

SEQ ID NO: 348746 - DNA, 19 bp, Homo sapiens
  siRNA target sequence for XTP2 (NM_015172.2,2562-2580).
cctcctaaaccattaatga

SEQ ID NO: 348747 - DNA, 19 bp, Homo sapiens
  siRNA target sequence for XTP2 (NM_015172.2,2595-2613).
gaagggtcaccgaacagtt

SEQ ID NO: 348748 - DNA, 19 bp, Homo sapiens
  siRNA target sequence for XTP2 (NM_015172.2,2618-2636).
gtcatttgagcatatagct

SEQ ID NO: 348749 - DNA, 19 bp, Homo sapiens
  siRNA target sequence for XTP2 (NM_015172.2,2643-2661).
gcaagagatcacgcaattt

SEQ ID NO: 348750 - DNA, 19 bp, Homo sapiens
  siRNA target sequence for XTP2 (NM_015172.2,2724-2742).
gcaactactcccaaagcaa

SEQ ID NO: 348751 - DNA, 19 bp, Homo sapiens
  siRNA target sequence for XTP2 (NM_015172.2,2802-2820).
gcttattctgtagaacata

SEQ ID NO: 348752 - DNA, 19 bp, Homo sapiens
  siRNA target sequence for XTP2 (NM_015172.2,2838-2856).
ccaaaggcagactttatca

SEQ ID NO: 348753 - DNA, 19 bp, Homo sapiens
  siRNA target sequence for XTP2 (NM_015172.2,2871-2889).
gcacaagtacaaaagtttt

SEQ ID NO: 348754 - DNA, 19 bp, Homo sapiens
  siRNA target sequence for XTP2 (NM_015172.2,2893-2911).
gcagatctgtggaagatgt

SEQ ID NO: 348755 - DNA, 19 bp, Homo sapiens
  siRNA target sequence for XTP2 (NM_015172.2,2894-2912).
cagatctgtggaagatgtt

SEQ ID NO: 348756 - DNA, 19 bp, Homo sapiens
  siRNA target sequence for XTP2 (NM_015172.2,2919-2937).
caccatactgatgcaaata

SEQ ID NO: 348757 - DNA, 19 bp, Homo sapiens
  siRNA target sequence for XTP2 (NM_015172.2,2921-2939).
ccatactgatgcaaataat

SEQ ID NO: 348758 - DNA, 19 bp, Homo sapiens
  siRNA target sequence for XTP2 (NM_015172.2,2996-3014).
gcggatttcagctgtagaa

SEQ ID NO: 348759 - DNA, 19 bp, Homo sapiens
  siRNA target sequence for XTP2 (NM_015172.2,3018-3036).
cagccttcccggaaaagaa

SEQ ID NO: 348760 - DNA, 19 bp, Homo sapiens
  siRNA target sequence for XTP2 (NM_015172.2,3020-3038).
gccttcccggaaaagaagt

SEQ ID NO: 348761 - DNA, 19 bp, Homo sapiens
  siRNA target sequence for XTP2 (NM_015172.2,3090-3108).
ccatctgcaggcattccta

SEQ ID NO: 348762 - DNA, 19 bp, Homo sapiens
  siRNA target sequence for XTP2 (NM_015172.2,3094-3112).
ctgcaggcattcctaaagt

SEQ ID NO: 348763 - DNA, 19 bp, Homo sapiens
  siRNA target sequence for XTP2 (NM_015172.2,3096-3114).
gcaggcattcctaaagtaa

SEQ ID NO: 348764 - DNA, 19 bp, Homo sapiens
  siRNA target sequence for XTP2 (NM_015172.2,3179-3197).
ctttatacgatcttctgaa

SEQ ID NO: 348765 - DNA, 19 bp, Homo sapiens
  siRNA target sequence for XTP2 (NM_015172.2,3252-3270).
cgaccaagctctaacagaa

SEQ ID NO: 348766 - DNA, 19 bp, Homo sapiens
  siRNA target sequence for XTP2 (NM_015172.2,3285-3303).
gatagacctgtgagaagat

SEQ ID NO: 348767 - DNA, 19 bp, Homo sapiens
  siRNA target sequence for XTP2 (NM_015172.2,3298-3316).
gaagatcaggtcccattaa

SEQ ID NO: 348768 - DNA, 19 bp, Homo sapiens
  siRNA target sequence for XTP2 (NM_015172.2,3321-3339).
cctgtacttagagatatga

SEQ ID NO: 348769 - DNA, 19 bp, Homo sapiens
  siRNA target sequence for XTP2 (NM_015172.2,3322-3340).
ctgtacttagagatatgaa

SEQ ID NO: 348770 - DNA, 19 bp, Homo sapiens
  siRNA target sequence for XTP2 (NM_015172.2,3381-3399).
gccgaaaaggtcactgaaa

SEQ ID NO: 348771 - DNA, 19 bp, Homo sapiens
  siRNA target sequence for XTP2 (NM_015172.2,3382-3400).
ccgaaaaggtcactgaaaa

SEQ ID NO: 348772 - DNA, 19 bp, Homo sapiens
  siRNA target sequence for XTP2 (NM_015172.2,3389-3407).
ggtcactgaaaaagtagtt

SEQ ID NO: 348773 - DNA, 19 bp, Homo sapiens
  siRNA target sequence for XTP2 (NM_015172.2,3488-3506).
gtcagttccaccaccaatt

SEQ ID NO: 348774 - DNA, 19 bp, Homo sapiens
  siRNA target sequence for XTP2 (NM_015172.2,3541-3559).
ctgcaactttggctcaaaa

SEQ ID NO: 348775 - DNA, 19 bp, Homo sapiens
  siRNA target sequence for XTP2 (NM_015172.2,3587-3605).
ggaacctgtgagtactgtt

SEQ ID NO: 348776 - DNA, 19 bp, Homo sapiens
  siRNA target sequence for XTP2 (NM_015172.2,3615-3633).
cctgcagttaagactgtaa

SEQ ID NO: 348777 - DNA, 19 bp, Homo sapiens
  siRNA target sequence for XTP2 (NM_015172.2,3616-3634).
ctgcagttaagactgtaaa

SEQ ID NO: 348778 - DNA, 19 bp, Homo sapiens
  siRNA target sequence for XTP2 (NM_015172.2,3619-3637).
cagttaagactgtaaacca

SEQ ID NO: 348779 - DNA, 19 bp, Homo sapiens
  siRNA target sequence for XTP2 (NM_015172.2,3628-3646).
ctgtaaaccaacagactat

SEQ ID NO: 348780 - DNA, 19 bp, Homo sapiens
  siRNA target sequence for XTP2 (NM_015172.2,3647-3665).
ggcagcaccagtagtcaaa

SEQ ID NO: 348781 - DNA, 19 bp, Homo sapiens
  siRNA target sequence for XTP2 (NM_015172.2,3649-3667).
cagcaccagtagtcaaaga

SEQ ID NO: 348782 - DNA, 19 bp, Homo sapiens
  siRNA target sequence for XTP2 (NM_015172.2,3713-3731).
gaggcctcgaccagattca

SEQ ID NO: 348783 - DNA, 19 bp, Homo sapiens
  siRNA target sequence for XTP2 (NM_015172.2,3716-3734).
gcctcgaccagattcaaga

SEQ ID NO: 348784 - DNA, 19 bp, Homo sapiens
  siRNA target sequence for XTP2 (NM_015172.2,3767-3785).
caggacctattggaaagaa

SEQ ID NO: 348785 - DNA, 19 bp, Homo sapiens
  siRNA target sequence for XTP2 (NM_015172.2,3826-3844).
gtcgaggccgaggtgaata

SEQ ID NO: 348786 - DNA, 19 bp, Homo sapiens
  siRNA target sequence for XTP2 (NM_015172.2,3828-3846).
cgaggccgaggtgaatatt

SEQ ID NO: 348787 - DNA, 19 bp, Homo sapiens
  siRNA target sequence for XTP2 (NM_015172.2,3831-3849).
ggccgaggtgaatattact

SEQ ID NO: 348788 - DNA, 19 bp, Homo sapiens
  siRNA target sequence for XTP2 (NM_015172.2,3851-3869).
cagaggtcgaagctataga

SEQ ID NO: 348789 - DNA, 19 bp, Homo sapiens
  siRNA target sequence for XTP2 (NM_015172.2,3901-3919).
ggggacacactcgagatta

SEQ ID NO: 348790 - DNA, 19 bp, Homo sapiens
  siRNA target sequence for XTP2 (NM_015172.2,3902-3920).
gggacacactcgagattat

SEQ ID NO: 348791 - DNA, 19 bp, Homo sapiens
  siRNA target sequence for XTP2 (NM_015172.2,3912-3930).
cgagattatcctcagtata

SEQ ID NO: 348792 - DNA, 19 bp, Homo sapiens
  siRNA target sequence for XTP2 (NM_015172.2,3921-3939).
cctcagtatagagacaata

SEQ ID NO: 348793 - DNA, 19 bp, Homo sapiens
  siRNA target sequence for XTP2 (NM_015172.2,3922-3940).
ctcagtatagagacaataa

SEQ ID NO: 348794 - DNA, 19 bp, Homo sapiens
  siRNA target sequence for XTP2 (NM_015172.2,4007-4025).
gagctctgattttgaagtt

SEQ ID NO: 348795 - DNA, 19 bp, Homo sapiens
  siRNA target sequence for XTP2 (NM_015172.2,4095-4113).
gacaaggacagtttaagta

SEQ ID NO: 348796 - DNA, 19 bp, Homo sapiens
  siRNA target sequence for XTP2 (NM_015172.2,4117-4135).
gcaaacttcccaaaagaga

SEQ ID NO: 348797 - DNA, 19 bp, Homo sapiens
  siRNA target sequence for XTP2 (NM_015172.2,4136-4154).
ggaacggcctgaaaacaaa

SEQ ID NO: 348798 - DNA, 19 bp, Homo sapiens
  siRNA target sequence for XTP2 (NM_015172.2,4137-4155).
gaacggcctgaaaacaaaa

SEQ ID NO: 348799 - DNA, 19 bp, Homo sapiens
  siRNA target sequence for XTP2 (NM_015172.2,4174-4192).
cttctttcaagcctgataa

SEQ ID NO: 348800 - DNA, 19 bp, Homo sapiens
  siRNA target sequence for XTP2 (NM_015172.2,4177-4195).
ctttcaagcctgataatca

SEQ ID NO: 348801 - DNA, 19 bp, Homo sapiens
  siRNA target sequence for XTP2 (NM_015172.2,4181-4199).
caagcctgataatcatgtt

SEQ ID NO: 348802 - DNA, 19 bp, Homo sapiens
  siRNA target sequence for XTP2 (NM_015172.2,4217-4235).
gctagaaaagccttatgta

SEQ ID NO: 348803 - DNA, 19 bp, Homo sapiens
  siRNA target sequence for XTP2 (NM_015172.2,4218-4236).
ctagaaaagccttatgtaa

SEQ ID NO: 348804 - DNA, 19 bp, Homo sapiens
  siRNA target sequence for XTP2 (NM_015172.2,4238-4256).
ggatgacgataaagctaaa

SEQ ID NO: 348805 - DNA, 19 bp, Homo sapiens
  siRNA target sequence for XTP2 (NM_015172.2,4293-4311).
ggcagagggggaacattca

SEQ ID NO: 348806 - DNA, 19 bp, Homo sapiens
  siRNA target sequence for XTP2 (NM_015172.2,4347-4365).
cgcccttccactttacgaa

SEQ ID NO: 348807 - DNA, 19 bp, Homo sapiens
  siRNA target sequence for XTP2 (NM_015172.2,4369-4387).
cagcttatcgggacaatca

SEQ ID NO: 348808 - DNA, 19 bp, Homo sapiens
  siRNA target sequence for XTP2 (NM_015172.2,4371-4389).
gcttatcgggacaatcagt

SEQ ID NO: 348809 - DNA, 19 bp, Homo sapiens
  siRNA target sequence for XTP2 (NM_015172.2,4446-4464).
catgagcagtttattccta

SEQ ID NO: 348810 - DNA, 19 bp, Homo sapiens
  siRNA target sequence for XTP2 (NM_015172.2,4451-4469).
gcagtttattcctatagca

SEQ ID NO: 348811 - DNA, 19 bp, Homo sapiens
  siRNA target sequence for XTP2 (NM_015172.2,4473-4491).
gataaacgacctccaaaat

SEQ ID NO: 348812 - DNA, 19 bp, Homo sapiens
  siRNA target sequence for XTP2 (NM_015172.2,4546-4564).
gaccaccaaggcaagacaa

SEQ ID NO: 348813 - DNA, 19 bp, Homo sapiens
  siRNA target sequence for XTP2 (NM_015172.2,4560-4578).
gacaagccacctcgattta

SEQ ID NO: 348814 - DNA, 19 bp, Homo sapiens
  siRNA target sequence for XTP2 (NM_015172.2,4562-4580).
caagccacctcgatttaga

SEQ ID NO: 348815 - DNA, 19 bp, Homo sapiens
  siRNA target sequence for XTP2 (NM_015172.2,4573-4591).
gatttagacggctaagaga

SEQ ID NO: 348816 - DNA, 19 bp, Homo sapiens
  siRNA target sequence for XTP2 (NM_015172.2,4622-4640).
ggtagcagtgcccacaaat

SEQ ID NO: 348817 - DNA, 19 bp, Homo sapiens
  siRNA target sequence for XTP2 (NM_015172.2,4684-4702).
gggatatttccgggaataa

SEQ ID NO: 348818 - DNA, 19 bp, Homo sapiens
  siRNA target sequence for XTP2 (NM_015172.2,4703-4721).
gacaccagatttatctaat

SEQ ID NO: 348819 - DNA, 19 bp, Homo sapiens
  siRNA target sequence for XTP2 (NM_015172.2,4820-4838).
cttgaatgcacaaacagtt

SEQ ID NO: 348820 - DNA, 19 bp, Homo sapiens
  siRNA target sequence for XTP2 (NM_015172.2,4823-4841).
gaatgcacaaacagttgta

SEQ ID NO: 348821 - DNA, 19 bp, Homo sapiens
  siRNA target sequence for XTP2 (NM_015172.2,4866-4884).
ccaaagagggaaattgcaa

SEQ ID NO: 348822 - DNA, 19 bp, Homo sapiens
  siRNA target sequence for XTP2 (NM_015172.2,4871-4889).
gagggaaattgcaaagaga

SEQ ID NO: 348823 - DNA, 19 bp, Homo sapiens
  siRNA target sequence for XTP2 (NM_015172.2,4922-4940).
gaatcgacgtggcaacaat

SEQ ID NO: 348824 - DNA, 19 bp, Homo sapiens
  siRNA target sequence for XTP2 (NM_015172.2,4990-5008).
gaagtggcccaccatcaaa

SEQ ID NO: 348825 - DNA, 19 bp, Homo sapiens
  siRNA target sequence for XTP2 (NM_015172.2,5015-5033).
gaagagagggccatttgat

SEQ ID NO: 348826 - DNA, 19 bp, Homo sapiens
  siRNA target sequence for XTP2 (NM_015172.2,5093-5111).
ggaaggagtacctaatggt

SEQ ID NO: 348827 - DNA, 19 bp, Homo sapiens
  siRNA target sequence for XTP2 (NM_015172.2,5094-5112).
gaaggagtacctaatggta

SEQ ID NO: 348828 - DNA, 19 bp, Homo sapiens
  siRNA target sequence for XTP2 (NM_015172.2,5104-5122).
ctaatggtacaggacaaaa

SEQ ID NO: 348829 - DNA, 19 bp, Homo sapiens
  siRNA target sequence for XTP2 (NM_015172.2,5123-5141).
gaactccaaagattctact

SEQ ID NO: 348830 - DNA, 19 bp, Homo sapiens
  siRNA target sequence for XTP2 (NM_015172.2,5160-5178).
cccaaaccaggccctaaaa

SEQ ID NO: 348831 - DNA, 19 bp, Homo sapiens
  siRNA target sequence for XTP2 (NM_015172.2,5167-5185).
caggccctaaaaaaccaaa

SEQ ID NO: 348832 - DNA, 19 bp, Homo sapiens
  siRNA target sequence for XTP2 (NM_015172.2,5200-5218).
ctctatcacagtttgatct

SEQ ID NO: 348833 - DNA, 19 bp, Homo sapiens
  siRNA target sequence for XTP2 (NM_015172.2,5206-5224).
cacagtttgatctcaacaa

SEQ ID NO: 348834 - DNA, 19 bp, Homo sapiens
  siRNA target sequence for XTP2 (NM_015172.2,5208-5226).
cagtttgatctcaacaatt

SEQ ID NO: 348835 - DNA, 19 bp, Homo sapiens
  siRNA target sequence for XTP2 (NM_015172.2,5222-5240).
caattatgcaagtgttgtt

SEQ ID NO: 348836 - DNA, 19 bp, Homo sapiens
  siRNA target sequence for XTP2 (NM_015172.2,5233-5251).
gtgttgttataattgatga

SEQ ID NO: 348837 - DNA, 19 bp, Homo sapiens
  siRNA target sequence for XTP2 (NM_015172.2,5274-5292).
gaagatccccagtcaaatt

SEQ ID NO: 348838 - DNA, 19 bp, Homo sapiens
  siRNA target sequence for XTP2 (NM_015172.2,5387-5405).
ggtctggaacaaaaagaat

SEQ ID NO: 348839 - DNA, 19 bp, Homo sapiens
  siRNA target sequence for XTP2 (NM_015172.2,5418-5436).
ggaagaagccagacttcta

SEQ ID NO: 348840 - DNA, 19 bp, Homo sapiens
  siRNA target sequence for XTP2 (NM_015172.2,5571-5589).
ccacttccggcaaccttaa

SEQ ID NO: 348841 - DNA, 19 bp, Homo sapiens
  siRNA target sequence for XTP2 (NM_015172.2,5617-5635).
cggttccagcctcaacttt

SEQ ID NO: 348842 - DNA, 19 bp, Homo sapiens
  siRNA target sequence for XTP2 (NM_015172.2,5742-5760).
gcagctataacctcttctt

SEQ ID NO: 348843 - DNA, 19 bp, Homo sapiens
  siRNA target sequence for XTP2 (NM_015172.2,6123-6141).
caaccaccaccatcaatta

SEQ ID NO: 348844 - DNA, 19 bp, Homo sapiens
  siRNA target sequence for XTP2 (NM_015172.2,6160-6178).
cacctaatggcacagatta

SEQ ID NO: 348845 - DNA, 19 bp, Homo sapiens
  siRNA target sequence for XTP2 (NM_015172.2,6163-6181).
ctaatggcacagattatgt

SEQ ID NO: 348846 - DNA, 19 bp, Homo sapiens
  siRNA target sequence for XTP2 (NM_015172.2,6220-6238).
gcactctgacagctgaatt

SEQ ID NO: 348847 - DNA, 19 bp, Homo sapiens
  siRNA target sequence for XTP2 (NM_015172.2,6221-6239).
cactctgacagctgaatta

SEQ ID NO: 348848 - DNA, 19 bp, Homo sapiens
  siRNA target sequence for XTP2 (NM_015172.2,6231-6249).
gctgaattatgggataaca

SEQ ID NO: 348849 - DNA, 19 bp, Homo sapiens
  siRNA target sequence for XTP2 (NM_015172.2,6232-6250).
ctgaattatgggataacaa

SEQ ID NO: 348850 - DNA, 19 bp, Homo sapiens
  siRNA target sequence for XTP2 (NM_015172.2,6261-6279).
ccagctgtgctgaatgata

SEQ ID NO: 348851 - DNA, 19 bp, Homo sapiens
  siRNA target sequence for XTP2 (NM_015172.2,6267-6285).
gtgctgaatgatatctcta

SEQ ID NO: 348852 - DNA, 19 bp, Homo sapiens
  siRNA target sequence for XTP2 (NM_015172.2,6287-6305).
gaaattaggtcccattagt

SEQ ID NO: 348853 - DNA, 19 bp, Homo sapiens
  siRNA target sequence for XTP2 (NM_015172.2,6342-6360).
cccttaacatcgtttggat

SEQ ID NO: 348854 - DNA, 19 bp, Homo sapiens
  siRNA target sequence for XTP2 (NM_015172.2,6438-6456).
gctccagcctcaaatggaa

SEQ ID NO: 348855 - DNA, 19 bp, Homo sapiens
  siRNA target sequence for XTP2 (NM_015172.2,6439-6457).
ctccagcctcaaatggaaa

SEQ ID NO: 348856 - DNA, 19 bp, Homo sapiens
  siRNA target sequence for XTP2 (NM_015172.2,6442-6460).
cagcctcaaatggaaatga

SEQ ID NO: 348857 - DNA, 19 bp, Homo sapiens
  siRNA target sequence for XTP2 (NM_015172.2,6485-6503).
ggaaaaatctgctgacaaa

SEQ ID NO: 348858 - DNA, 19 bp, Homo sapiens
  siRNA target sequence for XTP2 (NM_015172.2,6538-6556).
cacgagcaggacctatcaa

SEQ ID NO: 348859 - DNA, 19 bp, Homo sapiens
  siRNA target sequence for XTP2 (NM_015172.2,6573-6591).
gatttgagtccagtagaaa

SEQ ID NO: 348860 - DNA, 19 bp, Homo sapiens
  siRNA target sequence for XTP2 (NM_015172.2,6798-6816).
gaatatggtactaatgcaa

SEQ ID NO: 348861 - DNA, 19 bp, Homo sapiens
  siRNA target sequence for XTP2 (NM_015172.2,6818-6836).
ggagtctgtaacagactat

SEQ ID NO: 348862 - DNA, 19 bp, Homo sapiens
  siRNA target sequence for XTP2 (NM_015172.2,6859-6877).
ctaacaccgtggctactaa

SEQ ID NO: 348863 - DNA, 19 bp, Homo sapiens
  siRNA target sequence for XTP2 (NM_015172.2,6887-6905).
gatggaggatactttggtt

SEQ ID NO: 348864 - DNA, 19 bp, Homo sapiens
  siRNA target sequence for XTP2 (NM_015172.2,6893-6911).
ggatactttggttaataat

SEQ ID NO: 348865 - DNA, 19 bp, Homo sapiens
  siRNA target sequence for XTP2 (NM_015172.2,6938-6956).
ccctaagagggagactata

SEQ ID NO: 348866 - DNA, 19 bp, Homo sapiens
  siRNA target sequence for XTP2 (NM_015172.2,6940-6958).
ctaagagggagactataca

SEQ ID NO: 348867 - DNA, 19 bp, Homo sapiens
  siRNA target sequence for XTP2 (NM_015172.2,6965-6983).
ctccagcctaacttcagtt

SEQ ID NO: 348868 - DNA, 19 bp, Homo sapiens
  siRNA target sequence for XTP2 (NM_015172.2,6981-6999).
gttcctcccactactttca

SEQ ID NO: 348869 - DNA, 19 bp, Homo sapiens
  siRNA target sequence for XTP2 (NM_015172.2,7028-7046).
caaagcatgggagaattct

SEQ ID NO: 348870 - DNA, 19 bp, Homo sapiens
  siRNA target sequence for XTP2 (NM_015172.2,7036-7054).
gggagaattctccaaatgt

SEQ ID NO: 348871 - DNA, 19 bp, Homo sapiens
  siRNA target sequence for XTP2 (NM_015172.2,7037-7055).
ggagaattctccaaatgta

SEQ ID NO: 348872 - DNA, 19 bp, Homo sapiens
  siRNA target sequence for XTP2 (NM_015172.2,7082-7100).
cacagcacctccaattgca

SEQ ID NO: 348873 - DNA, 19 bp, Homo sapiens
  siRNA target sequence for XTP2 (NM_015172.2,7125-7143).
ggaccaagcactgctaatt

SEQ ID NO: 348874 - DNA, 19 bp, Homo sapiens
  siRNA target sequence for XTP2 (NM_015172.2,7126-7144).
gaccaagcactgctaatta

SEQ ID NO: 348875 - DNA, 19 bp, Homo sapiens
  siRNA target sequence for XTP2 (NM_015172.2,7128-7146).
ccaagcactgctaattaca

SEQ ID NO: 348876 - DNA, 19 bp, Homo sapiens
  siRNA target sequence for XTP2 (NM_015172.2,7129-7147).
caagcactgctaattacaa

SEQ ID NO: 348877 - DNA, 19 bp, Homo sapiens
  siRNA target sequence for XTP2 (NM_015172.2,7135-7153).
ctgctaattacaattcgtt

SEQ ID NO: 348878 - DNA, 19 bp, Homo sapiens
  siRNA target sequence for XTP2 (NM_015172.2,7215-7233).
ggagctggtacatacacta

SEQ ID NO: 348879 - DNA, 19 bp, Homo sapiens
  siRNA target sequence for XTP2 (NM_015172.2,7235-7253).
ctcttctttgagcacaaaa

SEQ ID NO: 348880 - DNA, 19 bp, Homo sapiens
  siRNA target sequence for XTP2 (NM_015172.2,7262-7280).
cacatcggaccctccaaat

SEQ ID NO: 348881 - DNA, 19 bp, Homo sapiens
  siRNA target sequence for XTP2 (NM_015172.2,7264-7282).
catcggaccctccaaatat

SEQ ID NO: 348882 - DNA, 19 bp, Homo sapiens
  siRNA target sequence for XTP2 (NM_015172.2,7268-7286).
ggaccctccaaatatttgt

SEQ ID NO: 348883 - DNA, 19 bp, Homo sapiens
  siRNA target sequence for XTP2 (NM_015172.2,7269-7287).
gaccctccaaatatttgta

SEQ ID NO: 348884 - DNA, 19 bp, Homo sapiens
  siRNA target sequence for XTP2 (NM_015172.2,7271-7289).
ccctccaaatatttgtaaa

SEQ ID NO: 348885 - DNA, 19 bp, Homo sapiens
  siRNA target sequence for XTP2 (NM_015172.2,7352-7370).
ctgtatgccttcccttatt

SEQ ID NO: 348886 - DNA, 19 bp, Homo sapiens
  siRNA target sequence for XTP2 (NM_015172.2,7422-7440).
caaatcccagccttctata

SEQ ID NO: 348887 - DNA, 19 bp, Homo sapiens
  siRNA target sequence for XTP2 (NM_015172.2,7548-7566).
cagattccaatccctattt

SEQ ID NO: 348888 - DNA, 19 bp, Homo sapiens
  siRNA target sequence for XTP2 (NM_015172.2,7550-7568).
gattccaatccctatttat

SEQ ID NO: 348889 - DNA, 19 bp, Homo sapiens
  siRNA target sequence for XTP2 (NM_015172.2,7643-7661).
gttcagctcctcacttcaa

SEQ ID NO: 348890 - DNA, 19 bp, Homo sapiens
  siRNA target sequence for XTP2 (NM_015172.2,7648-7666).
gctcctcacttcaaccata

SEQ ID NO: 348891 - DNA, 19 bp, Homo sapiens
  siRNA target sequence for XTP2 (NM_015172.2,7652-7670).
ctcacttcaaccatataga

SEQ ID NO: 348892 - DNA, 19 bp, Homo sapiens
  siRNA target sequence for XTP2 (NM_015172.2,7672-7690).
ctcagccagcttttatgca

SEQ ID NO: 348893 - DNA, 19 bp, Homo sapiens
  siRNA target sequence for XTP2 (NM_015172.2,7674-7692).
cagccagcttttatgcaaa

SEQ ID NO: 348894 - DNA, 19 bp, Homo sapiens
  siRNA target sequence for XTP2 (NM_015172.2,7723-7741).
ctggtactgctattcacaa

SEQ ID NO: 348895 - DNA, 19 bp, Homo sapiens
  siRNA target sequence for XTP2 (NM_015172.2,7726-7744).
gtactgctattcacaactt

SEQ ID NO: 348896 - DNA, 19 bp, Homo sapiens
  siRNA target sequence for XTP2 (NM_015172.2,7815-7833).
cagcccattcctatattgt

SEQ ID NO: 348897 - DNA, 19 bp, Homo sapiens
  siRNA target sequence for XTP2 (NM_015172.2,7867-7885).
gaggttcccagctgattga

SEQ ID NO: 348898 - DNA, 19 bp, Homo sapiens
  siRNA target sequence for XTP2 (NM_015172.2,7898-7916).
ccaggccagagcaaatctt

SEQ ID NO: 348899 - DNA, 19 bp, Homo sapiens
  siRNA target sequence for XTP2 (NM_015172.2,7919-7937).
ccaggcctcaaatctttat

SEQ ID NO: 348900 - DNA, 19 bp, Homo sapiens
  siRNA target sequence for XTP2 (NM_015172.2,7955-7973).
gcctggtcagacaaatttt

SEQ ID NO: 348901 - DNA, 19 bp, Homo sapiens
  siRNA target sequence for XTP2 (NM_015172.2,7956-7974).
cctggtcagacaaattttt

SEQ ID NO: 348902 - DNA, 19 bp, Homo sapiens
  siRNA target sequence for XTP2 (NM_015172.2,7960-7978).
gtcagacaaatttttataa

SEQ ID NO: 348903 - DNA, 19 bp, Homo sapiens
  siRNA target sequence for XTP2 (NM_015172.2,7964-7982).
gacaaatttttataacact

SEQ ID NO: 348904 - DNA, 19 bp, Homo sapiens
  siRNA target sequence for XTP2 (NM_015172.2,8006-8024).
gcaggttacagtaccttta

SEQ ID NO: 348905 - DNA, 19 bp, Homo sapiens
  siRNA target sequence for XTP2 (NM_015172.2,8009-8027).
ggttacagtacctttacca

SEQ ID NO: 348906 - DNA, 19 bp, Homo sapiens
  siRNA target sequence for XTP2 (NM_015172.2,8045-8063).
gcctaattttggatctaca

SEQ ID NO: 348907 - DNA, 19 bp, Homo sapiens
  siRNA target sequence for XTP2 (NM_015172.2,8059-8077).
ctacagggcaacctctaat

SEQ ID NO: 348908 - DNA, 19 bp, Homo sapiens
  siRNA target sequence for XTP2 (NM_015172.2,8064-8082).
gggcaacctctaattgctt

SEQ ID NO: 348909 - DNA, 19 bp, Homo sapiens
  siRNA target sequence for XTP2 (NM_015172.2,8165-8183).
ccagcctttcagaggatta

SEQ ID NO: 348910 - DNA, 19 bp, Homo sapiens
  siRNA target sequence for XTP2 (NM_015172.2,8199-8217).
cagcatagcatgattgcaa

SEQ ID NO: 348911 - DNA, 19 bp, Homo sapiens
  siRNA target sequence for XTP2 (NM_015172.2,8306-8324).
caccacaccaacatctagt

SEQ ID NO: 348912 - DNA, 19 bp, Homo sapiens
  siRNA target sequence for XTP2 (NM_015172.2,8323-8341).
gtccttccgggctacttct

SEQ ID NO: 348913 - DNA, 19 bp, Homo sapiens
  siRNA target sequence for XTP2 (NM_015172.2,8326-8344).
cttccgggctacttctaca

SEQ ID NO: 348914 - DNA, 19 bp, Homo sapiens
  siRNA target sequence for XTP2 (NM_015172.2,8329-8347).
ccgggctacttctacaagt

SEQ ID NO: 348915 - DNA, 19 bp, Homo sapiens
  siRNA target sequence for KIAA0483 (NM_015176.1,183-201).
cggaccagctgcctcaaaa

SEQ ID NO: 348916 - DNA, 19 bp, Homo sapiens
  siRNA target sequence for KIAA0483 (NM_015176.1,236-254).
gagaacatcctcagcttta

SEQ ID NO: 348917 - DNA, 19 bp, Homo sapiens
  siRNA target sequence for KIAA0483 (NM_015176.1,275-293).
cagctccgcctggtttgta

SEQ ID NO: 348918 - DNA, 19 bp, Homo sapiens
  siRNA target sequence for KIAA0483 (NM_015176.1,277-295).
gctccgcctggtttgtaaa

SEQ ID NO: 348919 - DNA, 19 bp, Homo sapiens
  siRNA target sequence for KIAA0483 (NM_015176.1,278-296).
ctccgcctggtttgtaaaa

SEQ ID NO: 348920 - DNA, 19 bp, Homo sapiens
  siRNA target sequence for KIAA0483 (NM_015176.1,282-300).
gcctggtttgtaaaagaat

SEQ ID NO: 348921 - DNA, 19 bp, Homo sapiens
  siRNA target sequence for KIAA0483 (NM_015176.1,308-326).
gtctgccagagaatgttga

SEQ ID NO: 348922 - DNA, 19 bp, Homo sapiens
  siRNA target sequence for KIAA0483 (NM_015176.1,310-328).
ctgccagagaatgttgaat

SEQ ID NO: 348923 - DNA, 19 bp, Homo sapiens
  siRNA target sequence for KIAA0483 (NM_015176.1,346-364).
ggagaggtaccataatcta

SEQ ID NO: 348924 - DNA, 19 bp, Homo sapiens
  siRNA target sequence for KIAA0483 (NM_015176.1,347-365).
gagaggtaccataatctat

SEQ ID NO: 348925 - DNA, 19 bp, Homo sapiens
  siRNA target sequence for KIAA0483 (NM_015176.1,351-369).
ggtaccataatctatgtca

SEQ ID NO: 348926 - DNA, 19 bp, Homo sapiens
  siRNA target sequence for KIAA0483 (NM_015176.1,355-373).
ccataatctatgtcagaaa

SEQ ID NO: 348927 - DNA, 19 bp, Homo sapiens
  siRNA target sequence for KIAA0483 (NM_015176.1,429-447).
ctcgtcatgcagacattct

SEQ ID NO: 348928 - DNA, 19 bp, Homo sapiens
  siRNA target sequence for KIAA0483 (NM_015176.1,535-553).
ggtgattgatgagatttat

SEQ ID NO: 348929 - DNA, 19 bp, Homo sapiens
  siRNA target sequence for KIAA0483 (NM_015176.1,554-572).
cgtgtgttgagatatgtca

SEQ ID NO: 348930 - DNA, 19 bp, Homo sapiens
  siRNA target sequence for KIAA0483 (NM_015176.1,555-573).
gtgtgttgagatatgtcaa

SEQ ID NO: 348931 - DNA, 19 bp, Homo sapiens
  siRNA target sequence for KIAA0483 (NM_015176.1,557-575).
gtgttgagatatgtcaatt

SEQ ID NO: 348932 - DNA, 19 bp, Homo sapiens
  siRNA target sequence for KIAA0483 (NM_015176.1,559-577).
gttgagatatgtcaattct

SEQ ID NO: 348933 - DNA, 19 bp, Homo sapiens
  siRNA target sequence for KIAA0483 (NM_015176.1,611-629).
caagaattaagggatatat

SEQ ID NO: 348934 - DNA, 19 bp, Homo sapiens
  siRNA target sequence for KIAA0483 (NM_015176.1,633-651).
ctatggcaatggagtactt

SEQ ID NO: 348935 - DNA, 19 bp, Homo sapiens
  siRNA target sequence for KIAA0483 (NM_015176.1,637-655).
ggcaatggagtactttgat

SEQ ID NO: 348936 - DNA, 19 bp, Homo sapiens
  siRNA target sequence for KIAA0483 (NM_015176.1,639-657).
caatggagtactttgatga

SEQ ID NO: 348937 - DNA, 19 bp, Homo sapiens
  siRNA target sequence for KIAA0483 (NM_015176.1,740-758).
ccgtctgcagccctaacaa

SEQ ID NO: 348938 - DNA, 19 bp, Homo sapiens
  siRNA target sequence for KIAA0483 (NM_015176.1,811-829).
ccagcagcaggttaaaaca

SEQ ID NO: 348939 - DNA, 19 bp, Homo sapiens
  siRNA target sequence for KIAA0483 (NM_015176.1,814-832).
gcagcaggttaaaacaaat

SEQ ID NO: 348940 - DNA, 19 bp, Homo sapiens
  siRNA target sequence for KIAA0483 (NM_015176.1,817-835).
gcaggttaaaacaaatggt

SEQ ID NO: 348941 - DNA, 19 bp, Homo sapiens
  siRNA target sequence for KIAA0483 (NM_015176.1,848-866).
gttctcaggcgtgaaattt

SEQ ID NO: 348942 - DNA, 19 bp, Homo sapiens
  siRNA target sequence for KIAA0483 (NM_015176.1,940-958).
ccagatcataggtgaacaa

SEQ ID NO: 348943 - DNA, 19 bp, Homo sapiens
  siRNA target sequence for KIAA0483 (NM_015176.1,941-959).
cagatcataggtgaacaaa

SEQ ID NO: 348944 - DNA, 19 bp, Homo sapiens
  siRNA target sequence for KIAA0483 (NM_015176.1,983-1001).
cgcaaactacgagaagtaa

SEQ ID NO: 348945 - DNA, 19 bp, Homo sapiens
  siRNA target sequence for KIAA0483 (NM_015176.1,984-1002).
gcaaactacgagaagtaat

SEQ ID NO: 348946 - DNA, 19 bp, Homo sapiens
  siRNA target sequence for KIAA0483 (NM_015176.1,1048-1066).
gtctcctcggaaacgaaaa

SEQ ID NO: 348947 - DNA, 19 bp, Homo sapiens
  siRNA target sequence for KIAA0483 (NM_015176.1,1070-1088).
gccacggaagccatagact

SEQ ID NO: 348948 - DNA, 19 bp, Homo sapiens
  siRNA target sequence for KIAA0483 (NM_015176.1,1076-1094).
gaagccatagactctctta

SEQ ID NO: 348949 - DNA, 19 bp, Homo sapiens
  siRNA target sequence for KIAA0483 (NM_015176.1,1080-1098).
ccatagactctcttaggaa

SEQ ID NO: 348950 - DNA, 19 bp, Homo sapiens
  siRNA target sequence for KIAA0690 (NM_015179.2,103-121).
ctggtgtctcagctaagtt

SEQ ID NO: 348951 - DNA, 19 bp, Homo sapiens
  siRNA target sequence for KIAA0690 (NM_015179.2,105-123).
ggtgtctcagctaagttga

SEQ ID NO: 348952 - DNA, 19 bp, Homo sapiens
  siRNA target sequence for KIAA0690 (NM_015179.2,616-634).
gccctgtgcttattaagaa

SEQ ID NO: 348953 - DNA, 19 bp, Homo sapiens
  siRNA target sequence for KIAA0690 (NM_015179.2,618-636).
cctgtgcttattaagaagt

SEQ ID NO: 348954 - DNA, 19 bp, Homo sapiens
  siRNA target sequence for KIAA0690 (NM_015179.2,864-882).
gtcctcaagggcagtgaat

SEQ ID NO: 348955 - DNA, 19 bp, Homo sapiens
  siRNA target sequence for KIAA0690 (NM_015179.2,1192-1210).
cggccctgtacgactatgt

SEQ ID NO: 348956 - DNA, 19 bp, Homo sapiens
  siRNA target sequence for KIAA0690 (NM_015179.2,1193-1211).
ggccctgtacgactatgtt

SEQ ID NO: 348957 - DNA, 19 bp, Homo sapiens
  siRNA target sequence for KIAA0690 (NM_015179.2,1209-1227).
gttcccagtgagaatgatt

SEQ ID NO: 348958 - DNA, 19 bp, Homo sapiens
  siRNA target sequence for KIAA0690 (NM_015179.2,1214-1232).
cagtgagaatgatttacaa

SEQ ID NO: 348959 - DNA, 19 bp, Homo sapiens
  siRNA target sequence for KIAA0690 (NM_015179.2,1309-1327).
gccacctccctcgcttttt

SEQ ID NO: 348960 - DNA, 19 bp, Homo sapiens
  siRNA target sequence for KIAA0690 (NM_015179.2,1313-1331).
cctccctcgcttttttgga

SEQ ID NO: 348961 - DNA, 19 bp, Homo sapiens
  siRNA target sequence for KIAA0690 (NM_015179.2,1314-1332).
ctccctcgcttttttggaa

SEQ ID NO: 348962 - DNA, 19 bp, Homo sapiens
  siRNA target sequence for KIAA0690 (NM_015179.2,1506-1524).
gagggcctgacgtacaaat

SEQ ID NO: 348963 - DNA, 19 bp, Homo sapiens
  siRNA target sequence for KIAA0690 (NM_015179.2,1510-1528).
gcctgacgtacaaattcca

SEQ ID NO: 348964 - DNA, 19 bp, Homo sapiens
  siRNA target sequence for KIAA0690 (NM_015179.2,1511-1529).
cctgacgtacaaattccat

SEQ ID NO: 348965 - DNA, 19 bp, Homo sapiens
  siRNA target sequence for KIAA0690 (NM_015179.2,1964-1982).
ctgcacaaggcctacagat

SEQ ID NO: 348966 - DNA, 19 bp, Homo sapiens
  siRNA target sequence for KIAA0690 (NM_015179.2,2125-2143).
gtcgctttgccaagaactt

SEQ ID NO: 348967 - DNA, 19 bp, Homo sapiens
  siRNA target sequence for KIAA0690 (NM_015179.2,2726-2744).
gatgggccatgctttccta

SEQ ID NO: 348968 - DNA, 19 bp, Homo sapiens
  siRNA target sequence for KIAA0690 (NM_015179.2,2732-2750).
ccatgctttcctaaggttt

SEQ ID NO: 348969 - DNA, 19 bp, Homo sapiens
  siRNA target sequence for KIAA0690 (NM_015179.2,2779-2797).
gctacctcgtcctgatcta

SEQ ID NO: 348970 - DNA, 19 bp, Homo sapiens
  siRNA target sequence for KIAA0690 (NM_015179.2,2853-2871).
cacctccttttcgagttta

SEQ ID NO: 348971 - DNA, 19 bp, Homo sapiens
  siRNA target sequence for KIAA0690 (NM_015179.2,2959-2977).
ctgcactgggcttcatcaa

SEQ ID NO: 348972 - DNA, 19 bp, Homo sapiens
  siRNA target sequence for KIAA0690 (NM_015179.2,3002-3020).
ggcgcacctggccaaacat

SEQ ID NO: 348973 - DNA, 19 bp, Homo sapiens
  siRNA target sequence for KIAA0690 (NM_015179.2,3110-3128).
catccgcaagtttggattt

SEQ ID NO: 348974 - DNA, 19 bp, Homo sapiens
  siRNA target sequence for KIAA0690 (NM_015179.2,3293-3311).
cattgaggagattttagct

SEQ ID NO: 348975 - DNA, 19 bp, Homo sapiens
  siRNA target sequence for KIAA0690 (NM_015179.2,3608-3626).
gatggctgacccaatggaa

SEQ ID NO: 348976 - DNA, 19 bp, Homo sapiens
  siRNA target sequence for KIAA0690 (NM_015179.2,3613-3631).
ctgacccaatggaagatgt

SEQ ID NO: 348977 - DNA, 19 bp, Homo sapiens
  siRNA target sequence for KIAA0690 (NM_015179.2,3881-3899).
gctgcagggacagttcaaa

SEQ ID NO: 348978 - DNA, 19 bp, Homo sapiens
  siRNA target sequence for SYNE2 (NM_015180.3,230-248).
gcttcccaccgaagatgaa

SEQ ID NO: 348979 - DNA, 19 bp, Homo sapiens
  siRNA target sequence for SYNE2 (NM_015180.3,262-280).
gcatcgacgatctccatat

SEQ ID NO: 348980 - DNA, 19 bp, Homo sapiens
  siRNA target sequence for SYNE2 (NM_015180.3,263-281).
catcgacgatctccatatt

SEQ ID NO: 348981 - DNA, 19 bp, Homo sapiens
  siRNA target sequence for SYNE2 (NM_015180.3,266-284).
cgacgatctccatatttca

SEQ ID NO: 348982 - DNA, 19 bp, Homo sapiens
  siRNA target sequence for SYNE2 (NM_015180.3,267-285).
gacgatctccatatttcat

SEQ ID NO: 348983 - DNA, 19 bp, Homo sapiens
  siRNA target sequence for SYNE2 (NM_015180.3,354-372).
cacacttctccctcagtta

SEQ ID NO: 348984 - DNA, 19 bp, Homo sapiens
  siRNA target sequence for SYNE2 (NM_015180.3,367-385).
cagttatatccgacctatt

SEQ ID NO: 348985 - DNA, 19 bp, Homo sapiens
  siRNA target sequence for SYNE2 (NM_015180.3,369-387).
gttatatccgacctattca

SEQ ID NO: 348986 - DNA, 19 bp, Homo sapiens
  siRNA target sequence for SYNE2 (NM_015180.3,377-395).
cgacctattcacagacatt

SEQ ID NO: 348987 - DNA, 19 bp, Homo sapiens
  siRNA target sequence for SYNE2 (NM_015180.3,378-396).
gacctattcacagacatta

SEQ ID NO: 348988 - DNA, 19 bp, Homo sapiens
  siRNA target sequence for SYNE2 (NM_015180.3,446-464).
gttgcctcgggataaagga

SEQ ID NO: 348989 - DNA, 19 bp, Homo sapiens
  siRNA target sequence for SYNE2 (NM_015180.3,453-471).
cgggataaaggatctaata

SEQ ID NO: 348990 - DNA, 19 bp, Homo sapiens
  siRNA target sequence for SYNE2 (NM_015180.3,456-474).
gataaaggatctaatacct

SEQ ID NO: 348991 - DNA, 19 bp, Homo sapiens
  siRNA target sequence for SYNE2 (NM_015180.3,472-490).
ccttccagtgtagaatcaa

SEQ ID NO: 348992 - DNA, 19 bp, Homo sapiens
  siRNA target sequence for SYNE2 (NM_015180.3,473-491).
cttccagtgtagaatcaat

SEQ ID NO: 348993 - DNA, 19 bp, Homo sapiens
  siRNA target sequence for SYNE2 (NM_015180.3,476-494).
ccagtgtagaatcaatata

SEQ ID NO: 348994 - DNA, 19 bp, Homo sapiens
  siRNA target sequence for SYNE2 (NM_015180.3,501-519).
gccttgacattcctaagaa

SEQ ID NO: 348995 - DNA, 19 bp, Homo sapiens
  siRNA target sequence for SYNE2 (NM_015180.3,512-530).
cctaagaaaccgatcaatt

SEQ ID NO: 348996 - DNA, 19 bp, Homo sapiens
  siRNA target sequence for SYNE2 (NM_015180.3,517-535).
gaaaccgatcaattaagct

SEQ ID NO: 348997 - DNA, 19 bp, Homo sapiens
  siRNA target sequence for SYNE2 (NM_015180.3,521-539).
ccgatcaattaagctaata

SEQ ID NO: 348998 - DNA, 19 bp, Homo sapiens
  siRNA target sequence for SYNE2 (NM_015180.3,522-540).
cgatcaattaagctaataa

SEQ ID NO: 348999 - DNA, 19 bp, Homo sapiens
  siRNA target sequence for SYNE2 (NM_015180.3,564-582).
gatggaaacccatccatta

SEQ ID NO: 349000 - DNA, 19 bp, Homo sapiens
  siRNA target sequence for SYNE2 (NM_015180.3,588-606).
ggcctaatttggacaatta

SEQ ID NO: 349001 - DNA, 19 bp, Homo sapiens
  siRNA target sequence for SYNE2 (NM_015180.3,589-607).
gcctaatttggacaattat

SEQ ID NO: 349002 - DNA, 19 bp, Homo sapiens
  siRNA target sequence for SYNE2 (NM_015180.3,635-653).
ccagactctttcttgcaat

SEQ ID NO: 349003 - DNA, 19 bp, Homo sapiens
  siRNA target sequence for SYNE2 (NM_015180.3,636-654).
cagactctttcttgcaatt

SEQ ID NO: 349004 - DNA, 19 bp, Homo sapiens
  siRNA target sequence for SYNE2 (NM_015180.3,640-658).
ctctttcttgcaattacaa

SEQ ID NO: 349005 - DNA, 19 bp, Homo sapiens
  siRNA target sequence for SYNE2 (NM_015180.3,792-810).
caatgcgccacctatgagt

SEQ ID NO: 349006 - DNA, 19 bp, Homo sapiens
  siRNA target sequence for SYNE2 (NM_015180.3,819-837).
gtgaccgattttaagtcaa

SEQ ID NO: 349007 - DNA, 19 bp, Homo sapiens
  siRNA target sequence for SYNE2 (NM_015180.3,877-895).
ccttgcgaccagacctaat

SEQ ID NO: 349008 - DNA, 19 bp, Homo sapiens
  siRNA target sequence for SYNE2 (NM_015180.3,878-896).
cttgcgaccagacctaatt

SEQ ID NO: 349009 - DNA, 19 bp, Homo sapiens
  siRNA target sequence for SYNE2 (NM_015180.3,883-901).
gaccagacctaattgacat

SEQ ID NO: 349010 - DNA, 19 bp, Homo sapiens
  siRNA target sequence for SYNE2 (NM_015180.3,1047-1065).
gcacagtttctgcagtatt

SEQ ID NO: 349011 - DNA, 19 bp, Homo sapiens
  siRNA target sequence for SYNE2 (NM_015180.3,1113-1131).
gatgctatgggctggttaa

SEQ ID NO: 349012 - DNA, 19 bp, Homo sapiens
  siRNA target sequence for SYNE2 (NM_015180.3,1117-1135).
ctatgggctggttaactct

SEQ ID NO: 349013 - DNA, 19 bp, Homo sapiens
  siRNA target sequence for SYNE2 (NM_015180.3,1152-1170).
cagaagttgctaaaggatt

SEQ ID NO: 349014 - DNA, 19 bp, Homo sapiens
  siRNA target sequence for SYNE2 (NM_015180.3,1204-1222).
gcctgctgtcctttatgga

SEQ ID NO: 349015 - DNA, 19 bp, Homo sapiens
  siRNA target sequence for SYNE2 (NM_015180.3,1214-1232).
ctttatggagtcattcaat

SEQ ID NO: 349016 - DNA, 19 bp, Homo sapiens
  siRNA target sequence for SYNE2 (NM_015180.3,1326-1344).
ggcctcgatcaccagatta

SEQ ID NO: 349017 - DNA, 19 bp, Homo sapiens
  siRNA target sequence for SYNE2 (NM_015180.3,1328-1346).
cctcgatcaccagattaat

SEQ ID NO: 349018 - DNA, 19 bp, Homo sapiens
  siRNA target sequence for SYNE2 (NM_015180.3,1331-1349).
cgatcaccagattaatgca

SEQ ID NO: 349019 - DNA, 19 bp, Homo sapiens
  siRNA target sequence for SYNE2 (NM_015180.3,1519-1537).
gatttgagcatcattcgaa

SEQ ID NO: 349020 - DNA, 19 bp, Homo sapiens
  siRNA target sequence for SYNE2 (NM_015180.3,1615-1633).
gacgaatcaacaacatttt

SEQ ID NO: 349021 - DNA, 19 bp, Homo sapiens
  siRNA target sequence for SYNE2 (NM_015180.3,1670-1688).
ctacaagtgcttagttctt

SEQ ID NO: 349022 - DNA, 19 bp, Homo sapiens
  siRNA target sequence for SYNE2 (NM_015180.3,1679-1697).
cttagttcttggtttggta

SEQ ID NO: 349023 - DNA, 19 bp, Homo sapiens
  siRNA target sequence for SYNE2 (NM_015180.3,1704-1722).
gtgaaatcaaaattggata

SEQ ID NO: 349024 - DNA, 19 bp, Homo sapiens
  siRNA target sequence for SYNE2 (NM_015180.3,1744-1762).
gcagagaatctgtggaatt

SEQ ID NO: 349025 - DNA, 19 bp, Homo sapiens
  siRNA target sequence for SYNE2 (NM_015180.3,1745-1763).
cagagaatctgtggaatta

SEQ ID NO: 349026 - DNA, 19 bp, Homo sapiens
  siRNA target sequence for SYNE2 (NM_015180.3,1805-1823).
cctagctcgacttgatact

SEQ ID NO: 349027 - DNA, 19 bp, Homo sapiens
  siRNA target sequence for SYNE2 (NM_015180.3,1806-1824).
ctagctcgacttgatactt

SEQ ID NO: 349028 - DNA, 19 bp, Homo sapiens
  siRNA target sequence for SYNE2 (NM_015180.3,1809-1827).
gctcgacttgatacttctt

SEQ ID NO: 349029 - DNA, 19 bp, Homo sapiens
  siRNA target sequence for SYNE2 (NM_015180.3,1810-1828).
ctcgacttgatacttcttt

SEQ ID NO: 349030 - DNA, 19 bp, Homo sapiens
  siRNA target sequence for SYNE2 (NM_015180.3,1887-1905).
cagtatatgatggtgaaat

SEQ ID NO: 349031 - DNA, 19 bp, Homo sapiens
  siRNA target sequence for SYNE2 (NM_015180.3,1889-1907).
gtatatgatggtgaaatct

SEQ ID NO: 349032 - DNA, 19 bp, Homo sapiens
  siRNA target sequence for SYNE2 (NM_015180.3,1943-1961).
gaagtccactctacaaaaa

SEQ ID NO: 349033 - DNA, 19 bp, Homo sapiens
  siRNA target sequence for SYNE2 (NM_015180.3,1967-1985).
ggcatgttgggctacttat

SEQ ID NO: 349034 - DNA, 19 bp, Homo sapiens
  siRNA target sequence for SYNE2 (NM_015180.3,1969-1987).
catgttgggctacttatgt

SEQ ID NO: 349035 - DNA, 19 bp, Homo sapiens
  siRNA target sequence for SYNE2 (NM_015180.3,2068-2086).
cccagtggaatctagaaca

SEQ ID NO: 349036 - DNA, 19 bp, Homo sapiens
  siRNA target sequence for SYNE2 (NM_015180.3,2133-2151).
gatgtggttggatcatcta

SEQ ID NO: 349037 - DNA, 19 bp, Homo sapiens
  siRNA target sequence for SYNE2 (NM_015180.3,2143-2161).
gatcatctatttctaaaga

SEQ ID NO: 349038 - DNA, 19 bp, Homo sapiens
  siRNA target sequence for SYNE2 (NM_015180.3,2165-2183).
gagaaggctgaataaaaga

SEQ ID NO: 349039 - DNA, 19 bp, Homo sapiens
  siRNA target sequence for SYNE2 (NM_015180.3,2192-2210).
gttggtttcaaaaactcaa

SEQ ID NO: 349040 - DNA, 19 bp, Homo sapiens
  siRNA target sequence for SYNE2 (NM_015180.3,2244-2262).
gatcagcccacttttgaca

SEQ ID NO: 349041 - DNA, 19 bp, Homo sapiens
  siRNA target sequence for SYNE2 (NM_015180.3,2247-2265).
cagcccacttttgacaatt

SEQ ID NO: 349042 - DNA, 19 bp, Homo sapiens
  siRNA target sequence for SYNE2 (NM_015180.3,2249-2267).
gcccacttttgacaattct

SEQ ID NO: 349043 - DNA, 19 bp, Homo sapiens
  siRNA target sequence for SYNE2 (NM_015180.3,2291-2309).
gaaagcaactgttgagttt

SEQ ID NO: 349044 - DNA, 19 bp, Homo sapiens
  siRNA target sequence for SYNE2 (NM_015180.3,2301-2319).
gttgagttttcaacagata

SEQ ID NO: 349045 - DNA, 19 bp, Homo sapiens
  siRNA target sequence for SYNE2 (NM_015180.3,2391-2409).
gaattcacagggcaactaa

SEQ ID NO: 349046 - DNA, 19 bp, Homo sapiens
  siRNA target sequence for SYNE2 (NM_015180.3,2534-2552).
caaaggctctatgtttgat

SEQ ID NO: 349047 - DNA, 19 bp, Homo sapiens
  siRNA target sequence for SYNE2 (NM_015180.3,2566-2584).
gaagtgaagatatgttaca

SEQ ID NO: 349048 - DNA, 19 bp, Homo sapiens
  siRNA target sequence for SYNE2 (NM_015180.3,2579-2597).
gttacaaatggatatacaa

SEQ ID NO: 349049 - DNA, 19 bp, Homo sapiens
  siRNA target sequence for SYNE2 (NM_015180.3,2608-2626).
gccaggagtcctttcaaca

SEQ ID NO: 349050 - DNA, 19 bp, Homo sapiens
  siRNA target sequence for SYNE2 (NM_015180.3,2609-2627).
ccaggagtcctttcaacat

SEQ ID NO: 349051 - DNA, 19 bp, Homo sapiens
  siRNA target sequence for SYNE2 (NM_015180.3,2612-2630).
ggagtcctttcaacatgtt

SEQ ID NO: 349052 - DNA, 19 bp, Homo sapiens
  siRNA target sequence for SYNE2 (NM_015180.3,2703-2721).
gcagcgttgaagaacttaa

SEQ ID NO: 349053 - DNA, 19 bp, Homo sapiens
  siRNA target sequence for SYNE2 (NM_015180.3,2707-2725).
cgttgaagaacttaactga

SEQ ID NO: 349054 - DNA, 19 bp, Homo sapiens
  siRNA target sequence for SYNE2 (NM_015180.3,2771-2789).
gaaggaacttgaatcatat

SEQ ID NO: 349055 - DNA, 19 bp, Homo sapiens
  siRNA target sequence for SYNE2 (NM_015180.3,2831-2849).
cggtgaactcatttcaaaa

SEQ ID NO: 349056 - DNA, 19 bp, Homo sapiens
  siRNA target sequence for SYNE2 (NM_015180.3,2981-2999).
caaatgggagtctcttcat

SEQ ID NO: 349057 - DNA, 19 bp, Homo sapiens
  siRNA target sequence for SYNE2 (NM_015180.3,2986-3004).
gggagtctcttcatcatga

SEQ ID NO: 349058 - DNA, 19 bp, Homo sapiens
  siRNA target sequence for SYNE2 (NM_015180.3,3048-3066).
ggaaagcttagtgacaata

SEQ ID NO: 349059 - DNA, 19 bp, Homo sapiens
  siRNA target sequence for SYNE2 (NM_015180.3,3053-3071).
gcttagtgacaatatttta

SEQ ID NO: 349060 - DNA, 19 bp, Homo sapiens
  siRNA target sequence for SYNE2 (NM_015180.3,3128-3146).
gggtctcatcaaagaacat

SEQ ID NO: 349061 - DNA, 19 bp, Homo sapiens
  siRNA target sequence for SYNE2 (NM_015180.3,3257-3275).
gagactactcaaagattat

SEQ ID NO: 349062 - DNA, 19 bp, Homo sapiens
  siRNA target sequence for SYNE2 (NM_015180.3,3306-3324).
gcttccgagattcatatga

SEQ ID NO: 349063 - DNA, 19 bp, Homo sapiens
  siRNA target sequence for SYNE2 (NM_015180.3,3339-3357).
gcgggaggcacgtcgaaaa

SEQ ID NO: 349064 - DNA, 19 bp, Homo sapiens
  siRNA target sequence for SYNE2 (NM_015180.3,3340-3358).
cgggaggcacgtcgaaaaa

SEQ ID NO: 349065 - DNA, 19 bp, Homo sapiens
  siRNA target sequence for SYNE2 (NM_015180.3,3343-3361).
gaggcacgtcgaaaaacga

SEQ ID NO: 349066 - DNA, 19 bp, Homo sapiens
  siRNA target sequence for SYNE2 (NM_015180.3,3368-3386).
catcaccacatctgagaat

SEQ ID NO: 349067 - DNA, 19 bp, Homo sapiens
  siRNA target sequence for SYNE2 (NM_015180.3,3371-3389).
caccacatctgagaataga

SEQ ID NO: 349068 - DNA, 19 bp, Homo sapiens
  siRNA target sequence for SYNE2 (NM_015180.3,3404-3422).
cagtgaggcaccatttgca

SEQ ID NO: 349069 - DNA, 19 bp, Homo sapiens
  siRNA target sequence for SYNE2 (NM_015180.3,3406-3424).
gtgaggcaccatttgcaaa

SEQ ID NO: 349070 - DNA, 19 bp, Homo sapiens
  siRNA target sequence for SYNE2 (NM_015180.3,3408-3426).
gaggcaccatttgcaaaat

SEQ ID NO: 349071 - DNA, 19 bp, Homo sapiens
  siRNA target sequence for SYNE2 (NM_015180.3,3454-3472).
caatggaacccactatgaa

SEQ ID NO: 349072 - DNA, 19 bp, Homo sapiens
  siRNA target sequence for SYNE2 (NM_015180.3,3458-3476).
ggaacccactatgaagttt

SEQ ID NO: 349073 - DNA, 19 bp, Homo sapiens
  siRNA target sequence for SYNE2 (NM_015180.3,3459-3477).
gaacccactatgaagttta

SEQ ID NO: 349074 - DNA, 19 bp, Homo sapiens
  siRNA target sequence for SYNE2 (NM_015180.3,3527-3545).
ggattacagtgcatctata

SEQ ID NO: 349075 - DNA, 19 bp, Homo sapiens
  siRNA target sequence for SYNE2 (NM_015180.3,3533-3551).
cagtgcatctataaatagt

SEQ ID NO: 349076 - DNA, 19 bp, Homo sapiens
  siRNA target sequence for SYNE2 (NM_015180.3,3535-3553).
gtgcatctataaatagttt

SEQ ID NO: 349077 - DNA, 19 bp, Homo sapiens
  siRNA target sequence for SYNE2 (NM_015180.3,3644-3662).
ggacaggagtagttcttgt

SEQ ID NO: 349078 - DNA, 19 bp, Homo sapiens
  siRNA target sequence for SYNE2 (NM_015180.3,3668-3686).
ggctaaactgacagatcta

SEQ ID NO: 349079 - DNA, 19 bp, Homo sapiens
  siRNA target sequence for SYNE2 (NM_015180.3,3708-3726).
gatgctcgctggaaagagt

SEQ ID NO: 349080 - DNA, 19 bp, Homo sapiens
  siRNA target sequence for SYNE2 (NM_015180.3,3712-3730).
ctcgctggaaagagtttga

SEQ ID NO: 349081 - DNA, 19 bp, Homo sapiens
  siRNA target sequence for SYNE2 (NM_015180.3,3824-3842).
gcttcagatgactcttaat

SEQ ID NO: 349082 - DNA, 19 bp, Homo sapiens
  siRNA target sequence for SYNE2 (NM_015180.3,3828-3846).
cagatgactcttaatacca

SEQ ID NO: 349083 - DNA, 19 bp, Homo sapiens
  siRNA target sequence for SYNE2 (NM_015180.3,3865-3883).
cagcactgcggcttgtgtt

SEQ ID NO: 349084 - DNA, 19 bp, Homo sapiens
  siRNA target sequence for SYNE2 (NM_015180.3,3919-3937).
cggacctgcctctccataa

SEQ ID NO: 349085 - DNA, 19 bp, Homo sapiens
  siRNA target sequence for SYNE2 (NM_015180.3,3947-3965).
ccagggatttcatctcatt

SEQ ID NO: 349086 - DNA, 19 bp, Homo sapiens
  siRNA target sequence for SYNE2 (NM_015180.3,3980-3998).
ctatcaacacctaaggaat

SEQ ID NO: 349087 - DNA, 19 bp, Homo sapiens
  siRNA target sequence for SYNE2 (NM_015180.3,3990-4008).
ctaaggaatatccaagatt

SEQ ID NO: 349088 - DNA, 19 bp, Homo sapiens
  siRNA target sequence for SYNE2 (NM_015180.3,4047-4065).
gagccaggcaactttgtat

SEQ ID NO: 349089 - DNA, 19 bp, Homo sapiens
  siRNA target sequence for SYNE2 (NM_015180.3,4070-4088).
ggagttacacccatttgat

SEQ ID NO: 349090 - DNA, 19 bp, Homo sapiens
  siRNA target sequence for SYNE2 (NM_015180.3,4089-4107).
ctacacgcaatgcagaata

SEQ ID NO: 349091 - DNA, 19 bp, Homo sapiens
  siRNA target sequence for SYNE2 (NM_015180.3,4092-4110).
cacgcaatgcagaatatta

SEQ ID NO: 349092 - DNA, 19 bp, Homo sapiens
  siRNA target sequence for SYNE2 (NM_015180.3,4094-4112).
cgcaatgcagaatattata

SEQ ID NO: 349093 - DNA, 19 bp, Homo sapiens
  siRNA target sequence for SYNE2 (NM_015180.3,4222-4240).
ctgctgagcccgttacaga

SEQ ID NO: 349094 - DNA, 19 bp, Homo sapiens
  siRNA target sequence for SYNE2 (NM_015180.3,4263-4281).
gtggcacaagaaaatacgt

SEQ ID NO: 349095 - DNA, 19 bp, Homo sapiens
  siRNA target sequence for SYNE2 (NM_015180.3,4272-4290).
gaaaatacgttgacagtaa

SEQ ID NO: 349096 - DNA, 19 bp, Homo sapiens
  siRNA target sequence for SYNE2 (NM_015180.3,4392-4410).
gatgacacctcctgtgaaa

SEQ ID NO: 349097 - DNA, 19 bp, Homo sapiens
  siRNA target sequence for SYNE2 (NM_015180.3,4458-4476).
ggggtacaggaggaattca

SEQ ID NO: 349098 - DNA, 19 bp, Homo sapiens
  siRNA target sequence for SYNE2 (NM_015180.3,4545-4563).
gtgcagagtcaaatcagta

SEQ ID NO: 349099 - DNA, 19 bp, Homo sapiens
  siRNA target sequence for SYNE2 (NM_015180.3,4550-4568).
gagtcaaatcagtaaaatt

SEQ ID NO: 349100 - DNA, 19 bp, Homo sapiens
  siRNA target sequence for SYNE2 (NM_015180.3,4596-4614).
gtgaaacatcggaaaaaat

SEQ ID NO: 349101 - DNA, 19 bp, Homo sapiens
  siRNA target sequence for SYNE2 (NM_015180.3,4615-4633).
cattaatcagactggataa

SEQ ID NO: 349102 - DNA, 19 bp, Homo sapiens
  siRNA target sequence for SYNE2 (NM_015180.3,4735-4753).
gccaaaatacagtagtctt

SEQ ID NO: 349103 - DNA, 19 bp, Homo sapiens
  siRNA target sequence for SYNE2 (NM_015180.3,4746-4764).
gtagtcttgtgggagaata

SEQ ID NO: 349104 - DNA, 19 bp, Homo sapiens
  siRNA target sequence for SYNE2 (NM_015180.3,4778-4796).
caccgaatgtcttgaacaa

SEQ ID NO: 349105 - DNA, 19 bp, Homo sapiens
  siRNA target sequence for SYNE2 (NM_015180.3,4847-4865).
cttgacaactttgattcaa

SEQ ID NO: 349106 - DNA, 19 bp, Homo sapiens
  siRNA target sequence for SYNE2 (NM_015180.3,4852-4870).
caactttgattcaaaaaga

SEQ ID NO: 349107 - DNA, 19 bp, Homo sapiens
  siRNA target sequence for SYNE2 (NM_015180.3,5010-5028).
ctacaattttatctaaata

SEQ ID NO: 349108 - DNA, 19 bp, Homo sapiens
  siRNA target sequence for SYNE2 (NM_015180.3,5086-5104).
gatggcttgatataaatga

SEQ ID NO: 349109 - DNA, 19 bp, Homo sapiens
  siRNA target sequence for SYNE2 (NM_015180.3,5089-5107).
ggcttgatataaatgagaa

SEQ ID NO: 349110 - DNA, 19 bp, Homo sapiens
  siRNA target sequence for SYNE2 (NM_015180.3,5145-5163).
gctttgtgggacaaacttt

SEQ ID NO: 349111 - DNA, 19 bp, Homo sapiens
  siRNA target sequence for SYNE2 (NM_015180.3,5153-5171).
ggacaaactttttaactta

SEQ ID NO: 349112 - DNA, 19 bp, Homo sapiens
  siRNA target sequence for SYNE2 (NM_015180.3,5154-5172).
gacaaactttttaacttaa

SEQ ID NO: 349113 - DNA, 19 bp, Homo sapiens
  siRNA target sequence for SYNE2 (NM_015180.3,5327-5345).
gctccaaagcagtgaaata

SEQ ID NO: 349114 - DNA, 19 bp, Homo sapiens
  siRNA target sequence for SYNE2 (NM_015180.3,5360-5378).
ggtcatggagtcctctatt

SEQ ID NO: 349115 - DNA, 19 bp, Homo sapiens
  siRNA target sequence for SYNE2 (NM_015180.3,5407-5425).
gcttaacaggagaatccaa

SEQ ID NO: 349116 - DNA, 19 bp, Homo sapiens
  siRNA target sequence for SYNE2 (NM_015180.3,5487-5505).
cagatcgggatgactgaat

SEQ ID NO: 349117 - DNA, 19 bp, Homo sapiens
  siRNA target sequence for SYNE2 (NM_015180.3,5498-5516).
gactgaatccctcttaaaa

SEQ ID NO: 349118 - DNA, 19 bp, Homo sapiens
  siRNA target sequence for SYNE2 (NM_015180.3,5540-5558).
ggagatcttcactaaacta

SEQ ID NO: 349119 - DNA, 19 bp, Homo sapiens
  siRNA target sequence for SYNE2 (NM_015180.3,5551-5569).
ctaaactagaggagataca

SEQ ID NO: 349120 - DNA, 19 bp, Homo sapiens
  siRNA target sequence for SYNE2 (NM_015180.3,5600-5618).
gatattacttgagaatcaa

SEQ ID NO: 349121 - DNA, 19 bp, Homo sapiens
  siRNA target sequence for SYNE2 (NM_015180.3,5607-5625).
cttgagaatcaaataggtt

SEQ ID NO: 349122 - DNA, 19 bp, Homo sapiens
  siRNA target sequence for SYNE2 (NM_015180.3,5634-5652).
cctgaactctctgaattga

SEQ ID NO: 349123 - DNA, 19 bp, Homo sapiens
  siRNA target sequence for SYNE2 (NM_015180.3,5733-5751).
gatcaatgcaagaacttta

SEQ ID NO: 349124 - DNA, 19 bp, Homo sapiens
  siRNA target sequence for SYNE2 (NM_015180.3,5756-5774).
ctggttcagcaacattaaa

SEQ ID NO: 349125 - DNA, 19 bp, Homo sapiens
  siRNA target sequence for SYNE2 (NM_015180.3,5758-5776).
ggttcagcaacattaaagt

SEQ ID NO: 349126 - DNA, 19 bp, Homo sapiens
  siRNA target sequence for SYNE2 (NM_015180.3,5816-5834).
gagtgtggaacaaaagcta

SEQ ID NO: 349127 - DNA, 19 bp, Homo sapiens
  siRNA target sequence for SYNE2 (NM_015180.3,5896-5914).
gcgtactgaagcatgtgaa

SEQ ID NO: 349128 - DNA, 19 bp, Homo sapiens
  siRNA target sequence for SYNE2 (NM_015180.3,5932-5950).
cacatgtgaaggagcttat

SEQ ID NO: 349129 - DNA, 19 bp, Homo sapiens
  siRNA target sequence for SYNE2 (NM_015180.3,5965-5983).
gtcaggaattcgaattaga

SEQ ID NO: 349130 - DNA, 19 bp, Homo sapiens
  siRNA target sequence for SYNE2 (NM_015180.3,5967-5985).
caggaattcgaattagaaa

SEQ ID NO: 349131 - DNA, 19 bp, Homo sapiens
  siRNA target sequence for SYNE2 (NM_015180.3,5982-6000).
gaaaaaatggagtccatat

SEQ ID NO: 349132 - DNA, 19 bp, Homo sapiens
  siRNA target sequence for SYNE2 (NM_015180.3,6051-6069).
ctccaggatgaccatagaa

SEQ ID NO: 349133 - DNA, 19 bp, Homo sapiens
  siRNA target sequence for SYNE2 (NM_015180.3,6076-6094).
ggaagtggttgactaatca

SEQ ID NO: 349134 - DNA, 19 bp, Homo sapiens
  siRNA target sequence for SYNE2 (NM_015180.3,6077-6095).
gaagtggttgactaatcaa

SEQ ID NO: 349135 - DNA, 19 bp, Homo sapiens
  siRNA target sequence for SYNE2 (NM_015180.3,6080-6098).
gtggttgactaatcaagaa

SEQ ID NO: 349136 - DNA, 19 bp, Homo sapiens
  siRNA target sequence for SYNE2 (NM_015180.3,6082-6100).
ggttgactaatcaagaaga

SEQ ID NO: 349137 - DNA, 19 bp, Homo sapiens
  siRNA target sequence for SYNE2 (NM_015180.3,6143-6161).
gttctgccaagctttagct

SEQ ID NO: 349138 - DNA, 19 bp, Homo sapiens
  siRNA target sequence for SYNE2 (NM_015180.3,6150-6168).
caagctttagctagaaaga

SEQ ID NO: 349139 - DNA, 19 bp, Homo sapiens
  siRNA target sequence for SYNE2 (NM_015180.3,6167-6185).
gagggaacagtttgaatct

SEQ ID NO: 349140 - DNA, 19 bp, Homo sapiens
  siRNA target sequence for SYNE2 (NM_015180.3,6169-6187).
gggaacagtttgaatctgt

SEQ ID NO: 349141 - DNA, 19 bp, Homo sapiens
  siRNA target sequence for SYNE2 (NM_015180.3,6180-6198).
gaatctgtggcccaattga

SEQ ID NO: 349142 - DNA, 19 bp, Homo sapiens
  siRNA target sequence for SYNE2 (NM_015180.3,6209-6227).
gaaggaatatgggtttact

SEQ ID NO: 349143 - DNA, 19 bp, Homo sapiens
  siRNA target sequence for SYNE2 (NM_015180.3,6212-6230).
ggaatatgggtttactgaa

SEQ ID NO: 349144 - DNA, 19 bp, Homo sapiens
  siRNA target sequence for SYNE2 (NM_015180.3,6289-6307).
gacaactaagtgaaatcga

SEQ ID NO: 349145 - DNA, 19 bp, Homo sapiens
  siRNA target sequence for SYNE2 (NM_015180.3,6335-6353).
ggaccagagctttaatgat

SEQ ID NO: 349146 - DNA, 19 bp, Homo sapiens
  siRNA target sequence for SYNE2 (NM_015180.3,6363-6381).
gatgtaattcattggataa

SEQ ID NO: 349147 - DNA, 19 bp, Homo sapiens
  siRNA target sequence for SYNE2 (NM_015180.3,6372-6390).
cattggataaaagagatta

SEQ ID NO: 349148 - DNA, 19 bp, Homo sapiens
  siRNA target sequence for SYNE2 (NM_015180.3,6395-6413).
gtcccttatggttttgaat

SEQ ID NO: 349149 - DNA, 19 bp, Homo sapiens
  siRNA target sequence for SYNE2 (NM_015180.3,6630-6648).
ctactagaaggagagaaat

SEQ ID NO: 349150 - DNA, 19 bp, Homo sapiens
  siRNA target sequence for SYNE2 (NM_015180.3,6658-6676).
gtaaggaggatctgagatt

SEQ ID NO: 349151 - DNA, 19 bp, Homo sapiens
  siRNA target sequence for SYNE2 (NM_015180.3,6673-6691).
gattaatgctcatagaact

SEQ ID NO: 349152 - DNA, 19 bp, Homo sapiens
  siRNA target sequence for SYNE2 (NM_015180.3,6834-6852).
ctcttggagtgcactaaaa

SEQ ID NO: 349153 - DNA, 19 bp, Homo sapiens
  siRNA target sequence for SYNE2 (NM_015180.3,6836-6854).
cttggagtgcactaaaaat

SEQ ID NO: 349154 - DNA, 19 bp, Homo sapiens
  siRNA target sequence for SYNE2 (NM_015180.3,6874-6892).
cttggctggaaataaagca

SEQ ID NO: 349155 - DNA, 19 bp, Homo sapiens
  siRNA target sequence for SYNE2 (NM_015180.3,6890-6908).
gcatctacacgaaagtctt

SEQ ID NO: 349156 - DNA, 19 bp, Homo sapiens
  siRNA target sequence for SYNE2 (NM_015180.3,6899-6917).
cgaaagtcttcttcaacaa

SEQ ID NO: 349157 - DNA, 19 bp, Homo sapiens
  siRNA target sequence for SYNE2 (NM_015180.3,6944-6962).
cggtcacgttcgagaacat

SEQ ID NO: 349158 - DNA, 19 bp, Homo sapiens
  siRNA target sequence for SYNE2 (NM_015180.3,6950-6968).
cgttcgagaacatgattca

SEQ ID NO: 349159 - DNA, 19 bp, Homo sapiens
  siRNA target sequence for SYNE2 (NM_015180.3,6980-6998).
cgtcacagacctgaatact

SEQ ID NO: 349160 - DNA, 19 bp, Homo sapiens
  siRNA target sequence for SYNE2 (NM_015180.3,6981-6999).
gtcacagacctgaatacta

SEQ ID NO: 349161 - DNA, 19 bp, Homo sapiens
  siRNA target sequence for SYNE2 (NM_015180.3,6983-7001).
cacagacctgaatactaca

SEQ ID NO: 349162 - DNA, 19 bp, Homo sapiens
  siRNA target sequence for SYNE2 (NM_015180.3,7147-7165).
caaaatccgtcaagcaaaa

SEQ ID NO: 349163 - DNA, 19 bp, Homo sapiens
  siRNA target sequence for SYNE2 (NM_015180.3,7155-7173).
gtcaagcaaaatacatctt

SEQ ID NO: 349164 - DNA, 19 bp, Homo sapiens
  siRNA target sequence for SYNE2 (NM_015180.3,7176-7194).
gtggggcagaagattatta

SEQ ID NO: 349165 - DNA, 19 bp, Homo sapiens
  siRNA target sequence for SYNE2 (NM_015180.3,7280-7298).
caacagcattctcaaatca

SEQ ID NO: 349166 - DNA, 19 bp, Homo sapiens
  siRNA target sequence for SYNE2 (NM_015180.3,7440-7458).
gtggaaatggctatgtcaa

SEQ ID NO: 349167 - DNA, 19 bp, Homo sapiens
  siRNA target sequence for SYNE2 (NM_015180.3,7456-7474).
caaaacaactttctcttaa

SEQ ID NO: 349168 - DNA, 19 bp, Homo sapiens
  siRNA target sequence for SYNE2 (NM_015180.3,7500-7518).
gaagatgagcggaaagtca

SEQ ID NO: 349169 - DNA, 19 bp, Homo sapiens
  siRNA target sequence for SYNE2 (NM_015180.3,7628-7646).
gccactggaacaaacagaa

SEQ ID NO: 349170 - DNA, 19 bp, Homo sapiens
  siRNA target sequence for SYNE2 (NM_015180.3,7634-7652).
ggaacaaacagaatgtctt

SEQ ID NO: 349171 - DNA, 19 bp, Homo sapiens
  siRNA target sequence for SYNE2 (NM_015180.3,7671-7689).
gccttggttctccacaata

SEQ ID NO: 349172 - DNA, 19 bp, Homo sapiens
  siRNA target sequence for SYNE2 (NM_015180.3,7676-7694).
ggttctccacaatatagga

SEQ ID NO: 349173 - DNA, 19 bp, Homo sapiens
  siRNA target sequence for SYNE2 (NM_015180.3,7701-7719).
gcacagcatttggacaatt

SEQ ID NO: 349174 - DNA, 19 bp, Homo sapiens
  siRNA target sequence for SYNE2 (NM_015180.3,7854-7872).
ggaccactggacagtgtaa

SEQ ID NO: 349175 - DNA, 19 bp, Homo sapiens
  siRNA target sequence for SYNE2 (NM_015180.3,7873-7891).
cgtatctggacaaaattaa

SEQ ID NO: 349176 - DNA, 19 bp, Homo sapiens
  siRNA target sequence for SYNE2 (NM_015180.3,7923-7941).
gattctttaggcaacttga

SEQ ID NO: 349177 - DNA, 19 bp, Homo sapiens
  siRNA target sequence for SYNE2 (NM_015180.3,7946-7964).
caaatgggagaatttatca

SEQ ID NO: 349178 - DNA, 19 bp, Homo sapiens
  siRNA target sequence for SYNE2 (NM_015180.3,7968-7986).
cacgtgactgacatggata

SEQ ID NO: 349179 - DNA, 19 bp, Homo sapiens
  siRNA target sequence for SYNE2 (NM_015180.3,7971-7989).
gtgactgacatggataaga

SEQ ID NO: 349180 - DNA, 19 bp, Homo sapiens
  siRNA target sequence for SYNE2 (NM_015180.3,8002-8020).
gccagattaagcaacttga

SEQ ID NO: 349181 - DNA, 19 bp, Homo sapiens
  siRNA target sequence for SYNE2 (NM_015180.3,8003-8021).
ccagattaagcaacttgaa

SEQ ID NO: 349182 - DNA, 19 bp, Homo sapiens
  siRNA target sequence for SYNE2 (NM_015180.3,8006-8024).
gattaagcaacttgaacat

SEQ ID NO: 349183 - DNA, 19 bp, Homo sapiens
  siRNA target sequence for SYNE2 (NM_015180.3,8065-8083).
ctcagcaggtagtggaata

SEQ ID NO: 349184 - DNA, 19 bp, Homo sapiens
  siRNA target sequence for SYNE2 (NM_015180.3,8069-8087).
gcaggtagtggaatatgat

SEQ ID NO: 349185 - DNA, 19 bp, Homo sapiens
  siRNA target sequence for SYNE2 (NM_015180.3,8233-8251).
ccaagcatggattttctgt

SEQ ID NO: 349186 - DNA, 19 bp, Homo sapiens
  siRNA target sequence for SYNE2 (NM_015180.3,8265-8283).
gctgaacttcagatgaaga

SEQ ID NO: 349187 - DNA, 19 bp, Homo sapiens
  siRNA target sequence for SYNE2 (NM_015180.3,8319-8337).
gatggaataaataacttga

SEQ ID NO: 349188 - DNA, 19 bp, Homo sapiens
  siRNA target sequence for SYNE2 (NM_015180.3,8398-8416).
gtgacataaggaacaagat

SEQ ID NO: 349189 - DNA, 19 bp, Homo sapiens
  siRNA target sequence for SYNE2 (NM_015180.3,8414-8432).
gatgaaagagactatctta

SEQ ID NO: 349190 - DNA, 19 bp, Homo sapiens
  siRNA target sequence for SYNE2 (NM_015180.3,8480-8498).
cccagatgacattctttca

SEQ ID NO: 349191 - DNA, 19 bp, Homo sapiens
  siRNA target sequence for SYNE2 (NM_015180.3,8603-8621).
ctatgagggcagtgattta

SEQ ID NO: 349192 - DNA, 19 bp, Homo sapiens
  siRNA target sequence for SYNE2 (NM_015180.3,8607-8625).
gagggcagtgatttaaata

SEQ ID NO: 349193 - DNA, 19 bp, Homo sapiens
  siRNA target sequence for SYNE2 (NM_015180.3,8634-8652).
gaggacttacggaatcaat

SEQ ID NO: 349194 - DNA, 19 bp, Homo sapiens
  siRNA target sequence for SYNE2 (NM_015180.3,8644-8662).
ggaatcaataccaaatgct

SEQ ID NO: 349195 - DNA, 19 bp, Homo sapiens
  siRNA target sequence for SYNE2 (NM_015180.3,8731-8749).
ctataataaggaagtttca

SEQ ID NO: 349196 - DNA, 19 bp, Homo sapiens
  siRNA target sequence for SYNE2 (NM_015180.3,8802-8820).
gccacggaagctgaactaa

SEQ ID NO: 349197 - DNA, 19 bp, Homo sapiens
  siRNA target sequence for SYNE2 (NM_015180.3,8803-8821).
ccacggaagctgaactaaa

SEQ ID NO: 349198 - DNA, 19 bp, Homo sapiens
  siRNA target sequence for SYNE2 (NM_015180.3,8804-8822).
cacggaagctgaactaaaa

SEQ ID NO: 349199 - DNA, 19 bp, Homo sapiens
  siRNA target sequence for SYNE2 (NM_015180.3,8817-8835).
ctaaaacatcaccatgtta

SEQ ID NO: 349200 - DNA, 19 bp, Homo sapiens
  siRNA target sequence for SYNE2 (NM_015180.3,8892-8910).
cttcaggagctaacaaaca

SEQ ID NO: 349201 - DNA, 19 bp, Homo sapiens
  siRNA target sequence for SYNE2 (NM_015180.3,9018-9036).
gaagtggaacacaagataa

SEQ ID NO: 349202 - DNA, 19 bp, Homo sapiens
  siRNA target sequence for SYNE2 (NM_015180.3,9021-9039).
gtggaacacaagataaagt

SEQ ID NO: 349203 - DNA, 19 bp, Homo sapiens
  siRNA target sequence for SYNE2 (NM_015180.3,9027-9045).
cacaagataaagttttgca

SEQ ID NO: 349204 - DNA, 19 bp, Homo sapiens
  siRNA target sequence for SYNE2 (NM_015180.3,9038-9056).
gttttgcagacaattccat

SEQ ID NO: 349205 - DNA, 19 bp, Homo sapiens
  siRNA target sequence for SYNE2 (NM_015180.3,9077-9095).
ggaggaggctgacagtata

SEQ ID NO: 349206 - DNA, 19 bp, Homo sapiens
  siRNA target sequence for SYNE2 (NM_015180.3,9089-9107).
cagtatacagcgcaatgaa

SEQ ID NO: 349207 - DNA, 19 bp, Homo sapiens
  siRNA target sequence for SYNE2 (NM_015180.3,9091-9109).
gtatacagcgcaatgaact

SEQ ID NO: 349208 - DNA, 19 bp, Homo sapiens
  siRNA target sequence for SYNE2 (NM_015180.3,9098-9116).
gcgcaatgaactattactt

SEQ ID NO: 349209 - DNA, 19 bp, Homo sapiens
  siRNA target sequence for SYNE2 (NM_015180.3,9100-9118).
gcaatgaactattacttaa

SEQ ID NO: 349210 - DNA, 19 bp, Homo sapiens
  siRNA target sequence for SYNE2 (NM_015180.3,9138-9156).
gttaaagaggagatctata

SEQ ID NO: 349211 - DNA, 19 bp, Homo sapiens
  siRNA target sequence for SYNE2 (NM_015180.3,9165-9183).
gacagactcaccgctatta

SEQ ID NO: 349212 - DNA, 19 bp, Homo sapiens
  siRNA target sequence for SYNE2 (NM_015180.3,9191-9209).
catcttacaggtattgaaa

SEQ ID NO: 349213 - DNA, 19 bp, Homo sapiens
  siRNA target sequence for SYNE2 (NM_015180.3,9225-9243).
gactatattggactaaact

SEQ ID NO: 349214 - DNA, 19 bp, Homo sapiens
  siRNA target sequence for SYNE2 (NM_015180.3,9234-9252).
ggactaaactgggattttt

SEQ ID NO: 349215 - DNA, 19 bp, Homo sapiens
  siRNA target sequence for SYNE2 (NM_015180.3,9354-9372).
caggcattattaagtaaaa

SEQ ID NO: 349216 - DNA, 19 bp, Homo sapiens
  siRNA target sequence for SYNE2 (NM_015180.3,9367-9385).
gtaaaatgagagctattga

SEQ ID NO: 349217 - DNA, 19 bp, Homo sapiens
  siRNA target sequence for SYNE2 (NM_015180.3,9374-9392).
gagagctattgatttgcaa

SEQ ID NO: 349218 - DNA, 19 bp, Homo sapiens
  siRNA target sequence for SYNE2 (NM_015180.3,9404-9422).
gactgaagtagtactaaaa

SEQ ID NO: 349219 - DNA, 19 bp, Homo sapiens
  siRNA target sequence for SYNE2 (NM_015180.3,9450-9468).
cggctcaatgcccaaattt

SEQ ID NO: 349220 - DNA, 19 bp, Homo sapiens
  siRNA target sequence for SYNE2 (NM_015180.3,9451-9469).
ggctcaatgcccaaatttt

SEQ ID NO: 349221 - DNA, 19 bp, Homo sapiens
  siRNA target sequence for SYNE2 (NM_015180.3,9452-9470).
gctcaatgcccaaatttta

SEQ ID NO: 349222 - DNA, 19 bp, Homo sapiens
  siRNA target sequence for SYNE2 (NM_015180.3,9636-9654).
gaactctcaccaaaagaat

SEQ ID NO: 349223 - DNA, 19 bp, Homo sapiens
  siRNA target sequence for SYNE2 (NM_015180.3,9672-9690).
caggacaaactagaaactt

SEQ ID NO: 349224 - DNA, 19 bp, Homo sapiens
  siRNA target sequence for SYNE2 (NM_015180.3,9728-9746).
gcagccattacttataaat

SEQ ID NO: 349225 - DNA, 19 bp, Homo sapiens
  siRNA target sequence for SYNE2 (NM_015180.3,9729-9747).
cagccattacttataaatt

SEQ ID NO: 349226 - DNA, 19 bp, Homo sapiens
  siRNA target sequence for SYNE2 (NM_015180.3,9811-9829).
cagaaatgtgtagtattaa

SEQ ID NO: 349227 - DNA, 19 bp, Homo sapiens
  siRNA target sequence for SYNE2 (NM_015180.3,9877-9895).
cgagtgatgtggagacaaa

SEQ ID NO: 349228 - DNA, 19 bp, Homo sapiens
  siRNA target sequence for SYNE2 (NM_015180.3,9890-9908).
gacaaaactacgtgagttt

SEQ ID NO: 349229 - DNA, 19 bp, Homo sapiens
  siRNA target sequence for SYNE2 (NM_015180.3,9892-9910).
caaaactacgtgagtttga

SEQ ID NO: 349230 - DNA, 19 bp, Homo sapiens
  siRNA target sequence for SYNE2 (NM_015180.3,9915-9933).
cttcagatgcagcttaaca

SEQ ID NO: 349231 - DNA, 19 bp, Homo sapiens
  siRNA target sequence for SYNE2 (NM_015180.3,9918-9936).
cagatgcagcttaacacaa

SEQ ID NO: 349232 - DNA, 19 bp, Homo sapiens
  siRNA target sequence for SYNE2 (NM_015180.3,9926-9944).
gcttaacacaagcattgat

SEQ ID NO: 349233 - DNA, 19 bp, Homo sapiens
  siRNA target sequence for SYNE2 (NM_015180.3,9927-9945).
cttaacacaagcattgatt

SEQ ID NO: 349234 - DNA, 19 bp, Homo sapiens
  siRNA target sequence for SYNE2 (NM_015180.3,9942-9960).
gatttgcgcacaaatgtct

SEQ ID NO: 349235 - DNA, 19 bp, Homo sapiens
  siRNA target sequence for SYNE2 (NM_015180.3,9959-9977).
cttgaatgatgcttatgaa

SEQ ID NO: 349236 - DNA, 19 bp, Homo sapiens
  siRNA target sequence for SYNE2 (NM_015180.3,9962-9980).
gaatgatgcttatgaaaat

SEQ ID NO: 349237 - DNA, 19 bp, Homo sapiens
  siRNA target sequence for SYNE2 (NM_015180.3,10011-10029).
gcagtggagagcatcactt

SEQ ID NO: 349238 - DNA, 19 bp, Homo sapiens
  siRNA target sequence for SYNE2 (NM_015180.3,10031-10049).
cctcgaagccatcattata

SEQ ID NO: 349239 - DNA, 19 bp, Homo sapiens
  siRNA target sequence for SYNE2 (NM_015180.3,10152-10170).
gagaaactgggaatgatat

SEQ ID NO: 349240 - DNA, 19 bp, Homo sapiens
  siRNA target sequence for SYNE2 (NM_015180.3,10172-10190).
cagccccgaagccaaacta

SEQ ID NO: 349241 - DNA, 19 bp, Homo sapiens
  siRNA target sequence for SYNE2 (NM_015180.3,10174-10192).
gccccgaagccaaactaca

SEQ ID NO: 349242 - DNA, 19 bp, Homo sapiens
  siRNA target sequence for SYNE2 (NM_015180.3,10175-10193).
ccccgaagccaaactacaa

SEQ ID NO: 349243 - DNA, 19 bp, Homo sapiens
  siRNA target sequence for SYNE2 (NM_015180.3,10178-10196).
cgaagccaaactacaactt

SEQ ID NO: 349244 - DNA, 19 bp, Homo sapiens
  siRNA target sequence for SYNE2 (NM_015180.3,10184-10202).
caaactacaacttcagtat

SEQ ID NO: 349245 - DNA, 19 bp, Homo sapiens
  siRNA target sequence for SYNE2 (NM_015180.3,10209-10227).
caggaactagtttctaaga

SEQ ID NO: 349246 - DNA, 19 bp, Homo sapiens
  siRNA target sequence for SYNE2 (NM_015180.3,10231-10249).
cagcaatgaaggaagcttt

SEQ ID NO: 349247 - DNA, 19 bp, Homo sapiens
  siRNA target sequence for SYNE2 (NM_015180.3,10270-10288).
cagaaaggtatcttgagaa

SEQ ID NO: 349248 - DNA, 19 bp, Homo sapiens
  siRNA target sequence for SYNE2 (NM_015180.3,10281-10299).
cttgagaattacaaatgct

SEQ ID NO: 349249 - DNA, 19 bp, Homo sapiens
  siRNA target sequence for SYNE2 (NM_015180.3,10369-10387).
cctcgttgccactgtctta

SEQ ID NO: 349250 - DNA, 19 bp, Homo sapiens
  siRNA target sequence for SYNE2 (NM_015180.3,10417-10435).
gcaaggccttggtgtcaaa

SEQ ID NO: 349251 - DNA, 19 bp, Homo sapiens
  siRNA target sequence for SYNE2 (NM_015180.3,10418-10436).
caaggccttggtgtcaaat

SEQ ID NO: 349252 - DNA, 19 bp, Homo sapiens
  siRNA target sequence for SYNE2 (NM_015180.3,10422-10440).
gccttggtgtcaaatctta

SEQ ID NO: 349253 - DNA, 19 bp, Homo sapiens
  siRNA target sequence for SYNE2 (NM_015180.3,10428-10446).
gtgtcaaatcttatatcaa

SEQ ID NO: 349254 - DNA, 19 bp, Homo sapiens
  siRNA target sequence for SYNE2 (NM_015180.3,10614-10632).
caggaatggaaatttgtca

SEQ ID NO: 349255 - DNA, 19 bp, Homo sapiens
  siRNA target sequence for SYNE2 (NM_015180.3,10644-10662).
gaacgagaggcaattattt

SEQ ID NO: 349256 - DNA, 19 bp, Homo sapiens
  siRNA target sequence for SYNE2 (NM_015180.3,10787-10805).
gttactgactctacttctt

SEQ ID NO: 349257 - DNA, 19 bp, Homo sapiens
  siRNA target sequence for SYNE2 (NM_015180.3,10803-10821).
cttcagcgcatcagaagta

SEQ ID NO: 349258 - DNA, 19 bp, Homo sapiens
  siRNA target sequence for SYNE2 (NM_015180.3,10897-10915).
gatgcaacaagcttcttca

SEQ ID NO: 349259 - DNA, 19 bp, Homo sapiens
  siRNA target sequence for SYNE2 (NM_015180.3,10935-10953).
gaattggtgcagactgaaa

SEQ ID NO: 349260 - DNA, 19 bp, Homo sapiens
  siRNA target sequence for SYNE2 (NM_015180.3,10959-10977).
gaaagacattccttcacaa

SEQ ID NO: 349261 - DNA, 19 bp, Homo sapiens
  siRNA target sequence for SYNE2 (NM_015180.3,11045-11063).
ggatcacccagaaaagtca

SEQ ID NO: 349262 - DNA, 19 bp, Homo sapiens
  siRNA target sequence for SYNE2 (NM_015180.3,11162-11180).
catagtccctgcagagatt

SEQ ID NO: 349263 - DNA, 19 bp, Homo sapiens
  siRNA target sequence for SYNE2 (NM_015180.3,11217-11235).
gacatagatgagaagatta

SEQ ID NO: 349264 - DNA, 19 bp, Homo sapiens
  siRNA target sequence for SYNE2 (NM_015180.3,11254-11272).
gctcaccatcatatgcaat

SEQ ID NO: 349265 - DNA, 19 bp, Homo sapiens
  siRNA target sequence for SYNE2 (NM_015180.3,11378-11396).
gtgggacgagttagatcta

SEQ ID NO: 349266 - DNA, 19 bp, Homo sapiens
  siRNA target sequence for SYNE2 (NM_015180.3,11394-11412).
ctatggcattccaaactaa

SEQ ID NO: 349267 - DNA, 19 bp, Homo sapiens
  siRNA target sequence for SYNE2 (NM_015180.3,11398-11416).
ggcattccaaactaaatga

SEQ ID NO: 349268 - DNA, 19 bp, Homo sapiens
  siRNA target sequence for SYNE2 (NM_015180.3,11425-11443).
ctgaagttcaggacattgt

SEQ ID NO: 349269 - DNA, 19 bp, Homo sapiens
  siRNA target sequence for SYNE2 (NM_015180.3,11710-11728).
cagaacagaagcacaatct

SEQ ID NO: 349270 - DNA, 19 bp, Homo sapiens
  siRNA target sequence for SYNE2 (NM_015180.3,11720-11738).
gcacaatcttttacattca

SEQ ID NO: 349271 - DNA, 19 bp, Homo sapiens
  siRNA target sequence for SYNE2 (NM_015180.3,11751-11769).
ctagaagacctgtcaataa

SEQ ID NO: 349272 - DNA, 19 bp, Homo sapiens
  siRNA target sequence for SYNE2 (NM_015180.3,11791-11809).
cccaatccatacaagagtt

SEQ ID NO: 349273 - DNA, 19 bp, Homo sapiens
  siRNA target sequence for SYNE2 (NM_015180.3,11792-11810).
ccaatccatacaagagtta

SEQ ID NO: 349274 - DNA, 19 bp, Homo sapiens
  siRNA target sequence for SYNE2 (NM_015180.3,11793-11811).
caatccatacaagagttaa

SEQ ID NO: 349275 - DNA, 19 bp, Homo sapiens
  siRNA target sequence for SYNE2 (NM_015180.3,11797-11815).
ccatacaagagttaagtaa

SEQ ID NO: 349276 - DNA, 19 bp, Homo sapiens
  siRNA target sequence for SYNE2 (NM_015180.3,11805-11823).
gagttaagtaatcaagtaa

SEQ ID NO: 349277 - DNA, 19 bp, Homo sapiens
  siRNA target sequence for SYNE2 (NM_015180.3,11846-11864).
ggaaagccttccacagatt

SEQ ID NO: 349278 - DNA, 19 bp, Homo sapiens
  siRNA target sequence for SYNE2 (NM_015180.3,11936-11954).
caaaactatcctattatca

SEQ ID NO: 349279 - DNA, 19 bp, Homo sapiens
  siRNA target sequence for SYNE2 (NM_015180.3,11941-11959).
ctatcctattatcaaaaga

SEQ ID NO: 349280 - DNA, 19 bp, Homo sapiens
  siRNA target sequence for SYNE2 (NM_015180.3,11945-11963).
cctattatcaaaagaaata

SEQ ID NO: 349281 - DNA, 19 bp, Homo sapiens
  siRNA target sequence for SYNE2 (NM_015180.3,12005-12023).
catacttgaaaatatacgt

SEQ ID NO: 349282 - DNA, 19 bp, Homo sapiens
  siRNA target sequence for SYNE2 (NM_015180.3,12113-12131).
gcggacaaatcagctttta

SEQ ID NO: 349283 - DNA, 19 bp, Homo sapiens
  siRNA target sequence for SYNE2 (NM_015180.3,12115-12133).
ggacaaatcagcttttaca

SEQ ID NO: 349284 - DNA, 19 bp, Homo sapiens
  siRNA target sequence for SYNE2 (NM_015180.3,12116-12134).
gacaaatcagcttttacaa

SEQ ID NO: 349285 - DNA, 19 bp, Homo sapiens
  siRNA target sequence for SYNE2 (NM_015180.3,12135-12153).
gatataaaactattggaaa

SEQ ID NO: 349286 - DNA, 19 bp, Homo sapiens
  siRNA target sequence for SYNE2 (NM_015180.3,12392-12410).
ggccaccgtactaaacctt

SEQ ID NO: 349287 - DNA, 19 bp, Homo sapiens
  siRNA target sequence for SYNE2 (NM_015180.3,12523-12541).
gaagaggctccatgtctta

SEQ ID NO: 349288 - DNA, 19 bp, Homo sapiens
  siRNA target sequence for SYNE2 (NM_015180.3,12578-12596).
cgtgaagagcgataatgga

SEQ ID NO: 349289 - DNA, 19 bp, Homo sapiens
  siRNA target sequence for SYNE2 (NM_015180.3,12621-12639).
cagtcttggtcttcacttt

SEQ ID NO: 349290 - DNA, 19 bp, Homo sapiens
  siRNA target sequence for SYNE2 (NM_015180.3,12634-12652).
cactttggaagcatgacaa

SEQ ID NO: 349291 - DNA, 19 bp, Homo sapiens
  siRNA target sequence for SYNE2 (NM_015180.3,12677-12695).
ctcatcctctggaacaatt

SEQ ID NO: 349292 - DNA, 19 bp, Homo sapiens
  siRNA target sequence for SYNE2 (NM_015180.3,12679-12697).
catcctctggaacaattgt

SEQ ID NO: 349293 - DNA, 19 bp, Homo sapiens
  siRNA target sequence for SYNE2 (NM_015180.3,12682-12700).
cctctggaacaattgttca

SEQ ID NO: 349294 - DNA, 19 bp, Homo sapiens
  siRNA target sequence for SYNE2 (NM_015180.3,12701-12719).
ggaagcatatgggaaaata

SEQ ID NO: 349295 - DNA, 19 bp, Homo sapiens
  siRNA target sequence for SYNE2 (NM_015180.3,12750-12768).
ctcacaccagactcactaa

SEQ ID NO: 349296 - DNA, 19 bp, Homo sapiens
  siRNA target sequence for SYNE2 (NM_015180.3,12818-12836).
gggcaccacacctcctatt

SEQ ID NO: 349297 - DNA, 19 bp, Homo sapiens
  siRNA target sequence for SYNE2 (NM_015180.3,12882-12900).
cccagggtggagaaaacta

SEQ ID NO: 349298 - DNA, 19 bp, Homo sapiens
  siRNA target sequence for SYNE2 (NM_015180.3,12981-12999).
gcagttgagccggaaacat

SEQ ID NO: 349299 - DNA, 19 bp, Homo sapiens
  siRNA target sequence for SYNE2 (NM_015180.3,12982-13000).
cagttgagccggaaacatt

SEQ ID NO: 349300 - DNA, 19 bp, Homo sapiens
  siRNA target sequence for SYNE2 (NM_015180.3,12984-13002).
gttgagccggaaacattaa

SEQ ID NO: 349301 - DNA, 19 bp, Homo sapiens
  siRNA target sequence for SYNE2 (NM_015180.3,13041-13059).
gggtgccaggctatgctaa

SEQ ID NO: 349302 - DNA, 19 bp, Homo sapiens
  siRNA target sequence for SYNE2 (NM_015180.3,13049-13067).
ggctatgctaacagagatt

SEQ ID NO: 349303 - DNA, 19 bp, Homo sapiens
  siRNA target sequence for SYNE2 (NM_015180.3,13071-13089).
cacaaggttgcctttctgt

SEQ ID NO: 349304 - DNA, 19 bp, Homo sapiens
  siRNA target sequence for SYNE2 (NM_015180.3,13088-13106).
gttagagacttgcaaagat

SEQ ID NO: 349305 - DNA, 19 bp, Homo sapiens
  siRNA target sequence for SYNE2 (NM_015180.3,13109-13127).
gggcctgggagataatgga

SEQ ID NO: 349306 - DNA, 19 bp, Homo sapiens
  siRNA target sequence for SYNE2 (NM_015180.3,13230-13248).
cagcatcctaccattctaa

SEQ ID NO: 349307 - DNA, 19 bp, Homo sapiens
  siRNA target sequence for SYNE2 (NM_015180.3,13279-13297).
ctctccaaccagttaacct

SEQ ID NO: 349308 - DNA, 19 bp, Homo sapiens
  siRNA target sequence for SYNE2 (NM_015180.3,13367-13385).
ggttctggagttaaaacca

SEQ ID NO: 349309 - DNA, 19 bp, Homo sapiens
  siRNA target sequence for SYNE2 (NM_015180.3,13368-13386).
gttctggagttaaaaccaa

SEQ ID NO: 349310 - DNA, 19 bp, Homo sapiens
  siRNA target sequence for SYNE2 (NM_015180.3,13373-13391).
ggagttaaaaccaatggaa

SEQ ID NO: 349311 - DNA, 19 bp, Homo sapiens
  siRNA target sequence for SYNE2 (NM_015180.3,13441-13459).
cccagtattgccaacatga

SEQ ID NO: 349312 - DNA, 19 bp, Homo sapiens
  siRNA target sequence for SYNE2 (NM_015180.3,13452-13470).
caacatgataacgatacaa

SEQ ID NO: 349313 - DNA, 19 bp, Homo sapiens
  siRNA target sequence for SYNE2 (NM_015180.3,13518-13536).
gttccagactcgatcttgt

SEQ ID NO: 349314 - DNA, 19 bp, Homo sapiens
  siRNA target sequence for SYNE2 (NM_015180.3,13535-13553).
gtcaccccagggccaaaat

SEQ ID NO: 349315 - DNA, 19 bp, Homo sapiens
  siRNA target sequence for SYNE2 (NM_015180.3,13636-13654).
ccacaaatatgggtattct

SEQ ID NO: 349316 - DNA, 19 bp, Homo sapiens
  siRNA target sequence for SYNE2 (NM_015180.3,13637-13655).
cacaaatatgggtattcta

SEQ ID NO: 349317 - DNA, 19 bp, Homo sapiens
  siRNA target sequence for SYNE2 (NM_015180.3,13656-13674).
cccagcgtgactatgtata

SEQ ID NO: 349318 - DNA, 19 bp, Homo sapiens
  siRNA target sequence for SYNE2 (NM_015180.3,13657-13675).
ccagcgtgactatgtataa

SEQ ID NO: 349319 - DNA, 19 bp, Homo sapiens
  siRNA target sequence for SYNE2 (NM_015180.3,13660-13678).
gcgtgactatgtataactt

SEQ ID NO: 349320 - DNA, 19 bp, Homo sapiens
  siRNA target sequence for SYNE2 (NM_015180.3,13664-13682).
gactatgtataactttaga

SEQ ID NO: 349321 - DNA, 19 bp, Homo sapiens
  siRNA target sequence for SYNE2 (NM_015180.3,13676-13694).
ctttagatacccaacaact

SEQ ID NO: 349322 - DNA, 19 bp, Homo sapiens
  siRNA target sequence for SYNE2 (NM_015180.3,13695-13713).
gaagaactgaaaacctata

SEQ ID NO: 349323 - DNA, 19 bp, Homo sapiens
  siRNA target sequence for SYNE2 (NM_015180.3,13698-13716).
gaactgaaaacctatacca

SEQ ID NO: 349324 - DNA, 19 bp, Homo sapiens
  siRNA target sequence for SYNE2 (NM_015180.3,13709-13727).
ctataccacccaacttgaa

SEQ ID NO: 349325 - DNA, 19 bp, Homo sapiens
  siRNA target sequence for SYNE2 (NM_015180.3,13782-13800).
gcatatatcaatttggata

SEQ ID NO: 349326 - DNA, 19 bp, Homo sapiens
  siRNA target sequence for SYNE2 (NM_015180.3,13863-13881).
gagatgcccagactttaca

SEQ ID NO: 349327 - DNA, 19 bp, Homo sapiens
  siRNA target sequence for SYNE2 (NM_015180.3,13918-13936).
cgctggctcttgagttgaa

SEQ ID NO: 349328 - DNA, 19 bp, Homo sapiens
  siRNA target sequence for SYNE2 (NM_015180.3,13920-13938).
ctggctcttgagttgaaga

SEQ ID NO: 349329 - DNA, 19 bp, Homo sapiens
  siRNA target sequence for SYNE2 (NM_015180.3,13922-13940).
ggctcttgagttgaagaaa

SEQ ID NO: 349330 - DNA, 19 bp, Homo sapiens
  siRNA target sequence for SYNE2 (NM_015180.3,14114-14132).
ccgcagttaccagaatgaa

SEQ ID NO: 349331 - DNA, 19 bp, Homo sapiens
  siRNA target sequence for SYNE2 (NM_015180.3,14117-14135).
cagttaccagaatgaaata

SEQ ID NO: 349332 - DNA, 19 bp, Homo sapiens
  siRNA target sequence for SYNE2 (NM_015180.3,14148-14166).
catcagctcattaagagta

SEQ ID NO: 349333 - DNA, 19 bp, Homo sapiens
  siRNA target sequence for SYNE2 (NM_015180.3,14162-14180).
gagtaagacatctttacaa

SEQ ID NO: 349334 - DNA, 19 bp, Homo sapiens
  siRNA target sequence for SYNE2 (NM_015180.3,14181-14199).
cagtctttgaatgaaatca

SEQ ID NO: 349335 - DNA, 19 bp, Homo sapiens
  siRNA target sequence for SYNE2 (NM_015180.3,14267-14285).
gagccgagtggccaaacta

SEQ ID NO: 349336 - DNA, 19 bp, Homo sapiens
  siRNA target sequence for SYNE2 (NM_015180.3,14272-14290).
gagtggccaaactaagaga

SEQ ID NO: 349337 - DNA, 19 bp, Homo sapiens
  siRNA target sequence for SYNE2 (NM_015180.3,14297-14315).
ggagaggcttcatttacct

SEQ ID NO: 349338 - DNA, 19 bp, Homo sapiens
  siRNA target sequence for SYNE2 (NM_015180.3,14300-14318).
gaggcttcatttaccttat

SEQ ID NO: 349339 - DNA, 19 bp, Homo sapiens
  siRNA target sequence for SYNE2 (NM_015180.3,14320-14338).
ctttactccaggaggttta

SEQ ID NO: 349340 - DNA, 19 bp, Homo sapiens
  siRNA target sequence for SYNE2 (NM_015180.3,14325-14343).
ctccaggaggtttacaaat

SEQ ID NO: 349341 - DNA, 19 bp, Homo sapiens
  siRNA target sequence for SYNE2 (NM_015180.3,14360-14378).
cagtatgtggggaatgcta

SEQ ID NO: 349342 - DNA, 19 bp, Homo sapiens
  siRNA target sequence for SYNE2 (NM_015180.3,14422-14440).
gccagcaagatgctttgtt

SEQ ID NO: 349343 - DNA, 19 bp, Homo sapiens
  siRNA target sequence for SYNE2 (NM_015180.3,14450-14468).
ggtggaactggtgaagatt

SEQ ID NO: 349344 - DNA, 19 bp, Homo sapiens
  siRNA target sequence for SYNE2 (NM_015180.3,14481-14499).
cttgctcatggccacttaa

SEQ ID NO: 349345 - DNA, 19 bp, Homo sapiens
  siRNA target sequence for SYNE2 (NM_015180.3,14519-14537).
ggcgttacaggctcaaata

SEQ ID NO: 349346 - DNA, 19 bp, Homo sapiens
  siRNA target sequence for SYNE2 (NM_015180.3,14521-14539).
cgttacaggctcaaataga

SEQ ID NO: 349347 - DNA, 19 bp, Homo sapiens
  siRNA target sequence for SYNE2 (NM_015180.3,14522-14540).
gttacaggctcaaatagaa

SEQ ID NO: 349348 - DNA, 19 bp, Homo sapiens
  siRNA target sequence for SYNE2 (NM_015180.3,14529-14547).
gctcaaatagaaaatcaca

SEQ ID NO: 349349 - DNA, 19 bp, Homo sapiens
  siRNA target sequence for SYNE2 (NM_015180.3,14568-14586).
gttgctgacatgttgttga

SEQ ID NO: 349350 - DNA, 19 bp, Homo sapiens
  siRNA target sequence for SYNE2 (NM_015180.3,14686-14704).
cacgccaatgtggtatgaa

SEQ ID NO: 349351 - DNA, 19 bp, Homo sapiens
  siRNA target sequence for SYNE2 (NM_015180.3,14765-14783).
ggacctggaaattcttata

SEQ ID NO: 349352 - DNA, 19 bp, Homo sapiens
  siRNA target sequence for SYNE2 (NM_015180.3,14766-14784).
gacctggaaattcttatat

SEQ ID NO: 349353 - DNA, 19 bp, Homo sapiens
  siRNA target sequence for SYNE2 (NM_015180.3,14769-14787).
ctggaaattcttatatcta

SEQ ID NO: 349354 - DNA, 19 bp, Homo sapiens
  siRNA target sequence for SYNE2 (NM_015180.3,14771-14789).
ggaaattcttatatctaca

SEQ ID NO: 349355 - DNA, 19 bp, Homo sapiens
  siRNA target sequence for SYNE2 (NM_015180.3,14772-14790).
gaaattcttatatctacat

SEQ ID NO: 349356 - DNA, 19 bp, Homo sapiens
  siRNA target sequence for SYNE2 (NM_015180.3,15042-15060).
catctgctcagttataaca

SEQ ID NO: 349357 - DNA, 19 bp, Homo sapiens
  siRNA target sequence for SYNE2 (NM_015180.3,15063-15081).
gattcggatcagttaacca

SEQ ID NO: 349358 - DNA, 19 bp, Homo sapiens
  siRNA target sequence for SYNE2 (NM_015180.3,15099-15117).
cagcatactctgaattact

SEQ ID NO: 349359 - DNA, 19 bp, Homo sapiens
  siRNA target sequence for SYNE2 (NM_015180.3,15138-15156).
gtgtctcaggacttggata

SEQ ID NO: 349360 - DNA, 19 bp, Homo sapiens
  siRNA target sequence for SYNE2 (NM_015180.3,15144-15162).
caggacttggatacaatca

SEQ ID NO: 349361 - DNA, 19 bp, Homo sapiens
  siRNA target sequence for SYNE2 (NM_015180.3,15221-15239).
gaagactgccgttatcagt

SEQ ID NO: 349362 - DNA, 19 bp, Homo sapiens
  siRNA target sequence for SYNE2 (NM_015180.3,15320-15338).
gacaatgctcataactcaa

SEQ ID NO: 349363 - DNA, 19 bp, Homo sapiens
  siRNA target sequence for SYNE2 (NM_015180.3,15334-15352).
ctcaacttccagatattca

SEQ ID NO: 349364 - DNA, 19 bp, Homo sapiens
  siRNA target sequence for SYNE2 (NM_015180.3,15380-15398).
gaaattgccgtctcgtaaa

SEQ ID NO: 349365 - DNA, 19 bp, Homo sapiens
  siRNA target sequence for SYNE2 (NM_015180.3,15393-15411).
cgtaaagcaatcacagaaa

SEQ ID NO: 349366 - DNA, 19 bp, Homo sapiens
  siRNA target sequence for SYNE2 (NM_015180.3,15434-15452).
ggagcatcaaacttcagat

SEQ ID NO: 349367 - DNA, 19 bp, Homo sapiens
  siRNA target sequence for SYNE2 (NM_015180.3,15461-15479).
cgtgcattcaccaagttct

SEQ ID NO: 349368 - DNA, 19 bp, Homo sapiens
  siRNA target sequence for SYNE2 (NM_015180.3,15475-15493).
gttctgcatctcaagttaa

SEQ ID NO: 349369 - DNA, 19 bp, Homo sapiens
  siRNA target sequence for SYNE2 (NM_015180.3,15478-15496).
ctgcatctcaagttaaaca

SEQ ID NO: 349370 - DNA, 19 bp, Homo sapiens
  siRNA target sequence for SYNE2 (NM_015180.3,15481-15499).
catctcaagttaaacatct

SEQ ID NO: 349371 - DNA, 19 bp, Homo sapiens
  siRNA target sequence for SYNE2 (NM_015180.3,15506-15524).
gaagcacaaggagtttaga

SEQ ID NO: 349372 - DNA, 19 bp, Homo sapiens
  siRNA target sequence for SYNE2 (NM_015180.3,15536-15554).
ctataaacagtggatagtt

SEQ ID NO: 349373 - DNA, 19 bp, Homo sapiens
  siRNA target sequence for SYNE2 (NM_015180.3,15547-15565).
ggatagttgacttcgttaa

SEQ ID NO: 349374 - DNA, 19 bp, Homo sapiens
  siRNA target sequence for SYNE2 (NM_015180.3,15557-15575).
cttcgttaaccagtcatta

SEQ ID NO: 349375 - DNA, 19 bp, Homo sapiens
  siRNA target sequence for SYNE2 (NM_015180.3,15560-15578).
cgttaaccagtcattactt

SEQ ID NO: 349376 - DNA, 19 bp, Homo sapiens
  siRNA target sequence for SYNE2 (NM_015180.3,15581-15599).
gctaagcacctgtgatgta

SEQ ID NO: 349377 - DNA, 19 bp, Homo sapiens
  siRNA target sequence for SYNE2 (NM_015180.3,15661-15679).
ggcaccgtgtacatggaat

SEQ ID NO: 349378 - DNA, 19 bp, Homo sapiens
  siRNA target sequence for SYNE2 (NM_015180.3,15669-15687).
gtacatggaatgctgaata

SEQ ID NO: 349379 - DNA, 19 bp, Homo sapiens
  siRNA target sequence for SYNE2 (NM_015180.3,15839-15857).
ggactgtcaggatatagaa

SEQ ID NO: 349380 - DNA, 19 bp, Homo sapiens
  siRNA target sequence for SYNE2 (NM_015180.3,15861-15879).
caacttgcaattaaatcca

SEQ ID NO: 349381 - DNA, 19 bp, Homo sapiens
  siRNA target sequence for SYNE2 (NM_015180.3,15928-15946).
cagtgccattgttagaaga

SEQ ID NO: 349382 - DNA, 19 bp, Homo sapiens
  siRNA target sequence for SYNE2 (NM_015180.3,15952-15970).
catcccgaattgatgagtt

SEQ ID NO: 349383 - DNA, 19 bp, Homo sapiens
  siRNA target sequence for SYNE2 (NM_015180.3,15955-15973).
cccgaattgatgagttatt

SEQ ID NO: 349384 - DNA, 19 bp, Homo sapiens
  siRNA target sequence for SYNE2 (NM_015180.3,15956-15974).
ccgaattgatgagttattt

SEQ ID NO: 349385 - DNA, 19 bp, Homo sapiens
  siRNA target sequence for SYNE2 (NM_015180.3,16002-16020).
gtcaatcagctcaaaacct

SEQ ID NO: 349386 - DNA, 19 bp, Homo sapiens
  siRNA target sequence for SYNE2 (NM_015180.3,16019-16037).
ctccatgcagtcagtttta

SEQ ID NO: 349387 - DNA, 19 bp, Homo sapiens
  siRNA target sequence for SYNE2 (NM_015180.3,16118-16136).
caagcctgtggtgttatca

SEQ ID NO: 349388 - DNA, 19 bp, Homo sapiens
  siRNA target sequence for SYNE2 (NM_015180.3,16224-16242).
gaggttatcggcaaactca

SEQ ID NO: 349389 - DNA, 19 bp, Homo sapiens
  siRNA target sequence for SYNE2 (NM_015180.3,16226-16244).
ggttatcggcaaactcaaa

SEQ ID NO: 349390 - DNA, 19 bp, Homo sapiens
  siRNA target sequence for SYNE2 (NM_015180.3,16253-16271).
cccctctgttgctgaaata

SEQ ID NO: 349391 - DNA, 19 bp, Homo sapiens
  siRNA target sequence for SYNE2 (NM_015180.3,16254-16272).
ccctctgttgctgaaataa

SEQ ID NO: 349392 - DNA, 19 bp, Homo sapiens
  siRNA target sequence for SYNE2 (NM_015180.3,16258-16276).
ctgttgctgaaataatcga

SEQ ID NO: 349393 - DNA, 19 bp, Homo sapiens
  siRNA target sequence for SYNE2 (NM_015180.3,16274-16292).
cgaagagaaatgccaaaat

SEQ ID NO: 349394 - DNA, 19 bp, Homo sapiens
  siRNA target sequence for SYNE2 (NM_015180.3,16365-16383).
ctctggaaggcctatagca

SEQ ID NO: 349395 - DNA, 19 bp, Homo sapiens
  siRNA target sequence for SYNE2 (NM_015180.3,16632-16650).
ctccagagggctgcttatt

SEQ ID NO: 349396 - DNA, 19 bp, Homo sapiens
  siRNA target sequence for SYNE2 (NM_015180.3,16717-16735).
gagtccggctggaatcttt

SEQ ID NO: 349397 - DNA, 19 bp, Homo sapiens
  siRNA target sequence for SYNE2 (NM_015180.3,16719-16737).
gtccggctggaatctttaa

SEQ ID NO: 349398 - DNA, 19 bp, Homo sapiens
  siRNA target sequence for SYNE2 (NM_015180.3,16721-16739).
ccggctggaatctttaaaa

SEQ ID NO: 349399 - DNA, 19 bp, Homo sapiens
  siRNA target sequence for SYNE2 (NM_015180.3,16834-16852).
cagcccaatcacctgatat

SEQ ID NO: 349400 - DNA, 19 bp, Homo sapiens
  siRNA target sequence for SYNE2 (NM_015180.3,16874-16892).
cctcaagctcccacttagt

SEQ ID NO: 349401 - DNA, 19 bp, Homo sapiens
  siRNA target sequence for SYNE2 (NM_015180.3,16899-16917).
gctgtgaagacgttacaaa

SEQ ID NO: 349402 - DNA, 19 bp, Homo sapiens
  siRNA target sequence for SYNE2 (NM_015180.3,17310-17328).
cagtggcaagatttcacta

SEQ ID NO: 349403 - DNA, 19 bp, Homo sapiens
  siRNA target sequence for SYNE2 (NM_015180.3,17517-17535).
ctcacaactgacctgaaaa

SEQ ID NO: 349404 - DNA, 19 bp, Homo sapiens
  siRNA target sequence for SYNE2 (NM_015180.3,17732-17750).
cgaggacctccataacgaa

SEQ ID NO: 349405 - DNA, 19 bp, Homo sapiens
  siRNA target sequence for SYNE2 (NM_015180.3,17733-17751).
gaggacctccataacgaaa

SEQ ID NO: 349406 - DNA, 19 bp, Homo sapiens
  siRNA target sequence for SYNE2 (NM_015180.3,17920-17938).
gggtggccatacgtaaaca

SEQ ID NO: 349407 - DNA, 19 bp, Homo sapiens
  siRNA target sequence for SYNE2 (NM_015180.3,17946-17964).
gaagacagactcaatacat

SEQ ID NO: 349408 - DNA, 19 bp, Homo sapiens
  siRNA target sequence for SYNE2 (NM_015180.3,17962-17980).
catgggttgtattcaatga

SEQ ID NO: 349409 - DNA, 19 bp, Homo sapiens
  siRNA target sequence for SYNE2 (NM_015180.3,18030-18048).
ctacagacagcggacatta

SEQ ID NO: 349410 - DNA, 19 bp, Homo sapiens
  siRNA target sequence for SYNE2 (NM_015180.3,18033-18051).
cagacagcggacattagta

SEQ ID NO: 349411 - DNA, 19 bp, Homo sapiens
  siRNA target sequence for SYNE2 (NM_015180.3,18035-18053).
gacagcggacattagtatt

SEQ ID NO: 349412 - DNA, 19 bp, Homo sapiens
  siRNA target sequence for SYNE2 (NM_015180.3,18037-18055).
cagcggacattagtattga

SEQ ID NO: 349413 - DNA, 19 bp, Homo sapiens
  siRNA target sequence for SYNE2 (NM_015180.3,18040-18058).
cggacattagtattgaaga

SEQ ID NO: 349414 - DNA, 19 bp, Homo sapiens
  siRNA target sequence for SYNE2 (NM_015180.3,18041-18059).
ggacattagtattgaagaa

SEQ ID NO: 349415 - DNA, 19 bp, Homo sapiens
  siRNA target sequence for SYNE2 (NM_015180.3,18185-18203).
cgatgacaagctcaacaaa

SEQ ID NO: 349416 - DNA, 19 bp, Homo sapiens
  siRNA target sequence for SYNE2 (NM_015180.3,18209-18227).
cgatcgttggcaacatctt

SEQ ID NO: 349417 - DNA, 19 bp, Homo sapiens
  siRNA target sequence for SYNE2 (NM_015180.3,18263-18281).
ggagacctttgcttttatt

SEQ ID NO: 349418 - DNA, 19 bp, Homo sapiens
  siRNA target sequence for SYNE2 (NM_015180.3,18285-18303).
cagttggacaaaaacatga

SEQ ID NO: 349419 - DNA, 19 bp, Homo sapiens
  siRNA target sequence for SYNE2 (NM_015180.3,18316-18334).
cctggttggctcgaattga

SEQ ID NO: 349420 - DNA, 19 bp, Homo sapiens
  siRNA target sequence for SYNE2 (NM_015180.3,18346-18364).
ccaagcctgttgtttatga

SEQ ID NO: 349421 - DNA, 19 bp, Homo sapiens
  siRNA target sequence for SYNE2 (NM_015180.3,18444-18462).
ggggtggagtccgtgttta

SEQ ID NO: 349422 - DNA, 19 bp, Homo sapiens
  siRNA target sequence for SYNE2 (NM_015180.3,18447-18465).
gtggagtccgtgtttaaca

SEQ ID NO: 349423 - DNA, 19 bp, Homo sapiens
  siRNA target sequence for SYNE2 (NM_015180.3,18450-18468).
gagtccgtgtttaacatct

SEQ ID NO: 349424 - DNA, 19 bp, Homo sapiens
  siRNA target sequence for SYNE2 (NM_015180.3,18488-18506).
ctccgatgcctgtgcaaat

SEQ ID NO: 349425 - DNA, 19 bp, Homo sapiens
  siRNA target sequence for SYNE2 (NM_015180.3,18921-18939).
cggagactcaggcatttca

SEQ ID NO: 349426 - DNA, 19 bp, Homo sapiens
  siRNA target sequence for SYNE2 (NM_015180.3,18940-18958).
ccaaccagagggaagaatt

SEQ ID NO: 349427 - DNA, 19 bp, Homo sapiens
  siRNA target sequence for SYNE2 (NM_015180.3,19039-19057).
gtgacgccgatgacaagat

SEQ ID NO: 349428 - DNA, 19 bp, Homo sapiens
  siRNA target sequence for SYNE2 (NM_015180.3,19261-19279).
ctccgggcttggaagatga

SEQ ID NO: 349429 - DNA, 19 bp, Homo sapiens
  siRNA target sequence for SYNE2 (NM_015180.3,19512-19530).
gaggagggcccatactaca

SEQ ID NO: 349430 - DNA, 19 bp, Homo sapiens
  siRNA target sequence for SYNE2 (NM_015180.3,19529-19547).
cagcgcactgtcaggtaaa

SEQ ID NO: 349431 - DNA, 19 bp, Homo sapiens
  siRNA target sequence for SYNE2 (NM_015180.3,19533-19551).
gcactgtcaggtaaatcca

SEQ ID NO: 349432 - DNA, 19 bp, Homo sapiens
  siRNA target sequence for SYNE2 (NM_015180.3,19591-19609).
cctgtcccgagcatcacta

SEQ ID NO: 349433 - DNA, 19 bp, Homo sapiens
  siRNA target sequence for SYNE2 (NM_015180.3,19594-19612).
gtcccgagcatcactacaa

SEQ ID NO: 349434 - DNA, 19 bp, Homo sapiens
  siRNA target sequence for SYNE2 (NM_015180.3,19766-19784).
gggactggccggtatcaca

SEQ ID NO: 349435 - DNA, 19 bp, Homo sapiens
  siRNA target sequence for SYNE2 (NM_015180.3,19805-19823).
cgacagatgggagatgatt

SEQ ID NO: 349436 - DNA, 19 bp, Homo sapiens
  siRNA target sequence for SYNE2 (NM_015180.3,19808-19826).
cagatgggagatgattcaa

SEQ ID NO: 349437 - DNA, 19 bp, Homo sapiens
  siRNA target sequence for SYNE2 (NM_015180.3,19872-19890).
cagctgaactctgatatca

SEQ ID NO: 349438 - DNA, 19 bp, Homo sapiens
  siRNA target sequence for SYNE2 (NM_015180.3,19947-19965).
gcaaagcctccctctgata

SEQ ID NO: 349439 - DNA, 19 bp, Homo sapiens
  siRNA target sequence for SYNE2 (NM_015180.3,19948-19966).
caaagcctccctctgatat

SEQ ID NO: 349440 - DNA, 19 bp, Homo sapiens
  siRNA target sequence for SYNE2 (NM_015180.3,19960-19978).
ctgatatccaggaaataga

SEQ ID NO: 349441 - DNA, 19 bp, Homo sapiens
  siRNA target sequence for SYNE2 (NM_015180.3,20051-20069).
cgtgagcagcaaggaattt

SEQ ID NO: 349442 - DNA, 19 bp, Homo sapiens
  siRNA target sequence for SYNE2 (NM_015180.3,20269-20287).
ctcatgtcaccgatccaaa

SEQ ID NO: 349443 - DNA, 19 bp, Homo sapiens
  siRNA target sequence for SYNE2 (NM_015180.3,20310-20328).
gagtgtcggagggaactaa

SEQ ID NO: 349444 - DNA, 19 bp, Homo sapiens
  siRNA target sequence for SYNE2 (NM_015180.3,20314-20332).
gtcggagggaactaatgca

SEQ ID NO: 349445 - DNA, 19 bp, Homo sapiens
  siRNA target sequence for SYNE2 (NM_015180.3,20362-20380).
ctcaagtggacatgttaca

SEQ ID NO: 349446 - DNA, 19 bp, Homo sapiens
  siRNA target sequence for SYNE2 (NM_015180.3,20389-20407).
caaacagccttctcattaa

SEQ ID NO: 349447 - DNA, 19 bp, Homo sapiens
  siRNA target sequence for SYNE2 (NM_015180.3,20423-20441).
ctgtattgaagctgaagaa

SEQ ID NO: 349448 - DNA, 19 bp, Homo sapiens
  siRNA target sequence for SYNE2 (NM_015180.3,20595-20613).
gctccccgagcaaagttca

SEQ ID NO: 349449 - DNA, 19 bp, Homo sapiens
  siRNA target sequence for ARHGEF9 (NM_015185.1,873-891).
ccgggagttggcatttaaa

SEQ ID NO: 349450 - DNA, 19 bp, Homo sapiens
  siRNA target sequence for ARHGEF9 (NM_015185.1,895-913).
ggcgacgtcatcaaagtct

SEQ ID NO: 349451 - DNA, 19 bp, Homo sapiens
  siRNA target sequence for ARHGEF9 (NM_015185.1,896-914).
gcgacgtcatcaaagtctt

SEQ ID NO: 349452 - DNA, 19 bp, Homo sapiens
  siRNA target sequence for ARHGEF9 (NM_015185.1,954-972).
cgatgaggagggatggttt

SEQ ID NO: 349453 - DNA, 19 bp, Homo sapiens
  siRNA target sequence for ARHGEF9 (NM_015185.1,1120-1138).
gtcatcaatgagataatga

SEQ ID NO: 349454 - DNA, 19 bp, Homo sapiens
  siRNA target sequence for ARHGEF9 (NM_015185.1,1225-1243).
gacgagcaactgaaggtaa

SEQ ID NO: 349455 - DNA, 19 bp, Homo sapiens
  siRNA target sequence for ARHGEF9 (NM_015185.1,1228-1246).
gagcaactgaaggtaatct

SEQ ID NO: 349456 - DNA, 19 bp, Homo sapiens
  siRNA target sequence for ARHGEF9 (NM_015185.1,1448-1466).
gctaccagcacttctttga

SEQ ID NO: 349457 - DNA, 19 bp, Homo sapiens
  siRNA target sequence for ARHGEF9 (NM_015185.1,1560-1578).
ggctgagctcctaaagtat

SEQ ID NO: 349458 - DNA, 19 bp, Homo sapiens
  siRNA target sequence for ARHGEF9 (NM_015185.1,1656-1674).
cgaacgcaagcgacgttta

SEQ ID NO: 349459 - DNA, 19 bp, Homo sapiens
  siRNA target sequence for ARHGEF9 (NM_015185.1,1660-1678).
cgcaagcgacgtttagaga

SEQ ID NO: 349460 - DNA, 19 bp, Homo sapiens
  siRNA target sequence for ARHGEF9 (NM_015185.1,1661-1679).
gcaagcgacgtttagagaa

SEQ ID NO: 349461 - DNA, 19 bp, Homo sapiens
  siRNA target sequence for ARHGEF9 (NM_015185.1,1662-1680).
caagcgacgtttagagaat

SEQ ID NO: 349462 - DNA, 19 bp, Homo sapiens
  siRNA target sequence for ARHGEF9 (NM_015185.1,1667-1685).
gacgtttagagaatattga

SEQ ID NO: 349463 - DNA, 19 bp, Homo sapiens
  siRNA target sequence for ARHGEF9 (NM_015185.1,1891-1909).
ggccgcattgacatggata

SEQ ID NO: 349464 - DNA, 19 bp, Homo sapiens
  siRNA target sequence for ARHGEF9 (NM_015185.1,1893-1911).
ccgcattgacatggataaa

SEQ ID NO: 349465 - DNA, 19 bp, Homo sapiens
  siRNA target sequence for ARHGEF9 (NM_015185.1,1894-1912).
cgcattgacatggataaat

SEQ ID NO: 349466 - DNA, 19 bp, Homo sapiens
  siRNA target sequence for ARHGEF9 (NM_015185.1,1997-2015).
ctgaggagatacatctgtt

SEQ ID NO: 349467 - DNA, 19 bp, Homo sapiens
  siRNA target sequence for ARHGEF9 (NM_015185.1,2150-2168).
gaaaagtccctaagcaaaa

SEQ ID NO: 349468 - DNA, 19 bp, Homo sapiens
  siRNA target sequence for ARHGEF9 (NM_015185.1,2210-2228).
caccgcaggacccgttaaa

SEQ ID NO: 349469 - DNA, 19 bp, Homo sapiens
  siRNA target sequence for ARHGEF9 (NM_015185.1,2213-2231).
cgcaggacccgttaaacca

SEQ ID NO: 349470 - DNA, 19 bp, Homo sapiens
  siRNA target sequence for ARHGEF9 (NM_015185.1,2261-2279).
ctcagtcgcaggtctttga

SEQ ID NO: 349471 - DNA, 19 bp, Homo sapiens
  siRNA target sequence for ARHGEF9 (NM_015185.1,2263-2281).
cagtcgcaggtctttgagt

SEQ ID NO: 349472 - DNA, 19 bp, Homo sapiens
  siRNA target sequence for ARHGEF9 (NM_015185.1,2317-2335).
caaaacttcagcaggttaa

SEQ ID NO: 349473 - DNA, 19 bp, Homo sapiens
  siRNA target sequence for ARHGEF9 (NM_015185.1,2328-2346).
caggttaacccccttcaaa

SEQ ID NO: 349474 - DNA, 19 bp, Homo sapiens
  siRNA target sequence for ARHGEF9 (NM_015185.1,2330-2348).
ggttaacccccttcaaaaa

SEQ ID NO: 349475 - DNA, 19 bp, Homo sapiens
  siRNA target sequence for KIAA0746 (NM_015187.1,450-468).
ggtttacagagatgattat

SEQ ID NO: 349476 - DNA, 19 bp, Homo sapiens
  siRNA target sequence for KIAA0746 (NM_015187.1,486-504).
ctctgtatctgcagtgata

SEQ ID NO: 349477 - DNA, 19 bp, Homo sapiens
  siRNA target sequence for KIAA0746 (NM_015187.1,510-528).
cgcctggattactcacaaa

SEQ ID NO: 349478 - DNA, 19 bp, Homo sapiens
  siRNA target sequence for KIAA0746 (NM_015187.1,577-595).
gctgtagcaaagaattata

SEQ ID NO: 349479 - DNA, 19 bp, Homo sapiens
  siRNA target sequence for KIAA0746 (NM_015187.1,606-624).
gaccatcccgccttttgaa

SEQ ID NO: 349480 - DNA, 19 bp, Homo sapiens
  siRNA target sequence for KIAA0746 (NM_015187.1,617-635).
cttttgaacgccctttcaa

SEQ ID NO: 349481 - DNA, 19 bp, Homo sapiens
  siRNA target sequence for KIAA0746 (NM_015187.1,657-675).
gtggaacatgggttatatt

SEQ ID NO: 349482 - DNA, 19 bp, Homo sapiens
  siRNA target sequence for KIAA0746 (NM_015187.1,730-748).
gccctgcttggctttcctt

SEQ ID NO: 349483 - DNA, 19 bp, Homo sapiens
  siRNA target sequence for KIAA0746 (NM_015187.1,731-749).
ccctgcttggctttcctta

SEQ ID NO: 349484 - DNA, 19 bp, Homo sapiens
  siRNA target sequence for KIAA0746 (NM_015187.1,770-788).
caggcattgtcaagaagtt

SEQ ID NO: 349485 - DNA, 19 bp, Homo sapiens
  siRNA target sequence for KIAA0746 (NM_015187.1,823-841).
cgacgccagaggatggatt

SEQ ID NO: 349486 - DNA, 19 bp, Homo sapiens
  siRNA target sequence for KIAA0746 (NM_015187.1,905-923).
ggattctgtactttgttga

SEQ ID NO: 349487 - DNA, 19 bp, Homo sapiens
  siRNA target sequence for KIAA0746 (NM_015187.1,912-930).
gtactttgttgactctaat

SEQ ID NO: 349488 - DNA, 19 bp, Homo sapiens
  siRNA target sequence for KIAA0746 (NM_015187.1,939-957).
cggcacaccttctgtattt

SEQ ID NO: 349489 - DNA, 19 bp, Homo sapiens
  siRNA target sequence for KIAA0746 (NM_015187.1,962-980).
cggaagagggctatttgca

SEQ ID NO: 349490 - DNA, 19 bp, Homo sapiens
  siRNA target sequence for KIAA0746 (NM_015187.1,1057-1075).
cgactggatatctctttta

SEQ ID NO: 349491 - DNA, 19 bp, Homo sapiens
  siRNA target sequence for KIAA0746 (NM_015187.1,1058-1076).
gactggatatctcttttaa

SEQ ID NO: 349492 - DNA, 19 bp, Homo sapiens
  siRNA target sequence for KIAA0746 (NM_015187.1,1077-1095).
cggaggccagatagtagta

SEQ ID NO: 349493 - DNA, 19 bp, Homo sapiens
  siRNA target sequence for KIAA0746 (NM_015187.1,1129-1147).
cacaatcagaccattagct

SEQ ID NO: 349494 - DNA, 19 bp, Homo sapiens
  siRNA target sequence for KIAA0746 (NM_015187.1,1149-1167).
ccgggaggatttccattat

SEQ ID NO: 349495 - DNA, 19 bp, Homo sapiens
  siRNA target sequence for KIAA0746 (NM_015187.1,1150-1168).
cgggaggatttccattata

SEQ ID NO: 349496 - DNA, 19 bp, Homo sapiens
  siRNA target sequence for KIAA0746 (NM_015187.1,1152-1170).
ggaggatttccattataat

SEQ ID NO: 349497 - DNA, 19 bp, Homo sapiens
  siRNA target sequence for KIAA0746 (NM_015187.1,1175-1193).
cagctgggtacttcattat

SEQ ID NO: 349498 - DNA, 19 bp, Homo sapiens
  siRNA target sequence for KIAA0746 (NM_015187.1,1306-1324).
cttgctgaacaaatcaagt

SEQ ID NO: 349499 - DNA, 19 bp, Homo sapiens
  siRNA target sequence for KIAA0746 (NM_015187.1,1347-1365).
ggttcaagaaatagtatct

SEQ ID NO: 349500 - DNA, 19 bp, Homo sapiens
  siRNA target sequence for KIAA0746 (NM_015187.1,1682-1700).
gctgctgtggataccataa

SEQ ID NO: 349501 - DNA, 19 bp, Homo sapiens
  siRNA target sequence for KIAA0746 (NM_015187.1,1759-1777).
ctgcagggcatgttgtata

SEQ ID NO: 349502 - DNA, 19 bp, Homo sapiens
  siRNA target sequence for KIAA0746 (NM_015187.1,1799-1817).
gtgagaggctgtcttcaat

SEQ ID NO: 349503 - DNA, 19 bp, Homo sapiens
  siRNA target sequence for KIAA0746 (NM_015187.1,1805-1823).
ggctgtcttcaatgaatct

SEQ ID NO: 349504 - DNA, 19 bp, Homo sapiens
  siRNA target sequence for KIAA0746 (NM_015187.1,1806-1824).
gctgtcttcaatgaatctt

SEQ ID NO: 349505 - DNA, 19 bp, Homo sapiens
  siRNA target sequence for KIAA0746 (NM_015187.1,1834-1852).
cactaccagggtattgaca

SEQ ID NO: 349506 - DNA, 19 bp, Homo sapiens
  siRNA target sequence for KIAA0746 (NM_015187.1,1873-1891).
ctgtcgtatgcctactaca

SEQ ID NO: 349507 - DNA, 19 bp, Homo sapiens
  siRNA target sequence for KIAA0746 (NM_015187.1,1937-1955).
gagatcaggcatatgttga

SEQ ID NO: 349508 - DNA, 19 bp, Homo sapiens
  siRNA target sequence for KIAA0746 (NM_015187.1,1939-1957).
gatcaggcatatgttgaaa

SEQ ID NO: 349509 - DNA, 19 bp, Homo sapiens
  siRNA target sequence for KIAA0746 (NM_015187.1,1945-1963).
gcatatgttgaaacaatta

SEQ ID NO: 349510 - DNA, 19 bp, Homo sapiens
  siRNA target sequence for KIAA0746 (NM_015187.1,2097-2115).
gcaaggtgtggccaagaat

SEQ ID NO: 349511 - DNA, 19 bp, Homo sapiens
  siRNA target sequence for KIAA0746 (NM_015187.1,2112-2130).
gaatcccgaagcagcaatt

SEQ ID NO: 349512 - DNA, 19 bp, Homo sapiens
  siRNA target sequence for KIAA0746 (NM_015187.1,2116-2134).
cccgaagcagcaattgagt

SEQ ID NO: 349513 - DNA, 19 bp, Homo sapiens
  siRNA target sequence for KIAA0746 (NM_015187.1,2159-2177).
cggaggatcctgcgttaat

SEQ ID NO: 349514 - DNA, 19 bp, Homo sapiens
  siRNA target sequence for KIAA0746 (NM_015187.1,2161-2179).
gaggatcctgcgttaatct

SEQ ID NO: 349515 - DNA, 19 bp, Homo sapiens
  siRNA target sequence for KIAA0746 (NM_015187.1,2163-2181).
ggatcctgcgttaatctat

SEQ ID NO: 349516 - DNA, 19 bp, Homo sapiens
  siRNA target sequence for KIAA0746 (NM_015187.1,2167-2185).
cctgcgttaatctatgact

SEQ ID NO: 349517 - DNA, 19 bp, Homo sapiens
  siRNA target sequence for KIAA0746 (NM_015187.1,2168-2186).
ctgcgttaatctatgacta

SEQ ID NO: 349518 - DNA, 19 bp, Homo sapiens
  siRNA target sequence for KIAA0746 (NM_015187.1,2286-2304).
caatggcctgggatggtat

SEQ ID NO: 349519 - DNA, 19 bp, Homo sapiens
  siRNA target sequence for KIAA0746 (NM_015187.1,2291-2309).
gcctgggatggtattacca

SEQ ID NO: 349520 - DNA, 19 bp, Homo sapiens
  siRNA target sequence for KIAA0746 (NM_015187.1,2300-2318).
ggtattaccacaaattcaa

SEQ ID NO: 349521 - DNA, 19 bp, Homo sapiens
  siRNA target sequence for KIAA0746 (NM_015187.1,2373-2391).
cccagatgcgtcatacaat

SEQ ID NO: 349522 - DNA, 19 bp, Homo sapiens
  siRNA target sequence for KIAA0746 (NM_015187.1,2375-2393).
cagatgcgtcatacaatct

SEQ ID NO: 349523 - DNA, 19 bp, Homo sapiens
  siRNA target sequence for KIAA0746 (NM_015187.1,2507-2525).
ggtgttctctctactatat

SEQ ID NO: 349524 - DNA, 19 bp, Homo sapiens
  siRNA target sequence for KIAA0746 (NM_015187.1,2787-2805).
gagatactataatttctct

SEQ ID NO: 349525 - DNA, 19 bp, Homo sapiens
  siRNA target sequence for KIAA0746 (NM_015187.1,2802-2820).
ctctgtttttcaaatcgat

SEQ ID NO: 349526 - DNA, 19 bp, Homo sapiens
  siRNA target sequence for KIAA0746 (NM_015187.1,2939-2957).
cccagggattttttaacct

SEQ ID NO: 349527 - DNA, 19 bp, Homo sapiens
  siRNA target sequence for KIAA0746 (NM_015187.1,3021-3039).
ctcaactctccattctaat

SEQ ID NO: 349528 - DNA, 19 bp, Homo sapiens
  siRNA target sequence for KIAA0746 (NM_015187.1,3023-3041).
caactctccattctaataa

SEQ ID NO: 349529 - DNA, 19 bp, Homo sapiens
  siRNA target sequence for KIAA0746 (NM_015187.1,3052-3070).
ctccaggaactgtacgaaa

SEQ ID NO: 349530 - DNA, 19 bp, Homo sapiens
  siRNA target sequence for KIAA0746 (NM_015187.1,3165-3183).
ctcagccctgatctacttt

SEQ ID NO: 349531 - DNA, 19 bp, Homo sapiens
  siRNA target sequence for KIAA0746 (NM_015187.1,3188-3206).
gaacctttctgctatccat

SEQ ID NO: 349532 - DNA, 19 bp, Homo sapiens
  siRNA target sequence for KIAA0746 (NM_015187.1,3343-3361).
caagaccagcccacagtaa

SEQ ID NO: 349533 - DNA, 19 bp, Homo sapiens
  siRNA target sequence for KIAA0746 (NM_015187.1,3346-3364).
gaccagcccacagtaacta

SEQ ID NO: 349534 - DNA, 19 bp, Homo sapiens
  siRNA target sequence for DNAJC9 (NM_015190.3,374-392).
cgtattggcggctactctt

SEQ ID NO: 349535 - DNA, 19 bp, Homo sapiens
  siRNA target sequence for DNAJC9 (NM_015190.3,375-393).
gtattggcggctactcttt

SEQ ID NO: 349536 - DNA, 19 bp, Homo sapiens
  siRNA target sequence for DNAJC9 (NM_015190.3,382-400).
cggctactctttaaaaaga

SEQ ID NO: 349537 - DNA, 19 bp, Homo sapiens
  siRNA target sequence for DNAJC9 (NM_015190.3,451-469).
gaagagctggctgatatta

SEQ ID NO: 349538 - DNA, 19 bp, Homo sapiens
  siRNA target sequence for DNAJC9 (NM_015190.3,547-565).
cccaggataaggaatatca

SEQ ID NO: 349539 - DNA, 19 bp, Homo sapiens
  siRNA target sequence for DNAJC9 (NM_015190.3,548-566).
ccaggataaggaatatcat

SEQ ID NO: 349540 - DNA, 19 bp, Homo sapiens
  siRNA target sequence for DNAJC9 (NM_015190.3,549-567).
caggataaggaatatcatt

SEQ ID NO: 349541 - DNA, 19 bp, Homo sapiens
  siRNA target sequence for DNAJC9 (NM_015190.3,587-605).
gagaggtcccatcctataa

SEQ ID NO: 349542 - DNA, 19 bp, Homo sapiens
  siRNA target sequence for DNAJC9 (NM_015190.3,599-617).
cctataatgcctttgtcaa

SEQ ID NO: 349543 - DNA, 19 bp, Homo sapiens
  siRNA target sequence for DNAJC9 (NM_015190.3,608-626).
cctttgtcaaagaatcgaa

SEQ ID NO: 349544 - DNA, 19 bp, Homo sapiens
  siRNA target sequence for DNAJC9 (NM_015190.3,613-631).
gtcaaagaatcgaaacaaa

SEQ ID NO: 349545 - DNA, 19 bp, Homo sapiens
  siRNA target sequence for DNAJC9 (NM_015190.3,733-751).
gccattcagagcagacaaa

SEQ ID NO: 349546 - DNA, 19 bp, Homo sapiens
  siRNA target sequence for DNAJC9 (NM_015190.3,734-752).
ccattcagagcagacaaaa

SEQ ID NO: 349547 - DNA, 19 bp, Homo sapiens
  siRNA target sequence for DNAJC9 (NM_015190.3,785-803).
ctcagatggaagcaaagta

SEQ ID NO: 349548 - DNA, 19 bp, Homo sapiens
  siRNA target sequence for ARC (NM_015193.2,828-846).
gcgtggacacgcagatctt

SEQ ID NO: 349549 - DNA, 19 bp, Homo sapiens
  siRNA target sequence for KIAA0922 (NM_015196.2,525-543).
cgtatggagtcctttccta

SEQ ID NO: 349550 - DNA, 19 bp, Homo sapiens
  siRNA target sequence for KIAA0922 (NM_015196.2,526-544).
gtatggagtcctttcctat

SEQ ID NO: 349551 - DNA, 19 bp, Homo sapiens
  siRNA target sequence for KIAA0922 (NM_015196.2,531-549).
gagtcctttcctatcatgt

SEQ ID NO: 349552 - DNA, 19 bp, Homo sapiens
  siRNA target sequence for KIAA0922 (NM_015196.2,533-551).
gtcctttcctatcatgtat

SEQ ID NO: 349553 - DNA, 19 bp, Homo sapiens
  siRNA target sequence for KIAA0922 (NM_015196.2,555-573).
gaattggcactcgtagaat

SEQ ID NO: 349554 - DNA, 19 bp, Homo sapiens
  siRNA target sequence for KIAA0922 (NM_015196.2,560-578).
ggcactcgtagaatctcta

SEQ ID NO: 349555 - DNA, 19 bp, Homo sapiens
  siRNA target sequence for KIAA0922 (NM_015196.2,588-606).
ctgcaaagcagctaccaaa

SEQ ID NO: 349556 - DNA, 19 bp, Homo sapiens
  siRNA target sequence for KIAA0922 (NM_015196.2,595-613).
gcagctaccaaatgcttat

SEQ ID NO: 349557 - DNA, 19 bp, Homo sapiens
  siRNA target sequence for KIAA0922 (NM_015196.2,596-614).
cagctaccaaatgcttatt

SEQ ID NO: 349558 - DNA, 19 bp, Homo sapiens
  siRNA target sequence for KIAA0922 (NM_015196.2,658-676).
ggcagaaaccactaatact

SEQ ID NO: 349559 - DNA, 19 bp, Homo sapiens
  siRNA target sequence for KIAA0922 (NM_015196.2,702-720).
gcagtttacataataaagt

SEQ ID NO: 349560 - DNA, 19 bp, Homo sapiens
  siRNA target sequence for KIAA0922 (NM_015196.2,761-779).
gttttgcgtctacaaatga

SEQ ID NO: 349561 - DNA, 19 bp, Homo sapiens
  siRNA target sequence for KIAA0922 (NM_015196.2,767-785).
cgtctacaaatgagcataa

SEQ ID NO: 349562 - DNA, 19 bp, Homo sapiens
  siRNA target sequence for KIAA0922 (NM_015196.2,787-805).
ggtaacaatggaaaacttt

SEQ ID NO: 349563 - DNA, 19 bp, Homo sapiens
  siRNA target sequence for KIAA0922 (NM_015196.2,826-844).
cacacaacatttgttagat

SEQ ID NO: 349564 - DNA, 19 bp, Homo sapiens
  siRNA target sequence for KIAA0922 (NM_015196.2,828-846).
cacaacatttgttagatca

SEQ ID NO: 349565 - DNA, 19 bp, Homo sapiens
  siRNA target sequence for KIAA0922 (NM_015196.2,862-880).
cgtagctacagatgaatct

SEQ ID NO: 349566 - DNA, 19 bp, Homo sapiens
  siRNA target sequence for KIAA0922 (NM_015196.2,897-915).
cagcagtaaatatgtatat

SEQ ID NO: 349567 - DNA, 19 bp, Homo sapiens
  siRNA target sequence for KIAA0922 (NM_015196.2,949-967).
ggatatacgccatttctca

SEQ ID NO: 349568 - DNA, 19 bp, Homo sapiens
  siRNA target sequence for KIAA0922 (NM_015196.2,1075-1093).
cagtggaattatagaagat

SEQ ID NO: 349569 - DNA, 19 bp, Homo sapiens
  siRNA target sequence for KIAA0922 (NM_015196.2,1077-1095).
gtggaattatagaagatgt

SEQ ID NO: 349570 - DNA, 19 bp, Homo sapiens
  siRNA target sequence for KIAA0922 (NM_015196.2,1429-1447).
cataggtgccatttttgca

SEQ ID NO: 349571 - DNA, 19 bp, Homo sapiens
  siRNA target sequence for KIAA0922 (NM_015196.2,1508-1526).
gcacattgtggcatgcatt

SEQ ID NO: 349572 - DNA, 19 bp, Homo sapiens
  siRNA target sequence for KIAA0922 (NM_015196.2,1509-1527).
cacattgtggcatgcatta

SEQ ID NO: 349573 - DNA, 19 bp, Homo sapiens
  siRNA target sequence for KIAA0922 (NM_015196.2,1563-1581).
ggaatgggagcctttctct

SEQ ID NO: 349574 - DNA, 19 bp, Homo sapiens
  siRNA target sequence for KIAA0922 (NM_015196.2,1574-1592).
ctttctctggatcaatcta

SEQ ID NO: 349575 - DNA, 19 bp, Homo sapiens
  siRNA target sequence for KIAA0922 (NM_015196.2,1603-1621).
ggattctgaacttgcaaat

SEQ ID NO: 349576 - DNA, 19 bp, Homo sapiens
  siRNA target sequence for KIAA0922 (NM_015196.2,1604-1622).
gattctgaacttgcaaata

SEQ ID NO: 349577 - DNA, 19 bp, Homo sapiens
  siRNA target sequence for KIAA0922 (NM_015196.2,1763-1781).
cctggcctcatgttaaact

SEQ ID NO: 349578 - DNA, 19 bp, Homo sapiens
  siRNA target sequence for KIAA0922 (NM_015196.2,1796-1814).
cttaggagcaggatgatca

SEQ ID NO: 349579 - DNA, 19 bp, Homo sapiens
  siRNA target sequence for KIAA0922 (NM_015196.2,1804-1822).
caggatgatcaagtacttt

SEQ ID NO: 349580 - DNA, 19 bp, Homo sapiens
  siRNA target sequence for KIAA0922 (NM_015196.2,1906-1924).
cctgctccacagatggttt

SEQ ID NO: 349581 - DNA, 19 bp, Homo sapiens
  siRNA target sequence for KIAA0922 (NM_015196.2,1917-1935).
gatggtttggcactgatat

SEQ ID NO: 349582 - DNA, 19 bp, Homo sapiens
  siRNA target sequence for KIAA0922 (NM_015196.2,1920-1938).
ggtttggcactgatatgca

SEQ ID NO: 349583 - DNA, 19 bp, Homo sapiens
  siRNA target sequence for KIAA0922 (NM_015196.2,1926-1944).
gcactgatatgcagatgat

SEQ ID NO: 349584 - DNA, 19 bp, Homo sapiens
  siRNA target sequence for KIAA0922 (NM_015196.2,1936-1954).
gcagatgattaatttcaca

SEQ ID NO: 349585 - DNA, 19 bp, Homo sapiens
  siRNA target sequence for KIAA0922 (NM_015196.2,2022-2040).
gcatcctccacttacatct

SEQ ID NO: 349586 - DNA, 19 bp, Homo sapiens
  siRNA target sequence for KIAA0922 (NM_015196.2,2079-2097).
cacctgctgactatggaaa

SEQ ID NO: 349587 - DNA, 19 bp, Homo sapiens
  siRNA target sequence for KIAA0922 (NM_015196.2,2114-2132).
ctaatccggaataacttga

SEQ ID NO: 349588 - DNA, 19 bp, Homo sapiens
  siRNA target sequence for KIAA0922 (NM_015196.2,2120-2138).
cggaataacttgactgtta

SEQ ID NO: 349589 - DNA, 19 bp, Homo sapiens
  siRNA target sequence for KIAA0922 (NM_015196.2,2165-2183).
ggagcaagagagttattaa

SEQ ID NO: 349590 - DNA, 19 bp, Homo sapiens
  siRNA target sequence for KIAA0922 (NM_015196.2,2210-2228).
ggaggctcactccgattta

SEQ ID NO: 349591 - DNA, 19 bp, Homo sapiens
  siRNA target sequence for KIAA0922 (NM_015196.2,2211-2229).
gaggctcactccgatttaa

SEQ ID NO: 349592 - DNA, 19 bp, Homo sapiens
  siRNA target sequence for KIAA0922 (NM_015196.2,2248-2266).
gatggactgccgtagacaa

SEQ ID NO: 349593 - DNA, 19 bp, Homo sapiens
  siRNA target sequence for KIAA0922 (NM_015196.2,2256-2274).
gccgtagacaactgaaaga

SEQ ID NO: 349594 - DNA, 19 bp, Homo sapiens
  siRNA target sequence for KIAA0922 (NM_015196.2,2277-2295).
gtaagcaaattttatctat

SEQ ID NO: 349595 - DNA, 19 bp, Homo sapiens
  siRNA target sequence for KIAA0922 (NM_015196.2,2340-2358).
ctgtttcgtctctgaaaat

SEQ ID NO: 349596 - DNA, 19 bp, Homo sapiens
  siRNA target sequence for KIAA0922 (NM_015196.2,2389-2407).
cgaggtgctggattgtcat

SEQ ID NO: 349597 - DNA, 19 bp, Homo sapiens
  siRNA target sequence for KIAA0922 (NM_015196.2,2435-2453).
cgcgatatcagcattgtgt

SEQ ID NO: 349598 - DNA, 19 bp, Homo sapiens
  siRNA target sequence for KIAA0922 (NM_015196.2,2486-2504).
cgggacctaagtcttgtaa

SEQ ID NO: 349599 - DNA, 19 bp, Homo sapiens
  siRNA target sequence for KIAA0922 (NM_015196.2,2505-2523).
ccgcagcggacctagaatt

SEQ ID NO: 349600 - DNA, 19 bp, Homo sapiens
  siRNA target sequence for KIAA0922 (NM_015196.2,2506-2524).
cgcagcggacctagaattt

SEQ ID NO: 349601 - DNA, 19 bp, Homo sapiens
  siRNA target sequence for KIAA0922 (NM_015196.2,2614-2632).
gaggctcacggtcttcttt

SEQ ID NO: 349602 - DNA, 19 bp, Homo sapiens
  siRNA target sequence for KIAA0922 (NM_015196.2,2618-2636).
ctcacggtcttctttgtca

SEQ ID NO: 349603 - DNA, 19 bp, Homo sapiens
  siRNA target sequence for KIAA0922 (NM_015196.2,2622-2640).
cggtcttctttgtcagttt

SEQ ID NO: 349604 - DNA, 19 bp, Homo sapiens
  siRNA target sequence for KIAA0922 (NM_015196.2,2641-2659).
gtccctgttgggtgtgatt

SEQ ID NO: 349605 - DNA, 19 bp, Homo sapiens
  siRNA target sequence for KIAA0922 (NM_015196.2,2643-2661).
ccctgttgggtgtgatttt

SEQ ID NO: 349606 - DNA, 19 bp, Homo sapiens
  siRNA target sequence for KIAA0922 (NM_015196.2,2647-2665).
gttgggtgtgattttaata

SEQ ID NO: 349607 - DNA, 19 bp, Homo sapiens
  siRNA target sequence for KIAA0922 (NM_015196.2,2681-2699).
cagtacattctcatggaat

SEQ ID NO: 349608 - DNA, 19 bp, Homo sapiens
  siRNA target sequence for KIAA0922 (NM_015196.2,2765-2783).
gtaatcagcccccattctt

SEQ ID NO: 349609 - DNA, 19 bp, Homo sapiens
  siRNA target sequence for KIAA0922 (NM_015196.2,2781-2799).
cttacaaaagcaattgcaa

SEQ ID NO: 349610 - DNA, 19 bp, Homo sapiens
  siRNA target sequence for KIAA0922 (NM_015196.2,2814-2832).
catatggcccctctgataa

SEQ ID NO: 349611 - DNA, 19 bp, Homo sapiens
  siRNA target sequence for KIAA0922 (NM_015196.2,2994-3012).
gcacgactactgaggaaaa

SEQ ID NO: 349612 - DNA, 19 bp, Homo sapiens
  siRNA target sequence for KIAA0922 (NM_015196.2,3044-3062).
gctgctaaagaggacattt

SEQ ID NO: 349613 - DNA, 19 bp, Homo sapiens
  siRNA target sequence for KIAA0922 (NM_015196.2,3088-3106).
gatcagcctcagatatgca

SEQ ID NO: 349614 - DNA, 19 bp, Homo sapiens
  siRNA target sequence for KIAA0922 (NM_015196.2,3104-3122).
gcaagtggcataaatgtca

SEQ ID NO: 349615 - DNA, 19 bp, Homo sapiens
  siRNA target sequence for KIAA0922 (NM_015196.2,3141-3159).
cccttcccaaaaacttact

SEQ ID NO: 349616 - DNA, 19 bp, Homo sapiens
  siRNA target sequence for KIAA0922 (NM_015196.2,3143-3161).
cttcccaaaaacttactga

SEQ ID NO: 349617 - DNA, 19 bp, Homo sapiens
  siRNA target sequence for KIAA0922 (NM_015196.2,3222-3240).
gtatgaaggagggaataca

SEQ ID NO: 349618 - DNA, 19 bp, Homo sapiens
  siRNA target sequence for KIAA0922 (NM_015196.2,3334-3352).
gaaactacctgaaaaccat

SEQ ID NO: 349619 - DNA, 19 bp, Homo sapiens
  siRNA target sequence for KIAA0922 (NM_015196.2,3478-3496).
ggacacaaagccttcttca

SEQ ID NO: 349620 - DNA, 19 bp, Homo sapiens
  siRNA target sequence for KIAA0922 (NM_015196.2,3505-3523).
gattcacaaaacatctaga

SEQ ID NO: 349621 - DNA, 19 bp, Homo sapiens
  siRNA target sequence for KIAA0922 (NM_015196.2,3516-3534).
catctagagaagacatgtt

SEQ ID NO: 349622 - DNA, 19 bp, Homo sapiens
  siRNA target sequence for KIAA0922 (NM_015196.2,3555-3573).
ctttcgtagagcaagaaga

SEQ ID NO: 349623 - DNA, 19 bp, Homo sapiens
  siRNA target sequence for KIAA0922 (NM_015196.2,3634-3652).
gagtaaaagtcgaacatgt

SEQ ID NO: 349624 - DNA, 19 bp, Homo sapiens
  siRNA target sequence for KIAA0922 (NM_015196.2,3642-3660).
gtcgaacatgtagaaagaa

SEQ ID NO: 349625 - DNA, 19 bp, Homo sapiens
  siRNA target sequence for KIAA0922 (NM_015196.2,3695-3713).
cctgaacagagtgatctaa

SEQ ID NO: 349626 - DNA, 19 bp, Homo sapiens
  siRNA target sequence for KIAA0922 (NM_015196.2,3715-3733).
gcttgtgtgcagtgacttt

SEQ ID NO: 349627 - DNA, 19 bp, Homo sapiens
  siRNA target sequence for KIAA0922 (NM_015196.2,3719-3737).
gtgtgcagtgactttgaga

SEQ ID NO: 349628 - DNA, 19 bp, Homo sapiens
  siRNA target sequence for KIAA0922 (NM_015196.2,3745-3763).
gctgagcagtgacatcaat

SEQ ID NO: 349629 - DNA, 19 bp, Homo sapiens
  siRNA target sequence for KIAA0922 (NM_015196.2,3748-3766).
gagcagtgacatcaatgta

SEQ ID NO: 349630 - DNA, 19 bp, Homo sapiens
  siRNA target sequence for KIAA0922 (NM_015196.2,3790-3808).
cactagggaggtttgtaaa

SEQ ID NO: 349631 - DNA, 19 bp, Homo sapiens
  siRNA target sequence for KIAA0922 (NM_015196.2,3809-3827).
gcagatgccgaaattgcaa

SEQ ID NO: 349632 - DNA, 19 bp, Homo sapiens
  siRNA target sequence for KIAA0922 (NM_015196.2,3871-3889).
gaagcctgagaagaaatgt

SEQ ID NO: 349633 - DNA, 19 bp, Homo sapiens
  siRNA target sequence for KIAA0922 (NM_015196.2,3990-4008).
gctccgacggggataagaa

SEQ ID NO: 349634 - DNA, 19 bp, Homo sapiens
  siRNA target sequence for KIAA0922 (NM_015196.2,4087-4105).
ctccttgaatctttctcat

SEQ ID NO: 349635 - DNA, 19 bp, Homo sapiens
  siRNA target sequence for KIAA0922 (NM_015196.2,4119-4137).
ccatgaccgtgaatagtct

SEQ ID NO: 349636 - DNA, 19 bp, Homo sapiens
  siRNA target sequence for KIAA0922 (NM_015196.2,4196-4214).
gaagataaaggtctttact

SEQ ID NO: 349637 - DNA, 19 bp, Homo sapiens
  siRNA target sequence for KIAA0922 (NM_015196.2,4248-4266).
gtgtgacaagcagcttaaa

SEQ ID NO: 349638 - DNA, 19 bp, Homo sapiens
  siRNA target sequence for KIAA0922 (NM_015196.2,4282-4300).
cggcgtgccttgtgtgatt

SEQ ID NO: 349639 - DNA, 19 bp, Homo sapiens
  siRNA target sequence for KIAA0922 (NM_015196.2,4284-4302).
gcgtgccttgtgtgattca

SEQ ID NO: 349640 - DNA, 19 bp, Homo sapiens
  siRNA target sequence for KIAA0922 (NM_015196.2,4313-4331).
ccggttcataatagtttca

SEQ ID NO: 349641 - DNA, 19 bp, Homo sapiens
  siRNA target sequence for KIAA0922 (NM_015196.2,4360-4378).
gttttccagcgcatactgt

SEQ ID NO: 349642 - DNA, 19 bp, Homo sapiens
  siRNA target sequence for KIAA0922 (NM_015196.2,4379-4397).
ccattggaattgaacgatt

SEQ ID NO: 349643 - DNA, 19 bp, Homo sapiens
  siRNA target sequence for KIAA0922 (NM_015196.2,4380-4398).
cattggaattgaacgatta

SEQ ID NO: 349644 - DNA, 19 bp, Homo sapiens
  siRNA target sequence for KIAA0922 (NM_015196.2,4384-4402).
ggaattgaacgattacaat

SEQ ID NO: 349645 - DNA, 19 bp, Homo sapiens
  siRNA target sequence for KIAA0922 (NM_015196.2,4529-4547).
ggacatgccagtttcatca

SEQ ID NO: 349646 - DNA, 19 bp, Homo sapiens
  siRNA target sequence for KIAA0922 (NM_015196.2,4620-4638).
cgcaaagcgatgtgtatga

SEQ ID NO: 349647 - DNA, 19 bp, Homo sapiens
  siRNA target sequence for KIAA0922 (NM_015196.2,4670-4688).
cattcgacccacatggaaa

SEQ ID NO: 349648 - DNA, 19 bp, Homo sapiens
  siRNA target sequence for KIAA0922 (NM_015196.2,4730-4748).
ccgtttcgcgcctatatga

SEQ ID NO: 349649 - DNA, 19 bp, Homo sapiens
  siRNA target sequence for KIAA0922 (NM_015196.2,4731-4749).
cgtttcgcgcctatatgaa

SEQ ID NO: 349650 - DNA, 19 bp, Homo sapiens
  siRNA target sequence for KIAA0922 (NM_015196.2,4764-4782).
ctaccacagcgaataggaa

SEQ ID NO: 349651 - DNA, 19 bp, Homo sapiens
  siRNA target sequence for KIAA0922 (NM_015196.2,4772-4790).
gcgaataggaatgcaaatt

SEQ ID NO: 349652 - DNA, 19 bp, Homo sapiens
  siRNA target sequence for COBL (NM_015198.2,495-513).
cagaaacccaacaaccttt

SEQ ID NO: 349653 - DNA, 19 bp, Homo sapiens
  siRNA target sequence for COBL (NM_015198.2,503-521).
caacaacctttgagtttta

SEQ ID NO: 349654 - DNA, 19 bp, Homo sapiens
  siRNA target sequence for COBL (NM_015198.2,607-625).
ccctaaggtgcctgagaaa

SEQ ID NO: 349655 - DNA, 19 bp, Homo sapiens
  siRNA target sequence for COBL (NM_015198.2,608-626).
cctaaggtgcctgagaaat

SEQ ID NO: 349656 - DNA, 19 bp, Homo sapiens
  siRNA target sequence for COBL (NM_015198.2,629-647).
gtgcgtttggtcgtgaatt

SEQ ID NO: 349657 - DNA, 19 bp, Homo sapiens
  siRNA target sequence for COBL (NM_015198.2,633-651).
gtttggtcgtgaattacct

SEQ ID NO: 349658 - DNA, 19 bp, Homo sapiens
  siRNA target sequence for COBL (NM_015198.2,649-667).
cctgcggacacaaaaagct

SEQ ID NO: 349659 - DNA, 19 bp, Homo sapiens
  siRNA target sequence for COBL (NM_015198.2,688-706).
ggttcctctccagaatatt

SEQ ID NO: 349660 - DNA, 19 bp, Homo sapiens
  siRNA target sequence for COBL (NM_015198.2,940-958).
caatagtaagggctgttta

SEQ ID NO: 349661 - DNA, 19 bp, Homo sapiens
  siRNA target sequence for COBL (NM_015198.2,979-997).
catgcactcacgttctctt

SEQ ID NO: 349662 - DNA, 19 bp, Homo sapiens
  siRNA target sequence for COBL (NM_015198.2,1041-1059).
ccgtgaagtcggagatgaa

SEQ ID NO: 349663 - DNA, 19 bp, Homo sapiens
  siRNA target sequence for COBL (NM_015198.2,1092-1110).
ggccacctgtgcaagacaa

SEQ ID NO: 349664 - DNA, 19 bp, Homo sapiens
  siRNA target sequence for COBL (NM_015198.2,1108-1126).
caaggcatcggaaaaggta

SEQ ID NO: 349665 - DNA, 19 bp, Homo sapiens
  siRNA target sequence for COBL (NM_015198.2,1113-1131).
catcggaaaaggtatctct

SEQ ID NO: 349666 - DNA, 19 bp, Homo sapiens
  siRNA target sequence for COBL (NM_015198.2,1128-1146).
ctcttgggtcacagattga

SEQ ID NO: 349667 - DNA, 19 bp, Homo sapiens
  siRNA target sequence for COBL (NM_015198.2,1130-1148).
cttgggtcacagattgatt

SEQ ID NO: 349668 - DNA, 19 bp, Homo sapiens
  siRNA target sequence for COBL (NM_015198.2,1218-1236).
ccaaccgcactgaggataa

SEQ ID NO: 349669 - DNA, 19 bp, Homo sapiens
  siRNA target sequence for COBL (NM_015198.2,1382-1400).
gactcaggagtgatgagtt

SEQ ID NO: 349670 - DNA, 19 bp, Homo sapiens
  siRNA target sequence for COBL (NM_015198.2,1433-1451).
caggacagcatgaaataca

SEQ ID NO: 349671 - DNA, 19 bp, Homo sapiens
  siRNA target sequence for COBL (NM_015198.2,1531-1549).
ccccttgtgggagaagaat

SEQ ID NO: 349672 - DNA, 19 bp, Homo sapiens
  siRNA target sequence for COBL (NM_015198.2,1561-1579).
ctcacatctgagaactgaa

SEQ ID NO: 349673 - DNA, 19 bp, Homo sapiens
  siRNA target sequence for COBL (NM_015198.2,1622-1640).
gctggagagttccgtaaaa

SEQ ID NO: 349674 - DNA, 19 bp, Homo sapiens
  siRNA target sequence for COBL (NM_015198.2,1775-1793).
gatgcaatcccagtaacat

SEQ ID NO: 349675 - DNA, 19 bp, Homo sapiens
  siRNA target sequence for COBL (NM_015198.2,1778-1796).
gcaatcccagtaacattca

SEQ ID NO: 349676 - DNA, 19 bp, Homo sapiens
  siRNA target sequence for COBL (NM_015198.2,1779-1797).
caatcccagtaacattcat

SEQ ID NO: 349677 - DNA, 19 bp, Homo sapiens
  siRNA target sequence for COBL (NM_015198.2,1828-1846).
ggggttgttttccaataga

SEQ ID NO: 349678 - DNA, 19 bp, Homo sapiens
  siRNA target sequence for COBL (NM_015198.2,1897-1915).
ctccctggcgccacttcaa

SEQ ID NO: 349679 - DNA, 19 bp, Homo sapiens
  siRNA target sequence for COBL (NM_015198.2,1978-1996).
ccatgacgtcggaaaagga

SEQ ID NO: 349680 - DNA, 19 bp, Homo sapiens
  siRNA target sequence for COBL (NM_015198.2,1979-1997).
catgacgtcggaaaaggaa

SEQ ID NO: 349681 - DNA, 19 bp, Homo sapiens
  siRNA target sequence for COBL (NM_015198.2,2000-2018).
cgtgtggccttatctaaca

SEQ ID NO: 349682 - DNA, 19 bp, Homo sapiens
  siRNA target sequence for COBL (NM_015198.2,2001-2019).
gtgtggccttatctaacat

SEQ ID NO: 349683 - DNA, 19 bp, Homo sapiens
  siRNA target sequence for COBL (NM_015198.2,2003-2021).
gtggccttatctaacatct

SEQ ID NO: 349684 - DNA, 19 bp, Homo sapiens
  siRNA target sequence for COBL (NM_015198.2,2020-2038).
ctctaaagatgggaatcta

SEQ ID NO: 349685 - DNA, 19 bp, Homo sapiens
  siRNA target sequence for COBL (NM_015198.2,2022-2040).
ctaaagatgggaatctaat

SEQ ID NO: 349686 - DNA, 19 bp, Homo sapiens
  siRNA target sequence for COBL (NM_015198.2,2050-2068).
gcccagggtgacttctttt

SEQ ID NO: 349687 - DNA, 19 bp, Homo sapiens
  siRNA target sequence for COBL (NM_015198.2,2053-2071).
cagggtgacttcttttgct

SEQ ID NO: 349688 - DNA, 19 bp, Homo sapiens
  siRNA target sequence for COBL (NM_015198.2,2059-2077).
gacttcttttgcttcgaat

SEQ ID NO: 349689 - DNA, 19 bp, Homo sapiens
  siRNA target sequence for COBL (NM_015198.2,2064-2082).
cttttgcttcgaatcttca

SEQ ID NO: 349690 - DNA, 19 bp, Homo sapiens
  siRNA target sequence for COBL (NM_015198.2,2253-2271).
ggaaaagctacagacttaa

SEQ ID NO: 349691 - DNA, 19 bp, Homo sapiens
  siRNA target sequence for COBL (NM_015198.2,2272-2290).
gcacggcctcacaacgtat

SEQ ID NO: 349692 - DNA, 19 bp, Homo sapiens
  siRNA target sequence for COBL (NM_015198.2,2273-2291).
cacggcctcacaacgtata

SEQ ID NO: 349693 - DNA, 19 bp, Homo sapiens
  siRNA target sequence for COBL (NM_015198.2,2275-2293).
cggcctcacaacgtataaa

SEQ ID NO: 349694 - DNA, 19 bp, Homo sapiens
  siRNA target sequence for COBL (NM_015198.2,2276-2294).
ggcctcacaacgtataaaa

SEQ ID NO: 349695 - DNA, 19 bp, Homo sapiens
  siRNA target sequence for COBL (NM_015198.2,2277-2295).
gcctcacaacgtataaaat

SEQ ID NO: 349696 - DNA, 19 bp, Homo sapiens
  siRNA target sequence for COBL (NM_015198.2,2279-2297).
ctcacaacgtataaaatca

SEQ ID NO: 349697 - DNA, 19 bp, Homo sapiens
  siRNA target sequence for COBL (NM_015198.2,2346-2364).
ccaccggagccattaagat

SEQ ID NO: 349698 - DNA, 19 bp, Homo sapiens
  siRNA target sequence for COBL (NM_015198.2,2347-2365).
caccggagccattaagatt

SEQ ID NO: 349699 - DNA, 19 bp, Homo sapiens
  siRNA target sequence for COBL (NM_015198.2,2349-2367).
ccggagccattaagattga

SEQ ID NO: 349700 - DNA, 19 bp, Homo sapiens
  siRNA target sequence for COBL (NM_015198.2,2484-2502).
gcaactctgtggaaaaaca

SEQ ID NO: 349701 - DNA, 19 bp, Homo sapiens
  siRNA target sequence for COBL (NM_015198.2,2591-2609).
gcagaccccaagccaatat

SEQ ID NO: 349702 - DNA, 19 bp, Homo sapiens
  siRNA target sequence for COBL (NM_015198.2,2751-2769).
gaacgtccagccagtatgt

SEQ ID NO: 349703 - DNA, 19 bp, Homo sapiens
  siRNA target sequence for COBL (NM_015198.2,3032-3050).
ggcccacacaggaagttgt

SEQ ID NO: 349704 - DNA, 19 bp, Homo sapiens
  siRNA target sequence for COBL (NM_015198.2,3112-3130).
ccagagggatcgtgtttct

SEQ ID NO: 349705 - DNA, 19 bp, Homo sapiens
  siRNA target sequence for COBL (NM_015198.2,3376-3394).
cagtgtgttctctacagat

SEQ ID NO: 349706 - DNA, 19 bp, Homo sapiens
  siRNA target sequence for COBL (NM_015198.2,3434-3452).
gggccgaagaaaaaattca

SEQ ID NO: 349707 - DNA, 19 bp, Homo sapiens
  siRNA target sequence for KIAA0648 (NM_015200.1,348-366).
caggaaccccaataaagat

SEQ ID NO: 349708 - DNA, 19 bp, Homo sapiens
  siRNA target sequence for KIAA0648 (NM_015200.1,350-368).
ggaaccccaataaagatgt

SEQ ID NO: 349709 - DNA, 19 bp, Homo sapiens
  siRNA target sequence for KIAA0648 (NM_015200.1,386-404).
gttgtttggctgatatctt

SEQ ID NO: 349710 - DNA, 19 bp, Homo sapiens
  siRNA target sequence for KIAA0648 (NM_015200.1,395-413).
ctgatatctttcgtatcta

SEQ ID NO: 349711 - DNA, 19 bp, Homo sapiens
  siRNA target sequence for KIAA0648 (NM_015200.1,415-433).
gccccagaagctccatata

SEQ ID NO: 349712 - DNA, 19 bp, Homo sapiens
  siRNA target sequence for KIAA0648 (NM_015200.1,417-435).
cccagaagctccatatact

SEQ ID NO: 349713 - DNA, 19 bp, Homo sapiens
  siRNA target sequence for KIAA0648 (NM_015200.1,465-483).
gtttattaccagacaatta

SEQ ID NO: 349714 - DNA, 19 bp, Homo sapiens
  siRNA target sequence for KIAA0648 (NM_015200.1,500-518).
caaagagtccacagtttaa

SEQ ID NO: 349715 - DNA, 19 bp, Homo sapiens
  siRNA target sequence for KIAA0648 (NM_015200.1,513-531).
gtttaatagatacttttat

SEQ ID NO: 349716 - DNA, 19 bp, Homo sapiens
  siRNA target sequence for KIAA0648 (NM_015200.1,540-558).
gaatttagcttgggttaaa

SEQ ID NO: 349717 - DNA, 19 bp, Homo sapiens
  siRNA target sequence for KIAA0648 (NM_015200.1,661-679).
caaatgcacatgctagatt

SEQ ID NO: 349718 - DNA, 19 bp, Homo sapiens
  siRNA target sequence for KIAA0648 (NM_015200.1,706-724).
gatggagttactcaagaat

SEQ ID NO: 349719 - DNA, 19 bp, Homo sapiens
  siRNA target sequence for KIAA0648 (NM_015200.1,748-766).
ctcattcctgcacataaga

SEQ ID NO: 349720 - DNA, 19 bp, Homo sapiens
  siRNA target sequence for KIAA0648 (NM_015200.1,812-830).
gaacagtccagactattga

SEQ ID NO: 349721 - DNA, 19 bp, Homo sapiens
  siRNA target sequence for KIAA0648 (NM_015200.1,822-840).
gactattgaggcatgcatt

SEQ ID NO: 349722 - DNA, 19 bp, Homo sapiens
  siRNA target sequence for KIAA0648 (NM_015200.1,868-886).
ctgggaagatcatcagtaa

SEQ ID NO: 349723 - DNA, 19 bp, Homo sapiens
  siRNA target sequence for KIAA0648 (NM_015200.1,931-949).
gctatagatcctcatttat

SEQ ID NO: 349724 - DNA, 19 bp, Homo sapiens
  siRNA target sequence for KIAA0648 (NM_015200.1,958-976).
gtcatgccacagcttgaat

SEQ ID NO: 349725 - DNA, 19 bp, Homo sapiens
  siRNA target sequence for KIAA0648 (NM_015200.1,1018-1036).
gttcgacttctagctaaat

SEQ ID NO: 349726 - DNA, 19 bp, Homo sapiens
  siRNA target sequence for KIAA0648 (NM_015200.1,1021-1039).
cgacttctagctaaattgt

SEQ ID NO: 349727 - DNA, 19 bp, Homo sapiens
  siRNA target sequence for KIAA0648 (NM_015200.1,1042-1060).
ggctccaaagattctgatt

SEQ ID NO: 349728 - DNA, 19 bp, Homo sapiens
  siRNA target sequence for KIAA0648 (NM_015200.1,1091-1109).
gttttcttggacgatttaa

SEQ ID NO: 349729 - DNA, 19 bp, Homo sapiens
  siRNA target sequence for KIAA0648 (NM_015200.1,1096-1114).
cttggacgatttaatgata

SEQ ID NO: 349730 - DNA, 19 bp, Homo sapiens
  siRNA target sequence for KIAA0648 (NM_015200.1,1100-1118).
gacgatttaatgatattca

SEQ ID NO: 349731 - DNA, 19 bp, Homo sapiens
  siRNA target sequence for KIAA0648 (NM_015200.1,1150-1168).
gccagtcattgtttaatga

SEQ ID NO: 349732 - DNA, 19 bp, Homo sapiens
  siRNA target sequence for KIAA0648 (NM_015200.1,1151-1169).
ccagtcattgtttaatgaa

SEQ ID NO: 349733 - DNA, 19 bp, Homo sapiens
  siRNA target sequence for KIAA0648 (NM_015200.1,1184-1202).
cgaaggatctcacagaata

SEQ ID NO: 349734 - DNA, 19 bp, Homo sapiens
  siRNA target sequence for KIAA0648 (NM_015200.1,1240-1258).
cgtcatgatgtcattgtta

SEQ ID NO: 349735 - DNA, 19 bp, Homo sapiens
  siRNA target sequence for KIAA0648 (NM_015200.1,1243-1261).
catgatgtcattgttacta

SEQ ID NO: 349736 - DNA, 19 bp, Homo sapiens
  siRNA target sequence for KIAA0648 (NM_015200.1,1278-1296).
gagggacctggccttagta

SEQ ID NO: 349737 - DNA, 19 bp, Homo sapiens
  siRNA target sequence for KIAA0648 (NM_015200.1,1280-1298).
gggacctggccttagtaaa

SEQ ID NO: 349738 - DNA, 19 bp, Homo sapiens
  siRNA target sequence for KIAA0648 (NM_015200.1,1349-1367).
gagtaagaaaagaagctat

SEQ ID NO: 349739 - DNA, 19 bp, Homo sapiens
  siRNA target sequence for KIAA0648 (NM_015200.1,1373-1391).
gtctggctcagctttataa

SEQ ID NO: 349740 - DNA, 19 bp, Homo sapiens
  siRNA target sequence for KIAA0648 (NM_015200.1,1375-1393).
ctggctcagctttataaga

SEQ ID NO: 349741 - DNA, 19 bp, Homo sapiens
  siRNA target sequence for KIAA0648 (NM_015200.1,1432-1450).
gagaaagtcagctggataa

SEQ ID NO: 349742 - DNA, 19 bp, Homo sapiens
  siRNA target sequence for KIAA0648 (NM_015200.1,1445-1463).
ggataaaggacaaacttct

SEQ ID NO: 349743 - DNA, 19 bp, Homo sapiens
  siRNA target sequence for KIAA0648 (NM_015200.1,1452-1470).
ggacaaacttctgcatatt

SEQ ID NO: 349744 - DNA, 19 bp, Homo sapiens
  siRNA target sequence for KIAA0648 (NM_015200.1,1453-1471).
gacaaacttctgcatattt

SEQ ID NO: 349745 - DNA, 19 bp, Homo sapiens
  siRNA target sequence for KIAA0648 (NM_015200.1,1484-1502).
gcattgacgacaaactgtt

SEQ ID NO: 349746 - DNA, 19 bp, Homo sapiens
  siRNA target sequence for KIAA0648 (NM_015200.1,1578-1596).
cttatatgctagtttggat

SEQ ID NO: 349747 - DNA, 19 bp, Homo sapiens
  siRNA target sequence for KIAA0648 (NM_015200.1,1593-1611).
ggatccaaatgctgtaaaa

SEQ ID NO: 349748 - DNA, 19 bp, Homo sapiens
  siRNA target sequence for KIAA0648 (NM_015200.1,1606-1624).
gtaaaagctctcaacgaaa

SEQ ID NO: 349749 - DNA, 19 bp, Homo sapiens
  siRNA target sequence for KIAA0648 (NM_015200.1,1652-1670).
gccatgtacgcgaactatt

SEQ ID NO: 349750 - DNA, 19 bp, Homo sapiens
  siRNA target sequence for KIAA0648 (NM_015200.1,1657-1675).
gtacgcgaactattggatt

SEQ ID NO: 349751 - DNA, 19 bp, Homo sapiens
  siRNA target sequence for KIAA0648 (NM_015200.1,1661-1679).
gcgaactattggatttgca

SEQ ID NO: 349752 - DNA, 19 bp, Homo sapiens
  siRNA target sequence for KIAA0648 (NM_015200.1,1758-1776).
cgggaaagcacaagatttt

SEQ ID NO: 349753 - DNA, 19 bp, Homo sapiens
  siRNA target sequence for KIAA0648 (NM_015200.1,1819-1837).
cggtctcagttggagttat

SEQ ID NO: 349754 - DNA, 19 bp, Homo sapiens
  siRNA target sequence for KIAA0648 (NM_015200.1,1821-1839).
gtctcagttggagttatta

SEQ ID NO: 349755 - DNA, 19 bp, Homo sapiens
  siRNA target sequence for KIAA0648 (NM_015200.1,1823-1841).
ctcagttggagttattaat

SEQ ID NO: 349756 - DNA, 19 bp, Homo sapiens
  siRNA target sequence for KIAA0648 (NM_015200.1,1893-1911).
ccggaaacttgcaaatcct

SEQ ID NO: 349757 - DNA, 19 bp, Homo sapiens
  siRNA target sequence for KIAA0648 (NM_015200.1,1894-1912).
cggaaacttgcaaatccta

SEQ ID NO: 349758 - DNA, 19 bp, Homo sapiens
  siRNA target sequence for KIAA0648 (NM_015200.1,1914-1932).
gcaaccaacaaatcctttt

SEQ ID NO: 349759 - DNA, 19 bp, Homo sapiens
  siRNA target sequence for KIAA0648 (NM_015200.1,1991-2009).
ccataagtgcactagtgaa

SEQ ID NO: 349760 - DNA, 19 bp, Homo sapiens
  siRNA target sequence for KIAA0648 (NM_015200.1,1992-2010).
cataagtgcactagtgaaa

SEQ ID NO: 349761 - DNA, 19 bp, Homo sapiens
  siRNA target sequence for KIAA0648 (NM_015200.1,1997-2015).
gtgcactagtgaaattgat

SEQ ID NO: 349762 - DNA, 19 bp, Homo sapiens
  siRNA target sequence for KIAA0648 (NM_015200.1,2079-2097).
ccgttcaggacttgaactt

SEQ ID NO: 349763 - DNA, 19 bp, Homo sapiens
  siRNA target sequence for KIAA0648 (NM_015200.1,2133-2151).
ccactctgcagagacatat

SEQ ID NO: 349764 - DNA, 19 bp, Homo sapiens
  siRNA target sequence for KIAA0648 (NM_015200.1,2145-2163).
gacatatgagtccttgtta

SEQ ID NO: 349765 - DNA, 19 bp, Homo sapiens
  siRNA target sequence for KIAA0648 (NM_015200.1,2147-2165).
catatgagtccttgttaca

SEQ ID NO: 349766 - DNA, 19 bp, Homo sapiens
  siRNA target sequence for KIAA0648 (NM_015200.1,2194-2212).
gcagaagctgctattcaaa

SEQ ID NO: 349767 - DNA, 19 bp, Homo sapiens
  siRNA target sequence for KIAA0648 (NM_015200.1,2195-2213).
cagaagctgctattcaaat

SEQ ID NO: 349768 - DNA, 19 bp, Homo sapiens
  siRNA target sequence for KIAA0648 (NM_015200.1,2197-2215).
gaagctgctattcaaattt

SEQ ID NO: 349769 - DNA, 19 bp, Homo sapiens
  siRNA target sequence for KIAA0648 (NM_015200.1,2245-2263).
gaccttccccagatacgat

SEQ ID NO: 349770 - DNA, 19 bp, Homo sapiens
  siRNA target sequence for KIAA0648 (NM_015200.1,2254-2272).
cagatacgatcgaccttaa

SEQ ID NO: 349771 - DNA, 19 bp, Homo sapiens
  siRNA target sequence for KIAA0648 (NM_015200.1,2256-2274).
gatacgatcgaccttaatt

SEQ ID NO: 349772 - DNA, 19 bp, Homo sapiens
  siRNA target sequence for KIAA0648 (NM_015200.1,2303-2321).
gtactccacaccaagcaaa

SEQ ID NO: 349773 - DNA, 19 bp, Homo sapiens
  siRNA target sequence for KIAA0648 (NM_015200.1,2416-2434).
gtgccagaacaacttataa

SEQ ID NO: 349774 - DNA, 19 bp, Homo sapiens
  siRNA target sequence for KIAA0648 (NM_015200.1,2418-2436).
gccagaacaacttataact

SEQ ID NO: 349775 - DNA, 19 bp, Homo sapiens
  siRNA target sequence for KIAA0648 (NM_015200.1,2451-2469).
gggccacatttctatgtta

SEQ ID NO: 349776 - DNA, 19 bp, Homo sapiens
  siRNA target sequence for KIAA0648 (NM_015200.1,2470-2488).
gcaccagatcagtttgctt

SEQ ID NO: 349777 - DNA, 19 bp, Homo sapiens
  siRNA target sequence for KIAA0648 (NM_015200.1,2486-2504).
cttccccaatgaaatctgt

SEQ ID NO: 349778 - DNA, 19 bp, Homo sapiens
  siRNA target sequence for KIAA0648 (NM_015200.1,2490-2508).
cccaatgaaatctgtagta

SEQ ID NO: 349779 - DNA, 19 bp, Homo sapiens
  siRNA target sequence for KIAA0648 (NM_015200.1,2592-2610).
ggtttcccctgaagtacta

SEQ ID NO: 349780 - DNA, 19 bp, Homo sapiens
  siRNA target sequence for KIAA0648 (NM_015200.1,2616-2634).
ggtacaggcaattaaactt

SEQ ID NO: 349781 - DNA, 19 bp, Homo sapiens
  siRNA target sequence for KIAA0648 (NM_015200.1,2642-2660).
ggtggctgttgggtatgaa

SEQ ID NO: 349782 - DNA, 19 bp, Homo sapiens
  siRNA target sequence for KIAA0648 (NM_015200.1,2643-2661).
gtggctgttgggtatgaaa

SEQ ID NO: 349783 - DNA, 19 bp, Homo sapiens
  siRNA target sequence for KIAA0648 (NM_015200.1,2647-2665).
ctgttgggtatgaaaaaca

SEQ ID NO: 349784 - DNA, 19 bp, Homo sapiens
  siRNA target sequence for KIAA0648 (NM_015200.1,2670-2688).
gtctaaatctgccaattca

SEQ ID NO: 349785 - DNA, 19 bp, Homo sapiens
  siRNA target sequence for KIAA0648 (NM_015200.1,2705-2723).
cagcgatgttggttagtga

SEQ ID NO: 349786 - DNA, 19 bp, Homo sapiens
  siRNA target sequence for KIAA0648 (NM_015200.1,2751-2769).
cagtaaatctgatatgtct

SEQ ID NO: 349787 - DNA, 19 bp, Homo sapiens
  siRNA target sequence for KIAA0648 (NM_015200.1,2766-2784).
gtctcgcttgcgattagct

SEQ ID NO: 349788 - DNA, 19 bp, Homo sapiens
  siRNA target sequence for KIAA0648 (NM_015200.1,2783-2801).
ctgctggtagtgccataat

SEQ ID NO: 349789 - DNA, 19 bp, Homo sapiens
  siRNA target sequence for KIAA0648 (NM_015200.1,2854-2872).
cagctctgtgcacttgtta

SEQ ID NO: 349790 - DNA, 19 bp, Homo sapiens
  siRNA target sequence for KIAA0648 (NM_015200.1,2856-2874).
gctctgtgcacttgttatt

SEQ ID NO: 349791 - DNA, 19 bp, Homo sapiens
  siRNA target sequence for KIAA0648 (NM_015200.1,2878-2896).
gatgagtgttaccaagtaa

SEQ ID NO: 349792 - DNA, 19 bp, Homo sapiens
  siRNA target sequence for KIAA0648 (NM_015200.1,2941-2959).
ctgctcccattggagtata

SEQ ID NO: 349793 - DNA, 19 bp, Homo sapiens
  siRNA target sequence for KIAA0648 (NM_015200.1,2952-2970).
ggagtatatggcgatcttt

SEQ ID NO: 349794 - DNA, 19 bp, Homo sapiens
  siRNA target sequence for KIAA0648 (NM_015200.1,3007-3025).
gcacacgcacgacaatgtt

SEQ ID NO: 349795 - DNA, 19 bp, Homo sapiens
  siRNA target sequence for KIAA0648 (NM_015200.1,3008-3026).
cacacgcacgacaatgttt

SEQ ID NO: 349796 - DNA, 19 bp, Homo sapiens
  siRNA target sequence for KIAA0648 (NM_015200.1,3013-3031).
gcacgacaatgtttactga

SEQ ID NO: 349797 - DNA, 19 bp, Homo sapiens
  siRNA target sequence for KIAA0648 (NM_015200.1,3014-3032).
cacgacaatgtttactgaa

SEQ ID NO: 349798 - DNA, 19 bp, Homo sapiens
  siRNA target sequence for KIAA0648 (NM_015200.1,3041-3059).
gtatacgcagggaatacat

SEQ ID NO: 349799 - DNA, 19 bp, Homo sapiens
  siRNA target sequence for KIAA0648 (NM_015200.1,3070-3088).
cctatggctactgagaaat

SEQ ID NO: 349800 - DNA, 19 bp, Homo sapiens
  siRNA target sequence for KIAA0648 (NM_015200.1,3071-3089).
ctatggctactgagaaatt

SEQ ID NO: 349801 - DNA, 19 bp, Homo sapiens
  siRNA target sequence for KIAA0648 (NM_015200.1,3075-3093).
ggctactgagaaattatta

SEQ ID NO: 349802 - DNA, 19 bp, Homo sapiens
  siRNA target sequence for KIAA0648 (NM_015200.1,3099-3117).
gttgcctgaatatgtagtt

SEQ ID NO: 349803 - DNA, 19 bp, Homo sapiens
  siRNA target sequence for KIAA0648 (NM_015200.1,3104-3122).
ctgaatatgtagttccata

SEQ ID NO: 349804 - DNA, 19 bp, Homo sapiens
  siRNA target sequence for KIAA0648 (NM_015200.1,3206-3224).
ggttcatgcttgaagtttt

SEQ ID NO: 349805 - DNA, 19 bp, Homo sapiens
  siRNA target sequence for KIAA0648 (NM_015200.1,3213-3231).
gcttgaagttttaatgaca

SEQ ID NO: 349806 - DNA, 19 bp, Homo sapiens
  siRNA target sequence for KIAA0648 (NM_015200.1,3214-3232).
cttgaagttttaatgacaa

SEQ ID NO: 349807 - DNA, 19 bp, Homo sapiens
  siRNA target sequence for KIAA0648 (NM_015200.1,3270-3288).
ggcagagaacatcaagtta

SEQ ID NO: 349808 - DNA, 19 bp, Homo sapiens
  siRNA target sequence for KIAA0648 (NM_015200.1,3271-3289).
gcagagaacatcaagttaa

SEQ ID NO: 349809 - DNA, 19 bp, Homo sapiens
  siRNA target sequence for KIAA0648 (NM_015200.1,3349-3367).
gatgtggctctctgtgtta

SEQ ID NO: 349810 - DNA, 19 bp, Homo sapiens
  siRNA target sequence for KIAA0648 (NM_015200.1,3352-3370).
gtggctctctgtgttataa

SEQ ID NO: 349811 - DNA, 19 bp, Homo sapiens
  siRNA target sequence for KIAA0648 (NM_015200.1,3354-3372).
ggctctctgtgttataaat

SEQ ID NO: 349812 - DNA, 19 bp, Homo sapiens
  siRNA target sequence for KIAA0648 (NM_015200.1,3355-3373).
gctctctgtgttataaata

SEQ ID NO: 349813 - DNA, 19 bp, Homo sapiens
  siRNA target sequence for KIAA0648 (NM_015200.1,3358-3376).
ctctgtgttataaatagta

SEQ ID NO: 349814 - DNA, 19 bp, Homo sapiens
  siRNA target sequence for KIAA0648 (NM_015200.1,3413-3431).
cagtcctcccaatgaaatt

SEQ ID NO: 349815 - DNA, 19 bp, Homo sapiens
  siRNA target sequence for KIAA0648 (NM_015200.1,3415-3433).
gtcctcccaatgaaatttt

SEQ ID NO: 349816 - DNA, 19 bp, Homo sapiens
  siRNA target sequence for KIAA0648 (NM_015200.1,3453-3471).
cttctgtaacgataagagt

SEQ ID NO: 349817 - DNA, 19 bp, Homo sapiens
  siRNA target sequence for KIAA0648 (NM_015200.1,3456-3474).
ctgtaacgataagagttat

SEQ ID NO: 349818 - DNA, 19 bp, Homo sapiens
  siRNA target sequence for KIAA0648 (NM_015200.1,3458-3476).
gtaacgataagagttatat

SEQ ID NO: 349819 - DNA, 19 bp, Homo sapiens
  siRNA target sequence for KIAA0648 (NM_015200.1,3462-3480).
cgataagagttatatttca

SEQ ID NO: 349820 - DNA, 19 bp, Homo sapiens
  siRNA target sequence for KIAA0648 (NM_015200.1,3486-3504).
gacaagagtacttctgtta

SEQ ID NO: 349821 - DNA, 19 bp, Homo sapiens
  siRNA target sequence for KIAA0648 (NM_015200.1,3527-3545).
gagtactaggtgcagtaaa

SEQ ID NO: 349822 - DNA, 19 bp, Homo sapiens
  siRNA target sequence for KIAA0648 (NM_015200.1,3529-3547).
gtactaggtgcagtaaata

SEQ ID NO: 349823 - DNA, 19 bp, Homo sapiens
  siRNA target sequence for KIAA0648 (NM_015200.1,3602-3620).
ctggaagcaatattaatgt

SEQ ID NO: 349824 - DNA, 19 bp, Homo sapiens
  siRNA target sequence for KIAA0648 (NM_015200.1,3730-3748).
gtcacacctgtaaagaata

SEQ ID NO: 349825 - DNA, 19 bp, Homo sapiens
  siRNA target sequence for KIAA0648 (NM_015200.1,3732-3750).
cacacctgtaaagaatatt

SEQ ID NO: 349826 - DNA, 19 bp, Homo sapiens
  siRNA target sequence for KIAA0648 (NM_015200.1,3753-3771).
cccagtaaagaataaggaa

SEQ ID NO: 349827 - DNA, 19 bp, Homo sapiens
  siRNA target sequence for KIAA0648 (NM_015200.1,3847-3865).
gcagagaatatccaacaaa

SEQ ID NO: 349828 - DNA, 19 bp, Homo sapiens
  siRNA target sequence for KIAA0648 (NM_015200.1,3925-3943).
cgtcgacccaagtctgaat

SEQ ID NO: 349829 - DNA, 19 bp, Homo sapiens
  siRNA target sequence for KIAA0648 (NM_015200.1,3946-3964).
cagggcaatgctaccaaaa

SEQ ID NO: 349830 - DNA, 19 bp, Homo sapiens
  siRNA target sequence for KIAA0648 (NM_015200.1,3948-3966).
gggcaatgctaccaaaaat

SEQ ID NO: 349831 - DNA, 19 bp, Homo sapiens
  siRNA target sequence for KIAA0648 (NM_015200.1,4090-4108).
gcaccagcagaaagacaaa

SEQ ID NO: 349832 - DNA, 19 bp, Homo sapiens
  siRNA target sequence for KIAA0648 (NM_015200.1,4097-4115).
cagaaagacaaattgactt

SEQ ID NO: 349833 - DNA, 19 bp, Homo sapiens
  siRNA target sequence for KIAA0874 (NM_015208.2,218-236).
cccaaatctgggttcacaa

SEQ ID NO: 349834 - DNA, 19 bp, Homo sapiens
  siRNA target sequence for KIAA0874 (NM_015208.2,225-243).
ctgggttcacaaaaccaat

SEQ ID NO: 349835 - DNA, 19 bp, Homo sapiens
  siRNA target sequence for KIAA0874 (NM_015208.2,239-257).
ccaattcagagtgaaaatt

SEQ ID NO: 349836 - DNA, 19 bp, Homo sapiens
  siRNA target sequence for KIAA0874 (NM_015208.2,381-399).
catccatgaaacgtaaact

SEQ ID NO: 349837 - DNA, 19 bp, Homo sapiens
  siRNA target sequence for KIAA0874 (NM_015208.2,388-406).
gaaacgtaaacttcctttt

SEQ ID NO: 349838 - DNA, 19 bp, Homo sapiens
  siRNA target sequence for KIAA0874 (NM_015208.2,392-410).
cgtaaacttccttttacta

SEQ ID NO: 349839 - DNA, 19 bp, Homo sapiens
  siRNA target sequence for KIAA0874 (NM_015208.2,415-433).
cccatcaagaaatgaagaa

SEQ ID NO: 349840 - DNA, 19 bp, Homo sapiens
  siRNA target sequence for KIAA0874 (NM_015208.2,482-500).
ggggagagacttatatctt

SEQ ID NO: 349841 - DNA, 19 bp, Homo sapiens
  siRNA target sequence for KIAA0874 (NM_015208.2,484-502).
ggagagacttatatcttct

SEQ ID NO: 349842 - DNA, 19 bp, Homo sapiens
  siRNA target sequence for KIAA0874 (NM_015208.2,485-503).
gagagacttatatcttctt

SEQ ID NO: 349843 - DNA, 19 bp, Homo sapiens
  siRNA target sequence for KIAA0874 (NM_015208.2,574-592).
cacaccagttagcattctt

SEQ ID NO: 349844 - DNA, 19 bp, Homo sapiens
  siRNA target sequence for KIAA0874 (NM_015208.2,576-594).
caccagttagcattctttt

SEQ ID NO: 349845 - DNA, 19 bp, Homo sapiens
  siRNA target sequence for KIAA0874 (NM_015208.2,603-621).
cactctctgagcgaaaaca

SEQ ID NO: 349846 - DNA, 19 bp, Homo sapiens
  siRNA target sequence for KIAA0874 (NM_015208.2,674-692).
ccaaatcatccatcacaaa

SEQ ID NO: 349847 - DNA, 19 bp, Homo sapiens
  siRNA target sequence for KIAA0874 (NM_015208.2,697-715).
gcctgcccaaaagaaaact

SEQ ID NO: 349848 - DNA, 19 bp, Homo sapiens
  siRNA target sequence for KIAA0874 (NM_015208.2,731-749).
cgacagaaagataaagtta

SEQ ID NO: 349849 - DNA, 19 bp, Homo sapiens
  siRNA target sequence for KIAA0874 (NM_015208.2,792-810).
ctattcgaggagatgtgaa

SEQ ID NO: 349850 - DNA, 19 bp, Homo sapiens
  siRNA target sequence for KIAA0874 (NM_015208.2,798-816).
gaggagatgtgaaacaagt

SEQ ID NO: 349851 - DNA, 19 bp, Homo sapiens
  siRNA target sequence for KIAA0874 (NM_015208.2,800-818).
ggagatgtgaaacaagtta

SEQ ID NO: 349852 - DNA, 19 bp, Homo sapiens
  siRNA target sequence for KIAA0874 (NM_015208.2,891-909).
gcaatgttggatattacga

SEQ ID NO: 349853 - DNA, 19 bp, Homo sapiens
  siRNA target sequence for KIAA0874 (NM_015208.2,900-918).
gatattacgatgttgctaa

SEQ ID NO: 349854 - DNA, 19 bp, Homo sapiens
  siRNA target sequence for KIAA0874 (NM_015208.2,949-967).
cacacaaggattagatgat

SEQ ID NO: 349855 - DNA, 19 bp, Homo sapiens
  siRNA target sequence for KIAA0874 (NM_015208.2,968-986).
gacactccactccatgatt

SEQ ID NO: 349856 - DNA, 19 bp, Homo sapiens
  siRNA target sequence for KIAA0874 (NM_015208.2,970-988).
cactccactccatgattct

SEQ ID NO: 349857 - DNA, 19 bp, Homo sapiens
  siRNA target sequence for KIAA0874 (NM_015208.2,979-997).
ccatgattctgctagtagt

SEQ ID NO: 349858 - DNA, 19 bp, Homo sapiens
  siRNA target sequence for KIAA0874 (NM_015208.2,993-1011).
gtagtgggcacagagatat

SEQ ID NO: 349859 - DNA, 19 bp, Homo sapiens
  siRNA target sequence for KIAA0874 (NM_015208.2,1028-1046).
cgtcacggtggaaatccat

SEQ ID NO: 349860 - DNA, 19 bp, Homo sapiens
  siRNA target sequence for KIAA0874 (NM_015208.2,1029-1047).
gtcacggtggaaatccatt

SEQ ID NO: 349861 - DNA, 19 bp, Homo sapiens
  siRNA target sequence for KIAA0874 (NM_015208.2,1033-1051).
cggtggaaatccatttcaa

SEQ ID NO: 349862 - DNA, 19 bp, Homo sapiens
  siRNA target sequence for KIAA0874 (NM_015208.2,1102-1120).
ggagttgctactaaaaaga

SEQ ID NO: 349863 - DNA, 19 bp, Homo sapiens
  siRNA target sequence for KIAA0874 (NM_015208.2,1161-1179).
ccgaagaggctcaatctgt

SEQ ID NO: 349864 - DNA, 19 bp, Homo sapiens
  siRNA target sequence for KIAA0874 (NM_015208.2,1162-1180).
cgaagaggctcaatctgta

SEQ ID NO: 349865 - DNA, 19 bp, Homo sapiens
  siRNA target sequence for KIAA0874 (NM_015208.2,1163-1181).
gaagaggctcaatctgtaa

SEQ ID NO: 349866 - DNA, 19 bp, Homo sapiens
  siRNA target sequence for KIAA0874 (NM_015208.2,1168-1186).
ggctcaatctgtaaatcct

SEQ ID NO: 349867 - DNA, 19 bp, Homo sapiens
  siRNA target sequence for KIAA0874 (NM_015208.2,1169-1187).
gctcaatctgtaaatcctt

SEQ ID NO: 349868 - DNA, 19 bp, Homo sapiens
  siRNA target sequence for KIAA0874 (NM_015208.2,1239-1257).
gtgaaagtaaacagatact

SEQ ID NO: 349869 - DNA, 19 bp, Homo sapiens
  siRNA target sequence for KIAA0874 (NM_015208.2,1278-1296).
catctgcccttgatgagta

SEQ ID NO: 349870 - DNA, 19 bp, Homo sapiens
  siRNA target sequence for KIAA0874 (NM_015208.2,1340-1358).
gatgataggcatattctta

SEQ ID NO: 349871 - DNA, 19 bp, Homo sapiens
  siRNA target sequence for KIAA0874 (NM_015208.2,1421-1439).
gagaaagccttctatccta

SEQ ID NO: 349872 - DNA, 19 bp, Homo sapiens
  siRNA target sequence for KIAA0874 (NM_015208.2,1427-1445).
gccttctatcctaaatcat

SEQ ID NO: 349873 - DNA, 19 bp, Homo sapiens
  siRNA target sequence for KIAA0874 (NM_015208.2,1428-1446).
ccttctatcctaaatcatt

SEQ ID NO: 349874 - DNA, 19 bp, Homo sapiens
  siRNA target sequence for KIAA0874 (NM_015208.2,1465-1483).
gccatctagggtcttatat

SEQ ID NO: 349875 - DNA, 19 bp, Homo sapiens
  siRNA target sequence for KIAA0874 (NM_015208.2,1466-1484).
ccatctagggtcttatatt

SEQ ID NO: 349876 - DNA, 19 bp, Homo sapiens
  siRNA target sequence for KIAA0874 (NM_015208.2,1766-1784).
gaggggaactttaggaaat

SEQ ID NO: 349877 - DNA, 19 bp, Homo sapiens
  siRNA target sequence for KIAA0874 (NM_015208.2,1793-1811).
ccaaaagatgatacttcat

SEQ ID NO: 349878 - DNA, 19 bp, Homo sapiens
  siRNA target sequence for KIAA0874 (NM_015208.2,1846-1864).
caaacattcttgtggatta

SEQ ID NO: 349879 - DNA, 19 bp, Homo sapiens
  siRNA target sequence for KIAA0874 (NM_015208.2,1922-1940).
ggaagttctgaaatgtcat

SEQ ID NO: 349880 - DNA, 19 bp, Homo sapiens
  siRNA target sequence for KIAA0874 (NM_015208.2,1926-1944).
gttctgaaatgtcattaca

SEQ ID NO: 349881 - DNA, 19 bp, Homo sapiens
  siRNA target sequence for KIAA0874 (NM_015208.2,1949-1967).
gatcttgttcggtatgata

SEQ ID NO: 349882 - DNA, 19 bp, Homo sapiens
  siRNA target sequence for KIAA0874 (NM_015208.2,1958-1976).
cggtatgataatacagaat

SEQ ID NO: 349883 - DNA, 19 bp, Homo sapiens
  siRNA target sequence for KIAA0874 (NM_015208.2,1964-1982).
gataatacagaatctgaat

SEQ ID NO: 349884 - DNA, 19 bp, Homo sapiens
  siRNA target sequence for KIAA0874 (NM_015208.2,2003-2021).
gtaaaatcttgtaagcata

SEQ ID NO: 349885 - DNA, 19 bp, Homo sapiens
  siRNA target sequence for KIAA0874 (NM_015208.2,2282-2300).
gaatttgatagagaatttt

SEQ ID NO: 349886 - DNA, 19 bp, Homo sapiens
  siRNA target sequence for KIAA0874 (NM_015208.2,2360-2378).
gaatccttaacattagaaa

SEQ ID NO: 349887 - DNA, 19 bp, Homo sapiens
  siRNA target sequence for KIAA0874 (NM_015208.2,2437-2455).
gtcaaaagagaggaacttt

SEQ ID NO: 349888 - DNA, 19 bp, Homo sapiens
  siRNA target sequence for KIAA0874 (NM_015208.2,2482-2500).
ggaaagcgagaaatctttt

SEQ ID NO: 349889 - DNA, 19 bp, Homo sapiens
  siRNA target sequence for KIAA0874 (NM_015208.2,2597-2615).
gaatctatagggcttcatt

SEQ ID NO: 349890 - DNA, 19 bp, Homo sapiens
  siRNA target sequence for KIAA0874 (NM_015208.2,2678-2696).
cctgagaagcgatctcaaa

SEQ ID NO: 349891 - DNA, 19 bp, Homo sapiens
  siRNA target sequence for KIAA0874 (NM_015208.2,2686-2704).
gcgatctcaaattaaagaa

SEQ ID NO: 349892 - DNA, 19 bp, Homo sapiens
  siRNA target sequence for KIAA0874 (NM_015208.2,2759-2777).
catgagcataagtcagaaa

SEQ ID NO: 349893 - DNA, 19 bp, Homo sapiens
  siRNA target sequence for KIAA0874 (NM_015208.2,2782-2800).
caaattagatcttagtgaa

SEQ ID NO: 349894 - DNA, 19 bp, Homo sapiens
  siRNA target sequence for KIAA0874 (NM_015208.2,3116-3134).
gaaagtataaatataacta

SEQ ID NO: 349895 - DNA, 19 bp, Homo sapiens
  siRNA target sequence for KIAA0874 (NM_015208.2,3168-3186).
gtatagtagacggtaataa

SEQ ID NO: 349896 - DNA, 19 bp, Homo sapiens
  siRNA target sequence for KIAA0874 (NM_015208.2,3178-3196).
cggtaataaagcacaacat

SEQ ID NO: 349897 - DNA, 19 bp, Homo sapiens
  siRNA target sequence for KIAA0874 (NM_015208.2,3180-3198).
gtaataaagcacaacatga

SEQ ID NO: 349898 - DNA, 19 bp, Homo sapiens
  siRNA target sequence for KIAA0874 (NM_015208.2,3418-3436).
gaggttagtgaatgatgat

SEQ ID NO: 349899 - DNA, 19 bp, Homo sapiens
  siRNA target sequence for KIAA0874 (NM_015208.2,3420-3438).
ggttagtgaatgatgattt

SEQ ID NO: 349900 - DNA, 19 bp, Homo sapiens
  siRNA target sequence for KIAA0874 (NM_015208.2,3421-3439).
gttagtgaatgatgattta

SEQ ID NO: 349901 - DNA, 19 bp, Homo sapiens
  siRNA target sequence for KIAA0874 (NM_015208.2,3546-3564).
gaaaccgaaactgtttaga

SEQ ID NO: 349902 - DNA, 19 bp, Homo sapiens
  siRNA target sequence for KIAA0874 (NM_015208.2,3550-3568).
ccgaaactgtttagaactt

SEQ ID NO: 349903 - DNA, 19 bp, Homo sapiens
  siRNA target sequence for KIAA0874 (NM_015208.2,3551-3569).
cgaaactgtttagaactta

SEQ ID NO: 349904 - DNA, 19 bp, Homo sapiens
  siRNA target sequence for KIAA0874 (NM_015208.2,3626-3644).
cttactaggtcaaagagtt

SEQ ID NO: 349905 - DNA, 19 bp, Homo sapiens
  siRNA target sequence for KIAA0874 (NM_015208.2,3650-3668).
gtgactgatgcatatacca

SEQ ID NO: 349906 - DNA, 19 bp, Homo sapiens
  siRNA target sequence for KIAA0874 (NM_015208.2,3680-3698).
cctaaagatgctgtaagta

SEQ ID NO: 349907 - DNA, 19 bp, Homo sapiens
  siRNA target sequence for KIAA0874 (NM_015208.2,3681-3699).
ctaaagatgctgtaagtaa

SEQ ID NO: 349908 - DNA, 19 bp, Homo sapiens
  siRNA target sequence for KIAA0874 (NM_015208.2,3686-3704).
gatgctgtaagtaacagat

SEQ ID NO: 349909 - DNA, 19 bp, Homo sapiens
  siRNA target sequence for KIAA0874 (NM_015208.2,3742-3760).
gaagtcatcttttgtttca

SEQ ID NO: 349910 - DNA, 19 bp, Homo sapiens
  siRNA target sequence for KIAA0874 (NM_015208.2,3777-3795).
ggtctcctagatcagaaaa

SEQ ID NO: 349911 - DNA, 19 bp, Homo sapiens
  siRNA target sequence for KIAA0874 (NM_015208.2,3778-3796).
gtctcctagatcagaaaat

SEQ ID NO: 349912 - DNA, 19 bp, Homo sapiens
  siRNA target sequence for KIAA0874 (NM_015208.2,3817-3835).
cagatctgtatccatgatt

SEQ ID NO: 349913 - DNA, 19 bp, Homo sapiens
  siRNA target sequence for KIAA0874 (NM_015208.2,3885-3903).
ggcctccagttgagtatga

SEQ ID NO: 349914 - DNA, 19 bp, Homo sapiens
  siRNA target sequence for KIAA0874 (NM_015208.2,3887-3905).
cctccagttgagtatgact

SEQ ID NO: 349915 - DNA, 19 bp, Homo sapiens
  siRNA target sequence for KIAA0874 (NM_015208.2,3943-3961).
cttttcccagtcacctttt

SEQ ID NO: 349916 - DNA, 19 bp, Homo sapiens
  siRNA target sequence for KIAA0874 (NM_015208.2,3949-3967).
ccagtcaccttttttgtca

SEQ ID NO: 349917 - DNA, 19 bp, Homo sapiens
  siRNA target sequence for KIAA0874 (NM_015208.2,3973-3991).
caaatctcctgctcttcat

SEQ ID NO: 349918 - DNA, 19 bp, Homo sapiens
  siRNA target sequence for KIAA0874 (NM_015208.2,4027-4045).
gcggattaaaccaccatat

SEQ ID NO: 349919 - DNA, 19 bp, Homo sapiens
  siRNA target sequence for KIAA0874 (NM_015208.2,4075-4093).
gtcatcttctgtagaagat

SEQ ID NO: 349920 - DNA, 19 bp, Homo sapiens
  siRNA target sequence for KIAA0874 (NM_015208.2,4080-4098).
cttctgtagaagatgttaa

SEQ ID NO: 349921 - DNA, 19 bp, Homo sapiens
  siRNA target sequence for KIAA0874 (NM_015208.2,4083-4101).
ctgtagaagatgttaaact

SEQ ID NO: 349922 - DNA, 19 bp, Homo sapiens
  siRNA target sequence for KIAA0874 (NM_015208.2,4111-4129).
cgaggggagacctaccata

SEQ ID NO: 349923 - DNA, 19 bp, Homo sapiens
  siRNA target sequence for KIAA0874 (NM_015208.2,4150-4168).
gccttctgtcatttgtgaa

SEQ ID NO: 349924 - DNA, 19 bp, Homo sapiens
  siRNA target sequence for KIAA0874 (NM_015208.2,4164-4182).
gtgaacataccaaacaatt

SEQ ID NO: 349925 - DNA, 19 bp, Homo sapiens
  siRNA target sequence for KIAA0874 (NM_015208.2,4201-4219).
gagcaatcaaggtagctta

SEQ ID NO: 349926 - DNA, 19 bp, Homo sapiens
  siRNA target sequence for KIAA0874 (NM_015208.2,4203-4221).
gcaatcaaggtagcttatt

SEQ ID NO: 349927 - DNA, 19 bp, Homo sapiens
  siRNA target sequence for KIAA0874 (NM_015208.2,4204-4222).
caatcaaggtagcttatta

SEQ ID NO: 349928 - DNA, 19 bp, Homo sapiens
  siRNA target sequence for KIAA0874 (NM_015208.2,4267-4285).
ctcaaatgtgcctgaaaga

SEQ ID NO: 349929 - DNA, 19 bp, Homo sapiens
  siRNA target sequence for KIAA0874 (NM_015208.2,4306-4324).
catacattccagttttgca

SEQ ID NO: 349930 - DNA, 19 bp, Homo sapiens
  siRNA target sequence for KIAA0874 (NM_015208.2,4423-4441).
gcatttagagccatctagt

SEQ ID NO: 349931 - DNA, 19 bp, Homo sapiens
  siRNA target sequence for KIAA0874 (NM_015208.2,4448-4466).
ggtgtgatccagaataaat

SEQ ID NO: 349932 - DNA, 19 bp, Homo sapiens
  siRNA target sequence for KIAA0874 (NM_015208.2,4471-4489).
ggagatgcctgttgataga

SEQ ID NO: 349933 - DNA, 19 bp, Homo sapiens
  siRNA target sequence for KIAA0874 (NM_015208.2,4474-4492).
gatgcctgttgatagacta

SEQ ID NO: 349934 - DNA, 19 bp, Homo sapiens
  siRNA target sequence for KIAA0874 (NM_015208.2,4530-4548).
ctaacatacctgatcaaga

SEQ ID NO: 349935 - DNA, 19 bp, Homo sapiens
  siRNA target sequence for KIAA0874 (NM_015208.2,4554-4572).
ctcttcagagtttttgtaa

SEQ ID NO: 349936 - DNA, 19 bp, Homo sapiens
  siRNA target sequence for KIAA0874 (NM_015208.2,4652-4670).
caggatccggcatccttta

SEQ ID NO: 349937 - DNA, 19 bp, Homo sapiens
  siRNA target sequence for KIAA0874 (NM_015208.2,4698-4716).
ccagccaatcactttcaga

SEQ ID NO: 349938 - DNA, 19 bp, Homo sapiens
  siRNA target sequence for KIAA0874 (NM_015208.2,4715-4733).
gatgctgaatcgatttcta

SEQ ID NO: 349939 - DNA, 19 bp, Homo sapiens
  siRNA target sequence for KIAA0874 (NM_015208.2,4719-4737).
ctgaatcgatttctaaaca

SEQ ID NO: 349940 - DNA, 19 bp, Homo sapiens
  siRNA target sequence for KIAA0874 (NM_015208.2,4820-4838).
gatactgataatgaatcta

SEQ ID NO: 349941 - DNA, 19 bp, Homo sapiens
  siRNA target sequence for KIAA0874 (NM_015208.2,4862-4880).
gtcctaggagatgttcaaa

SEQ ID NO: 349942 - DNA, 19 bp, Homo sapiens
  siRNA target sequence for KIAA0874 (NM_015208.2,4864-4882).
cctaggagatgttcaaaaa

SEQ ID NO: 349943 - DNA, 19 bp, Homo sapiens
  siRNA target sequence for KIAA0874 (NM_015208.2,4865-4883).
ctaggagatgttcaaaaaa

SEQ ID NO: 349944 - DNA, 19 bp, Homo sapiens
  siRNA target sequence for KIAA0874 (NM_015208.2,4939-4957).
ctttgagaaagcttatact

SEQ ID NO: 349945 - DNA, 19 bp, Homo sapiens
  siRNA target sequence for KIAA0874 (NM_015208.2,4945-4963).
gaaagcttatactttacct

SEQ ID NO: 349946 - DNA, 19 bp, Homo sapiens
  siRNA target sequence for KIAA0874 (NM_015208.2,5004-5022).
ctacccagctaaatacaca

SEQ ID NO: 349947 - DNA, 19 bp, Homo sapiens
  siRNA target sequence for KIAA0874 (NM_015208.2,5007-5025).
cccagctaaatacacatta

SEQ ID NO: 349948 - DNA, 19 bp, Homo sapiens
  siRNA target sequence for KIAA0874 (NM_015208.2,5019-5037).
cacattatgcatttagcaa

SEQ ID NO: 349949 - DNA, 19 bp, Homo sapiens
  siRNA target sequence for KIAA0874 (NM_015208.2,5052-5070).
cttccagtggccatgaagt

SEQ ID NO: 349950 - DNA, 19 bp, Homo sapiens
  siRNA target sequence for KIAA0874 (NM_015208.2,5055-5073).
ccagtggccatgaagttga

SEQ ID NO: 349951 - DNA, 19 bp, Homo sapiens
  siRNA target sequence for KIAA0874 (NM_015208.2,5058-5076).
gtggccatgaagttgagaa

SEQ ID NO: 349952 - DNA, 19 bp, Homo sapiens
  siRNA target sequence for KIAA0874 (NM_015208.2,5060-5078).
ggccatgaagttgagaata

SEQ ID NO: 349953 - DNA, 19 bp, Homo sapiens
  siRNA target sequence for KIAA0874 (NM_015208.2,5074-5092).
gaatagcacaactgatact

SEQ ID NO: 349954 - DNA, 19 bp, Homo sapiens
  siRNA target sequence for KIAA0874 (NM_015208.2,5093-5111).
caggtcatttcacatgaaa

SEQ ID NO: 349955 - DNA, 19 bp, Homo sapiens
  siRNA target sequence for KIAA0874 (NM_015208.2,5125-5143).
ggagagtttggttttaact

SEQ ID NO: 349956 - DNA, 19 bp, Homo sapiens
  siRNA target sequence for KIAA0874 (NM_015208.2,5128-5146).
gagtttggttttaactcat

SEQ ID NO: 349957 - DNA, 19 bp, Homo sapiens
  siRNA target sequence for KIAA0874 (NM_015208.2,5151-5169).
gtaggtgtgattctgattt

SEQ ID NO: 349958 - DNA, 19 bp, Homo sapiens
  siRNA target sequence for KIAA0874 (NM_015208.2,5269-5287).
ggaatctcaacaaagcatt

SEQ ID NO: 349959 - DNA, 19 bp, Homo sapiens
  siRNA target sequence for KIAA0874 (NM_015208.2,5295-5313).
gtctggaaaaccattcaca

SEQ ID NO: 349960 - DNA, 19 bp, Homo sapiens
  siRNA target sequence for KIAA0874 (NM_015208.2,5319-5337).
caactcaaccagaaatgca

SEQ ID NO: 349961 - DNA, 19 bp, Homo sapiens
  siRNA target sequence for KIAA0874 (NM_015208.2,5346-5364).
gtcagttagttaaagtaga

SEQ ID NO: 349962 - DNA, 19 bp, Homo sapiens
  siRNA target sequence for KIAA0874 (NM_015208.2,5348-5366).
cagttagttaaagtagaat

SEQ ID NO: 349963 - DNA, 19 bp, Homo sapiens
  siRNA target sequence for KIAA0874 (NM_015208.2,5465-5483).
cttgctagctgtacactat

SEQ ID NO: 349964 - DNA, 19 bp, Homo sapiens
  siRNA target sequence for KIAA0874 (NM_015208.2,5468-5486).
gctagctgtacactattat

SEQ ID NO: 349965 - DNA, 19 bp, Homo sapiens
  siRNA target sequence for KIAA0874 (NM_015208.2,5473-5491).
ctgtacactattatcagaa

SEQ ID NO: 349966 - DNA, 19 bp, Homo sapiens
  siRNA target sequence for KIAA0874 (NM_015208.2,5558-5576).
caccatccacggaaaagga

SEQ ID NO: 349967 - DNA, 19 bp, Homo sapiens
  siRNA target sequence for KIAA0874 (NM_015208.2,5564-5582).
ccacggaaaaggaaagtgt

SEQ ID NO: 349968 - DNA, 19 bp, Homo sapiens
  siRNA target sequence for KIAA0874 (NM_015208.2,5608-5626).
gagtccctctttactacaa

SEQ ID NO: 349969 - DNA, 19 bp, Homo sapiens
  siRNA target sequence for KIAA0874 (NM_015208.2,5657-5675).
gccattgtagattctctaa

SEQ ID NO: 349970 - DNA, 19 bp, Homo sapiens
  siRNA target sequence for KIAA0874 (NM_015208.2,5726-5744).
gaatacttgcacataagga

SEQ ID NO: 349971 - DNA, 19 bp, Homo sapiens
  siRNA target sequence for KIAA0874 (NM_015208.2,5787-5805).
ctcaagcacctcagtacta

SEQ ID NO: 349972 - DNA, 19 bp, Homo sapiens
  siRNA target sequence for KIAA0874 (NM_015208.2,5796-5814).
ctcagtactatgacgaata

SEQ ID NO: 349973 - DNA, 19 bp, Homo sapiens
  siRNA target sequence for KIAA0874 (NM_015208.2,5800-5818).
gtactatgacgaatatgta

SEQ ID NO: 349974 - DNA, 19 bp, Homo sapiens
  siRNA target sequence for KIAA0874 (NM_015208.2,5803-5821).
ctatgacgaatatgtaaca

SEQ ID NO: 349975 - DNA, 19 bp, Homo sapiens
  siRNA target sequence for KIAA0874 (NM_015208.2,5832-5850).
catatctcctggatggaaa

SEQ ID NO: 349976 - DNA, 19 bp, Homo sapiens
  siRNA target sequence for KIAA0874 (NM_015208.2,5924-5942).
cgacaacaggaagttgtaa

SEQ ID NO: 349977 - DNA, 19 bp, Homo sapiens
  siRNA target sequence for KIAA0874 (NM_015208.2,5994-6012).
ccaacgaacaagaagtttt

SEQ ID NO: 349978 - DNA, 19 bp, Homo sapiens
  siRNA target sequence for KIAA0874 (NM_015208.2,6005-6023).
gaagttttgcgagttcatt

SEQ ID NO: 349979 - DNA, 19 bp, Homo sapiens
  siRNA target sequence for KIAA0874 (NM_015208.2,6008-6026).
gttttgcgagttcattaca

SEQ ID NO: 349980 - DNA, 19 bp, Homo sapiens
  siRNA target sequence for KIAA0874 (NM_015208.2,6058-6076).
gccatttagtgcttgtact

SEQ ID NO: 349981 - DNA, 19 bp, Homo sapiens
  siRNA target sequence for KIAA0874 (NM_015208.2,6085-6103).
ggatgccgaagtatacaat

SEQ ID NO: 349982 - DNA, 19 bp, Homo sapiens
  siRNA target sequence for KIAA0874 (NM_015208.2,6119-6137).
cagtctgatgacagtaaaa

SEQ ID NO: 349983 - DNA, 19 bp, Homo sapiens
  siRNA target sequence for KIAA0874 (NM_015208.2,6145-6163).
gagggatcgctttaatgca

SEQ ID NO: 349984 - DNA, 19 bp, Homo sapiens
  siRNA target sequence for KIAA0874 (NM_015208.2,6152-6170).
cgctttaatgcaagacaat

SEQ ID NO: 349985 - DNA, 19 bp, Homo sapiens
  siRNA target sequence for KIAA0874 (NM_015208.2,6153-6171).
gctttaatgcaagacaatt

SEQ ID NO: 349986 - DNA, 19 bp, Homo sapiens
  siRNA target sequence for KIAA0874 (NM_015208.2,6161-6179).
gcaagacaattcatgtctt

SEQ ID NO: 349987 - DNA, 19 bp, Homo sapiens
  siRNA target sequence for KIAA0874 (NM_015208.2,6191-6209).
gtggatgataaatttgaca

SEQ ID NO: 349988 - DNA, 19 bp, Homo sapiens
  siRNA target sequence for KIAA0874 (NM_015208.2,6242-6260).
catgaagctgcggctttaa

SEQ ID NO: 349989 - DNA, 19 bp, Homo sapiens
  siRNA target sequence for KIAA0874 (NM_015208.2,6305-6323).
gatcctgccacctataaat

SEQ ID NO: 349990 - DNA, 19 bp, Homo sapiens
  siRNA target sequence for KIAA0874 (NM_015208.2,6308-6326).
cctgccacctataaatcta

SEQ ID NO: 349991 - DNA, 19 bp, Homo sapiens
  siRNA target sequence for KIAA0874 (NM_015208.2,6309-6327).
ctgccacctataaatctat

SEQ ID NO: 349992 - DNA, 19 bp, Homo sapiens
  siRNA target sequence for KIAA0874 (NM_015208.2,6324-6342).
ctatcagcatttacgaaat

SEQ ID NO: 349993 - DNA, 19 bp, Homo sapiens
  siRNA target sequence for KIAA0874 (NM_015208.2,6356-6374).
gttccccttgttgatgtta

SEQ ID NO: 349994 - DNA, 19 bp, Homo sapiens
  siRNA target sequence for KIAA0874 (NM_015208.2,6360-6378).
cccttgttgatgttaacga

SEQ ID NO: 349995 - DNA, 19 bp, Homo sapiens
  siRNA target sequence for KIAA0874 (NM_015208.2,6376-6394).
cgacgactttgaattgact

SEQ ID NO: 349996 - DNA, 19 bp, Homo sapiens
  siRNA target sequence for RAP140 (NM_015224.1,984-1002).
cttaggtccaaatgaagtt

SEQ ID NO: 349997 - DNA, 19 bp, Homo sapiens
  siRNA target sequence for RAP140 (NM_015224.1,1017-1035).
gtattgcagcctttatgaa

SEQ ID NO: 349998 - DNA, 19 bp, Homo sapiens
  siRNA target sequence for RAP140 (NM_015224.1,1061-1079).
gtaacatggagagtttact

SEQ ID NO: 349999 - DNA, 19 bp, Homo sapiens
  siRNA target sequence for RAP140 (NM_015224.1,1068-1086).
ggagagtttactgcaaaaa

SEQ ID NO: 350000 - DNA, 19 bp, Homo sapiens
  siRNA target sequence for RAP140 (NM_015224.1,1073-1091).
gtttactgcaaaaactaga

SEQ ID NO: 350001 - DNA, 19 bp, Homo sapiens
  siRNA target sequence for RAP140 (NM_015224.1,1094-1112).
gagaaaaacttgttcttgt

SEQ ID NO: 350002 - DNA, 19 bp, Homo sapiens
  siRNA target sequence for RAP140 (NM_015224.1,1096-1114).
gaaaaacttgttcttgtta

SEQ ID NO: 350003 - DNA, 19 bp, Homo sapiens
  siRNA target sequence for RAP140 (NM_015224.1,1123-1141).
ggagaccgaggataccttt

SEQ ID NO: 350004 - DNA, 19 bp, Homo sapiens
  siRNA target sequence for RAP140 (NM_015224.1,1124-1142).
gagaccgaggatacctttt

SEQ ID NO: 350005 - DNA, 19 bp, Homo sapiens
  siRNA target sequence for RAP140 (NM_015224.1,1144-1162).
cttctctccccttatcaga

SEQ ID NO: 350006 - DNA, 19 bp, Homo sapiens
  siRNA target sequence for RAP140 (NM_015224.1,1164-1182).
ggttcctccatatgaatat

SEQ ID NO: 350007 - DNA, 19 bp, Homo sapiens
  siRNA target sequence for RAP140 (NM_015224.1,1196-1214).
ctcgagtcctacatgcttt

SEQ ID NO: 350008 - DNA, 19 bp, Homo sapiens
  siRNA target sequence for RAP140 (NM_015224.1,1239-1257).
catagttacttcacaaaaa

SEQ ID NO: 350009 - DNA, 19 bp, Homo sapiens
  siRNA target sequence for RAP140 (NM_015224.1,1291-1309).
gagagcatgccagatgtat

SEQ ID NO: 350010 - DNA, 19 bp, Homo sapiens
  siRNA target sequence for RAP140 (NM_015224.1,1293-1311).
gagcatgccagatgtatta

SEQ ID NO: 350011 - DNA, 19 bp, Homo sapiens
  siRNA target sequence for RAP140 (NM_015224.1,1345-1363).
cagtgtcgaaaggaattca

SEQ ID NO: 350012 - DNA, 19 bp, Homo sapiens
  siRNA target sequence for RAP140 (NM_015224.1,1347-1365).
gtgtcgaaaggaattcaaa

SEQ ID NO: 350013 - DNA, 19 bp, Homo sapiens
  siRNA target sequence for RAP140 (NM_015224.1,1374-1392).
cgccataaattttcattct

SEQ ID NO: 350014 - DNA, 19 bp, Homo sapiens
  siRNA target sequence for RAP140 (NM_015224.1,1439-1457).
caggtaaacgagagtttat

SEQ ID NO: 350015 - DNA, 19 bp, Homo sapiens
  siRNA target sequence for RAP140 (NM_015224.1,1441-1459).
ggtaaacgagagtttatta

SEQ ID NO: 350016 - DNA, 19 bp, Homo sapiens
  siRNA target sequence for RAP140 (NM_015224.1,1442-1460).
gtaaacgagagtttattat

SEQ ID NO: 350017 - DNA, 19 bp, Homo sapiens
  siRNA target sequence for RAP140 (NM_015224.1,1466-1484).
catatgattcacgattaga

SEQ ID NO: 350018 - DNA, 19 bp, Homo sapiens
  siRNA target sequence for RAP140 (NM_015224.1,1471-1489).
gattcacgattagatgata

SEQ ID NO: 350019 - DNA, 19 bp, Homo sapiens
  siRNA target sequence for RAP140 (NM_015224.1,1523-1541).
cccatattgatacttgttt

SEQ ID NO: 350020 - DNA, 19 bp, Homo sapiens
  siRNA target sequence for RAP140 (NM_015224.1,1559-1577).
ggcctgaagtgtatcagtt

SEQ ID NO: 350021 - DNA, 19 bp, Homo sapiens
  siRNA target sequence for RAP140 (NM_015224.1,1560-1578).
gcctgaagtgtatcagtta

SEQ ID NO: 350022 - DNA, 19 bp, Homo sapiens
  siRNA target sequence for RAP140 (NM_015224.1,1626-1644).
gcagtttagtccactttca

SEQ ID NO: 350023 - DNA, 19 bp, Homo sapiens
  siRNA target sequence for RAP140 (NM_015224.1,1738-1756).
caaagatcatctcattctt

SEQ ID NO: 350024 - DNA, 19 bp, Homo sapiens
  siRNA target sequence for RAP140 (NM_015224.1,1905-1923).
gctcgccaaaaccagtaat

SEQ ID NO: 350025 - DNA, 19 bp, Homo sapiens
  siRNA target sequence for RAP140 (NM_015224.1,1906-1924).
ctcgccaaaaccagtaatt

SEQ ID NO: 350026 - DNA, 19 bp, Homo sapiens
  siRNA target sequence for RAP140 (NM_015224.1,2005-2023).
cagcaggatacctgtaact

SEQ ID NO: 350027 - DNA, 19 bp, Homo sapiens
  siRNA target sequence for RAP140 (NM_015224.1,2035-2053).
gacatccataggctgttta

SEQ ID NO: 350028 - DNA, 19 bp, Homo sapiens
  siRNA target sequence for RAP140 (NM_015224.1,2037-2055).
catccataggctgtttaat

SEQ ID NO: 350029 - DNA, 19 bp, Homo sapiens
  siRNA target sequence for RAP140 (NM_015224.1,2049-2067).
gtttaattggttatcagaa

SEQ ID NO: 350030 - DNA, 19 bp, Homo sapiens
  siRNA target sequence for RAP140 (NM_015224.1,2173-2191).
gagtatgagttgaactcta

SEQ ID NO: 350031 - DNA, 19 bp, Homo sapiens
  siRNA target sequence for RAP140 (NM_015224.1,2208-2226).
ctatgagcagcctacttgt

SEQ ID NO: 350032 - DNA, 19 bp, Homo sapiens
  siRNA target sequence for RAP140 (NM_015224.1,2214-2232).
gcagcctacttgtgcaaaa

SEQ ID NO: 350033 - DNA, 19 bp, Homo sapiens
  siRNA target sequence for RAP140 (NM_015224.1,2217-2235).
gcctacttgtgcaaaagtt

SEQ ID NO: 350034 - DNA, 19 bp, Homo sapiens
  siRNA target sequence for RAP140 (NM_015224.1,2219-2237).
ctacttgtgcaaaagttga

SEQ ID NO: 350035 - DNA, 19 bp, Homo sapiens
  siRNA target sequence for RAP140 (NM_015224.1,2258-2276).
ctcagagcttattactaga

SEQ ID NO: 350036 - DNA, 19 bp, Homo sapiens
  siRNA target sequence for RAP140 (NM_015224.1,2262-2280).
gagcttattactagaagtt

SEQ ID NO: 350037 - DNA, 19 bp, Homo sapiens
  siRNA target sequence for RAP140 (NM_015224.1,2264-2282).
gcttattactagaagttga

SEQ ID NO: 350038 - DNA, 19 bp, Homo sapiens
  siRNA target sequence for RAP140 (NM_015224.1,2281-2299).
gatgcaacatctaagtatt

SEQ ID NO: 350039 - DNA, 19 bp, Homo sapiens
  siRNA target sequence for RAP140 (NM_015224.1,2325-2343).
gggcactgaccataagcta

SEQ ID NO: 350040 - DNA, 19 bp, Homo sapiens
  siRNA target sequence for RAP140 (NM_015224.1,2332-2350).
gaccataagctacatttga

SEQ ID NO: 350041 - DNA, 19 bp, Homo sapiens
  siRNA target sequence for RAP140 (NM_015224.1,2334-2352).
ccataagctacatttgaaa

SEQ ID NO: 350042 - DNA, 19 bp, Homo sapiens
  siRNA target sequence for RAP140 (NM_015224.1,2372-2390).
gcgtgaataattttgaaga

SEQ ID NO: 350043 - DNA, 19 bp, Homo sapiens
  siRNA target sequence for RAP140 (NM_015224.1,2415-2433).
cattgaacatggatttcgt

SEQ ID NO: 350044 - DNA, 19 bp, Homo sapiens
  siRNA target sequence for RAP140 (NM_015224.1,2431-2449).
cgtagacaacagtctaagt

SEQ ID NO: 350045 - DNA, 19 bp, Homo sapiens
  siRNA target sequence for RAP140 (NM_015224.1,2437-2455).
caacagtctaagtcaaata

SEQ ID NO: 350046 - DNA, 19 bp, Homo sapiens
  siRNA target sequence for RAP140 (NM_015224.1,2661-2679).
cacagagaggacagtgtta

SEQ ID NO: 350047 - DNA, 19 bp, Homo sapiens
  siRNA target sequence for RAP140 (NM_015224.1,2683-2701).
gagtacaatctcttttcta

SEQ ID NO: 350048 - DNA, 19 bp, Homo sapiens
  siRNA target sequence for RAP140 (NM_015224.1,2791-2809).
cggctttccgagttcatat

SEQ ID NO: 350049 - DNA, 19 bp, Homo sapiens
  siRNA target sequence for RAP140 (NM_015224.1,2792-2810).
ggctttccgagttcatata

SEQ ID NO: 350050 - DNA, 19 bp, Homo sapiens
  siRNA target sequence for RAP140 (NM_015224.1,2793-2811).
gctttccgagttcatatat

SEQ ID NO: 350051 - DNA, 19 bp, Homo sapiens
  siRNA target sequence for RAP140 (NM_015224.1,2794-2812).
ctttccgagttcatatatt

SEQ ID NO: 350052 - DNA, 19 bp, Homo sapiens
  siRNA target sequence for RAP140 (NM_015224.1,2798-2816).
ccgagttcatatattctaa

SEQ ID NO: 350053 - DNA, 19 bp, Homo sapiens
  siRNA target sequence for RAP140 (NM_015224.1,2856-2874).
gcatgagaagctaaatact

SEQ ID NO: 350054 - DNA, 19 bp, Homo sapiens
  siRNA target sequence for RAP140 (NM_015224.1,2860-2878).
gagaagctaaatactatta

SEQ ID NO: 350055 - DNA, 19 bp, Homo sapiens
  siRNA target sequence for RAP140 (NM_015224.1,2862-2880).
gaagctaaatactattatt

SEQ ID NO: 350056 - DNA, 19 bp, Homo sapiens
  siRNA target sequence for RAP140 (NM_015224.1,2914-2932).
ccagtcagtcctaacgatt

SEQ ID NO: 350057 - DNA, 19 bp, Homo sapiens
  siRNA target sequence for RAP140 (NM_015224.1,2928-2946).
cgattctggtgctaagata

SEQ ID NO: 350058 - DNA, 19 bp, Homo sapiens
  siRNA target sequence for RAP140 (NM_015224.1,3064-3082).
cattccacttcggctttaa

SEQ ID NO: 350059 - DNA, 19 bp, Homo sapiens
  siRNA target sequence for RAP140 (NM_015224.1,3074-3092).
cggctttaactgaagtaga

SEQ ID NO: 350060 - DNA, 19 bp, Homo sapiens
  siRNA target sequence for RAP140 (NM_015224.1,3106-3124).
caacatgccacagagttaa

SEQ ID NO: 350061 - DNA, 19 bp, Homo sapiens
  siRNA target sequence for RAP140 (NM_015224.1,3120-3138).
gttaatggtgacttctgat

SEQ ID NO: 350062 - DNA, 19 bp, Homo sapiens
  siRNA target sequence for RAP140 (NM_015224.1,3126-3144).
ggtgacttctgatcatatt

SEQ ID NO: 350063 - DNA, 19 bp, Homo sapiens
  siRNA target sequence for RAP140 (NM_015224.1,3217-3235).
caaccagctctttcaaatt

SEQ ID NO: 350064 - DNA, 19 bp, Homo sapiens
  siRNA target sequence for RAP140 (NM_015224.1,3243-3261).
ccagttagaacctgaagta

SEQ ID NO: 350065 - DNA, 19 bp, Homo sapiens
  siRNA target sequence for RAP140 (NM_015224.1,3244-3262).
cagttagaacctgaagtat

SEQ ID NO: 350066 - DNA, 19 bp, Homo sapiens
  siRNA target sequence for RAP140 (NM_015224.1,3246-3264).
gttagaacctgaagtattt

SEQ ID NO: 350067 - DNA, 19 bp, Homo sapiens
  siRNA target sequence for RAP140 (NM_015224.1,3285-3303).
gaaagacgtccagaaaaat

SEQ ID NO: 350068 - DNA, 19 bp, Homo sapiens
  siRNA target sequence for RAP140 (NM_015224.1,3436-3454).
ctattgattattattcaaa

SEQ ID NO: 350069 - DNA, 19 bp, Homo sapiens
  siRNA target sequence for RAP140 (NM_015224.1,3488-3506).
ctggcttggtgactttaaa

SEQ ID NO: 350070 - DNA, 19 bp, Homo sapiens
  siRNA target sequence for RAP140 (NM_015224.1,3490-3508).
ggcttggtgactttaaaga

SEQ ID NO: 350071 - DNA, 19 bp, Homo sapiens
  siRNA target sequence for RAP140 (NM_015224.1,3507-3525).
gaagctcccctgtgttagt

SEQ ID NO: 350072 - DNA, 19 bp, Homo sapiens
  siRNA target sequence for RAP140 (NM_015224.1,3510-3528).
gctcccctgtgttagtttt

SEQ ID NO: 350073 - DNA, 19 bp, Homo sapiens
  siRNA target sequence for RAP140 (NM_015224.1,3542-3560).
gcctggatgatgttaaaaa

SEQ ID NO: 350074 - DNA, 19 bp, Homo sapiens
  siRNA target sequence for RAP140 (NM_015224.1,3547-3565).
gatgatgttaaaaatcata

SEQ ID NO: 350075 - DNA, 19 bp, Homo sapiens
  siRNA target sequence for RAP140 (NM_015224.1,3566-3584).
catacaatgaattatttgt

SEQ ID NO: 350076 - DNA, 19 bp, Homo sapiens
  siRNA target sequence for RAP140 (NM_015224.1,3570-3588).
caatgaattatttgtatct

SEQ ID NO: 350077 - DNA, 19 bp, Homo sapiens
  siRNA target sequence for RAP140 (NM_015224.1,3634-3652).
gtcacagttgagaacctta

SEQ ID NO: 350078 - DNA, 19 bp, Homo sapiens
  siRNA target sequence for RAP140 (NM_015224.1,3707-3725).
ggaaagtccactgtaaatt

SEQ ID NO: 350079 - DNA, 19 bp, Homo sapiens
  siRNA target sequence for RAP140 (NM_015224.1,3708-3726).
gaaagtccactgtaaattt

SEQ ID NO: 350080 - DNA, 19 bp, Homo sapiens
  siRNA target sequence for RAP140 (NM_015224.1,3745-3763).
ctaggcagattgaatgcta

SEQ ID NO: 350081 - DNA, 19 bp, Homo sapiens
  siRNA target sequence for RAP140 (NM_015224.1,3756-3774).
gaatgctaaagctctaagt

SEQ ID NO: 350082 - DNA, 19 bp, Homo sapiens
  siRNA target sequence for RAP140 (NM_015224.1,3782-3800).
cgcttctgaatgtctatca

SEQ ID NO: 350083 - DNA, 19 bp, Homo sapiens
  siRNA target sequence for RAP140 (NM_015224.1,3851-3869).
ctcgaaatgctccagaatt

SEQ ID NO: 350084 - DNA, 19 bp, Homo sapiens
  siRNA target sequence for RAP140 (NM_015224.1,3900-3918).
catacagcaacgacacata

SEQ ID NO: 350085 - DNA, 19 bp, Homo sapiens
  siRNA target sequence for RAP140 (NM_015224.1,3904-3922).
cagcaacgacacatagtct

SEQ ID NO: 350086 - DNA, 19 bp, Homo sapiens
  siRNA target sequence for RAP140 (NM_015224.1,3910-3928).
cgacacatagtctttttaa

SEQ ID NO: 350087 - DNA, 19 bp, Homo sapiens
  siRNA target sequence for RAP140 (NM_015224.1,3994-4012).
gacttcatgcaaaacttta

SEQ ID NO: 350088 - DNA, 19 bp, Homo sapiens
  siRNA target sequence for RAP140 (NM_015224.1,4018-4036).
cttgtgggctatcacaatt

SEQ ID NO: 350089 - DNA, 19 bp, Homo sapiens
  siRNA target sequence for RAP140 (NM_015224.1,4026-4044).
ctatcacaattcaatcaca

SEQ ID NO: 350090 - DNA, 19 bp, Homo sapiens
  siRNA target sequence for RAP140 (NM_015224.1,4062-4080).
gcttggtgctaatgagaat

SEQ ID NO: 350091 - DNA, 19 bp, Homo sapiens
  siRNA target sequence for RAP140 (NM_015224.1,4141-4159).
gattcaggggatgaaatct

SEQ ID NO: 350092 - DNA, 19 bp, Homo sapiens
  siRNA target sequence for RAP140 (NM_015224.1,4148-4166).
gggatgaaatctcacatat

SEQ ID NO: 350093 - DNA, 19 bp, Homo sapiens
  siRNA target sequence for RAP140 (NM_015224.1,4178-4196).
gcaattttcattcagaaat

SEQ ID NO: 350094 - DNA, 19 bp, Homo sapiens
  siRNA target sequence for RAP140 (NM_015224.1,4222-4240).
cgtggaacagatcaaaaaa

SEQ ID NO: 350095 - DNA, 19 bp, Homo sapiens
  siRNA target sequence for RAP140 (NM_015224.1,4273-4291).
gatgtgcaaaacagtttat

SEQ ID NO: 350096 - DNA, 19 bp, Homo sapiens
  siRNA target sequence for RAP140 (NM_015224.1,4364-4382).
gcaattcaacagaacaaga

SEQ ID NO: 350097 - DNA, 19 bp, Homo sapiens
  siRNA target sequence for RAP140 (NM_015224.1,4378-4396).
caagattcatatagtaact

SEQ ID NO: 350098 - DNA, 19 bp, Homo sapiens
  siRNA target sequence for RAP140 (NM_015224.1,4391-4409).
gtaactttcaggtttatca

SEQ ID NO: 350099 - DNA, 19 bp, Homo sapiens
  siRNA target sequence for RAP140 (NM_015224.1,4395-4413).
ctttcaggtttatcatagt

SEQ ID NO: 350100 - DNA, 19 bp, Homo sapiens
  siRNA target sequence for RAP140 (NM_015224.1,4401-4419).
ggtttatcatagtcaatta

SEQ ID NO: 350101 - DNA, 19 bp, Homo sapiens
  siRNA target sequence for RAP140 (NM_015224.1,4402-4420).
gtttatcatagtcaattaa

SEQ ID NO: 350102 - DNA, 19 bp, Homo sapiens
  siRNA target sequence for RAP140 (NM_015224.1,4425-4443).
gtcccatcagtttagtcat

SEQ ID NO: 350103 - DNA, 19 bp, Homo sapiens
  siRNA target sequence for RAP140 (NM_015224.1,4524-4542).
cttcttatctgcttatact

SEQ ID NO: 350104 - DNA, 19 bp, Homo sapiens
  siRNA target sequence for RAP140 (NM_015224.1,4527-4545).
cttatctgcttatactgaa

SEQ ID NO: 350105 - DNA, 19 bp, Homo sapiens
  siRNA target sequence for RAP140 (NM_015224.1,4604-4622).
ggccatattcacaagagaa

SEQ ID NO: 350106 - DNA, 19 bp, Homo sapiens
  siRNA target sequence for RAP140 (NM_015224.1,4605-4623).
gccatattcacaagagaaa

SEQ ID NO: 350107 - DNA, 19 bp, Homo sapiens
  siRNA target sequence for RAP140 (NM_015224.1,4606-4624).
ccatattcacaagagaaat

SEQ ID NO: 350108 - DNA, 19 bp, Homo sapiens
  siRNA target sequence for C21orf80 (NM_015227.2,136-154).
cccgcagacggtatcttct

SEQ ID NO: 350109 - DNA, 19 bp, Homo sapiens
  siRNA target sequence for C21orf80 (NM_015227.2,142-160).
gacggtatcttctgtatga

SEQ ID NO: 350110 - DNA, 19 bp, Homo sapiens
  siRNA target sequence for C21orf80 (NM_015227.2,185-203).
cctgcgcagggatgtctat

SEQ ID NO: 350111 - DNA, 19 bp, Homo sapiens
  siRNA target sequence for C21orf80 (NM_015227.2,186-204).
ctgcgcagggatgtctata

SEQ ID NO: 350112 - DNA, 19 bp, Homo sapiens
  siRNA target sequence for C21orf80 (NM_015227.2,339-357).
gatcttccaagtctcaata

SEQ ID NO: 350113 - DNA, 19 bp, Homo sapiens
  siRNA target sequence for C21orf80 (NM_015227.2,409-427).
cctttattgaccaggttta

SEQ ID NO: 350114 - DNA, 19 bp, Homo sapiens
  siRNA target sequence for C21orf80 (NM_015227.2,626-644).
cctgctgctgagaaacaca

SEQ ID NO: 350115 - DNA, 19 bp, Homo sapiens
  siRNA target sequence for C21orf80 (NM_015227.2,649-667).
cccggtccgtgatgttaga

SEQ ID NO: 350116 - DNA, 19 bp, Homo sapiens
  siRNA target sequence for C21orf80 (NM_015227.2,651-669).
cggtccgtgatgttagaca

SEQ ID NO: 350117 - DNA, 19 bp, Homo sapiens
  siRNA target sequence for C21orf80 (NM_015227.2,692-710).
ccactatggagggaaagaa

SEQ ID NO: 350118 - DNA, 19 bp, Homo sapiens
  siRNA target sequence for C21orf80 (NM_015227.2,883-901).
gagtccacctgagaagaaa

SEQ ID NO: 350119 - DNA, 19 bp, Homo sapiens
  siRNA target sequence for C21orf80 (NM_015227.2,1011-1029).
gatgccgtcagaaaggaat

SEQ ID NO: 350120 - DNA, 19 bp, Homo sapiens
  siRNA target sequence for C21orf80 (NM_015227.2,1015-1033).
ccgtcagaaaggaatatga

SEQ ID NO: 350121 - DNA, 19 bp, Homo sapiens
  siRNA target sequence for C21orf80 (NM_015227.2,1106-1124).
cggaggcgttgcgattatt

SEQ ID NO: 350122 - DNA, 19 bp, Homo sapiens
  siRNA target sequence for C21orf80 (NM_015227.2,1108-1126).
gaggcgttgcgattattga

SEQ ID NO: 350123 - DNA, 19 bp, Homo sapiens
  siRNA target sequence for C21orf80 (NM_015227.2,1181-1199).
cgggtcgggtggctttcaa

SEQ ID NO: 350124 - DNA, 19 bp, Homo sapiens
  siRNA target sequence for C21orf80 (NM_015227.2,1182-1200).
gggtcgggtggctttcaaa

SEQ ID NO: 350125 - DNA, 19 bp, Homo sapiens
  siRNA target sequence for C21orf80 (NM_015227.2,1251-1269).
cacagtggtcatttccata

SEQ ID NO: 350126 - DNA, 19 bp, Homo sapiens
  siRNA target sequence for C21orf80 (NM_015227.2,1257-1275).
ggtcatttccatactgttt

SEQ ID NO: 350127 - DNA, 19 bp, Homo sapiens
  siRNA target sequence for KIBRA (NM_015238.1,121-139).
gacggcaaggtctactaca

SEQ ID NO: 350128 - DNA, 19 bp, Homo sapiens
  siRNA target sequence for KIBRA (NM_015238.1,123-141).
cggcaaggtctactacata

SEQ ID NO: 350129 - DNA, 19 bp, Homo sapiens
  siRNA target sequence for KIBRA (NM_015238.1,125-143).
gcaaggtctactacataga

SEQ ID NO: 350130 - DNA, 19 bp, Homo sapiens
  siRNA target sequence for KIBRA (NM_015238.1,259-277).
ccacaggttggagattact

SEQ ID NO: 350131 - DNA, 19 bp, Homo sapiens
  siRNA target sequence for KIBRA (NM_015238.1,293-311).
ccaaaaccactcagattga

SEQ ID NO: 350132 - DNA, 19 bp, Homo sapiens
  siRNA target sequence for KIBRA (NM_015238.1,464-482).
ccgtctgggagcataagct

SEQ ID NO: 350133 - DNA, 19 bp, Homo sapiens
  siRNA target sequence for KIBRA (NM_015238.1,566-584).
caaaatcccgggtcaacaa

SEQ ID NO: 350134 - DNA, 19 bp, Homo sapiens
  siRNA target sequence for KIBRA (NM_015238.1,680-698).
ctcagggcagctacaaact

SEQ ID NO: 350135 - DNA, 19 bp, Homo sapiens
  siRNA target sequence for KIBRA (NM_015238.1,709-727).
caggctgtcttgagagaaa

SEQ ID NO: 350136 - DNA, 19 bp, Homo sapiens
  siRNA target sequence for KIBRA (NM_015238.1,733-751).
gccatcaaaaaggctatta

SEQ ID NO: 350137 - DNA, 19 bp, Homo sapiens
  siRNA target sequence for KIBRA (NM_015238.1,766-784).
gaaaagcaagatctcatta

SEQ ID NO: 350138 - DNA, 19 bp, Homo sapiens
  siRNA target sequence for KIBRA (NM_015238.1,936-954).
cggcatcaacagcaacaat

SEQ ID NO: 350139 - DNA, 19 bp, Homo sapiens
  siRNA target sequence for KIBRA (NM_015238.1,972-990).
cagattgcgccttcgatat

SEQ ID NO: 350140 - DNA, 19 bp, Homo sapiens
  siRNA target sequence for KIBRA (NM_015238.1,974-992).
gattgcgccttcgatatga

SEQ ID NO: 350141 - DNA, 19 bp, Homo sapiens
  siRNA target sequence for KIBRA (NM_015238.1,1007-1025).
ggatcgccaacctgaagat

SEQ ID NO: 350142 - DNA, 19 bp, Homo sapiens
  siRNA target sequence for KIBRA (NM_015238.1,1081-1099).
gaccggctgatccttatca

SEQ ID NO: 350143 - DNA, 19 bp, Homo sapiens
  siRNA target sequence for KIBRA (NM_015238.1,1238-1256).
cgctgacggagaggttaaa

SEQ ID NO: 350144 - DNA, 19 bp, Homo sapiens
  siRNA target sequence for KIBRA (NM_015238.1,1240-1258).
ctgacggagaggttaaagt

SEQ ID NO: 350145 - DNA, 19 bp, Homo sapiens
  siRNA target sequence for KIBRA (NM_015238.1,1242-1260).
gacggagaggttaaagtta

SEQ ID NO: 350146 - DNA, 19 bp, Homo sapiens
  siRNA target sequence for KIBRA (NM_015238.1,1248-1266).
gaggttaaagttaaacagt

SEQ ID NO: 350147 - DNA, 19 bp, Homo sapiens
  siRNA target sequence for KIBRA (NM_015238.1,1779-1797).
gctgagtgccactctttgt

SEQ ID NO: 350148 - DNA, 19 bp, Homo sapiens
  siRNA target sequence for KIBRA (NM_015238.1,1866-1884).
gctgggccaagctgtgaat

SEQ ID NO: 350149 - DNA, 19 bp, Homo sapiens
  siRNA target sequence for KIBRA (NM_015238.1,2038-2056).
ggtgcgacccgaattcaga

SEQ ID NO: 350150 - DNA, 19 bp, Homo sapiens
  siRNA target sequence for KIBRA (NM_015238.1,2039-2057).
gtgcgacccgaattcagat

SEQ ID NO: 350151 - DNA, 19 bp, Homo sapiens
  siRNA target sequence for KIBRA (NM_015238.1,2103-2121).
catccagctgagtaacctt

SEQ ID NO: 350152 - DNA, 19 bp, Homo sapiens
  siRNA target sequence for KIBRA (NM_015238.1,2225-2243).
cctcagacactctagtgtt

SEQ ID NO: 350153 - DNA, 19 bp, Homo sapiens
  siRNA target sequence for KIBRA (NM_015238.1,2228-2246).
cagacactctagtgttcaa

SEQ ID NO: 350154 - DNA, 19 bp, Homo sapiens
  siRNA target sequence for KIBRA (NM_015238.1,2704-2722).
gatgggtacccagcattaa

SEQ ID NO: 350155 - DNA, 19 bp, Homo sapiens
  siRNA target sequence for KIBRA (NM_015238.1,2708-2726).
ggtacccagcattaaaggt

SEQ ID NO: 350156 - DNA, 19 bp, Homo sapiens
  siRNA target sequence for KIBRA (NM_015238.1,2805-2823).
gtcccaggggccatttctt

SEQ ID NO: 350157 - DNA, 19 bp, Homo sapiens
  siRNA target sequence for KIBRA (NM_015238.1,2887-2905).
cggctgaatcggagtgata

SEQ ID NO: 350158 - DNA, 19 bp, Homo sapiens
  siRNA target sequence for KIBRA (NM_015238.1,2912-2930).
gctccactctgtccaaaaa

SEQ ID NO: 350159 - DNA, 19 bp, Homo sapiens
  siRNA target sequence for KIBRA (NM_015238.1,2922-2940).
gtccaaaaagccacctttt

SEQ ID NO: 350160 - DNA, 19 bp, Homo sapiens
  siRNA target sequence for KIBRA (NM_015238.1,3046-3064).
gacctgcaggcgacaagaa

SEQ ID NO: 350161 - DNA, 19 bp, Homo sapiens
  siRNA target sequence for COH1 (NM_015243.2,120-138).
gtcatatgtaactccaatt

SEQ ID NO: 350162 - DNA, 19 bp, Homo sapiens
  siRNA target sequence for COH1 (NM_015243.2,220-238).
ctcagcaagctcgagttaa

SEQ ID NO: 350163 - DNA, 19 bp, Homo sapiens
  siRNA target sequence for COH1 (NM_015243.2,224-242).
gcaagctcgagttaaagtt

SEQ ID NO: 350164 - DNA, 19 bp, Homo sapiens
  siRNA target sequence for COH1 (NM_015243.2,256-274).
caggaactgaaattaccat

SEQ ID NO: 350165 - DNA, 19 bp, Homo sapiens
  siRNA target sequence for COH1 (NM_015243.2,262-280).
ctgaaattaccattcactt

SEQ ID NO: 350166 - DNA, 19 bp, Homo sapiens
  siRNA target sequence for COH1 (NM_015243.2,278-296).
cttttttaagtggacatat

SEQ ID NO: 350167 - DNA, 19 bp, Homo sapiens
  siRNA target sequence for COH1 (NM_015243.2,289-307).
ggacatattcatgaattga

SEQ ID NO: 350168 - DNA, 19 bp, Homo sapiens
  siRNA target sequence for COH1 (NM_015243.2,346-364).
gtggtaattaccatcaata

SEQ ID NO: 350169 - DNA, 19 bp, Homo sapiens
  siRNA target sequence for COH1 (NM_015243.2,360-378).
caatactatggaatgcatt

SEQ ID NO: 350170 - DNA, 19 bp, Homo sapiens
  siRNA target sequence for COH1 (NM_015243.2,374-392).
gcattttgaaacttaagga

SEQ ID NO: 350171 - DNA, 19 bp, Homo sapiens
  siRNA target sequence for COH1 (NM_015243.2,375-393).
cattttgaaacttaaggat

SEQ ID NO: 350172 - DNA, 19 bp, Homo sapiens
  siRNA target sequence for COH1 (NM_015243.2,455-473).
gcacaaaatcatcaatcaa

SEQ ID NO: 350173 - DNA, 19 bp, Homo sapiens
  siRNA target sequence for COH1 (NM_015243.2,489-507).
gcaggctgctcctacagat

SEQ ID NO: 350174 - DNA, 19 bp, Homo sapiens
  siRNA target sequence for COH1 (NM_015243.2,538-556).
ctgattagacgagttgtaa

SEQ ID NO: 350175 - DNA, 19 bp, Homo sapiens
  siRNA target sequence for COH1 (NM_015243.2,540-558).
gattagacgagttgtaaat

SEQ ID NO: 350176 - DNA, 19 bp, Homo sapiens
  siRNA target sequence for COH1 (NM_015243.2,613-631).
gtcctttccgtcaatatca

SEQ ID NO: 350177 - DNA, 19 bp, Homo sapiens
  siRNA target sequence for COH1 (NM_015243.2,682-700).
gatatttctgcaactgatt

SEQ ID NO: 350178 - DNA, 19 bp, Homo sapiens
  siRNA target sequence for COH1 (NM_015243.2,784-802).
caggatcctttattataca

SEQ ID NO: 350179 - DNA, 19 bp, Homo sapiens
  siRNA target sequence for COH1 (NM_015243.2,852-870).
caagatgccatctgttatt

SEQ ID NO: 350180 - DNA, 19 bp, Homo sapiens
  siRNA target sequence for COH1 (NM_015243.2,922-940).
ctgcctatgtttattcgta

SEQ ID NO: 350181 - DNA, 19 bp, Homo sapiens
  siRNA target sequence for COH1 (NM_015243.2,924-942).
gcctatgtttattcgtata

SEQ ID NO: 350182 - DNA, 19 bp, Homo sapiens
  siRNA target sequence for COH1 (NM_015243.2,925-943).
cctatgtttattcgtataa

SEQ ID NO: 350183 - DNA, 19 bp, Homo sapiens
  siRNA target sequence for COH1 (NM_015243.2,926-944).
ctatgtttattcgtataat

SEQ ID NO: 350184 - DNA, 19 bp, Homo sapiens
  siRNA target sequence for COH1 (NM_015243.2,930-948).
gtttattcgtataatgcaa

SEQ ID NO: 350185 - DNA, 19 bp, Homo sapiens
  siRNA target sequence for COH1 (NM_015243.2,997-1015).
gaaatagaggaccttactt

SEQ ID NO: 350186 - DNA, 19 bp, Homo sapiens
  siRNA target sequence for COH1 (NM_015243.2,1003-1021).
gaggaccttacttgtcata

SEQ ID NO: 350187 - DNA, 19 bp, Homo sapiens
  siRNA target sequence for COH1 (NM_015243.2,1092-1110).
gcataaaggtcaagagtta

SEQ ID NO: 350188 - DNA, 19 bp, Homo sapiens
  siRNA target sequence for COH1 (NM_015243.2,1100-1118).
gtcaagagttatattcaca

SEQ ID NO: 350189 - DNA, 19 bp, Homo sapiens
  siRNA target sequence for COH1 (NM_015243.2,1299-1317).
ggcaacggtgactttcaaa

SEQ ID NO: 350190 - DNA, 19 bp, Homo sapiens
  siRNA target sequence for COH1 (NM_015243.2,1329-1347).
gcaagttgagagtagttat

SEQ ID NO: 350191 - DNA, 19 bp, Homo sapiens
  siRNA target sequence for COH1 (NM_015243.2,1330-1348).
caagttgagagtagttatt

SEQ ID NO: 350192 - DNA, 19 bp, Homo sapiens
  siRNA target sequence for COH1 (NM_015243.2,1333-1351).
gttgagagtagttattaca

SEQ ID NO: 350193 - DNA, 19 bp, Homo sapiens
  siRNA target sequence for COH1 (NM_015243.2,1406-1424).
cagttgaggcccttatgat

SEQ ID NO: 350194 - DNA, 19 bp, Homo sapiens
  siRNA target sequence for COH1 (NM_015243.2,1422-1440).
gatgggagaacctttcttt

SEQ ID NO: 350195 - DNA, 19 bp, Homo sapiens
  siRNA target sequence for COH1 (NM_015243.2,1425-1443).
gggagaacctttctttgat

SEQ ID NO: 350196 - DNA, 19 bp, Homo sapiens
  siRNA target sequence for COH1 (NM_015243.2,1426-1444).
ggagaacctttctttgatt

SEQ ID NO: 350197 - DNA, 19 bp, Homo sapiens
  siRNA target sequence for COH1 (NM_015243.2,1504-1522).
gattttgaagagaatatga

SEQ ID NO: 350198 - DNA, 19 bp, Homo sapiens
  siRNA target sequence for COH1 (NM_015243.2,1569-1587).
gagtacgaaaggtttcaca

SEQ ID NO: 350199 - DNA, 19 bp, Homo sapiens
  siRNA target sequence for COH1 (NM_015243.2,1571-1589).
gtacgaaaggtttcacata

SEQ ID NO: 350200 - DNA, 19 bp, Homo sapiens
  siRNA target sequence for COH1 (NM_015243.2,1579-1597).
ggtttcacataccttacaa

SEQ ID NO: 350201 - DNA, 19 bp, Homo sapiens
  siRNA target sequence for COH1 (NM_015243.2,1614-1632).
ccgaagcccagaaaataat

SEQ ID NO: 350202 - DNA, 19 bp, Homo sapiens
  siRNA target sequence for COH1 (NM_015243.2,1633-1651).
ggtactcgcgcagaattta

SEQ ID NO: 350203 - DNA, 19 bp, Homo sapiens
  siRNA target sequence for COH1 (NM_015243.2,1634-1652).
gtactcgcgcagaatttat

SEQ ID NO: 350204 - DNA, 19 bp, Homo sapiens
  siRNA target sequence for COH1 (NM_015243.2,1637-1655).
ctcgcgcagaatttatctt

SEQ ID NO: 350205 - DNA, 19 bp, Homo sapiens
  siRNA target sequence for COH1 (NM_015243.2,1664-1682).
ctcatcataaggagacata

SEQ ID NO: 350206 - DNA, 19 bp, Homo sapiens
  siRNA target sequence for COH1 (NM_015243.2,1702-1720).
caacggtttggggcttttt

SEQ ID NO: 350207 - DNA, 19 bp, Homo sapiens
  siRNA target sequence for COH1 (NM_015243.2,1829-1847).
ccaccaaaagccttgttat

SEQ ID NO: 350208 - DNA, 19 bp, Homo sapiens
  siRNA target sequence for COH1 (NM_015243.2,1830-1848).
caccaaaagccttgttata

SEQ ID NO: 350209 - DNA, 19 bp, Homo sapiens
  siRNA target sequence for COH1 (NM_015243.2,1855-1873).
cttgattttcgtttggata

SEQ ID NO: 350210 - DNA, 19 bp, Homo sapiens
  siRNA target sequence for COH1 (NM_015243.2,1877-1895).
gtgcggtgcataggatttt

SEQ ID NO: 350211 - DNA, 19 bp, Homo sapiens
  siRNA target sequence for COH1 (NM_015243.2,1879-1897).
gcggtgcataggattttga

SEQ ID NO: 350212 - DNA, 19 bp, Homo sapiens
  siRNA target sequence for COH1 (NM_015243.2,1880-1898).
cggtgcataggattttgaa

SEQ ID NO: 350213 - DNA, 19 bp, Homo sapiens
  siRNA target sequence for COH1 (NM_015243.2,1933-1951).
ccatatagcaggctaaaat

SEQ ID NO: 350214 - DNA, 19 bp, Homo sapiens
  siRNA target sequence for COH1 (NM_015243.2,2000-2018).
ctcttctggaggaatatat

SEQ ID NO: 350215 - DNA, 19 bp, Homo sapiens
  siRNA target sequence for COH1 (NM_015243.2,2005-2023).
ctggaggaatatattccta

SEQ ID NO: 350216 - DNA, 19 bp, Homo sapiens
  siRNA target sequence for COH1 (NM_015243.2,2027-2045).
gacatacaagtgttactct

SEQ ID NO: 350217 - DNA, 19 bp, Homo sapiens
  siRNA target sequence for COH1 (NM_015243.2,2049-2067).
caaatgtacctgcacaatt

SEQ ID NO: 350218 - DNA, 19 bp, Homo sapiens
  siRNA target sequence for COH1 (NM_015243.2,2069-2087).
ccatggctgaattcaactt

SEQ ID NO: 350219 - DNA, 19 bp, Homo sapiens
  siRNA target sequence for COH1 (NM_015243.2,2082-2100).
caacttgctggaccattta

SEQ ID NO: 350220 - DNA, 19 bp, Homo sapiens
  siRNA target sequence for COH1 (NM_015243.2,2094-2112).
ccatttactacctgtcatt

SEQ ID NO: 350221 - DNA, 19 bp, Homo sapiens
  siRNA target sequence for COH1 (NM_015243.2,2127-2145).
ctcaagtaacttcatgaat

SEQ ID NO: 350222 - DNA, 19 bp, Homo sapiens
  siRNA target sequence for COH1 (NM_015243.2,2170-2188).
cctttgccatccattcgaa

SEQ ID NO: 350223 - DNA, 19 bp, Homo sapiens
  siRNA target sequence for COH1 (NM_015243.2,2171-2189).
ctttgccatccattcgaat

SEQ ID NO: 350224 - DNA, 19 bp, Homo sapiens
  siRNA target sequence for COH1 (NM_015243.2,2185-2203).
cgaatattggtggataaaa

SEQ ID NO: 350225 - DNA, 19 bp, Homo sapiens
  siRNA target sequence for COH1 (NM_015243.2,2262-2280).
ccttactcaaccttctgat

SEQ ID NO: 350226 - DNA, 19 bp, Homo sapiens
  siRNA target sequence for COH1 (NM_015243.2,2267-2285).
ctcaaccttctgataacct

SEQ ID NO: 350227 - DNA, 19 bp, Homo sapiens
  siRNA target sequence for COH1 (NM_015243.2,2276-2294).
ctgataacctgcttcatta

SEQ ID NO: 350228 - DNA, 19 bp, Homo sapiens
  siRNA target sequence for COH1 (NM_015243.2,2278-2296).
gataacctgcttcattatt

SEQ ID NO: 350229 - DNA, 19 bp, Homo sapiens
  siRNA target sequence for COH1 (NM_015243.2,2372-2390).
gcttacctgtaccagttat

SEQ ID NO: 350230 - DNA, 19 bp, Homo sapiens
  siRNA target sequence for COH1 (NM_015243.2,2465-2483).
ctataactgaaggtatatt

SEQ ID NO: 350231 - DNA, 19 bp, Homo sapiens
  siRNA target sequence for COH1 (NM_015243.2,2471-2489).
ctgaaggtatatttgaact

SEQ ID NO: 350232 - DNA, 19 bp, Homo sapiens
  siRNA target sequence for COH1 (NM_015243.2,2499-2517).
cacaattcaagctacaaga

SEQ ID NO: 350233 - DNA, 19 bp, Homo sapiens
  siRNA target sequence for COH1 (NM_015243.2,2527-2545).
cttctcttgcaagcaatat

SEQ ID NO: 350234 - DNA, 19 bp, Homo sapiens
  siRNA target sequence for COH1 (NM_015243.2,2535-2553).
gcaagcaatatatcaaagt

SEQ ID NO: 350235 - DNA, 19 bp, Homo sapiens
  siRNA target sequence for COH1 (NM_015243.2,2536-2554).
caagcaatatatcaaagtt

SEQ ID NO: 350236 - DNA, 19 bp, Homo sapiens
  siRNA target sequence for COH1 (NM_015243.2,2577-2595).
ctcttccgcagtgattgaa

SEQ ID NO: 350237 - DNA, 19 bp, Homo sapiens
  siRNA target sequence for COH1 (NM_015243.2,2582-2600).
ccgcagtgattgaagcttt

SEQ ID NO: 350238 - DNA, 19 bp, Homo sapiens
  siRNA target sequence for ANKS1 (NM_015245.1,456-474).
ccaacgtggctgactcaaa

SEQ ID NO: 350239 - DNA, 19 bp, Homo sapiens
  siRNA target sequence for ANKS1 (NM_015245.1,457-475).
caacgtggctgactcaaaa

SEQ ID NO: 350240 - DNA, 19 bp, Homo sapiens
  siRNA target sequence for ANKS1 (NM_015245.1,552-570).
cacacaccagagtcaatga

SEQ ID NO: 350241 - DNA, 19 bp, Homo sapiens
  siRNA target sequence for ANKS1 (NM_015245.1,666-684).
ccatgcgcaacaacaaatt

SEQ ID NO: 350242 - DNA, 19 bp, Homo sapiens
  siRNA target sequence for ANKS1 (NM_015245.1,761-779).
ctcctgagctgcaacacta

SEQ ID NO: 350243 - DNA, 19 bp, Homo sapiens
  siRNA target sequence for ANKS1 (NM_015245.1,764-782).
ctgagctgcaacactaaga

SEQ ID NO: 350244 - DNA, 19 bp, Homo sapiens
  siRNA target sequence for ANKS1 (NM_015245.1,947-965).
ggaactgacgtcaacataa

SEQ ID NO: 350245 - DNA, 19 bp, Homo sapiens
  siRNA target sequence for ANKS1 (NM_015245.1,948-966).
gaactgacgtcaacataaa

SEQ ID NO: 350246 - DNA, 19 bp, Homo sapiens
  siRNA target sequence for ANKS1 (NM_015245.1,953-971).
gacgtcaacataaaagata

SEQ ID NO: 350247 - DNA, 19 bp, Homo sapiens
  siRNA target sequence for ANKS1 (NM_015245.1,1004-1022).
gaactgccttctcaaaaga

SEQ ID NO: 350248 - DNA, 19 bp, Homo sapiens
  siRNA target sequence for ANKS1 (NM_015245.1,1025-1043).
cagcaaatagcagcattaa

SEQ ID NO: 350249 - DNA, 19 bp, Homo sapiens
  siRNA target sequence for ANKS1 (NM_015245.1,1027-1045).
gcaaatagcagcattaatt

SEQ ID NO: 350250 - DNA, 19 bp, Homo sapiens
  siRNA target sequence for ANKS1 (NM_015245.1,1049-1067).
gatcacatgactggaaaaa

SEQ ID NO: 350251 - DNA, 19 bp, Homo sapiens
  siRNA target sequence for ANKS1 (NM_015245.1,1120-1138).
cagtatggactccatatca

SEQ ID NO: 350252 - DNA, 19 bp, Homo sapiens
  siRNA target sequence for ANKS1 (NM_015245.1,1217-1235).
ccctacgaagctctgtata

SEQ ID NO: 350253 - DNA, 19 bp, Homo sapiens
  siRNA target sequence for ANKS1 (NM_015245.1,1218-1236).
cctacgaagctctgtataa

SEQ ID NO: 350254 - DNA, 19 bp, Homo sapiens
  siRNA target sequence for ANKS1 (NM_015245.1,1219-1237).
ctacgaagctctgtataat

SEQ ID NO: 350255 - DNA, 19 bp, Homo sapiens
  siRNA target sequence for ANKS1 (NM_015245.1,1447-1465).
gtccatgagacctaggatt

SEQ ID NO: 350256 - DNA, 19 bp, Homo sapiens
  siRNA target sequence for ANKS1 (NM_015245.1,1450-1468).
catgagacctaggattcat

SEQ ID NO: 350257 - DNA, 19 bp, Homo sapiens
  siRNA target sequence for ANKS1 (NM_015245.1,1498-1516).
cccttatgaactgttgtta

SEQ ID NO: 350258 - DNA, 19 bp, Homo sapiens
  siRNA target sequence for ANKS1 (NM_015245.1,1499-1517).
ccttatgaactgttgttaa

SEQ ID NO: 350259 - DNA, 19 bp, Homo sapiens
  siRNA target sequence for ANKS1 (NM_015245.1,1870-1888).
ccgctcgcaccctgaaact

SEQ ID NO: 350260 - DNA, 19 bp, Homo sapiens
  siRNA target sequence for ANKS1 (NM_015245.1,1871-1889).
cgctcgcaccctgaaactt

SEQ ID NO: 350261 - DNA, 19 bp, Homo sapiens
  siRNA target sequence for ANKS1 (NM_015245.1,1872-1890).
gctcgcaccctgaaacttt

SEQ ID NO: 350262 - DNA, 19 bp, Homo sapiens
  siRNA target sequence for ANKS1 (NM_015245.1,2069-2087).
cggagtgagtccttatcca

SEQ ID NO: 350263 - DNA, 19 bp, Homo sapiens
  siRNA target sequence for ANKS1 (NM_015245.1,2134-2152).
ctcggagtgggatgagatt

SEQ ID NO: 350264 - DNA, 19 bp, Homo sapiens
  siRNA target sequence for ANKS1 (NM_015245.1,2193-2211).
ctcaggaacggcagaagat

SEQ ID NO: 350265 - DNA, 19 bp, Homo sapiens
  siRNA target sequence for ANKS1 (NM_015245.1,2501-2519).
gtccattccttcttgtcaa

SEQ ID NO: 350266 - DNA, 19 bp, Homo sapiens
  siRNA target sequence for ANKS1 (NM_015245.1,2522-2540).
ggttacagctccattgaca

SEQ ID NO: 350267 - DNA, 19 bp, Homo sapiens
  siRNA target sequence for ANKS1 (NM_015245.1,2675-2693).
cagctgaggtgccaagatt

SEQ ID NO: 350268 - DNA, 19 bp, Homo sapiens
  siRNA target sequence for ANKS1 (NM_015245.1,2958-2976).
gtggttatgaagccaatta

SEQ ID NO: 350269 - DNA, 19 bp, Homo sapiens
  siRNA target sequence for ANKS1 (NM_015245.1,2980-2998).
gggctccatgctgatcaaa

SEQ ID NO: 350270 - DNA, 19 bp, Homo sapiens
  siRNA target sequence for ANKS1 (NM_015245.1,3096-3114).
catacaaaggtgtcaagtt

SEQ ID NO: 350271 - DNA, 19 bp, Homo sapiens
  siRNA target sequence for ANKS1 (NM_015245.1,3148-3166).
gcacgagatccggaacatt

SEQ ID NO: 350272 - DNA, 19 bp, Homo sapiens
  siRNA target sequence for ANKS1 (NM_015245.1,3149-3167).
cacgagatccggaacattt

SEQ ID NO: 350273 - DNA, 19 bp, Homo sapiens
  siRNA target sequence for ANKS1 (NM_015245.1,3152-3170).
gagatccggaacatttcct

SEQ ID NO: 350274 - DNA, 19 bp, Homo sapiens
  siRNA target sequence for ANKS1 (NM_015245.1,3419-3437).
cgggtcggcgtgaggaaat

SEQ ID NO: 350275 - DNA, 19 bp, Homo sapiens
  siRNA target sequence for KIAA0431 (NM_015251.1,998-1016).
gtaagtgcagcaattcgta

SEQ ID NO: 350276 - DNA, 19 bp, Homo sapiens
  siRNA target sequence for KIAA0431 (NM_015251.1,1008-1026).
caattcgtacggtacagaa

SEQ ID NO: 350277 - DNA, 19 bp, Homo sapiens
  siRNA target sequence for KIAA0431 (NM_015251.1,1157-1175).
gggacccacctagtaagaa

SEQ ID NO: 350278 - DNA, 19 bp, Homo sapiens
  siRNA target sequence for KIAA0431 (NM_015251.1,1158-1176).
ggacccacctagtaagaaa

SEQ ID NO: 350279 - DNA, 19 bp, Homo sapiens
  siRNA target sequence for KIAA0431 (NM_015251.1,1159-1177).
gacccacctagtaagaaaa

SEQ ID NO: 350280 - DNA, 19 bp, Homo sapiens
  siRNA target sequence for KIAA0431 (NM_015251.1,1204-1222).
cagaagttatccaacaaga

SEQ ID NO: 350281 - DNA, 19 bp, Homo sapiens
  siRNA target sequence for KIAA0431 (NM_015251.1,1232-1250).
cattgaacaaccaaccaat

SEQ ID NO: 350282 - DNA, 19 bp, Homo sapiens
  siRNA target sequence for KIAA0431 (NM_015251.1,1256-1274).
gaccagacactcaagaact

SEQ ID NO: 350283 - DNA, 19 bp, Homo sapiens
  siRNA target sequence for KIAA0431 (NM_015251.1,1293-1311).
gctagaaccatcttttgaa

SEQ ID NO: 350284 - DNA, 19 bp, Homo sapiens
  siRNA target sequence for KIAA0431 (NM_015251.1,1314-1332).
ctcttgtggctctaacact

SEQ ID NO: 350285 - DNA, 19 bp, Homo sapiens
  siRNA target sequence for KIAA0431 (NM_015251.1,1358-1376).
cgagatatcctcagaagtt

SEQ ID NO: 350286 - DNA, 19 bp, Homo sapiens
  siRNA target sequence for KIAA0431 (NM_015251.1,1369-1387).
cagaagttgcttttaccaa

SEQ ID NO: 350287 - DNA, 19 bp, Homo sapiens
  siRNA target sequence for KIAA0431 (NM_015251.1,1411-1429).
ctacccgtgatgcagtttt

SEQ ID NO: 350288 - DNA, 19 bp, Homo sapiens
  siRNA target sequence for KIAA0431 (NM_015251.1,1548-1566).
gatcctcggcctagattca

SEQ ID NO: 350289 - DNA, 19 bp, Homo sapiens
  siRNA target sequence for KIAA0431 (NM_015251.1,1587-1605).
gagcctacctcttttcaaa

SEQ ID NO: 350290 - DNA, 19 bp, Homo sapiens
  siRNA target sequence for KIAA0431 (NM_015251.1,1602-1620).
caaaattgctaatcctatt

SEQ ID NO: 350291 - DNA, 19 bp, Homo sapiens
  siRNA target sequence for KIAA0431 (NM_015251.1,1637-1655).
gtactggtgttcaagtgaa

SEQ ID NO: 350292 - DNA, 19 bp, Homo sapiens
  siRNA target sequence for KIAA0431 (NM_015251.1,1700-1718).
cgtgtcaaaagaatagcat

SEQ ID NO: 350293 - DNA, 19 bp, Homo sapiens
  siRNA target sequence for KIAA0431 (NM_015251.1,1800-1818).
ctctgtgtcgtcttgttct

SEQ ID NO: 350294 - DNA, 19 bp, Homo sapiens
  siRNA target sequence for KIAA0431 (NM_015251.1,1804-1822).
gtgtcgtcttgttctcaaa

SEQ ID NO: 350295 - DNA, 19 bp, Homo sapiens
  siRNA target sequence for KIAA0431 (NM_015251.1,1885-1903).
cccagctctaaggtaactt

SEQ ID NO: 350296 - DNA, 19 bp, Homo sapiens
  siRNA target sequence for KIAA0431 (NM_015251.1,1887-1905).
cagctctaaggtaacttca

SEQ ID NO: 350297 - DNA, 19 bp, Homo sapiens
  siRNA target sequence for KIAA0431 (NM_015251.1,1892-1910).
ctaaggtaacttcatctat

SEQ ID NO: 350298 - DNA, 19 bp, Homo sapiens
  siRNA target sequence for KIAA0431 (NM_015251.1,1896-1914).
ggtaacttcatctatagct

SEQ ID NO: 350299 - DNA, 19 bp, Homo sapiens
  siRNA target sequence for KIAA0431 (NM_015251.1,1913-1931).
ctgctcagactgatgcatt

SEQ ID NO: 350300 - DNA, 19 bp, Homo sapiens
  siRNA target sequence for KIAA0431 (NM_015251.1,1916-1934).
ctcagactgatgcatttat

SEQ ID NO: 350301 - DNA, 19 bp, Homo sapiens
  siRNA target sequence for KIAA0903 (NM_015252.1,372-390).
gcagcgtgtgggaaaacat

SEQ ID NO: 350302 - DNA, 19 bp, Homo sapiens
  siRNA target sequence for KIAA0903 (NM_015252.1,432-450).
ggttgagtgtacgaagaaa

SEQ ID NO: 350303 - DNA, 19 bp, Homo sapiens
  siRNA target sequence for KIAA0903 (NM_015252.1,460-478).
gataaactggtggtagttt

SEQ ID NO: 350304 - DNA, 19 bp, Homo sapiens
  siRNA target sequence for KIAA0903 (NM_015252.1,491-509).
gccgaaggaagtcttctaa

SEQ ID NO: 350305 - DNA, 19 bp, Homo sapiens
  siRNA target sequence for KIAA0903 (NM_015252.1,542-560).
cctatcgtggtgttgttgt

SEQ ID NO: 350306 - DNA, 19 bp, Homo sapiens
  siRNA target sequence for KIAA0903 (NM_015252.1,563-581).
ggcctgttcctgaaaacat

SEQ ID NO: 350307 - DNA, 19 bp, Homo sapiens
  siRNA target sequence for KIAA0903 (NM_015252.1,583-601).
gaaatcactgtaacacttt

SEQ ID NO: 350308 - DNA, 19 bp, Homo sapiens
  siRNA target sequence for KIAA0903 (NM_015252.1,607-625).
gatcctcatgcggaagaat

SEQ ID NO: 350309 - DNA, 19 bp, Homo sapiens
  siRNA target sequence for KIAA0903 (NM_015252.1,639-657).
gtggacatttgtcatagaa

SEQ ID NO: 350310 - DNA, 19 bp, Homo sapiens
  siRNA target sequence for KIAA0903 (NM_015252.1,641-659).
ggacatttgtcatagaaaa

SEQ ID NO: 350311 - DNA, 19 bp, Homo sapiens
  siRNA target sequence for KIAA0903 (NM_015252.1,644-662).
catttgtcatagaaaatga

SEQ ID NO: 350312 - DNA, 19 bp, Homo sapiens
  siRNA target sequence for KIAA0903 (NM_015252.1,701-719).
gcatcaatatgaaacagta

SEQ ID NO: 350313 - DNA, 19 bp, Homo sapiens
  siRNA target sequence for KIAA0903 (NM_015252.1,737-755).
ctcagactgatgtcaagtt

SEQ ID NO: 350314 - DNA, 19 bp, Homo sapiens
  siRNA target sequence for KIAA0903 (NM_015252.1,739-757).
cagactgatgtcaagttaa

SEQ ID NO: 350315 - DNA, 19 bp, Homo sapiens
  siRNA target sequence for KIAA0903 (NM_015252.1,791-809).
ccgctcttcagttttcatt

SEQ ID NO: 350316 - DNA, 19 bp, Homo sapiens
  siRNA target sequence for KIAA0903 (NM_015252.1,983-1001).
gaattgtaaaccagttgaa

SEQ ID NO: 350317 - DNA, 19 bp, Homo sapiens
  siRNA target sequence for KIAA0903 (NM_015252.1,1076-1094).
gttcctctgaagagcttat

SEQ ID NO: 350318 - DNA, 19 bp, Homo sapiens
  siRNA target sequence for KIAA0903 (NM_015252.1,1087-1105).
gagcttatcaacaaactta

SEQ ID NO: 350319 - DNA, 19 bp, Homo sapiens
  siRNA target sequence for KIAA0903 (NM_015252.1,1129-1147).
gacttggccaccgtgaatt

SEQ ID NO: 350320 - DNA, 19 bp, Homo sapiens
  siRNA target sequence for KIAA0903 (NM_015252.1,1134-1152).
ggccaccgtgaattcaaat

SEQ ID NO: 350321 - DNA, 19 bp, Homo sapiens
  siRNA target sequence for KIAA0903 (NM_015252.1,1266-1284).
cagctataatccctttaaa

SEQ ID NO: 350322 - DNA, 19 bp, Homo sapiens
  siRNA target sequence for KIAA0903 (NM_015252.1,1327-1345).
gaagcatttgtgaccataa

SEQ ID NO: 350323 - DNA, 19 bp, Homo sapiens
  siRNA target sequence for KIAA0903 (NM_015252.1,1410-1428).
ctatgctgatagttctaaa

SEQ ID NO: 350324 - DNA, 19 bp, Homo sapiens
  siRNA target sequence for KIAA0903 (NM_015252.1,1484-1502).
ctcctccaaataatttggt

SEQ ID NO: 350325 - DNA, 19 bp, Homo sapiens
  siRNA target sequence for KIAA0903 (NM_015252.1,1486-1504).
cctccaaataatttggtaa

SEQ ID NO: 350326 - DNA, 19 bp, Homo sapiens
  siRNA target sequence for KIAA0903 (NM_015252.1,1571-1589).
caccaaaaacaggagtatt

SEQ ID NO: 350327 - DNA, 19 bp, Homo sapiens
  siRNA target sequence for KIAA0903 (NM_015252.1,1580-1598).
caggagtattaaatgaaaa

SEQ ID NO: 350328 - DNA, 19 bp, Homo sapiens
  siRNA target sequence for KIAA0903 (NM_015252.1,1665-1683).
ggggcgaaagccaaatgct

SEQ ID NO: 350329 - DNA, 19 bp, Homo sapiens
  siRNA target sequence for KIAA0903 (NM_015252.1,1666-1684).
gggcgaaagccaaatgcta

SEQ ID NO: 350330 - DNA, 19 bp, Homo sapiens
  siRNA target sequence for KIAA0903 (NM_015252.1,1695-1713).
gcttgtatggtgtaaagaa

SEQ ID NO: 350331 - DNA, 19 bp, Homo sapiens
  siRNA target sequence for KIAA0903 (NM_015252.1,1699-1717).
gtatggtgtaaagaagtta

SEQ ID NO: 350332 - DNA, 19 bp, Homo sapiens
  siRNA target sequence for KIAA0903 (NM_015252.1,1786-1804).
gcaatattacaccacttta

SEQ ID NO: 350333 - DNA, 19 bp, Homo sapiens
  siRNA target sequence for KIAA0903 (NM_015252.1,1797-1815).
ccactttagaccagattta

SEQ ID NO: 350334 - DNA, 19 bp, Homo sapiens
  siRNA target sequence for KIAA0903 (NM_015252.1,1798-1816).
cactttagaccagatttaa

SEQ ID NO: 350335 - DNA, 19 bp, Homo sapiens
  siRNA target sequence for KIAA0903 (NM_015252.1,1857-1875).
caacaaaaaggcatacgat

SEQ ID NO: 350336 - DNA, 19 bp, Homo sapiens
  siRNA target sequence for KIAA0903 (NM_015252.1,1908-1926).
ggaaccttctgatatggta

SEQ ID NO: 350337 - DNA, 19 bp, Homo sapiens
  siRNA target sequence for KIAA0903 (NM_015252.1,1912-1930).
ccttctgatatggtattat

SEQ ID NO: 350338 - DNA, 19 bp, Homo sapiens
  siRNA target sequence for KIAA0903 (NM_015252.1,1942-1960).
gataaactgactgttatga

SEQ ID NO: 350339 - DNA, 19 bp, Homo sapiens
  siRNA target sequence for KIAA0903 (NM_015252.1,1952-1970).
ctgttatgacttatctcta

SEQ ID NO: 350340 - DNA, 19 bp, Homo sapiens
  siRNA target sequence for KIAA0903 (NM_015252.1,1959-1977).
gacttatctctatcaaata

SEQ ID NO: 350341 - DNA, 19 bp, Homo sapiens
  siRNA target sequence for KIAA0903 (NM_015252.1,1991-2009).
gtggccaagaactaaatgt

SEQ ID NO: 350342 - DNA, 19 bp, Homo sapiens
  siRNA target sequence for KIAA0903 (NM_015252.1,2028-2046).
cagcagtaaaagcacatat

SEQ ID NO: 350343 - DNA, 19 bp, Homo sapiens
  siRNA target sequence for KIAA0903 (NM_015252.1,2042-2060).
catataaagttggaaacta

SEQ ID NO: 350344 - DNA, 19 bp, Homo sapiens
  siRNA target sequence for KIAA0903 (NM_015252.1,2062-2080).
gaaacagatacaaacagtt

SEQ ID NO: 350345 - DNA, 19 bp, Homo sapiens
  siRNA target sequence for KIAA0903 (NM_015252.1,2124-2142).
gcgggagcctgaactacaa

SEQ ID NO: 350346 - DNA, 19 bp, Homo sapiens
  siRNA target sequence for KIAA0903 (NM_015252.1,2208-2226).
ggttggagagtcagaaagt

SEQ ID NO: 350347 - DNA, 19 bp, Homo sapiens
  siRNA target sequence for KIAA0903 (NM_015252.1,2357-2375).
gaatatgttccaatacaga

SEQ ID NO: 350348 - DNA, 19 bp, Homo sapiens
  siRNA target sequence for KIAA0903 (NM_015252.1,2439-2457).
gagtgacttatatgttagt

SEQ ID NO: 350349 - DNA, 19 bp, Homo sapiens
  siRNA target sequence for KIAA0903 (NM_015252.1,2456-2474).
gtgataagaagaaggatat

SEQ ID NO: 350350 - DNA, 19 bp, Homo sapiens
  siRNA target sequence for KIAA0903 (NM_015252.1,2475-2493).
gtctccaccctttatttgt

SEQ ID NO: 350351 - DNA, 19 bp, Homo sapiens
  siRNA target sequence for KIAA0903 (NM_015252.1,2477-2495).
ctccaccctttatttgtga

SEQ ID NO: 350352 - DNA, 19 bp, Homo sapiens
  siRNA target sequence for KIAA0903 (NM_015252.1,2522-2540).
ctctagacatcggtagtaa

SEQ ID NO: 350353 - DNA, 19 bp, Homo sapiens
  siRNA target sequence for KIAA0903 (NM_015252.1,2524-2542).
ctagacatcggtagtaact

SEQ ID NO: 350354 - DNA, 19 bp, Homo sapiens
  siRNA target sequence for KIAA0903 (NM_015252.1,2574-2592).
cttagaatgcagatcagat

SEQ ID NO: 350355 - DNA, 19 bp, Homo sapiens
  siRNA target sequence for KIAA0903 (NM_015252.1,2627-2645).
ctacttctaaacttggata

SEQ ID NO: 350356 - DNA, 19 bp, Homo sapiens
  siRNA target sequence for KIAA0903 (NM_015252.1,2633-2651).
ctaaacttggatactcata

SEQ ID NO: 350357 - DNA, 19 bp, Homo sapiens
  siRNA target sequence for KIAA0903 (NM_015252.1,2638-2656).
cttggatactcatatagta

SEQ ID NO: 350358 - DNA, 19 bp, Homo sapiens
  siRNA target sequence for KIAA0903 (NM_015252.1,2646-2664).
ctcatatagtagagatcta

SEQ ID NO: 350359 - DNA, 19 bp, Homo sapiens
  siRNA target sequence for KIAA0903 (NM_015252.1,2648-2666).
catatagtagagatctaga

SEQ ID NO: 350360 - DNA, 19 bp, Homo sapiens
  siRNA target sequence for KIAA0903 (NM_015252.1,2719-2737).
gctgatagaaccactttaa

SEQ ID NO: 350361 - DNA, 19 bp, Homo sapiens
  siRNA target sequence for KIAA0903 (NM_015252.1,2764-2782).
gtccagcatcgattgttat

SEQ ID NO: 350362 - DNA, 19 bp, Homo sapiens
  siRNA target sequence for KIAA0903 (NM_015252.1,2766-2784).
ccagcatcgattgttatct

SEQ ID NO: 350363 - DNA, 19 bp, Homo sapiens
  siRNA target sequence for KIAA0903 (NM_015252.1,2767-2785).
cagcatcgattgttatcta

SEQ ID NO: 350364 - DNA, 19 bp, Homo sapiens
  siRNA target sequence for KIAA0903 (NM_015252.1,2769-2787).
gcatcgattgttatctaga

SEQ ID NO: 350365 - DNA, 19 bp, Homo sapiens
  siRNA target sequence for KIAA0903 (NM_015252.1,2778-2796).
gttatctagacaagaagaa

SEQ ID NO: 350366 - DNA, 19 bp, Homo sapiens
  siRNA target sequence for KIAA0903 (NM_015252.1,2857-2875).
gggaataagcacaatacca

SEQ ID NO: 350367 - DNA, 19 bp, Homo sapiens
  siRNA target sequence for KIAA0903 (NM_015252.1,2858-2876).
ggaataagcacaataccaa

SEQ ID NO: 350368 - DNA, 19 bp, Homo sapiens
  siRNA target sequence for KIAA0903 (NM_015252.1,2894-2912).
gcaacaggcagctaagtga

SEQ ID NO: 350369 - DNA, 19 bp, Homo sapiens
  siRNA target sequence for KIAA0903 (NM_015252.1,2895-2913).
caacaggcagctaagtgat

SEQ ID NO: 350370 - DNA, 19 bp, Homo sapiens
  siRNA target sequence for KIAA0903 (NM_015252.1,2949-2967).
gagagctcgtcagctaata

SEQ ID NO: 350371 - DNA, 19 bp, Homo sapiens
  siRNA target sequence for KIAA0903 (NM_015252.1,2977-2995).
cgatctggagtgaagatgt

SEQ ID NO: 350372 - DNA, 19 bp, Homo sapiens
  siRNA target sequence for KIAA0903 (NM_015252.1,3016-3034).
gaaatggctgcagaaaagt

SEQ ID NO: 350373 - DNA, 19 bp, Homo sapiens
  siRNA target sequence for KIAA0903 (NM_015252.1,3070-3088).
gataatattgagatagata

SEQ ID NO: 350374 - DNA, 19 bp, Homo sapiens
  siRNA target sequence for KIAA0903 (NM_015252.1,3099-3117).
gatccctgaaggctttgtt

SEQ ID NO: 350375 - DNA, 19 bp, Homo sapiens
  siRNA target sequence for KIAA0903 (NM_015252.1,3124-3142).
ggtggagatgaacttacta

SEQ ID NO: 350376 - DNA, 19 bp, Homo sapiens
  siRNA target sequence for KIAA0903 (NM_015252.1,3128-3146).
gagatgaacttactaactt

SEQ ID NO: 350377 - DNA, 19 bp, Homo sapiens
  siRNA target sequence for KIAA0903 (NM_015252.1,3133-3151).
gaacttactaacttagaaa

SEQ ID NO: 350378 - DNA, 19 bp, Homo sapiens
  siRNA target sequence for KIAA0903 (NM_015252.1,3160-3178).
gatactcccgaacaaaaca

SEQ ID NO: 350379 - DNA, 19 bp, Homo sapiens
  siRNA target sequence for KIAA0903 (NM_015252.1,3167-3185).
ccgaacaaaacagtaagtt

SEQ ID NO: 350380 - DNA, 19 bp, Homo sapiens
  siRNA target sequence for KIAA0903 (NM_015252.1,3179-3197).
gtaagttggtggacttgaa

SEQ ID NO: 350381 - DNA, 19 bp, Homo sapiens
  siRNA target sequence for KIAA0903 (NM_015252.1,3254-3272).
cccagaaagctgtaactga

SEQ ID NO: 350382 - DNA, 19 bp, Homo sapiens
  siRNA target sequence for KIAA0903 (NM_015252.1,3312-3330).
ccggactgaacgattacaa

SEQ ID NO: 350383 - DNA, 19 bp, Homo sapiens
  siRNA target sequence for KIAA0903 (NM_015252.1,3313-3331).
cggactgaacgattacaaa

SEQ ID NO: 350384 - DNA, 19 bp, Homo sapiens
  siRNA target sequence for KIAA0903 (NM_015252.1,3315-3333).
gactgaacgattacaaaaa

SEQ ID NO: 350385 - DNA, 19 bp, Homo sapiens
  siRNA target sequence for KIAA0903 (NM_015252.1,3404-3422).
ctttcagccaatatattga

SEQ ID NO: 350386 - DNA, 19 bp, Homo sapiens
  siRNA target sequence for KIAA0903 (NM_015252.1,3486-3504).
gaaggcagcgataactgaa

SEQ ID NO: 350387 - DNA, 19 bp, Homo sapiens
  siRNA target sequence for KIAA0903 (NM_015252.1,3489-3507).
ggcagcgataactgaaact

SEQ ID NO: 350388 - DNA, 19 bp, Homo sapiens
  siRNA target sequence for KIAA0903 (NM_015252.1,3689-3707).
ctatgatgcaggaatggtt

SEQ ID NO: 350389 - DNA, 19 bp, Homo sapiens
  siRNA target sequence for KIAA0903 (NM_015252.1,3730-3748).
gccttaataaggagaatga

SEQ ID NO: 350390 - DNA, 19 bp, Homo sapiens
  siRNA target sequence for KIAA0903 (NM_015252.1,3799-3817).
ctgctgaaccgggaattga

SEQ ID NO: 350391 - DNA, 19 bp, Homo sapiens
  siRNA target sequence for KIAA0903 (NM_015252.1,3819-3837).
ggcaatgctagccattgaa

SEQ ID NO: 350392 - DNA, 19 bp, Homo sapiens
  siRNA target sequence for KIAA0903 (NM_015252.1,3821-3839).
caatgctagccattgaaga

SEQ ID NO: 350393 - DNA, 19 bp, Homo sapiens
  siRNA target sequence for KIAA0903 (NM_015252.1,3982-4000).
cgaactctggagcaaaaca

SEQ ID NO: 350394 - DNA, 19 bp, Homo sapiens
  siRNA target sequence for KIAA0903 (NM_015252.1,3983-4001).
gaactctggagcaaaacaa

SEQ ID NO: 350395 - DNA, 19 bp, Homo sapiens
  siRNA target sequence for RC3 (NM_015263.1,285-303).
ccccttcacggcatatgga

SEQ ID NO: 350396 - DNA, 19 bp, Homo sapiens
  siRNA target sequence for RC3 (NM_015263.1,286-304).
cccttcacggcatatggat

SEQ ID NO: 350397 - DNA, 19 bp, Homo sapiens
  siRNA target sequence for RC3 (NM_015263.1,416-434).
gaagaattgcagcttcata

SEQ ID NO: 350398 - DNA, 19 bp, Homo sapiens
  siRNA target sequence for RC3 (NM_015263.1,541-559).
gtgacatacaacttagcat

SEQ ID NO: 350399 - DNA, 19 bp, Homo sapiens
  siRNA target sequence for RC3 (NM_015263.1,561-579).
ggatcctcaagataataga

SEQ ID NO: 350400 - DNA, 19 bp, Homo sapiens
  siRNA target sequence for RC3 (NM_015263.1,565-583).
cctcaagataatagattgt

SEQ ID NO: 350401 - DNA, 19 bp, Homo sapiens
  siRNA target sequence for RC3 (NM_015263.1,566-584).
ctcaagataatagattgtt

SEQ ID NO: 350402 - DNA, 19 bp, Homo sapiens
  siRNA target sequence for RC3 (NM_015263.1,568-586).
caagataatagattgttga

SEQ ID NO: 350403 - DNA, 19 bp, Homo sapiens
  siRNA target sequence for RC3 (NM_015263.1,737-755).
ggtctcctgatggtgaata

SEQ ID NO: 350404 - DNA, 19 bp, Homo sapiens
  siRNA target sequence for RC3 (NM_015263.1,738-756).
gtctcctgatggtgaatat

SEQ ID NO: 350405 - DNA, 19 bp, Homo sapiens
  siRNA target sequence for RC3 (NM_015263.1,809-827).
ctggttggaagtcttcaat

SEQ ID NO: 350406 - DNA, 19 bp, Homo sapiens
  siRNA target sequence for RC3 (NM_015263.1,811-829).
ggttggaagtcttcaatta

SEQ ID NO: 350407 - DNA, 19 bp, Homo sapiens
  siRNA target sequence for RC3 (NM_015263.1,812-830).
gttggaagtcttcaattat

SEQ ID NO: 350408 - DNA, 19 bp, Homo sapiens
  siRNA target sequence for RC3 (NM_015263.1,816-834).
gaagtcttcaattatacct

SEQ ID NO: 350409 - DNA, 19 bp, Homo sapiens
  siRNA target sequence for RC3 (NM_015263.1,835-853).
caggatcatcatgaagtaa

SEQ ID NO: 350410 - DNA, 19 bp, Homo sapiens
  siRNA target sequence for RC3 (NM_015263.1,858-876).
gagacagtcctctactcaa

SEQ ID NO: 350411 - DNA, 19 bp, Homo sapiens
  siRNA target sequence for RC3 (NM_015263.1,860-878).
gacagtcctctactcaatt

SEQ ID NO: 350412 - DNA, 19 bp, Homo sapiens
  siRNA target sequence for RC3 (NM_015263.1,862-880).
cagtcctctactcaatttt

SEQ ID NO: 350413 - DNA, 19 bp, Homo sapiens
  siRNA target sequence for RC3 (NM_015263.1,907-925).
gctgtgacaggtttttcgt

SEQ ID NO: 350414 - DNA, 19 bp, Homo sapiens
  siRNA target sequence for RC3 (NM_015263.1,927-945).
gcgcaaaactagcaagtat

SEQ ID NO: 350415 - DNA, 19 bp, Homo sapiens
  siRNA target sequence for RC3 (NM_015263.1,956-974).
gttctgtctgtaatgtgtt

SEQ ID NO: 350416 - DNA, 19 bp, Homo sapiens
  siRNA target sequence for RC3 (NM_015263.1,959-977).
ctgtctgtaatgtgttgtt

SEQ ID NO: 350417 - DNA, 19 bp, Homo sapiens
  siRNA target sequence for RC3 (NM_015263.1,1005-1023).
gctctgggcagaaacttta

SEQ ID NO: 350418 - DNA, 19 bp, Homo sapiens
  siRNA target sequence for RC3 (NM_015263.1,1192-1210).
gtaactcatgctgaattaa

SEQ ID NO: 350419 - DNA, 19 bp, Homo sapiens
  siRNA target sequence for RC3 (NM_015263.1,1221-1239).
gacagcaatgcatgaagtt

SEQ ID NO: 350420 - DNA, 19 bp, Homo sapiens
  siRNA target sequence for RC3 (NM_015263.1,1223-1241).
cagcaatgcatgaagttca

SEQ ID NO: 350421 - DNA, 19 bp, Homo sapiens
  siRNA target sequence for RC3 (NM_015263.1,1326-1344).
cttggttggcactgcattt

SEQ ID NO: 350422 - DNA, 19 bp, Homo sapiens
  siRNA target sequence for RC3 (NM_015263.1,1337-1355).
ctgcatttaatgttgatga

SEQ ID NO: 350423 - DNA, 19 bp, Homo sapiens
  siRNA target sequence for RC3 (NM_015263.1,1372-1390).
gtagttcattggttaaaca

SEQ ID NO: 350424 - DNA, 19 bp, Homo sapiens
  siRNA target sequence for RC3 (NM_015263.1,1395-1413).
ggaatttcattttacatca

SEQ ID NO: 350425 - DNA, 19 bp, Homo sapiens
  siRNA target sequence for RC3 (NM_015263.1,1451-1469).
ctgataagcaggtagatca

SEQ ID NO: 350426 - DNA, 19 bp, Homo sapiens
  siRNA target sequence for RC3 (NM_015263.1,1520-1538).
gagaacggggtttacatat

SEQ ID NO: 350427 - DNA, 19 bp, Homo sapiens
  siRNA target sequence for RC3 (NM_015263.1,1522-1540).
gaacggggtttacatatga

SEQ ID NO: 350428 - DNA, 19 bp, Homo sapiens
  siRNA target sequence for RC3 (NM_015263.1,1640-1658).
cacgacttagtgtaccaat

SEQ ID NO: 350429 - DNA, 19 bp, Homo sapiens
  siRNA target sequence for RC3 (NM_015263.1,1677-1695).
gcttgatcggaagattgaa

SEQ ID NO: 350430 - DNA, 19 bp, Homo sapiens
  siRNA target sequence for RC3 (NM_015263.1,1678-1696).
cttgatcggaagattgaaa

SEQ ID NO: 350431 - DNA, 19 bp, Homo sapiens
  siRNA target sequence for RC3 (NM_015263.1,1693-1711).
gaaacgctgctaactgaat

SEQ ID NO: 350432 - DNA, 19 bp, Homo sapiens
  siRNA target sequence for RC3 (NM_015263.1,1697-1715).
cgctgctaactgaatggaa

SEQ ID NO: 350433 - DNA, 19 bp, Homo sapiens
  siRNA target sequence for RC3 (NM_015263.1,1805-1823).
gaatatttagacaagttca

SEQ ID NO: 350434 - DNA, 19 bp, Homo sapiens
  siRNA target sequence for RC3 (NM_015263.1,1867-1885).
gatgcaagctctcttagta

SEQ ID NO: 350435 - DNA, 19 bp, Homo sapiens
  siRNA target sequence for RC3 (NM_015263.1,1870-1888).
gcaagctctcttagtaaaa

SEQ ID NO: 350436 - DNA, 19 bp, Homo sapiens
  siRNA target sequence for RC3 (NM_015263.1,1871-1889).
caagctctcttagtaaaaa

SEQ ID NO: 350437 - DNA, 19 bp, Homo sapiens
  siRNA target sequence for RC3 (NM_015263.1,1874-1892).
gctctcttagtaaaaatat

SEQ ID NO: 350438 - DNA, 19 bp, Homo sapiens
  siRNA target sequence for RC3 (NM_015263.1,1893-1911).
catgatgtatgcctgtata

SEQ ID NO: 350439 - DNA, 19 bp, Homo sapiens
  siRNA target sequence for RC3 (NM_015263.1,1997-2015).
gatcccacagtacacatat

SEQ ID NO: 350440 - DNA, 19 bp, Homo sapiens
  siRNA target sequence for RC3 (NM_015263.1,2006-2024).
gtacacatatgaacatctt

SEQ ID NO: 350441 - DNA, 19 bp, Homo sapiens
  siRNA target sequence for RC3 (NM_015263.1,2033-2051).
cagtaatgatgatctctaa

SEQ ID NO: 350442 - DNA, 19 bp, Homo sapiens
  siRNA target sequence for RC3 (NM_015263.1,2040-2058).
gatgatctctaaacacata

SEQ ID NO: 350443 - DNA, 19 bp, Homo sapiens
  siRNA target sequence for RC3 (NM_015263.1,2043-2061).
gatctctaaacacatagat

SEQ ID NO: 350444 - DNA, 19 bp, Homo sapiens
  siRNA target sequence for RC3 (NM_015263.1,2083-2101).
gtcacttttgctgataagt

SEQ ID NO: 350445 - DNA, 19 bp, Homo sapiens
  siRNA target sequence for RC3 (NM_015263.1,2095-2113).
gataagtctgcctttacca

SEQ ID NO: 350446 - DNA, 19 bp, Homo sapiens
  siRNA target sequence for RC3 (NM_015263.1,2112-2130).
cactgttctaactgtatct

SEQ ID NO: 350447 - DNA, 19 bp, Homo sapiens
  siRNA target sequence for RC3 (NM_015263.1,2119-2137).
ctaactgtatctcacaaat

SEQ ID NO: 350448 - DNA, 19 bp, Homo sapiens
  siRNA target sequence for RC3 (NM_015263.1,2175-2193).
ggcatgtcattcagtttta

SEQ ID NO: 350449 - DNA, 19 bp, Homo sapiens
  siRNA target sequence for RC3 (NM_015263.1,2213-2231).
ctcatcataatgctctatt

SEQ ID NO: 350450 - DNA, 19 bp, Homo sapiens
  siRNA target sequence for RC3 (NM_015263.1,2225-2243).
ctctattgactcctgaatt

SEQ ID NO: 350451 - DNA, 19 bp, Homo sapiens
  siRNA target sequence for RC3 (NM_015263.1,2232-2250).
gactcctgaattagattgt

SEQ ID NO: 350452 - DNA, 19 bp, Homo sapiens
  siRNA target sequence for RC3 (NM_015263.1,2234-2252).
ctcctgaattagattgtca

SEQ ID NO: 350453 - DNA, 19 bp, Homo sapiens
  siRNA target sequence for RC3 (NM_015263.1,2253-2271).
gtgggactcagacaataaa

SEQ ID NO: 350454 - DNA, 19 bp, Homo sapiens
  siRNA target sequence for RC3 (NM_015263.1,2255-2273).
gggactcagacaataaatt

SEQ ID NO: 350455 - DNA, 19 bp, Homo sapiens
  siRNA target sequence for RC3 (NM_015263.1,2279-2297).
gattaatggaccctgtaaa

SEQ ID NO: 350456 - DNA, 19 bp, Homo sapiens
  siRNA target sequence for RC3 (NM_015263.1,2315-2333).
cgaaacaacctcttagaaa

SEQ ID NO: 350457 - DNA, 19 bp, Homo sapiens
  siRNA target sequence for RC3 (NM_015263.1,2339-2357).
caactcgtacatttcatga

SEQ ID NO: 350458 - DNA, 19 bp, Homo sapiens
  siRNA target sequence for RC3 (NM_015263.1,2391-2409).
gcgtgtagacccaatagga

SEQ ID NO: 350459 - DNA, 19 bp, Homo sapiens
  siRNA target sequence for RC3 (NM_015263.1,2401-2419).
ccaataggacctttgtcat

SEQ ID NO: 350460 - DNA, 19 bp, Homo sapiens
  siRNA target sequence for RC3 (NM_015263.1,2423-2441).
ctggaggagtatcagaatt

SEQ ID NO: 350461 - DNA, 19 bp, Homo sapiens
  siRNA target sequence for RC3 (NM_015263.1,2435-2453).
cagaattggctcgaattaa

SEQ ID NO: 350462 - DNA, 19 bp, Homo sapiens
  siRNA target sequence for RC3 (NM_015263.1,2437-2455).
gaattggctcgaattaact

SEQ ID NO: 350463 - DNA, 19 bp, Homo sapiens
  siRNA target sequence for RC3 (NM_015263.1,2442-2460).
ggctcgaattaactcttta

SEQ ID NO: 350464 - DNA, 19 bp, Homo sapiens
  siRNA target sequence for RC3 (NM_015263.1,2446-2464).
cgaattaactctttacata

SEQ ID NO: 350465 - DNA, 19 bp, Homo sapiens
  siRNA target sequence for RC3 (NM_015263.1,2461-2479).
catacctcagcgttctcta

SEQ ID NO: 350466 - DNA, 19 bp, Homo sapiens
  siRNA target sequence for RC3 (NM_015263.1,2593-2611).
gtagtggatgcaaggaaat

SEQ ID NO: 350467 - DNA, 19 bp, Homo sapiens
  siRNA target sequence for RC3 (NM_015263.1,2603-2621).
caaggaaattattagatga

SEQ ID NO: 350468 - DNA, 19 bp, Homo sapiens
  siRNA target sequence for RC3 (NM_015263.1,2625-2643).
gtcagacccagaatcttca

SEQ ID NO: 350469 - DNA, 19 bp, Homo sapiens
  siRNA target sequence for RC3 (NM_015263.1,2632-2650).
ccagaatcttcaaaactta

SEQ ID NO: 350470 - DNA, 19 bp, Homo sapiens
  siRNA target sequence for RC3 (NM_015263.1,2633-2651).
cagaatcttcaaaacttat

SEQ ID NO: 350471 - DNA, 19 bp, Homo sapiens
  siRNA target sequence for RC3 (NM_015263.1,2654-2672).
gagaagtgtttaatattgt

SEQ ID NO: 350472 - DNA, 19 bp, Homo sapiens
  siRNA target sequence for RC3 (NM_015263.1,2689-2707).
gctcgacctggctgcatta

SEQ ID NO: 350473 - DNA, 19 bp, Homo sapiens
  siRNA target sequence for RC3 (NM_015263.1,2690-2708).
ctcgacctggctgcattat

SEQ ID NO: 350474 - DNA, 19 bp, Homo sapiens
  siRNA target sequence for RC3 (NM_015263.1,2693-2711).
gacctggctgcattattga

SEQ ID NO: 350475 - DNA, 19 bp, Homo sapiens
  siRNA target sequence for RC3 (NM_015263.1,2710-2728).
gaactcgacgcaataacca

SEQ ID NO: 350476 - DNA, 19 bp, Homo sapiens
  siRNA target sequence for RC3 (NM_015263.1,2716-2734).
gacgcaataaccaaccaat

SEQ ID NO: 350477 - DNA, 19 bp, Homo sapiens
  siRNA target sequence for RC3 (NM_015263.1,2727-2745).
caaccaatgtggctcaaat

SEQ ID NO: 350478 - DNA, 19 bp, Homo sapiens
  siRNA target sequence for RC3 (NM_015263.1,2778-2796).
cattataggatataaacca

SEQ ID NO: 350479 - DNA, 19 bp, Homo sapiens
  siRNA target sequence for RC3 (NM_015263.1,2786-2804).
gatataaaccacataagga

SEQ ID NO: 350480 - DNA, 19 bp, Homo sapiens
  siRNA target sequence for RC3 (NM_015263.1,2940-2958).
ccttcatcttaaatctgta

SEQ ID NO: 350481 - DNA, 19 bp, Homo sapiens
  siRNA target sequence for RC3 (NM_015263.1,2956-2974).
gtacaagcatgtttagcta

SEQ ID NO: 350482 - DNA, 19 bp, Homo sapiens
  siRNA target sequence for RC3 (NM_015263.1,3024-3042).
gaagaacgtagattcttct

SEQ ID NO: 350483 - DNA, 19 bp, Homo sapiens
  siRNA target sequence for RC3 (NM_015263.1,3207-3225).
gagttcttcttcaatttat

SEQ ID NO: 350484 - DNA, 19 bp, Homo sapiens
  siRNA target sequence for RC3 (NM_015263.1,3231-3249).
gtgccttgcaccttattta

SEQ ID NO: 350485 - DNA, 19 bp, Homo sapiens
  siRNA target sequence for RC3 (NM_015263.1,3233-3251).
gccttgcaccttatttagt

SEQ ID NO: 350486 - DNA, 19 bp, Homo sapiens
  siRNA target sequence for RC3 (NM_015263.1,3305-3323).
ccaacccagagtgtaataa

SEQ ID NO: 350487 - DNA, 19 bp, Homo sapiens
  siRNA target sequence for RC3 (NM_015263.1,3309-3327).
cccagagtgtaataaaagt

SEQ ID NO: 350488 - DNA, 19 bp, Homo sapiens
  siRNA target sequence for RC3 (NM_015263.1,3311-3329).
cagagtgtaataaaagtga

SEQ ID NO: 350489 - DNA, 19 bp, Homo sapiens
  siRNA target sequence for RC3 (NM_015263.1,3424-3442).
gctgttagctgttcataca

SEQ ID NO: 350490 - DNA, 19 bp, Homo sapiens
  siRNA target sequence for RC3 (NM_015263.1,3448-3466).
cgccttgcagtggcttata

SEQ ID NO: 350491 - DNA, 19 bp, Homo sapiens
  siRNA target sequence for RC3 (NM_015263.1,3449-3467).
gccttgcagtggcttataa

SEQ ID NO: 350492 - DNA, 19 bp, Homo sapiens
  siRNA target sequence for RC3 (NM_015263.1,3468-3486).
gcagcctatccaccataat

SEQ ID NO: 350493 - DNA, 19 bp, Homo sapiens
  siRNA target sequence for RC3 (NM_015263.1,3472-3490).
cctatccaccataatggtt

SEQ ID NO: 350494 - DNA, 19 bp, Homo sapiens
  siRNA target sequence for RC3 (NM_015263.1,3473-3491).
ctatccaccataatggttt

SEQ ID NO: 350495 - DNA, 19 bp, Homo sapiens
  siRNA target sequence for RC3 (NM_015263.1,3548-3566).
gatcagagtgggttttaga

SEQ ID NO: 350496 - DNA, 19 bp, Homo sapiens
  siRNA target sequence for RC3 (NM_015263.1,3553-3571).
gagtgggttttagaacaaa

SEQ ID NO: 350497 - DNA, 19 bp, Homo sapiens
  siRNA target sequence for RC3 (NM_015263.1,3555-3573).
gtgggttttagaacaaaca

SEQ ID NO: 350498 - DNA, 19 bp, Homo sapiens
  siRNA target sequence for RC3 (NM_015263.1,3601-3619).
gggagtgtacttgattcaa

SEQ ID NO: 350499 - DNA, 19 bp, Homo sapiens
  siRNA target sequence for RC3 (NM_015263.1,3621-3639).
ggtcagcgtcgacagtaat

SEQ ID NO: 350500 - DNA, 19 bp, Homo sapiens
  siRNA target sequence for RC3 (NM_015263.1,3626-3644).
gcgtcgacagtaatctgtt

SEQ ID NO: 350501 - DNA, 19 bp, Homo sapiens
  siRNA target sequence for RC3 (NM_015263.1,3627-3645).
cgtcgacagtaatctgttt

SEQ ID NO: 350502 - DNA, 19 bp, Homo sapiens
  siRNA target sequence for RC3 (NM_015263.1,3672-3690).
gagcaaggatagatatctt

SEQ ID NO: 350503 - DNA, 19 bp, Homo sapiens
  siRNA target sequence for RC3 (NM_015263.1,3674-3692).
gcaaggatagatatcttat

SEQ ID NO: 350504 - DNA, 19 bp, Homo sapiens
  siRNA target sequence for RC3 (NM_015263.1,3675-3693).
caaggatagatatcttatt

SEQ ID NO: 350505 - DNA, 19 bp, Homo sapiens
  siRNA target sequence for RC3 (NM_015263.1,3683-3701).
gatatcttattccgaatat

SEQ ID NO: 350506 - DNA, 19 bp, Homo sapiens
  siRNA target sequence for RC3 (NM_015263.1,3695-3713).
cgaatatcaaacatttagt

SEQ ID NO: 350507 - DNA, 19 bp, Homo sapiens
  siRNA target sequence for RC3 (NM_015263.1,3696-3714).
gaatatcaaacatttagta

SEQ ID NO: 350508 - DNA, 19 bp, Homo sapiens
  siRNA target sequence for RC3 (NM_015263.1,3743-3761).
gctcccacattcttacagt

SEQ ID NO: 350509 - DNA, 19 bp, Homo sapiens
  siRNA target sequence for RC3 (NM_015263.1,3763-3781).
ggagtcggtgcgaatatct

SEQ ID NO: 350510 - DNA, 19 bp, Homo sapiens
  siRNA target sequence for RC3 (NM_015263.1,3764-3782).
gagtcggtgcgaatatctt

SEQ ID NO: 350511 - DNA, 19 bp, Homo sapiens
  siRNA target sequence for RC3 (NM_015263.1,3766-3784).
gtcggtgcgaatatcttca

SEQ ID NO: 350512 - DNA, 19 bp, Homo sapiens
  siRNA target sequence for RC3 (NM_015263.1,3770-3788).
gtgcgaatatcttcatgta

SEQ ID NO: 350513 - DNA, 19 bp, Homo sapiens
  siRNA target sequence for RC3 (NM_015263.1,3816-3834).
gcaaaccaacagtaaggat

SEQ ID NO: 350514 - DNA, 19 bp, Homo sapiens
  siRNA target sequence for RC3 (NM_015263.1,3856-3874).
ccactaggtggtagtatca

SEQ ID NO: 350515 - DNA, 19 bp, Homo sapiens
  siRNA target sequence for RC3 (NM_015263.1,3857-3875).
cactaggtggtagtatcaa

SEQ ID NO: 350516 - DNA, 19 bp, Homo sapiens
  siRNA target sequence for RC3 (NM_015263.1,3869-3887).
gtatcaagcaaggagttaa

SEQ ID NO: 350517 - DNA, 19 bp, Homo sapiens
  siRNA target sequence for RC3 (NM_015263.1,3873-3891).
caagcaaggagttaagtca

SEQ ID NO: 350518 - DNA, 19 bp, Homo sapiens
  siRNA target sequence for RC3 (NM_015263.1,3877-3895).
caaggagttaagtcaagat

SEQ ID NO: 350519 - DNA, 19 bp, Homo sapiens
  siRNA target sequence for RC3 (NM_015263.1,3901-3919).
cttcttagatctatagact

SEQ ID NO: 350520 - DNA, 19 bp, Homo sapiens
  siRNA target sequence for RC3 (NM_015263.1,3918-3936).
cttggtatcttctgttgat

SEQ ID NO: 350521 - DNA, 19 bp, Homo sapiens
  siRNA target sequence for RC3 (NM_015263.1,3968-3986).
gggtaagagatgggatatt

SEQ ID NO: 350522 - DNA, 19 bp, Homo sapiens
  siRNA target sequence for RC3 (NM_015263.1,4026-4044).
gtggaagcatgctgtcaaa

SEQ ID NO: 350523 - DNA, 19 bp, Homo sapiens
  siRNA target sequence for RC3 (NM_015263.1,4032-4050).
gcatgctgtcaaatttgga

SEQ ID NO: 350524 - DNA, 19 bp, Homo sapiens
  siRNA target sequence for RC3 (NM_015263.1,4084-4102).
gcagcaatgcaagatcatt

SEQ ID NO: 350525 - DNA, 19 bp, Homo sapiens
  siRNA target sequence for RC3 (NM_015263.1,4093-4111).
caagatcattcgaccttta

SEQ ID NO: 350526 - DNA, 19 bp, Homo sapiens
  siRNA target sequence for RC3 (NM_015263.1,4099-4117).
cattcgacctttaaatcta

SEQ ID NO: 350527 - DNA, 19 bp, Homo sapiens
  siRNA target sequence for RC3 (NM_015263.1,4106-4124).
cctttaaatctaatatgct

SEQ ID NO: 350528 - DNA, 19 bp, Homo sapiens
  siRNA target sequence for RC3 (NM_015263.1,4178-4196).
caccaactgtaattcaaga

SEQ ID NO: 350529 - DNA, 19 bp, Homo sapiens
  siRNA target sequence for RC3 (NM_015263.1,4229-4247).
cccctactcttccacaata

SEQ ID NO: 350530 - DNA, 19 bp, Homo sapiens
  siRNA target sequence for RC3 (NM_015263.1,4253-4271).
caactcagctgttagaatt

SEQ ID NO: 350531 - DNA, 19 bp, Homo sapiens
  siRNA target sequence for RC3 (NM_015263.1,4263-4281).
gttagaattgatggattta

SEQ ID NO: 350532 - DNA, 19 bp, Homo sapiens
  siRNA target sequence for RC3 (NM_015263.1,4385-4403).
gacatctctctcgaactat

SEQ ID NO: 350533 - DNA, 19 bp, Homo sapiens
  siRNA target sequence for RC3 (NM_015263.1,4387-4405).
catctctctcgaactatta

SEQ ID NO: 350534 - DNA, 19 bp, Homo sapiens
  siRNA target sequence for RC3 (NM_015263.1,4450-4468).
gatggtactcgagattata

SEQ ID NO: 350535 - DNA, 19 bp, Homo sapiens
  siRNA target sequence for RC3 (NM_015263.1,4454-4472).
gtactcgagattatactga

SEQ ID NO: 350536 - DNA, 19 bp, Homo sapiens
  siRNA target sequence for RC3 (NM_015263.1,4489-4507).
ccactaccactatatgcat

SEQ ID NO: 350537 - DNA, 19 bp, Homo sapiens
  siRNA target sequence for RC3 (NM_015263.1,4510-4528).
cttgctgcagatcaagata

SEQ ID NO: 350538 - DNA, 19 bp, Homo sapiens
  siRNA target sequence for RC3 (NM_015263.1,4560-4578).
gataccacagagctatgaa

SEQ ID NO: 350539 - DNA, 19 bp, Homo sapiens
  siRNA target sequence for RC3 (NM_015263.1,4592-4610).
gtcaaccagaggatcagta

SEQ ID NO: 350540 - DNA, 19 bp, Homo sapiens
  siRNA target sequence for RC3 (NM_015263.1,4594-4612).
caaccagaggatcagtatt

SEQ ID NO: 350541 - DNA, 19 bp, Homo sapiens
  siRNA target sequence for RC3 (NM_015263.1,4633-4651).
gatataccaacggatgata

SEQ ID NO: 350542 - DNA, 19 bp, Homo sapiens
  siRNA target sequence for RC3 (NM_015263.1,4639-4657).
ccaacggatgatattgatt

SEQ ID NO: 350543 - DNA, 19 bp, Homo sapiens
  siRNA target sequence for RC3 (NM_015263.1,4640-4658).
caacggatgatattgattt

SEQ ID NO: 350544 - DNA, 19 bp, Homo sapiens
  siRNA target sequence for RC3 (NM_015263.1,4643-4661).
cggatgatattgatttaga

SEQ ID NO: 350545 - DNA, 19 bp, Homo sapiens
  siRNA target sequence for RC3 (NM_015263.1,4718-4736).
cttactttggccaagaaca

SEQ ID NO: 350546 - DNA, 19 bp, Homo sapiens
  siRNA target sequence for RC3 (NM_015263.1,4735-4753).
catgcaagggtactttcaa

SEQ ID NO: 350547 - DNA, 19 bp, Homo sapiens
  siRNA target sequence for RC3 (NM_015263.1,4787-4805).
cccgtttggagcagatgtt

SEQ ID NO: 350548 - DNA, 19 bp, Homo sapiens
  siRNA target sequence for RC3 (NM_015263.1,4869-4887).
gagttgctcaggaagagat

SEQ ID NO: 350549 - DNA, 19 bp, Homo sapiens
  siRNA target sequence for RC3 (NM_015263.1,4874-4892).
gctcaggaagagatacatt

SEQ ID NO: 350550 - DNA, 19 bp, Homo sapiens
  siRNA target sequence for RC3 (NM_015263.1,4875-4893).
ctcaggaagagatacatta

SEQ ID NO: 350551 - DNA, 19 bp, Homo sapiens
  siRNA target sequence for RC3 (NM_015263.1,4897-4915).
gagtgtggtttgagatact

SEQ ID NO: 350552 - DNA, 19 bp, Homo sapiens
  siRNA target sequence for RC3 (NM_015263.1,4968-4986).
ccgagtgcagctacttcat

SEQ ID NO: 350553 - DNA, 19 bp, Homo sapiens
  siRNA target sequence for RC3 (NM_015263.1,4984-5002).
catcaaggtgtctctacat

SEQ ID NO: 350554 - DNA, 19 bp, Homo sapiens
  siRNA target sequence for RC3 (NM_015263.1,5079-5097).
cccccagtggtctgaatta

SEQ ID NO: 350555 - DNA, 19 bp, Homo sapiens
  siRNA target sequence for RC3 (NM_015263.1,5082-5100).
ccagtggtctgaattaaga

SEQ ID NO: 350556 - DNA, 19 bp, Homo sapiens
  siRNA target sequence for RC3 (NM_015263.1,5117-5135).
ggtgggtgaggaacattaa

SEQ ID NO: 350557 - DNA, 19 bp, Homo sapiens
  siRNA target sequence for RC3 (NM_015263.1,5136-5154).
cacgcttcgaagatgcatt

SEQ ID NO: 350558 - DNA, 19 bp, Homo sapiens
  siRNA target sequence for RC3 (NM_015263.1,5139-5157).
gcttcgaagatgcattgaa

SEQ ID NO: 350559 - DNA, 19 bp, Homo sapiens
  siRNA target sequence for RC3 (NM_015263.1,5144-5162).
gaagatgcattgaaaaggt

SEQ ID NO: 350560 - DNA, 19 bp, Homo sapiens
  siRNA target sequence for RC3 (NM_015263.1,5164-5182).
gccaaagcttcttttcaaa

SEQ ID NO: 350561 - DNA, 19 bp, Homo sapiens
  siRNA target sequence for RC3 (NM_015263.1,5195-5213).
ccttagatgctgcactatt

SEQ ID NO: 350562 - DNA, 19 bp, Homo sapiens
  siRNA target sequence for RC3 (NM_015263.1,5203-5221).
gctgcactattctaccttt

SEQ ID NO: 350563 - DNA, 19 bp, Homo sapiens
  siRNA target sequence for RC3 (NM_015263.1,5206-5224).
gcactattctacctttcaa

SEQ ID NO: 350564 - DNA, 19 bp, Homo sapiens
  siRNA target sequence for RC3 (NM_015263.1,5209-5227).
ctattctacctttcaatga

SEQ ID NO: 350565 - DNA, 19 bp, Homo sapiens
  siRNA target sequence for RC3 (NM_015263.1,5319-5337).
gcgaaaagctgctttgaaa

SEQ ID NO: 350566 - DNA, 19 bp, Homo sapiens
  siRNA target sequence for RC3 (NM_015263.1,5357-5375).
gaaaacaacgctttgaaca

SEQ ID NO: 350567 - DNA, 19 bp, Homo sapiens
  siRNA target sequence for RC3 (NM_015263.1,5371-5389).
gaacaatcggctgcttttt

SEQ ID NO: 350568 - DNA, 19 bp, Homo sapiens
  siRNA target sequence for RC3 (NM_015263.1,5394-5412).
gctagctggttcattgaaa

SEQ ID NO: 350569 - DNA, 19 bp, Homo sapiens
  siRNA target sequence for RC3 (NM_015263.1,5418-5436).
catagaggtatgtcttgaa

SEQ ID NO: 350570 - DNA, 19 bp, Homo sapiens
  siRNA target sequence for RC3 (NM_015263.1,5494-5512).
gagacttcatccacttata

SEQ ID NO: 350571 - DNA, 19 bp, Homo sapiens
  siRNA target sequence for RC3 (NM_015263.1,5507-5525).
cttatatatccatcctaaa

SEQ ID NO: 350572 - DNA, 19 bp, Homo sapiens
  siRNA target sequence for RC3 (NM_015263.1,5576-5594).
gattacatcctgatccttt

SEQ ID NO: 350573 - DNA, 19 bp, Homo sapiens
  siRNA target sequence for RC3 (NM_015263.1,5605-5623).
cttgcctattgggtaatga

SEQ ID NO: 350574 - DNA, 19 bp, Homo sapiens
  siRNA target sequence for RC3 (NM_015263.1,5609-5627).
cctattgggtaatgaaaga

SEQ ID NO: 350575 - DNA, 19 bp, Homo sapiens
  siRNA target sequence for RC3 (NM_015263.1,5610-5628).
ctattgggtaatgaaagat

SEQ ID NO: 350576 - DNA, 19 bp, Homo sapiens
  siRNA target sequence for RC3 (NM_015263.1,5633-5651).
cccgagccttggacacatt

SEQ ID NO: 350577 - DNA, 19 bp, Homo sapiens
  siRNA target sequence for RC3 (NM_015263.1,5634-5652).
ccgagccttggacacatta

SEQ ID NO: 350578 - DNA, 19 bp, Homo sapiens
  siRNA target sequence for RC3 (NM_015263.1,5644-5662).
gacacattactggaacaaa

SEQ ID NO: 350579 - DNA, 19 bp, Homo sapiens
  siRNA target sequence for RC3 (NM_015263.1,5646-5664).
cacattactggaacaaaca

SEQ ID NO: 350580 - DNA, 19 bp, Homo sapiens
  siRNA target sequence for RC3 (NM_015263.1,5677-5695).
gatgaacatcaagttatca

SEQ ID NO: 350581 - DNA, 19 bp, Homo sapiens
  siRNA target sequence for RC3 (NM_015263.1,5680-5698).
gaacatcaagttatcatca

SEQ ID NO: 350582 - DNA, 19 bp, Homo sapiens
  siRNA target sequence for RC3 (NM_015263.1,5683-5701).
catcaagttatcatcaagt

SEQ ID NO: 350583 - DNA, 19 bp, Homo sapiens
  siRNA target sequence for RC3 (NM_015263.1,5689-5707).
gttatcatcaagtcttgta

SEQ ID NO: 350584 - DNA, 19 bp, Homo sapiens
  siRNA target sequence for RC3 (NM_015263.1,5709-5727).
cccggtggcatttagtttt

SEQ ID NO: 350585 - DNA, 19 bp, Homo sapiens
  siRNA target sequence for RC3 (NM_015263.1,5710-5728).
ccggtggcatttagttttt

SEQ ID NO: 350586 - DNA, 19 bp, Homo sapiens
  siRNA target sequence for RC3 (NM_015263.1,5711-5729).
cggtggcatttagttttta

SEQ ID NO: 350587 - DNA, 19 bp, Homo sapiens
  siRNA target sequence for RC3 (NM_015263.1,5750-5768).
ctttgctcattcgaagaaa

SEQ ID NO: 350588 - DNA, 19 bp, Homo sapiens
  siRNA target sequence for RC3 (NM_015263.1,5754-5772).
gctcattcgaagaaatctt

SEQ ID NO: 350589 - DNA, 19 bp, Homo sapiens
  siRNA target sequence for RC3 (NM_015263.1,5793-5811).
ggcaaccttaggtctcaaa

SEQ ID NO: 350590 - DNA, 19 bp, Homo sapiens
  siRNA target sequence for RC3 (NM_015263.1,5794-5812).
gcaaccttaggtctcaaaa

SEQ ID NO: 350591 - DNA, 19 bp, Homo sapiens
  siRNA target sequence for RC3 (NM_015263.1,5913-5931).
ggaggtactctccaaaatt

SEQ ID NO: 350592 - DNA, 19 bp, Homo sapiens
  siRNA target sequence for RC3 (NM_015263.1,5916-5934).
ggtactctccaaaattcca

SEQ ID NO: 350593 - DNA, 19 bp, Homo sapiens
  siRNA target sequence for RC3 (NM_015263.1,5917-5935).
gtactctccaaaattccaa

SEQ ID NO: 350594 - DNA, 19 bp, Homo sapiens
  siRNA target sequence for RC3 (NM_015263.1,5990-6008).
ctcacaggatggatgatgt

SEQ ID NO: 350595 - DNA, 19 bp, Homo sapiens
  siRNA target sequence for RC3 (NM_015263.1,6000-6018).
ggatgatgtaccttcacat

SEQ ID NO: 350596 - DNA, 19 bp, Homo sapiens
  siRNA target sequence for RC3 (NM_015263.1,6001-6019).
gatgatgtaccttcacatt

SEQ ID NO: 350597 - DNA, 19 bp, Homo sapiens
  siRNA target sequence for RC3 (NM_015263.1,6090-6108).
ctggagtcagccaatagta

SEQ ID NO: 350598 - DNA, 19 bp, Homo sapiens
  siRNA target sequence for RC3 (NM_015263.1,6092-6110).
ggagtcagccaatagtaaa

SEQ ID NO: 350599 - DNA, 19 bp, Homo sapiens
  siRNA target sequence for RC3 (NM_015263.1,6095-6113).
gtcagccaatagtaaaagt

SEQ ID NO: 350600 - DNA, 19 bp, Homo sapiens
  siRNA target sequence for RC3 (NM_015263.1,6099-6117).
gccaatagtaaaagttgat

SEQ ID NO: 350601 - DNA, 19 bp, Homo sapiens
  siRNA target sequence for RC3 (NM_015263.1,6247-6265).
gcctcagaccctaacatgt

SEQ ID NO: 350602 - DNA, 19 bp, Homo sapiens
  siRNA target sequence for RC3 (NM_015263.1,6344-6362).
cttgtttaaagatccttat

SEQ ID NO: 350603 - DNA, 19 bp, Homo sapiens
  siRNA target sequence for RC3 (NM_015263.1,6354-6372).
gatccttatgactgaatta

SEQ ID NO: 350604 - DNA, 19 bp, Homo sapiens
  siRNA target sequence for RC3 (NM_015263.1,6377-6395).
cattggctacaggttatga

SEQ ID NO: 350605 - DNA, 19 bp, Homo sapiens
  siRNA target sequence for RC3 (NM_015263.1,6381-6399).
ggctacaggttatgaagta

SEQ ID NO: 350606 - DNA, 19 bp, Homo sapiens
  siRNA target sequence for RC3 (NM_015263.1,6407-6425).
gaaaactcagatttcaact

SEQ ID NO: 350607 - DNA, 19 bp, Homo sapiens
  siRNA target sequence for RC3 (NM_015263.1,6424-6442).
ctctataactggcttgaaa

SEQ ID NO: 350608 - DNA, 19 bp, Homo sapiens
  siRNA target sequence for RC3 (NM_015263.1,6451-6469).
gctgccttgcatgagatat

SEQ ID NO: 350609 - DNA, 19 bp, Homo sapiens
  siRNA target sequence for RC3 (NM_015263.1,6454-6472).
gccttgcatgagatatgta

SEQ ID NO: 350610 - DNA, 19 bp, Homo sapiens
  siRNA target sequence for RC3 (NM_015263.1,6470-6488).
gtaatcatgaatcagttat

SEQ ID NO: 350611 - DNA, 19 bp, Homo sapiens
  siRNA target sequence for RC3 (NM_015263.1,6478-6496).
gaatcagttattaaagagt

SEQ ID NO: 350612 - DNA, 19 bp, Homo sapiens
  siRNA target sequence for RC3 (NM_015263.1,6493-6511).
gagtattccagtaagacat

SEQ ID NO: 350613 - DNA, 19 bp, Homo sapiens
  siRNA target sequence for RC3 (NM_015263.1,6495-6513).
gtattccagtaagacatat

SEQ ID NO: 350614 - DNA, 19 bp, Homo sapiens
  siRNA target sequence for RC3 (NM_015263.1,6500-6518).
ccagtaagacatattccaa

SEQ ID NO: 350615 - DNA, 19 bp, Homo sapiens
  siRNA target sequence for RC3 (NM_015263.1,6501-6519).
cagtaagacatattccaaa

SEQ ID NO: 350616 - DNA, 19 bp, Homo sapiens
  siRNA target sequence for RC3 (NM_015263.1,6575-6593).
cctatgagcgccatcaaat

SEQ ID NO: 350617 - DNA, 19 bp, Homo sapiens
  siRNA target sequence for RC3 (NM_015263.1,6576-6594).
ctatgagcgccatcaaata

SEQ ID NO: 350618 - DNA, 19 bp, Homo sapiens
  siRNA target sequence for RC3 (NM_015263.1,6580-6598).
gagcgccatcaaatagaaa

SEQ ID NO: 350619 - DNA, 19 bp, Homo sapiens
  siRNA target sequence for RC3 (NM_015263.1,6582-6600).
gcgccatcaaatagaaaga

SEQ ID NO: 350620 - DNA, 19 bp, Homo sapiens
  siRNA target sequence for RC3 (NM_015263.1,6583-6601).
cgccatcaaatagaaagaa

SEQ ID NO: 350621 - DNA, 19 bp, Homo sapiens
  siRNA target sequence for RC3 (NM_015263.1,6667-6685).
ctcctgagagtatttctca

SEQ ID NO: 350622 - DNA, 19 bp, Homo sapiens
  siRNA target sequence for RC3 (NM_015263.1,6676-6694).
gtatttctcagctactgta

SEQ ID NO: 350623 - DNA, 19 bp, Homo sapiens
  siRNA target sequence for RC3 (NM_015263.1,6719-6737).
gtttggcttcagtaaggat

SEQ ID NO: 350624 - DNA, 19 bp, Homo sapiens
  siRNA target sequence for RC3 (NM_015263.1,6734-6752).
ggatggaactcaaattttt

SEQ ID NO: 350625 - DNA, 19 bp, Homo sapiens
  siRNA target sequence for RC3 (NM_015263.1,6836-6854).
caagtattgcgtcaacaaa

SEQ ID NO: 350626 - DNA, 19 bp, Homo sapiens
  siRNA target sequence for RC3 (NM_015263.1,6892-6910).
cacatccatgatatacttt

SEQ ID NO: 350627 - DNA, 19 bp, Homo sapiens
  siRNA target sequence for RC3 (NM_015263.1,6897-6915).
ccatgatatactttatact

SEQ ID NO: 350628 - DNA, 19 bp, Homo sapiens
  siRNA target sequence for RC3 (NM_015263.1,6944-6962).
ccagtattgaagatgtgaa

SEQ ID NO: 350629 - DNA, 19 bp, Homo sapiens
  siRNA target sequence for RC3 (NM_015263.1,6966-6984).
gcacacacttcattcacta

SEQ ID NO: 350630 - DNA, 19 bp, Homo sapiens
  siRNA target sequence for RC3 (NM_015263.1,7015-7033).
gcattatgtgacagtcata

SEQ ID NO: 350631 - DNA, 19 bp, Homo sapiens
  siRNA target sequence for RC3 (NM_015263.1,7165-7183).
cctggtgtgagctcactta

SEQ ID NO: 350632 - DNA, 19 bp, Homo sapiens
  siRNA target sequence for RC3 (NM_015263.1,7173-7191).
gagctcacttattaatctt

SEQ ID NO: 350633 - DNA, 19 bp, Homo sapiens
  siRNA target sequence for RC3 (NM_015263.1,7175-7193).
gctcacttattaatctttt

SEQ ID NO: 350634 - DNA, 19 bp, Homo sapiens
  siRNA target sequence for RC3 (NM_015263.1,7255-7273).
gctgtttacttaagtttat

SEQ ID NO: 350635 - DNA, 19 bp, Homo sapiens
  siRNA target sequence for RC3 (NM_015263.1,7279-7297).
catgctcttgccacaaatt

SEQ ID NO: 350636 - DNA, 19 bp, Homo sapiens
  siRNA target sequence for RC3 (NM_015263.1,7292-7310).
caaattcctccagtgaatt

SEQ ID NO: 350637 - DNA, 19 bp, Homo sapiens
  siRNA target sequence for RC3 (NM_015263.1,7321-7339).
gcagcccacccattaaata

SEQ ID NO: 350638 - DNA, 19 bp, Homo sapiens
  siRNA target sequence for RC3 (NM_015263.1,7322-7340).
cagcccacccattaaataa

SEQ ID NO: 350639 - DNA, 19 bp, Homo sapiens
  siRNA target sequence for RC3 (NM_015263.1,7326-7344).
ccacccattaaataatcga

SEQ ID NO: 350640 - DNA, 19 bp, Homo sapiens
  siRNA target sequence for RC3 (NM_015263.1,7364-7382).
gaggcggtgtaaaacttgt

SEQ ID NO: 350641 - DNA, 19 bp, Homo sapiens
  siRNA target sequence for RC3 (NM_015263.1,7390-7408).
cctcgaagacaatcagaaa

SEQ ID NO: 350642 - DNA, 19 bp, Homo sapiens
  siRNA target sequence for RC3 (NM_015263.1,7428-7446).
cctttctgaagacatagat

SEQ ID NO: 350643 - DNA, 19 bp, Homo sapiens
  siRNA target sequence for RC3 (NM_015263.1,7450-7468).
caccgtaggagatttaaca

SEQ ID NO: 350644 - DNA, 19 bp, Homo sapiens
  siRNA target sequence for RC3 (NM_015263.1,7453-7471).
cgtaggagatttaacatga

SEQ ID NO: 350645 - DNA, 19 bp, Homo sapiens
  siRNA target sequence for RC3 (NM_015263.1,7523-7541).
ctgcagaaagaccatctta

SEQ ID NO: 350646 - DNA, 19 bp, Homo sapiens
  siRNA target sequence for RC3 (NM_015263.1,7525-7543).
gcagaaagaccatcttaca

SEQ ID NO: 350647 - DNA, 19 bp, Homo sapiens
  siRNA target sequence for RC3 (NM_015263.1,7526-7544).
cagaaagaccatcttacaa

SEQ ID NO: 350648 - DNA, 19 bp, Homo sapiens
  siRNA target sequence for RC3 (NM_015263.1,7558-7576).
cctcccgaacttagtatgt

SEQ ID NO: 350649 - DNA, 19 bp, Homo sapiens
  siRNA target sequence for RC3 (NM_015263.1,7622-7640).
gtgttatatatgattctga

SEQ ID NO: 350650 - DNA, 19 bp, Homo sapiens
  siRNA target sequence for RC3 (NM_015263.1,7663-7681).
gaagatgatgccttttttt

SEQ ID NO: 350651 - DNA, 19 bp, Homo sapiens
  siRNA target sequence for RC3 (NM_015263.1,7698-7716).
ggagcaccaagatccaaat

SEQ ID NO: 350652 - DNA, 19 bp, Homo sapiens
  siRNA target sequence for RC3 (NM_015263.1,7699-7717).
gagcaccaagatccaaatt

SEQ ID NO: 350653 - DNA, 19 bp, Homo sapiens
  siRNA target sequence for RC3 (NM_015263.1,7702-7720).
caccaagatccaaattcct

SEQ ID NO: 350654 - DNA, 19 bp, Homo sapiens
  siRNA target sequence for RC3 (NM_015263.1,7704-7722).
ccaagatccaaattcctat

SEQ ID NO: 350655 - DNA, 19 bp, Homo sapiens
  siRNA target sequence for RC3 (NM_015263.1,7708-7726).
gatccaaattcctatagct

SEQ ID NO: 350656 - DNA, 19 bp, Homo sapiens
  siRNA target sequence for RC3 (NM_015263.1,7724-7742).
gctgggctcttctacattt

SEQ ID NO: 350657 - DNA, 19 bp, Homo sapiens
  siRNA target sequence for RC3 (NM_015263.1,7728-7746).
ggctcttctacatttgaca

SEQ ID NO: 350658 - DNA, 19 bp, Homo sapiens
  siRNA target sequence for RC3 (NM_015263.1,7729-7747).
gctcttctacatttgacaa

SEQ ID NO: 350659 - DNA, 19 bp, Homo sapiens
  siRNA target sequence for RC3 (NM_015263.1,7730-7748).
ctcttctacatttgacaat

SEQ ID NO: 350660 - DNA, 19 bp, Homo sapiens
  siRNA target sequence for RC3 (NM_015263.1,7771-7789).
gtcaagaatttctttccta

SEQ ID NO: 350661 - DNA, 19 bp, Homo sapiens
  siRNA target sequence for RC3 (NM_015263.1,7787-7805).
ctattgctggactggaatt

SEQ ID NO: 350662 - DNA, 19 bp, Homo sapiens
  siRNA target sequence for RC3 (NM_015263.1,7815-7833).
gcctgtaacatcaccatta

SEQ ID NO: 350663 - DNA, 19 bp, Homo sapiens
  siRNA target sequence for RC3 (NM_015263.1,7819-7837).
gtaacatcaccattaggta

SEQ ID NO: 350664 - DNA, 19 bp, Homo sapiens
  siRNA target sequence for RC3 (NM_015263.1,7903-7921).
ggtccaccccctaactata

SEQ ID NO: 350665 - DNA, 19 bp, Homo sapiens
  siRNA target sequence for RC3 (NM_015263.1,7904-7922).
gtccaccccctaactatat

SEQ ID NO: 350666 - DNA, 19 bp, Homo sapiens
  siRNA target sequence for RC3 (NM_015263.1,7907-7925).
caccccctaactatatcaa

SEQ ID NO: 350667 - DNA, 19 bp, Homo sapiens
  siRNA target sequence for RC3 (NM_015263.1,7909-7927).
ccccctaactatatcaaca

SEQ ID NO: 350668 - DNA, 19 bp, Homo sapiens
  siRNA target sequence for RC3 (NM_015263.1,7952-7970).
gagctggaccagctattct

SEQ ID NO: 350669 - DNA, 19 bp, Homo sapiens
  siRNA target sequence for RC3 (NM_015263.1,7958-7976).
gaccagctattcttcgaaa

SEQ ID NO: 350670 - DNA, 19 bp, Homo sapiens
  siRNA target sequence for RC3 (NM_015263.1,7961-7979).
cagctattcttcgaaataa

SEQ ID NO: 350671 - DNA, 19 bp, Homo sapiens
  siRNA target sequence for RC3 (NM_015263.1,7994-8012).
ctgaaaataccccattcaa

SEQ ID NO: 350672 - DNA, 19 bp, Homo sapiens
  siRNA target sequence for RC3 (NM_015263.1,7996-8014).
gaaaataccccattcaagt

SEQ ID NO: 350673 - DNA, 19 bp, Homo sapiens
  siRNA target sequence for RC3 (NM_015263.1,8010-8028).
caagtcccgggattcttct

SEQ ID NO: 350674 - DNA, 19 bp, Homo sapiens
  siRNA target sequence for RC3 (NM_015263.1,8016-8034).
ccgggattcttctgcattt

SEQ ID NO: 350675 - DNA, 19 bp, Homo sapiens
  siRNA target sequence for RC3 (NM_015263.1,8074-8092).
gtccttcaagagacattta

SEQ ID NO: 350676 - DNA, 19 bp, Homo sapiens
  siRNA target sequence for RC3 (NM_015263.1,8165-8183).
cgaaagtcatccataagga

SEQ ID NO: 350677 - DNA, 19 bp, Homo sapiens
  siRNA target sequence for RC3 (NM_015263.1,8188-8206).
gatatgatcatggcatttt

SEQ ID NO: 350678 - DNA, 19 bp, Homo sapiens
  siRNA target sequence for RC3 (NM_015263.1,8241-8259).
ggcttcaacacatgatgtt

SEQ ID NO: 350679 - DNA, 19 bp, Homo sapiens
  siRNA target sequence for RC3 (NM_015263.1,8243-8261).
cttcaacacatgatgttca

SEQ ID NO: 350680 - DNA, 19 bp, Homo sapiens
  siRNA target sequence for RC3 (NM_015263.1,8284-8302).
ctggcctgtcagtcataca

SEQ ID NO: 350681 - DNA, 19 bp, Homo sapiens
  siRNA target sequence for RC3 (NM_015263.1,8323-8341).
gacagagaatccaaaagtt

SEQ ID NO: 350682 - DNA, 19 bp, Homo sapiens
  siRNA target sequence for RC3 (NM_015263.1,8333-8351).
ccaaaagttcagatgatgt

SEQ ID NO: 350683 - DNA, 19 bp, Homo sapiens
  siRNA target sequence for RC3 (NM_015263.1,8363-8381).
gttccactacaactcttta

SEQ ID NO: 350684 - DNA, 19 bp, Homo sapiens
  siRNA target sequence for RC3 (NM_015263.1,8366-8384).
ccactacaactctttatca

SEQ ID NO: 350685 - DNA, 19 bp, Homo sapiens
  siRNA target sequence for RC3 (NM_015263.1,8367-8385).
cactacaactctttatcaa

SEQ ID NO: 350686 - DNA, 19 bp, Homo sapiens
  siRNA target sequence for RC3 (NM_015263.1,8468-8486).
gagctagtgtgcttatgaa

SEQ ID NO: 350687 - DNA, 19 bp, Homo sapiens
  siRNA target sequence for RC3 (NM_015263.1,8470-8488).
gctagtgtgcttatgaaaa

SEQ ID NO: 350688 - DNA, 19 bp, Homo sapiens
  siRNA target sequence for RC3 (NM_015263.1,8474-8492).
gtgtgcttatgaaaaggaa

SEQ ID NO: 350689 - DNA, 19 bp, Homo sapiens
  siRNA target sequence for RC3 (NM_015263.1,8494-8512).
ctacataatgttaagagaa

SEQ ID NO: 350690 - DNA, 19 bp, Homo sapiens
  siRNA target sequence for RC3 (NM_015263.1,8519-8537).
cacacccagtccatcaata

SEQ ID NO: 350691 - DNA, 19 bp, Homo sapiens
  siRNA target sequence for RC3 (NM_015263.1,8521-8539).
cacccagtccatcaatact

SEQ ID NO: 350692 - DNA, 19 bp, Homo sapiens
  siRNA target sequence for RC3 (NM_015263.1,8523-8541).
cccagtccatcaatactat

SEQ ID NO: 350693 - DNA, 19 bp, Homo sapiens
  siRNA target sequence for RC3 (NM_015263.1,8525-8543).
cagtccatcaatactatct

SEQ ID NO: 350694 - DNA, 19 bp, Homo sapiens
  siRNA target sequence for RC3 (NM_015263.1,8527-8545).
gtccatcaatactatctta

SEQ ID NO: 350695 - DNA, 19 bp, Homo sapiens
  siRNA target sequence for RC3 (NM_015263.1,8529-8547).
ccatcaatactatcttaca

SEQ ID NO: 350696 - DNA, 19 bp, Homo sapiens
  siRNA target sequence for RC3 (NM_015263.1,8559-8577).
cggcagtgtacgaatgttt

SEQ ID NO: 350697 - DNA, 19 bp, Homo sapiens
  siRNA target sequence for RC3 (NM_015263.1,8611-8629).
cgtcaagctggcaatgcaa

SEQ ID NO: 350698 - DNA, 19 bp, Homo sapiens
  siRNA target sequence for RC3 (NM_015263.1,8627-8645).
caagagttactagattata

SEQ ID NO: 350699 - DNA, 19 bp, Homo sapiens
  siRNA target sequence for RC3 (NM_015263.1,8699-8717).
gtatctggcaagttaacca

SEQ ID NO: 350700 - DNA, 19 bp, Homo sapiens
  siRNA target sequence for RC3 (NM_015263.1,8715-8733).
ccaaactgcatcaaatcct

SEQ ID NO: 350701 - DNA, 19 bp, Homo sapiens
  siRNA target sequence for RC3 (NM_015263.1,8722-8740).
gcatcaaatcctaaacctt

SEQ ID NO: 350702 - DNA, 19 bp, Homo sapiens
  siRNA target sequence for RC3 (NM_015263.1,8723-8741).
catcaaatcctaaacctta

SEQ ID NO: 350703 - DNA, 19 bp, Homo sapiens
  siRNA target sequence for RC3 (NM_015263.1,8731-8749).
cctaaaccttatatgagtt

SEQ ID NO: 350704 - DNA, 19 bp, Homo sapiens
  siRNA target sequence for RC3 (NM_015263.1,8769-8787).
cacaagtgactttgcattt

SEQ ID NO: 350705 - DNA, 19 bp, Homo sapiens
  siRNA target sequence for RC3 (NM_015263.1,8823-8841).
ctccaatgacaatagaaat

SEQ ID NO: 350706 - DNA, 19 bp, Homo sapiens
  siRNA target sequence for RC3 (NM_015263.1,8846-8864).
gcctctgggacacattaat

SEQ ID NO: 350707 - DNA, 19 bp, Homo sapiens
  siRNA target sequence for RC3 (NM_015263.1,8848-8866).
ctctgggacacattaatat

SEQ ID NO: 350708 - DNA, 19 bp, Homo sapiens
  siRNA target sequence for RC3 (NM_015263.1,8850-8868).
ctgggacacattaatatca

SEQ ID NO: 350709 - DNA, 19 bp, Homo sapiens
  siRNA target sequence for RC3 (NM_015263.1,8870-8888).
ccggaaacagcctcattca

SEQ ID NO: 350710 - DNA, 19 bp, Homo sapiens
  siRNA target sequence for RC3 (NM_015263.1,8974-8992).
cacgtctgcatttttgaca

SEQ ID NO: 350711 - DNA, 19 bp, Homo sapiens
  siRNA target sequence for RC3 (NM_015263.1,8996-9014).
ggcaaaggcagctcattca

SEQ ID NO: 350712 - DNA, 19 bp, Homo sapiens
  siRNA target sequence for RC3 (NM_015263.1,9025-9043).
gcccatgactcagctatta

SEQ ID NO: 350713 - DNA, 19 bp, Homo sapiens
  siRNA target sequence for RC3 (NM_015263.1,9058-9076).
gatccctatgaggaatatt

SEQ ID NO: 350714 - DNA, 19 bp, Homo sapiens
  siRNA target sequence for RC3 (NM_015263.1,9061-9079).
ccctatgaggaatatttta

SEQ ID NO: 350715 - DNA, 19 bp, Homo sapiens
  siRNA target sequence for RC3 (NM_015263.1,9120-9138).
gacaggccatggcctaatt

SEQ ID NO: 350716 - DNA, 19 bp, Homo sapiens
  siRNA target sequence for RC3 (NM_015263.1,9124-9142).
ggccatggcctaattcatt

SEQ ID NO: 350717 - DNA, 19 bp, Homo sapiens
  siRNA target sequence for RC3 (NM_015263.1,9127-9145).
catggcctaattcattcat

SEQ ID NO: 350718 - DNA, 19 bp, Homo sapiens
  siRNA target sequence for RC3 (NM_015263.1,9247-9265).
gatggcacgctgaaaacca

SEQ ID NO: 350719 - DNA, 19 bp, Homo sapiens
  siRNA target sequence for KIAA1033 (NM_015275.1,107-125).
ccccggactgggagtttga

SEQ ID NO: 350720 - DNA, 19 bp, Homo sapiens
  siRNA target sequence for KIAA1033 (NM_015275.1,133-151).
gacgacggctcgcagaaaa

SEQ ID NO: 350721 - DNA, 19 bp, Homo sapiens
  siRNA target sequence for KIAA1033 (NM_015275.1,135-153).
cgacggctcgcagaaaatt

SEQ ID NO: 350722 - DNA, 19 bp, Homo sapiens
  siRNA target sequence for KIAA1033 (NM_015275.1,138-156).
cggctcgcagaaaattcat

SEQ ID NO: 350723 - DNA, 19 bp, Homo sapiens
  siRNA target sequence for KIAA1033 (NM_015275.1,154-172).
catgccgaagtccaactta

SEQ ID NO: 350724 - DNA, 19 bp, Homo sapiens
  siRNA target sequence for KIAA1033 (NM_015275.1,157-175).
gccgaagtccaacttaaga

SEQ ID NO: 350725 - DNA, 19 bp, Homo sapiens
  siRNA target sequence for KIAA1033 (NM_015275.1,158-176).
ccgaagtccaacttaagaa

SEQ ID NO: 350726 - DNA, 19 bp, Homo sapiens
  siRNA target sequence for KIAA1033 (NM_015275.1,159-177).
cgaagtccaacttaagaat

SEQ ID NO: 350727 - DNA, 19 bp, Homo sapiens
  siRNA target sequence for KIAA1033 (NM_015275.1,204-222).
ctctcaactgagaagaatt

SEQ ID NO: 350728 - DNA, 19 bp, Homo sapiens
  siRNA target sequence for KIAA1033 (NM_015275.1,228-246).
cgctctggatgactcaatt

SEQ ID NO: 350729 - DNA, 19 bp, Homo sapiens
  siRNA target sequence for KIAA1033 (NM_015275.1,264-282).
caatcttgatcctatagca

SEQ ID NO: 350730 - DNA, 19 bp, Homo sapiens
  siRNA target sequence for KIAA1033 (NM_015275.1,274-292).
cctatagcattaaagcttt

SEQ ID NO: 350731 - DNA, 19 bp, Homo sapiens
  siRNA target sequence for KIAA1033 (NM_015275.1,364-382).
gtttatgctgcactttgtt

SEQ ID NO: 350732 - DNA, 19 bp, Homo sapiens
  siRNA target sequence for KIAA1033 (NM_015275.1,577-595).
cagttggctgccctctata

SEQ ID NO: 350733 - DNA, 19 bp, Homo sapiens
  siRNA target sequence for KIAA1033 (NM_015275.1,582-600).
ggctgccctctatatcagt

SEQ ID NO: 350734 - DNA, 19 bp, Homo sapiens
  siRNA target sequence for KIAA1033 (NM_015275.1,583-601).
gctgccctctatatcagta

SEQ ID NO: 350735 - DNA, 19 bp, Homo sapiens
  siRNA target sequence for KIAA1033 (NM_015275.1,584-602).
ctgccctctatatcagtaa

SEQ ID NO: 350736 - DNA, 19 bp, Homo sapiens
  siRNA target sequence for KIAA1033 (NM_015275.1,586-604).
gccctctatatcagtaaca

SEQ ID NO: 350737 - DNA, 19 bp, Homo sapiens
  siRNA target sequence for KIAA1033 (NM_015275.1,587-605).
ccctctatatcagtaacaa

SEQ ID NO: 350738 - DNA, 19 bp, Homo sapiens
  siRNA target sequence for KIAA1033 (NM_015275.1,589-607).
ctctatatcagtaacaaga

SEQ ID NO: 350739 - DNA, 19 bp, Homo sapiens
  siRNA target sequence for KIAA1033 (NM_015275.1,635-653).
gagttcattttcagactat

SEQ ID NO: 350740 - DNA, 19 bp, Homo sapiens
  siRNA target sequence for KIAA1033 (NM_015275.1,666-684).
gggagaactgctaacagtt

SEQ ID NO: 350741 - DNA, 19 bp, Homo sapiens
  siRNA target sequence for KIAA1033 (NM_015275.1,687-705).
gctcaccctggatgaaatt

SEQ ID NO: 350742 - DNA, 19 bp, Homo sapiens
  siRNA target sequence for KIAA1033 (NM_015275.1,688-706).
ctcaccctggatgaaatta

SEQ ID NO: 350743 - DNA, 19 bp, Homo sapiens
  siRNA target sequence for KIAA1033 (NM_015275.1,694-712).
ctggatgaaattattgata

SEQ ID NO: 350744 - DNA, 19 bp, Homo sapiens
  siRNA target sequence for KIAA1033 (NM_015275.1,732-750).
ccactggactatgtacaaa

SEQ ID NO: 350745 - DNA, 19 bp, Homo sapiens
  siRNA target sequence for KIAA1033 (NM_015275.1,737-755).
ggactatgtacaaaaggtt

SEQ ID NO: 350746 - DNA, 19 bp, Homo sapiens
  siRNA target sequence for KIAA1033 (NM_015275.1,759-777).
gaaatctgtccatcacaat

SEQ ID NO: 350747 - DNA, 19 bp, Homo sapiens
  siRNA target sequence for KIAA1033 (NM_015275.1,768-786).
ccatcacaatccttcaaaa

SEQ ID NO: 350748 - DNA, 19 bp, Homo sapiens
  siRNA target sequence for KIAA1033 (NM_015275.1,769-787).
catcacaatccttcaaaat

SEQ ID NO: 350749 - DNA, 19 bp, Homo sapiens
  siRNA target sequence for KIAA1033 (NM_015275.1,834-852).
gaagctagaagggcaatta

SEQ ID NO: 350750 - DNA, 19 bp, Homo sapiens
  siRNA target sequence for KIAA1033 (NM_015275.1,870-888).
ccaggcctgtatagaacaa

SEQ ID NO: 350751 - DNA, 19 bp, Homo sapiens
  siRNA target sequence for KIAA1033 (NM_015275.1,873-891).
ggcctgtatagaacaacaa

SEQ ID NO: 350752 - DNA, 19 bp, Homo sapiens
  siRNA target sequence for KIAA1033 (NM_015275.1,878-896).
gtatagaacaacaatttga

SEQ ID NO: 350753 - DNA, 19 bp, Homo sapiens
  siRNA target sequence for KIAA1033 (NM_015275.1,908-926).
gaggagtatctgtgtcaaa

SEQ ID NO: 350754 - DNA, 19 bp, Homo sapiens
  siRNA target sequence for KIAA1033 (NM_015275.1,932-950).
gtacttttgctgaggaatt

SEQ ID NO: 350755 - DNA, 19 bp, Homo sapiens
  siRNA target sequence for KIAA1033 (NM_015275.1,955-973).
catagtattcggtcaattt

SEQ ID NO: 350756 - DNA, 19 bp, Homo sapiens
  siRNA target sequence for KIAA1033 (NM_015275.1,1022-1040).
gagacaagtatgttggaat

SEQ ID NO: 350757 - DNA, 19 bp, Homo sapiens
  siRNA target sequence for KIAA1033 (NM_015275.1,1026-1044).
caagtatgttggaatttgt

SEQ ID NO: 350758 - DNA, 19 bp, Homo sapiens
  siRNA target sequence for KIAA1033 (NM_015275.1,1037-1055).
gaatttgtggactctttgt

SEQ ID NO: 350759 - DNA, 19 bp, Homo sapiens
  siRNA target sequence for KIAA1033 (NM_015275.1,1043-1061).
gtggactctttgtattgca

SEQ ID NO: 350760 - DNA, 19 bp, Homo sapiens
  siRNA target sequence for KIAA1033 (NM_015275.1,1068-1086).
gatttttcgaactattgat

SEQ ID NO: 350761 - DNA, 19 bp, Homo sapiens
  siRNA target sequence for KIAA1033 (NM_015275.1,1126-1144).
gtaccagccatcactctaa

SEQ ID NO: 350762 - DNA, 19 bp, Homo sapiens
  siRNA target sequence for KIAA1033 (NM_015275.1,1137-1155).
cactctaactgctaatatt

SEQ ID NO: 350763 - DNA, 19 bp, Homo sapiens
  siRNA target sequence for KIAA1033 (NM_015275.1,1264-1282).
cagaaagctcaatcactta

SEQ ID NO: 350764 - DNA, 19 bp, Homo sapiens
  siRNA target sequence for KIAA1033 (NM_015275.1,1277-1295).
cacttaccaaagatgtaca

SEQ ID NO: 350765 - DNA, 19 bp, Homo sapiens
  siRNA target sequence for KIAA1033 (NM_015275.1,1314-1332).
gagctcatggatgatgaaa

SEQ ID NO: 350766 - DNA, 19 bp, Homo sapiens
  siRNA target sequence for KIAA1033 (NM_015275.1,1316-1334).
gctcatggatgatgaaaat

SEQ ID NO: 350767 - DNA, 19 bp, Homo sapiens
  siRNA target sequence for KIAA1033 (NM_015275.1,1378-1396).
gaagatctcaccaatagat

SEQ ID NO: 350768 - DNA, 19 bp, Homo sapiens
  siRNA target sequence for KIAA1033 (NM_015275.1,1381-1399).
gatctcaccaatagatgta

SEQ ID NO: 350769 - DNA, 19 bp, Homo sapiens
  siRNA target sequence for KIAA1033 (NM_015275.1,1386-1404).
caccaatagatgtaatgtt

SEQ ID NO: 350770 - DNA, 19 bp, Homo sapiens
  siRNA target sequence for KIAA1033 (NM_015275.1,1388-1406).
ccaatagatgtaatgtttt

SEQ ID NO: 350771 - DNA, 19 bp, Homo sapiens
  siRNA target sequence for KIAA1033 (NM_015275.1,1416-1434).
cttcttgtatgcatatagt

SEQ ID NO: 350772 - DNA, 19 bp, Homo sapiens
  siRNA target sequence for KIAA1033 (NM_015275.1,1419-1437).
cttgtatgcatatagtatt

SEQ ID NO: 350773 - DNA, 19 bp, Homo sapiens
  siRNA target sequence for KIAA1033 (NM_015275.1,1422-1440).
gtatgcatatagtattagt

SEQ ID NO: 350774 - DNA, 19 bp, Homo sapiens
  siRNA target sequence for KIAA1033 (NM_015275.1,1433-1451).
gtattagtaccattattaa

SEQ ID NO: 350775 - DNA, 19 bp, Homo sapiens
  siRNA target sequence for KIAA1033 (NM_015275.1,1465-1483).
ctctacatgtccatgcaaa

SEQ ID NO: 350776 - DNA, 19 bp, Homo sapiens
  siRNA target sequence for KIAA1033 (NM_015275.1,1511-1529).
cattgtgcaggcttgttga

SEQ ID NO: 350777 - DNA, 19 bp, Homo sapiens
  siRNA target sequence for KIAA1033 (NM_015275.1,1572-1590).
ggttgtggctgattcagtt

SEQ ID NO: 350778 - DNA, 19 bp, Homo sapiens
  siRNA target sequence for KIAA1033 (NM_015275.1,1573-1591).
gttgtggctgattcagttt

SEQ ID NO: 350779 - DNA, 19 bp, Homo sapiens
  siRNA target sequence for KIAA1033 (NM_015275.1,1579-1597).
gctgattcagtttcacata

SEQ ID NO: 350780 - DNA, 19 bp, Homo sapiens
  siRNA target sequence for KIAA1033 (NM_015275.1,1586-1604).
cagtttcacatataacaca

SEQ ID NO: 350781 - DNA, 19 bp, Homo sapiens
  siRNA target sequence for KIAA1033 (NM_015275.1,1674-1692).
cagcgaacagcgtcttgat

SEQ ID NO: 350782 - DNA, 19 bp, Homo sapiens
  siRNA target sequence for KIAA1033 (NM_015275.1,1676-1694).
gcgaacagcgtcttgatgt

SEQ ID NO: 350783 - DNA, 19 bp, Homo sapiens
  siRNA target sequence for KIAA1033 (NM_015275.1,1742-1760).
caaagcaacggcgacttat

SEQ ID NO: 350784 - DNA, 19 bp, Homo sapiens
  siRNA target sequence for KIAA1033 (NM_015275.1,1746-1764).
gcaacggcgacttattgtt

SEQ ID NO: 350785 - DNA, 19 bp, Homo sapiens
  siRNA target sequence for KIAA1033 (NM_015275.1,1747-1765).
caacggcgacttattgttt

SEQ ID NO: 350786 - DNA, 19 bp, Homo sapiens
  siRNA target sequence for KIAA1033 (NM_015275.1,1750-1768).
cggcgacttattgtttctt

SEQ ID NO: 350787 - DNA, 19 bp, Homo sapiens
  siRNA target sequence for KIAA1033 (NM_015275.1,1839-1857).
gaaaaaactggatcttatt

SEQ ID NO: 350788 - DNA, 19 bp, Homo sapiens
  siRNA target sequence for KIAA1033 (NM_015275.1,1848-1866).
ggatcttattagtgaactt

SEQ ID NO: 350789 - DNA, 19 bp, Homo sapiens
  siRNA target sequence for KIAA1033 (NM_015275.1,1915-1933).
cgagctgtcttcccaattt

SEQ ID NO: 350790 - DNA, 19 bp, Homo sapiens
  siRNA target sequence for KIAA1033 (NM_015275.1,1963-1981).
gatgcagccagattacatt

SEQ ID NO: 350791 - DNA, 19 bp, Homo sapiens
  siRNA target sequence for KIAA1033 (NM_015275.1,1966-1984).
gcagccagattacattaca

SEQ ID NO: 350792 - DNA, 19 bp, Homo sapiens
  siRNA target sequence for KIAA1033 (NM_015275.1,1969-1987).
gccagattacattacatgt

SEQ ID NO: 350793 - DNA, 19 bp, Homo sapiens
  siRNA target sequence for KIAA1033 (NM_015275.1,2019-2037).
gatgcatgcaaggcattta

SEQ ID NO: 350794 - DNA, 19 bp, Homo sapiens
  siRNA target sequence for KIAA1033 (NM_015275.1,2023-2041).
catgcaaggcatttagagt

SEQ ID NO: 350795 - DNA, 19 bp, Homo sapiens
  siRNA target sequence for KIAA1033 (NM_015275.1,2049-2067).
gatacttctggattgctat

SEQ ID NO: 350796 - DNA, 19 bp, Homo sapiens
  siRNA target sequence for KIAA1033 (NM_015275.1,2097-2115).
gcatttgctggacaaatta

SEQ ID NO: 350797 - DNA, 19 bp, Homo sapiens
  siRNA target sequence for KIAA1033 (NM_015275.1,2130-2148).
gaaagatctgcgactttct

SEQ ID NO: 350798 - DNA, 19 bp, Homo sapiens
  siRNA target sequence for KIAA1033 (NM_015275.1,2238-2256).
gtttttcaatcgtttcatt

SEQ ID NO: 350799 - DNA, 19 bp, Homo sapiens
  siRNA target sequence for KIAA1033 (NM_015275.1,2278-2296).
cactacctagacaagactt

SEQ ID NO: 350800 - DNA, 19 bp, Homo sapiens
  siRNA target sequence for KIAA1033 (NM_015275.1,2289-2307).
caagactttctacaatcta

SEQ ID NO: 350801 - DNA, 19 bp, Homo sapiens
  siRNA target sequence for KIAA1033 (NM_015275.1,2292-2310).
gactttctacaatctaaca

SEQ ID NO: 350802 - DNA, 19 bp, Homo sapiens
  siRNA target sequence for KIAA1033 (NM_015275.1,2298-2316).
ctacaatctaacaactgta

SEQ ID NO: 350803 - DNA, 19 bp, Homo sapiens
  siRNA target sequence for KIAA1033 (NM_015275.1,2309-2327).
caactgtagcccttcatga

SEQ ID NO: 350804 - DNA, 19 bp, Homo sapiens
  siRNA target sequence for KIAA1033 (NM_015275.1,2323-2341).
catgactgggccacttata

SEQ ID NO: 350805 - DNA, 19 bp, Homo sapiens
  siRNA target sequence for KIAA1033 (NM_015275.1,2336-2354).
cttatagtgagatgagaaa

SEQ ID NO: 350806 - DNA, 19 bp, Homo sapiens
  siRNA target sequence for KIAA1033 (NM_015275.1,2344-2362).
gagatgagaaacttagcta

SEQ ID NO: 350807 - DNA, 19 bp, Homo sapiens
  siRNA target sequence for KIAA1033 (NM_015275.1,2415-2433).
ggaacagggccttgatgtt

SEQ ID NO: 350808 - DNA, 19 bp, Homo sapiens
  siRNA target sequence for KIAA1033 (NM_015275.1,2423-2441).
gccttgatgttttagaaat

SEQ ID NO: 350809 - DNA, 19 bp, Homo sapiens
  siRNA target sequence for KIAA1033 (NM_015275.1,2464-2482).
gtgtcccgatacctctata

SEQ ID NO: 350810 - DNA, 19 bp, Homo sapiens
  siRNA target sequence for KIAA1033 (NM_015275.1,2466-2484).
gtcccgatacctctataat

SEQ ID NO: 350811 - DNA, 19 bp, Homo sapiens
  siRNA target sequence for KIAA1033 (NM_015275.1,2468-2486).
cccgatacctctataatct

SEQ ID NO: 350812 - DNA, 19 bp, Homo sapiens
  siRNA target sequence for KIAA1033 (NM_015275.1,2470-2488).
cgatacctctataatctca

SEQ ID NO: 350813 - DNA, 19 bp, Homo sapiens
  siRNA target sequence for KIAA1033 (NM_015275.1,2471-2489).
gatacctctataatctcaa

SEQ ID NO: 350814 - DNA, 19 bp, Homo sapiens
  siRNA target sequence for KIAA1033 (NM_015275.1,2475-2493).
cctctataatctcaacaat

SEQ ID NO: 350815 - DNA, 19 bp, Homo sapiens
  siRNA target sequence for KIAA1033 (NM_015275.1,2516-2534).
gcaataacaagcatttgaa

SEQ ID NO: 350816 - DNA, 19 bp, Homo sapiens
  siRNA target sequence for KIAA1033 (NM_015275.1,2548-2566).
cggcatattgctaattcaa

SEQ ID NO: 350817 - DNA, 19 bp, Homo sapiens
  siRNA target sequence for KIAA1033 (NM_015275.1,2575-2593).
catggcacgggaattatga

SEQ ID NO: 350818 - DNA, 19 bp, Homo sapiens
  siRNA target sequence for KIAA1033 (NM_015275.1,2580-2598).
cacgggaattatgaataca

SEQ ID NO: 350819 - DNA, 19 bp, Homo sapiens
  siRNA target sequence for KIAA1033 (NM_015275.1,2637-2655).
ctatatatttagccaattt

SEQ ID NO: 350820 - DNA, 19 bp, Homo sapiens
  siRNA target sequence for KIAA1033 (NM_015275.1,2648-2666).
gccaatttatgtatgatga

SEQ ID NO: 350821 - DNA, 19 bp, Homo sapiens
  siRNA target sequence for KIAA1033 (NM_015275.1,2719-2737).
gaccaaaatgatcataagt

SEQ ID NO: 350822 - DNA, 19 bp, Homo sapiens
  siRNA target sequence for KIAA1033 (NM_015275.1,2721-2739).
ccaaaatgatcataagtat

SEQ ID NO: 350823 - DNA, 19 bp, Homo sapiens
  siRNA target sequence for KIAA1033 (NM_015275.1,2731-2749).
cataagtatccttttgata

SEQ ID NO: 350824 - DNA, 19 bp, Homo sapiens
  siRNA target sequence for KIAA1033 (NM_015275.1,2775-2793).
cagaaaacttggagtaaca

SEQ ID NO: 350825 - DNA, 19 bp, Homo sapiens
  siRNA target sequence for KIAA1033 (NM_015275.1,2830-2848).
ctcatcagccagattggta

SEQ ID NO: 350826 - DNA, 19 bp, Homo sapiens
  siRNA target sequence for KIAA1033 (NM_015275.1,2832-2850).
catcagccagattggtaat

SEQ ID NO: 350827 - DNA, 19 bp, Homo sapiens
  siRNA target sequence for KIAA1033 (NM_015275.1,2835-2853).
cagccagattggtaatgct

SEQ ID NO: 350828 - DNA, 19 bp, Homo sapiens
  siRNA target sequence for KIAA1033 (NM_015275.1,2837-2855).
gccagattggtaatgctat

SEQ ID NO: 350829 - DNA, 19 bp, Homo sapiens
  siRNA target sequence for KIAA1033 (NM_015275.1,2852-2870).
ctatgggctatgtacgaat

SEQ ID NO: 350830 - DNA, 19 bp, Homo sapiens
  siRNA target sequence for KIAA1033 (NM_015275.1,2856-2874).
gggctatgtacgaatgata

SEQ ID NO: 350831 - DNA, 19 bp, Homo sapiens
  siRNA target sequence for KIAA1033 (NM_015275.1,2857-2875).
ggctatgtacgaatgataa

SEQ ID NO: 350832 - DNA, 19 bp, Homo sapiens
  siRNA target sequence for KIAA1033 (NM_015275.1,2859-2877).
ctatgtacgaatgataaga

SEQ ID NO: 350833 - DNA, 19 bp, Homo sapiens
  siRNA target sequence for KIAA1033 (NM_015275.1,2897-2915).
gcagcaatgccattagatt

SEQ ID NO: 350834 - DNA, 19 bp, Homo sapiens
  siRNA target sequence for KIAA1033 (NM_015275.1,2898-2916).
cagcaatgccattagattt

SEQ ID NO: 350835 - DNA, 19 bp, Homo sapiens
  siRNA target sequence for KIAA1033 (NM_015275.1,3038-3056).
ctgccgaaggcacagaata

SEQ ID NO: 350836 - DNA, 19 bp, Homo sapiens
  siRNA target sequence for KIAA1033 (NM_015275.1,3095-3113).
gaaggccaaagaatataca

SEQ ID NO: 350837 - DNA, 19 bp, Homo sapiens
  siRNA target sequence for KIAA1033 (NM_015275.1,3141-3159).
ccctctgaccctcaacttt

SEQ ID NO: 350838 - DNA, 19 bp, Homo sapiens
  siRNA target sequence for KIAA1033 (NM_015275.1,3239-3257).
ccatgggtgtggcttacat

SEQ ID NO: 350839 - DNA, 19 bp, Homo sapiens
  siRNA target sequence for KIAA1033 (NM_015275.1,3243-3261).
gggtgtggcttacattcta

SEQ ID NO: 350840 - DNA, 19 bp, Homo sapiens
  siRNA target sequence for KIAA1033 (NM_015275.1,3244-3262).
ggtgtggcttacattctaa

SEQ ID NO: 350841 - DNA, 19 bp, Homo sapiens
  siRNA target sequence for KIAA1033 (NM_015275.1,3245-3263).
gtgtggcttacattctaaa

SEQ ID NO: 350842 - DNA, 19 bp, Homo sapiens
  siRNA target sequence for KIAA1033 (NM_015275.1,3276-3294).
gtatcgggagtttgattca

SEQ ID NO: 350843 - DNA, 19 bp, Homo sapiens
  siRNA target sequence for KIAA1033 (NM_015275.1,3311-3329).
ctgttagagagaaatacct

SEQ ID NO: 350844 - DNA, 19 bp, Homo sapiens
  siRNA target sequence for KIAA1033 (NM_015275.1,3371-3389).
cagccagtcaagatgaaaa

SEQ ID NO: 350845 - DNA, 19 bp, Homo sapiens
  siRNA target sequence for KIAA1033 (NM_015275.1,3417-3435).
gaagcgactggatgtctat

SEQ ID NO: 350846 - DNA, 19 bp, Homo sapiens
  siRNA target sequence for KIAA1033 (NM_015275.1,3420-3438).
gcgactggatgtctatcta

SEQ ID NO: 350847 - DNA, 19 bp, Homo sapiens
  siRNA target sequence for KIAA1033 (NM_015275.1,3422-3440).
gactggatgtctatctaca

SEQ ID NO: 350848 - DNA, 19 bp, Homo sapiens
  siRNA target sequence for KIAA1033 (NM_015275.1,3464-3482).
cactgagcagtgcaagaat

SEQ ID NO: 350849 - DNA, 19 bp, Homo sapiens
  siRNA target sequence for KIAA1043 (NM_015281.1,384-402).
ggggactagtgctttacta

SEQ ID NO: 350850 - DNA, 19 bp, Homo sapiens
  siRNA target sequence for KIAA1043 (NM_015281.1,385-403).
gggactagtgctttactat

SEQ ID NO: 350851 - DNA, 19 bp, Homo sapiens
  siRNA target sequence for KIAA1043 (NM_015281.1,386-404).
ggactagtgctttactatt

SEQ ID NO: 350852 - DNA, 19 bp, Homo sapiens
  siRNA target sequence for KIAA1043 (NM_015281.1,407-425).
ctggctgcaggctatctgt

SEQ ID NO: 350853 - DNA, 19 bp, Homo sapiens
  siRNA target sequence for KIAA1043 (NM_015281.1,409-427).
ggctgcaggctatctgtat

SEQ ID NO: 350854 - DNA, 19 bp, Homo sapiens
  siRNA target sequence for KIAA1043 (NM_015281.1,410-428).
gctgcaggctatctgtata

SEQ ID NO: 350855 - DNA, 19 bp, Homo sapiens
  siRNA target sequence for KIAA1043 (NM_015281.1,413-431).
gcaggctatctgtatagct

SEQ ID NO: 350856 - DNA, 19 bp, Homo sapiens
  siRNA target sequence for KIAA1043 (NM_015281.1,444-462).
ctggggcaggaattgtgaa

SEQ ID NO: 350857 - DNA, 19 bp, Homo sapiens
  siRNA target sequence for KIAA1043 (NM_015281.1,447-465).
gggcaggaattgtgaagtt

SEQ ID NO: 350858 - DNA, 19 bp, Homo sapiens
  siRNA target sequence for KIAA1043 (NM_015281.1,448-466).
ggcaggaattgtgaagttt

SEQ ID NO: 350859 - DNA, 19 bp, Homo sapiens
  siRNA target sequence for KIAA1043 (NM_015281.1,450-468).
caggaattgtgaagtttca

SEQ ID NO: 350860 - DNA, 19 bp, Homo sapiens
  siRNA target sequence for KIAA1043 (NM_015281.1,453-471).
gaattgtgaagtttcatga

SEQ ID NO: 350861 - DNA, 19 bp, Homo sapiens
  siRNA target sequence for KIAA1043 (NM_015281.1,599-617).
gtggagtctcactactcaa

SEQ ID NO: 350862 - DNA, 19 bp, Homo sapiens
  siRNA target sequence for KIAA1043 (NM_015281.1,645-663).
gtgaagcgggagacatcat

SEQ ID NO: 350863 - DNA, 19 bp, Homo sapiens
  siRNA target sequence for KIAA1043 (NM_015281.1,658-676).
catcatggaccagcaattt

SEQ ID NO: 350864 - DNA, 19 bp, Homo sapiens
  siRNA target sequence for KIAA1043 (NM_015281.1,661-679).
catggaccagcaatttgaa

SEQ ID NO: 350865 - DNA, 19 bp, Homo sapiens
  siRNA target sequence for KIAA1043 (NM_015281.1,729-747).
ggatggttcgccgcaataa

SEQ ID NO: 350866 - DNA, 19 bp, Homo sapiens
  siRNA target sequence for KIAA1043 (NM_015281.1,737-755).
cgccgcaataacctgttta

SEQ ID NO: 350867 - DNA, 19 bp, Homo sapiens
  siRNA target sequence for KIAA1043 (NM_015281.1,738-756).
gccgcaataacctgtttaa

SEQ ID NO: 350868 - DNA, 19 bp, Homo sapiens
  siRNA target sequence for KIAA1043 (NM_015281.1,740-758).
cgcaataacctgtttaaca

SEQ ID NO: 350869 - DNA, 19 bp, Homo sapiens
  siRNA target sequence for KIAA1043 (NM_015281.1,861-879).
cgctccgtgccctgtatga

SEQ ID NO: 350870 - DNA, 19 bp, Homo sapiens
  siRNA target sequence for KIAA1043 (NM_015281.1,1002-1020).
gaagctcctccaatgagta

SEQ ID NO: 350871 - DNA, 19 bp, Homo sapiens
  siRNA target sequence for KIAA1043 (NM_015281.1,1075-1093).
gcagtccaagtctcactta

SEQ ID NO: 350872 - DNA, 19 bp, Homo sapiens
  siRNA target sequence for KIAA1043 (NM_015281.1,1673-1691).
gctgcttctaagatgttca

SEQ ID NO: 350873 - DNA, 19 bp, Homo sapiens
  siRNA target sequence for KIAA1043 (NM_015281.1,1964-1982).
cagcgcaatgccatgtaca

SEQ ID NO: 350874 - DNA, 19 bp, Homo sapiens
  siRNA target sequence for KIAA1043 (NM_015281.1,2178-2196).
ccctccaagccctttgcaa

SEQ ID NO: 350875 - DNA, 19 bp, Homo sapiens
  siRNA target sequence for KIAA1043 (NM_015281.1,2238-2256).
gggctgttaaaaatatggt

SEQ ID NO: 350876 - DNA, 19 bp, Homo sapiens
  siRNA target sequence for KIAA1043 (NM_015281.1,2380-2398).
cctggcagctctaggtttt

SEQ ID NO: 350877 - DNA, 19 bp, Homo sapiens
  siRNA target sequence for KIAA1043 (NM_015281.1,2385-2403).
cagctctaggttttgatct

SEQ ID NO: 350878 - DNA, 19 bp, Homo sapiens
  siRNA target sequence for KIAA1043 (NM_015281.1,2440-2458).
cgggaagcaagctaatcga

SEQ ID NO: 350879 - DNA, 19 bp, Homo sapiens
  siRNA target sequence for KIAA1043 (NM_015281.1,3239-3257).
ggccaggtgagcaagagta

SEQ ID NO: 350880 - DNA, 19 bp, Homo sapiens
  siRNA target sequence for KIAA1043 (NM_015281.1,3299-3317).
gtcttcagagcgtcagaaa

SEQ ID NO: 350881 - DNA, 19 bp, Homo sapiens
  siRNA target sequence for KIAA1043 (NM_015281.1,3336-3354).
ctgttctctcccatcagaa

SEQ ID NO: 350882 - DNA, 19 bp, Homo sapiens
  siRNA target sequence for KIAA1043 (NM_015281.1,3448-3466).
ctcagagatgtccatcaaa

SEQ ID NO: 350883 - DNA, 19 bp, Homo sapiens
  siRNA target sequence for KIAA1043 (NM_015281.1,3452-3470).
gagatgtccatcaaagaca

SEQ ID NO: 350884 - DNA, 19 bp, Homo sapiens
  siRNA target sequence for KIAA1043 (NM_015281.1,3566-3584).
ccttacagcgctcacattt

SEQ ID NO: 350885 - DNA, 19 bp, Homo sapiens
  siRNA target sequence for KIAA1043 (NM_015281.1,3574-3592).
cgctcacatttccaaatca

SEQ ID NO: 350886 - DNA, 19 bp, Homo sapiens
  siRNA target sequence for KIAA1043 (NM_015281.1,3696-3714).
cagacgctcccgacataga

SEQ ID NO: 350887 - DNA, 19 bp, Homo sapiens
  siRNA target sequence for KIAA1043 (NM_015281.1,3698-3716).
gacgctcccgacatagaca

SEQ ID NO: 350888 - DNA, 19 bp, Homo sapiens
  siRNA target sequence for KIAA1043 (NM_015281.1,3700-3718).
cgctcccgacatagacaaa

SEQ ID NO: 350889 - DNA, 19 bp, Homo sapiens
  siRNA target sequence for KIAA1043 (NM_015281.1,3702-3720).
ctcccgacatagacaaact

SEQ ID NO: 350890 - DNA, 19 bp, Homo sapiens
  siRNA target sequence for KIAA1043 (NM_015281.1,3704-3722).
cccgacatagacaaactga

SEQ ID NO: 350891 - DNA, 19 bp, Homo sapiens
  siRNA target sequence for KIAA1043 (NM_015281.1,3705-3723).
ccgacatagacaaactgaa

SEQ ID NO: 350892 - DNA, 19 bp, Homo sapiens
  siRNA target sequence for KIAA1043 (NM_015281.1,3753-3771).
ctgtccataacctgaagat

SEQ ID NO: 350893 - DNA, 19 bp, Homo sapiens
  siRNA target sequence for KIAA1043 (NM_015281.1,3801-3819).
cagggccaatgaagatctt

SEQ ID NO: 350894 - DNA, 19 bp, Homo sapiens
  siRNA target sequence for KIAA1043 (NM_015281.1,3827-3845).
gctcctggcacgatgactt

SEQ ID NO: 350895 - DNA, 19 bp, Homo sapiens
  siRNA target sequence for KIAA1043 (NM_015281.1,3833-3851).
ggcacgatgacttccaaaa

SEQ ID NO: 350896 - DNA, 19 bp, Homo sapiens
  siRNA target sequence for KIAA1043 (NM_015281.1,3857-3875).
gtcctcagtctgttgaatt

SEQ ID NO: 350897 - DNA, 19 bp, Homo sapiens
  siRNA target sequence for KIAA1043 (NM_015281.1,3906-3924).
gagtggataagcttgaact

SEQ ID NO: 350898 - DNA, 19 bp, Homo sapiens
  siRNA target sequence for CLASP1 (NM_015282.1,460-478).
ggccaagaactgatagact

SEQ ID NO: 350899 - DNA, 19 bp, Homo sapiens
  siRNA target sequence for CLASP1 (NM_015282.1,461-479).
gccaagaactgatagacta

SEQ ID NO: 350900 - DNA, 19 bp, Homo sapiens
  siRNA target sequence for CLASP1 (NM_015282.1,463-481).
caagaactgatagactatt

SEQ ID NO: 350901 - DNA, 19 bp, Homo sapiens
  siRNA target sequence for CLASP1 (NM_015282.1,524-542).
ccatgttagataaacttgt

SEQ ID NO: 350902 - DNA, 19 bp, Homo sapiens
  siRNA target sequence for CLASP1 (NM_015282.1,563-581).
gggtgaactctagcaatta

SEQ ID NO: 350903 - DNA, 19 bp, Homo sapiens
  siRNA target sequence for CLASP1 (NM_015282.1,565-583).
gtgaactctagcaattaca

SEQ ID NO: 350904 - DNA, 19 bp, Homo sapiens
  siRNA target sequence for CLASP1 (NM_015282.1,660-678).
cacagtgctgccaagtcta

SEQ ID NO: 350905 - DNA, 19 bp, Homo sapiens
  siRNA target sequence for CLASP1 (NM_015282.1,684-702).
cagactaggagatgctaaa

SEQ ID NO: 350906 - DNA, 19 bp, Homo sapiens
  siRNA target sequence for CLASP1 (NM_015282.1,686-704).
gactaggagatgctaaaga

SEQ ID NO: 350907 - DNA, 19 bp, Homo sapiens
  siRNA target sequence for CLASP1 (NM_015282.1,688-706).
ctaggagatgctaaagact

SEQ ID NO: 350908 - DNA, 19 bp, Homo sapiens
  siRNA target sequence for CLASP1 (NM_015282.1,713-731).
gggagcaggaccaaactct

SEQ ID NO: 350909 - DNA, 19 bp, Homo sapiens
  siRNA target sequence for CLASP1 (NM_015282.1,757-775).
gctaatccccagtacgtat

SEQ ID NO: 350910 - DNA, 19 bp, Homo sapiens
  siRNA target sequence for CLASP1 (NM_015282.1,771-789).
cgtatgggacagaatgctt

SEQ ID NO: 350911 - DNA, 19 bp, Homo sapiens
  siRNA target sequence for CLASP1 (NM_015282.1,840-858).
ccttatagcaacactcaat

SEQ ID NO: 350912 - DNA, 19 bp, Homo sapiens
  siRNA target sequence for CLASP1 (NM_015282.1,866-884).
gagcacagactttaacact

SEQ ID NO: 350913 - DNA, 19 bp, Homo sapiens
  siRNA target sequence for CLASP1 (NM_015282.1,868-886).
gcacagactttaacactaa

SEQ ID NO: 350914 - DNA, 19 bp, Homo sapiens
  siRNA target sequence for CLASP1 (NM_015282.1,887-905).
gcaagattgtgccacatat

SEQ ID NO: 350915 - DNA, 19 bp, Homo sapiens
  siRNA target sequence for CLASP1 (NM_015282.1,899-917).
cacatatatgcaacttact

SEQ ID NO: 350916 - DNA, 19 bp, Homo sapiens
  siRNA target sequence for CLASP1 (NM_015282.1,937-955).
gttcgagatgcagcaataa

SEQ ID NO: 350917 - DNA, 19 bp, Homo sapiens
  siRNA target sequence for CLASP1 (NM_015282.1,966-984).
ggaaatttacagacatgta

SEQ ID NO: 350918 - DNA, 19 bp, Homo sapiens
  siRNA target sequence for CLASP1 (NM_015282.1,998-1016).
gggcagatctcagtaaaaa

SEQ ID NO: 350919 - DNA, 19 bp, Homo sapiens
  siRNA target sequence for CLASP1 (NM_015282.1,1003-1021).
gatctcagtaaaaaaggat

SEQ ID NO: 350920 - DNA, 19 bp, Homo sapiens
  siRNA target sequence for CLASP1 (NM_015282.1,1023-1041).
gccacagtcccggttgaat

SEQ ID NO: 350921 - DNA, 19 bp, Homo sapiens
  siRNA target sequence for CLASP1 (NM_015282.1,1025-1043).
cacagtcccggttgaatgt

SEQ ID NO: 350922 - DNA, 19 bp, Homo sapiens
  siRNA target sequence for CLASP1 (NM_015282.1,1027-1045).
cagtcccggttgaatgtaa

SEQ ID NO: 350923 - DNA, 19 bp, Homo sapiens
  siRNA target sequence for CLASP1 (NM_015282.1,1029-1047).
gtcccggttgaatgtaatt

SEQ ID NO: 350924 - DNA, 19 bp, Homo sapiens
  siRNA target sequence for CLASP1 (NM_015282.1,1032-1050).
ccggttgaatgtaattttt

SEQ ID NO: 350925 - DNA, 19 bp, Homo sapiens
  siRNA target sequence for CLASP1 (NM_015282.1,1033-1051).
cggttgaatgtaattttta

SEQ ID NO: 350926 - DNA, 19 bp, Homo sapiens
  siRNA target sequence for CLASP1 (NM_015282.1,1086-1104).
gatacaatctgcaaatgat

SEQ ID NO: 350927 - DNA, 19 bp, Homo sapiens
  siRNA target sequence for CLASP1 (NM_015282.1,1170-1188).
caaggctccaccaagttct

SEQ ID NO: 350928 - DNA, 19 bp, Homo sapiens
  siRNA target sequence for CLASP1 (NM_015282.1,1187-1205).
ctcggagaaacgttggaat

SEQ ID NO: 350929 - DNA, 19 bp, Homo sapiens
  siRNA target sequence for CLASP1 (NM_015282.1,1315-1333).
gtacctgtagtacagattt

SEQ ID NO: 350930 - DNA, 19 bp, Homo sapiens
  siRNA target sequence for CLASP1 (NM_015282.1,1345-1363).
gaccttgaggaatccataa

SEQ ID NO: 350931 - DNA, 19 bp, Homo sapiens
  siRNA target sequence for CLASP1 (NM_015282.1,1348-1366).
cttgaggaatccataaaca

SEQ ID NO: 350932 - DNA, 19 bp, Homo sapiens
  siRNA target sequence for CLASP1 (NM_015282.1,1404-1422).
ggagcagagagtaaatgct

SEQ ID NO: 350933 - DNA, 19 bp, Homo sapiens
  siRNA target sequence for CLASP1 (NM_015282.1,1410-1428).
gagagtaaatgctctaaaa

SEQ ID NO: 350934 - DNA, 19 bp, Homo sapiens
  siRNA target sequence for CLASP1 (NM_015282.1,1420-1438).
gctctaaaaaagattagat

SEQ ID NO: 350935 - DNA, 19 bp, Homo sapiens
  siRNA target sequence for CLASP1 (NM_015282.1,1454-1472).
gtgctgctgagtatgataa

SEQ ID NO: 350936 - DNA, 19 bp, Homo sapiens
  siRNA target sequence for CLASP1 (NM_015282.1,1456-1474).
gctgctgagtatgataact

SEQ ID NO: 350937 - DNA, 19 bp, Homo sapiens
  siRNA target sequence for CLASP1 (NM_015282.1,1457-1475).
ctgctgagtatgataactt

SEQ ID NO: 350938 - DNA, 19 bp, Homo sapiens
  siRNA target sequence for CLASP1 (NM_015282.1,1459-1477).
gctgagtatgataacttct

SEQ ID NO: 350939 - DNA, 19 bp, Homo sapiens
  siRNA target sequence for CLASP1 (NM_015282.1,1460-1478).
ctgagtatgataacttctt

SEQ ID NO: 350940 - DNA, 19 bp, Homo sapiens
  siRNA target sequence for CLASP1 (NM_015282.1,1498-1516).
gatggagcctttaaactct

SEQ ID NO: 350941 - DNA, 19 bp, Homo sapiens
  siRNA target sequence for CLASP1 (NM_015282.1,1543-1561).
gtgcgggaggcttgtatca

SEQ ID NO: 350942 - DNA, 19 bp, Homo sapiens
  siRNA target sequence for CLASP1 (NM_015282.1,1580-1598).
cagttctggggaataagtt

SEQ ID NO: 350943 - DNA, 19 bp, Homo sapiens
  siRNA target sequence for CLASP1 (NM_015282.1,1615-1633).
gccattatgccaactatct

SEQ ID NO: 350944 - DNA, 19 bp, Homo sapiens
  siRNA target sequence for CLASP1 (NM_015282.1,1624-1642).
ccaactatctttaatttaa

SEQ ID NO: 350945 - DNA, 19 bp, Homo sapiens
  siRNA target sequence for CLASP1 (NM_015282.1,1665-1683).
ggccacatctggtgttgta

SEQ ID NO: 350946 - DNA, 19 bp, Homo sapiens
  siRNA target sequence for CLASP1 (NM_015282.1,1709-1727).
cacacatccctaggttaat

SEQ ID NO: 350947 - DNA, 19 bp, Homo sapiens
  siRNA target sequence for CLASP1 (NM_015282.1,1713-1731).
catccctaggttaatacct

SEQ ID NO: 350948 - DNA, 19 bp, Homo sapiens
  siRNA target sequence for CLASP1 (NM_015282.1,1722-1740).
gttaatacctgtcataaca

SEQ ID NO: 350949 - DNA, 19 bp, Homo sapiens
  siRNA target sequence for CLASP1 (NM_015282.1,1732-1750).
gtcataacaagcaactgta

SEQ ID NO: 350950 - DNA, 19 bp, Homo sapiens
  siRNA target sequence for CLASP1 (NM_015282.1,1775-1793).
ggcgctgttttgaattttt

SEQ ID NO: 350951 - DNA, 19 bp, Homo sapiens
  siRNA target sequence for CLASP1 (NM_015282.1,1815-1833).
gcagacacattcactagaa

SEQ ID NO: 350952 - DNA, 19 bp, Homo sapiens
  siRNA target sequence for CLASP1 (NM_015282.1,1844-1862).
cagtattagctgaaacaat

SEQ ID NO: 350953 - DNA, 19 bp, Homo sapiens
  siRNA target sequence for CLASP1 (NM_015282.1,1883-1901).
ctgattccgaagcaagaat

SEQ ID NO: 350954 - DNA, 19 bp, Homo sapiens
  siRNA target sequence for CLASP1 (NM_015282.1,2063-2081).
gctctcaagagagtctaaa

SEQ ID NO: 350955 - DNA, 19 bp, Homo sapiens
  siRNA target sequence for CLASP1 (NM_015282.1,2064-2082).
ctctcaagagagtctaaat

SEQ ID NO: 350956 - DNA, 19 bp, Homo sapiens
  siRNA target sequence for CLASP1 (NM_015282.1,2175-2193).
ccagcgatctcgaagtgat

SEQ ID NO: 350957 - DNA, 19 bp, Homo sapiens
  siRNA target sequence for CLASP1 (NM_015282.1,2176-2194).
cagcgatctcgaagtgata

SEQ ID NO: 350958 - DNA, 19 bp, Homo sapiens
  siRNA target sequence for CLASP1 (NM_015282.1,2178-2196).
gcgatctcgaagtgatatt

SEQ ID NO: 350959 - DNA, 19 bp, Homo sapiens
  siRNA target sequence for CLASP1 (NM_015282.1,2180-2198).
gatctcgaagtgatattga

SEQ ID NO: 350960 - DNA, 19 bp, Homo sapiens
  siRNA target sequence for CLASP1 (NM_015282.1,2381-2399).
gcgctaaagtggtttcaca

SEQ ID NO: 350961 - DNA, 19 bp, Homo sapiens
  siRNA target sequence for CLASP1 (NM_015282.1,2406-2424).
gcgatccagatctgctaat

SEQ ID NO: 350962 - DNA, 19 bp, Homo sapiens
  siRNA target sequence for CLASP1 (NM_015282.1,2434-2452).
gctggcagccggtcaagtt

SEQ ID NO: 350963 - DNA, 19 bp, Homo sapiens
  siRNA target sequence for CLASP1 (NM_015282.1,2518-2536).
gtgacaccgtcttcagaaa

SEQ ID NO: 350964 - DNA, 19 bp, Homo sapiens
  siRNA target sequence for CLASP1 (NM_015282.1,2563-2581).
ggatgtagccgggaaacaa

SEQ ID NO: 350965 - DNA, 19 bp, Homo sapiens
  siRNA target sequence for CLASP1 (NM_015282.1,2582-2600).
gtccaaaccgaataggatt

SEQ ID NO: 350966 - DNA, 19 bp, Homo sapiens
  siRNA target sequence for CLASP1 (NM_015282.1,2774-2792).
gcacaagtacagatcttga

SEQ ID NO: 350967 - DNA, 19 bp, Homo sapiens
  siRNA target sequence for CLASP1 (NM_015282.1,2839-2857).
gagccgtatgggatgtatt

SEQ ID NO: 350968 - DNA, 19 bp, Homo sapiens
  siRNA target sequence for CLASP1 (NM_015282.1,2841-2859).
gccgtatgggatgtattct

SEQ ID NO: 350969 - DNA, 19 bp, Homo sapiens
  siRNA target sequence for CLASP1 (NM_015282.1,2843-2861).
cgtatgggatgtattctga

SEQ ID NO: 350970 - DNA, 19 bp, Homo sapiens
  siRNA target sequence for CLASP1 (NM_015282.1,2924-2942).
gtggcattccccattatct

SEQ ID NO: 350971 - DNA, 19 bp, Homo sapiens
  siRNA target sequence for CLASP1 (NM_015282.1,2973-2991).
caaccactgtgctagttca

SEQ ID NO: 350972 - DNA, 19 bp, Homo sapiens
  siRNA target sequence for CLASP1 (NM_015282.1,2977-2995).
cactgtgctagttcaaact

SEQ ID NO: 350973 - DNA, 19 bp, Homo sapiens
  siRNA target sequence for CLASP1 (NM_015282.1,3022-3040).
ggcctgcagaacttactga

SEQ ID NO: 350974 - DNA, 19 bp, Homo sapiens
  siRNA target sequence for CLASP1 (NM_015282.1,3205-3223).
cttctcacacaattactta

SEQ ID NO: 350975 - DNA, 19 bp, Homo sapiens
  siRNA target sequence for CLASP1 (NM_015282.1,3287-3305).
caagggactcctttccatt

SEQ ID NO: 350976 - DNA, 19 bp, Homo sapiens
  siRNA target sequence for CLASP1 (NM_015282.1,3301-3319).
ccatttgatcaacaattta

SEQ ID NO: 350977 - DNA, 19 bp, Homo sapiens
  siRNA target sequence for CLASP1 (NM_015282.1,3417-3435).
ggatccaacagattttgta

SEQ ID NO: 350978 - DNA, 19 bp, Homo sapiens
  siRNA target sequence for CLASP1 (NM_015282.1,3418-3436).
gatccaacagattttgtaa

SEQ ID NO: 350979 - DNA, 19 bp, Homo sapiens
  siRNA target sequence for CLASP1 (NM_015282.1,3447-3465).
gacaaggcttgctgtttct

SEQ ID NO: 350980 - DNA, 19 bp, Homo sapiens
  siRNA target sequence for CLASP1 (NM_015282.1,3515-3533).
cagcacagattgtgctaat

SEQ ID NO: 350981 - DNA, 19 bp, Homo sapiens
  siRNA target sequence for CLASP1 (NM_015282.1,3517-3535).
gcacagattgtgctaatct

SEQ ID NO: 350982 - DNA, 19 bp, Homo sapiens
  siRNA target sequence for CLASP1 (NM_015282.1,3621-3639).
gcacaaccacctcaagaat

SEQ ID NO: 350983 - DNA, 19 bp, Homo sapiens
  siRNA target sequence for CLASP1 (NM_015282.1,3655-3673).
gtgggctctccaagcaata

SEQ ID NO: 350984 - DNA, 19 bp, Homo sapiens
  siRNA target sequence for CLASP1 (NM_015282.1,3658-3676).
ggctctccaagcaatacga

SEQ ID NO: 350985 - DNA, 19 bp, Homo sapiens
  siRNA target sequence for CLASP1 (NM_015282.1,3659-3677).
gctctccaagcaatacgat

SEQ ID NO: 350986 - DNA, 19 bp, Homo sapiens
  siRNA target sequence for CLASP1 (NM_015282.1,3660-3678).
ctctccaagcaatacgatt

SEQ ID NO: 350987 - DNA, 19 bp, Homo sapiens
  siRNA target sequence for CLASP1 (NM_015282.1,3856-3874).
gctctcaggcgctcttact

SEQ ID NO: 350988 - DNA, 19 bp, Homo sapiens
  siRNA target sequence for CLASP1 (NM_015282.1,3958-3976).
gaaaagtttagttttcgaa

SEQ ID NO: 350989 - DNA, 19 bp, Homo sapiens
  siRNA target sequence for CLASP1 (NM_015282.1,3990-4008).
gaatgagccaattaaacga

SEQ ID NO: 350990 - DNA, 19 bp, Homo sapiens
  siRNA target sequence for CLASP1 (NM_015282.1,4100-4118).
gccggacagctctggataa

SEQ ID NO: 350991 - DNA, 19 bp, Homo sapiens
  siRNA target sequence for CLASP1 (NM_015282.1,4456-4474).
ggagacaaagaccattcaa

SEQ ID NO: 350992 - DNA, 19 bp, Homo sapiens
  siRNA target sequence for CLASP1 (NM_015282.1,4478-4496).
gagcactggcgttaagagt

SEQ ID NO: 350993 - DNA, 19 bp, Homo sapiens
  siRNA target sequence for CLASP1 (NM_015282.1,4480-4498).
gcactggcgttaagagttt

SEQ ID NO: 350994 - DNA, 19 bp, Homo sapiens
  siRNA target sequence for CLASP1 (NM_015282.1,4481-4499).
cactggcgttaagagtttt

SEQ ID NO: 350995 - DNA, 19 bp, Homo sapiens
  siRNA target sequence for CLASP1 (NM_015282.1,4543-4561).
gccgagctgacgattatga

SEQ ID NO: 350996 - DNA, 19 bp, Homo sapiens
  siRNA target sequence for CLASP1 (NM_015282.1,4544-4562).
ccgagctgacgattatgaa

SEQ ID NO: 350997 - DNA, 19 bp, Homo sapiens
  siRNA target sequence for CLASP1 (NM_015282.1,4546-4564).
gagctgacgattatgaaga

SEQ ID NO: 350998 - DNA, 19 bp, Homo sapiens
  siRNA target sequence for CLASP1 (NM_015282.1,4831-4849).
cgtaaggccagcgtgtttt

SEQ ID NO: 350999 - DNA, 19 bp, Homo sapiens
  siRNA target sequence for CLASP1 (NM_015282.1,4836-4854).
ggccagcgtgttttgctta

SEQ ID NO: 351000 - DNA, 19 bp, Homo sapiens
  siRNA target sequence for CLASP1 (NM_015282.1,4916-4934).
gcaagatgaagctactaaa

SEQ ID NO: 351001 - DNA, 19 bp, Homo sapiens
  siRNA target sequence for CLASP1 (NM_015282.1,4926-4944).
gctactaaacttatacata

SEQ ID NO: 351002 - DNA, 19 bp, Homo sapiens
  siRNA target sequence for CLASP1 (NM_015282.1,4927-4945).
ctactaaacttatacataa

SEQ ID NO: 351003 - DNA, 19 bp, Homo sapiens
  siRNA target sequence for WDR7 (NM_015285.1,43-61).
cgaaaagcgcccacacatt

SEQ ID NO: 351004 - DNA, 19 bp, Homo sapiens
  siRNA target sequence for WDR7 (NM_015285.1,62-80).
gcatctcagccgtactttt

SEQ ID NO: 351005 - DNA, 19 bp, Homo sapiens
  siRNA target sequence for WDR7 (NM_015285.1,63-81).
catctcagccgtactttta

SEQ ID NO: 351006 - DNA, 19 bp, Homo sapiens
  siRNA target sequence for WDR7 (NM_015285.1,66-84).
ctcagccgtacttttaaca

SEQ ID NO: 351007 - DNA, 19 bp, Homo sapiens
  siRNA target sequence for WDR7 (NM_015285.1,68-86).
cagccgtacttttaacaga

SEQ ID NO: 351008 - DNA, 19 bp, Homo sapiens
  siRNA target sequence for WDR7 (NM_015285.1,110-128).
gatgtcacgacggacaaat

SEQ ID NO: 351009 - DNA, 19 bp, Homo sapiens
  siRNA target sequence for WDR7 (NM_015285.1,137-155).
gggatctttcagtagaact

SEQ ID NO: 351010 - DNA, 19 bp, Homo sapiens
  siRNA target sequence for WDR7 (NM_015285.1,184-202).
ggtcatacagcatcaatca

SEQ ID NO: 351011 - DNA, 19 bp, Homo sapiens
  siRNA target sequence for WDR7 (NM_015285.1,187-205).
catacagcatcaatcactt

SEQ ID NO: 351012 - DNA, 19 bp, Homo sapiens
  siRNA target sequence for WDR7 (NM_015285.1,292-310).
gatggcagatgtattgaat

SEQ ID NO: 351013 - DNA, 19 bp, Homo sapiens
  siRNA target sequence for WDR7 (NM_015285.1,297-315).
cagatgtattgaatttaca

SEQ ID NO: 351014 - DNA, 19 bp, Homo sapiens
  siRNA target sequence for WDR7 (NM_015285.1,299-317).
gatgtattgaatttacaaa

SEQ ID NO: 351015 - DNA, 19 bp, Homo sapiens
  siRNA target sequence for WDR7 (NM_015285.1,427-445).
gctaccagccttgaagtat

SEQ ID NO: 351016 - DNA, 19 bp, Homo sapiens
  siRNA target sequence for WDR7 (NM_015285.1,428-446).
ctaccagccttgaagtatt

SEQ ID NO: 351017 - DNA, 19 bp, Homo sapiens
  siRNA target sequence for WDR7 (NM_015285.1,442-460).
gtattatactccttagtat

SEQ ID NO: 351018 - DNA, 19 bp, Homo sapiens
  siRNA target sequence for WDR7 (NM_015285.1,479-497).
ggattagctccatgagtat

SEQ ID NO: 351019 - DNA, 19 bp, Homo sapiens
  siRNA target sequence for WDR7 (NM_015285.1,480-498).
gattagctccatgagtatt

SEQ ID NO: 351020 - DNA, 19 bp, Homo sapiens
  siRNA target sequence for WDR7 (NM_015285.1,486-504).
ctccatgagtattattcga

SEQ ID NO: 351021 - DNA, 19 bp, Homo sapiens
  siRNA target sequence for WDR7 (NM_015285.1,555-573).
cctgaaggtctggattgtt

SEQ ID NO: 351022 - DNA, 19 bp, Homo sapiens
  siRNA target sequence for WDR7 (NM_015285.1,556-574).
ctgaaggtctggattgtta

SEQ ID NO: 351023 - DNA, 19 bp, Homo sapiens
  siRNA target sequence for WDR7 (NM_015285.1,567-585).
gattgttacctcggaaata

SEQ ID NO: 351024 - DNA, 19 bp, Homo sapiens
  siRNA target sequence for WDR7 (NM_015285.1,587-605).
gtgacatgcaggatactga

SEQ ID NO: 351025 - DNA, 19 bp, Homo sapiens
  siRNA target sequence for WDR7 (NM_015285.1,595-613).
caggatactgagccaatat

SEQ ID NO: 351026 - DNA, 19 bp, Homo sapiens
  siRNA target sequence for WDR7 (NM_015285.1,621-639).
ggaatccaaaccaatttat

SEQ ID NO: 351027 - DNA, 19 bp, Homo sapiens
  siRNA target sequence for WDR7 (NM_015285.1,622-640).
gaatccaaaccaatttatt

SEQ ID NO: 351028 - DNA, 19 bp, Homo sapiens
  siRNA target sequence for WDR7 (NM_015285.1,626-644).
ccaaaccaatttattgtca

SEQ ID NO: 351029 - DNA, 19 bp, Homo sapiens
  siRNA target sequence for WDR7 (NM_015285.1,662-680).
ctttttgtgcatttacaca

SEQ ID NO: 351030 - DNA, 19 bp, Homo sapiens
  siRNA target sequence for WDR7 (NM_015285.1,720-738).
gttcgatgccggagactat

SEQ ID NO: 351031 - DNA, 19 bp, Homo sapiens
  siRNA target sequence for WDR7 (NM_015285.1,724-742).
gatgccggagactattcct

SEQ ID NO: 351032 - DNA, 19 bp, Homo sapiens
  siRNA target sequence for WDR7 (NM_015285.1,730-748).
ggagactattccttgttgt

SEQ ID NO: 351033 - DNA, 19 bp, Homo sapiens
  siRNA target sequence for WDR7 (NM_015285.1,733-751).
gactattccttgttgtgtt

SEQ ID NO: 351034 - DNA, 19 bp, Homo sapiens
  siRNA target sequence for WDR7 (NM_015285.1,790-808).
gactttgtctcatcagata

SEQ ID NO: 351035 - DNA, 19 bp, Homo sapiens
  siRNA target sequence for WDR7 (NM_015285.1,811-829).
gtcatcatttggacagaaa

SEQ ID NO: 351036 - DNA, 19 bp, Homo sapiens
  siRNA target sequence for WDR7 (NM_015285.1,868-886).
cttccagctagtgattcat

SEQ ID NO: 351037 - DNA, 19 bp, Homo sapiens
  siRNA target sequence for WDR7 (NM_015285.1,901-919).
gggaaggcagttgaaaatt

SEQ ID NO: 351038 - DNA, 19 bp, Homo sapiens
  siRNA target sequence for WDR7 (NM_015285.1,942-960).
cctcttggatcgaaaagat

SEQ ID NO: 351039 - DNA, 19 bp, Homo sapiens
  siRNA target sequence for WDR7 (NM_015285.1,949-967).
gatcgaaaagataaagagt

SEQ ID NO: 351040 - DNA, 19 bp, Homo sapiens
  siRNA target sequence for WDR7 (NM_015285.1,958-976).
gataaagagttgctaattt

SEQ ID NO: 351041 - DNA, 19 bp, Homo sapiens
  siRNA target sequence for WDR7 (NM_015285.1,983-1001).
ctgttactcggttcttcta

SEQ ID NO: 351042 - DNA, 19 bp, Homo sapiens
  siRNA target sequence for WDR7 (NM_015285.1,1029-1047).
gttaattcagggtgattct

SEQ ID NO: 351043 - DNA, 19 bp, Homo sapiens
  siRNA target sequence for WDR7 (NM_015285.1,1046-1064).
cttctggaaggttgaatat

SEQ ID NO: 351044 - DNA, 19 bp, Homo sapiens
  siRNA target sequence for WDR7 (NM_015285.1,1051-1069).
ggaaggttgaatatttgga

SEQ ID NO: 351045 - DNA, 19 bp, Homo sapiens
  siRNA target sequence for WDR7 (NM_015285.1,1105-1123).
gaagggctggcaatgacaa

SEQ ID NO: 351046 - DNA, 19 bp, Homo sapiens
  siRNA target sequence for WDR7 (NM_015285.1,1108-1126).
gggctggcaatgacaactt

SEQ ID NO: 351047 - DNA, 19 bp, Homo sapiens
  siRNA target sequence for WDR7 (NM_015285.1,1166-1184).
gtcctgctggaattataga

SEQ ID NO: 351048 - DNA, 19 bp, Homo sapiens
  siRNA target sequence for WDR7 (NM_015285.1,1169-1187).
ctgctggaattatagatca

SEQ ID NO: 351049 - DNA, 19 bp, Homo sapiens
  siRNA target sequence for WDR7 (NM_015285.1,1191-1209).
gagtgtgattcccaatagt

SEQ ID NO: 351050 - DNA, 19 bp, Homo sapiens
  siRNA target sequence for WDR7 (NM_015285.1,1193-1211).
gtgtgattcccaatagtaa

SEQ ID NO: 351051 - DNA, 19 bp, Homo sapiens
  siRNA target sequence for WDR7 (NM_015285.1,1208-1226).
gtaatgaacctcttaaagt

SEQ ID NO: 351052 - DNA, 19 bp, Homo sapiens
  siRNA target sequence for WDR7 (NM_015285.1,1305-1323).
cacacagacggccatagta

SEQ ID NO: 351053 - DNA, 19 bp, Homo sapiens
  siRNA target sequence for WDR7 (NM_015285.1,1307-1325).
cacagacggccatagtaca

SEQ ID NO: 351054 - DNA, 19 bp, Homo sapiens
  siRNA target sequence for WDR7 (NM_015285.1,1380-1398).
ccgtggtcatcggaacaaa

SEQ ID NO: 351055 - DNA, 19 bp, Homo sapiens
  siRNA target sequence for WDR7 (NM_015285.1,1382-1400).
gtggtcatcggaacaaagt

SEQ ID NO: 351056 - DNA, 19 bp, Homo sapiens
  siRNA target sequence for WDR7 (NM_015285.1,1384-1402).
ggtcatcggaacaaagtca

SEQ ID NO: 351057 - DNA, 19 bp, Homo sapiens
  siRNA target sequence for WDR7 (NM_015285.1,1390-1408).
cggaacaaagtcacatgtt

SEQ ID NO: 351058 - DNA, 19 bp, Homo sapiens
  siRNA target sequence for WDR7 (NM_015285.1,1401-1419).
cacatgtttgctatatcct

SEQ ID NO: 351059 - DNA, 19 bp, Homo sapiens
  siRNA target sequence for WDR7 (NM_015285.1,1425-1443).
ggtctcagctcggtatgat

SEQ ID NO: 351060 - DNA, 19 bp, Homo sapiens
  siRNA target sequence for WDR7 (NM_015285.1,1428-1446).
ctcagctcggtatgatcaa

SEQ ID NO: 351061 - DNA, 19 bp, Homo sapiens
  siRNA target sequence for WDR7 (NM_015285.1,1432-1450).
gctcggtatgatcaaagat

SEQ ID NO: 351062 - DNA, 19 bp, Homo sapiens
  siRNA target sequence for WDR7 (NM_015285.1,1433-1451).
ctcggtatgatcaaagata

SEQ ID NO: 351063 - DNA, 19 bp, Homo sapiens
  siRNA target sequence for WDR7 (NM_015285.1,1468-1486).
gtggatttttcagtcataa

SEQ ID NO: 351064 - DNA, 19 bp, Homo sapiens
  siRNA target sequence for WDR7 (NM_015285.1,1528-1546).
gttcatggtggtgagatta

SEQ ID NO: 351065 - DNA, 19 bp, Homo sapiens
  siRNA target sequence for WDR7 (NM_015285.1,1538-1556).
gtgagattactcaacttct

SEQ ID NO: 351066 - DNA, 19 bp, Homo sapiens
  siRNA target sequence for WDR7 (NM_015285.1,1617-1635).
ccactcagtaggacttcta

SEQ ID NO: 351067 - DNA, 19 bp, Homo sapiens
  siRNA target sequence for WDR7 (NM_015285.1,1618-1636).
cactcagtaggacttctaa

SEQ ID NO: 351068 - DNA, 19 bp, Homo sapiens
  siRNA target sequence for WDR7 (NM_015285.1,1622-1640).
cagtaggacttctaagttt

SEQ ID NO: 351069 - DNA, 19 bp, Homo sapiens
  siRNA target sequence for WDR7 (NM_015285.1,1641-1659).
gcgagagaaaaaatgcata

SEQ ID NO: 351070 - DNA, 19 bp, Homo sapiens
  siRNA target sequence for WDR7 (NM_015285.1,1642-1660).
cgagagaaaaaatgcataa

SEQ ID NO: 351071 - DNA, 19 bp, Homo sapiens
  siRNA target sequence for WDR7 (NM_015285.1,1665-1683).
ggcatctcgtcaccttttt

SEQ ID NO: 351072 - DNA, 19 bp, Homo sapiens
  siRNA target sequence for WDR7 (NM_015285.1,1684-1702).
cctattcaagtaatcaaat

SEQ ID NO: 351073 - DNA, 19 bp, Homo sapiens
  siRNA target sequence for WDR7 (NM_015285.1,1725-1743).
ggtggtggggtgttcagat

SEQ ID NO: 351074 - DNA, 19 bp, Homo sapiens
  siRNA target sequence for WDR7 (NM_015285.1,1752-1770).
gtacgtctggcaaatggat

SEQ ID NO: 351075 - DNA, 19 bp, Homo sapiens
  siRNA target sequence for WDR7 (NM_015285.1,1815-1833).
gattctaaacgcttgtgat

SEQ ID NO: 351076 - DNA, 19 bp, Homo sapiens
  siRNA target sequence for WDR7 (NM_015285.1,1867-1885).
catccagcagtcaacctaa

SEQ ID NO: 351077 - DNA, 19 bp, Homo sapiens
  siRNA target sequence for WDR7 (NM_015285.1,1871-1889).
cagcagtcaacctaaaaca

SEQ ID NO: 351078 - DNA, 19 bp, Homo sapiens
  siRNA target sequence for WDR7 (NM_015285.1,1930-1948).
gcccatcataagctacaaa

SEQ ID NO: 351079 - DNA, 19 bp, Homo sapiens
  siRNA target sequence for WDR7 (NM_015285.1,1984-2002).
gacaagggaaatttaccta

SEQ ID NO: 351080 - DNA, 19 bp, Homo sapiens
  siRNA target sequence for WDR7 (NM_015285.1,2020-2038).
ctgatggttcaagcaataa

SEQ ID NO: 351081 - DNA, 19 bp, Homo sapiens
  siRNA target sequence for WDR7 (NM_015285.1,2057-2075).
cggacatacatgtgctatt

SEQ ID NO: 351082 - DNA, 19 bp, Homo sapiens
  siRNA target sequence for WDR7 (NM_015285.1,2085-2103).
ggaagcgttgattattcaa

SEQ ID NO: 351083 - DNA, 19 bp, Homo sapiens
  siRNA target sequence for WDR7 (NM_015285.1,2126-2144).
ggccgaatactgctcttat

SEQ ID NO: 351084 - DNA, 19 bp, Homo sapiens
  siRNA target sequence for WDR7 (NM_015285.1,2128-2146).
ccgaatactgctcttattt

SEQ ID NO: 351085 - DNA, 19 bp, Homo sapiens
  siRNA target sequence for WDR7 (NM_015285.1,2182-2200).
gacaaagggggctcttttt

SEQ ID NO: 351086 - DNA, 19 bp, Homo sapiens
  siRNA target sequence for WDR7 (NM_015285.1,2335-2353).
gaatatcggtccagcaaat

SEQ ID NO: 351087 - DNA, 19 bp, Homo sapiens
  siRNA target sequence for WDR7 (NM_015285.1,2358-2376).
gccattgaccctattagaa

SEQ ID NO: 351088 - DNA, 19 bp, Homo sapiens
  siRNA target sequence for WDR7 (NM_015285.1,2359-2377).
ccattgaccctattagaat

SEQ ID NO: 351089 - DNA, 19 bp, Homo sapiens
  siRNA target sequence for WDR7 (NM_015285.1,2360-2378).
cattgaccctattagaata

SEQ ID NO: 351090 - DNA, 19 bp, Homo sapiens
  siRNA target sequence for WDR7 (NM_015285.1,2459-2477).
gcctggatcgccttggaat

SEQ ID NO: 351091 - DNA, 19 bp, Homo sapiens
  siRNA target sequence for WDR7 (NM_015285.1,2486-2504).
cccactgcaccgtatcgtt

SEQ ID NO: 351092 - DNA, 19 bp, Homo sapiens
  siRNA target sequence for WDR7 (NM_015285.1,2487-2505).
ccactgcaccgtatcgttt

SEQ ID NO: 351093 - DNA, 19 bp, Homo sapiens
  siRNA target sequence for WDR7 (NM_015285.1,2536-2554).
ctgatgctgccgggttata

SEQ ID NO: 351094 - DNA, 19 bp, Homo sapiens
  siRNA target sequence for WDR7 (NM_015285.1,2538-2556).
gatgctgccgggttataat

SEQ ID NO: 351095 - DNA, 19 bp, Homo sapiens
  siRNA target sequence for WDR7 (NM_015285.1,2612-2630).
cgtctgagggagtaggaaa

SEQ ID NO: 351096 - DNA, 19 bp, Homo sapiens
  siRNA target sequence for WDR7 (NM_015285.1,2667-2685).
gcatctcctgtctatcatt

SEQ ID NO: 351097 - DNA, 19 bp, Homo sapiens
  siRNA target sequence for WDR7 (NM_015285.1,2668-2686).
catctcctgtctatcattt

SEQ ID NO: 351098 - DNA, 19 bp, Homo sapiens
  siRNA target sequence for WDR7 (NM_015285.1,2708-2726).
gtatgaccaatgcaacttt

SEQ ID NO: 351099 - DNA, 19 bp, Homo sapiens
  siRNA target sequence for WDR7 (NM_015285.1,2723-2741).
cttttattggtgatcatat

SEQ ID NO: 351100 - DNA, 19 bp, Homo sapiens
  siRNA target sequence for WDR7 (NM_015285.1,2774-2792).
gcaccccagacctttctaa

SEQ ID NO: 351101 - DNA, 19 bp, Homo sapiens
  siRNA target sequence for WDR7 (NM_015285.1,2806-2824).
cctccaacttccagtaata

SEQ ID NO: 351102 - DNA, 19 bp, Homo sapiens
  siRNA target sequence for WDR7 (NM_015285.1,2807-2825).
ctccaacttccagtaatat

SEQ ID NO: 351103 - DNA, 19 bp, Homo sapiens
  siRNA target sequence for WDR7 (NM_015285.1,2962-2980).
gctgctatgcactgtgtta

SEQ ID NO: 351104 - DNA, 19 bp, Homo sapiens
  siRNA target sequence for WDR7 (NM_015285.1,2989-3007).
gacctactgggattggata

SEQ ID NO: 351105 - DNA, 19 bp, Homo sapiens
  siRNA target sequence for WDR7 (NM_015285.1,2992-3010).
ctactgggattggataaat

SEQ ID NO: 351106 - DNA, 19 bp, Homo sapiens
  siRNA target sequence for WDR7 (NM_015285.1,3096-3114).
ggcggaactgagaagaatt

SEQ ID NO: 351107 - DNA, 19 bp, Homo sapiens
  siRNA target sequence for WDR7 (NM_015285.1,3126-3144).
caggaaggaagccattgat

SEQ ID NO: 351108 - DNA, 19 bp, Homo sapiens
  siRNA target sequence for WDR7 (NM_015285.1,3171-3189).
catagaccacgtcatatca

SEQ ID NO: 351109 - DNA, 19 bp, Homo sapiens
  siRNA target sequence for WDR7 (NM_015285.1,3294-3312).
catcaccactggttgctta

SEQ ID NO: 351110 - DNA, 19 bp, Homo sapiens
  siRNA target sequence for WDR7 (NM_015285.1,3297-3315).
caccactggttgcttatca

SEQ ID NO: 351111 - DNA, 19 bp, Homo sapiens
  siRNA target sequence for WDR7 (NM_015285.1,3300-3318).
cactggttgcttatcaagt

SEQ ID NO: 351112 - DNA, 19 bp, Homo sapiens
  siRNA target sequence for WDR7 (NM_015285.1,3314-3332).
caagtgtcccacaaatgaa

SEQ ID NO: 351113 - DNA, 19 bp, Homo sapiens
  siRNA target sequence for WDR7 (NM_015285.1,3366-3384).
gcaagctaccgctattgtt

SEQ ID NO: 351114 - DNA, 19 bp, Homo sapiens
  siRNA target sequence for WDR7 (NM_015285.1,3367-3385).
caagctaccgctattgttt

SEQ ID NO: 351115 - DNA, 19 bp, Homo sapiens
  siRNA target sequence for WDR7 (NM_015285.1,3371-3389).
ctaccgctattgttttact

SEQ ID NO: 351116 - DNA, 19 bp, Homo sapiens
  siRNA target sequence for WDR7 (NM_015285.1,3392-3410).
gagtaataggagctgaatt

SEQ ID NO: 351117 - DNA, 19 bp, Homo sapiens
  siRNA target sequence for WDR7 (NM_015285.1,3404-3422).
ctgaatttggtgctgaaat

SEQ ID NO: 351118 - DNA, 19 bp, Homo sapiens
  siRNA target sequence for WDR7 (NM_015285.1,3424-3442).
gaacctcctaaactattga

SEQ ID NO: 351119 - DNA, 19 bp, Homo sapiens
  siRNA target sequence for WDR7 (NM_015285.1,3472-3490).
gagggattcgggttgacta

SEQ ID NO: 351120 - DNA, 19 bp, Homo sapiens
  siRNA target sequence for WDR7 (NM_015285.1,3528-3546).
caaggcactgacgtttctt

SEQ ID NO: 351121 - DNA, 19 bp, Homo sapiens
  siRNA target sequence for WDR7 (NM_015285.1,3582-3600).
cagcactatccgaagaaca

SEQ ID NO: 351122 - DNA, 19 bp, Homo sapiens
  siRNA target sequence for WDR7 (NM_015285.1,3591-3609).
ccgaagaacagccattgat

SEQ ID NO: 351123 - DNA, 19 bp, Homo sapiens
  siRNA target sequence for WDR7 (NM_015285.1,3593-3611).
gaagaacagccattgatct

SEQ ID NO: 351124 - DNA, 19 bp, Homo sapiens
  siRNA target sequence for WDR7 (NM_015285.1,3629-3647).
ctgtttgggagccttacat

SEQ ID NO: 351125 - DNA, 19 bp, Homo sapiens
  siRNA target sequence for WDR7 (NM_015285.1,3686-3704).
gtgccgatgccgagaaaca

SEQ ID NO: 351126 - DNA, 19 bp, Homo sapiens
  siRNA target sequence for WDR7 (NM_015285.1,3863-3881).
cccaatcacagcagaatat

SEQ ID NO: 351127 - DNA, 19 bp, Homo sapiens
  siRNA target sequence for WDR7 (NM_015285.1,3874-3892).
cagaatatgcacacaacaa

SEQ ID NO: 351128 - DNA, 19 bp, Homo sapiens
  siRNA target sequence for WDR7 (NM_015285.1,3901-3919).
cgagctaaaggggaaattt

SEQ ID NO: 351129 - DNA, 19 bp, Homo sapiens
  siRNA target sequence for WDR7 (NM_015285.1,3956-3974).
cagatgttgtggatcttct

SEQ ID NO: 351130 - DNA, 19 bp, Homo sapiens
  siRNA target sequence for WDR7 (NM_015285.1,3982-4000).
gttatggacatcattatgt

SEQ ID NO: 351131 - DNA, 19 bp, Homo sapiens
  siRNA target sequence for WDR7 (NM_015285.1,4006-4024).
cttgaaggatctttagtta

SEQ ID NO: 351132 - DNA, 19 bp, Homo sapiens
  siRNA target sequence for WDR7 (NM_015285.1,4054-4072).
gccatctgcaggttctaca

SEQ ID NO: 351133 - DNA, 19 bp, Homo sapiens
  siRNA target sequence for WDR7 (NM_015285.1,4140-4158).
cgacatccggactggaaaa

SEQ ID NO: 351134 - DNA, 19 bp, Homo sapiens
  siRNA target sequence for WDR7 (NM_015285.1,4141-4159).
gacatccggactggaaaat

SEQ ID NO: 351135 - DNA, 19 bp, Homo sapiens
  siRNA target sequence for WDR7 (NM_015285.1,4143-4161).
catccggactggaaaatgt

SEQ ID NO: 351136 - DNA, 19 bp, Homo sapiens
  siRNA target sequence for WDR7 (NM_015285.1,4242-4260).
cactgacagccacatttct

SEQ ID NO: 351137 - DNA, 19 bp, Homo sapiens
  siRNA target sequence for WDR7 (NM_015285.1,4246-4264).
gacagccacatttcttttt

SEQ ID NO: 351138 - DNA, 19 bp, Homo sapiens
  siRNA target sequence for WDR7 (NM_015285.1,4315-4333).
cctcagctgcgctgcatta

SEQ ID NO: 351139 - DNA, 19 bp, Homo sapiens
  siRNA target sequence for WDR7 (NM_015285.1,4316-4334).
ctcagctgcgctgcattaa

SEQ ID NO: 351140 - DNA, 19 bp, Homo sapiens
  siRNA target sequence for WDR7 (NM_015285.1,4321-4339).
ctgcgctgcattaaaacct

SEQ ID NO: 351141 - DNA, 19 bp, Homo sapiens
  siRNA target sequence for SYNE1 (NM_015293.1,134-152).
cagcagtacagaaattctt

SEQ ID NO: 351142 - DNA, 19 bp, Homo sapiens
  siRNA target sequence for SYNE1 (NM_015293.1,144-162).
gaaattcttggaacagaat

SEQ ID NO: 351143 - DNA, 19 bp, Homo sapiens
  siRNA target sequence for SYNE1 (NM_015293.1,211-229).
cttcaccagcagaccatta

SEQ ID NO: 351144 - DNA, 19 bp, Homo sapiens
  siRNA target sequence for SYNE1 (NM_015293.1,216-234).
ccagcagaccattagacaa

SEQ ID NO: 351145 - DNA, 19 bp, Homo sapiens
  siRNA target sequence for SYNE1 (NM_015293.1,225-243).
cattagacaagctgagaat

SEQ ID NO: 351146 - DNA, 19 bp, Homo sapiens
  siRNA target sequence for SYNE1 (NM_015293.1,346-364).
ggaactattgcatggaatt

SEQ ID NO: 351147 - DNA, 19 bp, Homo sapiens
  siRNA target sequence for SYNE1 (NM_015293.1,469-487).
ctcactagcgtgtactgta

SEQ ID NO: 351148 - DNA, 19 bp, Homo sapiens
  siRNA target sequence for SYNE1 (NM_015293.1,476-494).
gcgtgtactgtacagaaaa

SEQ ID NO: 351149 - DNA, 19 bp, Homo sapiens
  siRNA target sequence for SYNE1 (NM_015293.1,477-495).
cgtgtactgtacagaaaaa

SEQ ID NO: 351150 - DNA, 19 bp, Homo sapiens
  siRNA target sequence for SYNE1 (NM_015293.1,540-558).
gcgacagatgatcaaaatt

SEQ ID NO: 351151 - DNA, 19 bp, Homo sapiens
  siRNA target sequence for SYNE1 (NM_015293.1,544-562).
cagatgatcaaaattcgtt

SEQ ID NO: 351152 - DNA, 19 bp, Homo sapiens
  siRNA target sequence for SYNE1 (NM_015293.1,573-591).
ccaagatgcagctaaggat

SEQ ID NO: 351153 - DNA, 19 bp, Homo sapiens
  siRNA target sequence for SYNE1 (NM_015293.1,574-592).
caagatgcagctaaggata

SEQ ID NO: 351154 - DNA, 19 bp, Homo sapiens
  siRNA target sequence for SYNE1 (NM_015293.1,577-595).
gatgcagctaaggatatga

SEQ ID NO: 351155 - DNA, 19 bp, Homo sapiens
  siRNA target sequence for SYNE1 (NM_015293.1,703-721).
catcggcagcatttgttgt

SEQ ID NO: 351156 - DNA, 19 bp, Homo sapiens
  siRNA target sequence for SYNE1 (NM_015293.1,866-884).
ccgccatccagcagtgtaa

SEQ ID NO: 351157 - DNA, 19 bp, Homo sapiens
  siRNA target sequence for SYNE1 (NM_015293.1,899-917).
ctgtggtacaatatgaaca

SEQ ID NO: 351158 - DNA, 19 bp, Homo sapiens
  siRNA target sequence for SYNE1 (NM_015293.1,901-919).
gtggtacaatatgaacaat

SEQ ID NO: 351159 - DNA, 19 bp, Homo sapiens
  siRNA target sequence for SYNE1 (NM_015293.1,1038-1056).
ggagctggcgcagaaaatt

SEQ ID NO: 351160 - DNA, 19 bp, Homo sapiens
  siRNA target sequence for SYNE1 (NM_015293.1,1072-1090).
cagatcgcttctttgaatt

SEQ ID NO: 351161 - DNA, 19 bp, Homo sapiens
  siRNA target sequence for SYNE1 (NM_015293.1,1098-1116).
caagatgctgacgatgaaa

SEQ ID NO: 351162 - DNA, 19 bp, Homo sapiens
  siRNA target sequence for SYNE1 (NM_015293.1,1241-1259).
caggtcgctgtcacacttt

SEQ ID NO: 351163 - DNA, 19 bp, Homo sapiens
  siRNA target sequence for SYNE1 (NM_015293.1,1355-1373).
cagatgcttctgttaacca

SEQ ID NO: 351164 - DNA, 19 bp, Homo sapiens
  siRNA target sequence for SYNE1 (NM_015293.1,1374-1392).
ggacattgcatattaccaa

SEQ ID NO: 351165 - DNA, 19 bp, Homo sapiens
  siRNA target sequence for SYNE1 (NM_015293.1,1496-1514).
ccaaactgggtgatttgca

SEQ ID NO: 351166 - DNA, 19 bp, Homo sapiens
  siRNA target sequence for SYNE1 (NM_015293.1,1515-1533).
gcgttcttgggaaacctta

SEQ ID NO: 351167 - DNA, 19 bp, Homo sapiens
  siRNA target sequence for SYNE1 (NM_015293.1,1516-1534).
cgttcttgggaaaccttaa

SEQ ID NO: 351168 - DNA, 19 bp, Homo sapiens
  siRNA target sequence for SYNE1 (NM_015293.1,1633-1651).
gccattgagctgaaactca

SEQ ID NO: 351169 - DNA, 19 bp, Homo sapiens
  siRNA target sequence for SYNE1 (NM_015293.1,1706-1724).
cattgatggatgagattct

SEQ ID NO: 351170 - DNA, 19 bp, Homo sapiens
  siRNA target sequence for SYNE1 (NM_015293.1,1824-1842).
gtccacgctcactgtctta

SEQ ID NO: 351171 - DNA, 19 bp, Homo sapiens
  siRNA target sequence for SYNE1 (NM_015293.1,1877-1895).
cggggaaacggcagctttt

SEQ ID NO: 351172 - DNA, 19 bp, Homo sapiens
  siRNA target sequence for SYNE1 (NM_015293.1,1880-1898).
ggaaacggcagcttttgga

SEQ ID NO: 351173 - DNA, 19 bp, Homo sapiens
  siRNA target sequence for SYNE1 (NM_015293.1,1978-1996).
gacagctggctcttgagta

SEQ ID NO: 351174 - DNA, 19 bp, Homo sapiens
  siRNA target sequence for SYNE1 (NM_015293.1,2059-2077).
cttatggactgccagaata

SEQ ID NO: 351175 - DNA, 19 bp, Homo sapiens
  siRNA target sequence for SYNE1 (NM_015293.1,2452-2470).
cgtggagaggagattctaa

SEQ ID NO: 351176 - DNA, 19 bp, Homo sapiens
  siRNA target sequence for SYNE1 (NM_015293.1,2507-2525).
gcgaaaaacctgatgtgtt

SEQ ID NO: 351177 - DNA, 19 bp, Homo sapiens
  siRNA target sequence for SYNE1 (NM_015293.1,2508-2526).
cgaaaaacctgatgtgtta

SEQ ID NO: 351178 - DNA, 19 bp, Homo sapiens
  siRNA target sequence for SYNE1 (NM_015293.1,2596-2614).
ctacatcaagaatttagta

SEQ ID NO: 351179 - DNA, 19 bp, Homo sapiens
  siRNA target sequence for SYNE1 (NM_015293.1,2656-2674).
gagcaagtgctttatagca

SEQ ID NO: 351180 - DNA, 19 bp, Homo sapiens
  siRNA target sequence for SYNE1 (NM_015293.1,2716-2734).
gacgtgccaacccaagata

SEQ ID NO: 351181 - DNA, 19 bp, Homo sapiens
  siRNA target sequence for SYNE1 (NM_015293.1,2804-2822).
gggcaaagaggcagagtat

SEQ ID NO: 351182 - DNA, 19 bp, Homo sapiens
  siRNA target sequence for SYNE1 (NM_015293.1,2870-2888).
ggttggatgacgttgaaga

SEQ ID NO: 351183 - DNA, 19 bp, Homo sapiens
  siRNA target sequence for SYNE1 (NM_015293.1,2880-2898).
cgttgaagaacgtttattt

SEQ ID NO: 351184 - DNA, 19 bp, Homo sapiens
  siRNA target sequence for SYNE1 (NM_015293.1,3034-3052).
ggtgataatcgagatgtta

SEQ ID NO: 351185 - DNA, 19 bp, Homo sapiens
  siRNA target sequence for SYNE1 (NM_015293.1,3035-3053).
gtgataatcgagatgttat

SEQ ID NO: 351186 - DNA, 19 bp, Homo sapiens
  siRNA target sequence for SYNE1 (NM_015293.1,3073-3091).
cttttgggcaggttatcct

SEQ ID NO: 351187 - DNA, 19 bp, Homo sapiens
  siRNA target sequence for SYNE1 (NM_015293.1,3093-3111).
gctagactcagtagtgaat

SEQ ID NO: 351188 - DNA, 19 bp, Homo sapiens
  siRNA target sequence for SYNE1 (NM_015293.1,3185-3203).
catcactggctgacaacaa

SEQ ID NO: 351189 - DNA, 19 bp, Homo sapiens
  siRNA target sequence for SYNE1 (NM_015293.1,3241-3259).
cagcccgtagcagaacaaa

SEQ ID NO: 351190 - DNA, 19 bp, Homo sapiens
  siRNA target sequence for SYNE1 (NM_015293.1,3451-3469).
ctcaagagtcagtatgaga

SEQ ID NO: 351191 - DNA, 19 bp, Homo sapiens
  siRNA target sequence for SYNE1 (NM_015293.1,3486-3504).
ggctgacctgctagaaact

SEQ ID NO: 351192 - DNA, 19 bp, Homo sapiens
  siRNA target sequence for SYNE1 (NM_015293.1,3571-3589).
cttgacaaacataaggaat

SEQ ID NO: 351193 - DNA, 19 bp, Homo sapiens
  siRNA target sequence for SYNE1 (NM_015293.1,3595-3613).
cagggcctggaatctcata

SEQ ID NO: 351194 - DNA, 19 bp, Homo sapiens
  siRNA target sequence for SYNE1 (NM_015293.1,3598-3616).
ggcctggaatctcatatga

SEQ ID NO: 351195 - DNA, 19 bp, Homo sapiens
  siRNA target sequence for SYNE1 (NM_015293.1,3601-3619).
ctggaatctcatatgatct

SEQ ID NO: 351196 - DNA, 19 bp, Homo sapiens
  siRNA target sequence for SYNE1 (NM_015293.1,3631-3649).
ctcttcagaaagataatca

SEQ ID NO: 351197 - DNA, 19 bp, Homo sapiens
  siRNA target sequence for SYNE1 (NM_015293.1,3650-3668).
gctttgcagtccaaaagga

SEQ ID NO: 351198 - DNA, 19 bp, Homo sapiens
  siRNA target sequence for SYNE1 (NM_015293.1,3881-3899).
cactctaccagcatttaaa

SEQ ID NO: 351199 - DNA, 19 bp, Homo sapiens
  siRNA target sequence for SYNE1 (NM_015293.1,3902-3920).
ctagccttaatgaatacca

SEQ ID NO: 351200 - DNA, 19 bp, Homo sapiens
  siRNA target sequence for SYNE1 (NM_015293.1,3913-3931).
gaataccagcccaaattat

SEQ ID NO: 351201 - DNA, 19 bp, Homo sapiens
  siRNA target sequence for SYNE1 (NM_015293.1,3949-3967).
gggaaacgacttctgatat

SEQ ID NO: 351202 - DNA, 19 bp, Homo sapiens
  siRNA target sequence for SYNE1 (NM_015293.1,4009-4027).
ggagagtgctggctaagta

SEQ ID NO: 351203 - DNA, 19 bp, Homo sapiens
  siRNA target sequence for SYNE1 (NM_015293.1,4010-4028).
gagagtgctggctaagtaa

SEQ ID NO: 351204 - DNA, 19 bp, Homo sapiens
  siRNA target sequence for SYNE1 (NM_015293.1,4012-4030).
gagtgctggctaagtaaca

SEQ ID NO: 351205 - DNA, 19 bp, Homo sapiens
  siRNA target sequence for SYNE1 (NM_015293.1,4019-4037).
ggctaagtaacaccaataa

SEQ ID NO: 351206 - DNA, 19 bp, Homo sapiens
  siRNA target sequence for SYNE1 (NM_015293.1,4020-4038).
gctaagtaacaccaataaa

SEQ ID NO: 351207 - DNA, 19 bp, Homo sapiens
  siRNA target sequence for SYNE1 (NM_015293.1,4021-4039).
ctaagtaacaccaataaaa

SEQ ID NO: 351208 - DNA, 19 bp, Homo sapiens
  siRNA target sequence for SYNE1 (NM_015293.1,4074-4092).
gaaacactggaccagatat

SEQ ID NO: 351209 - DNA, 19 bp, Homo sapiens
  siRNA target sequence for SYNE1 (NM_015293.1,4086-4104).
cagatatcaaagtgaatct

SEQ ID NO: 351210 - DNA, 19 bp, Homo sapiens
  siRNA target sequence for SYNE1 (NM_015293.1,4097-4115).
gtgaatctgcagatctaat

SEQ ID NO: 351211 - DNA, 19 bp, Homo sapiens
  siRNA target sequence for SYNE1 (NM_015293.1,4132-4150).
gcaaaagaccggctagaat

SEQ ID NO: 351212 - DNA, 19 bp, Homo sapiens
  siRNA target sequence for SYNE1 (NM_015293.1,4138-4156).
gaccggctagaattttgga

SEQ ID NO: 351213 - DNA, 19 bp, Homo sapiens
  siRNA target sequence for SYNE1 (NM_015293.1,4188-4206).
ggaaatggtccgtgatcat

SEQ ID NO: 351214 - DNA, 19 bp, Homo sapiens
  siRNA target sequence for SYNE1 (NM_015293.1,4194-4212).
ggtccgtgatcatctaaat

SEQ ID NO: 351215 - DNA, 19 bp, Homo sapiens
  siRNA target sequence for SYNE1 (NM_015293.1,4197-4215).
ccgtgatcatctaaatgct

SEQ ID NO: 351216 - DNA, 19 bp, Homo sapiens
  siRNA target sequence for SYNE1 (NM_015293.1,4245-4263).
ccaatcttccctgaaatca

SEQ ID NO: 351217 - DNA, 19 bp, Homo sapiens
  siRNA target sequence for SYNE1 (NM_015293.1,4246-4264).
caatcttccctgaaatcat

SEQ ID NO: 351218 - DNA, 19 bp, Homo sapiens
  siRNA target sequence for SYNE1 (NM_015293.1,4401-4419).
ccagctccagatggataaa

SEQ ID NO: 351219 - DNA, 19 bp, Homo sapiens
  siRNA target sequence for SYNE1 (NM_015293.1,4524-4542).
ggcaattcatgaatacctt

SEQ ID NO: 351220 - DNA, 19 bp, Homo sapiens
  siRNA target sequence for SYNE1 (NM_015293.1,4555-4573).
ggttttaagatagacatta

SEQ ID NO: 351221 - DNA, 19 bp, Homo sapiens
  siRNA target sequence for SYNE1 (NM_015293.1,4556-4574).
gttttaagatagacattaa

SEQ ID NO: 351222 - DNA, 19 bp, Homo sapiens
  siRNA target sequence for SYNE1 (NM_015293.1,4606-4624).
cagtccgtgctacaaatca

SEQ ID NO: 351223 - DNA, 19 bp, Homo sapiens
  siRNA target sequence for SYNE1 (NM_015293.1,4638-4656).
ggaaagtaagcgtagtgat

SEQ ID NO: 351224 - DNA, 19 bp, Homo sapiens
  siRNA target sequence for SYNE1 (NM_015293.1,4639-4657).
gaaagtaagcgtagtgata

SEQ ID NO: 351225 - DNA, 19 bp, Homo sapiens
  siRNA target sequence for SYNE1 (NM_015293.1,4648-4666).
cgtagtgataagactgatt

SEQ ID NO: 351226 - DNA, 19 bp, Homo sapiens
  siRNA target sequence for SYNE1 (NM_015293.1,4674-4692).
gcaacttggagcaatgaat

SEQ ID NO: 351227 - DNA, 19 bp, Homo sapiens
  siRNA target sequence for SYNE1 (NM_015293.1,4975-4993).
gacgtctctagcattgtca

SEQ ID NO: 351228 - DNA, 19 bp, Homo sapiens
  siRNA target sequence for SYNE1 (NM_015293.1,5038-5056).
cacatggttggacaattaa

SEQ ID NO: 351229 - DNA, 19 bp, Homo sapiens
  siRNA target sequence for SYNE1 (NM_015293.1,5043-5061).
ggttggacaattaaagata

SEQ ID NO: 351230 - DNA, 19 bp, Homo sapiens
  siRNA target sequence for SYNE1 (NM_015293.1,5128-5146).
ctcatggaggccagatact

SEQ ID NO: 351231 - DNA, 19 bp, Homo sapiens
  siRNA target sequence for SYNE1 (NM_015293.1,5134-5152).
gaggccagatactctcttt

SEQ ID NO: 351232 - DNA, 19 bp, Homo sapiens
  siRNA target sequence for SYNE1 (NM_015293.1,5166-5184).
gctgactggctccttagaa

SEQ ID NO: 351233 - DNA, 19 bp, Homo sapiens
  siRNA target sequence for SYNE1 (NM_015293.1,5254-5272).
cagaaatttggctctatca

SEQ ID NO: 351234 - DNA, 19 bp, Homo sapiens
  siRNA target sequence for SYNE1 (NM_015293.1,5263-5281).
ggctctatcaccaaccaat

SEQ ID NO: 351235 - DNA, 19 bp, Homo sapiens
  siRNA target sequence for SYNE1 (NM_015293.1,5264-5282).
gctctatcaccaaccaatt

SEQ ID NO: 351236 - DNA, 19 bp, Homo sapiens
  siRNA target sequence for SYNE1 (NM_015293.1,5265-5283).
ctctatcaccaaccaatta

SEQ ID NO: 351237 - DNA, 19 bp, Homo sapiens
  siRNA target sequence for SYNE1 (NM_015293.1,5273-5291).
ccaaccaattattaaaaga

SEQ ID NO: 351238 - DNA, 19 bp, Homo sapiens
  siRNA target sequence for SYNE1 (NM_015293.1,5298-5316).
cccacccgtgacagaaact

SEQ ID NO: 351239 - DNA, 19 bp, Homo sapiens
  siRNA target sequence for SYNE1 (NM_015293.1,5300-5318).
cacccgtgacagaaactct

SEQ ID NO: 351240 - DNA, 19 bp, Homo sapiens
  siRNA target sequence for SYNE1 (NM_015293.1,5390-5408).
ccagcaaggccctacttca

SEQ ID NO: 351241 - DNA, 19 bp, Homo sapiens
  siRNA target sequence for SYNE1 (NM_015293.1,5407-5425).
cagctttggcaaagataca

SEQ ID NO: 351242 - DNA, 19 bp, Homo sapiens
  siRNA target sequence for SYNE1 (NM_015293.1,5463-5481).
gcaggaggatcgaaccaat

SEQ ID NO: 351243 - DNA, 19 bp, Homo sapiens
  siRNA target sequence for SYNE1 (NM_015293.1,5530-5548).
gccacatggattcaagatt

SEQ ID NO: 351244 - DNA, 19 bp, Homo sapiens
  siRNA target sequence for SYNE1 (NM_015293.1,5534-5552).
catggattcaagattgcaa

SEQ ID NO: 351245 - DNA, 19 bp, Homo sapiens
  siRNA target sequence for SYNE1 (NM_015293.1,5567-5585).
gactgggcacagttaaaga

SEQ ID NO: 351246 - DNA, 19 bp, Homo sapiens
  siRNA target sequence for SYNE1 (NM_015293.1,5569-5587).
ctgggcacagttaaagatt

SEQ ID NO: 351247 - DNA, 19 bp, Homo sapiens
  siRNA target sequence for SYNE1 (NM_015293.1,5664-5682).
ggatcaactctctttgagt

SEQ ID NO: 351248 - DNA, 19 bp, Homo sapiens
  siRNA target sequence for SYNE1 (NM_015293.1,5714-5732).
gcaaacagcagacttcatt

SEQ ID NO: 351249 - DNA, 19 bp, Homo sapiens
  siRNA target sequence for SYNE1 (NM_015293.1,5738-5756).
ctggagttcttgattatga

SEQ ID NO: 351250 - DNA, 19 bp, Homo sapiens
  siRNA target sequence for SYNE1 (NM_015293.1,5903-5921).
gcagcatggctccagattt

SEQ ID NO: 351251 - DNA, 19 bp, Homo sapiens
  siRNA target sequence for SYNE1 (NM_015293.1,5927-5945).
gtctaaatgagcttggata

SEQ ID NO: 351252 - DNA, 19 bp, Homo sapiens
  siRNA target sequence for SYNE1 (NM_015293.1,5948-5966).
ggttacccttgaatgataa

SEQ ID NO: 351253 - DNA, 19 bp, Homo sapiens
  siRNA target sequence for SYNE1 (NM_015293.1,6109-6127).
gttcagacagaacaaaagt

SEQ ID NO: 351254 - DNA, 19 bp, Homo sapiens
  siRNA target sequence for SYNE1 (NM_015293.1,6126-6144).
gttagcagtagagatttca

SEQ ID NO: 351255 - DNA, 19 bp, Homo sapiens
  siRNA target sequence for SYNE1 (NM_015293.1,6174-6192).
gagagcacacgagttgttt

SEQ ID NO: 351256 - DNA, 19 bp, Homo sapiens
  siRNA target sequence for SYNE1 (NM_015293.1,6176-6194).
gagcacacgagttgtttca

SEQ ID NO: 351257 - DNA, 19 bp, Homo sapiens
  siRNA target sequence for SYNE1 (NM_015293.1,6225-6243).
gcactcaatcattattgat

SEQ ID NO: 351258 - DNA, 19 bp, Homo sapiens
  siRNA target sequence for SYNE1 (NM_015293.1,6406-6424).
gcagaaaagcttcgtaaat

SEQ ID NO: 351259 - DNA, 19 bp, Homo sapiens
  siRNA target sequence for SYNE1 (NM_015293.1,6409-6427).
gaaaagcttcgtaaatggt

SEQ ID NO: 351260 - DNA, 19 bp, Homo sapiens
  siRNA target sequence for SYNE1 (NM_015293.1,6453-6471).
gagtggtctcggaagtgtt

SEQ ID NO: 351261 - DNA, 19 bp, Homo sapiens
  siRNA target sequence for SYNE1 (NM_015293.1,6458-6476).
gtctcggaagtgttcctat

SEQ ID NO: 351262 - DNA, 19 bp, Homo sapiens
  siRNA target sequence for SYNE1 (NM_015293.1,6462-6480).
cggaagtgttcctatacca

SEQ ID NO: 351263 - DNA, 19 bp, Homo sapiens
  siRNA target sequence for SYNE1 (NM_015293.1,6626-6644).
ccgaactcgctgaaatcca

SEQ ID NO: 351264 - DNA, 19 bp, Homo sapiens
  siRNA target sequence for SYNE1 (NM_015293.1,6627-6645).
cgaactcgctgaaatccaa

SEQ ID NO: 351265 - DNA, 19 bp, Homo sapiens
  siRNA target sequence for SYNE1 (NM_015293.1,6751-6769).
gagaaactacgaactttca

SEQ ID NO: 351266 - DNA, 19 bp, Homo sapiens
  siRNA target sequence for SYNE1 (NM_015293.1,6757-6775).
ctacgaactttcaaaaaga

SEQ ID NO: 351267 - DNA, 19 bp, Homo sapiens
  siRNA target sequence for SYNE1 (NM_015293.1,6808-6826).
gagctccatgcagaacaaa

SEQ ID NO: 351268 - DNA, 19 bp, Homo sapiens
  siRNA target sequence for SYNE1 (NM_015293.1,6823-6841).
caaatgcgttgcaaggaat

SEQ ID NO: 351269 - DNA, 19 bp, Homo sapiens
  siRNA target sequence for SYNE1 (NM_015293.1,6828-6846).
gcgttgcaaggaattagaa

SEQ ID NO: 351270 - DNA, 19 bp, Homo sapiens
  siRNA target sequence for SYNE1 (NM_015293.1,6998-7016).
ccttaaggcggcagcaaat

SEQ ID NO: 351271 - DNA, 19 bp, Homo sapiens
  siRNA target sequence for SYNE1 (NM_015293.1,7009-7027).
cagcaaataggtgaaagat

SEQ ID NO: 351272 - DNA, 19 bp, Homo sapiens
  siRNA target sequence for SYNE1 (NM_015293.1,7070-7088).
gtgagtggttgactcaaat

SEQ ID NO: 351273 - DNA, 19 bp, Homo sapiens
  siRNA target sequence for SYNE1 (NM_015293.1,7074-7092).
gtggttgactcaaatggaa

SEQ ID NO: 351274 - DNA, 19 bp, Homo sapiens
  siRNA target sequence for SYNE1 (NM_015293.1,7348-7366).
gccgtgcagcagcttgata

SEQ ID NO: 351275 - DNA, 19 bp, Homo sapiens
  siRNA target sequence for SYNE1 (NM_015293.1,7357-7375).
cagcttgataagaacatga

SEQ ID NO: 351276 - DNA, 19 bp, Homo sapiens
  siRNA target sequence for SYNE1 (NM_015293.1,7414-7432).
ctggccaagccaatagtct

SEQ ID NO: 351277 - DNA, 19 bp, Homo sapiens
  siRNA target sequence for SYNE1 (NM_015293.1,7429-7447).
gtctacgattcctgtaact

SEQ ID NO: 351278 - DNA, 19 bp, Homo sapiens
  siRNA target sequence for SYNE1 (NM_015293.1,7439-7457).
cctgtaactcggaagaaat

SEQ ID NO: 351279 - DNA, 19 bp, Homo sapiens
  siRNA target sequence for SYNE1 (NM_015293.1,7440-7458).
ctgtaactcggaagaaata

SEQ ID NO: 351280 - DNA, 19 bp, Homo sapiens
  siRNA target sequence for SYNE1 (NM_015293.1,7626-7644).
gcggtggagaaacatttgt

SEQ ID NO: 351281 - DNA, 19 bp, Homo sapiens
  siRNA target sequence for SYNE1 (NM_015293.1,7686-7704).
gcgattgtggcagaaattt

SEQ ID NO: 351282 - DNA, 19 bp, Homo sapiens
  siRNA target sequence for SYNE1 (NM_015293.1,7707-7725).
ggatgactattcacgtttt

SEQ ID NO: 351283 - DNA, 19 bp, Homo sapiens
  siRNA target sequence for SYNE1 (NM_015293.1,7713-7731).
ctattcacgttttgaagat

SEQ ID NO: 351284 - DNA, 19 bp, Homo sapiens
  siRNA target sequence for SYNE1 (NM_015293.1,7775-7793).
ctggggtgatctatacagt

SEQ ID NO: 351285 - DNA, 19 bp, Homo sapiens
  siRNA target sequence for SYNE1 (NM_015293.1,7896-7914).
ggagaaccgcactgattca

SEQ ID NO: 351286 - DNA, 19 bp, Homo sapiens
  siRNA target sequence for SYNE1 (NM_015293.1,7915-7933).
gcatgtagcctcaaacaga

SEQ ID NO: 351287 - DNA, 19 bp, Homo sapiens
  siRNA target sequence for SYNE1 (NM_015293.1,7916-7934).
catgtagcctcaaacagat

SEQ ID NO: 351288 - DNA, 19 bp, Homo sapiens
  siRNA target sequence for SYNE1 (NM_015293.1,7992-8010).
gcgcagactcaagcatttt

SEQ ID NO: 351289 - DNA, 19 bp, Homo sapiens
  siRNA target sequence for SYNE1 (NM_015293.1,7993-8011).
cgcagactcaagcatttta

SEQ ID NO: 351290 - DNA, 19 bp, Homo sapiens
  siRNA target sequence for SYNE1 (NM_015293.1,7995-8013).
cagactcaagcattttatt

SEQ ID NO: 351291 - DNA, 19 bp, Homo sapiens
  siRNA target sequence for SYNE1 (NM_015293.1,8082-8100).
gctcactaatattgaacat

SEQ ID NO: 351292 - DNA, 19 bp, Homo sapiens
  siRNA target sequence for SYNE1 (NM_015293.1,8109-8127).
gtgtgatgttcaagctaaa

SEQ ID NO: 351293 - DNA, 19 bp, Homo sapiens
  siRNA target sequence for SYNE1 (NM_015293.1,8123-8141).
ctaaaataaagcaactcaa

SEQ ID NO: 351294 - DNA, 19 bp, Homo sapiens
  siRNA target sequence for SYNE1 (NM_015293.1,8244-8262).
catcgaggaggaactagat

SEQ ID NO: 351295 - DNA, 19 bp, Homo sapiens
  siRNA target sequence for SYNE1 (NM_015293.1,8295-8313).
gcgtgtggaaagataccat

SEQ ID NO: 351296 - DNA, 19 bp, Homo sapiens
  siRNA target sequence for SYNE1 (NM_015293.1,8296-8314).
cgtgtggaaagataccata

SEQ ID NO: 351297 - DNA, 19 bp, Homo sapiens
  siRNA target sequence for SYNE1 (NM_015293.1,8306-8324).
gataccataagaaactgat

SEQ ID NO: 351298 - DNA, 19 bp, Homo sapiens
  siRNA target sequence for SYNE1 (NM_015293.1,8740-8758).
cagcaaaccgaaaatatca

SEQ ID NO: 351299 - DNA, 19 bp, Homo sapiens
  siRNA target sequence for SYNE1 (NM_015293.1,8787-8805).
gctagacaccagctacaaa

SEQ ID NO: 351300 - DNA, 19 bp, Homo sapiens
  siRNA target sequence for SYNE1 (NM_015293.1,8799-8817).
ctacaaaggctacatgaaa

SEQ ID NO: 351301 - DNA, 19 bp, Homo sapiens
  siRNA target sequence for SYNE1 (NM_015293.1,9423-9441).
ccctattgattctaacctt

SEQ ID NO: 351302 - DNA, 19 bp, Homo sapiens
  siRNA target sequence for SYNE1 (NM_015293.1,9466-9484).
cacaaacagcttatgcaaa

SEQ ID NO: 351303 - DNA, 19 bp, Homo sapiens
  siRNA target sequence for SYNE1 (NM_015293.1,9468-9486).
caaacagcttatgcaaata

SEQ ID NO: 351304 - DNA, 19 bp, Homo sapiens
  siRNA target sequence for SYNE1 (NM_015293.1,9513-9531).
cagagtagcctctttgcaa

SEQ ID NO: 351305 - DNA, 19 bp, Homo sapiens
  siRNA target sequence for SYNE1 (NM_015293.1,9608-9626).
gaaatcggctcaaacttct

SEQ ID NO: 351306 - DNA, 19 bp, Homo sapiens
  siRNA target sequence for SYNE1 (NM_015293.1,9634-9652).
gaggtcagtcgtcatatca

SEQ ID NO: 351307 - DNA, 19 bp, Homo sapiens
  siRNA target sequence for SYNE1 (NM_015293.1,9705-9723).
ctggtcttctgctgatgaa

SEQ ID NO: 351308 - DNA, 19 bp, Homo sapiens
  siRNA target sequence for SYNE1 (NM_015293.1,9707-9725).
ggtcttctgctgatgaact

SEQ ID NO: 351309 - DNA, 19 bp, Homo sapiens
  siRNA target sequence for SYNE1 (NM_015293.1,9863-9881).
ccgattcctccctttctga

SEQ ID NO: 351310 - DNA, 19 bp, Homo sapiens
  siRNA target sequence for SYNE1 (NM_015293.1,9989-10007).
caatgtcagaggaagacta

SEQ ID NO: 351311 - DNA, 19 bp, Homo sapiens
  siRNA target sequence for SYNE1 (NM_015293.1,10013-10031).
gtgccctctccaacaactt

SEQ ID NO: 351312 - DNA, 19 bp, Homo sapiens
  siRNA target sequence for KIAA0759 (NM_015305.2,132-150).
cttcacatgtcgaaaaaat

SEQ ID NO: 351313 - DNA, 19 bp, Homo sapiens
  siRNA target sequence for KIAA0759 (NM_015305.2,331-349).
ctggcacttctgatggata

SEQ ID NO: 351314 - DNA, 19 bp, Homo sapiens
  siRNA target sequence for KIAA0759 (NM_015305.2,333-351).
ggcacttctgatggataat

SEQ ID NO: 351315 - DNA, 19 bp, Homo sapiens
  siRNA target sequence for KIAA0759 (NM_015305.2,685-703).
cccgcagtggaaataccat

SEQ ID NO: 351316 - DNA, 19 bp, Homo sapiens
  siRNA target sequence for KIAA0759 (NM_015305.2,686-704).
ccgcagtggaaataccata

SEQ ID NO: 351317 - DNA, 19 bp, Homo sapiens
  siRNA target sequence for KIAA0759 (NM_015305.2,687-705).
cgcagtggaaataccatat

SEQ ID NO: 351318 - DNA, 19 bp, Homo sapiens
  siRNA target sequence for KIAA0759 (NM_015305.2,689-707).
cagtggaaataccatatca

SEQ ID NO: 351319 - DNA, 19 bp, Homo sapiens
  siRNA target sequence for KIAA0759 (NM_015305.2,693-711).
ggaaataccatatcatgaa

SEQ ID NO: 351320 - DNA, 19 bp, Homo sapiens
  siRNA target sequence for KIAA0759 (NM_015305.2,694-712).
gaaataccatatcatgaaa

SEQ ID NO: 351321 - DNA, 19 bp, Homo sapiens
  siRNA target sequence for KIAA0759 (NM_015305.2,721-739).
cgagaatgggaggatttct

SEQ ID NO: 351322 - DNA, 19 bp, Homo sapiens
  siRNA target sequence for KIAA0759 (NM_015305.2,840-858).
gagctcagagctctatcta

SEQ ID NO: 351323 - DNA, 19 bp, Homo sapiens
  siRNA target sequence for KIAA0759 (NM_015305.2,873-891).
catcctcaattggaactat

SEQ ID NO: 351324 - DNA, 19 bp, Homo sapiens
  siRNA target sequence for KIAA0759 (NM_015305.2,955-973).
gtccaggaagatcattact

SEQ ID NO: 351325 - DNA, 19 bp, Homo sapiens
  siRNA target sequence for KIAA0759 (NM_015305.2,997-1015).
cgaatgatgggctttacct

SEQ ID NO: 351326 - DNA, 19 bp, Homo sapiens
  siRNA target sequence for KIAA0759 (NM_015305.2,1121-1139).
ctggcttggagctacttaa

SEQ ID NO: 351327 - DNA, 19 bp, Homo sapiens
  siRNA target sequence for KIAA0759 (NM_015305.2,1213-1231).
ccgctgtgtgtggcaaata

SEQ ID NO: 351328 - DNA, 19 bp, Homo sapiens
  siRNA target sequence for KIAA0759 (NM_015305.2,1224-1242).
ggcaaatacccatatcctt

SEQ ID NO: 351329 - DNA, 19 bp, Homo sapiens
  siRNA target sequence for KIAA0759 (NM_015305.2,1226-1244).
caaatacccatatccttta

SEQ ID NO: 351330 - DNA, 19 bp, Homo sapiens
  siRNA target sequence for KIAA0759 (NM_015305.2,1347-1365).
cttgtgcggggacctaaat

SEQ ID NO: 351331 - DNA, 19 bp, Homo sapiens
  siRNA target sequence for KIAA0759 (NM_015305.2,1350-1368).
gtgcggggacctaaattct

SEQ ID NO: 351332 - DNA, 19 bp, Homo sapiens
  siRNA target sequence for KIAA0759 (NM_015305.2,1352-1370).
gcggggacctaaattctgt

SEQ ID NO: 351333 - DNA, 19 bp, Homo sapiens
  siRNA target sequence for KIAA0759 (NM_015305.2,1373-1391).
ctgattcacctctctacaa

SEQ ID NO: 351334 - DNA, 19 bp, Homo sapiens
  siRNA target sequence for KIAA0759 (NM_015305.2,1375-1393).
gattcacctctctacaact

SEQ ID NO: 351335 - DNA, 19 bp, Homo sapiens
  siRNA target sequence for KIAA0759 (NM_015305.2,1525-1543).
gattgctgtcagtatgtca

SEQ ID NO: 351336 - DNA, 19 bp, Homo sapiens
  siRNA target sequence for KIAA0759 (NM_015305.2,1634-1652).
cagtaggactggtccttat

SEQ ID NO: 351337 - DNA, 19 bp, Homo sapiens
  siRNA target sequence for KIAA0759 (NM_015305.2,1653-1671).
ggaaggagtgacagatact

SEQ ID NO: 351338 - DNA, 19 bp, Homo sapiens
  siRNA target sequence for KIAA0759 (NM_015305.2,1774-1792).
ctccacctgacgtcagtat

SEQ ID NO: 351339 - DNA, 19 bp, Homo sapiens
  siRNA target sequence for KIAA0759 (NM_015305.2,1776-1794).
ccacctgacgtcagtatat

SEQ ID NO: 351340 - DNA, 19 bp, Homo sapiens
  siRNA target sequence for KIAA0759 (NM_015305.2,1777-1795).
cacctgacgtcagtatata

SEQ ID NO: 351341 - DNA, 19 bp, Homo sapiens
  siRNA target sequence for KIAA0759 (NM_015305.2,1849-1867).
cttggaatgacagtagatt

SEQ ID NO: 351342 - DNA, 19 bp, Homo sapiens
  siRNA target sequence for KIAA0759 (NM_015305.2,1853-1871).
gaatgacagtagattacat

SEQ ID NO: 351343 - DNA, 19 bp, Homo sapiens
  siRNA target sequence for KIAA0759 (NM_015305.2,1896-1914).
gaatgggaacagaactgat

SEQ ID NO: 351344 - DNA, 19 bp, Homo sapiens
  siRNA target sequence for KIAA0759 (NM_015305.2,1962-1980).
ccttctctctgaagagata

SEQ ID NO: 351345 - DNA, 19 bp, Homo sapiens
  siRNA target sequence for FNBP4 (NM_015308.1,222-240).
ggacgactcgccttcagaa

SEQ ID NO: 351346 - DNA, 19 bp, Homo sapiens
  siRNA target sequence for FNBP4 (NM_015308.1,225-243).
cgactcgccttcagaagat

SEQ ID NO: 351347 - DNA, 19 bp, Homo sapiens
  siRNA target sequence for FNBP4 (NM_015308.1,258-276).
gcaggaggttcctagagtt

SEQ ID NO: 351348 - DNA, 19 bp, Homo sapiens
  siRNA target sequence for FNBP4 (NM_015308.1,261-279).
ggaggttcctagagttgtt

SEQ ID NO: 351349 - DNA, 19 bp, Homo sapiens
  siRNA target sequence for FNBP4 (NM_015308.1,308-326).
ctagacccacagctgttaa

SEQ ID NO: 351350 - DNA, 19 bp, Homo sapiens
  siRNA target sequence for FNBP4 (NM_015308.1,424-442).
ggaaaccagtcaactgata

SEQ ID NO: 351351 - DNA, 19 bp, Homo sapiens
  siRNA target sequence for FNBP4 (NM_015308.1,425-443).
gaaaccagtcaactgatat

SEQ ID NO: 351352 - DNA, 19 bp, Homo sapiens
  siRNA target sequence for FNBP4 (NM_015308.1,430-448).
cagtcaactgatattgata

SEQ ID NO: 351353 - DNA, 19 bp, Homo sapiens
  siRNA target sequence for FNBP4 (NM_015308.1,432-450).
gtcaactgatattgatagt

SEQ ID NO: 351354 - DNA, 19 bp, Homo sapiens
  siRNA target sequence for FNBP4 (NM_015308.1,471-489).
ggagatcgatgccataaca

SEQ ID NO: 351355 - DNA, 19 bp, Homo sapiens
  siRNA target sequence for FNBP4 (NM_015308.1,623-641).
gttggcaatatgatactca

SEQ ID NO: 351356 - DNA, 19 bp, Homo sapiens
  siRNA target sequence for FNBP4 (NM_015308.1,697-715).
gagaacacgggatgttatt

SEQ ID NO: 351357 - DNA, 19 bp, Homo sapiens
  siRNA target sequence for FNBP4 (NM_015308.1,699-717).
gaacacgggatgttattat

SEQ ID NO: 351358 - DNA, 19 bp, Homo sapiens
  siRNA target sequence for FNBP4 (NM_015308.1,702-720).
cacgggatgttattattat

SEQ ID NO: 351359 - DNA, 19 bp, Homo sapiens
  siRNA target sequence for FNBP4 (NM_015308.1,907-925).
gccaagcgagaagttaaaa

SEQ ID NO: 351360 - DNA, 19 bp, Homo sapiens
  siRNA target sequence for FNBP4 (NM_015308.1,941-959).
gaattcaggctctctcaaa

SEQ ID NO: 351361 - DNA, 19 bp, Homo sapiens
  siRNA target sequence for FNBP4 (NM_015308.1,992-1010).
cgctgcttgctcctttatt

SEQ ID NO: 351362 - DNA, 19 bp, Homo sapiens
  siRNA target sequence for FNBP4 (NM_015308.1,1311-1329).
gtctagtccacgttctgat

SEQ ID NO: 351363 - DNA, 19 bp, Homo sapiens
  siRNA target sequence for FNBP4 (NM_015308.1,1313-1331).
ctagtccacgttctgatat

SEQ ID NO: 351364 - DNA, 19 bp, Homo sapiens
  siRNA target sequence for FNBP4 (NM_015308.1,1354-1372).
ggaatgcgtaggcttatgt

SEQ ID NO: 351365 - DNA, 19 bp, Homo sapiens
  siRNA target sequence for FNBP4 (NM_015308.1,1359-1377).
gcgtaggcttatgtctaaa

SEQ ID NO: 351366 - DNA, 19 bp, Homo sapiens
  siRNA target sequence for FNBP4 (NM_015308.1,1360-1378).
cgtaggcttatgtctaaaa

SEQ ID NO: 351367 - DNA, 19 bp, Homo sapiens
  siRNA target sequence for FNBP4 (NM_015308.1,1424-1442).
ccagtaggagttctagtaa

SEQ ID NO: 351368 - DNA, 19 bp, Homo sapiens
  siRNA target sequence for FNBP4 (NM_015308.1,1425-1443).
cagtaggagttctagtaaa

SEQ ID NO: 351369 - DNA, 19 bp, Homo sapiens
  siRNA target sequence for FNBP4 (NM_015308.1,1628-1646).
ccctgacaagtaaattcga

SEQ ID NO: 351370 - DNA, 19 bp, Homo sapiens
  siRNA target sequence for FNBP4 (NM_015308.1,1644-1662).
cgagtttctaggcattaat

SEQ ID NO: 351371 - DNA, 19 bp, Homo sapiens
  siRNA target sequence for FNBP4 (NM_015308.1,1651-1669).
ctaggcattaatagacaat

SEQ ID NO: 351372 - DNA, 19 bp, Homo sapiens
  siRNA target sequence for FNBP4 (NM_015308.1,1701-1719).
gactgagactcgaattgca

SEQ ID NO: 351373 - DNA, 19 bp, Homo sapiens
  siRNA target sequence for FNBP4 (NM_015308.1,1724-1742).
ggcgggaaggggctcttaa

SEQ ID NO: 351374 - DNA, 19 bp, Homo sapiens
  siRNA target sequence for FNBP4 (NM_015308.1,1725-1743).
gcgggaaggggctcttaat

SEQ ID NO: 351375 - DNA, 19 bp, Homo sapiens
  siRNA target sequence for FNBP4 (NM_015308.1,1729-1747).
gaaggggctcttaatggaa

SEQ ID NO: 351376 - DNA, 19 bp, Homo sapiens
  siRNA target sequence for FNBP4 (NM_015308.1,1733-1751).
gggctcttaatggaaacta

SEQ ID NO: 351377 - DNA, 19 bp, Homo sapiens
  siRNA target sequence for FNBP4 (NM_015308.1,1744-1762).
ggaaactaccttaaacgaa

SEQ ID NO: 351378 - DNA, 19 bp, Homo sapiens
  siRNA target sequence for FNBP4 (NM_015308.1,1745-1763).
gaaactaccttaaacgaaa

SEQ ID NO: 351379 - DNA, 19 bp, Homo sapiens
  siRNA target sequence for FNBP4 (NM_015308.1,1749-1767).
ctaccttaaacgaaaactt

SEQ ID NO: 351380 - DNA, 19 bp, Homo sapiens
  siRNA target sequence for FNBP4 (NM_015308.1,1770-1788).
ggatgcagcagaacaacta

SEQ ID NO: 351381 - DNA, 19 bp, Homo sapiens
  siRNA target sequence for FNBP4 (NM_015308.1,1841-1859).
gggatcatagacggtattt

SEQ ID NO: 351382 - DNA, 19 bp, Homo sapiens
  siRNA target sequence for FNBP4 (NM_015308.1,1843-1861).
gatcatagacggtatttct

SEQ ID NO: 351383 - DNA, 19 bp, Homo sapiens
  siRNA target sequence for FNBP4 (NM_015308.1,1980-1998).
caaaactggcactgattca

SEQ ID NO: 351384 - DNA, 19 bp, Homo sapiens
  siRNA target sequence for FNBP4 (NM_015308.1,1987-2005).
ggcactgattcaaattcaa

SEQ ID NO: 351385 - DNA, 19 bp, Homo sapiens
  siRNA target sequence for FNBP4 (NM_015308.1,1989-2007).
cactgattcaaattcaaca

SEQ ID NO: 351386 - DNA, 19 bp, Homo sapiens
  siRNA target sequence for FNBP4 (NM_015308.1,2293-2311).
gatacccctttgaaacctt

SEQ ID NO: 351387 - DNA, 19 bp, Homo sapiens
  siRNA target sequence for FNBP4 (NM_015308.1,2355-2373).
caccatctctagttcttct

SEQ ID NO: 351388 - DNA, 19 bp, Homo sapiens
  siRNA target sequence for FNBP4 (NM_015308.1,2460-2478).
ctatagccagtcagctata

SEQ ID NO: 351389 - DNA, 19 bp, Homo sapiens
  siRNA target sequence for FNBP4 (NM_015308.1,2623-2641).
gcacctgcaattatgagtt

SEQ ID NO: 351390 - DNA, 19 bp, Homo sapiens
  siRNA target sequence for FNBP4 (NM_015308.1,2624-2642).
cacctgcaattatgagtta

SEQ ID NO: 351391 - DNA, 19 bp, Homo sapiens
  siRNA target sequence for FNBP4 (NM_015308.1,2710-2728).
gtgcctaccgctaccatta

SEQ ID NO: 351392 - DNA, 19 bp, Homo sapiens
  siRNA target sequence for FNBP4 (NM_015308.1,2712-2730).
gcctaccgctaccattata

SEQ ID NO: 351393 - DNA, 19 bp, Homo sapiens
  siRNA target sequence for FNBP4 (NM_015308.1,2714-2732).
ctaccgctaccattataga

SEQ ID NO: 351394 - DNA, 19 bp, Homo sapiens
  siRNA target sequence for FNBP4 (NM_015308.1,2896-2914).
gaagaggacaattctagtt

SEQ ID NO: 351395 - DNA, 19 bp, Homo sapiens
  siRNA target sequence for FNBP4 (NM_015308.1,2939-2957).
ctgcacagaagcgaattga

SEQ ID NO: 351396 - DNA, 19 bp, Homo sapiens
  siRNA target sequence for FNBP4 (NM_015308.1,2993-3011).
cagagagaaatgctaattt

SEQ ID NO: 351397 - DNA, 19 bp, Homo sapiens
  siRNA target sequence for EFA6R (NM_015310.1,92-110).
gccagcgactccatctaca

SEQ ID NO: 351398 - DNA, 19 bp, Homo sapiens
  siRNA target sequence for EFA6R (NM_015310.1,116-134).
ggcaccccggagattgctt

SEQ ID NO: 351399 - DNA, 19 bp, Homo sapiens
  siRNA target sequence for EFA6R (NM_015310.1,185-203).
gaaatggggagcactgaaa

SEQ ID NO: 351400 - DNA, 19 bp, Homo sapiens
  siRNA target sequence for EFA6R (NM_015310.1,215-233).
gagaccccagaaaatctca

SEQ ID NO: 351401 - DNA, 19 bp, Homo sapiens
  siRNA target sequence for EFA6R (NM_015310.1,271-289).
gttggccaaacgcctttat

SEQ ID NO: 351402 - DNA, 19 bp, Homo sapiens
  siRNA target sequence for EFA6R (NM_015310.1,337-355).
gaacaacgaatttagcaaa

SEQ ID NO: 351403 - DNA, 19 bp, Homo sapiens
  siRNA target sequence for EFA6R (NM_015310.1,340-358).
caacgaatttagcaaacta

SEQ ID NO: 351404 - DNA, 19 bp, Homo sapiens
  siRNA target sequence for EFA6R (NM_015310.1,343-361).
cgaatttagcaaactagtt

SEQ ID NO: 351405 - DNA, 19 bp, Homo sapiens
  siRNA target sequence for EFA6R (NM_015310.1,352-370).
caaactagttgcagaagaa

SEQ ID NO: 351406 - DNA, 19 bp, Homo sapiens
  siRNA target sequence for EFA6R (NM_015310.1,407-425).
gatcagtcactcaggtatt

SEQ ID NO: 351407 - DNA, 19 bp, Homo sapiens
  siRNA target sequence for EFA6R (NM_015310.1,458-476).
caagaacgagagagagttt

SEQ ID NO: 351408 - DNA, 19 bp, Homo sapiens
  siRNA target sequence for EFA6R (NM_015310.1,484-502).
cttctccaatagatatttt

SEQ ID NO: 351409 - DNA, 19 bp, Homo sapiens
  siRNA target sequence for EFA6R (NM_015310.1,546-564).
gccttacctgtgcaataat

SEQ ID NO: 351410 - DNA, 19 bp, Homo sapiens
  siRNA target sequence for EFA6R (NM_015310.1,587-605).
ggccacgtgaatattggaa

SEQ ID NO: 351411 - DNA, 19 bp, Homo sapiens
  siRNA target sequence for EFA6R (NM_015310.1,588-606).
gccacgtgaatattggaaa

SEQ ID NO: 351412 - DNA, 19 bp, Homo sapiens
  siRNA target sequence for EFA6R (NM_015310.1,715-733).
gcttgaatgggcagtagat

SEQ ID NO: 351413 - DNA, 19 bp, Homo sapiens
  siRNA target sequence for EFA6R (NM_015310.1,775-793).
gaaagctaacggaacacat

SEQ ID NO: 351414 - DNA, 19 bp, Homo sapiens
  siRNA target sequence for EFA6R (NM_015310.1,780-798).
ctaacggaacacatccaaa

SEQ ID NO: 351415 - DNA, 19 bp, Homo sapiens
  siRNA target sequence for EFA6R (NM_015310.1,799-817).
gaccatcagtcgtattgga

SEQ ID NO: 351416 - DNA, 19 bp, Homo sapiens
  siRNA target sequence for EFA6R (NM_015310.1,805-823).
cagtcgtattggaagtact

SEQ ID NO: 351417 - DNA, 19 bp, Homo sapiens
  siRNA target sequence for EFA6R (NM_015310.1,809-827).
cgtattggaagtactacta

SEQ ID NO: 351418 - DNA, 19 bp, Homo sapiens
  siRNA target sequence for EFA6R (NM_015310.1,879-897).
gattcttggctcggaaaat

SEQ ID NO: 351419 - DNA, 19 bp, Homo sapiens
  siRNA target sequence for EFA6R (NM_015310.1,922-940).
gactccaagaggaaaacga

SEQ ID NO: 351420 - DNA, 19 bp, Homo sapiens
  siRNA target sequence for EFA6R (NM_015310.1,1077-1095).
ccacggactatgagaagaa

SEQ ID NO: 351421 - DNA, 19 bp, Homo sapiens
  siRNA target sequence for EFA6R (NM_015310.1,1307-1325).
ctgaagtcacatgaaagta

SEQ ID NO: 351422 - DNA, 19 bp, Homo sapiens
  siRNA target sequence for EFA6R (NM_015310.1,1351-1369).
ggccgagcaccgctcatat

SEQ ID NO: 351423 - DNA, 19 bp, Homo sapiens
  siRNA target sequence for EFA6R (NM_015310.1,1392-1410).
ccaaggacgtcgatgagta

SEQ ID NO: 351424 - DNA, 19 bp, Homo sapiens
  siRNA target sequence for EFA6R (NM_015310.1,1396-1414).
ggacgtcgatgagtacaaa

SEQ ID NO: 351425 - DNA, 19 bp, Homo sapiens
  siRNA target sequence for EFA6R (NM_015310.1,1400-1418).
gtcgatgagtacaaactga

SEQ ID NO: 351426 - DNA, 19 bp, Homo sapiens
  siRNA target sequence for EFA6R (NM_015310.1,1424-1442).
cactatctggagtttgaga

SEQ ID NO: 351427 - DNA, 19 bp, Homo sapiens
  siRNA target sequence for EFA6R (NM_015310.1,1446-1464).
cccgctatgaaatgtatgt

SEQ ID NO: 351428 - DNA, 19 bp, Homo sapiens
  siRNA target sequence for EFA6R (NM_015310.1,1448-1466).
cgctatgaaatgtatgtca

SEQ ID NO: 351429 - DNA, 19 bp, Homo sapiens
  siRNA target sequence for EFA6R (NM_015310.1,1485-1503).
gcaaagagctactgagtaa

SEQ ID NO: 351430 - DNA, 19 bp, Homo sapiens
  siRNA target sequence for EFA6R (NM_015310.1,1552-1570).
gctgaacccggatacttct

SEQ ID NO: 351431 - DNA, 19 bp, Homo sapiens
  siRNA target sequence for EFA6R (NM_015310.1,1561-1579).
ggatacttctccaatcact

SEQ ID NO: 351432 - DNA, 19 bp, Homo sapiens
  siRNA target sequence for LARP (NM_015315.2,300-318).
ctttggagatgcaatcaat

SEQ ID NO: 351433 - DNA, 19 bp, Homo sapiens
  siRNA target sequence for LARP (NM_015315.2,641-659).
ccaatcgcggagagatcaa

SEQ ID NO: 351434 - DNA, 19 bp, Homo sapiens
  siRNA target sequence for LARP (NM_015315.2,642-660).
caatcgcggagagatcaaa

SEQ ID NO: 351435 - DNA, 19 bp, Homo sapiens
  siRNA target sequence for LARP (NM_015315.2,708-726).
ctggcaaccagagatcaaa

SEQ ID NO: 351436 - DNA, 19 bp, Homo sapiens
  siRNA target sequence for LARP (NM_015315.2,913-931).
cctcgtacgcccaagtaca

SEQ ID NO: 351437 - DNA, 19 bp, Homo sapiens
  siRNA target sequence for LARP (NM_015315.2,916-934).
cgtacgcccaagtacatga

SEQ ID NO: 351438 - DNA, 19 bp, Homo sapiens
  siRNA target sequence for LARP (NM_015315.2,917-935).
gtacgcccaagtacatgaa

SEQ ID NO: 351439 - DNA, 19 bp, Homo sapiens
  siRNA target sequence for LARP (NM_015315.2,920-938).
cgcccaagtacatgaacaa

SEQ ID NO: 351440 - DNA, 19 bp, Homo sapiens
  siRNA target sequence for LARP (NM_015315.2,944-962).
cctactactttgacaatgt

SEQ ID NO: 351441 - DNA, 19 bp, Homo sapiens
  siRNA target sequence for LARP (NM_015315.2,1011-1029).
catcaagcgccagattgaa

SEQ ID NO: 351442 - DNA, 19 bp, Homo sapiens
  siRNA target sequence for LARP (NM_015315.2,1019-1037).
gccagattgaatactactt

SEQ ID NO: 351443 - DNA, 19 bp, Homo sapiens
  siRNA target sequence for LARP (NM_015315.2,1035-1053).
cttcagcgtggacaattta

SEQ ID NO: 351444 - DNA, 19 bp, Homo sapiens
  siRNA target sequence for LARP (NM_015315.2,1098-1116).
cctacccatcacccttatt

SEQ ID NO: 351445 - DNA, 19 bp, Homo sapiens
  siRNA target sequence for LARP (NM_015315.2,1102-1120).
cccatcacccttattgctt

SEQ ID NO: 351446 - DNA, 19 bp, Homo sapiens
  siRNA target sequence for LARP (NM_015315.2,1137-1155).
ggcccttaccactgacatt

SEQ ID NO: 351447 - DNA, 19 bp, Homo sapiens
  siRNA target sequence for LARP (NM_015315.2,1138-1156).
gcccttaccactgacattt

SEQ ID NO: 351448 - DNA, 19 bp, Homo sapiens
  siRNA target sequence for LARP (NM_015315.2,1140-1158).
ccttaccactgacatttca

SEQ ID NO: 351449 - DNA, 19 bp, Homo sapiens
  siRNA target sequence for LARP (NM_015315.2,1197-1215).
gatcgttgatgagaaagtt

SEQ ID NO: 351450 - DNA, 19 bp, Homo sapiens
  siRNA target sequence for LARP (NM_015315.2,1312-1330).
ccccgtcagcactaccaaa

SEQ ID NO: 351451 - DNA, 19 bp, Homo sapiens
  siRNA target sequence for LARP (NM_015315.2,1313-1331).
cccgtcagcactaccaaaa

SEQ ID NO: 351452 - DNA, 19 bp, Homo sapiens
  siRNA target sequence for LARP (NM_015315.2,1368-1386).
caccccagtgccaaccaaa

SEQ ID NO: 351453 - DNA, 19 bp, Homo sapiens
  siRNA target sequence for LARP (NM_015315.2,1495-1513).
ccagcacggcccaagaagt

SEQ ID NO: 351454 - DNA, 19 bp, Homo sapiens
  siRNA target sequence for LARP (NM_015315.2,1813-1831).
gaactggccaaggtcatta

SEQ ID NO: 351455 - DNA, 19 bp, Homo sapiens
  siRNA target sequence for LARP (NM_015315.2,1818-1836).
ggccaaggtcattaatgat

SEQ ID NO: 351456 - DNA, 19 bp, Homo sapiens
  siRNA target sequence for LARP (NM_015315.2,1892-1910).
cccagatcaagcaagaagt

SEQ ID NO: 351457 - DNA, 19 bp, Homo sapiens
  siRNA target sequence for LARP (NM_015315.2,2039-2057).
ccctggccaacaagttgtt

SEQ ID NO: 351458 - DNA, 19 bp, Homo sapiens
  siRNA target sequence for LARP (NM_015315.2,2040-2058).
cctggccaacaagttgttt

SEQ ID NO: 351459 - DNA, 19 bp, Homo sapiens
  siRNA target sequence for LARP (NM_015315.2,2229-2247).
caagatgcctcgaaaaaga

SEQ ID NO: 351460 - DNA, 19 bp, Homo sapiens
  siRNA target sequence for LARP (NM_015315.2,2450-2468).
cacaacacgtctaccataa

SEQ ID NO: 351461 - DNA, 19 bp, Homo sapiens
  siRNA target sequence for LARP (NM_015315.2,2458-2476).
gtctaccataagtatcgta

SEQ ID NO: 351462 - DNA, 19 bp, Homo sapiens
  siRNA target sequence for LARP (NM_015315.2,2474-2492).
gtaggcgctgccttaatga

SEQ ID NO: 351463 - DNA, 19 bp, Homo sapiens
  siRNA target sequence for LARP (NM_015315.2,2621-2639).
ccaaagaaggctacagata

SEQ ID NO: 351464 - DNA, 19 bp, Homo sapiens
  siRNA target sequence for LARP (NM_015315.2,2769-2787).
gttctgggccttcttgaaa

SEQ ID NO: 351465 - DNA, 19 bp, Homo sapiens
  siRNA target sequence for LARP (NM_015315.2,2772-2790).
ctgggccttcttgaaatat

SEQ ID NO: 351466 - DNA, 19 bp, Homo sapiens
  siRNA target sequence for P114-RHO-GEF (NM_015318.1,167-185).
gcaactcggaccaatcaca

SEQ ID NO: 351467 - DNA, 19 bp, Homo sapiens
  siRNA target sequence for P114-RHO-GEF (NM_015318.1,201-219).
gccgattctgcgtttttaa

SEQ ID NO: 351468 - DNA, 19 bp, Homo sapiens
  siRNA target sequence for P114-RHO-GEF (NM_015318.1,202-220).
ccgattctgcgtttttaaa

SEQ ID NO: 351469 - DNA, 19 bp, Homo sapiens
  siRNA target sequence for P114-RHO-GEF (NM_015318.1,261-279).
ccaaacaccgagtccattt

SEQ ID NO: 351470 - DNA, 19 bp, Homo sapiens
  siRNA target sequence for P114-RHO-GEF (NM_015318.1,262-280).
caaacaccgagtccatttt

SEQ ID NO: 351471 - DNA, 19 bp, Homo sapiens
  siRNA target sequence for P114-RHO-GEF (NM_015318.1,268-286).
ccgagtccatttttgtaga

SEQ ID NO: 351472 - DNA, 19 bp, Homo sapiens
  siRNA target sequence for P114-RHO-GEF (NM_015318.1,269-287).
cgagtccatttttgtagaa

SEQ ID NO: 351473 - DNA, 19 bp, Homo sapiens
  siRNA target sequence for P114-RHO-GEF (NM_015318.1,325-343).
cagacggccacgagtttga

SEQ ID NO: 351474 - DNA, 19 bp, Homo sapiens
  siRNA target sequence for P114-RHO-GEF (NM_015318.1,376-394).
cctacgccaagaagcaaaa

SEQ ID NO: 351475 - DNA, 19 bp, Homo sapiens
  siRNA target sequence for P114-RHO-GEF (NM_015318.1,412-430).
gacaagatgtcctttatga

SEQ ID NO: 351476 - DNA, 19 bp, Homo sapiens
  siRNA target sequence for P114-RHO-GEF (NM_015318.1,456-474).
gtgcggacgctcaagatca

SEQ ID NO: 351477 - DNA, 19 bp, Homo sapiens
  siRNA target sequence for P114-RHO-GEF (NM_015318.1,626-644).
gggcagtgaccggaattat

SEQ ID NO: 351478 - DNA, 19 bp, Homo sapiens
  siRNA target sequence for P114-RHO-GEF (NM_015318.1,628-646).
gcagtgaccggaattatgt

SEQ ID NO: 351479 - DNA, 19 bp, Homo sapiens
  siRNA target sequence for P114-RHO-GEF (NM_015318.1,631-649).
gtgaccggaattatgtcat

SEQ ID NO: 351480 - DNA, 19 bp, Homo sapiens
  siRNA target sequence for P114-RHO-GEF (NM_015318.1,716-734).
gtacggtgtgttttgtagt

SEQ ID NO: 351481 - DNA, 19 bp, Homo sapiens
  siRNA target sequence for P114-RHO-GEF (NM_015318.1,747-765).
gctgttagtcattacaagt

SEQ ID NO: 351482 - DNA, 19 bp, Homo sapiens
  siRNA target sequence for P114-RHO-GEF (NM_015318.1,748-766).
ctgttagtcattacaagtt

SEQ ID NO: 351483 - DNA, 19 bp, Homo sapiens
  siRNA target sequence for P114-RHO-GEF (NM_015318.1,868-886).
cacaacgcataaccaaata

SEQ ID NO: 351484 - DNA, 19 bp, Homo sapiens
  siRNA target sequence for P114-RHO-GEF (NM_015318.1,928-946).
gcactgaggactatgaaga

SEQ ID NO: 351485 - DNA, 19 bp, Homo sapiens
  siRNA target sequence for P114-RHO-GEF (NM_015318.1,1154-1172).
cacatcagggcgcttgaaa

SEQ ID NO: 351486 - DNA, 19 bp, Homo sapiens
  siRNA target sequence for P114-RHO-GEF (NM_015318.1,1156-1174).
catcagggcgcttgaaaga

SEQ ID NO: 351487 - DNA, 19 bp, Homo sapiens
  siRNA target sequence for P114-RHO-GEF (NM_015318.1,1159-1177).
cagggcgcttgaaagatat

SEQ ID NO: 351488 - DNA, 19 bp, Homo sapiens
  siRNA target sequence for P114-RHO-GEF (NM_015318.1,1188-1206).
ctgctgaccgacgtacttt

SEQ ID NO: 351489 - DNA, 19 bp, Homo sapiens
  siRNA target sequence for P114-RHO-GEF (NM_015318.1,1263-1281).
cccgtcatctcgttacaaa

SEQ ID NO: 351490 - DNA, 19 bp, Homo sapiens
  siRNA target sequence for P114-RHO-GEF (NM_015318.1,1264-1282).
ccgtcatctcgttacaaaa

SEQ ID NO: 351491 - DNA, 19 bp, Homo sapiens
  siRNA target sequence for P114-RHO-GEF (NM_015318.1,1350-1368).
ccggagatgtatgaaatct

SEQ ID NO: 351492 - DNA, 19 bp, Homo sapiens
  siRNA target sequence for P114-RHO-GEF (NM_015318.1,1351-1369).
cggagatgtatgaaatcta

SEQ ID NO: 351493 - DNA, 19 bp, Homo sapiens
  siRNA target sequence for P114-RHO-GEF (NM_015318.1,1501-1519).
cgagactccgggactttca

SEQ ID NO: 351494 - DNA, 19 bp, Homo sapiens
  siRNA target sequence for P114-RHO-GEF (NM_015318.1,1668-1686).
cagggggagctaattctca

SEQ ID NO: 351495 - DNA, 19 bp, Homo sapiens
  siRNA target sequence for P114-RHO-GEF (NM_015318.1,3130-3148).
gcaaagaagacgtcatctt

SEQ ID NO: 351496 - DNA, 19 bp, Homo sapiens
  siRNA target sequence for MECT1 (NM_015321.1,31-49).
cgaacaatccgcggaaatt

SEQ ID NO: 351497 - DNA, 19 bp, Homo sapiens
  siRNA target sequence for MECT1 (NM_015321.1,184-202).
ccagccgaggccagtacta

SEQ ID NO: 351498 - DNA, 19 bp, Homo sapiens
  siRNA target sequence for MECT1 (NM_015321.1,185-203).
cagccgaggccagtactat

SEQ ID NO: 351499 - DNA, 19 bp, Homo sapiens
  siRNA target sequence for MECT1 (NM_015321.1,667-685).
gtgaggtccccggaatcaa

SEQ ID NO: 351500 - DNA, 19 bp, Homo sapiens
  siRNA target sequence for KIAA0776 (NM_015323.2,38-56).
cggacgcctgggaagagat

SEQ ID NO: 351501 - DNA, 19 bp, Homo sapiens
  siRNA target sequence for KIAA0776 (NM_015323.2,39-57).
ggacgcctgggaagagatt

SEQ ID NO: 351502 - DNA, 19 bp, Homo sapiens
  siRNA target sequence for KIAA0776 (NM_015323.2,40-58).
gacgcctgggaagagatta

SEQ ID NO: 351503 - DNA, 19 bp, Homo sapiens
  siRNA target sequence for KIAA0776 (NM_015323.2,120-138).
gcggaactgcattgagatt

SEQ ID NO: 351504 - DNA, 19 bp, Homo sapiens
  siRNA target sequence for KIAA0776 (NM_015323.2,123-141).
gaactgcattgagattgtt

SEQ ID NO: 351505 - DNA, 19 bp, Homo sapiens
  siRNA target sequence for KIAA0776 (NM_015323.2,163-181).
cagctagaagtagttcata

SEQ ID NO: 351506 - DNA, 19 bp, Homo sapiens
  siRNA target sequence for KIAA0776 (NM_015323.2,165-183).
gctagaagtagttcataca

SEQ ID NO: 351507 - DNA, 19 bp, Homo sapiens
  siRNA target sequence for KIAA0776 (NM_015323.2,182-200).
cactcgatggaaaggaata

SEQ ID NO: 351508 - DNA, 19 bp, Homo sapiens
  siRNA target sequence for KIAA0776 (NM_015323.2,250-268).
cgaggtggtcgagtaaaca

SEQ ID NO: 351509 - DNA, 19 bp, Homo sapiens
  siRNA target sequence for KIAA0776 (NM_015323.2,251-269).
gaggtggtcgagtaaacat

SEQ ID NO: 351510 - DNA, 19 bp, Homo sapiens
  siRNA target sequence for KIAA0776 (NM_015323.2,257-275).
gtcgagtaaacattgttga

SEQ ID NO: 351511 - DNA, 19 bp, Homo sapiens
  siRNA target sequence for KIAA0776 (NM_015323.2,260-278).
gagtaaacattgttgatct

SEQ ID NO: 351512 - DNA, 19 bp, Homo sapiens
  siRNA target sequence for KIAA0776 (NM_015323.2,274-292).
gatctacaacaggtaatta

SEQ ID NO: 351513 - DNA, 19 bp, Homo sapiens
  siRNA target sequence for KIAA0776 (NM_015323.2,297-315).
ggacctgattcatattgaa

SEQ ID NO: 351514 - DNA, 19 bp, Homo sapiens
  siRNA target sequence for KIAA0776 (NM_015323.2,508-526).
cagcgacttggtagaatta

SEQ ID NO: 351515 - DNA, 19 bp, Homo sapiens
  siRNA target sequence for KIAA0776 (NM_015323.2,521-539).
gaattatcagtggacatat

SEQ ID NO: 351516 - DNA, 19 bp, Homo sapiens
  siRNA target sequence for KIAA0776 (NM_015323.2,528-546).
cagtggacatattgatctt

SEQ ID NO: 351517 - DNA, 19 bp, Homo sapiens
  siRNA target sequence for KIAA0776 (NM_015323.2,533-551).
gacatattgatcttgataa

SEQ ID NO: 351518 - DNA, 19 bp, Homo sapiens
  siRNA target sequence for KIAA0776 (NM_015323.2,575-593).
cttttgtagctcgacataa

SEQ ID NO: 351519 - DNA, 19 bp, Homo sapiens
  siRNA target sequence for KIAA0776 (NM_015323.2,596-614).
cacgtatccgtggactatt

SEQ ID NO: 351520 - DNA, 19 bp, Homo sapiens
  siRNA target sequence for KIAA0776 (NM_015323.2,598-616).
cgtatccgtggactattca

SEQ ID NO: 351521 - DNA, 19 bp, Homo sapiens
  siRNA target sequence for KIAA0776 (NM_015323.2,630-648).
gcctacagctgtgaattct

SEQ ID NO: 351522 - DNA, 19 bp, Homo sapiens
  siRNA target sequence for KIAA0776 (NM_015323.2,672-690).
ggagcagcttctttactct

SEQ ID NO: 351523 - DNA, 19 bp, Homo sapiens
  siRNA target sequence for KIAA0776 (NM_015323.2,794-812).
gtacttgggtggattcctt

SEQ ID NO: 351524 - DNA, 19 bp, Homo sapiens
  siRNA target sequence for KIAA0776 (NM_015323.2,816-834).
caggcagaatggctatcta

SEQ ID NO: 351525 - DNA, 19 bp, Homo sapiens
  siRNA target sequence for KIAA0776 (NM_015323.2,818-836).
ggcagaatggctatctaga

SEQ ID NO: 351526 - DNA, 19 bp, Homo sapiens
  siRNA target sequence for KIAA0776 (NM_015323.2,819-837).
gcagaatggctatctagaa

SEQ ID NO: 351527 - DNA, 19 bp, Homo sapiens
  siRNA target sequence for KIAA0776 (NM_015323.2,820-838).
cagaatggctatctagaat

SEQ ID NO: 351528 - DNA, 19 bp, Homo sapiens
  siRNA target sequence for KIAA0776 (NM_015323.2,900-918).
gactacacaactcttgttt

SEQ ID NO: 351529 - DNA, 19 bp, Homo sapiens
  siRNA target sequence for KIAA0776 (NM_015323.2,1015-1033).
ctgctacccacttctttat

SEQ ID NO: 351530 - DNA, 19 bp, Homo sapiens
  siRNA target sequence for KIAA0776 (NM_015323.2,1023-1041).
cacttctttatcagttgaa

SEQ ID NO: 351531 - DNA, 19 bp, Homo sapiens
  siRNA target sequence for KIAA0776 (NM_015323.2,1104-1122).
ctttagcgacactgttgta

SEQ ID NO: 351532 - DNA, 19 bp, Homo sapiens
  siRNA target sequence for KIAA0776 (NM_015323.2,1117-1135).
gttgtagtcagtgaaaaat

SEQ ID NO: 351533 - DNA, 19 bp, Homo sapiens
  siRNA target sequence for KIAA0776 (NM_015323.2,1259-1277).
gcgttagtacaagtaaaaa

SEQ ID NO: 351534 - DNA, 19 bp, Homo sapiens
  siRNA target sequence for KIAA0776 (NM_015323.2,1351-1369).
gccagagagtacaaaatta

SEQ ID NO: 351535 - DNA, 19 bp, Homo sapiens
  siRNA target sequence for KIAA0776 (NM_015323.2,1352-1370).
ccagagagtacaaaattaa

SEQ ID NO: 351536 - DNA, 19 bp, Homo sapiens
  siRNA target sequence for KIAA0776 (NM_015323.2,1529-1547).
cggaacttgctgagtactt

SEQ ID NO: 351537 - DNA, 19 bp, Homo sapiens
  siRNA target sequence for KIAA0776 (NM_015323.2,1530-1548).
ggaacttgctgagtactta

SEQ ID NO: 351538 - DNA, 19 bp, Homo sapiens
  siRNA target sequence for KIAA0776 (NM_015323.2,1531-1549).
gaacttgctgagtacttaa

SEQ ID NO: 351539 - DNA, 19 bp, Homo sapiens
  siRNA target sequence for KIAA0776 (NM_015323.2,1534-1552).
cttgctgagtacttaataa

SEQ ID NO: 351540 - DNA, 19 bp, Homo sapiens
  siRNA target sequence for KIAA0776 (NM_015323.2,1575-1593).
cgaggtggtacgttcagta

SEQ ID NO: 351541 - DNA, 19 bp, Homo sapiens
  siRNA target sequence for KIAA0776 (NM_015323.2,1576-1594).
gaggtggtacgttcagtat

SEQ ID NO: 351542 - DNA, 19 bp, Homo sapiens
  siRNA target sequence for KIAA0776 (NM_015323.2,1579-1597).
gtggtacgttcagtattca

SEQ ID NO: 351543 - DNA, 19 bp, Homo sapiens
  siRNA target sequence for KIAA0776 (NM_015323.2,1591-1609).
gtattcatgtcttcaacaa

SEQ ID NO: 351544 - DNA, 19 bp, Homo sapiens
  siRNA target sequence for KIAA0776 (NM_015323.2,1628-1646).
gcagaaaacgcacaatcaa

SEQ ID NO: 351545 - DNA, 19 bp, Homo sapiens
  siRNA target sequence for KIAA0776 (NM_015323.2,1663-1681).
gtttcaaacctgtacaata

SEQ ID NO: 351546 - DNA, 19 bp, Homo sapiens
  siRNA target sequence for KIAA0776 (NM_015323.2,1674-1692).
gtacaataacattaggtta

SEQ ID NO: 351547 - DNA, 19 bp, Homo sapiens
  siRNA target sequence for KIAA0776 (NM_015323.2,1732-1750).
gctgctcttaccaaacact

SEQ ID NO: 351548 - DNA, 19 bp, Homo sapiens
  siRNA target sequence for KIAA0776 (NM_015323.2,1733-1751).
ctgctcttaccaaacactt

SEQ ID NO: 351549 - DNA, 19 bp, Homo sapiens
  siRNA target sequence for KIAA0776 (NM_015323.2,1794-1812).
cttcttagcttcggattta

SEQ ID NO: 351550 - DNA, 19 bp, Homo sapiens
  siRNA target sequence for KIAA0776 (NM_015323.2,1827-1845).
cgatcctgcagccattaca

SEQ ID NO: 351551 - DNA, 19 bp, Homo sapiens
  siRNA target sequence for KIAA0776 (NM_015323.2,1828-1846).
gatcctgcagccattacaa

SEQ ID NO: 351552 - DNA, 19 bp, Homo sapiens
  siRNA target sequence for KIAA0776 (NM_015323.2,1911-1929).
ccataactctctgaatgaa

SEQ ID NO: 351553 - DNA, 19 bp, Homo sapiens
  siRNA target sequence for KIAA0776 (NM_015323.2,2069-2087).
cagaagaccctgctcttat

SEQ ID NO: 351554 - DNA, 19 bp, Homo sapiens
  siRNA target sequence for KIAA0776 (NM_015323.2,2153-2171).
gatgtgtcccacagatcat

SEQ ID NO: 351555 - DNA, 19 bp, Homo sapiens
  siRNA target sequence for KIAA0776 (NM_015323.2,2158-2176).
gtcccacagatcattgctt

SEQ ID NO: 351556 - DNA, 19 bp, Homo sapiens
  siRNA target sequence for KIAA0776 (NM_015323.2,2203-2221).
cagcatgctcttttggtaa

SEQ ID NO: 351557 - DNA, 19 bp, Homo sapiens
  siRNA target sequence for KIAA0776 (NM_015323.2,2210-2228).
ctcttttggtaaagtatca

SEQ ID NO: 351558 - DNA, 19 bp, Homo sapiens
  siRNA target sequence for KIAA0776 (NM_015323.2,2248-2266).
ctagtcagtcaaagtaaga

SEQ ID NO: 351559 - DNA, 19 bp, Homo sapiens
  siRNA target sequence for KIAA0776 (NM_015323.2,2277-2295).
gggagattatcccttgaat

SEQ ID NO: 351560 - DNA, 19 bp, Homo sapiens
  siRNA target sequence for KIAA0776 (NM_015323.2,2278-2296).
ggagattatcccttgaata

SEQ ID NO: 351561 - DNA, 19 bp, Homo sapiens
  siRNA target sequence for KIAA0776 (NM_015323.2,2279-2297).
gagattatcccttgaataa

SEQ ID NO: 351562 - DNA, 19 bp, Homo sapiens
  siRNA target sequence for KIAA0776 (NM_015323.2,2317-2335).
gaagatgttgccagtacta

SEQ ID NO: 351563 - DNA, 19 bp, Homo sapiens
  siRNA target sequence for KIAA0776 (NM_015323.2,2327-2345).
ccagtactactcgtaaaga

SEQ ID NO: 351564 - DNA, 19 bp, Homo sapiens
  siRNA target sequence for KIAA0776 (NM_015323.2,2374-2392).
gaccttgttctcaaatcta

SEQ ID NO: 351565 - DNA, 19 bp, Homo sapiens
  siRNA target sequence for KIAA0776 (NM_015323.2,2383-2401).
ctcaaatctaggaaatcat

SEQ ID NO: 351566 - DNA, 19 bp, Homo sapiens
  siRNA target sequence for KIAA0409 (NM_015324.2,159-177).
cggcctcctcgcaaaacaa

SEQ ID NO: 351567 - DNA, 19 bp, Homo sapiens
  siRNA target sequence for KIAA0409 (NM_015324.2,242-260).
catccccccagcctatgta

SEQ ID NO: 351568 - DNA, 19 bp, Homo sapiens
  siRNA target sequence for KIAA0409 (NM_015324.2,245-263).
ccccccagcctatgtataa

SEQ ID NO: 351569 - DNA, 19 bp, Homo sapiens
  siRNA target sequence for KIAA0409 (NM_015324.2,249-267).
ccagcctatgtataagtga

SEQ ID NO: 351570 - DNA, 19 bp, Homo sapiens
  siRNA target sequence for KIAA0409 (NM_015324.2,303-321).
gccccaaaaaggcatcatt

SEQ ID NO: 351571 - DNA, 19 bp, Homo sapiens
  siRNA target sequence for KIAA0409 (NM_015324.2,551-569).
gcctggaagggtagtacta

SEQ ID NO: 351572 - DNA, 19 bp, Homo sapiens
  siRNA target sequence for KIAA0409 (NM_015324.2,559-577).
gggtagtactacaaatgat

SEQ ID NO: 351573 - DNA, 19 bp, Homo sapiens
  siRNA target sequence for KIAA0409 (NM_015324.2,607-625).
ccctaaaccccctcataca

SEQ ID NO: 351574 - DNA, 19 bp, Homo sapiens
  siRNA target sequence for KIAA0409 (NM_015324.2,608-626).
cctaaaccccctcatacat

SEQ ID NO: 351575 - DNA, 19 bp, Homo sapiens
  siRNA target sequence for KIAA0409 (NM_015324.2,609-627).
ctaaaccccctcatacatt

SEQ ID NO: 351576 - DNA, 19 bp, Homo sapiens
  siRNA target sequence for KIAA0409 (NM_015324.2,642-660).
ggcggaaccggcaaaagaa

SEQ ID NO: 351577 - DNA, 19 bp, Homo sapiens
  siRNA target sequence for KIAA0409 (NM_015324.2,828-846).
gatttcgctacctcaatga

SEQ ID NO: 351578 - DNA, 19 bp, Homo sapiens
  siRNA target sequence for KIAA0409 (NM_015324.2,839-857).
ctcaatgaacagttgtact

SEQ ID NO: 351579 - DNA, 19 bp, Homo sapiens
  siRNA target sequence for KIAA0409 (NM_015324.2,1038-1056).
gccgcttggcttcaagtat

SEQ ID NO: 351580 - DNA, 19 bp, Homo sapiens
  siRNA target sequence for KIAA0409 (NM_015324.2,1175-1193).
ctgatgggaaccaacatca

SEQ ID NO: 351581 - DNA, 19 bp, Homo sapiens
  siRNA target sequence for KIAA0409 (NM_015324.2,1230-1248).
cagggggtctcctgaaagt

SEQ ID NO: 351582 - DNA, 19 bp, Homo sapiens
  siRNA target sequence for KIAA0409 (NM_015324.2,1344-1362).
gccatttcttcttgtttga

SEQ ID NO: 351583 - DNA, 19 bp, Homo sapiens
  siRNA target sequence for KIAA0409 (NM_015324.2,1351-1369).
cttcttgtttgatttccaa

SEQ ID NO: 351584 - DNA, 19 bp, Homo sapiens
  siRNA target sequence for EST1B (NM_015327.1,194-212).
caaaagtcctccacactaa

SEQ ID NO: 351585 - DNA, 19 bp, Homo sapiens
  siRNA target sequence for EST1B (NM_015327.1,256-274).
ctcatcctttgcaacaaaa

SEQ ID NO: 351586 - DNA, 19 bp, Homo sapiens
  siRNA target sequence for EST1B (NM_015327.1,266-284).
gcaacaaaactgcttatca

SEQ ID NO: 351587 - DNA, 19 bp, Homo sapiens
  siRNA target sequence for EST1B (NM_015327.1,277-295).
gcttatcaagaagtattca

SEQ ID NO: 351588 - DNA, 19 bp, Homo sapiens
  siRNA target sequence for EST1B (NM_015327.1,331-349).
gagctctgcgtcaagctta

SEQ ID NO: 351589 - DNA, 19 bp, Homo sapiens
  siRNA target sequence for EST1B (NM_015327.1,334-352).
ctctgcgtcaagcttatgt

SEQ ID NO: 351590 - DNA, 19 bp, Homo sapiens
  siRNA target sequence for EST1B (NM_015327.1,424-442).
cagcttatcaagactaaca

SEQ ID NO: 351591 - DNA, 19 bp, Homo sapiens
  siRNA target sequence for EST1B (NM_015327.1,426-444).
gcttatcaagactaacaaa

SEQ ID NO: 351592 - DNA, 19 bp, Homo sapiens
  siRNA target sequence for EST1B (NM_015327.1,427-445).
cttatcaagactaacaaaa

SEQ ID NO: 351593 - DNA, 19 bp, Homo sapiens
  siRNA target sequence for EST1B (NM_015327.1,489-507).
gcacctggttgctggtatt

SEQ ID NO: 351594 - DNA, 19 bp, Homo sapiens
  siRNA target sequence for EST1B (NM_015327.1,676-694).
gtgtatctgggggatttgt

SEQ ID NO: 351595 - DNA, 19 bp, Homo sapiens
  siRNA target sequence for EST1B (NM_015327.1,686-704).
gggatttgtcccgatatca

SEQ ID NO: 351596 - DNA, 19 bp, Homo sapiens
  siRNA target sequence for EST1B (NM_015327.1,688-706).
gatttgtcccgatatcaga

SEQ ID NO: 351597 - DNA, 19 bp, Homo sapiens
  siRNA target sequence for EST1B (NM_015327.1,696-714).
ccgatatcagaatgaatta

SEQ ID NO: 351598 - DNA, 19 bp, Homo sapiens
  siRNA target sequence for EST1B (NM_015327.1,709-727).
gaattagctggcgtagata

SEQ ID NO: 351599 - DNA, 19 bp, Homo sapiens
  siRNA target sequence for EST1B (NM_015327.1,736-754).
ctagccgagagattttact

SEQ ID NO: 351600 - DNA, 19 bp, Homo sapiens
  siRNA target sequence for EST1B (NM_015327.1,769-787).
gtagctcctcagattggaa

SEQ ID NO: 351601 - DNA, 19 bp, Homo sapiens
  siRNA target sequence for EST1B (NM_015327.1,780-798).
gattggaatgcccttcaat

SEQ ID NO: 351602 - DNA, 19 bp, Homo sapiens
  siRNA target sequence for EST1B (NM_015327.1,811-829).
ctggcaggcagcaagtact

SEQ ID NO: 351603 - DNA, 19 bp, Homo sapiens
  siRNA target sequence for EST1B (NM_015327.1,814-832).
gcaggcagcaagtactata

SEQ ID NO: 351604 - DNA, 19 bp, Homo sapiens
  siRNA target sequence for EST1B (NM_015327.1,977-995).
ctggcaaaaagcgatgtaa

SEQ ID NO: 351605 - DNA, 19 bp, Homo sapiens
  siRNA target sequence for EST1B (NM_015327.1,1007-1025).
ggttgctagtgaactttat

SEQ ID NO: 351606 - DNA, 19 bp, Homo sapiens
  siRNA target sequence for EST1B (NM_015327.1,1176-1194).
gtatgagagtggatatgct

SEQ ID NO: 351607 - DNA, 19 bp, Homo sapiens
  siRNA target sequence for EST1B (NM_015327.1,1323-1341).
cgtcaatcatgtcaacata

SEQ ID NO: 351608 - DNA, 19 bp, Homo sapiens
  siRNA target sequence for EST1B (NM_015327.1,1490-1508).
gcagaaagagccgtaagtt

SEQ ID NO: 351609 - DNA, 19 bp, Homo sapiens
  siRNA target sequence for EST1B (NM_015327.1,1638-1656).
ctctgacaagagtcttgaa

SEQ ID NO: 351610 - DNA, 19 bp, Homo sapiens
  siRNA target sequence for EST1B (NM_015327.1,1714-1732).
cgatcagacttggaagata

SEQ ID NO: 351611 - DNA, 19 bp, Homo sapiens
  siRNA target sequence for EST1B (NM_015327.1,1835-1853).
gcattgccagcaatctaca

SEQ ID NO: 351612 - DNA, 19 bp, Homo sapiens
  siRNA target sequence for EST1B (NM_015327.1,1836-1854).
cattgccagcaatctacaa

SEQ ID NO: 351613 - DNA, 19 bp, Homo sapiens
  siRNA target sequence for EST1B (NM_015327.1,1970-1988).
gcgtcaatggggatgtaga

SEQ ID NO: 351614 - DNA, 19 bp, Homo sapiens
  siRNA target sequence for EST1B (NM_015327.1,2177-2195).
cgcagagctctcaaagtct

SEQ ID NO: 351615 - DNA, 19 bp, Homo sapiens
  siRNA target sequence for EST1B (NM_015327.1,2210-2228).
ctgtgttgctgaatctgtt

SEQ ID NO: 351616 - DNA, 19 bp, Homo sapiens
  siRNA target sequence for EST1B (NM_015327.1,2375-2393).
ctgcccacagacgctttaa

SEQ ID NO: 351617 - DNA, 19 bp, Homo sapiens
  siRNA target sequence for EST1B (NM_015327.1,2377-2395).
gcccacagacgctttaact

SEQ ID NO: 351618 - DNA, 19 bp, Homo sapiens
  siRNA target sequence for EST1B (NM_015327.1,2378-2396).
cccacagacgctttaactt

SEQ ID NO: 351619 - DNA, 19 bp, Homo sapiens
  siRNA target sequence for EST1B (NM_015327.1,2379-2397).
ccacagacgctttaacttt

SEQ ID NO: 351620 - DNA, 19 bp, Homo sapiens
  siRNA target sequence for EST1B (NM_015327.1,2459-2477).
gcagctttggtcatttcat

SEQ ID NO: 351621 - DNA, 19 bp, Homo sapiens
  siRNA target sequence for EST1B (NM_015327.1,2783-2801).
gccgcttcattgtcatcat

SEQ ID NO: 351622 - DNA, 19 bp, Homo sapiens
  siRNA target sequence for EST1B (NM_015327.1,2880-2898).
ggcagagtttaaaaaagga

SEQ ID NO: 351623 - DNA, 19 bp, Homo sapiens
  siRNA target sequence for EST1B (NM_015327.1,2971-2989).
gatgcctggactctctata

SEQ ID NO: 351624 - DNA, 19 bp, Homo sapiens
  siRNA target sequence for EST1B (NM_015327.1,2974-2992).
gcctggactctctataaga

SEQ ID NO: 351625 - DNA, 19 bp, Homo sapiens
  siRNA target sequence for KIAA1068 (NM_015332.2,532-550).
ctagggaaccaccaattct

SEQ ID NO: 351626 - DNA, 19 bp, Homo sapiens
  siRNA target sequence for KIAA1068 (NM_015332.2,622-640).
ggtcacaggactatactga

SEQ ID NO: 351627 - DNA, 19 bp, Homo sapiens
  siRNA target sequence for KIAA1068 (NM_015332.2,963-981).
gacaggcttacctttgact

SEQ ID NO: 351628 - DNA, 19 bp, Homo sapiens
  siRNA target sequence for HIP14 (NM_015336.1,789-807).
cttggacggaaaactcata

SEQ ID NO: 351629 - DNA, 19 bp, Homo sapiens
  siRNA target sequence for HIP14 (NM_015336.1,844-862).
cacaatatggaatatatga

SEQ ID NO: 351630 - DNA, 19 bp, Homo sapiens
  siRNA target sequence for HIP14 (NM_015336.1,932-950).
ccattgggctgccatcaat

SEQ ID NO: 351631 - DNA, 19 bp, Homo sapiens
  siRNA target sequence for HIP14 (NM_015336.1,933-951).
cattgggctgccatcaata

SEQ ID NO: 351632 - DNA, 19 bp, Homo sapiens
  siRNA target sequence for HIP14 (NM_015336.1,939-957).
gctgccatcaataacagaa

SEQ ID NO: 351633 - DNA, 19 bp, Homo sapiens
  siRNA target sequence for HIP14 (NM_015336.1,940-958).
ctgccatcaataacagaat

SEQ ID NO: 351634 - DNA, 19 bp, Homo sapiens
  siRNA target sequence for HIP14 (NM_015336.1,966-984).
gtcaaatactatatttcga

SEQ ID NO: 351635 - DNA, 19 bp, Homo sapiens
  siRNA target sequence for HIP14 (NM_015336.1,988-1006).
gtgctattgtggatcaact

SEQ ID NO: 351636 - DNA, 19 bp, Homo sapiens
  siRNA target sequence for HIP14 (NM_015336.1,1048-1066).
gacaaggccatctatccat

SEQ ID NO: 351637 - DNA, 19 bp, Homo sapiens
  siRNA target sequence for HIP14 (NM_015336.1,1063-1081).
ccatggttgtgcaactaat

SEQ ID NO: 351638 - DNA, 19 bp, Homo sapiens
  siRNA target sequence for HIP14 (NM_015336.1,1089-1107).
ggtgcagatccttcattaa

SEQ ID NO: 351639 - DNA, 19 bp, Homo sapiens
  siRNA target sequence for HIP14 (NM_015336.1,1148-1166).
gttcggacatacctcaatt

SEQ ID NO: 351640 - DNA, 19 bp, Homo sapiens
  siRNA target sequence for HIP14 (NM_015336.1,1170-1188).
gttgcttatctcatagcaa

SEQ ID NO: 351641 - DNA, 19 bp, Homo sapiens
  siRNA target sequence for HIP14 (NM_015336.1,1192-1210).
gacaggatgtagatatgat

SEQ ID NO: 351642 - DNA, 19 bp, Homo sapiens
  siRNA target sequence for HIP14 (NM_015336.1,1221-1239).
ggaatgacgcctttaatgt

SEQ ID NO: 351643 - DNA, 19 bp, Homo sapiens
  siRNA target sequence for HIP14 (NM_015336.1,1241-1259).
ggcagcatatagaacacat

SEQ ID NO: 351644 - DNA, 19 bp, Homo sapiens
  siRNA target sequence for HIP14 (NM_015336.1,1242-1260).
gcagcatatagaacacata

SEQ ID NO: 351645 - DNA, 19 bp, Homo sapiens
  siRNA target sequence for HIP14 (NM_015336.1,1246-1264).
catatagaacacatagtgt

SEQ ID NO: 351646 - DNA, 19 bp, Homo sapiens
  siRNA target sequence for HIP14 (NM_015336.1,1265-1283).
ggatccaactagattgctt

SEQ ID NO: 351647 - DNA, 19 bp, Homo sapiens
  siRNA target sequence for HIP14 (NM_015336.1,1280-1298).
gcttttaacattcaatgtt

SEQ ID NO: 351648 - DNA, 19 bp, Homo sapiens
  siRNA target sequence for HIP14 (NM_015336.1,1288-1306).
cattcaatgtttcagttaa

SEQ ID NO: 351649 - DNA, 19 bp, Homo sapiens
  siRNA target sequence for HIP14 (NM_015336.1,1292-1310).
caatgtttcagttaacctt

SEQ ID NO: 351650 - DNA, 19 bp, Homo sapiens
  siRNA target sequence for HIP14 (NM_015336.1,1311-1329).
ggtgacaagtatcacaaaa

SEQ ID NO: 351651 - DNA, 19 bp, Homo sapiens
  siRNA target sequence for HIP14 (NM_015336.1,1312-1330).
gtgacaagtatcacaaaaa

SEQ ID NO: 351652 - DNA, 19 bp, Homo sapiens
  siRNA target sequence for HIP14 (NM_015336.1,1359-1377).
gggaataccacagtcatta

SEQ ID NO: 351653 - DNA, 19 bp, Homo sapiens
  siRNA target sequence for HIP14 (NM_015336.1,1425-1443).
ggcgaatcagcgcttgatt

SEQ ID NO: 351654 - DNA, 19 bp, Homo sapiens
  siRNA target sequence for HIP14 (NM_015336.1,1426-1444).
gcgaatcagcgcttgattt

SEQ ID NO: 351655 - DNA, 19 bp, Homo sapiens
  siRNA target sequence for HIP14 (NM_015336.1,1435-1453).
cgcttgatttggcaaaaca

SEQ ID NO: 351656 - DNA, 19 bp, Homo sapiens
  siRNA target sequence for HIP14 (NM_015336.1,1437-1455).
cttgatttggcaaaacaga

SEQ ID NO: 351657 - DNA, 19 bp, Homo sapiens
  siRNA target sequence for HIP14 (NM_015336.1,1512-1530).
gacaatccgtccttcctta

SEQ ID NO: 351658 - DNA, 19 bp, Homo sapiens
  siRNA target sequence for HIP14 (NM_015336.1,1571-1589).
gttaggaactcctttccta

SEQ ID NO: 351659 - DNA, 19 bp, Homo sapiens
  siRNA target sequence for HIP14 (NM_015336.1,1598-1616).
gctggttgggtttatagca

SEQ ID NO: 351660 - DNA, 19 bp, Homo sapiens
  siRNA target sequence for HIP14 (NM_015336.1,1606-1624).
ggtttatagcagacctaaa

SEQ ID NO: 351661 - DNA, 19 bp, Homo sapiens
  siRNA target sequence for HIP14 (NM_015336.1,1607-1625).
gtttatagcagacctaaat

SEQ ID NO: 351662 - DNA, 19 bp, Homo sapiens
  siRNA target sequence for HIP14 (NM_015336.1,1614-1632).
gcagacctaaatattgatt

SEQ ID NO: 351663 - DNA, 19 bp, Homo sapiens
  siRNA target sequence for HIP14 (NM_015336.1,1638-1656).
ctcattaaagggctaatgt

SEQ ID NO: 351664 - DNA, 19 bp, Homo sapiens
  siRNA target sequence for HIP14 (NM_015336.1,1640-1658).
cattaaagggctaatgtat

SEQ ID NO: 351665 - DNA, 19 bp, Homo sapiens
  siRNA target sequence for HIP14 (NM_015336.1,1675-1693).
cagtacagtttctttcaaa

SEQ ID NO: 351666 - DNA, 19 bp, Homo sapiens
  siRNA target sequence for HIP14 (NM_015336.1,1696-1714).
cctttttcgatcattcaat

SEQ ID NO: 351667 - DNA, 19 bp, Homo sapiens
  siRNA target sequence for HIP14 (NM_015336.1,1723-1741).
cattgccccttgggatata

SEQ ID NO: 351668 - DNA, 19 bp, Homo sapiens
  siRNA target sequence for HIP14 (NM_015336.1,1736-1754).
gatatatttggcaaccaaa

SEQ ID NO: 351669 - DNA, 19 bp, Homo sapiens
  siRNA target sequence for HIP14 (NM_015336.1,1750-1768).
ccaaattctggatgtatgt

SEQ ID NO: 351670 - DNA, 19 bp, Homo sapiens
  siRNA target sequence for HIP14 (NM_015336.1,1774-1792).
ggttcttctggttttggaa

SEQ ID NO: 351671 - DNA, 19 bp, Homo sapiens
  siRNA target sequence for HIP14 (NM_015336.1,1837-1855).
gtgttgcacttttctacaa

SEQ ID NO: 351672 - DNA, 19 bp, Homo sapiens
  siRNA target sequence for HIP14 (NM_015336.1,1839-1857).
gttgcacttttctacaatt

SEQ ID NO: 351673 - DNA, 19 bp, Homo sapiens
  siRNA target sequence for HIP14 (NM_015336.1,1945-1963).
gaagtctggacctcagtat

SEQ ID NO: 351674 - DNA, 19 bp, Homo sapiens
  siRNA target sequence for HIP14 (NM_015336.1,1948-1966).
gtctggacctcagtatatt

SEQ ID NO: 351675 - DNA, 19 bp, Homo sapiens
  siRNA target sequence for HIP14 (NM_015336.1,1950-1968).
ctggacctcagtatattct

SEQ ID NO: 351676 - DNA, 19 bp, Homo sapiens
  siRNA target sequence for HIP14 (NM_015336.1,1972-1990).
gtacctgtttgatacgaaa

SEQ ID NO: 351677 - DNA, 19 bp, Homo sapiens
  siRNA target sequence for HIP14 (NM_015336.1,1992-2010).
ccggtgaggtccaaacatt

SEQ ID NO: 351678 - DNA, 19 bp, Homo sapiens
  siRNA target sequence for HIP14 (NM_015336.1,2018-2036).
gtgcaaccgctgtatagca

SEQ ID NO: 351679 - DNA, 19 bp, Homo sapiens
  siRNA target sequence for HIP14 (NM_015336.1,2020-2038).
gcaaccgctgtatagcaaa

SEQ ID NO: 351680 - DNA, 19 bp, Homo sapiens
  siRNA target sequence for HIP14 (NM_015336.1,2021-2039).
caaccgctgtatagcaaaa

SEQ ID NO: 351681 - DNA, 19 bp, Homo sapiens
  siRNA target sequence for HIP14 (NM_015336.1,2024-2042).
ccgctgtatagcaaaattt

SEQ ID NO: 351682 - DNA, 19 bp, Homo sapiens
  siRNA target sequence for HIP14 (NM_015336.1,2026-2044).
gctgtatagcaaaatttga

SEQ ID NO: 351683 - DNA, 19 bp, Homo sapiens
  siRNA target sequence for HIP14 (NM_015336.1,2076-2094).
ggtgcaggcaaccatagat

SEQ ID NO: 351684 - DNA, 19 bp, Homo sapiens
  siRNA target sequence for HIP14 (NM_015336.1,2077-2095).
gtgcaggcaaccatagata

SEQ ID NO: 351685 - DNA, 19 bp, Homo sapiens
  siRNA target sequence for HIP14 (NM_015336.1,2079-2097).
gcaggcaaccatagatatt

SEQ ID NO: 351686 - DNA, 19 bp, Homo sapiens
  siRNA target sequence for HIP14 (NM_015336.1,2080-2098).
caggcaaccatagatattt

SEQ ID NO: 351687 - DNA, 19 bp, Homo sapiens
  siRNA target sequence for HIP14 (NM_015336.1,2108-2126).
cctattcttcttgcttttt

SEQ ID NO: 351688 - DNA, 19 bp, Homo sapiens
  siRNA target sequence for HIP14 (NM_015336.1,2129-2147).
gatctgctggatgatttat

SEQ ID NO: 351689 - DNA, 19 bp, Homo sapiens
  siRNA target sequence for HIP14 (NM_015336.1,2172-2190).
cactgtgagaccacttaca

SEQ ID NO: 351690 - DNA, 19 bp, Homo sapiens
  siRNA target sequence for HIP14 (NM_015336.1,2185-2203).
cttacaccaaggatggatt

SEQ ID NO: 351691 - DNA, 19 bp, Homo sapiens
  siRNA target sequence for HIP14 (NM_015336.1,2207-2225).
gacatacattactcagatt

SEQ ID NO: 351692 - DNA, 19 bp, Homo sapiens
  siRNA target sequence for HIP14 (NM_015336.1,2309-2327).
gatgtaccagatatcatgt

SEQ ID NO: 351693 - DNA, 19 bp, Homo sapiens
  siRNA target sequence for HIP14 (NM_015336.1,2312-2330).
gtaccagatatcatgttta

SEQ ID NO: 351694 - DNA, 19 bp, Homo sapiens
  siRNA target sequence for HIP14 (NM_015336.1,2315-2333).
ccagatatcatgtttaggt

SEQ ID NO: 351695 - DNA, 19 bp, Homo sapiens
  siRNA target sequence for HIP14 (NM_015336.1,2384-2402).
cacaacaacgtctattgaa

SEQ ID NO: 351696 - DNA, 19 bp, Homo sapiens
  siRNA target sequence for HIP14 (NM_015336.1,2395-2413).
ctattgaaagcccattcaa

SEQ ID NO: 351697 - DNA, 19 bp, Homo sapiens
  siRNA target sequence for HIP14 (NM_015336.1,2411-2429).
caaccatggatgtgtaaga

SEQ ID NO: 351698 - DNA, 19 bp, Homo sapiens
  siRNA target sequence for HIP14 (NM_015336.1,2415-2433).
catggatgtgtaagaaata

SEQ ID NO: 351699 - DNA, 19 bp, Homo sapiens
  siRNA target sequence for HIP14 (NM_015336.1,2464-2482).
gcctctttcgtcctgttat

SEQ ID NO: 351700 - DNA, 19 bp, Homo sapiens
  siRNA target sequence for HIP14 (NM_015336.1,2491-2509).
ggaccaggcagtatacaat

SEQ ID NO: 351701 - DNA, 19 bp, Homo sapiens
  siRNA target sequence for HIP14 (NM_015336.1,2492-2510).
gaccaggcagtatacaata

SEQ ID NO: 351702 - DNA, 19 bp, Homo sapiens
  siRNA target sequence for HIP14 (NM_015336.1,2494-2512).
ccaggcagtatacaataga

SEQ ID NO: 351703 - DNA, 19 bp, Homo sapiens
  siRNA target sequence for HIP14 (NM_015336.1,2495-2513).
caggcagtatacaatagaa

SEQ ID NO: 351704 - DNA, 19 bp, Homo sapiens
  siRNA target sequence for HIP14 (NM_015336.1,2497-2515).
ggcagtatacaatagaata

SEQ ID NO: 351705 - DNA, 19 bp, Homo sapiens
  siRNA target sequence for BRRN1 (NM_015341.2,196-214).
ggaaggcgcctctcaatat

SEQ ID NO: 351706 - DNA, 19 bp, Homo sapiens
  siRNA target sequence for BRRN1 (NM_015341.2,197-215).
gaaggcgcctctcaatatt

SEQ ID NO: 351707 - DNA, 19 bp, Homo sapiens
  siRNA target sequence for BRRN1 (NM_015341.2,200-218).
ggcgcctctcaatattcct

SEQ ID NO: 351708 - DNA, 19 bp, Homo sapiens
  siRNA target sequence for BRRN1 (NM_015341.2,223-241).
ccccagtcctcgaagactt

SEQ ID NO: 351709 - DNA, 19 bp, Homo sapiens
  siRNA target sequence for BRRN1 (NM_015341.2,224-242).
cccagtcctcgaagacttt

SEQ ID NO: 351710 - DNA, 19 bp, Homo sapiens
  siRNA target sequence for BRRN1 (NM_015341.2,283-301).
gctcgagggtctttgatct

SEQ ID NO: 351711 - DNA, 19 bp, Homo sapiens
  siRNA target sequence for BRRN1 (NM_015341.2,313-331).
ctgactcacctcgcttatt

SEQ ID NO: 351712 - DNA, 19 bp, Homo sapiens
  siRNA target sequence for BRRN1 (NM_015341.2,340-358).
cctccagcaggagtattga

SEQ ID NO: 351713 - DNA, 19 bp, Homo sapiens
  siRNA target sequence for BRRN1 (NM_015341.2,343-361).
ccagcaggagtattgacat

SEQ ID NO: 351714 - DNA, 19 bp, Homo sapiens
  siRNA target sequence for BRRN1 (NM_015341.2,344-362).
cagcaggagtattgacatt

SEQ ID NO: 351715 - DNA, 19 bp, Homo sapiens
  siRNA target sequence for BRRN1 (NM_015341.2,366-384).
gctactatccccaagttta

SEQ ID NO: 351716 - DNA, 19 bp, Homo sapiens
  siRNA target sequence for BRRN1 (NM_015341.2,391-409).
cgcagattacggaacatta

SEQ ID NO: 351717 - DNA, 19 bp, Homo sapiens
  siRNA target sequence for BRRN1 (NM_015341.2,393-411).
cagattacggaacattact

SEQ ID NO: 351718 - DNA, 19 bp, Homo sapiens
  siRNA target sequence for BRRN1 (NM_015341.2,405-423).
cattactccacctgtatca

SEQ ID NO: 351719 - DNA, 19 bp, Homo sapiens
  siRNA target sequence for BRRN1 (NM_015341.2,466-484).
gtttgcacttgattgattt

SEQ ID NO: 351720 - DNA, 19 bp, Homo sapiens
  siRNA target sequence for BRRN1 (NM_015341.2,473-491).
cttgattgattttatgtca

SEQ ID NO: 351721 - DNA, 19 bp, Homo sapiens
  siRNA target sequence for BRRN1 (NM_015341.2,512-530).
caccgaaccaaccaacttt

SEQ ID NO: 351722 - DNA, 19 bp, Homo sapiens
  siRNA target sequence for BRRN1 (NM_015341.2,514-532).
ccgaaccaaccaactttaa

SEQ ID NO: 351723 - DNA, 19 bp, Homo sapiens
  siRNA target sequence for BRRN1 (NM_015341.2,589-607).
ccgtccatgccgatgtata

SEQ ID NO: 351724 - DNA, 19 bp, Homo sapiens
  siRNA target sequence for BRRN1 (NM_015341.2,637-655).
caccgtctttggaagaagt

SEQ ID NO: 351725 - DNA, 19 bp, Homo sapiens
  siRNA target sequence for BRRN1 (NM_015341.2,739-757).
gaactattgagcagaacat

SEQ ID NO: 351726 - DNA, 19 bp, Homo sapiens
  siRNA target sequence for BRRN1 (NM_015341.2,742-760).
ctattgagcagaacataaa

SEQ ID NO: 351727 - DNA, 19 bp, Homo sapiens
  siRNA target sequence for BRRN1 (NM_015341.2,954-972).
gagttaggttgtgtagaaa

SEQ ID NO: 351728 - DNA, 19 bp, Homo sapiens
  siRNA target sequence for BRRN1 (NM_015341.2,995-1013).
gcagcagtgtgcagaagat

SEQ ID NO: 351729 - DNA, 19 bp, Homo sapiens
  siRNA target sequence for BRRN1 (NM_015341.2,1057-1075).
gggacagtgaaacacataa

SEQ ID NO: 351730 - DNA, 19 bp, Homo sapiens
  siRNA target sequence for BRRN1 (NM_015341.2,1058-1076).
ggacagtgaaacacataat

SEQ ID NO: 351731 - DNA, 19 bp, Homo sapiens
  siRNA target sequence for BRRN1 (NM_015341.2,1092-1110).
ctggtagacaagtttaaga

SEQ ID NO: 351732 - DNA, 19 bp, Homo sapiens
  siRNA target sequence for BRRN1 (NM_015341.2,1178-1196).
gtccctgggggatgacttt

SEQ ID NO: 351733 - DNA, 19 bp, Homo sapiens
  siRNA target sequence for BRRN1 (NM_015341.2,1222-1240).
ccgcagttggggatcatga

SEQ ID NO: 351734 - DNA, 19 bp, Homo sapiens
  siRNA target sequence for BRRN1 (NM_015341.2,1223-1241).
cgcagttggggatcatgaa

SEQ ID NO: 351735 - DNA, 19 bp, Homo sapiens
  siRNA target sequence for BRRN1 (NM_015341.2,1420-1438).
ggcctcgacgcaaacaaga

SEQ ID NO: 351736 - DNA, 19 bp, Homo sapiens
  siRNA target sequence for BRRN1 (NM_015341.2,1421-1439).
gcctcgacgcaaacaagat

SEQ ID NO: 351737 - DNA, 19 bp, Homo sapiens
  siRNA target sequence for BRRN1 (NM_015341.2,1506-1524).
gatattgactttgatgtat

SEQ ID NO: 351738 - DNA, 19 bp, Homo sapiens
  siRNA target sequence for BRRN1 (NM_015341.2,1537-1555).
caaaggctgctactattct

SEQ ID NO: 351739 - DNA, 19 bp, Homo sapiens
  siRNA target sequence for BRRN1 (NM_015341.2,1594-1612).
ccacccttcctacagattt

SEQ ID NO: 351740 - DNA, 19 bp, Homo sapiens
  siRNA target sequence for BRRN1 (NM_015341.2,1599-1617).
cttcctacagatttcaact

SEQ ID NO: 351741 - DNA, 19 bp, Homo sapiens
  siRNA target sequence for BRRN1 (NM_015341.2,1656-1674).
ggcaccaggttacttaaga

SEQ ID NO: 351742 - DNA, 19 bp, Homo sapiens
  siRNA target sequence for BRRN1 (NM_015341.2,1657-1675).
gcaccaggttacttaagat

SEQ ID NO: 351743 - DNA, 19 bp, Homo sapiens
  siRNA target sequence for BRRN1 (NM_015341.2,1691-1709).
ggtagagactgagcattat

SEQ ID NO: 351744 - DNA, 19 bp, Homo sapiens
  siRNA target sequence for BRRN1 (NM_015341.2,1754-1772).
caacttttgccctggatta

SEQ ID NO: 351745 - DNA, 19 bp, Homo sapiens
  siRNA target sequence for BRRN1 (NM_015341.2,1775-1793).
ggctgctgacagtgatgat

SEQ ID NO: 351746 - DNA, 19 bp, Homo sapiens
  siRNA target sequence for BRRN1 (NM_015341.2,1836-1854).
gacctctcaccttatcctt

SEQ ID NO: 351747 - DNA, 19 bp, Homo sapiens
  siRNA target sequence for BRRN1 (NM_015341.2,1902-1920).
caaggattagacatcacaa

SEQ ID NO: 351748 - DNA, 19 bp, Homo sapiens
  siRNA target sequence for BRRN1 (NM_015341.2,1906-1924).
gattagacatcacaacata

SEQ ID NO: 351749 - DNA, 19 bp, Homo sapiens
  siRNA target sequence for BRRN1 (NM_015341.2,1921-1939).
catatggggagtcaaactt

SEQ ID NO: 351750 - DNA, 19 bp, Homo sapiens
  siRNA target sequence for BRRN1 (NM_015341.2,1949-1967).
gcctcagaaggtaaataaa

SEQ ID NO: 351751 - DNA, 19 bp, Homo sapiens
  siRNA target sequence for BRRN1 (NM_015341.2,2121-2139).
gctgacgagaagatgctta

SEQ ID NO: 351752 - DNA, 19 bp, Homo sapiens
  siRNA target sequence for DULLARD (NM_015343.3,503-521).
gctctggagcttcttcatt

SEQ ID NO: 351753 - DNA, 19 bp, Homo sapiens
  siRNA target sequence for TA-LRRP (NM_015350.1,596-614).
cagatgcccagtcatctta

SEQ ID NO: 351754 - DNA, 19 bp, Homo sapiens
  siRNA target sequence for TA-LRRP (NM_015350.1,601-619).
gcccagtcatcttatcaca

SEQ ID NO: 351755 - DNA, 19 bp, Homo sapiens
  siRNA target sequence for TA-LRRP (NM_015350.1,602-620).
cccagtcatcttatcacat

SEQ ID NO: 351756 - DNA, 19 bp, Homo sapiens
  siRNA target sequence for TA-LRRP (NM_015350.1,608-626).
catcttatcacatcttaaa

SEQ ID NO: 351757 - DNA, 19 bp, Homo sapiens
  siRNA target sequence for TA-LRRP (NM_015350.1,635-653).
gggacgtcttctggtatta

SEQ ID NO: 351758 - DNA, 19 bp, Homo sapiens
  siRNA target sequence for TA-LRRP (NM_015350.1,637-655).
gacgtcttctggtattaca

SEQ ID NO: 351759 - DNA, 19 bp, Homo sapiens
  siRNA target sequence for TA-LRRP (NM_015350.1,827-845).
cgctccccctccgaattca

SEQ ID NO: 351760 - DNA, 19 bp, Homo sapiens
  siRNA target sequence for TA-LRRP (NM_015350.1,829-847).
ctccccctccgaattcaga

SEQ ID NO: 351761 - DNA, 19 bp, Homo sapiens
  siRNA target sequence for TA-LRRP (NM_015350.1,831-849).
ccccctccgaattcagaat

SEQ ID NO: 351762 - DNA, 19 bp, Homo sapiens
  siRNA target sequence for TA-LRRP (NM_015350.1,833-851).
ccctccgaattcagaatga

SEQ ID NO: 351763 - DNA, 19 bp, Homo sapiens
  siRNA target sequence for TA-LRRP (NM_015350.1,859-877).
cgacagcagtactcctata

SEQ ID NO: 351764 - DNA, 19 bp, Homo sapiens
  siRNA target sequence for TA-LRRP (NM_015350.1,860-878).
gacagcagtactcctatat

SEQ ID NO: 351765 - DNA, 19 bp, Homo sapiens
  siRNA target sequence for TA-LRRP (NM_015350.1,884-902).
ccgtctgttacgagaaaca

SEQ ID NO: 351766 - DNA, 19 bp, Homo sapiens
  siRNA target sequence for TA-LRRP (NM_015350.1,961-979).
gcagcctgcagcaactttt

SEQ ID NO: 351767 - DNA, 19 bp, Homo sapiens
  siRNA target sequence for TA-LRRP (NM_015350.1,1001-1019).
gttccaggctcgagcattt

SEQ ID NO: 351768 - DNA, 19 bp, Homo sapiens
  siRNA target sequence for TA-LRRP (NM_015350.1,1004-1022).
ccaggctcgagcattttgt

SEQ ID NO: 351769 - DNA, 19 bp, Homo sapiens
  siRNA target sequence for TA-LRRP (NM_015350.1,1030-1048).
cttcacaagtgcttcgatt

SEQ ID NO: 351770 - DNA, 19 bp, Homo sapiens
  siRNA target sequence for TA-LRRP (NM_015350.1,1203-1221).
ggagtcagctggcatagaa

SEQ ID NO: 351771 - DNA, 19 bp, Homo sapiens
  siRNA target sequence for TA-LRRP (NM_015350.1,1309-1327).
gagcagaaggacatcattt

SEQ ID NO: 351772 - DNA, 19 bp, Homo sapiens
  siRNA target sequence for TA-LRRP (NM_015350.1,1317-1335).
ggacatcatttatagagta

SEQ ID NO: 351773 - DNA, 19 bp, Homo sapiens
  siRNA target sequence for TA-LRRP (NM_015350.1,1320-1338).
catcatttatagagtatat

SEQ ID NO: 351774 - DNA, 19 bp, Homo sapiens
  siRNA target sequence for TA-LRRP (NM_015350.1,1374-1392).
gctcatcataacttatgtt

SEQ ID NO: 351775 - DNA, 19 bp, Homo sapiens
  siRNA target sequence for TA-LRRP (NM_015350.1,1406-1424).
cccacatcactcttgaaat

SEQ ID NO: 351776 - DNA, 19 bp, Homo sapiens
  siRNA target sequence for TA-LRRP (NM_015350.1,1464-1482).
gcgctaccagtgtgtctat

SEQ ID NO: 351777 - DNA, 19 bp, Homo sapiens
  siRNA target sequence for TA-LRRP (NM_015350.1,1465-1483).
cgctaccagtgtgtctatt

SEQ ID NO: 351778 - DNA, 19 bp, Homo sapiens
  siRNA target sequence for TA-LRRP (NM_015350.1,1503-1521).
ggtcctggcttcattttat

SEQ ID NO: 351779 - DNA, 19 bp, Homo sapiens
  siRNA target sequence for TA-LRRP (NM_015350.1,1581-1599).
gagttccctgaagcaatat

SEQ ID NO: 351780 - DNA, 19 bp, Homo sapiens
  siRNA target sequence for TA-LRRP (NM_015350.1,1606-1624).
gaggcgttaagagaaaaaa

SEQ ID NO: 351781 - DNA, 19 bp, Homo sapiens
  siRNA target sequence for TA-LRRP (NM_015350.1,1735-1753).
gtcagtgagaacaaactga

SEQ ID NO: 351782 - DNA, 19 bp, Homo sapiens
  siRNA target sequence for TA-LRRP (NM_015350.1,1851-1869).
caacggtcttccagacaat

SEQ ID NO: 351783 - DNA, 19 bp, Homo sapiens
  siRNA target sequence for TA-LRRP (NM_015350.1,1856-1874).
gtcttccagacaatgtctt

SEQ ID NO: 351784 - DNA, 19 bp, Homo sapiens
  siRNA target sequence for TA-LRRP (NM_015350.1,1861-1879).
ccagacaatgtctttgagt

SEQ ID NO: 351785 - DNA, 19 bp, Homo sapiens
  siRNA target sequence for TA-LRRP (NM_015350.1,1862-1880).
cagacaatgtctttgagtt

SEQ ID NO: 351786 - DNA, 19 bp, Homo sapiens
  siRNA target sequence for TA-LRRP (NM_015350.1,1963-1981).
gagcttcgtgtgtaccatt

SEQ ID NO: 351787 - DNA, 19 bp, Homo sapiens
  siRNA target sequence for TA-LRRP (NM_015350.1,1966-1984).
cttcgtgtgtaccattcat

SEQ ID NO: 351788 - DNA, 19 bp, Homo sapiens
  siRNA target sequence for TA-LRRP (NM_015350.1,2003-2021).
ctgcactggcctttctaga

SEQ ID NO: 351789 - DNA, 19 bp, Homo sapiens
  siRNA target sequence for TA-LRRP (NM_015350.1,2037-2055).
cctccgcctgaaatttact

SEQ ID NO: 351790 - DNA, 19 bp, Homo sapiens
  siRNA target sequence for TA-LRRP (NM_015350.1,2040-2058).
ccgcctgaaatttactgaa

SEQ ID NO: 351791 - DNA, 19 bp, Homo sapiens
  siRNA target sequence for TA-LRRP (NM_015350.1,2042-2060).
gcctgaaatttactgaaat

SEQ ID NO: 351792 - DNA, 19 bp, Homo sapiens
  siRNA target sequence for TA-LRRP (NM_015350.1,2131-2149).
cctgaacagttgagtacta

SEQ ID NO: 351793 - DNA, 19 bp, Homo sapiens
  siRNA target sequence for TA-LRRP (NM_015350.1,2132-2150).
ctgaacagttgagtactat

SEQ ID NO: 351794 - DNA, 19 bp, Homo sapiens
  siRNA target sequence for TA-LRRP (NM_015350.1,2182-2200).
ctaaggaccctgtacttga

SEQ ID NO: 351795 - DNA, 19 bp, Homo sapiens
  siRNA target sequence for TA-LRRP (NM_015350.1,2211-2229).
ctcccggatcccacaagtt

SEQ ID NO: 351796 - DNA, 19 bp, Homo sapiens
  siRNA target sequence for TA-LRRP (NM_015350.1,2214-2232).
ccggatcccacaagttgtt

SEQ ID NO: 351797 - DNA, 19 bp, Homo sapiens
  siRNA target sequence for TA-LRRP (NM_015350.1,2215-2233).
cggatcccacaagttgtta

SEQ ID NO: 351798 - DNA, 19 bp, Homo sapiens
  siRNA target sequence for TA-LRRP (NM_015350.1,2217-2235).
gatcccacaagttgttaca

SEQ ID NO: 351799 - DNA, 19 bp, Homo sapiens
  siRNA target sequence for TA-LRRP (NM_015350.1,2256-2274).
gaaactgtcccttgataat

SEQ ID NO: 351800 - DNA, 19 bp, Homo sapiens
  siRNA target sequence for TA-LRRP (NM_015350.1,2279-2297).
gaagcaaactggttgtgtt

SEQ ID NO: 351801 - DNA, 19 bp, Homo sapiens
  siRNA target sequence for TA-LRRP (NM_015350.1,2282-2300).
gcaaactggttgtgttgaa

SEQ ID NO: 351802 - DNA, 19 bp, Homo sapiens
  siRNA target sequence for TA-LRRP (NM_015350.1,2359-2377).
cgcatcccacattccattt

SEQ ID NO: 351803 - DNA, 19 bp, Homo sapiens
  siRNA target sequence for TA-LRRP (NM_015350.1,2360-2378).
gcatcccacattccatttt

SEQ ID NO: 351804 - DNA, 19 bp, Homo sapiens
  siRNA target sequence for TA-LRRP (NM_015350.1,2406-2424).
cctaagggaaaataacctt

SEQ ID NO: 351805 - DNA, 19 bp, Homo sapiens
  siRNA target sequence for TA-LRRP (NM_015350.1,2407-2425).
ctaagggaaaataacctta

SEQ ID NO: 351806 - DNA, 19 bp, Homo sapiens
  siRNA target sequence for TA-LRRP (NM_015350.1,2448-2466).
ctttcagcatcttcagaat

SEQ ID NO: 351807 - DNA, 19 bp, Homo sapiens
  siRNA target sequence for TA-LRRP (NM_015350.1,2481-2499).
gttgtggcacaataacatt

SEQ ID NO: 351808 - DNA, 19 bp, Homo sapiens
  siRNA target sequence for TA-LRRP (NM_015350.1,2512-2530).
gcacagattggggcattat

SEQ ID NO: 351809 - DNA, 19 bp, Homo sapiens
  siRNA target sequence for TA-LRRP (NM_015350.1,2515-2533).
cagattggggcattatcta

SEQ ID NO: 351810 - DNA, 19 bp, Homo sapiens
  siRNA target sequence for TA-LRRP (NM_015350.1,2586-2604).
gcttttcctatgcactaaa

SEQ ID NO: 351811 - DNA, 19 bp, Homo sapiens
  siRNA target sequence for TA-LRRP (NM_015350.1,2592-2610).
cctatgcactaaactacat

SEQ ID NO: 351812 - DNA, 19 bp, Homo sapiens
  siRNA target sequence for TA-LRRP (NM_015350.1,2802-2820).
gctgtcaaaccttactcat

SEQ ID NO: 351813 - DNA, 19 bp, Homo sapiens
  siRNA target sequence for TA-LRRP (NM_015350.1,2834-2852).
gtaattacctggaaacact

SEQ ID NO: 351814 - DNA, 19 bp, Homo sapiens
  siRNA target sequence for TA-LRRP (NM_015350.1,2888-2906).
ggaactgtctgattgttga

SEQ ID NO: 351815 - DNA, 19 bp, Homo sapiens
  siRNA target sequence for TA-LRRP (NM_015350.1,2910-2928).
gaacttgctcaatactctt

SEQ ID NO: 351816 - DNA, 19 bp, Homo sapiens
  siRNA target sequence for TA-LRRP (NM_015350.1,2934-2952).
ccctgtaacagaacgttta

SEQ ID NO: 351817 - DNA, 19 bp, Homo sapiens
  siRNA target sequence for TA-LRRP (NM_015350.1,2936-2954).
ctgtaacagaacgtttaca

SEQ ID NO: 351818 - DNA, 19 bp, Homo sapiens
  siRNA target sequence for TA-LRRP (NM_015350.1,2938-2956).
gtaacagaacgtttacaga

SEQ ID NO: 351819 - DNA, 19 bp, Homo sapiens
  siRNA target sequence for TA-LRRP (NM_015350.1,2953-2971).
cagacgtgcttagacaaat

SEQ ID NO: 351820 - DNA, 19 bp, Homo sapiens
  siRNA target sequence for TA-LRRP (NM_015350.1,2955-2973).
gacgtgcttagacaaatgt

SEQ ID NO: 351821 - DNA, 19 bp, Homo sapiens
  siRNA target sequence for DERP6 (NM_015362.2,126-144).
gaaggcgcttgtcaagaaa

SEQ ID NO: 351822 - DNA, 19 bp, Homo sapiens
  siRNA target sequence for DERP6 (NM_015362.2,129-147).
ggcgcttgtcaagaaatct

SEQ ID NO: 351823 - DNA, 19 bp, Homo sapiens
  siRNA target sequence for DERP6 (NM_015362.2,155-173).
gtggggagcaagtgcatat

SEQ ID NO: 351824 - DNA, 19 bp, Homo sapiens
  siRNA target sequence for DERP6 (NM_015362.2,231-249).
caatcggctggtttaccat

SEQ ID NO: 351825 - DNA, 19 bp, Homo sapiens
  siRNA target sequence for DERP6 (NM_015362.2,236-254).
ggctggtttaccatgactt

SEQ ID NO: 351826 - DNA, 19 bp, Homo sapiens
  siRNA target sequence for DERP6 (NM_015362.2,264-282).
ccctctcaactggtcaaaa

SEQ ID NO: 351827 - DNA, 19 bp, Homo sapiens
  siRNA target sequence for DERP6 (NM_015362.2,489-507).
gctgggcttgctacatgaa

SEQ ID NO: 351828 - DNA, 19 bp, Homo sapiens
  siRNA target sequence for DERP6 (NM_015362.2,711-729).
ctactccgatcctcatata

SEQ ID NO: 351829 - DNA, 19 bp, Homo sapiens
  siRNA target sequence for DERP6 (NM_015362.2,736-754).
gtggatcccacaactcatt

SEQ ID NO: 351830 - DNA, 19 bp, Homo sapiens
  siRNA target sequence for DERP6 (NM_015362.2,739-757).
gatcccacaactcatttga

SEQ ID NO: 351831 - DNA, 19 bp, Homo sapiens
  siRNA target sequence for DERP6 (NM_015362.2,765-783).
ccttcacctgtccaagaaa

SEQ ID NO: 351832 - DNA, 19 bp, Homo sapiens
  siRNA target sequence for DERP6 (NM_015362.2,872-890).
ctaccagccacatcttcta

SEQ ID NO: 351833 - DNA, 19 bp, Homo sapiens
  siRNA target sequence for DERP6 (NM_015362.2,929-947).
cagatgacgacctggatat

SEQ ID NO: 351834 - DNA, 19 bp, Homo sapiens
  siRNA target sequence for ZIM2 (NM_015363.3,836-854).
cccagttcccggacttcaa

SEQ ID NO: 351835 - DNA, 19 bp, Homo sapiens
  siRNA target sequence for ZIM2 (NM_015363.3,837-855).
ccagttcccggacttcaaa

SEQ ID NO: 351836 - DNA, 19 bp, Homo sapiens
  siRNA target sequence for ZIM2 (NM_015363.3,843-861).
cccggacttcaaacactta

SEQ ID NO: 351837 - DNA, 19 bp, Homo sapiens
  siRNA target sequence for ZIM2 (NM_015363.3,847-865).
gacttcaaacacttaggaa

SEQ ID NO: 351838 - DNA, 19 bp, Homo sapiens
  siRNA target sequence for ZIM2 (NM_015363.3,1008-1026).
ggggcaccagttctctaaa

SEQ ID NO: 351839 - DNA, 19 bp, Homo sapiens
  siRNA target sequence for ZIM2 (NM_015363.3,1011-1029).
gcaccagttctctaaacct

SEQ ID NO: 351840 - DNA, 19 bp, Homo sapiens
  siRNA target sequence for ZIM2 (NM_015363.3,1017-1035).
gttctctaaacctgacatt

SEQ ID NO: 351841 - DNA, 19 bp, Homo sapiens
  siRNA target sequence for ZIM2 (NM_015363.3,1161-1179).
gactcctataacaatgaat

SEQ ID NO: 351842 - DNA, 19 bp, Homo sapiens
  siRNA target sequence for ZIM2 (NM_015363.3,1290-1308).
cactgctcctggaatatgt

SEQ ID NO: 351843 - DNA, 19 bp, Homo sapiens
  siRNA target sequence for ZIM2 (NM_015363.3,1325-1343).
catcccaagagaacaaaca

SEQ ID NO: 351844 - DNA, 19 bp, Homo sapiens
  siRNA target sequence for ZIM2 (NM_015363.3,1445-1463).
gtgctgaagccttctatct

SEQ ID NO: 351845 - DNA, 19 bp, Homo sapiens
  siRNA target sequence for ZIM2 (NM_015363.3,1543-1561).
gtccagtgtgcgaatctct

SEQ ID NO: 351846 - DNA, 19 bp, Homo sapiens
  siRNA target sequence for ZIM2 (NM_015363.3,1558-1576).
ctctgtgaacgtgtaagaa

SEQ ID NO: 351847 - DNA, 19 bp, Homo sapiens
  siRNA target sequence for ZIM2 (NM_015363.3,1560-1578).
ctgtgaacgtgtaagaatt

SEQ ID NO: 351848 - DNA, 19 bp, Homo sapiens
  siRNA target sequence for ZIM2 (NM_015363.3,1581-1599).
cagtcaggaggactacttt

SEQ ID NO: 351849 - DNA, 19 bp, Homo sapiens
  siRNA target sequence for ZIM2 (NM_015363.3,1588-1606).
gaggactactttgaatgtt

SEQ ID NO: 351850 - DNA, 19 bp, Homo sapiens
  siRNA target sequence for ZIM2 (NM_015363.3,1697-1715).
cccacagcaagacatactt

SEQ ID NO: 351851 - DNA, 19 bp, Homo sapiens
  siRNA target sequence for ZIM2 (NM_015363.3,1699-1717).
cacagcaagacatacttaa

SEQ ID NO: 351852 - DNA, 19 bp, Homo sapiens
  siRNA target sequence for ZIM2 (NM_015363.3,1707-1725).
gacatacttaattcgttat

SEQ ID NO: 351853 - DNA, 19 bp, Homo sapiens
  siRNA target sequence for ZIM2 (NM_015363.3,1709-1727).
catacttaattcgttatca

SEQ ID NO: 351854 - DNA, 19 bp, Homo sapiens
  siRNA target sequence for ZIM2 (NM_015363.3,1721-1739).
gttatcagcggaaacatga

SEQ ID NO: 351855 - DNA, 19 bp, Homo sapiens
  siRNA target sequence for ZIM2 (NM_015363.3,1790-1808).
gtcggaattcatatctcat

SEQ ID NO: 351856 - DNA, 19 bp, Homo sapiens
  siRNA target sequence for ZIM2 (NM_015363.3,1852-1870).
cagctatgtgggaaatgtt

SEQ ID NO: 351857 - DNA, 19 bp, Homo sapiens
  siRNA target sequence for TP53TG3 (NM_015369.1,130-148).
ctcccggaacggttgaaga

SEQ ID NO: 351858 - DNA, 19 bp, Homo sapiens
  siRNA target sequence for TP53TG3 (NM_015369.1,257-275).
gctagtttcacctggtaat

SEQ ID NO: 351859 - DNA, 19 bp, Homo sapiens
  siRNA target sequence for TP53TG3 (NM_015369.1,258-276).
ctagtttcacctggtaatt

SEQ ID NO: 351860 - DNA, 19 bp, Homo sapiens
  siRNA target sequence for TP53TG3 (NM_015369.1,321-339).
gttcgaagtttgatacctt

SEQ ID NO: 351861 - DNA, 19 bp, Homo sapiens
  siRNA target sequence for TP53TG3 (NM_015369.1,380-398).
ggcagggttgtcaagacat

SEQ ID NO: 351862 - DNA, 19 bp, Homo sapiens
  siRNA target sequence for HS747E2A (NM_015370.1,178-196).
ccgacagtccatcttatta

SEQ ID NO: 351863 - DNA, 19 bp, Homo sapiens
  siRNA target sequence for HS747E2A (NM_015370.1,179-197).
cgacagtccatcttattaa

SEQ ID NO: 351864 - DNA, 19 bp, Homo sapiens
  siRNA target sequence for HS747E2A (NM_015370.1,182-200).
cagtccatcttattaaata

SEQ ID NO: 351865 - DNA, 19 bp, Homo sapiens
  siRNA target sequence for HS747E2A (NM_015370.1,230-248).
ccggctctcaccaacatct

SEQ ID NO: 351866 - DNA, 19 bp, Homo sapiens
  siRNA target sequence for HS747E2A (NM_015370.1,351-369).
ccctggttaagcttgtact

SEQ ID NO: 351867 - DNA, 19 bp, Homo sapiens
  siRNA target sequence for HS747E2A (NM_015370.1,370-388).
caggcggcaactgaagaat

SEQ ID NO: 351868 - DNA, 19 bp, Homo sapiens
  siRNA target sequence for HS747E2A (NM_015370.1,422-440).
ggaaaactctcgaagagat

SEQ ID NO: 351869 - DNA, 19 bp, Homo sapiens
  siRNA target sequence for HS747E2A (NM_015370.1,423-441).
gaaaactctcgaagagatt

SEQ ID NO: 351870 - DNA, 19 bp, Homo sapiens
  siRNA target sequence for HS747E2A (NM_015370.1,479-497).
caggccaggaaaagaaact

SEQ ID NO: 351871 - DNA, 19 bp, Homo sapiens
  siRNA target sequence for HS747E2A (NM_015370.1,723-741).
cggaggacacgctaaccat

SEQ ID NO: 351872 - DNA, 19 bp, Homo sapiens
  siRNA target sequence for HS747E2A (NM_015370.1,845-863).
ggcaaggccattaaacaaa

SEQ ID NO: 351873 - DNA, 19 bp, Homo sapiens
  siRNA target sequence for HS322B1A (NM_015371.1,75-93).
catgacatccagttcaact

SEQ ID NO: 351874 - DNA, 19 bp, Homo sapiens
  siRNA target sequence for C22orf2 (NM_015373.2,431-449).
ctgctgaatcccacttaat

SEQ ID NO: 351875 - DNA, 19 bp, Homo sapiens
  siRNA target sequence for C22orf2 (NM_015373.2,473-491).
ggatcagccggaagagaaa

SEQ ID NO: 351876 - DNA, 19 bp, Homo sapiens
  siRNA target sequence for C22orf2 (NM_015373.2,474-492).
gatcagccggaagagaaaa

SEQ ID NO: 351877 - DNA, 19 bp, Homo sapiens
  siRNA target sequence for DustyPK (NM_015375.1,295-313).
caactgagctgcatttcct

SEQ ID NO: 351878 - DNA, 19 bp, Homo sapiens
  siRNA target sequence for DustyPK (NM_015375.1,351-369).
ggactgcctcccttgcata

SEQ ID NO: 351879 - DNA, 19 bp, Homo sapiens
  siRNA target sequence for DustyPK (NM_015375.1,524-542).
cgctccctggacagtatga

SEQ ID NO: 351880 - DNA, 19 bp, Homo sapiens
  siRNA target sequence for DustyPK (NM_015375.1,624-642).
ggatgctgctcatgtttta

SEQ ID NO: 351881 - DNA, 19 bp, Homo sapiens
  siRNA target sequence for DustyPK (NM_015375.1,644-662).
cggaactggaggtaacgat

SEQ ID NO: 351882 - DNA, 19 bp, Homo sapiens
  siRNA target sequence for DustyPK (NM_015375.1,660-678).
gatgcaccatgctctctta

SEQ ID NO: 351883 - DNA, 19 bp, Homo sapiens
  siRNA target sequence for DustyPK (NM_015375.1,742-760).
gacttggtgaatgatttct

SEQ ID NO: 351884 - DNA, 19 bp, Homo sapiens
  siRNA target sequence for DustyPK (NM_015375.1,759-777).
cttgcctgtgataacctat

SEQ ID NO: 351885 - DNA, 19 bp, Homo sapiens
  siRNA target sequence for DustyPK (NM_015375.1,773-791).
cctatgcactccacaaaga

SEQ ID NO: 351886 - DNA, 19 bp, Homo sapiens
  siRNA target sequence for DustyPK (NM_015375.1,921-939).
cgaaagatcaccgctttat

SEQ ID NO: 351887 - DNA, 19 bp, Homo sapiens
  siRNA target sequence for DustyPK (NM_015375.1,932-950).
cgctttatcgccagctaat

SEQ ID NO: 351888 - DNA, 19 bp, Homo sapiens
  siRNA target sequence for DustyPK (NM_015375.1,933-951).
gctttatcgccagctaatt

SEQ ID NO: 351889 - DNA, 19 bp, Homo sapiens
  siRNA target sequence for DustyPK (NM_015375.1,1133-1151).
gccttgacatctttattaa

SEQ ID NO: 351890 - DNA, 19 bp, Homo sapiens
  siRNA target sequence for DustyPK (NM_015375.1,1187-1205).
ctcccaaacgtctggaata

SEQ ID NO: 351891 - DNA, 19 bp, Homo sapiens
  siRNA target sequence for DustyPK (NM_015375.1,1189-1207).
cccaaacgtctggaatata

SEQ ID NO: 351892 - DNA, 19 bp, Homo sapiens
  siRNA target sequence for DustyPK (NM_015375.1,1191-1209).
caaacgtctggaatatact

SEQ ID NO: 351893 - DNA, 19 bp, Homo sapiens
  siRNA target sequence for DustyPK (NM_015375.1,1198-1216).
ctggaatatactcgaaaaa

SEQ ID NO: 351894 - DNA, 19 bp, Homo sapiens
  siRNA target sequence for DustyPK (NM_015375.1,1221-1239).
gaatgagttgtatgaatca

SEQ ID NO: 351895 - DNA, 19 bp, Homo sapiens
  siRNA target sequence for DustyPK (NM_015375.1,1225-1243).
gagttgtatgaatcattga

SEQ ID NO: 351896 - DNA, 19 bp, Homo sapiens
  siRNA target sequence for DustyPK (NM_015375.1,1288-1306).
gttgagacacttaatacca

SEQ ID NO: 351897 - DNA, 19 bp, Homo sapiens
  siRNA target sequence for DustyPK (NM_015375.1,1331-1349).
ctactaacatggagtttaa

SEQ ID NO: 351898 - DNA, 19 bp, Homo sapiens
  siRNA target sequence for DustyPK (NM_015375.1,1334-1352).
ctaacatggagtttaaaga

SEQ ID NO: 351899 - DNA, 19 bp, Homo sapiens
  siRNA target sequence for DustyPK (NM_015375.1,1353-1371).
cgtcattgtccctgagaat

SEQ ID NO: 351900 - DNA, 19 bp, Homo sapiens
  siRNA target sequence for DustyPK (NM_015375.1,1384-1402).
ggcaccagagagatcaaat

SEQ ID NO: 351901 - DNA, 19 bp, Homo sapiens
  siRNA target sequence for DustyPK (NM_015375.1,1563-1581).
caccagtaattatctcaaa

SEQ ID NO: 351902 - DNA, 19 bp, Homo sapiens
  siRNA target sequence for DustyPK (NM_015375.1,1578-1596).
caaacagatcttaaatgct

SEQ ID NO: 351903 - DNA, 19 bp, Homo sapiens
  siRNA target sequence for DustyPK (NM_015375.1,1595-1613).
ctgcctatcatgttgaagt

SEQ ID NO: 351904 - DNA, 19 bp, Homo sapiens
  siRNA target sequence for DustyPK (NM_015375.1,1606-1624).
gttgaagtcacgtttcact

SEQ ID NO: 351905 - DNA, 19 bp, Homo sapiens
  siRNA target sequence for DustyPK (NM_015375.1,1621-1639).
cactcagggtcgtcagtta

SEQ ID NO: 351906 - DNA, 19 bp, Homo sapiens
  siRNA target sequence for DustyPK (NM_015375.1,1623-1641).
ctcagggtcgtcagttaca

SEQ ID NO: 351907 - DNA, 19 bp, Homo sapiens
  siRNA target sequence for DustyPK (NM_015375.1,1647-1665).
gctatgggagcaaatcaaa

SEQ ID NO: 351908 - DNA, 19 bp, Homo sapiens
  siRNA target sequence for DustyPK (NM_015375.1,1732-1750).
gcccaggaagccattgaga

SEQ ID NO: 351909 - DNA, 19 bp, Homo sapiens
  siRNA target sequence for DustyPK (NM_015375.1,1751-1769).
gcctcagcgcctccaaatt

SEQ ID NO: 351910 - DNA, 19 bp, Homo sapiens
  siRNA target sequence for DustyPK (NM_015375.1,1794-1812).
ccggactcggctcaatagt

SEQ ID NO: 351911 - DNA, 19 bp, Homo sapiens
  siRNA target sequence for DustyPK (NM_015375.1,1795-1813).
cggactcggctcaatagtt

SEQ ID NO: 351912 - DNA, 19 bp, Homo sapiens
  siRNA target sequence for DustyPK (NM_015375.1,1858-1876).
cactcaggccggttagaga

SEQ ID NO: 351913 - DNA, 19 bp, Homo sapiens
  siRNA target sequence for DustyPK (NM_015375.1,1893-1911).
gctgagggttcggaaagat

SEQ ID NO: 351914 - DNA, 19 bp, Homo sapiens
  siRNA target sequence for DustyPK (NM_015375.1,1949-1967).
gttctttacaggatgtctt

SEQ ID NO: 351915 - DNA, 19 bp, Homo sapiens
  siRNA target sequence for DustyPK (NM_015375.1,2055-2073).
cccttgtgccctcaaatca

SEQ ID NO: 351916 - DNA, 19 bp, Homo sapiens
  siRNA target sequence for DustyPK (NM_015375.1,2109-2127).
ggctttggaatttcactat

SEQ ID NO: 351917 - DNA, 19 bp, Homo sapiens
  siRNA target sequence for DustyPK (NM_015375.1,2110-2128).
gctttggaatttcactata

SEQ ID NO: 351918 - DNA, 19 bp, Homo sapiens
  siRNA target sequence for DustyPK (NM_015375.1,2111-2129).
ctttggaatttcactatat

SEQ ID NO: 351919 - DNA, 19 bp, Homo sapiens
  siRNA target sequence for DustyPK (NM_015375.1,2167-2185).
catggttcagtcattgact

SEQ ID NO: 351920 - DNA, 19 bp, Homo sapiens
  siRNA target sequence for DustyPK (NM_015375.1,2171-2189).
gttcagtcattgactacaa

SEQ ID NO: 351921 - DNA, 19 bp, Homo sapiens
  siRNA target sequence for DustyPK (NM_015375.1,2174-2192).
cagtcattgactacaacta

SEQ ID NO: 351922 - DNA, 19 bp, Homo sapiens
  siRNA target sequence for DustyPK (NM_015375.1,2353-2371).
cgtgatatcaaactgaaaa

SEQ ID NO: 351923 - DNA, 19 bp, Homo sapiens
  siRNA target sequence for DustyPK (NM_015375.1,2389-2407).
cagaaccgtgccaagatca

SEQ ID NO: 351924 - DNA, 19 bp, Homo sapiens
  siRNA target sequence for DustyPK (NM_015375.1,2490-2508).
cacagggaagtacgataat

SEQ ID NO: 351925 - DNA, 19 bp, Homo sapiens
  siRNA target sequence for DustyPK (NM_015375.1,2514-2532).
ggatgtctacgcttttgga

SEQ ID NO: 351926 - DNA, 19 bp, Homo sapiens
  siRNA target sequence for DustyPK (NM_015375.1,2520-2538).
ctacgcttttggaattctt

SEQ ID NO: 351927 - DNA, 19 bp, Homo sapiens
  siRNA target sequence for DustyPK (NM_015375.1,2797-2815).
ggactagatgattctactt

SEQ ID NO: 351928 - DNA, 19 bp, Homo sapiens
  siRNA target sequence for KIAA0889 (NM_015377.1,133-151).
ggcaccaacaacatctcta

SEQ ID NO: 351929 - DNA, 19 bp, Homo sapiens
  siRNA target sequence for KIAA0889 (NM_015377.1,138-156).
caacaacatctctacaaga

SEQ ID NO: 351930 - DNA, 19 bp, Homo sapiens
  siRNA target sequence for KIAA0889 (NM_015377.1,147-165).
ctctacaagaggtgaacaa

SEQ ID NO: 351931 - DNA, 19 bp, Homo sapiens
  siRNA target sequence for KIAA0889 (NM_015377.1,218-236).
gagtgtgccctcagtgtta

SEQ ID NO: 351932 - DNA, 19 bp, Homo sapiens
  siRNA target sequence for KIAA0889 (NM_015377.1,266-284).
gtccttcgcagaaccaaat

SEQ ID NO: 351933 - DNA, 19 bp, Homo sapiens
  siRNA target sequence for KIAA0889 (NM_015377.1,268-286).
ccttcgcagaaccaaatct

SEQ ID NO: 351934 - DNA, 19 bp, Homo sapiens
  siRNA target sequence for KIAA0889 (NM_015377.1,291-309).
cttccatgtctgagtttga

SEQ ID NO: 351935 - DNA, 19 bp, Homo sapiens
  siRNA target sequence for KIAA0889 (NM_015377.1,319-337).
cgactgttccccttacctt

SEQ ID NO: 351936 - DNA, 19 bp, Homo sapiens
  siRNA target sequence for KIAA0889 (NM_015377.1,537-555).
cgggcatccgagtctacta

SEQ ID NO: 351937 - DNA, 19 bp, Homo sapiens
  siRNA target sequence for KIAA0889 (NM_015377.1,538-556).
gggcatccgagtctactat

SEQ ID NO: 351938 - DNA, 19 bp, Homo sapiens
  siRNA target sequence for KIAA0889 (NM_015377.1,539-557).
ggcatccgagtctactata

SEQ ID NO: 351939 - DNA, 19 bp, Homo sapiens
  siRNA target sequence for KIAA0889 (NM_015377.1,541-559).
catccgagtctactatagt

SEQ ID NO: 351940 - DNA, 19 bp, Homo sapiens
  siRNA target sequence for KIAA0889 (NM_015377.1,586-604).
ccctgtggttcatgacaaa

SEQ ID NO: 351941 - DNA, 19 bp, Homo sapiens
  siRNA target sequence for KIAA0889 (NM_015377.1,810-828).
gcaacatgagtgatgacat

SEQ ID NO: 351942 - DNA, 19 bp, Homo sapiens
  siRNA target sequence for KIAA0889 (NM_015377.1,1232-1250).
cgggacagccctgtattga

SEQ ID NO: 351943 - DNA, 19 bp, Homo sapiens
  siRNA target sequence for KIAA0889 (NM_015377.1,1241-1259).
cctgtattgagaaacatca

SEQ ID NO: 351944 - DNA, 19 bp, Homo sapiens
  siRNA target sequence for KIAA0889 (NM_015377.1,1371-1389).
gcattgtgcaggaattctt

SEQ ID NO: 351945 - DNA, 19 bp, Homo sapiens
  siRNA target sequence for CLONE25003 (NM_015381.1,161-179).
cccagcatgtcctcaactt

SEQ ID NO: 351946 - DNA, 19 bp, Homo sapiens
  siRNA target sequence for CLONE25003 (NM_015381.1,162-180).
ccagcatgtcctcaacttt

SEQ ID NO: 351947 - DNA, 19 bp, Homo sapiens
  siRNA target sequence for CLONE25003 (NM_015381.1,177-195).
ctttctgggcgttcatgat

SEQ ID NO: 351948 - DNA, 19 bp, Homo sapiens
  siRNA target sequence for CLONE25003 (NM_015381.1,363-381).
cctgtgtggacgcaagaat

SEQ ID NO: 351949 - DNA, 19 bp, Homo sapiens
  siRNA target sequence for CLONE25003 (NM_015381.1,366-384).
gtgtggacgcaagaatcat

SEQ ID NO: 351950 - DNA, 19 bp, Homo sapiens
  siRNA target sequence for CLONE25003 (NM_015381.1,368-386).
gtggacgcaagaatcatca

SEQ ID NO: 351951 - DNA, 19 bp, Homo sapiens
  siRNA target sequence for CLONE25003 (NM_015381.1,426-444).
gggaaggctgcgacttgtt

SEQ ID NO: 351952 - DNA, 19 bp, Homo sapiens
  siRNA target sequence for CLONE25003 (NM_015381.1,431-449).
ggctgcgacttgttaatca

SEQ ID NO: 351953 - DNA, 19 bp, Homo sapiens
  siRNA target sequence for CLONE25003 (NM_015381.1,432-450).
gctgcgacttgttaatcaa

SEQ ID NO: 351954 - DNA, 19 bp, Homo sapiens
  siRNA target sequence for IDN3 (NM_015384.2,403-421).
ctcaggcttctataactca

SEQ ID NO: 351955 - DNA, 19 bp, Homo sapiens
  siRNA target sequence for IDN3 (NM_015384.2,423-441).
gattcagactccataaaaa

SEQ ID NO: 351956 - DNA, 19 bp, Homo sapiens
  siRNA target sequence for IDN3 (NM_015384.2,495-513).
gatattgttggaagtctta

SEQ ID NO: 351957 - DNA, 19 bp, Homo sapiens
  siRNA target sequence for IDN3 (NM_015384.2,501-519).
gttggaagtcttaaatcta

SEQ ID NO: 351958 - DNA, 19 bp, Homo sapiens
  siRNA target sequence for IDN3 (NM_015384.2,629-647).
ccgattggtggagacaaaa

SEQ ID NO: 351959 - DNA, 19 bp, Homo sapiens
  siRNA target sequence for IDN3 (NM_015384.2,630-648).
cgattggtggagacaaaat

SEQ ID NO: 351960 - DNA, 19 bp, Homo sapiens
  siRNA target sequence for IDN3 (NM_015384.2,704-722).
gaatgagagcagaacaact

SEQ ID NO: 351961 - DNA, 19 bp, Homo sapiens
  siRNA target sequence for IDN3 (NM_015384.2,708-726).
gagagcagaacaactgaat

SEQ ID NO: 351962 - DNA, 19 bp, Homo sapiens
  siRNA target sequence for IDN3 (NM_015384.2,745-763).
ccatagttgagcctaaaca

SEQ ID NO: 351963 - DNA, 19 bp, Homo sapiens
  siRNA target sequence for IDN3 (NM_015384.2,746-764).
catagttgagcctaaacaa

SEQ ID NO: 351964 - DNA, 19 bp, Homo sapiens
  siRNA target sequence for IDN3 (NM_015384.2,781-799).
ctgacacaaaaccaaatga

SEQ ID NO: 351965 - DNA, 19 bp, Homo sapiens
  siRNA target sequence for IDN3 (NM_015384.2,1004-1022).
gcgacctgaaacaccaaaa

SEQ ID NO: 351966 - DNA, 19 bp, Homo sapiens
  siRNA target sequence for IDN3 (NM_015384.2,1018-1036).
caaaacacaggcatgacaa

SEQ ID NO: 351967 - DNA, 19 bp, Homo sapiens
  siRNA target sequence for IDN3 (NM_015384.2,1108-1126).
ctgactcacctcggttaaa

SEQ ID NO: 351968 - DNA, 19 bp, Homo sapiens
  siRNA target sequence for IDN3 (NM_015384.2,1110-1128).
gactcacctcggttaaaat

SEQ ID NO: 351969 - DNA, 19 bp, Homo sapiens
  siRNA target sequence for IDN3 (NM_015384.2,1112-1130).
ctcacctcggttaaaatca

SEQ ID NO: 351970 - DNA, 19 bp, Homo sapiens
  siRNA target sequence for IDN3 (NM_015384.2,1114-1132).
cacctcggttaaaatcaga

SEQ ID NO: 351971 - DNA, 19 bp, Homo sapiens
  siRNA target sequence for IDN3 (NM_015384.2,1158-1176).
cctgatgggcgatctgttt

SEQ ID NO: 351972 - DNA, 19 bp, Homo sapiens
  siRNA target sequence for IDN3 (NM_015384.2,1185-1203).
ctaagacgtgaccatgata

SEQ ID NO: 351973 - DNA, 19 bp, Homo sapiens
  siRNA target sequence for IDN3 (NM_015384.2,1283-1301).
gagatcctctagtagaaat

SEQ ID NO: 351974 - DNA, 19 bp, Homo sapiens
  siRNA target sequence for IDN3 (NM_015384.2,1285-1303).
gatcctctagtagaaatga

SEQ ID NO: 351975 - DNA, 19 bp, Homo sapiens
  siRNA target sequence for IDN3 (NM_015384.2,1288-1306).
cctctagtagaaatgaaca

SEQ ID NO: 351976 - DNA, 19 bp, Homo sapiens
  siRNA target sequence for IDN3 (NM_015384.2,1333-1351).
ctgataaactagaacgaaa

SEQ ID NO: 351977 - DNA, 19 bp, Homo sapiens
  siRNA target sequence for IDN3 (NM_015384.2,1414-1432).
ctgacagtcctcgtgttaa

SEQ ID NO: 351978 - DNA, 19 bp, Homo sapiens
  siRNA target sequence for IDN3 (NM_015384.2,1418-1436).
cagtcctcgtgttaaacaa

SEQ ID NO: 351979 - DNA, 19 bp, Homo sapiens
  siRNA target sequence for IDN3 (NM_015384.2,1437-1455).
ggagattctaataaatcaa

SEQ ID NO: 351980 - DNA, 19 bp, Homo sapiens
  siRNA target sequence for IDN3 (NM_015384.2,1459-1477).
ctgataaacttggttttaa

SEQ ID NO: 351981 - DNA, 19 bp, Homo sapiens
  siRNA target sequence for IDN3 (NM_015384.2,1480-1498).
caccaactagtaaagatga

SEQ ID NO: 351982 - DNA, 19 bp, Homo sapiens
  siRNA target sequence for IDN3 (NM_015384.2,1483-1501).
caactagtaaagatgacaa

SEQ ID NO: 351983 - DNA, 19 bp, Homo sapiens
  siRNA target sequence for IDN3 (NM_015384.2,1520-1538).
gagtaaagtagacactaat

SEQ ID NO: 351984 - DNA, 19 bp, Homo sapiens
  siRNA target sequence for IDN3 (NM_015384.2,1589-1607).
caggtctggtgcgttgaaa

SEQ ID NO: 351985 - DNA, 19 bp, Homo sapiens
  siRNA target sequence for IDN3 (NM_015384.2,1592-1610).
gtctggtgcgttgaaaaat

SEQ ID NO: 351986 - DNA, 19 bp, Homo sapiens
  siRNA target sequence for IDN3 (NM_015384.2,1594-1612).
ctggtgcgttgaaaaattt

SEQ ID NO: 351987 - DNA, 19 bp, Homo sapiens
  siRNA target sequence for IDN3 (NM_015384.2,1599-1617).
gcgttgaaaaattttgtca

SEQ ID NO: 351988 - DNA, 19 bp, Homo sapiens
  siRNA target sequence for IDN3 (NM_015384.2,1600-1618).
cgttgaaaaattttgtcat

SEQ ID NO: 351989 - DNA, 19 bp, Homo sapiens
  siRNA target sequence for IDN3 (NM_015384.2,1614-1632).
gtcattccgaaaatcaaga

SEQ ID NO: 351990 - DNA, 19 bp, Homo sapiens
  siRNA target sequence for IDN3 (NM_015384.2,1713-1731).
ggattagttgaagatctaa

SEQ ID NO: 351991 - DNA, 19 bp, Homo sapiens
  siRNA target sequence for IDN3 (NM_015384.2,1714-1732).
gattagttgaagatctaaa

SEQ ID NO: 351992 - DNA, 19 bp, Homo sapiens
  siRNA target sequence for IDN3 (NM_015384.2,1738-1756).
gagctaagcctgtagttgt

SEQ ID NO: 351993 - DNA, 19 bp, Homo sapiens
  siRNA target sequence for IDN3 (NM_015384.2,1819-1837).
gaagttcccttaaacctat

SEQ ID NO: 351994 - DNA, 19 bp, Homo sapiens
  siRNA target sequence for IDN3 (NM_015384.2,1822-1840).
gttcccttaaacctatcaa

SEQ ID NO: 351995 - DNA, 19 bp, Homo sapiens
  siRNA target sequence for IDN3 (NM_015384.2,1825-1843).
cccttaaacctatcaagaa

SEQ ID NO: 351996 - DNA, 19 bp, Homo sapiens
  siRNA target sequence for IDN3 (NM_015384.2,1858-1876).
caaataaaggtagtataga

SEQ ID NO: 351997 - DNA, 19 bp, Homo sapiens
  siRNA target sequence for IDN3 (NM_015384.2,1867-1885).
gtagtatagatcaatcagt

SEQ ID NO: 351998 - DNA, 19 bp, Homo sapiens
  siRNA target sequence for IDN3 (NM_015384.2,1927-1945).
ccaccatgccactttgtga

SEQ ID NO: 351999 - DNA, 19 bp, Homo sapiens
  siRNA target sequence for IDN3 (NM_015384.2,1928-1946).
caccatgccactttgtgaa

SEQ ID NO: 352000 - DNA, 19 bp, Homo sapiens
  siRNA target sequence for IDN3 (NM_015384.2,1965-1983).
cgcaagcgtagcacagtta

SEQ ID NO: 352001 - DNA, 19 bp, Homo sapiens
  siRNA target sequence for IDN3 (NM_015384.2,1966-1984).
gcaagcgtagcacagttaa

SEQ ID NO: 352002 - DNA, 19 bp, Homo sapiens
  siRNA target sequence for IDN3 (NM_015384.2,1971-1989).
cgtagcacagttaatgaaa

SEQ ID NO: 352003 - DNA, 19 bp, Homo sapiens
  siRNA target sequence for IDN3 (NM_015384.2,2050-2068).
cctctaggaaacgacataa

SEQ ID NO: 352004 - DNA, 19 bp, Homo sapiens
  siRNA target sequence for IDN3 (NM_015384.2,2051-2069).
ctctaggaaacgacataaa

SEQ ID NO: 352005 - DNA, 19 bp, Homo sapiens
  siRNA target sequence for IDN3 (NM_015384.2,2170-2188).
gtggtggtcgttatcgaaa

SEQ ID NO: 352006 - DNA, 19 bp, Homo sapiens
  siRNA target sequence for IDN3 (NM_015384.2,2191-2209).
gaagtccgtcagattctga

SEQ ID NO: 352007 - DNA, 19 bp, Homo sapiens
  siRNA target sequence for IDN3 (NM_015384.2,2287-2305).
ggaaagcatatgaaccaaa

SEQ ID NO: 352008 - DNA, 19 bp, Homo sapiens
  siRNA target sequence for IDN3 (NM_015384.2,2319-2337).
gaaatgatggactcttcaa

SEQ ID NO: 352009 - DNA, 19 bp, Homo sapiens
  siRNA target sequence for IDN3 (NM_015384.2,2328-2346).
gactcttcaacttttaaga

SEQ ID NO: 352010 - DNA, 19 bp, Homo sapiens
  siRNA target sequence for IDN3 (NM_015384.2,2332-2350).
cttcaacttttaagagatt

SEQ ID NO: 352011 - DNA, 19 bp, Homo sapiens
  siRNA target sequence for IDN3 (NM_015384.2,2353-2371).
cagcctcaatagagaatat

SEQ ID NO: 352012 - DNA, 19 bp, Homo sapiens
  siRNA target sequence for IDN3 (NM_015384.2,2355-2373).
gcctcaatagagaatattt

SEQ ID NO: 352013 - DNA, 19 bp, Homo sapiens
  siRNA target sequence for IDN3 (NM_015384.2,2498-2516).
gggtataatggataagctt

SEQ ID NO: 352014 - DNA, 19 bp, Homo sapiens
  siRNA target sequence for IDN3 (NM_015384.2,2499-2517).
ggtataatggataagcttt

SEQ ID NO: 352015 - DNA, 19 bp, Homo sapiens
  siRNA target sequence for IDN3 (NM_015384.2,2565-2583).
caggatgggtcaaagcttt

SEQ ID NO: 352016 - DNA, 19 bp, Homo sapiens
  siRNA target sequence for IDN3 (NM_015384.2,2585-2603).
cactttgttaaatcataat

SEQ ID NO: 352017 - DNA, 19 bp, Homo sapiens
  siRNA target sequence for IDN3 (NM_015384.2,2591-2609).
gttaaatcataataacgat

SEQ ID NO: 352018 - DNA, 19 bp, Homo sapiens
  siRNA target sequence for IDN3 (NM_015384.2,2627-2645).
gttatggagagaccttatt

SEQ ID NO: 352019 - DNA, 19 bp, Homo sapiens
  siRNA target sequence for IDN3 (NM_015384.2,2640-2658).
cttattatggagagagtta

SEQ ID NO: 352020 - DNA, 19 bp, Homo sapiens
  siRNA target sequence for IDN3 (NM_015384.2,2667-2685).
gcggatgcttgtcttacaa

SEQ ID NO: 352021 - DNA, 19 bp, Homo sapiens
  siRNA target sequence for IDN3 (NM_015384.2,2669-2687).
ggatgcttgtcttacaact

SEQ ID NO: 352022 - DNA, 19 bp, Homo sapiens
  siRNA target sequence for IDN3 (NM_015384.2,2674-2692).
cttgtcttacaactatcaa

SEQ ID NO: 352023 - DNA, 19 bp, Homo sapiens
  siRNA target sequence for IDN3 (NM_015384.2,2677-2695).
gtcttacaactatcaacat

SEQ ID NO: 352024 - DNA, 19 bp, Homo sapiens
  siRNA target sequence for IDN3 (NM_015384.2,2679-2697).
cttacaactatcaacatta

SEQ ID NO: 352025 - DNA, 19 bp, Homo sapiens
  siRNA target sequence for IDN3 (NM_015384.2,2705-2723).
ccctaacatgccaaaagct

SEQ ID NO: 352026 - DNA, 19 bp, Homo sapiens
  siRNA target sequence for IDN3 (NM_015384.2,2751-2769).
gttatacagtacactaaat

SEQ ID NO: 352027 - DNA, 19 bp, Homo sapiens
  siRNA target sequence for IDN3 (NM_015384.2,2833-2851).
gaggcttattaagttcaaa

SEQ ID NO: 352028 - DNA, 19 bp, Homo sapiens
  siRNA target sequence for IDN3 (NM_015384.2,2853-2871).
gcaaaacgggctaaatgtt

SEQ ID NO: 352029 - DNA, 19 bp, Homo sapiens
  siRNA target sequence for IDN3 (NM_015384.2,2921-2939).
cattgttagcagcttatca

SEQ ID NO: 352030 - DNA, 19 bp, Homo sapiens
  siRNA target sequence for IDN3 (NM_015384.2,2925-2943).
gttagcagcttatcagaat

SEQ ID NO: 352031 - DNA, 19 bp, Homo sapiens
  siRNA target sequence for IDN3 (NM_015384.2,2965-2983).
cagacacaacaattcttca

SEQ ID NO: 352032 - DNA, 19 bp, Homo sapiens
  siRNA target sequence for IDN3 (NM_015384.2,3038-3056).
gttgtgtgccattaagtta

SEQ ID NO: 352033 - DNA, 19 bp, Homo sapiens
  siRNA target sequence for IDN3 (NM_015384.2,3071-3089).
ctcaagatatgaaaaacat

SEQ ID NO: 352034 - DNA, 19 bp, Homo sapiens
  siRNA target sequence for IDN3 (NM_015384.2,3081-3099).
gaaaaacataggcagttaa

SEQ ID NO: 352035 - DNA, 19 bp, Homo sapiens
  siRNA target sequence for IDN3 (NM_015384.2,3185-3203).
ggatggagaacctatgtat

SEQ ID NO: 352036 - DNA, 19 bp, Homo sapiens
  siRNA target sequence for IDN3 (NM_015384.2,3248-3266).
ggtacacttaccatcatca

SEQ ID NO: 352037 - DNA, 19 bp, Homo sapiens
  siRNA target sequence for IDN3 (NM_015384.2,3272-3290).
ggactctaatgcagaagaa

SEQ ID NO: 352038 - DNA, 19 bp, Homo sapiens
  siRNA target sequence for IDN3 (NM_015384.2,3318-3336).
gttgtcattactaactctt

SEQ ID NO: 352039 - DNA, 19 bp, Homo sapiens
  siRNA target sequence for IDN3 (NM_015384.2,3441-3459).
gttcaagaccttctttcaa

SEQ ID NO: 352040 - DNA, 19 bp, Homo sapiens
  siRNA target sequence for IDN3 (NM_015384.2,3486-3504).
gctgaactactccttagtt

SEQ ID NO: 352041 - DNA, 19 bp, Homo sapiens
  siRNA target sequence for IDN3 (NM_015384.2,3487-3505).
ctgaactactccttagttt

SEQ ID NO: 352042 - DNA, 19 bp, Homo sapiens
  siRNA target sequence for IDN3 (NM_015384.2,3489-3507).
gaactactccttagtttgt

SEQ ID NO: 352043 - DNA, 19 bp, Homo sapiens
  siRNA target sequence for IDN3 (NM_015384.2,3514-3532).
gactgttggttcatcagtt

SEQ ID NO: 352044 - DNA, 19 bp, Homo sapiens
  siRNA target sequence for IDN3 (NM_015384.2,3547-3565).
cagagatggctttaagagt

SEQ ID NO: 352045 - DNA, 19 bp, Homo sapiens
  siRNA target sequence for IDN3 (NM_015384.2,3595-3613).
ctgcacggctaagaaaaga

SEQ ID NO: 352046 - DNA, 19 bp, Homo sapiens
  siRNA target sequence for IDN3 (NM_015384.2,3612-3630).
gatgctgttacaagcaaaa

SEQ ID NO: 352047 - DNA, 19 bp, Homo sapiens
  siRNA target sequence for IDN3 (NM_015384.2,3632-3650).
ggatcaaggatctatagaa

SEQ ID NO: 352048 - DNA, 19 bp, Homo sapiens
  siRNA target sequence for IDN3 (NM_015384.2,3640-3658).
gatctatagaacgcatttt

SEQ ID NO: 352049 - DNA, 19 bp, Homo sapiens
  siRNA target sequence for IDN3 (NM_015384.2,3643-3661).
ctatagaacgcattttaaa

SEQ ID NO: 352050 - DNA, 19 bp, Homo sapiens
  siRNA target sequence for IDN3 (NM_015384.2,3690-3708).
caacaattacaaaaagcat

SEQ ID NO: 352051 - DNA, 19 bp, Homo sapiens
  siRNA target sequence for IDN3 (NM_015384.2,3750-3768).
ctagtgttttctcgtaaat

SEQ ID NO: 352052 - DNA, 19 bp, Homo sapiens
  siRNA target sequence for IDN3 (NM_015384.2,3876-3894).
gagacaactggccaaatta

SEQ ID NO: 352053 - DNA, 19 bp, Homo sapiens
  siRNA target sequence for IDN3 (NM_015384.2,3880-3898).
caactggccaaattatgca

SEQ ID NO: 352054 - DNA, 19 bp, Homo sapiens
  siRNA target sequence for IDN3 (NM_015384.2,3903-3921).
gctgaaaaccgaaaaaagt

SEQ ID NO: 352055 - DNA, 19 bp, Homo sapiens
  siRNA target sequence for IDN3 (NM_015384.2,3911-3929).
ccgaaaaaagtttcttaga

SEQ ID NO: 352056 - DNA, 19 bp, Homo sapiens
  siRNA target sequence for IDN3 (NM_015384.2,3979-3997).
ctgatactgtggactatga

SEQ ID NO: 352057 - DNA, 19 bp, Homo sapiens
  siRNA target sequence for IDN3 (NM_015384.2,4003-4021).
cttgcttgattgttcgata

SEQ ID NO: 352058 - DNA, 19 bp, Homo sapiens
  siRNA target sequence for IDN3 (NM_015384.2,4006-4024).
gcttgattgttcgatactt

SEQ ID NO: 352059 - DNA, 19 bp, Homo sapiens
  siRNA target sequence for IDN3 (NM_015384.2,4099-4117).
caattgctgttcgaacaaa

SEQ ID NO: 352060 - DNA, 19 bp, Homo sapiens
  siRNA target sequence for IDN3 (NM_015384.2,4189-4207).
gtgttcatggacgattgat

SEQ ID NO: 352061 - DNA, 19 bp, Homo sapiens
  siRNA target sequence for IDN3 (NM_015384.2,4194-4212).
catggacgattgatggata

SEQ ID NO: 352062 - DNA, 19 bp, Homo sapiens
  siRNA target sequence for IDN3 (NM_015384.2,4197-4215).
ggacgattgatggataatt

SEQ ID NO: 352063 - DNA, 19 bp, Homo sapiens
  siRNA target sequence for IDN3 (NM_015384.2,4200-4218).
cgattgatggataattcga

SEQ ID NO: 352064 - DNA, 19 bp, Homo sapiens
  siRNA target sequence for IDN3 (NM_015384.2,4277-4295).
gcttgctgaacagtattat

SEQ ID NO: 352065 - DNA, 19 bp, Homo sapiens
  siRNA target sequence for IDN3 (NM_015384.2,4372-4390).
gtattgaacaaccaacatt

SEQ ID NO: 352066 - DNA, 19 bp, Homo sapiens
  siRNA target sequence for IDN3 (NM_015384.2,4377-4395).
gaacaaccaacatttccaa

SEQ ID NO: 352067 - DNA, 19 bp, Homo sapiens
  siRNA target sequence for IDN3 (NM_015384.2,4421-4439).
gattcgcagagtcaatgat

SEQ ID NO: 352068 - DNA, 19 bp, Homo sapiens
  siRNA target sequence for IDN3 (NM_015384.2,4448-4466).
cattaagaaattagtaaat

SEQ ID NO: 352069 - DNA, 19 bp, Homo sapiens
  siRNA target sequence for IDN3 (NM_015384.2,4475-4493).
ccagaaactctggtttact

SEQ ID NO: 352070 - DNA, 19 bp, Homo sapiens
  siRNA target sequence for IDN3 (NM_015384.2,4593-4611).
caactgcttcaaaacttgt

SEQ ID NO: 352071 - DNA, 19 bp, Homo sapiens
  siRNA target sequence for IDN3 (NM_015384.2,4625-4643).
ggattcctcatataaacct

SEQ ID NO: 352072 - DNA, 19 bp, Homo sapiens
  siRNA target sequence for IDN3 (NM_015384.2,4646-4664).
gaagaaagcttgtactcaa

SEQ ID NO: 352073 - DNA, 19 bp, Homo sapiens
  siRNA target sequence for IDN3 (NM_015384.2,4676-4694).
cctagttgagcacattctt

SEQ ID NO: 352074 - DNA, 19 bp, Homo sapiens
  siRNA target sequence for IDN3 (NM_015384.2,4677-4695).
ctagttgagcacattctta

SEQ ID NO: 352075 - DNA, 19 bp, Homo sapiens
  siRNA target sequence for IDN3 (NM_015384.2,4710-4728).
ctagctgactctgacaata

SEQ ID NO: 352076 - DNA, 19 bp, Homo sapiens
  siRNA target sequence for IDN3 (NM_015384.2,4736-4754).
gaattctggaagattggta

SEQ ID NO: 352077 - DNA, 19 bp, Homo sapiens
  siRNA target sequence for IDN3 (NM_015384.2,4792-4810).
gaccccagctcatggttaa

SEQ ID NO: 352078 - DNA, 19 bp, Homo sapiens
  siRNA target sequence for IDN3 (NM_015384.2,4805-4823).
ggttaaacatgcaatgact

SEQ ID NO: 352079 - DNA, 19 bp, Homo sapiens
  siRNA target sequence for IDN3 (NM_015384.2,4806-4824).
gttaaacatgcaatgacta

SEQ ID NO: 352080 - DNA, 19 bp, Homo sapiens
  siRNA target sequence for IDN3 (NM_015384.2,4816-4834).
caatgactatgcaaccata

SEQ ID NO: 352081 - DNA, 19 bp, Homo sapiens
  siRNA target sequence for IDN3 (NM_015384.2,4820-4838).
gactatgcaaccatacctt

SEQ ID NO: 352082 - DNA, 19 bp, Homo sapiens
  siRNA target sequence for IDN3 (NM_015384.2,4836-4854).
cttaccactaaatgtagta

SEQ ID NO: 352083 - DNA, 19 bp, Homo sapiens
  siRNA target sequence for IDN3 (NM_015384.2,4852-4870).
gtacgcaaaatgatttcat

SEQ ID NO: 352084 - DNA, 19 bp, Homo sapiens
  siRNA target sequence for IDN3 (NM_015384.2,4879-4897).
gcaatgttgcaaaaatcct

SEQ ID NO: 352085 - DNA, 19 bp, Homo sapiens
  siRNA target sequence for IDN3 (NM_015384.2,4880-4898).
caatgttgcaaaaatccta

SEQ ID NO: 352086 - DNA, 19 bp, Homo sapiens
  siRNA target sequence for IDN3 (NM_015384.2,4962-4980).
ctaatgaagctcatcatca

SEQ ID NO: 352087 - DNA, 19 bp, Homo sapiens
  siRNA target sequence for IDN3 (NM_015384.2,4991-5009).
gactgtagtgcaacattgt

SEQ ID NO: 352088 - DNA, 19 bp, Homo sapiens
  siRNA target sequence for IDN3 (NM_015384.2,5063-5081).
gtgggcttgtttcaataga

SEQ ID NO: 352089 - DNA, 19 bp, Homo sapiens
  siRNA target sequence for IDN3 (NM_015384.2,5065-5083).
gggcttgtttcaatagata

SEQ ID NO: 352090 - DNA, 19 bp, Homo sapiens
  siRNA target sequence for IDN3 (NM_015384.2,5118-5136).
caagaggacccaaataaca

SEQ ID NO: 352091 - DNA, 19 bp, Homo sapiens
  siRNA target sequence for IDN3 (NM_015384.2,5121-5139).
gaggacccaaataacactt

SEQ ID NO: 352092 - DNA, 19 bp, Homo sapiens
  siRNA target sequence for IDN3 (NM_015384.2,5163-5181).
cttcttagatcccttttca

SEQ ID NO: 352093 - DNA, 19 bp, Homo sapiens
  siRNA target sequence for IDN3 (NM_015384.2,5191-5209).
cactatgtcggcattttga

SEQ ID NO: 352094 - DNA, 19 bp, Homo sapiens
  siRNA target sequence for IDN3 (NM_015384.2,5193-5211).
ctatgtcggcattttgatt

SEQ ID NO: 352095 - DNA, 19 bp, Homo sapiens
  siRNA target sequence for IDN3 (NM_015384.2,5232-5250).
ggcaacagcaaggttaaca

SEQ ID NO: 352096 - DNA, 19 bp, Homo sapiens
  siRNA target sequence for IDN3 (NM_015384.2,5233-5251).
gcaacagcaaggttaacat

SEQ ID NO: 352097 - DNA, 19 bp, Homo sapiens
  siRNA target sequence for IDN3 (NM_015384.2,5234-5252).
caacagcaaggttaacata

SEQ ID NO: 352098 - DNA, 19 bp, Homo sapiens
  siRNA target sequence for IDN3 (NM_015384.2,5256-5274).
gataaagtacttgaactat

SEQ ID NO: 352099 - DNA, 19 bp, Homo sapiens
  siRNA target sequence for IDN3 (NM_015384.2,5271-5289).
ctattgatgtattttacaa

SEQ ID NO: 352100 - DNA, 19 bp, Homo sapiens
  siRNA target sequence for IDN3 (NM_015384.2,5372-5390).
gcaagaagtgaagaatcta

SEQ ID NO: 352101 - DNA, 19 bp, Homo sapiens
  siRNA target sequence for IDN3 (NM_015384.2,5376-5394).
gaagtgaagaatctatata

SEQ ID NO: 352102 - DNA, 19 bp, Homo sapiens
  siRNA target sequence for IDN3 (NM_015384.2,5417-5435).
ctcctcagtcaatttaaaa

SEQ ID NO: 352103 - DNA, 19 bp, Homo sapiens
  siRNA target sequence for IDN3 (NM_015384.2,5459-5477).
gacctacctacaagaagaa

SEQ ID NO: 352104 - DNA, 19 bp, Homo sapiens
  siRNA target sequence for IDN3 (NM_015384.2,5575-5593).
ccatcatgcagctttatct

SEQ ID NO: 352105 - DNA, 19 bp, Homo sapiens
  siRNA target sequence for IDN3 (NM_015384.2,5638-5656).
gccactttgccctaaatgt

SEQ ID NO: 352106 - DNA, 19 bp, Homo sapiens
  siRNA target sequence for IDN3 (NM_015384.2,5655-5673).
gtcattgcattgactctaa

SEQ ID NO: 352107 - DNA, 19 bp, Homo sapiens
  siRNA target sequence for IDN3 (NM_015384.2,5694-5712).
gttcagtgtgtgccatatt

SEQ ID NO: 352108 - DNA, 19 bp, Homo sapiens
  siRNA target sequence for IDN3 (NM_015384.2,5766-5784).
caacttgtggaaatagaca

SEQ ID NO: 352109 - DNA, 19 bp, Homo sapiens
  siRNA target sequence for IDN3 (NM_015384.2,5817-5835).
gtggctggtatgaagatgt

SEQ ID NO: 352110 - DNA, 19 bp, Homo sapiens
  siRNA target sequence for IDN3 (NM_015384.2,5821-5839).
ctggtatgaagatgtctta

SEQ ID NO: 352111 - DNA, 19 bp, Homo sapiens
  siRNA target sequence for IDN3 (NM_015384.2,5958-5976).
cacagacgagcctttctta

SEQ ID NO: 352112 - DNA, 19 bp, Homo sapiens
  siRNA target sequence for IDN3 (NM_015384.2,5960-5978).
cagacgagcctttcttatt

SEQ ID NO: 352113 - DNA, 19 bp, Homo sapiens
  siRNA target sequence for IDN3 (NM_015384.2,5964-5982).
cgagcctttcttatttctt

SEQ ID NO: 352114 - DNA, 19 bp, Homo sapiens
  siRNA target sequence for IDN3 (NM_015384.2,6007-6025).
caaaaacagacgtgactat

SEQ ID NO: 352115 - DNA, 19 bp, Homo sapiens
  siRNA target sequence for IDN3 (NM_015384.2,6017-6035).
cgtgactatgctcttgtat

SEQ ID NO: 352116 - DNA, 19 bp, Homo sapiens
  siRNA target sequence for IDN3 (NM_015384.2,6018-6036).
gtgactatgctcttgtata

SEQ ID NO: 352117 - DNA, 19 bp, Homo sapiens
  siRNA target sequence for IDN3 (NM_015384.2,6029-6047).
cttgtatatagcagacaat

SEQ ID NO: 352118 - DNA, 19 bp, Homo sapiens
  siRNA target sequence for IDN3 (NM_015384.2,6032-6050).
gtatatagcagacaatcta

SEQ ID NO: 352119 - DNA, 19 bp, Homo sapiens
  siRNA target sequence for IDN3 (NM_015384.2,6072-6090).
caggaagagccgttgttta

SEQ ID NO: 352120 - DNA, 19 bp, Homo sapiens
  siRNA target sequence for IDN3 (NM_015384.2,6080-6098).
gccgttgtttataatgcat

SEQ ID NO: 352121 - DNA, 19 bp, Homo sapiens
  siRNA target sequence for IDN3 (NM_015384.2,6095-6113).
gcatcatatagacattaca

SEQ ID NO: 352122 - DNA, 19 bp, Homo sapiens
  siRNA target sequence for IDN3 (NM_015384.2,6130-6148).
gtaacctactgcagtcatt

SEQ ID NO: 352123 - DNA, 19 bp, Homo sapiens
  siRNA target sequence for IDN3 (NM_015384.2,6184-6202).
gaaaatcatcacctagtaa

SEQ ID NO: 352124 - DNA, 19 bp, Homo sapiens
  siRNA target sequence for IDN3 (NM_015384.2,6212-6230).
gtcaagcgacagtgaagaa

SEQ ID NO: 352125 - DNA, 19 bp, Homo sapiens
  siRNA target sequence for IDN3 (NM_015384.2,6251-6269).
gtcacggaaacgtgtagat

SEQ ID NO: 352126 - DNA, 19 bp, Homo sapiens
  siRNA target sequence for IDN3 (NM_015384.2,6256-6274).
ggaaacgtgtagattcaga

SEQ ID NO: 352127 - DNA, 19 bp, Homo sapiens
  siRNA target sequence for IDN3 (NM_015384.2,6285-6303).
gattcagaagacgatataa

SEQ ID NO: 352128 - DNA, 19 bp, Homo sapiens
  siRNA target sequence for IDN3 (NM_015384.2,6334-6352).
cagctcctttaatcgaatt

SEQ ID NO: 352129 - DNA, 19 bp, Homo sapiens
  siRNA target sequence for IDN3 (NM_015384.2,6362-6380).
gtcccagggtattttatta

SEQ ID NO: 352130 - DNA, 19 bp, Homo sapiens
  siRNA target sequence for IDN3 (NM_015384.2,6440-6458).
gaagtactctccatctgaa

SEQ ID NO: 352131 - DNA, 19 bp, Homo sapiens
  siRNA target sequence for IDN3 (NM_015384.2,6443-6461).
gtactctccatctgaatct

SEQ ID NO: 352132 - DNA, 19 bp, Homo sapiens
  siRNA target sequence for IDN3 (NM_015384.2,6488-6506).
ccgaaaaacaggagttcat

SEQ ID NO: 352133 - DNA, 19 bp, Homo sapiens
  siRNA target sequence for IDN3 (NM_015384.2,6537-6555).
cggagtgacatggctaatt

SEQ ID NO: 352134 - DNA, 19 bp, Homo sapiens
  siRNA target sequence for IDN3 (NM_015384.2,6573-6591).
gtgaaaaggagtatagtaa

SEQ ID NO: 352135 - DNA, 19 bp, Homo sapiens
  siRNA target sequence for IDN3 (NM_015384.2,6580-6598).
ggagtatagtaaaacagta

SEQ ID NO: 352136 - DNA, 19 bp, Homo sapiens
  siRNA target sequence for IDN3 (NM_015384.2,6588-6606).
gtaaaacagtatctagatt

SEQ ID NO: 352137 - DNA, 19 bp, Homo sapiens
  siRNA target sequence for IDN3 (NM_015384.2,6671-6689).
cacaaatgctcggaacaaa

SEQ ID NO: 352138 - DNA, 19 bp, Homo sapiens
  siRNA target sequence for IDN3 (NM_015384.2,6678-6696).
gctcggaacaaagcaatta

SEQ ID NO: 352139 - DNA, 19 bp, Homo sapiens
  siRNA target sequence for IDN3 (NM_015384.2,6681-6699).
cggaacaaagcaattacct

SEQ ID NO: 352140 - DNA, 19 bp, Homo sapiens
  siRNA target sequence for IDN3 (NM_015384.2,6711-6729).
ggaggcagccctaaaaata

SEQ ID NO: 352141 - DNA, 19 bp, Homo sapiens
  siRNA target sequence for IDN3 (NM_015384.2,6712-6730).
gaggcagccctaaaaataa

SEQ ID NO: 352142 - DNA, 19 bp, Homo sapiens
  siRNA target sequence for IDN3 (NM_015384.2,6714-6732).
ggcagccctaaaaataata

SEQ ID NO: 352143 - DNA, 19 bp, Homo sapiens
  siRNA target sequence for IDN3 (NM_015384.2,6802-6820).
ggaggaggagtcaacgtat

SEQ ID NO: 352144 - DNA, 19 bp, Homo sapiens
  siRNA target sequence for IDN3 (NM_015384.2,6803-6821).
gaggaggagtcaacgtatt

SEQ ID NO: 352145 - DNA, 19 bp, Homo sapiens
  siRNA target sequence for IDN3 (NM_015384.2,6816-6834).
cgtatttcgcagcgtatta

SEQ ID NO: 352146 - DNA, 19 bp, Homo sapiens
  siRNA target sequence for PREI3 (NM_015387.1,64-82).
caaggcgcaggatttctat

SEQ ID NO: 352147 - DNA, 19 bp, Homo sapiens
  siRNA target sequence for PREI3 (NM_015387.1,67-85).
ggcgcaggatttctataat

SEQ ID NO: 352148 - DNA, 19 bp, Homo sapiens
  siRNA target sequence for PREI3 (NM_015387.1,115-133).
cagtacactagctgttcaa

SEQ ID NO: 352149 - DNA, 19 bp, Homo sapiens
  siRNA target sequence for PREI3 (NM_015387.1,117-135).
gtacactagctgttcaaca

SEQ ID NO: 352150 - DNA, 19 bp, Homo sapiens
  siRNA target sequence for PREI3 (NM_015387.1,120-138).
cactagctgttcaacagta

SEQ ID NO: 352151 - DNA, 19 bp, Homo sapiens
  siRNA target sequence for PREI3 (NM_015387.1,122-140).
ctagctgttcaacagtata

SEQ ID NO: 352152 - DNA, 19 bp, Homo sapiens
  siRNA target sequence for PREI3 (NM_015387.1,161-179).
gattgctccaatattgaca

SEQ ID NO: 352153 - DNA, 19 bp, Homo sapiens
  siRNA target sequence for PREI3 (NM_015387.1,217-235).
gtggaagtatgaacattta

SEQ ID NO: 352154 - DNA, 19 bp, Homo sapiens
  siRNA target sequence for PREI3 (NM_015387.1,296-314).
gatacttgcactcaaatga

SEQ ID NO: 352155 - DNA, 19 bp, Homo sapiens
  siRNA target sequence for PREI3 (NM_015387.1,317-335).
gcaactgaacaatggattt

SEQ ID NO: 352156 - DNA, 19 bp, Homo sapiens
  siRNA target sequence for PREI3 (NM_015387.1,318-336).
caactgaacaatggatttt

SEQ ID NO: 352157 - DNA, 19 bp, Homo sapiens
  siRNA target sequence for PREI3 (NM_015387.1,338-356).
ctttgtgcagctcataaaa

SEQ ID NO: 352158 - DNA, 19 bp, Homo sapiens
  siRNA target sequence for PREI3 (NM_015387.1,350-368).
cataaaactccaaaagagt

SEQ ID NO: 352159 - DNA, 19 bp, Homo sapiens
  siRNA target sequence for PREI3 (NM_015387.1,367-385).
gtgtcctgctatagactat

SEQ ID NO: 352160 - DNA, 19 bp, Homo sapiens
  siRNA target sequence for PREI3 (NM_015387.1,371-389).
cctgctatagactatacta

SEQ ID NO: 352161 - DNA, 19 bp, Homo sapiens
  siRNA target sequence for PREI3 (NM_015387.1,440-458).
cccagcagggttagcataa

SEQ ID NO: 352162 - DNA, 19 bp, Homo sapiens
  siRNA target sequence for PREI3 (NM_015387.1,444-462).
gcagggttagcataaagga

SEQ ID NO: 352163 - DNA, 19 bp, Homo sapiens
  siRNA target sequence for PREI3 (NM_015387.1,445-463).
cagggttagcataaaggaa

SEQ ID NO: 352164 - DNA, 19 bp, Homo sapiens
  siRNA target sequence for PREI3 (NM_015387.1,449-467).
gttagcataaaggaatcat

SEQ ID NO: 352165 - DNA, 19 bp, Homo sapiens
  siRNA target sequence for PREI3 (NM_015387.1,473-491).
gcgaaactaggatcagtat

SEQ ID NO: 352166 - DNA, 19 bp, Homo sapiens
  siRNA target sequence for PREI3 (NM_015387.1,486-504).
cagtatgccgtaggattta

SEQ ID NO: 352167 - DNA, 19 bp, Homo sapiens
  siRNA target sequence for PREI3 (NM_015387.1,488-506).
gtatgccgtaggatttaca

SEQ ID NO: 352168 - DNA, 19 bp, Homo sapiens
  siRNA target sequence for PREI3 (NM_015387.1,492-510).
gccgtaggatttacagaat

SEQ ID NO: 352169 - DNA, 19 bp, Homo sapiens
  siRNA target sequence for PREI3 (NM_015387.1,493-511).
ccgtaggatttacagaata

SEQ ID NO: 352170 - DNA, 19 bp, Homo sapiens
  siRNA target sequence for PREI3 (NM_015387.1,494-512).
cgtaggatttacagaatat

SEQ ID NO: 352171 - DNA, 19 bp, Homo sapiens
  siRNA target sequence for PREI3 (NM_015387.1,515-533).
cacatgcttattttcatca

SEQ ID NO: 352172 - DNA, 19 bp, Homo sapiens
  siRNA target sequence for PREI3 (NM_015387.1,535-553).
cggcagatatttgatgaat

SEQ ID NO: 352173 - DNA, 19 bp, Homo sapiens
  siRNA target sequence for PREI3 (NM_015387.1,575-593).
gtcatcggtttactaagtt

SEQ ID NO: 352174 - DNA, 19 bp, Homo sapiens
  siRNA target sequence for C6orf109 (NM_015388.1,178-196).
gagggttcgaagaaaacat

SEQ ID NO: 352175 - DNA, 19 bp, Homo sapiens
  siRNA target sequence for C6orf109 (NM_015388.1,203-221).
cggaggctcagctgtgatt

SEQ ID NO: 352176 - DNA, 19 bp, Homo sapiens
  siRNA target sequence for C6orf109 (NM_015388.1,250-268).
gctctagcttcgaggatat

SEQ ID NO: 352177 - DNA, 19 bp, Homo sapiens
  siRNA target sequence for C6orf109 (NM_015388.1,470-488).
cctcagaccctactttgat

SEQ ID NO: 352178 - DNA, 19 bp, Homo sapiens
  siRNA target sequence for C6orf109 (NM_015388.1,602-620).
cactctggttgctatccta

SEQ ID NO: 352179 - DNA, 19 bp, Homo sapiens
  siRNA target sequence for C6orf109 (NM_015388.1,632-650).
gaagacgtctgacactatt

SEQ ID NO: 352180 - DNA, 19 bp, Homo sapiens
  siRNA target sequence for C6orf109 (NM_015388.1,707-725).
gggagtctcatccttcatt

SEQ ID NO: 352181 - DNA, 19 bp, Homo sapiens
  siRNA target sequence for C6orf109 (NM_015388.1,709-727).
gagtctcatccttcattta

SEQ ID NO: 352182 - DNA, 19 bp, Homo sapiens
  siRNA target sequence for C6orf109 (NM_015388.1,815-833).
cctgttcatcacctataat

SEQ ID NO: 352183 - DNA, 19 bp, Homo sapiens
  siRNA target sequence for C6orf109 (NM_015388.1,816-834).
ctgttcatcacctataata

SEQ ID NO: 352184 - DNA, 19 bp, Homo sapiens
  siRNA target sequence for DKFZP566D193 (NM_015391.1,198-216).
caccacagaatctgtcaaa

SEQ ID NO: 352185 - DNA, 19 bp, Homo sapiens
  siRNA target sequence for DKFZP566D193 (NM_015391.1,201-219).
cacagaatctgtcaaagaa

SEQ ID NO: 352186 - DNA, 19 bp, Homo sapiens
  siRNA target sequence for DKFZP566D193 (NM_015391.1,203-221).
cagaatctgtcaaagaaca

SEQ ID NO: 352187 - DNA, 19 bp, Homo sapiens
  siRNA target sequence for DKFZP566D193 (NM_015391.1,211-229).
gtcaaagaacaagaaatga

SEQ ID NO: 352188 - DNA, 19 bp, Homo sapiens
  siRNA target sequence for DKFZP566D193 (NM_015391.1,236-254).
cagacttagccttacagta

SEQ ID NO: 352189 - DNA, 19 bp, Homo sapiens
  siRNA target sequence for DKFZP564O0823 (NM_015393.1,188-206).
cttcgctctttgcatctta

SEQ ID NO: 352190 - DNA, 19 bp, Homo sapiens
  siRNA target sequence for DKFZP564O0823 (NM_015393.1,255-273).
gtttctcttccgacaaaca

SEQ ID NO: 352191 - DNA, 19 bp, Homo sapiens
  siRNA target sequence for DKFZP564O0823 (NM_015393.1,259-277).
ctcttccgacaaacattgt

SEQ ID NO: 352192 - DNA, 19 bp, Homo sapiens
  siRNA target sequence for DKFZP564O0823 (NM_015393.1,295-313).
ggactagctctccacaaaa

SEQ ID NO: 352193 - DNA, 19 bp, Homo sapiens
  siRNA target sequence for DKFZP564O0823 (NM_015393.1,394-412).
ctctgcttcctaagaacat

SEQ ID NO: 352194 - DNA, 19 bp, Homo sapiens
  siRNA target sequence for DKFZP564O0823 (NM_015393.1,396-414).
ctgcttcctaagaacattt

SEQ ID NO: 352195 - DNA, 19 bp, Homo sapiens
  siRNA target sequence for DKFZP564O0823 (NM_015393.1,440-458).
caccagcccaggttcgaat

SEQ ID NO: 352196 - DNA, 19 bp, Homo sapiens
  siRNA target sequence for DKFZP564O0823 (NM_015393.1,509-527).
cggtggagtccacttaaca

SEQ ID NO: 352197 - DNA, 19 bp, Homo sapiens
  siRNA target sequence for DKFZP564O0823 (NM_015393.1,510-528).
ggtggagtccacttaacaa

SEQ ID NO: 352198 - DNA, 19 bp, Homo sapiens
  siRNA target sequence for DKFZP564O0823 (NM_015393.1,841-859).
ctgtgtcaggcaaagtgat

SEQ ID NO: 352199 - DNA, 19 bp, Homo sapiens
  siRNA target sequence for DKFZP434B0335 (NM_015395.1,570-588).
ggtacgtggatgagaattt

SEQ ID NO: 352200 - DNA, 19 bp, Homo sapiens
  siRNA target sequence for DKFZP434B0335 (NM_015395.1,641-659).
gccacctacacgaaagaca

SEQ ID NO: 352201 - DNA, 19 bp, Homo sapiens
  siRNA target sequence for DKFZP434B0335 (NM_015395.1,645-663).
cctacacgaaagacaagaa

SEQ ID NO: 352202 - DNA, 19 bp, Homo sapiens
  siRNA target sequence for DKFZP434B0335 (NM_015395.1,999-1017).
ccctggtccgggaaggaat

SEQ ID NO: 352203 - DNA, 19 bp, Homo sapiens
  siRNA target sequence for DKFZP434B0335 (NM_015395.1,1174-1192).
ctgcggcaccagttggatt

SEQ ID NO: 352204 - DNA, 19 bp, Homo sapiens
  siRNA target sequence for DKFZP434B0335 (NM_015395.1,1178-1196).
ggcaccagttggattgaga

SEQ ID NO: 352205 - DNA, 19 bp, Homo sapiens
  siRNA target sequence for DKFZP434B0335 (NM_015395.1,1179-1197).
gcaccagttggattgagat

SEQ ID NO: 352206 - DNA, 19 bp, Homo sapiens
  siRNA target sequence for DKFZP434B0335 (NM_015395.1,1556-1574).
ggcaggaccgcagaagata

SEQ ID NO: 352207 - DNA, 19 bp, Homo sapiens
  siRNA target sequence for DKFZP434B0335 (NM_015395.1,1655-1673).
gagctgccctggaccaata

SEQ ID NO: 352208 - DNA, 19 bp, Homo sapiens
  siRNA target sequence for DKFZP434B0335 (NM_015395.1,1657-1675).
gctgccctggaccaatatt

SEQ ID NO: 352209 - DNA, 19 bp, Homo sapiens
  siRNA target sequence for DKFZP434B0335 (NM_015395.1,2409-2427).
cctgcaagggggacatctt

SEQ ID NO: 352210 - DNA, 19 bp, Homo sapiens
  siRNA target sequence for DKFZP434B0335 (NM_015395.1,2567-2585).
cacacggcctgggtataca

SEQ ID NO: 352211 - DNA, 19 bp, Homo sapiens
  siRNA target sequence for DKFZP434B0335 (NM_015395.1,2569-2587).
cacggcctgggtatacaca

SEQ ID NO: 352212 - DNA, 19 bp, Homo sapiens
  siRNA target sequence for DKFZP434B0335 (NM_015395.1,2625-2643).
gcagcaccagtaacatcta

SEQ ID NO: 352213 - DNA, 19 bp, Homo sapiens
  siRNA target sequence for DKFZP434B0335 (NM_015395.1,2659-2677).
gaagtgtgttcacatctat

SEQ ID NO: 352214 - DNA, 19 bp, Homo sapiens
  siRNA target sequence for DKFZP434B0335 (NM_015395.1,2726-2744).
cccacggaccggtacatgt

SEQ ID NO: 352215 - DNA, 19 bp, Homo sapiens
  siRNA target sequence for DKFZP434B0335 (NM_015395.1,2820-2838).
ccgactggttcgtggattt

SEQ ID NO: 352216 - DNA, 19 bp, Homo sapiens
  siRNA target sequence for DKFZP434B0335 (NM_015395.1,3472-3490).
ctgggtgatcgccaacaaa

SEQ ID NO: 352217 - DNA, 19 bp, Homo sapiens
  siRNA target sequence for DKFZP434B0335 (NM_015395.1,3474-3492).
gggtgatcgccaacaaagt

SEQ ID NO: 352218 - DNA, 19 bp, Homo sapiens
  siRNA target sequence for HSPC056 (NM_015396.2,923-941).
gtgcagtaaggagagatta

SEQ ID NO: 352219 - DNA, 19 bp, Homo sapiens
  siRNA target sequence for HSPC056 (NM_015396.2,966-984).
gagacacttgcctatctga

SEQ ID NO: 352220 - DNA, 19 bp, Homo sapiens
  siRNA target sequence for HSPC056 (NM_015396.2,1005-1023).
cagagaatcgctagcataa

SEQ ID NO: 352221 - DNA, 19 bp, Homo sapiens
  siRNA target sequence for HSPC056 (NM_015396.2,1007-1025).
gagaatcgctagcataact

SEQ ID NO: 352222 - DNA, 19 bp, Homo sapiens
  siRNA target sequence for HSPC056 (NM_015396.2,1038-1056).
gccatgcttgctgattatt

SEQ ID NO: 352223 - DNA, 19 bp, Homo sapiens
  siRNA target sequence for HSPC056 (NM_015396.2,1074-1092).
gtgagtgccatcactgata

SEQ ID NO: 352224 - DNA, 19 bp, Homo sapiens
  siRNA target sequence for HSPC056 (NM_015396.2,1076-1094).
gagtgccatcactgatatt

SEQ ID NO: 352225 - DNA, 19 bp, Homo sapiens
  siRNA target sequence for HSPC056 (NM_015396.2,1078-1096).
gtgccatcactgatattaa

SEQ ID NO: 352226 - DNA, 19 bp, Homo sapiens
  siRNA target sequence for HSPC056 (NM_015396.2,1099-1117).
ggcttgatcatgatttaaa

SEQ ID NO: 352227 - DNA, 19 bp, Homo sapiens
  siRNA target sequence for HSPC056 (NM_015396.2,1409-1427).
gctgtgtaatcttcttctt

SEQ ID NO: 352228 - DNA, 19 bp, Homo sapiens
  siRNA target sequence for HSPC056 (NM_015396.2,1437-1455).
ccaagcaaagagccaattt

SEQ ID NO: 352229 - DNA, 19 bp, Homo sapiens
  siRNA target sequence for HSPC056 (NM_015396.2,1464-1482).
ggagccgtagagctacttt

SEQ ID NO: 352230 - DNA, 19 bp, Homo sapiens
  siRNA target sequence for HSPC056 (NM_015396.2,1475-1493).
gctactttgtggattaact

SEQ ID NO: 352231 - DNA, 19 bp, Homo sapiens
  siRNA target sequence for HSPC056 (NM_015396.2,1486-1504).
gattaactcagagtgaaaa

SEQ ID NO: 352232 - DNA, 19 bp, Homo sapiens
  siRNA target sequence for HSPC056 (NM_015396.2,1510-1528).
ctttacgagtgaatggaat

SEQ ID NO: 352233 - DNA, 19 bp, Homo sapiens
  siRNA target sequence for HSPC056 (NM_015396.2,1524-1542).
ggaatttgggctttaatga

SEQ ID NO: 352234 - DNA, 19 bp, Homo sapiens
  siRNA target sequence for HSPC056 (NM_015396.2,1525-1543).
gaatttgggctttaatgaa

SEQ ID NO: 352235 - DNA, 19 bp, Homo sapiens
  siRNA target sequence for HSPC056 (NM_015396.2,1605-1623).
cagctattccggttattat

SEQ ID NO: 352236 - DNA, 19 bp, Homo sapiens
  siRNA target sequence for HSPC056 (NM_015396.2,1607-1625).
gctattccggttattatca

SEQ ID NO: 352237 - DNA, 19 bp, Homo sapiens
  siRNA target sequence for HSPC056 (NM_015396.2,1615-1633).
ggttattatcagattcaga

SEQ ID NO: 352238 - DNA, 19 bp, Homo sapiens
  siRNA target sequence for HSPC056 (NM_015396.2,1679-1697).
ctccactcgtcctcatata

SEQ ID NO: 352239 - DNA, 19 bp, Homo sapiens
  siRNA target sequence for HSPC056 (NM_015396.2,1682-1700).
cactcgtcctcatatagat

SEQ ID NO: 352240 - DNA, 19 bp, Homo sapiens
  siRNA target sequence for HSPC056 (NM_015396.2,1684-1702).
ctcgtcctcatatagataa

SEQ ID NO: 352241 - DNA, 19 bp, Homo sapiens
  siRNA target sequence for HSPC056 (NM_015396.2,1686-1704).
cgtcctcatatagataaaa

SEQ ID NO: 352242 - DNA, 19 bp, Homo sapiens
  siRNA target sequence for HSPC056 (NM_015396.2,1709-1727).
gagtactcatggaaagcaa

SEQ ID NO: 352243 - DNA, 19 bp, Homo sapiens
  siRNA target sequence for HSPC056 (NM_015396.2,1733-1751).
gcaagccgtcactcttatt

SEQ ID NO: 352244 - DNA, 19 bp, Homo sapiens
  siRNA target sequence for HSPC056 (NM_015396.2,1738-1756).
ccgtcactcttattctaga

SEQ ID NO: 352245 - DNA, 19 bp, Homo sapiens
  siRNA target sequence for HSPC056 (NM_015396.2,1739-1757).
cgtcactcttattctagaa

SEQ ID NO: 352246 - DNA, 19 bp, Homo sapiens
  siRNA target sequence for HSPC056 (NM_015396.2,1814-1832).
ggatgggacaacagcaaaa

SEQ ID NO: 352247 - DNA, 19 bp, Homo sapiens
  siRNA target sequence for HSPC056 (NM_015396.2,1820-1838).
gacaacagcaaaagatctt

SEQ ID NO: 352248 - DNA, 19 bp, Homo sapiens
  siRNA target sequence for HSPC056 (NM_015396.2,1825-1843).
cagcaaaagatcttattat

SEQ ID NO: 352249 - DNA, 19 bp, Homo sapiens
  siRNA target sequence for HSPC056 (NM_015396.2,1844-1862).
gaccaatgatgatatccta

SEQ ID NO: 352250 - DNA, 19 bp, Homo sapiens
  siRNA target sequence for HSPC056 (NM_015396.2,1880-1898).
catgggccattcacatgtt

SEQ ID NO: 352251 - DNA, 19 bp, Homo sapiens
  siRNA target sequence for HSPC056 (NM_015396.2,1883-1901).
gggccattcacatgttaaa

SEQ ID NO: 352252 - DNA, 19 bp, Homo sapiens
  siRNA target sequence for HSPC056 (NM_015396.2,1885-1903).
gccattcacatgttaaact

SEQ ID NO: 352253 - DNA, 19 bp, Homo sapiens
  siRNA target sequence for HSPC056 (NM_015396.2,1907-1925).
gcttgcagccatgttttgt

SEQ ID NO: 352254 - DNA, 19 bp, Homo sapiens
  siRNA target sequence for HSPC056 (NM_015396.2,1915-1933).
ccatgttttgtatatcaaa

SEQ ID NO: 352255 - DNA, 19 bp, Homo sapiens
  siRNA target sequence for HSPC056 (NM_015396.2,1960-1978).
cacaagaacgccaggataa

SEQ ID NO: 352256 - DNA, 19 bp, Homo sapiens
  siRNA target sequence for HSPC056 (NM_015396.2,1986-2004).
gacatgggcatcgtagata

SEQ ID NO: 352257 - DNA, 19 bp, Homo sapiens
  siRNA target sequence for HSPC056 (NM_015396.2,1988-2006).
catgggcatcgtagatatt

SEQ ID NO: 352258 - DNA, 19 bp, Homo sapiens
  siRNA target sequence for HSPC056 (NM_015396.2,1991-2009).
gggcatcgtagatattcta

SEQ ID NO: 352259 - DNA, 19 bp, Homo sapiens
  siRNA target sequence for HSPC056 (NM_015396.2,1993-2011).
gcatcgtagatattctaca

SEQ ID NO: 352260 - DNA, 19 bp, Homo sapiens
  siRNA target sequence for HSPC056 (NM_015396.2,2020-2038).
gtcagtcaccagattcaaa

SEQ ID NO: 352261 - DNA, 19 bp, Homo sapiens
  siRNA target sequence for KIAA1892 (NM_015397.1,393-411).
gggatcactcgcttcacaa

SEQ ID NO: 352262 - DNA, 19 bp, Homo sapiens
  siRNA target sequence for KIAA1892 (NM_015397.1,394-412).
ggatcactcgcttcacaaa

SEQ ID NO: 352263 - DNA, 19 bp, Homo sapiens
  siRNA target sequence for KIAA1892 (NM_015397.1,395-413).
gatcactcgcttcacaaaa

SEQ ID NO: 352264 - DNA, 19 bp, Homo sapiens
  siRNA target sequence for KIAA1892 (NM_015397.1,398-416).
cactcgcttcacaaaagga

SEQ ID NO: 352265 - DNA, 19 bp, Homo sapiens
  siRNA target sequence for KIAA1892 (NM_015397.1,431-449).
gtgaagagatccttagtat

SEQ ID NO: 352266 - DNA, 19 bp, Homo sapiens
  siRNA target sequence for KIAA1892 (NM_015397.1,438-456).
gatccttagtatactactt

SEQ ID NO: 352267 - DNA, 19 bp, Homo sapiens
  siRNA target sequence for KIAA1892 (NM_015397.1,441-459).
ccttagtatactacttgaa

SEQ ID NO: 352268 - DNA, 19 bp, Homo sapiens
  siRNA target sequence for KIAA1892 (NM_015397.1,466-484).
ggaagtcaggctacagaat

SEQ ID NO: 352269 - DNA, 19 bp, Homo sapiens
  siRNA target sequence for KIAA1892 (NM_015397.1,498-516).
ctcgagtgttgcatggtta

SEQ ID NO: 352270 - DNA, 19 bp, Homo sapiens
  siRNA target sequence for KIAA1892 (NM_015397.1,560-578).
caccttgggacccttaata

SEQ ID NO: 352271 - DNA, 19 bp, Homo sapiens
  siRNA target sequence for KIAA1892 (NM_015397.1,639-657).
cgctatttgtcgtagatgt

SEQ ID NO: 352272 - DNA, 19 bp, Homo sapiens
  siRNA target sequence for KIAA1892 (NM_015397.1,676-694).
caagatccccattctgaaa

SEQ ID NO: 352273 - DNA, 19 bp, Homo sapiens
  siRNA target sequence for KIAA1892 (NM_015397.1,745-763).
cgagctgaatccttctaga

SEQ ID NO: 352274 - DNA, 19 bp, Homo sapiens
  siRNA target sequence for KIAA1892 (NM_015397.1,746-764).
gagctgaatccttctagaa

SEQ ID NO: 352275 - DNA, 19 bp, Homo sapiens
  siRNA target sequence for KIAA1892 (NM_015397.1,909-927).
gctcacgtgatggttctat

SEQ ID NO: 352276 - DNA, 19 bp, Homo sapiens
  siRNA target sequence for KIAA1892 (NM_015397.1,966-984).
gtgatgcgagacacaatgt

SEQ ID NO: 352277 - DNA, 19 bp, Homo sapiens
  siRNA target sequence for KIAA1892 (NM_015397.1,968-986).
gatgcgagacacaatgtgt

SEQ ID NO: 352278 - DNA, 19 bp, Homo sapiens
  siRNA target sequence for KIAA1892 (NM_015397.1,1119-1137).
ctctggatggctactttca

SEQ ID NO: 352279 - DNA, 19 bp, Homo sapiens
  siRNA target sequence for KIAA1892 (NM_015397.1,1139-1157).
ctctggaaggctgaaaata

SEQ ID NO: 352280 - DNA, 19 bp, Homo sapiens
  siRNA target sequence for KIAA1892 (NM_015397.1,1147-1165).
ggctgaaaatacactatct

SEQ ID NO: 352281 - DNA, 19 bp, Homo sapiens
  siRNA target sequence for KIAA1892 (NM_015397.1,1148-1166).
gctgaaaatacactatcta

SEQ ID NO: 352282 - DNA, 19 bp, Homo sapiens
  siRNA target sequence for KIAA1892 (NM_015397.1,1186-1204).
gccatattgccgtgagaat

SEQ ID NO: 352283 - DNA, 19 bp, Homo sapiens
  siRNA target sequence for KIAA1892 (NM_015397.1,1188-1206).
catattgccgtgagaatgt

SEQ ID NO: 352284 - DNA, 19 bp, Homo sapiens
  siRNA target sequence for KIAA1892 (NM_015397.1,1211-1229).
ctggcttatggtagtgaat

SEQ ID NO: 352285 - DNA, 19 bp, Homo sapiens
  siRNA target sequence for KIAA1892 (NM_015397.1,1277-1295).
ccacggcagccatcataca

SEQ ID NO: 352286 - DNA, 19 bp, Homo sapiens
  siRNA target sequence for KIAA1892 (NM_015397.1,1278-1296).
cacggcagccatcatacaa

SEQ ID NO: 352287 - DNA, 19 bp, Homo sapiens
  siRNA target sequence for KIAA1892 (NM_015397.1,1432-1450).
gaggctctcagcttgttat

SEQ ID NO: 352288 - DNA, 19 bp, Homo sapiens
  siRNA target sequence for KIAA1892 (NM_015397.1,1464-1482).
gactagcaggggagaatct

SEQ ID NO: 352289 - DNA, 19 bp, Homo sapiens
  siRNA target sequence for KIAA1892 (NM_015397.1,1527-1545).
ggaggaattacttttcaga

SEQ ID NO: 352290 - DNA, 19 bp, Homo sapiens
  siRNA target sequence for KIAA1892 (NM_015397.1,1585-1603).
cgactcgtctggaacgaaa

SEQ ID NO: 352291 - DNA, 19 bp, Homo sapiens
  siRNA target sequence for KIAA1892 (NM_015397.1,1590-1608).
cgtctggaacgaaactctt

SEQ ID NO: 352292 - DNA, 19 bp, Homo sapiens
  siRNA target sequence for KIAA1892 (NM_015397.1,1591-1609).
gtctggaacgaaactcttt

SEQ ID NO: 352293 - DNA, 19 bp, Homo sapiens
  siRNA target sequence for KIAA1892 (NM_015397.1,1593-1611).
ctggaacgaaactctttgt

SEQ ID NO: 352294 - DNA, 19 bp, Homo sapiens
  siRNA target sequence for DKFZP586N0721 (NM_015400.1,729-747).
ggcatgcacgtatgtaagt

SEQ ID NO: 352295 - DNA, 19 bp, Homo sapiens
  siRNA target sequence for DKFZP586N0721 (NM_015400.1,730-748).
gcatgcacgtatgtaagta

SEQ ID NO: 352296 - DNA, 19 bp, Homo sapiens
  siRNA target sequence for DKFZP586N0721 (NM_015400.1,731-749).
catgcacgtatgtaagtaa

SEQ ID NO: 352297 - DNA, 19 bp, Homo sapiens
  siRNA target sequence for DKFZP586N0721 (NM_015400.1,734-752).
gcacgtatgtaagtaatct

SEQ ID NO: 352298 - DNA, 19 bp, Homo sapiens
  siRNA target sequence for DKFZP586N0721 (NM_015400.1,940-958).
ggaccctgtttcttactgt

SEQ ID NO: 352299 - DNA, 19 bp, Homo sapiens
  siRNA target sequence for DKFZP586N0721 (NM_015400.1,1032-1050).
gcgaagctgtactgtcttt

SEQ ID NO: 352300 - DNA, 19 bp, Homo sapiens
  siRNA target sequence for DKFZP586N0721 (NM_015400.1,1084-1102).
caggtaaccgtcttcacaa

SEQ ID NO: 352301 - DNA, 19 bp, Homo sapiens
  siRNA target sequence for DKFZP586N0721 (NM_015400.1,1087-1105).
gtaaccgtcttcacaatgt

SEQ ID NO: 352302 - DNA, 19 bp, Homo sapiens
  siRNA target sequence for DKFZP434F2021 (NM_015412.1,174-192).
cgctgaagagccaaacctt

SEQ ID NO: 352303 - DNA, 19 bp, Homo sapiens
  siRNA target sequence for DKFZP434F2021 (NM_015412.1,175-193).
gctgaagagccaaacctta

SEQ ID NO: 352304 - DNA, 19 bp, Homo sapiens
  siRNA target sequence for DKFZP434F2021 (NM_015412.1,278-296).
caggttgagcaatgtttaa

SEQ ID NO: 352305 - DNA, 19 bp, Homo sapiens
  siRNA target sequence for DKFZP434F2021 (NM_015412.1,313-331).
gaatttggagggctcaatt

SEQ ID NO: 352306 - DNA, 19 bp, Homo sapiens
  siRNA target sequence for DKFZP434F2021 (NM_015412.1,346-364).
gttgttttcttccaatgaa

SEQ ID NO: 352307 - DNA, 19 bp, Homo sapiens
  siRNA target sequence for DKFZP434F2021 (NM_015412.1,362-380).
gaaaatcagcccttaacta

SEQ ID NO: 352308 - DNA, 19 bp, Homo sapiens
  siRNA target sequence for DKFZP434F2021 (NM_015412.1,370-388).
gcccttaactaccaaagta

SEQ ID NO: 352309 - DNA, 19 bp, Homo sapiens
  siRNA target sequence for DKFZP434F2021 (NM_015412.1,371-389).
cccttaactaccaaagtat

SEQ ID NO: 352310 - DNA, 19 bp, Homo sapiens
  siRNA target sequence for DKFZP434F2021 (NM_015412.1,373-391).
cttaactaccaaagtatgt

SEQ ID NO: 352311 - DNA, 19 bp, Homo sapiens
  siRNA target sequence for DKFZP434F2021 (NM_015412.1,470-488).
gactgctgctgcaaaactt

SEQ ID NO: 352312 - DNA, 19 bp, Homo sapiens
  siRNA target sequence for DKFZP434F2021 (NM_015412.1,502-520).
gaaacatctaggtttgcaa

SEQ ID NO: 352313 - DNA, 19 bp, Homo sapiens
  siRNA target sequence for DKFZP434F2021 (NM_015412.1,512-530).
ggtttgcaagagttcatta

SEQ ID NO: 352314 - DNA, 19 bp, Homo sapiens
  siRNA target sequence for DKFZP434F2021 (NM_015412.1,551-569).
gggctggtgagcaggttat

SEQ ID NO: 352315 - DNA, 19 bp, Homo sapiens
  siRNA target sequence for DKFZP434F2021 (NM_015412.1,575-593).
ctctataaaggtgtcttaa

SEQ ID NO: 352316 - DNA, 19 bp, Homo sapiens
  siRNA target sequence for DKFZP434F2021 (NM_015412.1,597-615).
ggttgattttgttatatga

SEQ ID NO: 352317 - DNA, 19 bp, Homo sapiens
  siRNA target sequence for DKFZP434F2021 (NM_015412.1,736-754).
gaaaaaaatgcctatagct

SEQ ID NO: 352318 - DNA, 19 bp, Homo sapiens
  siRNA target sequence for DKFZP434F2021 (NM_015412.1,753-771).
cttttgcagctaaaggaat

SEQ ID NO: 352319 - DNA, 19 bp, Homo sapiens
  siRNA target sequence for DKFZP434F2021 (NM_015412.1,857-875).
gctaaacaaatgaagatca

SEQ ID NO: 352320 - DNA, 19 bp, Homo sapiens
  siRNA target sequence for DKFZP434F2021 (NM_015412.1,899-917).
ggacagccagtaaagaata

SEQ ID NO: 352321 - DNA, 19 bp, Homo sapiens
  siRNA target sequence for DKFZP434F2021 (NM_015412.1,1177-1195).
caaggctcaggccattttt

SEQ ID NO: 352322 - DNA, 19 bp, Homo sapiens
  siRNA target sequence for DKFZP434F2021 (NM_015412.1,1188-1206).
ccatttttctgggtaacaa

SEQ ID NO: 352323 - DNA, 19 bp, Homo sapiens
  siRNA target sequence for DKFZP434F2021 (NM_015412.1,1198-1216).
gggtaacaaacttcttaaa

SEQ ID NO: 352324 - DNA, 19 bp, Homo sapiens
  siRNA target sequence for DKFZP434F2021 (NM_015412.1,1218-1236).
gcaaccggcttaaacatct

SEQ ID NO: 352325 - DNA, 19 bp, Homo sapiens
  siRNA target sequence for DKFZP434F2021 (NM_015412.1,1238-1256).
gaagctcaaggtactagtt

SEQ ID NO: 352326 - DNA, 19 bp, Homo sapiens
  siRNA target sequence for DKFZP434F2021 (NM_015412.1,1268-1286).
ctagagtgcataaaaacgt

SEQ ID NO: 352327 - DNA, 19 bp, Homo sapiens
  siRNA target sequence for DKFZP434F2021 (NM_015412.1,1273-1291).
gtgcataaaaacgtctatt

SEQ ID NO: 352328 - DNA, 19 bp, Homo sapiens
  siRNA target sequence for DKFZP434F2021 (NM_015412.1,1310-1328).
ggctcaggtatcaaaactt

SEQ ID NO: 352329 - DNA, 19 bp, Homo sapiens
  siRNA target sequence for DKFZP434F2021 (NM_015412.1,1410-1428).
ctcttttaagggaaattca

SEQ ID NO: 352330 - DNA, 19 bp, Homo sapiens
  siRNA target sequence for DKFZP434F2021 (NM_015412.1,1448-1466).
cggaagagtgctacagata

SEQ ID NO: 352331 - DNA, 19 bp, Homo sapiens
  siRNA target sequence for DKFZP434F2021 (NM_015412.1,1511-1529).
gatctctaccctaacagta

SEQ ID NO: 352332 - DNA, 19 bp, Homo sapiens
  siRNA target sequence for DKFZP434F2021 (NM_015412.1,1598-1616).
cttagaggcatccatgaaa

SEQ ID NO: 352333 - DNA, 19 bp, Homo sapiens
  siRNA target sequence for DKFZP434F2021 (NM_015412.1,1629-1647).
cgtggacggtgatgcaaat

SEQ ID NO: 352334 - DNA, 19 bp, Homo sapiens
  siRNA target sequence for DKFZP434F2021 (NM_015412.1,1630-1648).
gtggacggtgatgcaaata

SEQ ID NO: 352335 - DNA, 19 bp, Homo sapiens
  siRNA target sequence for DKFZP434F2021 (NM_015412.1,1633-1651).
gacggtgatgcaaataaat

SEQ ID NO: 352336 - DNA, 19 bp, Homo sapiens
  siRNA target sequence for DKFZP434F2021 (NM_015412.1,1635-1653).
cggtgatgcaaataaataa

SEQ ID NO: 352337 - DNA, 19 bp, Homo sapiens
  siRNA target sequence for DKFZP434F2021 (NM_015412.1,1659-1677).
gtacatcaggaaccattaa

SEQ ID NO: 352338 - DNA, 19 bp, Homo sapiens
  siRNA target sequence for HCCR1 (NM_015416.2,125-143).
ccctcggtcttcaaagctt

SEQ ID NO: 352339 - DNA, 19 bp, Homo sapiens
  siRNA target sequence for HCCR1 (NM_015416.2,193-211).
ccaagacaaaagcgattaa

SEQ ID NO: 352340 - DNA, 19 bp, Homo sapiens
  siRNA target sequence for HCCR1 (NM_015416.2,194-212).
caagacaaaagcgattaat

SEQ ID NO: 352341 - DNA, 19 bp, Homo sapiens
  siRNA target sequence for HCCR1 (NM_015416.2,226-244).
gtttcttgggtcgtcattt

SEQ ID NO: 352342 - DNA, 19 bp, Homo sapiens
  siRNA target sequence for HCCR1 (NM_015416.2,307-325).
ccaaaaaggctagaagaat

SEQ ID NO: 352343 - DNA, 19 bp, Homo sapiens
  siRNA target sequence for HCCR1 (NM_015416.2,308-326).
caaaaaggctagaagaata

SEQ ID NO: 352344 - DNA, 19 bp, Homo sapiens
  siRNA target sequence for HCCR1 (NM_015416.2,314-332).
ggctagaagaataaagaca

SEQ ID NO: 352345 - DNA, 19 bp, Homo sapiens
  siRNA target sequence for HCCR1 (NM_015416.2,347-365).
caatataaagtttcatcaa

SEQ ID NO: 352346 - DNA, 19 bp, Homo sapiens
  siRNA target sequence for HCCR1 (NM_015416.2,413-431).
caccaagtgtcttttccta

SEQ ID NO: 352347 - DNA, 19 bp, Homo sapiens
  siRNA target sequence for HCCR1 (NM_015416.2,419-437).
gtgtcttttcctaggtatt

SEQ ID NO: 352348 - DNA, 19 bp, Homo sapiens
  siRNA target sequence for HCCR1 (NM_015416.2,421-439).
gtcttttcctaggtattat

SEQ ID NO: 352349 - DNA, 19 bp, Homo sapiens
  siRNA target sequence for HCCR1 (NM_015416.2,501-519).
ctactgatcaggcatttct

SEQ ID NO: 352350 - DNA, 19 bp, Homo sapiens
  siRNA target sequence for HCCR1 (NM_015416.2,524-542).
cccaaaacaacaaactgat

SEQ ID NO: 352351 - DNA, 19 bp, Homo sapiens
  siRNA target sequence for HCCR1 (NM_015416.2,608-626).
ggtcatccctctcatttct

SEQ ID NO: 352352 - DNA, 19 bp, Homo sapiens
  siRNA target sequence for HCCR1 (NM_015416.2,679-697).
gtacccacccagcaataca

SEQ ID NO: 352353 - DNA, 19 bp, Homo sapiens
  siRNA target sequence for HCCR1 (NM_015416.2,682-700).
cccacccagcaatacatga

SEQ ID NO: 352354 - DNA, 19 bp, Homo sapiens
  siRNA target sequence for HCCR1 (NM_015416.2,683-701).
ccacccagcaatacatgat

SEQ ID NO: 352355 - DNA, 19 bp, Homo sapiens
  siRNA target sequence for HCCR1 (NM_015416.2,708-726).
gctctgagagagtgtttct

SEQ ID NO: 352356 - DNA, 19 bp, Homo sapiens
  siRNA target sequence for HCCR1 (NM_015416.2,711-729).
ctgagagagtgtttctcta

SEQ ID NO: 352357 - DNA, 19 bp, Homo sapiens
  siRNA target sequence for HCCR1 (NM_015416.2,786-804).
gccatgcttctcacatctt

SEQ ID NO: 352358 - DNA, 19 bp, Homo sapiens
  siRNA target sequence for HCCR1 (NM_015416.2,828-846).
catcgtttgaagactcata

SEQ ID NO: 352359 - DNA, 19 bp, Homo sapiens
  siRNA target sequence for HCCR1 (NM_015416.2,831-849).
cgtttgaagactcatacaa

SEQ ID NO: 352360 - DNA, 19 bp, Homo sapiens
  siRNA target sequence for HCCR1 (NM_015416.2,933-951).
ctccgtggcctgaattcta

SEQ ID NO: 352361 - DNA, 19 bp, Homo sapiens
  siRNA target sequence for HCCR1 (NM_015416.2,944-962).
gaattctacgcatattggt

SEQ ID NO: 352362 - DNA, 19 bp, Homo sapiens
  siRNA target sequence for C20orf28 (NM_015417.2,277-295).
ggtggagatgcacaattat

SEQ ID NO: 352363 - DNA, 19 bp, Homo sapiens
  siRNA target sequence for C20orf28 (NM_015417.2,327-345).
gcaactggggtcatctgaa

SEQ ID NO: 352364 - DNA, 19 bp, Homo sapiens
  siRNA target sequence for C20orf28 (NM_015417.2,545-563).
ggtaaggtggccttttcca

SEQ ID NO: 352365 - DNA, 19 bp, Homo sapiens
  siRNA target sequence for C20orf28 (NM_015417.2,546-564).
gtaaggtggccttttccat

SEQ ID NO: 352366 - DNA, 19 bp, Homo sapiens
  siRNA target sequence for C20orf28 (NM_015417.2,550-568).
ggtggccttttccatttct

SEQ ID NO: 352367 - DNA, 19 bp, Homo sapiens
  siRNA target sequence for DKFZp564I1922 (NM_015419.1,145-163).
gtgcccgctggcattgcta

SEQ ID NO: 352368 - DNA, 19 bp, Homo sapiens
  siRNA target sequence for DKFZp564I1922 (NM_015419.1,166-184).
cacgtggaaagaatcaatt

SEQ ID NO: 352369 - DNA, 19 bp, Homo sapiens
  siRNA target sequence for DKFZp564I1922 (NM_015419.1,236-254).
ccaagttggagctacttat

SEQ ID NO: 352370 - DNA, 19 bp, Homo sapiens
  siRNA target sequence for DKFZp564I1922 (NM_015419.1,279-297).
catccccgatggagcttta

SEQ ID NO: 352371 - DNA, 19 bp, Homo sapiens
  siRNA target sequence for DKFZp564I1922 (NM_015419.1,282-300).
ccccgatggagctttaaga

SEQ ID NO: 352372 - DNA, 19 bp, Homo sapiens
  siRNA target sequence for DKFZp564I1922 (NM_015419.1,284-302).
ccgatggagctttaagaga

SEQ ID NO: 352373 - DNA, 19 bp, Homo sapiens
  siRNA target sequence for DKFZp564I1922 (NM_015419.1,308-326).
gctctcttcaggttttcaa

SEQ ID NO: 352374 - DNA, 19 bp, Homo sapiens
  siRNA target sequence for DKFZp564I1922 (NM_015419.1,365-383).
ccctccagggtctctctaa

SEQ ID NO: 352375 - DNA, 19 bp, Homo sapiens
  siRNA target sequence for DKFZp564I1922 (NM_015419.1,373-391).
ggtctctctaacttaatga

SEQ ID NO: 352376 - DNA, 19 bp, Homo sapiens
  siRNA target sequence for DKFZp564I1922 (NM_015419.1,436-454).
gctttcaacggcttaacgt

SEQ ID NO: 352377 - DNA, 19 bp, Homo sapiens
  siRNA target sequence for DKFZp564I1922 (NM_015419.1,509-527).
ccttctccacgttcacatt

SEQ ID NO: 352378 - DNA, 19 bp, Homo sapiens
  siRNA target sequence for DKFZp564I1922 (NM_015419.1,510-528).
cttctccacgttcacattt

SEQ ID NO: 352379 - DNA, 19 bp, Homo sapiens
  siRNA target sequence for DKFZp564I1922 (NM_015419.1,618-636).
gccgcttctggagaatctt

SEQ ID NO: 352380 - DNA, 19 bp, Homo sapiens
  siRNA target sequence for DKFZp564I1922 (NM_015419.1,653-671).
cgtggacctgcgattgtga

SEQ ID NO: 352381 - DNA, 19 bp, Homo sapiens
  siRNA target sequence for DKFZp564I1922 (NM_015419.1,668-686).
gtgagatgagatggttttt

SEQ ID NO: 352382 - DNA, 19 bp, Homo sapiens
  siRNA target sequence for DKFZp564I1922 (NM_015419.1,688-706).
gaatgggatgcaaaatcca

SEQ ID NO: 352383 - DNA, 19 bp, Homo sapiens
  siRNA target sequence for DKFZp564I1922 (NM_015419.1,940-958).
ccccagtggagcatctctt

SEQ ID NO: 352384 - DNA, 19 bp, Homo sapiens
  siRNA target sequence for DKFZp564I1922 (NM_015419.1,941-959).
cccagtggagcatctcttt

SEQ ID NO: 352385 - DNA, 19 bp, Homo sapiens
  siRNA target sequence for DKFZp564I1922 (NM_015419.1,1015-1033).
ccaatggatgtgtacaaga

SEQ ID NO: 352386 - DNA, 19 bp, Homo sapiens
  siRNA target sequence for DKFZp564I1922 (NM_015419.1,1021-1039).
gatgtgtacaagattcact

SEQ ID NO: 352387 - DNA, 19 bp, Homo sapiens
  siRNA target sequence for DKFZp564I1922 (NM_015419.1,1054-1072).
cctccagatattgacataa

SEQ ID NO: 352388 - DNA, 19 bp, Homo sapiens
  siRNA target sequence for DKFZp564I1922 (NM_015419.1,1100-1118).
gtccaatgacccgagaaaa

SEQ ID NO: 352389 - DNA, 19 bp, Homo sapiens
  siRNA target sequence for DKFZp564I1922 (NM_015419.1,1102-1120).
ccaatgacccgagaaaact

SEQ ID NO: 352390 - DNA, 19 bp, Homo sapiens
  siRNA target sequence for DKFZp564I1922 (NM_015419.1,1133-1151).
ggaaattgatagcatacta

SEQ ID NO: 352391 - DNA, 19 bp, Homo sapiens
  siRNA target sequence for DKFZp564I1922 (NM_015419.1,1237-1255).
gaggaagctctttactaca

SEQ ID NO: 352392 - DNA, 19 bp, Homo sapiens
  siRNA target sequence for DKFZp564I1922 (NM_015419.1,1362-1380).
ctactacacccagtattct

SEQ ID NO: 352393 - DNA, 19 bp, Homo sapiens
  siRNA target sequence for DKFZp564I1922 (NM_015419.1,1418-1436).
gcagaagctgggtaatgat

SEQ ID NO: 352394 - DNA, 19 bp, Homo sapiens
  siRNA target sequence for DKFZp564I1922 (NM_015419.1,1419-1437).
cagaagctgggtaatgatt

SEQ ID NO: 352395 - DNA, 19 bp, Homo sapiens
  siRNA target sequence for DKFZp564I1922 (NM_015419.1,1519-1537).
gagagtccatctatcttct

SEQ ID NO: 352396 - DNA, 19 bp, Homo sapiens
  siRNA target sequence for DKFZp564I1922 (NM_015419.1,1579-1597).
gacccagacagcaagttct

SEQ ID NO: 352397 - DNA, 19 bp, Homo sapiens
  siRNA target sequence for DKFZp564I1922 (NM_015419.1,1684-1702).
gaaatggaccgcatggtat

SEQ ID NO: 352398 - DNA, 19 bp, Homo sapiens
  siRNA target sequence for DKFZp564I1922 (NM_015419.1,1772-1790).
caggggagtcggtgacatt

SEQ ID NO: 352399 - DNA, 19 bp, Homo sapiens
  siRNA target sequence for DKFZp564I1922 (NM_015419.1,1791-1809).
gccttgcaatgctttagca

SEQ ID NO: 352400 - DNA, 19 bp, Homo sapiens
  siRNA target sequence for DKFZp564I1922 (NM_015419.1,1845-1863).
cagaaggataattaatgat

SEQ ID NO: 352401 - DNA, 19 bp, Homo sapiens
  siRNA target sequence for DKFZp564I1922 (NM_015419.1,1866-1884).
ggctaacacatcacatgta

SEQ ID NO: 352402 - DNA, 19 bp, Homo sapiens
  siRNA target sequence for DKFZp564I1922 (NM_015419.1,1867-1885).
gctaacacatcacatgtat

SEQ ID NO: 352403 - DNA, 19 bp, Homo sapiens
  siRNA target sequence for DKFZp564I1922 (NM_015419.1,1969-1987).
caaggggcagaccatttta

SEQ ID NO: 352404 - DNA, 19 bp, Homo sapiens
  siRNA target sequence for DKFZp564I1922 (NM_015419.1,2281-2299).
ggtcgcagagtgtttgaat

SEQ ID NO: 352405 - DNA, 19 bp, Homo sapiens
  siRNA target sequence for DKFZp564I1922 (NM_015419.1,2284-2302).
cgcagagtgtttgaatcta

SEQ ID NO: 352406 - DNA, 19 bp, Homo sapiens
  siRNA target sequence for DKFZp564I1922 (NM_015419.1,2319-2337).
ggcaaacaaacagattaat

SEQ ID NO: 352407 - DNA, 19 bp, Homo sapiens
  siRNA target sequence for DKFZp564I1922 (NM_015419.1,2339-2357).
cggagcgctgggctgatat

SEQ ID NO: 352408 - DNA, 19 bp, Homo sapiens
  siRNA target sequence for DKFZp564I1922 (NM_015419.1,2343-2361).
gcgctgggctgatatttta

SEQ ID NO: 352409 - DNA, 19 bp, Homo sapiens
  siRNA target sequence for DKFZp564I1922 (NM_015419.1,2556-2574).
gcacgttttgggtaccatt

SEQ ID NO: 352410 - DNA, 19 bp, Homo sapiens
  siRNA target sequence for DKFZp564I1922 (NM_015419.1,2557-2575).
cacgttttgggtaccattt

SEQ ID NO: 352411 - DNA, 19 bp, Homo sapiens
  siRNA target sequence for DKFZp564I1922 (NM_015419.1,2601-2619).
caaccacaatggagttatt

SEQ ID NO: 352412 - DNA, 19 bp, Homo sapiens
  siRNA target sequence for DKFZp564I1922 (NM_015419.1,2604-2622).
ccacaatggagttattctt

SEQ ID NO: 352413 - DNA, 19 bp, Homo sapiens
  siRNA target sequence for DKFZp564I1922 (NM_015419.1,2607-2625).
caatggagttattcttgtt

SEQ ID NO: 352414 - DNA, 19 bp, Homo sapiens
  siRNA target sequence for DKFZp564I1922 (NM_015419.1,2620-2638).
cttgttgaacctgaagtaa

SEQ ID NO: 352415 - DNA, 19 bp, Homo sapiens
  siRNA target sequence for DKFZp564I1922 (NM_015419.1,2775-2793).
cacattagacacagtctat

SEQ ID NO: 352416 - DNA, 19 bp, Homo sapiens
  siRNA target sequence for DKFZp564I1922 (NM_015419.1,2864-2882).
ccacatccagtgagtatga

SEQ ID NO: 352417 - DNA, 19 bp, Homo sapiens
  siRNA target sequence for DKFZp564I1922 (NM_015419.1,2911-2929).
gagtctgagcccatgcaat

SEQ ID NO: 352418 - DNA, 19 bp, Homo sapiens
  siRNA target sequence for DKFZp564I1922 (NM_015419.1,2915-2933).
ctgagcccatgcaatactt

SEQ ID NO: 352419 - DNA, 19 bp, Homo sapiens
  siRNA target sequence for DKFZp564I1922 (NM_015419.1,3033-3051).
ctccagtacatcacagtta

SEQ ID NO: 352420 - DNA, 19 bp, Homo sapiens
  siRNA target sequence for DKFZp564I1922 (NM_015419.1,3035-3053).
ccagtacatcacagttatt

SEQ ID NO: 352421 - DNA, 19 bp, Homo sapiens
  siRNA target sequence for DKFZp564I1922 (NM_015419.1,3036-3054).
cagtacatcacagttattt

SEQ ID NO: 352422 - DNA, 19 bp, Homo sapiens
  siRNA target sequence for DKFZp564I1922 (NM_015419.1,3038-3056).
gtacatcacagttatttga

SEQ ID NO: 352423 - DNA, 19 bp, Homo sapiens
  siRNA target sequence for DKFZp564I1922 (NM_015419.1,3126-3144).
ccttgtgaaaagtagtcta

SEQ ID NO: 352424 - DNA, 19 bp, Homo sapiens
  siRNA target sequence for DKFZp564I1922 (NM_015419.1,3151-3169).
caagacaccttactgatta

SEQ ID NO: 352425 - DNA, 19 bp, Homo sapiens
  siRNA target sequence for DKFZp564I1922 (NM_015419.1,3154-3172).
gacaccttactgattaaaa

SEQ ID NO: 352426 - DNA, 19 bp, Homo sapiens
  siRNA target sequence for DKFZp564I1922 (NM_015419.1,3197-3215).
cactacagggaggaaatat

SEQ ID NO: 352427 - DNA, 19 bp, Homo sapiens
  siRNA target sequence for DKFZp564I1922 (NM_015419.1,3229-3247).
cccacacactccagaagtt

SEQ ID NO: 352428 - DNA, 19 bp, Homo sapiens
  siRNA target sequence for DKFZp564I1922 (NM_015419.1,3353-3371).
gtaccctcctagacaaaga

SEQ ID NO: 352429 - DNA, 19 bp, Homo sapiens
  siRNA target sequence for DKFZp564I1922 (NM_015419.1,3453-3471).
caacgggagaaggagatta

SEQ ID NO: 352430 - DNA, 19 bp, Homo sapiens
  siRNA target sequence for DKFZp564I1922 (NM_015419.1,3465-3483).
gagattacgccccaacaaa

SEQ ID NO: 352431 - DNA, 19 bp, Homo sapiens
  siRNA target sequence for DKFZp564I1922 (NM_015419.1,3467-3485).
gattacgccccaacaaatt

SEQ ID NO: 352432 - DNA, 19 bp, Homo sapiens
  siRNA target sequence for DKFZp564I1922 (NM_015419.1,3487-3505).
cgccaccggcacaagcaaa

SEQ ID NO: 352433 - DNA, 19 bp, Homo sapiens
  siRNA target sequence for DKFZp564I1922 (NM_015419.1,3523-3541).
gccccatcagagacttttt

SEQ ID NO: 352434 - DNA, 19 bp, Homo sapiens
  siRNA target sequence for DKFZp564I1922 (NM_015419.1,3554-3572).
ctcaagcacctgacattaa

SEQ ID NO: 352435 - DNA, 19 bp, Homo sapiens
  siRNA target sequence for DKFZp564I1922 (NM_015419.1,3556-3574).
caagcacctgacattaaga

SEQ ID NO: 352436 - DNA, 19 bp, Homo sapiens
  siRNA target sequence for DKFZp564I1922 (NM_015419.1,3559-3577).
gcacctgacattaagattt

SEQ ID NO: 352437 - DNA, 19 bp, Homo sapiens
  siRNA target sequence for DKFZp564I1922 (NM_015419.1,3567-3585).
cattaagatttcaagtcaa

SEQ ID NO: 352438 - DNA, 19 bp, Homo sapiens
  siRNA target sequence for DKFZp564I1922 (NM_015419.1,3605-3623).
ctacagcttgggtggataa

SEQ ID NO: 352439 - DNA, 19 bp, Homo sapiens
  siRNA target sequence for DKFZp564I1922 (NM_015419.1,3615-3633).
ggtggataacacagttaat

SEQ ID NO: 352440 - DNA, 19 bp, Homo sapiens
  siRNA target sequence for DKFZp564I1922 (NM_015419.1,3628-3646).
gttaatacccccaaacagt

SEQ ID NO: 352441 - DNA, 19 bp, Homo sapiens
  siRNA target sequence for DKFZp564I1922 (NM_015419.1,3710-3728).
ggccaaacaaacatcgata

SEQ ID NO: 352442 - DNA, 19 bp, Homo sapiens
  siRNA target sequence for DKFZp564I1922 (NM_015419.1,3711-3729).
gccaaacaaacatcgatat

SEQ ID NO: 352443 - DNA, 19 bp, Homo sapiens
  siRNA target sequence for DKFZp564I1922 (NM_015419.1,3712-3730).
ccaaacaaacatcgatata

SEQ ID NO: 352444 - DNA, 19 bp, Homo sapiens
  siRNA target sequence for DKFZp564I1922 (NM_015419.1,3813-3831).
cagttcagaaactatactt

SEQ ID NO: 352445 - DNA, 19 bp, Homo sapiens
  siRNA target sequence for DKFZp564I1922 (NM_015419.1,3861-3879).
gggcccttatgattcctta

SEQ ID NO: 352446 - DNA, 19 bp, Homo sapiens
  siRNA target sequence for DKFZp564I1922 (NM_015419.1,3866-3884).
cttatgattccttagatta

SEQ ID NO: 352447 - DNA, 19 bp, Homo sapiens
  siRNA target sequence for DKFZp564I1922 (NM_015419.1,3885-3903).
catgacaaccaccagaaaa

SEQ ID NO: 352448 - DNA, 19 bp, Homo sapiens
  siRNA target sequence for DKFZp564I1922 (NM_015419.1,3890-3908).
caaccaccagaaaaatata

SEQ ID NO: 352449 - DNA, 19 bp, Homo sapiens
  siRNA target sequence for DKFZp564I1922 (NM_015419.1,4027-4045).
gtcactggtgaatcaatta

SEQ ID NO: 352450 - DNA, 19 bp, Homo sapiens
  siRNA target sequence for DKFZp564I1922 (NM_015419.1,4029-4047).
cactggtgaatcaattact

SEQ ID NO: 352451 - DNA, 19 bp, Homo sapiens
  siRNA target sequence for DKFZp564I1922 (NM_015419.1,4031-4049).
ctggtgaatcaattactaa

SEQ ID NO: 352452 - DNA, 19 bp, Homo sapiens
  siRNA target sequence for DKFZp564I1922 (NM_015419.1,4249-4267).
gatttcacttccgagtttt

SEQ ID NO: 352453 - DNA, 19 bp, Homo sapiens
  siRNA target sequence for DKFZp564I1922 (NM_015419.1,4278-4296).
gacagtctccacaccattt

SEQ ID NO: 352454 - DNA, 19 bp, Homo sapiens
  siRNA target sequence for DKFZp564I1922 (NM_015419.1,4320-4338).
cacaactctctcaagcata

SEQ ID NO: 352455 - DNA, 19 bp, Homo sapiens
  siRNA target sequence for DKFZp564I1922 (NM_015419.1,4376-4394).
cccttgatcaagatcatct

SEQ ID NO: 352456 - DNA, 19 bp, Homo sapiens
  siRNA target sequence for DKFZp564I1922 (NM_015419.1,4407-4425).
ggctattctcctttctgaa

SEQ ID NO: 352457 - DNA, 19 bp, Homo sapiens
  siRNA target sequence for DKFZp564I1922 (NM_015419.1,4479-4497).
ctcgtccccatccacaatt

SEQ ID NO: 352458 - DNA, 19 bp, Homo sapiens
  siRNA target sequence for DKFZp564I1922 (NM_015419.1,4660-4678).
gggccaaatgaattatcaa

SEQ ID NO: 352459 - DNA, 19 bp, Homo sapiens
  siRNA target sequence for DKFZp564I1922 (NM_015419.1,4662-4680).
gccaaatgaattatcaaca

SEQ ID NO: 352460 - DNA, 19 bp, Homo sapiens
  siRNA target sequence for DKFZp564I1922 (NM_015419.1,4699-4717).
gcatttaacttgtctacaa

SEQ ID NO: 352461 - DNA, 19 bp, Homo sapiens
  siRNA target sequence for DKFZp564I1922 (NM_015419.1,4879-4897).
caaagcgcttccagatact

SEQ ID NO: 352462 - DNA, 19 bp, Homo sapiens
  siRNA target sequence for DKFZp564I1922 (NM_015419.1,4926-4944).
gaccaacaaaccggaaata

SEQ ID NO: 352463 - DNA, 19 bp, Homo sapiens
  siRNA target sequence for DKFZp564I1922 (NM_015419.1,4932-4950).
caaaccggaaataactaca

SEQ ID NO: 352464 - DNA, 19 bp, Homo sapiens
  siRNA target sequence for DKFZp564I1922 (NM_015419.1,4938-4956).
ggaaataactacatatcct

SEQ ID NO: 352465 - DNA, 19 bp, Homo sapiens
  siRNA target sequence for DKFZp564I1922 (NM_015419.1,4974-4992).
gaacaaacagtttacaact

SEQ ID NO: 352466 - DNA, 19 bp, Homo sapiens
  siRNA target sequence for DKFZp564I1922 (NM_015419.1,4983-5001).
gtttacaactccaagatta

SEQ ID NO: 352467 - DNA, 19 bp, Homo sapiens
  siRNA target sequence for DKFZp564I1922 (NM_015419.1,4997-5015).
gattatcaagtacaacaat

SEQ ID NO: 352468 - DNA, 19 bp, Homo sapiens
  siRNA target sequence for DKFZp564I1922 (NM_015419.1,5041-5059).
cccagcattcctagtaagt

SEQ ID NO: 352469 - DNA, 19 bp, Homo sapiens
  siRNA target sequence for DKFZp564I1922 (NM_015419.1,5043-5061).
cagcattcctagtaagttt

SEQ ID NO: 352470 - DNA, 19 bp, Homo sapiens
  siRNA target sequence for DKFZp564I1922 (NM_015419.1,5046-5064).
cattcctagtaagtttact

SEQ ID NO: 352471 - DNA, 19 bp, Homo sapiens
  siRNA target sequence for DKFZp564I1922 (NM_015419.1,5058-5076).
gtttactgaccgaagaact

SEQ ID NO: 352472 - DNA, 19 bp, Homo sapiens
  siRNA target sequence for DKFZp564I1922 (NM_015419.1,5068-5086).
cgaagaactgaccaattca

SEQ ID NO: 352473 - DNA, 19 bp, Homo sapiens
  siRNA target sequence for DKFZp564I1922 (NM_015419.1,5129-5147).
caagaaacccagttggaaa

SEQ ID NO: 352474 - DNA, 19 bp, Homo sapiens
  siRNA target sequence for DKFZp564I1922 (NM_015419.1,5158-5176).
ccaagaattcctcattatt

SEQ ID NO: 352475 - DNA, 19 bp, Homo sapiens
  siRNA target sequence for DKFZp564I1922 (NM_015419.1,5167-5185).
cctcattattccaatggaa

SEQ ID NO: 352476 - DNA, 19 bp, Homo sapiens
  siRNA target sequence for DKFZp564I1922 (NM_015419.1,5387-5405).
cgggatcaccctcaactaa

SEQ ID NO: 352477 - DNA, 19 bp, Homo sapiens
  siRNA target sequence for DKFZp564I1922 (NM_015419.1,5389-5407).
ggatcaccctcaactaact

SEQ ID NO: 352478 - DNA, 19 bp, Homo sapiens
  siRNA target sequence for DKFZp564I1922 (NM_015419.1,5390-5408).
gatcaccctcaactaactt

SEQ ID NO: 352479 - DNA, 19 bp, Homo sapiens
  siRNA target sequence for DKFZp564I1922 (NM_015419.1,5429-5447).
cttccacccagagttctat

SEQ ID NO: 352480 - DNA, 19 bp, Homo sapiens
  siRNA target sequence for DKFZp564I1922 (NM_015419.1,5437-5455).
cagagttctatctccttta

SEQ ID NO: 352481 - DNA, 19 bp, Homo sapiens
  siRNA target sequence for DKFZp564I1922 (NM_015419.1,5439-5457).
gagttctatctcctttata

SEQ ID NO: 352482 - DNA, 19 bp, Homo sapiens
  siRNA target sequence for DKFZp564I1922 (NM_015419.1,5518-5536).
ggacctcctgcatccaaat

SEQ ID NO: 352483 - DNA, 19 bp, Homo sapiens
  siRNA target sequence for DKFZp564I1922 (NM_015419.1,5521-5539).
cctcctgcatccaaattct

SEQ ID NO: 352484 - DNA, 19 bp, Homo sapiens
  siRNA target sequence for DKFZp564I1922 (NM_015419.1,5641-5659).
ccaaagcctttcgttactt

SEQ ID NO: 352485 - DNA, 19 bp, Homo sapiens
  siRNA target sequence for DKFZp564I1922 (NM_015419.1,5652-5670).
cgttacttggacaaaggtt

SEQ ID NO: 352486 - DNA, 19 bp, Homo sapiens
  siRNA target sequence for DKFZp564I1922 (NM_015419.1,5673-5691).
cacaggagctcttatgact

SEQ ID NO: 352487 - DNA, 19 bp, Homo sapiens
  siRNA target sequence for DKFZp564I1922 (NM_015419.1,5727-5745).
gaacggtaccttagtgata

SEQ ID NO: 352488 - DNA, 19 bp, Homo sapiens
  siRNA target sequence for DKFZp564I1922 (NM_015419.1,5742-5760).
gatacggaaggttcaagta

SEQ ID NO: 352489 - DNA, 19 bp, Homo sapiens
  siRNA target sequence for DKFZp564I1922 (NM_015419.1,5761-5779).
caagatcgaggccagtata

SEQ ID NO: 352490 - DNA, 19 bp, Homo sapiens
  siRNA target sequence for DKFZp564I1922 (NM_015419.1,5764-5782).
gatcgaggccagtatatgt

SEQ ID NO: 352491 - DNA, 19 bp, Homo sapiens
  siRNA target sequence for DKFZp564I1922 (NM_015419.1,5841-5859).
gcagcaacctcaaatccta

SEQ ID NO: 352492 - DNA, 19 bp, Homo sapiens
  siRNA target sequence for DKFZp564I1922 (NM_015419.1,5890-5908).
ctgggagacaccattgcaa

SEQ ID NO: 352493 - DNA, 19 bp, Homo sapiens
  siRNA target sequence for DKFZp564I1922 (NM_015419.1,5966-5984).
ggagggtgtggcaaactgt

SEQ ID NO: 352494 - DNA, 19 bp, Homo sapiens
  siRNA target sequence for DKFZp564I1922 (NM_015419.1,6002-6020).
gcatcaccctgcacgaaaa

SEQ ID NO: 352495 - DNA, 19 bp, Homo sapiens
  siRNA target sequence for DKFZp564I1922 (NM_015419.1,6053-6071).
cagacagaggcgtctataa

SEQ ID NO: 352496 - DNA, 19 bp, Homo sapiens
  siRNA target sequence for DKFZp564I1922 (NM_015419.1,6286-6304).
cacgggaacttgtttgttt

SEQ ID NO: 352497 - DNA, 19 bp, Homo sapiens
  siRNA target sequence for DKFZp564I1922 (NM_015419.1,6308-6326).
ccaacgggacgctctacat

SEQ ID NO: 352498 - DNA, 19 bp, Homo sapiens
  siRNA target sequence for DKFZp564I1922 (NM_015419.1,6567-6585).
cgcgctcttcagttttgat

SEQ ID NO: 352499 - DNA, 19 bp, Homo sapiens
  siRNA target sequence for DKFZp564I1922 (NM_015419.1,6568-6586).
gcgctcttcagttttgata

SEQ ID NO: 352500 - DNA, 19 bp, Homo sapiens
  siRNA target sequence for DKFZp564I1922 (NM_015419.1,6657-6675).
cctgtgcgtagctcgaaat

SEQ ID NO: 352501 - DNA, 19 bp, Homo sapiens
  siRNA target sequence for DKFZp564I1922 (NM_015419.1,6662-6680).
gcgtagctcgaaataaggt

SEQ ID NO: 352502 - DNA, 19 bp, Homo sapiens
  siRNA target sequence for DKFZp564I1922 (NM_015419.1,6663-6681).
cgtagctcgaaataaggtt

SEQ ID NO: 352503 - DNA, 19 bp, Homo sapiens
  siRNA target sequence for DKFZp564I1922 (NM_015419.1,6748-6766).
gagaacgaccacaaagtct

SEQ ID NO: 352504 - DNA, 19 bp, Homo sapiens
  siRNA target sequence for DKFZp564I1922 (NM_015419.1,6899-6917).
gctatgtcgtcttcaacaa

SEQ ID NO: 352505 - DNA, 19 bp, Homo sapiens
  siRNA target sequence for DKFZp564I1922 (NM_015419.1,6900-6918).
ctatgtcgtcttcaacaat

SEQ ID NO: 352506 - DNA, 19 bp, Homo sapiens
  siRNA target sequence for DKFZp564I1922 (NM_015419.1,6915-6933).
caatgggacactctacttt

SEQ ID NO: 352507 - DNA, 19 bp, Homo sapiens
  siRNA target sequence for DKFZp564I1922 (NM_015419.1,6920-6938).
ggacactctactttaacga

SEQ ID NO: 352508 - DNA, 19 bp, Homo sapiens
  siRNA target sequence for DKFZp564I1922 (NM_015419.1,6921-6939).
gacactctactttaacgaa

SEQ ID NO: 352509 - DNA, 19 bp, Homo sapiens
  siRNA target sequence for DKFZp564I1922 (NM_015419.1,7036-7054).
gccaccatccggaacaaga

SEQ ID NO: 352510 - DNA, 19 bp, Homo sapiens
  siRNA target sequence for DKFZp564I1922 (NM_015419.1,7538-7556).
ccgtccagctggtatgcat

SEQ ID NO: 352511 - DNA, 19 bp, Homo sapiens
  siRNA target sequence for DKFZp564I1922 (NM_015419.1,7790-7808).
ctgacggcatgctacacat

SEQ ID NO: 352512 - DNA, 19 bp, Homo sapiens
  siRNA target sequence for DKFZp564I1922 (NM_015419.1,8051-8069).
ccctgggacgcgtttctct

SEQ ID NO: 352513 - DNA, 19 bp, Homo sapiens
  siRNA target sequence for DKFZp564I1922 (NM_015419.1,8052-8070).
cctgggacgcgtttctctt

SEQ ID NO: 352514 - DNA, 19 bp, Homo sapiens
  siRNA target sequence for DKFZp564I1922 (NM_015419.1,8096-8114).
gtgaggcctcggtgtttga

SEQ ID NO: 352515 - DNA, 19 bp, Homo sapiens
  siRNA target sequence for DKFZp564I1922 (NM_015419.1,8109-8127).
gtttgacaggggtacctat

SEQ ID NO: 352516 - DNA, 19 bp, Homo sapiens
  siRNA target sequence for DKFZp564I1922 (NM_015419.1,8242-8260).
gggaacaccgtgaaactga

SEQ ID NO: 352517 - DNA, 19 bp, Homo sapiens
  siRNA target sequence for DKFZp564I1922 (NM_015419.1,8243-8261).
ggaacaccgtgaaactgaa

SEQ ID NO: 352518 - DNA, 19 bp, Homo sapiens
  siRNA target sequence for DKFZp564I1922 (NM_015419.1,8309-8327).
cggataagtcgcatctgaa

SEQ ID NO: 352519 - DNA, 19 bp, Homo sapiens
  siRNA target sequence for DKFZp564I1922 (NM_015419.1,8334-8352).
ggttcaggctcgtctgtat

SEQ ID NO: 352520 - DNA, 19 bp, Homo sapiens
  siRNA target sequence for DKFZp564I1922 (NM_015419.1,8344-8362).
cgtctgtatggaaacagat

SEQ ID NO: 352521 - DNA, 19 bp, Homo sapiens
  siRNA target sequence for DKFZp564I1922 (NM_015419.1,8345-8363).
gtctgtatggaaacagatt

SEQ ID NO: 352522 - DNA, 19 bp, Homo sapiens
  siRNA target sequence for DKFZp564I1922 (NM_015419.1,8408-8426).
gagatgccggcttctacaa

SEQ ID NO: 352523 - DNA, 19 bp, Homo sapiens
  siRNA target sequence for DKFZp564I1922 (NM_015419.1,8410-8428).
gatgccggcttctacaagt

SEQ ID NO: 352524 - DNA, 19 bp, Homo sapiens
  siRNA target sequence for DKFZp564I1922 (NM_015419.1,8427-8445).
gtgcatggcaaaaaacatt

SEQ ID NO: 352525 - DNA, 19 bp, Homo sapiens
  siRNA target sequence for DKFZp564I1922 (NM_015419.1,8446-8464).
ctcggcagtgactccaaaa

SEQ ID NO: 352526 - DNA, 19 bp, Homo sapiens
  siRNA target sequence for DKFZp564I1922 (NM_015419.1,8448-8466).
cggcagtgactccaaaaca

SEQ ID NO: 352527 - DNA, 19 bp, Homo sapiens
  siRNA target sequence for DKFZp564I1922 (NM_015419.1,8451-8469).
cagtgactccaaaacaact

SEQ ID NO: 352528 - DNA, 19 bp, Homo sapiens
  siRNA target sequence for DKFZp564I1922 (NM_015419.1,8455-8473).
gactccaaaacaacttaca

SEQ ID NO: 352529 - DNA, 19 bp, Homo sapiens
  siRNA target sequence for DKFZP564O0463 (NM_015420.4,339-357).
ccaacgagaggactcttat

SEQ ID NO: 352530 - DNA, 19 bp, Homo sapiens
  siRNA target sequence for DKFZP564O0463 (NM_015420.4,375-393).
gaagccggagactctagta

SEQ ID NO: 352531 - DNA, 19 bp, Homo sapiens
  siRNA target sequence for DKFZP564O0463 (NM_015420.4,524-542).
cgactgcacagctaaagaa

SEQ ID NO: 352532 - DNA, 19 bp, Homo sapiens
  siRNA target sequence for DKFZP564O0463 (NM_015420.4,757-775).
ggaatccggacaattatgt

SEQ ID NO: 352533 - DNA, 19 bp, Homo sapiens
  siRNA target sequence for DKFZP564O0463 (NM_015420.4,888-906).
cgagtatttgcaaaaccat

SEQ ID NO: 352534 - DNA, 19 bp, Homo sapiens
  siRNA target sequence for DKFZP564O0463 (NM_015420.4,927-945).
caccgtgatggagtcaatt

SEQ ID NO: 352535 - DNA, 19 bp, Homo sapiens
  siRNA target sequence for DKFZP564O0463 (NM_015420.4,930-948).
cgtgatggagtcaattgct

SEQ ID NO: 352536 - DNA, 19 bp, Homo sapiens
  siRNA target sequence for DKFZP564O0463 (NM_015420.4,931-949).
gtgatggagtcaattgctt

SEQ ID NO: 352537 - DNA, 19 bp, Homo sapiens
  siRNA target sequence for DKFZP564O0463 (NM_015420.4,941-959).
caattgcttggcaaagcat

SEQ ID NO: 352538 - DNA, 19 bp, Homo sapiens
  siRNA target sequence for DKFZP564O0463 (NM_015420.4,1020-1038).
ctaactcagcggaattgta

SEQ ID NO: 352539 - DNA, 19 bp, Homo sapiens
  siRNA target sequence for DKFZP564O0463 (NM_015420.4,1030-1048).
ggaattgtatccgtacaat

SEQ ID NO: 352540 - DNA, 19 bp, Homo sapiens
  siRNA target sequence for DKFZP564O0463 (NM_015420.4,1031-1049).
gaattgtatccgtacaata

SEQ ID NO: 352541 - DNA, 19 bp, Homo sapiens
  siRNA target sequence for DKFZP564O0463 (NM_015420.4,1062-1080).
ggctttgtacgaggaatat

SEQ ID NO: 352542 - DNA, 19 bp, Homo sapiens
  siRNA target sequence for DKFZP564O0463 (NM_015420.4,1064-1082).
ctttgtacgaggaatatgt

SEQ ID NO: 352543 - DNA, 19 bp, Homo sapiens
  siRNA target sequence for DKFZP564O0463 (NM_015420.4,1169-1187).
cgaggaagagccattacat

SEQ ID NO: 352544 - DNA, 19 bp, Homo sapiens
  siRNA target sequence for DKFZP564O0463 (NM_015420.4,1173-1191).
gaagagccattacatacaa

SEQ ID NO: 352545 - DNA, 19 bp, Homo sapiens
  siRNA target sequence for DKFZP564O0463 (NM_015420.4,1176-1194).
gagccattacatacaatat

SEQ ID NO: 352546 - DNA, 19 bp, Homo sapiens
  siRNA target sequence for DKFZP564O0463 (NM_015420.4,1178-1196).
gccattacatacaatatta

SEQ ID NO: 352547 - DNA, 19 bp, Homo sapiens
  siRNA target sequence for DKFZP564O0463 (NM_015420.4,1208-1226).
gtatactgggattgatcat

SEQ ID NO: 352548 - DNA, 19 bp, Homo sapiens
  siRNA target sequence for DKFZP564O0463 (NM_015420.4,1255-1273).
gtggacagcaagtagacat

SEQ ID NO: 352549 - DNA, 19 bp, Homo sapiens
  siRNA target sequence for DKFZP564O0463 (NM_015420.4,1284-1302).
caaagaactaatcctatat

SEQ ID NO: 352550 - DNA, 19 bp, Homo sapiens
  siRNA target sequence for DKFZP564O0463 (NM_015420.4,1291-1309).
ctaatcctatatgttcaat

SEQ ID NO: 352551 - DNA, 19 bp, Homo sapiens
  siRNA target sequence for DKFZP564O0463 (NM_015420.4,1306-1324).
caatgacctggggatttga

SEQ ID NO: 352552 - DNA, 19 bp, Homo sapiens
  siRNA target sequence for DKFZP564O0463 (NM_015420.4,1316-1334).
gggatttgacagtataagt

SEQ ID NO: 352553 - DNA, 19 bp, Homo sapiens
  siRNA target sequence for DKFZP564O0463 (NM_015420.4,1317-1335).
ggatttgacagtataagta

SEQ ID NO: 352554 - DNA, 19 bp, Homo sapiens
  siRNA target sequence for DKFZP564O0463 (NM_015420.4,1325-1343).
cagtataagtagtgttaaa

SEQ ID NO: 352555 - DNA, 19 bp, Homo sapiens
  siRNA target sequence for DKFZP564O0463 (NM_015420.4,1327-1345).
gtataagtagtgttaaatt

SEQ ID NO: 352556 - DNA, 19 bp, Homo sapiens
  siRNA target sequence for DKFZP564O0463 (NM_015420.4,1384-1402).
ctgacaggaatatagtact

SEQ ID NO: 352557 - DNA, 19 bp, Homo sapiens
  siRNA target sequence for DKFZP564O0463 (NM_015420.4,1414-1432).
ggcaagctactcctttgaa

SEQ ID NO: 352558 - DNA, 19 bp, Homo sapiens
  siRNA target sequence for DKFZP564O0463 (NM_015420.4,1437-1455).
gttatcttagatatgagaa

SEQ ID NO: 352559 - DNA, 19 bp, Homo sapiens
  siRNA target sequence for DKFZP564O0463 (NM_015420.4,1442-1460).
cttagatatgagaacaaat

SEQ ID NO: 352560 - DNA, 19 bp, Homo sapiens
  siRNA target sequence for DKFZP564O0463 (NM_015420.4,1476-1494).
cctatggaagctttcattt

SEQ ID NO: 352561 - DNA, 19 bp, Homo sapiens
  siRNA target sequence for DKFZP564O0463 (NM_015420.4,1490-1508).
catttttacagcagcaaat

SEQ ID NO: 352562 - DNA, 19 bp, Homo sapiens
  siRNA target sequence for DKFZP564O0463 (NM_015420.4,1552-1570).
ctcctgtaatggtccatat

SEQ ID NO: 352563 - DNA, 19 bp, Homo sapiens
  siRNA target sequence for DKFZP564O0463 (NM_015420.4,1563-1581).
gtccatatggatcatgtat

SEQ ID NO: 352564 - DNA, 19 bp, Homo sapiens
  siRNA target sequence for DKFZP564O0463 (NM_015420.4,1565-1583).
ccatatggatcatgtatct

SEQ ID NO: 352565 - DNA, 19 bp, Homo sapiens
  siRNA target sequence for DKFZP564O0463 (NM_015420.4,1626-1644).
gtgtctgctagtttcgata

SEQ ID NO: 352566 - DNA, 19 bp, Homo sapiens
  siRNA target sequence for DKFZP564O0463 (NM_015420.4,1628-1646).
gtctgctagtttcgataaa

SEQ ID NO: 352567 - DNA, 19 bp, Homo sapiens
  siRNA target sequence for DKFZP564O0463 (NM_015420.4,1632-1650).
gctagtttcgataaatcta

SEQ ID NO: 352568 - DNA, 19 bp, Homo sapiens
  siRNA target sequence for DKFZP564O0463 (NM_015420.4,1678-1696).
gaagcagggaggtatatca

SEQ ID NO: 352569 - DNA, 19 bp, Homo sapiens
  siRNA target sequence for DKFZP564O0463 (NM_015420.4,1682-1700).
cagggaggtatatcataca

SEQ ID NO: 352570 - DNA, 19 bp, Homo sapiens
  siRNA target sequence for DKFZP564O0463 (NM_015420.4,1710-1728).
caacatgttatctgtgtaa

SEQ ID NO: 352571 - DNA, 19 bp, Homo sapiens
  siRNA target sequence for DKFZP564O0463 (NM_015420.4,1713-1731).
catgttatctgtgtaaaat

SEQ ID NO: 352572 - DNA, 19 bp, Homo sapiens
  siRNA target sequence for DKFZP564O0463 (NM_015420.4,1738-1756).
ctgacagcaagtatattat

SEQ ID NO: 352573 - DNA, 19 bp, Homo sapiens
  siRNA target sequence for DKFZP564O0463 (NM_015420.4,1784-1802).
cctgtggaaagctaatgct

SEQ ID NO: 352574 - DNA, 19 bp, Homo sapiens
  siRNA target sequence for DKFZP564O0463 (NM_015420.4,1785-1803).
ctgtggaaagctaatgctt

SEQ ID NO: 352575 - DNA, 19 bp, Homo sapiens
  siRNA target sequence for DKFZP564O0463 (NM_015420.4,1909-1927).
gtcatcgacatctaccaaa

SEQ ID NO: 352576 - DNA, 19 bp, Homo sapiens
  siRNA target sequence for DKFZP564O0463 (NM_015420.4,1920-1938).
ctaccaaaatctatctata

SEQ ID NO: 352577 - DNA, 19 bp, Homo sapiens
  siRNA target sequence for DKFZP564O0463 (NM_015420.4,1930-1948).
ctatctatagccagattca

SEQ ID NO: 352578 - DNA, 19 bp, Homo sapiens
  siRNA target sequence for DKFZP564O0463 (NM_015420.4,1985-2003).
ggaagtgaatcgtattaaa

SEQ ID NO: 352579 - DNA, 19 bp, Homo sapiens
  siRNA target sequence for DKFZP564O0463 (NM_015420.4,2028-2046).
cttgtgtcagagaagaaga

SEQ ID NO: 352580 - DNA, 19 bp, Homo sapiens
  siRNA target sequence for DKFZP564O0463 (NM_015420.4,2049-2067).
cacgtagtggcagttgtaa

SEQ ID NO: 352581 - DNA, 19 bp, Homo sapiens
  siRNA target sequence for DKFZP564O0463 (NM_015420.4,2051-2069).
cgtagtggcagttgtaaaa

SEQ ID NO: 352582 - DNA, 19 bp, Homo sapiens
  siRNA target sequence for DKFZP564O0463 (NM_015420.4,2052-2070).
gtagtggcagttgtaaaat

SEQ ID NO: 352583 - DNA, 19 bp, Homo sapiens
  siRNA target sequence for DKFZP564K2062 (NM_015421.1,38-56).
ccgagctgtgcgtaggttt

SEQ ID NO: 352584 - DNA, 19 bp, Homo sapiens
  siRNA target sequence for DKFZP564K2062 (NM_015421.1,106-124).
gtgggcaggaggatcctaa

SEQ ID NO: 352585 - DNA, 19 bp, Homo sapiens
  siRNA target sequence for DKFZP564K2062 (NM_015421.1,148-166).
ccatctcgaaggagaaact

SEQ ID NO: 352586 - DNA, 19 bp, Homo sapiens
  siRNA target sequence for DKFZP564K2062 (NM_015421.1,149-167).
catctcgaaggagaaacta

SEQ ID NO: 352587 - DNA, 19 bp, Homo sapiens
  siRNA target sequence for DKFZP564K2062 (NM_015421.1,204-222).
cgttttgatgccatcagaa

SEQ ID NO: 352588 - DNA, 19 bp, Homo sapiens
  siRNA target sequence for DKFZP564K2062 (NM_015421.1,262-280).
ccctgacagtggtagcttt

SEQ ID NO: 352589 - DNA, 19 bp, Homo sapiens
  siRNA target sequence for DKFZP564K2062 (NM_015421.1,282-300).
ccaccaggctattacttgt

SEQ ID NO: 352590 - DNA, 19 bp, Homo sapiens
  siRNA target sequence for DKFZP564K2062 (NM_015421.1,283-301).
caccaggctattacttgta

SEQ ID NO: 352591 - DNA, 19 bp, Homo sapiens
  siRNA target sequence for DKFZP564K2062 (NM_015421.1,285-303).
ccaggctattacttgtact

SEQ ID NO: 352592 - DNA, 19 bp, Homo sapiens
  siRNA target sequence for DKFZP564K2062 (NM_015421.1,405-423).
gttggtatcctgtatctga

SEQ ID NO: 352593 - DNA, 19 bp, Homo sapiens
  siRNA target sequence for DKFZP564K2062 (NM_015421.1,409-427).
gtatcctgtatctgaatga

SEQ ID NO: 352594 - DNA, 19 bp, Homo sapiens
  siRNA target sequence for DKFZP564K2062 (NM_015421.1,445-463).
gggtggcccatctgaactt

SEQ ID NO: 352595 - DNA, 19 bp, Homo sapiens
  siRNA target sequence for DKFZP564K2062 (NM_015421.1,473-491).
gcggcaggacacatactgt

SEQ ID NO: 352596 - DNA, 19 bp, Homo sapiens
  siRNA target sequence for DKFZP564K2062 (NM_015421.1,490-508).
gtcccatggcagatgtgat

SEQ ID NO: 352597 - DNA, 19 bp, Homo sapiens
  siRNA target sequence for DKFZP564K2062 (NM_015421.1,614-632).
ggacagagagcgtttcaca

SEQ ID NO: 352598 - DNA, 19 bp, Homo sapiens
  siRNA target sequence for AASDHPPT (NM_015423.2,248-266).
gctggcagtgcgatcgatt

SEQ ID NO: 352599 - DNA, 19 bp, Homo sapiens
  siRNA target sequence for AASDHPPT (NM_015423.2,333-351).
ggtcgtctgatgataagga

SEQ ID NO: 352600 - DNA, 19 bp, Homo sapiens
  siRNA target sequence for AASDHPPT (NM_015423.2,334-352).
gtcgtctgatgataaggaa

SEQ ID NO: 352601 - DNA, 19 bp, Homo sapiens
  siRNA target sequence for AASDHPPT (NM_015423.2,383-401).
gaatcatattcgtttgcaa

SEQ ID NO: 352602 - DNA, 19 bp, Homo sapiens
  siRNA target sequence for AASDHPPT (NM_015423.2,442-460).
cgaatccttacccgaattt

SEQ ID NO: 352603 - DNA, 19 bp, Homo sapiens
  siRNA target sequence for AASDHPPT (NM_015423.2,447-465).
ccttacccgaatttcaact

SEQ ID NO: 352604 - DNA, 19 bp, Homo sapiens
  siRNA target sequence for AASDHPPT (NM_015423.2,448-466).
cttacccgaatttcaactt

SEQ ID NO: 352605 - DNA, 19 bp, Homo sapiens
  siRNA target sequence for AASDHPPT (NM_015423.2,453-471).
ccgaatttcaactttaaca

SEQ ID NO: 352606 - DNA, 19 bp, Homo sapiens
  siRNA target sequence for AASDHPPT (NM_015423.2,454-472).
cgaatttcaactttaacat

SEQ ID NO: 352607 - DNA, 19 bp, Homo sapiens
  siRNA target sequence for AASDHPPT (NM_015423.2,522-540).
gttggaattgatataatga

SEQ ID NO: 352608 - DNA, 19 bp, Homo sapiens
  siRNA target sequence for AASDHPPT (NM_015423.2,531-549).
gatataatgaagactagtt

SEQ ID NO: 352609 - DNA, 19 bp, Homo sapiens
  siRNA target sequence for AASDHPPT (NM_015423.2,646-664).
ggactcagctggatatgtt

SEQ ID NO: 352610 - DNA, 19 bp, Homo sapiens
  siRNA target sequence for AASDHPPT (NM_015423.2,647-665).
gactcagctggatatgttt

SEQ ID NO: 352611 - DNA, 19 bp, Homo sapiens
  siRNA target sequence for AASDHPPT (NM_015423.2,651-669).
cagctggatatgttttata

SEQ ID NO: 352612 - DNA, 19 bp, Homo sapiens
  siRNA target sequence for AASDHPPT (NM_015423.2,657-675).
gatatgttttataggaatt

SEQ ID NO: 352613 - DNA, 19 bp, Homo sapiens
  siRNA target sequence for AASDHPPT (NM_015423.2,670-688).
ggaattgggcacttaagga

SEQ ID NO: 352614 - DNA, 19 bp, Homo sapiens
  siRNA target sequence for AASDHPPT (NM_015423.2,726-744).
gaattgcagcggcttgaat

SEQ ID NO: 352615 - DNA, 19 bp, Homo sapiens
  siRNA target sequence for AASDHPPT (NM_015423.2,731-749).
gcagcggcttgaatttgat

SEQ ID NO: 352616 - DNA, 19 bp, Homo sapiens
  siRNA target sequence for AASDHPPT (NM_015423.2,734-752).
gcggcttgaatttgatcta

SEQ ID NO: 352617 - DNA, 19 bp, Homo sapiens
  siRNA target sequence for AASDHPPT (NM_015423.2,884-902).
gaaacccgatggatctaga

SEQ ID NO: 352618 - DNA, 19 bp, Homo sapiens
  siRNA target sequence for AASDHPPT (NM_015423.2,921-939).
caggatgattccaaaccaa

SEQ ID NO: 352619 - DNA, 19 bp, Homo sapiens
  siRNA target sequence for AASDHPPT (NM_015423.2,940-958).
cccagaggcaatttactat

SEQ ID NO: 352620 - DNA, 19 bp, Homo sapiens
  siRNA target sequence for AASDHPPT (NM_015423.2,941-959).
ccagaggcaatttactatt

SEQ ID NO: 352621 - DNA, 19 bp, Homo sapiens
  siRNA target sequence for AASDHPPT (NM_015423.2,955-973).
ctattctcaactttaatga

SEQ ID NO: 352622 - DNA, 19 bp, Homo sapiens
  siRNA target sequence for AASDHPPT (NM_015423.2,1056-1074).
cgaaatggtacaaagtcat

SEQ ID NO: 352623 - DNA, 19 bp, Homo sapiens
  siRNA target sequence for BNF1 (NM_015424.3,1152-1170).
gccgtcaccccgagaaagt

SEQ ID NO: 352624 - DNA, 19 bp, Homo sapiens
  siRNA target sequence for BNF1 (NM_015424.3,1335-1353).
cggacttggtggagatcta

SEQ ID NO: 352625 - DNA, 19 bp, Homo sapiens
  siRNA target sequence for DKFZP434C245 (NM_015426.2,62-80).
cgctggaaaggcattttaa

SEQ ID NO: 352626 - DNA, 19 bp, Homo sapiens
  siRNA target sequence for DKFZP434C245 (NM_015426.2,109-127).
gacttcagtatcaacacaa

SEQ ID NO: 352627 - DNA, 19 bp, Homo sapiens
  siRNA target sequence for DKFZP434C245 (NM_015426.2,294-312).
ctgggtacccaatgtcaaa

SEQ ID NO: 352628 - DNA, 19 bp, Homo sapiens
  siRNA target sequence for DKFZP434C245 (NM_015426.2,424-442).
gcaactcatcgccagaaat

SEQ ID NO: 352629 - DNA, 19 bp, Homo sapiens
  siRNA target sequence for DKFZP434C245 (NM_015426.2,425-443).
caactcatcgccagaaatt

SEQ ID NO: 352630 - DNA, 19 bp, Homo sapiens
  siRNA target sequence for DKFZP434C245 (NM_015426.2,475-493).
gtccgctgtgccaagttct

SEQ ID NO: 352631 - DNA, 19 bp, Homo sapiens
  siRNA target sequence for DKFZP434C245 (NM_015426.2,565-583).
gaatgtgtccactcgtatt

SEQ ID NO: 352632 - DNA, 19 bp, Homo sapiens
  siRNA target sequence for DKFZP434C245 (NM_015426.2,569-587).
gtgtccactcgtattgtga

SEQ ID NO: 352633 - DNA, 19 bp, Homo sapiens
  siRNA target sequence for DKFZP434C245 (NM_015426.2,586-604).
gagcatggcggctttgtca

SEQ ID NO: 352634 - DNA, 19 bp, Homo sapiens
  siRNA target sequence for DKFZP434C245 (NM_015426.2,694-712).
ctgctgcagcattatcagt

SEQ ID NO: 352635 - DNA, 19 bp, Homo sapiens
  siRNA target sequence for DKFZP434C245 (NM_015426.2,779-797).
gtgactcaaccctgaagat

SEQ ID NO: 352636 - DNA, 19 bp, Homo sapiens
  siRNA target sequence for DKFZP434C245 (NM_015426.2,872-890).
caagaacgggggagtattt

SEQ ID NO: 352637 - DNA, 19 bp, Homo sapiens
  siRNA target sequence for DKFZP434C245 (NM_015426.2,927-945).
gaagagtaactttgatatt

SEQ ID NO: 352638 - DNA, 19 bp, Homo sapiens
  siRNA target sequence for DKFZP434C245 (NM_015426.2,932-950).
gtaactttgatattgttga

SEQ ID NO: 352639 - DNA, 19 bp, Homo sapiens
  siRNA target sequence for DKFZP434C245 (NM_015426.2,1115-1133).
gcacgctggagcacattgt

SEQ ID NO: 352640 - DNA, 19 bp, Homo sapiens
  siRNA target sequence for TARSH (NM_015429.2,116-134).
ctgtggaagtattacacta

SEQ ID NO: 352641 - DNA, 19 bp, Homo sapiens
  siRNA target sequence for TARSH (NM_015429.2,227-245).
cttgcgtccaagtccaaat

SEQ ID NO: 352642 - DNA, 19 bp, Homo sapiens
  siRNA target sequence for TARSH (NM_015429.2,230-248).
gcgtccaagtccaaatgta

SEQ ID NO: 352643 - DNA, 19 bp, Homo sapiens
  siRNA target sequence for TARSH (NM_015429.2,231-249).
cgtccaagtccaaatgtaa

SEQ ID NO: 352644 - DNA, 19 bp, Homo sapiens
  siRNA target sequence for TARSH (NM_015429.2,269-287).
gggatatggcagcaatgta

SEQ ID NO: 352645 - DNA, 19 bp, Homo sapiens
  siRNA target sequence for TARSH (NM_015429.2,270-288).
ggatatggcagcaatgtat

SEQ ID NO: 352646 - DNA, 19 bp, Homo sapiens
  siRNA target sequence for TARSH (NM_015429.2,314-332).
cgctgaagggaaattcaca

SEQ ID NO: 352647 - DNA, 19 bp, Homo sapiens
  siRNA target sequence for TARSH (NM_015429.2,322-340).
ggaaattcacagaagctat

SEQ ID NO: 352648 - DNA, 19 bp, Homo sapiens
  siRNA target sequence for TARSH (NM_015429.2,348-366).
gcagagccgaaatatctga

SEQ ID NO: 352649 - DNA, 19 bp, Homo sapiens
  siRNA target sequence for TARSH (NM_015429.2,349-367).
cagagccgaaatatctgat

SEQ ID NO: 352650 - DNA, 19 bp, Homo sapiens
  siRNA target sequence for TARSH (NM_015429.2,353-371).
gccgaaatatctgatagtt

SEQ ID NO: 352651 - DNA, 19 bp, Homo sapiens
  siRNA target sequence for TARSH (NM_015429.2,355-373).
cgaaatatctgatagttgt

SEQ ID NO: 352652 - DNA, 19 bp, Homo sapiens
  siRNA target sequence for TARSH (NM_015429.2,390-408).
ccaagtcaaaagaagtcat

SEQ ID NO: 352653 - DNA, 19 bp, Homo sapiens
  siRNA target sequence for TARSH (NM_015429.2,401-419).
gaagtcatgttcaggtaaa

SEQ ID NO: 352654 - DNA, 19 bp, Homo sapiens
  siRNA target sequence for TARSH (NM_015429.2,404-422).
gtcatgttcaggtaaaact

SEQ ID NO: 352655 - DNA, 19 bp, Homo sapiens
  siRNA target sequence for TARSH (NM_015429.2,556-574).
caattcgctatcgagaaaa

SEQ ID NO: 352656 - DNA, 19 bp, Homo sapiens
  siRNA target sequence for TARSH (NM_015429.2,561-579).
cgctatcgagaaaaggata

SEQ ID NO: 352657 - DNA, 19 bp, Homo sapiens
  siRNA target sequence for TARSH (NM_015429.2,590-608).
gtggatttttcaaatctgt

SEQ ID NO: 352658 - DNA, 19 bp, Homo sapiens
  siRNA target sequence for TARSH (NM_015429.2,607-625).
gtccagccactgaaacaat

SEQ ID NO: 352659 - DNA, 19 bp, Homo sapiens
  siRNA target sequence for TARSH (NM_015429.2,641-659).
gcccaacacagtttatgaa

SEQ ID NO: 352660 - DNA, 19 bp, Homo sapiens
  siRNA target sequence for TARSH (NM_015429.2,697-715).
gtaagattttcaatcacaa

SEQ ID NO: 352661 - DNA, 19 bp, Homo sapiens
  siRNA target sequence for TARSH (NM_015429.2,707-725).
caatcacaagactgttgtt

SEQ ID NO: 352662 - DNA, 19 bp, Homo sapiens
  siRNA target sequence for TARSH (NM_015429.2,716-734).
gactgttgttggaagtaaa

SEQ ID NO: 352663 - DNA, 19 bp, Homo sapiens
  siRNA target sequence for TARSH (NM_015429.2,800-818).
gaaactaatcccaataaca

SEQ ID NO: 352664 - DNA, 19 bp, Homo sapiens
  siRNA target sequence for TARSH (NM_015429.2,824-842).
caagcaagtgattcagaat

SEQ ID NO: 352665 - DNA, 19 bp, Homo sapiens
  siRNA target sequence for TARSH (NM_015429.2,896-914).
gatactagtccaccttatt

SEQ ID NO: 352666 - DNA, 19 bp, Homo sapiens
  siRNA target sequence for TARSH (NM_015429.2,918-936).
ccaggtcttaatgaaacta

SEQ ID NO: 352667 - DNA, 19 bp, Homo sapiens
  siRNA target sequence for TARSH (NM_015429.2,951-969).
gcatccctaatgtttgaga

SEQ ID NO: 352668 - DNA, 19 bp, Homo sapiens
  siRNA target sequence for TARSH (NM_015429.2,952-970).
catccctaatgtttgagat

SEQ ID NO: 352669 - DNA, 19 bp, Homo sapiens
  siRNA target sequence for TARSH (NM_015429.2,1014-1032).
gcattacctgccgaatcta

SEQ ID NO: 352670 - DNA, 19 bp, Homo sapiens
  siRNA target sequence for TARSH (NM_015429.2,1015-1033).
cattacctgccgaatctaa

SEQ ID NO: 352671 - DNA, 19 bp, Homo sapiens
  siRNA target sequence for TARSH (NM_015429.2,1072-1090).
cagtgactcctgaaacagt

SEQ ID NO: 352672 - DNA, 19 bp, Homo sapiens
  siRNA target sequence for TARSH (NM_015429.2,1109-1127).
cactacgtctagtgcatta

SEQ ID NO: 352673 - DNA, 19 bp, Homo sapiens
  siRNA target sequence for TARSH (NM_015429.2,1111-1129).
ctacgtctagtgcattaga

SEQ ID NO: 352674 - DNA, 19 bp, Homo sapiens
  siRNA target sequence for TARSH (NM_015429.2,1114-1132).
cgtctagtgcattagatgt

SEQ ID NO: 352675 - DNA, 19 bp, Homo sapiens
  siRNA target sequence for TARSH (NM_015429.2,1115-1133).
gtctagtgcattagatgtt

SEQ ID NO: 352676 - DNA, 19 bp, Homo sapiens
  siRNA target sequence for TARSH (NM_015429.2,1173-1191).
gtgcctacagctaaaatat

SEQ ID NO: 352677 - DNA, 19 bp, Homo sapiens
  siRNA target sequence for TARSH (NM_015429.2,1224-1242).
gcaacttatgatgttttct

SEQ ID NO: 352678 - DNA, 19 bp, Homo sapiens
  siRNA target sequence for TARSH (NM_015429.2,1283-1301).
ctacacagcaacaagtgat

SEQ ID NO: 352679 - DNA, 19 bp, Homo sapiens
  siRNA target sequence for TARSH (NM_015429.2,1288-1306).
cagcaacaagtgatcgtat

SEQ ID NO: 352680 - DNA, 19 bp, Homo sapiens
  siRNA target sequence for TARSH (NM_015429.2,1299-1317).
gatcgtattctggattcta

SEQ ID NO: 352681 - DNA, 19 bp, Homo sapiens
  siRNA target sequence for TARSH (NM_015429.2,1310-1328).
ggattctatcccacctaaa

SEQ ID NO: 352682 - DNA, 19 bp, Homo sapiens
  siRNA target sequence for TARSH (NM_015429.2,1319-1337).
cccacctaaaacttctaga

SEQ ID NO: 352683 - DNA, 19 bp, Homo sapiens
  siRNA target sequence for TARSH (NM_015429.2,1320-1338).
ccacctaaaacttctagaa

SEQ ID NO: 352684 - DNA, 19 bp, Homo sapiens
  siRNA target sequence for TARSH (NM_015429.2,1437-1455).
cctgctccccagcaaacta

SEQ ID NO: 352685 - DNA, 19 bp, Homo sapiens
  siRNA target sequence for TARSH (NM_015429.2,1444-1462).
cccagcaaactacatctat

SEQ ID NO: 352686 - DNA, 19 bp, Homo sapiens
  siRNA target sequence for TARSH (NM_015429.2,1463-1481).
cccttctacacctaaacga

SEQ ID NO: 352687 - DNA, 19 bp, Homo sapiens
  siRNA target sequence for TARSH (NM_015429.2,1522-1540).
ccacaagtgccggaacaat

SEQ ID NO: 352688 - DNA, 19 bp, Homo sapiens
  siRNA target sequence for TARSH (NM_015429.2,1523-1541).
cacaagtgccggaacaatt

SEQ ID NO: 352689 - DNA, 19 bp, Homo sapiens
  siRNA target sequence for TARSH (NM_015429.2,1532-1550).
cggaacaattacacctaaa

SEQ ID NO: 352690 - DNA, 19 bp, Homo sapiens
  siRNA target sequence for TARSH (NM_015429.2,1585-1603).
cggctcccggtaaaacaca

SEQ ID NO: 352691 - DNA, 19 bp, Homo sapiens
  siRNA target sequence for TARSH (NM_015429.2,1586-1604).
ggctcccggtaaaacacaa

SEQ ID NO: 352692 - DNA, 19 bp, Homo sapiens
  siRNA target sequence for TARSH (NM_015429.2,1587-1605).
gctcccggtaaaacacaat

SEQ ID NO: 352693 - DNA, 19 bp, Homo sapiens
  siRNA target sequence for TARSH (NM_015429.2,1588-1606).
ctcccggtaaaacacaatt

SEQ ID NO: 352694 - DNA, 19 bp, Homo sapiens
  siRNA target sequence for TARSH (NM_015429.2,1686-1704).
cctcctaagccaaaaacat

SEQ ID NO: 352695 - DNA, 19 bp, Homo sapiens
  siRNA target sequence for TARSH (NM_015429.2,1702-1720).
catcaccacgcccaagaat

SEQ ID NO: 352696 - DNA, 19 bp, Homo sapiens
  siRNA target sequence for TARSH (NM_015429.2,1745-1763).
ggtgccccagcgtgttact

SEQ ID NO: 352697 - DNA, 19 bp, Homo sapiens
  siRNA target sequence for TARSH (NM_015429.2,1751-1769).
ccagcgtgttactgcaaaa

SEQ ID NO: 352698 - DNA, 19 bp, Homo sapiens
  siRNA target sequence for TARSH (NM_015429.2,1754-1772).
gcgtgttactgcaaaacca

SEQ ID NO: 352699 - DNA, 19 bp, Homo sapiens
  siRNA target sequence for TARSH (NM_015429.2,1755-1773).
cgtgttactgcaaaaccaa

SEQ ID NO: 352700 - DNA, 19 bp, Homo sapiens
  siRNA target sequence for TARSH (NM_015429.2,1826-1844).
gctccttcctcataaacca

SEQ ID NO: 352701 - DNA, 19 bp, Homo sapiens
  siRNA target sequence for TARSH (NM_015429.2,1885-1903).
cacgaggcatcccttttat

SEQ ID NO: 352702 - DNA, 19 bp, Homo sapiens
  siRNA target sequence for TARSH (NM_015429.2,1943-1961).
gaccactctggaagaaaca

SEQ ID NO: 352703 - DNA, 19 bp, Homo sapiens
  siRNA target sequence for TARSH (NM_015429.2,1970-1988).
cacccaagaacctttcaca

SEQ ID NO: 352704 - DNA, 19 bp, Homo sapiens
  siRNA target sequence for TARSH (NM_015429.2,1974-1992).
caagaacctttcacaacta

SEQ ID NO: 352705 - DNA, 19 bp, Homo sapiens
  siRNA target sequence for TARSH (NM_015429.2,1977-1995).
gaacctttcacaactaaga

SEQ ID NO: 352706 - DNA, 19 bp, Homo sapiens
  siRNA target sequence for TARSH (NM_015429.2,2026-2044).
ctcaggcgccacacagatt

SEQ ID NO: 352707 - DNA, 19 bp, Homo sapiens
  siRNA target sequence for TARSH (NM_015429.2,2028-2046).
caggcgccacacagatttt

SEQ ID NO: 352708 - DNA, 19 bp, Homo sapiens
  siRNA target sequence for TARSH (NM_015429.2,2031-2049).
gcgccacacagattttata

SEQ ID NO: 352709 - DNA, 19 bp, Homo sapiens
  siRNA target sequence for TARSH (NM_015429.2,2033-2051).
gccacacagattttatact

SEQ ID NO: 352710 - DNA, 19 bp, Homo sapiens
  siRNA target sequence for TARSH (NM_015429.2,2034-2052).
ccacacagattttatacta

SEQ ID NO: 352711 - DNA, 19 bp, Homo sapiens
  siRNA target sequence for TARSH (NM_015429.2,2114-2132).
gccatcaggtgctgataga

SEQ ID NO: 352712 - DNA, 19 bp, Homo sapiens
  siRNA target sequence for TARSH (NM_015429.2,2115-2133).
ccatcaggtgctgatagaa

SEQ ID NO: 352713 - DNA, 19 bp, Homo sapiens
  siRNA target sequence for TARSH (NM_015429.2,2116-2134).
catcaggtgctgatagaaa

SEQ ID NO: 352714 - DNA, 19 bp, Homo sapiens
  siRNA target sequence for TARSH (NM_015429.2,2119-2137).
caggtgctgatagaaatgt

SEQ ID NO: 352715 - DNA, 19 bp, Homo sapiens
  siRNA target sequence for TARSH (NM_015429.2,2125-2143).
ctgatagaaatgtatcagt

SEQ ID NO: 352716 - DNA, 19 bp, Homo sapiens
  siRNA target sequence for TARSH (NM_015429.2,2147-2165).
ctctacccaccccactaaa

SEQ ID NO: 352717 - DNA, 19 bp, Homo sapiens
  siRNA target sequence for TARSH (NM_015429.2,2149-2167).
ctacccaccccactaaaaa

SEQ ID NO: 352718 - DNA, 19 bp, Homo sapiens
  siRNA target sequence for TARSH (NM_015429.2,2203-2221).
ctacacacccacgaagaaa

SEQ ID NO: 352719 - DNA, 19 bp, Homo sapiens
  siRNA target sequence for TARSH (NM_015429.2,2256-2274).
ggaagtgcaggaatcattt

SEQ ID NO: 352720 - DNA, 19 bp, Homo sapiens
  siRNA target sequence for TARSH (NM_015429.2,2326-2344).
gaactcccttggagagaat

SEQ ID NO: 352721 - DNA, 19 bp, Homo sapiens
  siRNA target sequence for TARSH (NM_015429.2,2337-2355).
gagagaatagagacagata

SEQ ID NO: 352722 - DNA, 19 bp, Homo sapiens
  siRNA target sequence for TARSH (NM_015429.2,2394-2412).
gaaaatataactgacttta

SEQ ID NO: 352723 - DNA, 19 bp, Homo sapiens
  siRNA target sequence for TARSH (NM_015429.2,2420-2438).
cccaacaagagaaactgat

SEQ ID NO: 352724 - DNA, 19 bp, Homo sapiens
  siRNA target sequence for TARSH (NM_015429.2,2464-2482).
gacctcatgtgcgatacat

SEQ ID NO: 352725 - DNA, 19 bp, Homo sapiens
  siRNA target sequence for TARSH (NM_015429.2,2469-2487).
catgtgcgatacatccaaa

SEQ ID NO: 352726 - DNA, 19 bp, Homo sapiens
  siRNA target sequence for TARSH (NM_015429.2,2644-2662).
gggaaaagccactaaatga

SEQ ID NO: 352727 - DNA, 19 bp, Homo sapiens
  siRNA target sequence for TARSH (NM_015429.2,2663-2681).
cactgtcactgaatatgaa

SEQ ID NO: 352728 - DNA, 19 bp, Homo sapiens
  siRNA target sequence for TARSH (NM_015429.2,2679-2697).
gaagttatatccagagaaa

SEQ ID NO: 352729 - DNA, 19 bp, Homo sapiens
  siRNA target sequence for TARSH (NM_015429.2,2704-2722).
cattcagtgggaagaacaa

SEQ ID NO: 352730 - DNA, 19 bp, Homo sapiens
  siRNA target sequence for TARSH (NM_015429.2,2720-2738).
caagtccattcaaatgaca

SEQ ID NO: 352731 - DNA, 19 bp, Homo sapiens
  siRNA target sequence for TARSH (NM_015429.2,2744-2762).
gacattttccacagtagaa

SEQ ID NO: 352732 - DNA, 19 bp, Homo sapiens
  siRNA target sequence for TARSH (NM_015429.2,2768-2786).
gaaaccaaacacgagttat

SEQ ID NO: 352733 - DNA, 19 bp, Homo sapiens
  siRNA target sequence for TARSH (NM_015429.2,2772-2790).
ccaaacacgagttatgaat

SEQ ID NO: 352734 - DNA, 19 bp, Homo sapiens
  siRNA target sequence for TARSH (NM_015429.2,2773-2791).
caaacacgagttatgaatt

SEQ ID NO: 352735 - DNA, 19 bp, Homo sapiens
  siRNA target sequence for TARSH (NM_015429.2,2841-2859).
gtggcattcagtactgaat

SEQ ID NO: 352736 - DNA, 19 bp, Homo sapiens
  siRNA target sequence for TARSH (NM_015429.2,2843-2861).
ggcattcagtactgaatca

SEQ ID NO: 352737 - DNA, 19 bp, Homo sapiens
  siRNA target sequence for TARSH (NM_015429.2,2923-2941).
cctttaattcagactctta

SEQ ID NO: 352738 - DNA, 19 bp, Homo sapiens
  siRNA target sequence for TARSH (NM_015429.2,2948-2966).
gtgtaagggcaaacaatat

SEQ ID NO: 352739 - DNA, 19 bp, Homo sapiens
  siRNA target sequence for TARSH (NM_015429.2,2950-2968).
gtaagggcaaacaatatgt

SEQ ID NO: 352740 - DNA, 19 bp, Homo sapiens
  siRNA target sequence for TARSH (NM_015429.2,3010-3028).
gcaactctctcagatacaa

SEQ ID NO: 352741 - DNA, 19 bp, Homo sapiens
  siRNA target sequence for TARSH (NM_015429.2,3041-3059).
cgactccctcacaggaaaa

SEQ ID NO: 352742 - DNA, 19 bp, Homo sapiens
  siRNA target sequence for TARSH (NM_015429.2,3042-3060).
gactccctcacaggaaaat

SEQ ID NO: 352743 - DNA, 19 bp, Homo sapiens
  siRNA target sequence for TARSH (NM_015429.2,3044-3062).
ctccctcacaggaaaattt

SEQ ID NO: 352744 - DNA, 19 bp, Homo sapiens
  siRNA target sequence for TARSH (NM_015429.2,3151-3169).
cttctgaccagttaccaat

SEQ ID NO: 352745 - DNA, 19 bp, Homo sapiens
  siRNA target sequence for TARSH (NM_015429.2,3154-3172).
ctgaccagttaccaatcaa

SEQ ID NO: 352746 - DNA, 19 bp, Homo sapiens
  siRNA target sequence for TARSH (NM_015429.2,3165-3183).
ccaatcaaagaaggttatt

SEQ ID NO: 352747 - DNA, 19 bp, Homo sapiens
  siRNA target sequence for TARSH (NM_015429.2,3166-3184).
caatcaaagaaggttattt

SEQ ID NO: 352748 - DNA, 19 bp, Homo sapiens
  siRNA target sequence for TARSH (NM_015429.2,3229-3247).
gtcacacccaaatcaatta

SEQ ID NO: 352749 - DNA, 19 bp, Homo sapiens
  siRNA target sequence for TARSH (NM_015429.2,3233-3251).
cacccaaatcaattatgtt

SEQ ID NO: 352750 - DNA, 19 bp, Homo sapiens
  siRNA target sequence for TARSH (NM_015429.2,3235-3253).
cccaaatcaattatgttca

SEQ ID NO: 352751 - DNA, 19 bp, Homo sapiens
  siRNA target sequence for BIA2 (NM_015431.2,805-823).
ggagtcctgagcagaagta

SEQ ID NO: 352752 - DNA, 19 bp, Homo sapiens
  siRNA target sequence for BIA2 (NM_015431.2,1057-1075).
ggtttgcagagcttctcat

SEQ ID NO: 352753 - DNA, 19 bp, Homo sapiens
  siRNA target sequence for BIA2 (NM_015431.2,1271-1289).
ctcgctgcattgggatttt

SEQ ID NO: 352754 - DNA, 19 bp, Homo sapiens
  siRNA target sequence for BIA2 (NM_015431.2,1273-1291).
cgctgcattgggattttct

SEQ ID NO: 352755 - DNA, 19 bp, Homo sapiens
  siRNA target sequence for BIA2 (NM_015431.2,1296-1314).
ctatgaagccggtgaaatt

SEQ ID NO: 352756 - DNA, 19 bp, Homo sapiens
  siRNA target sequence for BIA2 (NM_015431.2,1300-1318).
gaagccggtgaaatttcat

SEQ ID NO: 352757 - DNA, 19 bp, Homo sapiens
  siRNA target sequence for BIA2 (NM_015431.2,1303-1321).
gccggtgaaatttcattct

SEQ ID NO: 352758 - DNA, 19 bp, Homo sapiens
  siRNA target sequence for BIA2 (NM_015431.2,1304-1322).
ccggtgaaatttcattcta

SEQ ID NO: 352759 - DNA, 19 bp, Homo sapiens
  siRNA target sequence for BIA2 (NM_015431.2,1373-1391).
gtcttcttcggccttactt

SEQ ID NO: 352760 - DNA, 19 bp, Homo sapiens
  siRNA target sequence for BIA2 (NM_015431.2,1402-1420).
gatgcaactcctcttatct

SEQ ID NO: 352761 - DNA, 19 bp, Homo sapiens
  siRNA target sequence for BIA2 (NM_015431.2,1422-1440).
gccacccacaacaatagca

SEQ ID NO: 352762 - DNA, 19 bp, Homo sapiens
  siRNA target sequence for BIA2 (NM_015431.2,1455-1473).
ggcatccagggatcattta

SEQ ID NO: 352763 - DNA, 19 bp, Homo sapiens
  siRNA target sequence for BIA2 (NM_015431.2,1457-1475).
catccagggatcatttaga

SEQ ID NO: 352764 - DNA, 19 bp, Homo sapiens
  siRNA target sequence for BIA2 (NM_015431.2,1474-1492).
gatcctgcttctgatgtaa

SEQ ID NO: 352765 - DNA, 19 bp, Homo sapiens
  siRNA target sequence for BIA2 (NM_015431.2,1484-1502).
ctgatgtaagagatgatca

SEQ ID NO: 352766 - DNA, 19 bp, Homo sapiens
  siRNA target sequence for DKFZP586D0919 (NM_015433.1,379-397).
gtggacatgctctatccat

SEQ ID NO: 352767 - DNA, 19 bp, Homo sapiens
  siRNA target sequence for DKFZP586D0919 (NM_015433.1,384-402).
catgctctatccatgtcta

SEQ ID NO: 352768 - DNA, 19 bp, Homo sapiens
  siRNA target sequence for DKFZP586D0919 (NM_015433.1,550-568).
gggggattgaccatcatgt

SEQ ID NO: 352769 - DNA, 19 bp, Homo sapiens
  siRNA target sequence for DKFZP586D0919 (NM_015433.1,553-571).
ggattgaccatcatgtctt

SEQ ID NO: 352770 - DNA, 19 bp, Homo sapiens
  siRNA target sequence for DKFZP586D0919 (NM_015433.1,665-683).
gccccatggcaccatctat

SEQ ID NO: 352771 - DNA, 19 bp, Homo sapiens
  siRNA target sequence for DKFZP586D0919 (NM_015433.1,667-685).
cccatggcaccatctatct

SEQ ID NO: 352772 - DNA, 19 bp, Homo sapiens
  siRNA target sequence for DKFZP434B168 (NM_015434.1,109-127).
gcgtcaaactcaactaagt

SEQ ID NO: 352773 - DNA, 19 bp, Homo sapiens
  siRNA target sequence for DKFZP434B168 (NM_015434.1,113-131).
caaactcaactaagtcttt

SEQ ID NO: 352774 - DNA, 19 bp, Homo sapiens
  siRNA target sequence for DKFZP434B168 (NM_015434.1,192-210).
ggacaaaggcctaagatct

SEQ ID NO: 352775 - DNA, 19 bp, Homo sapiens
  siRNA target sequence for DKFZP434B168 (NM_015434.1,256-274).
ctttttcagaagtatccat

SEQ ID NO: 352776 - DNA, 19 bp, Homo sapiens
  siRNA target sequence for DKFZP434B168 (NM_015434.1,267-285).
gtatccattccctattctt

SEQ ID NO: 352777 - DNA, 19 bp, Homo sapiens
  siRNA target sequence for DKFZP434B168 (NM_015434.1,272-290).
cattccctattcttatcaa

SEQ ID NO: 352778 - DNA, 19 bp, Homo sapiens
  siRNA target sequence for DKFZP434B168 (NM_015434.1,300-318).
cctaaagttagctgatgtt

SEQ ID NO: 352779 - DNA, 19 bp, Homo sapiens
  siRNA target sequence for DKFZP434B168 (NM_015434.1,306-324).
gttagctgatgttttcaga

SEQ ID NO: 352780 - DNA, 19 bp, Homo sapiens
  siRNA target sequence for DKFZP434B168 (NM_015434.1,355-373).
cttaaagttacccaacaaa

SEQ ID NO: 352781 - DNA, 19 bp, Homo sapiens
  siRNA target sequence for DKFZP434B168 (NM_015434.1,485-503).
gaagtctggcatcaataat

SEQ ID NO: 352782 - DNA, 19 bp, Homo sapiens
  siRNA target sequence for DKFZP434B168 (NM_015434.1,536-554).
gtcagagtttagattcaca

SEQ ID NO: 352783 - DNA, 19 bp, Homo sapiens
  siRNA target sequence for DKFZP434B168 (NM_015434.1,628-646).
ggaatctgtaacaaaatca

SEQ ID NO: 352784 - DNA, 19 bp, Homo sapiens
  siRNA target sequence for DKFZP434B168 (NM_015434.1,741-759).
cagtgctcgtcagctttta

SEQ ID NO: 352785 - DNA, 19 bp, Homo sapiens
  siRNA target sequence for DKFZP434B168 (NM_015434.1,776-794).
cctatccgtccaccaaaat

SEQ ID NO: 352786 - DNA, 19 bp, Homo sapiens
  siRNA target sequence for DKFZP434B168 (NM_015434.1,804-822).
gtctttgcacactttcact

SEQ ID NO: 352787 - DNA, 19 bp, Homo sapiens
  siRNA target sequence for DKFZP434B168 (NM_015434.1,823-841).
ctgcttgcagcgtcatctt

SEQ ID NO: 352788 - DNA, 19 bp, Homo sapiens
  siRNA target sequence for DKFZP434B168 (NM_015434.1,832-850).
gcgtcatctttggttgata

SEQ ID NO: 352789 - DNA, 19 bp, Homo sapiens
  siRNA target sequence for DKFZP434B168 (NM_015434.1,834-852).
gtcatctttggttgataca

SEQ ID NO: 352790 - DNA, 19 bp, Homo sapiens
  siRNA target sequence for DKFZP434B168 (NM_015434.1,905-923).
cagtaaagagacttgctat

SEQ ID NO: 352791 - DNA, 19 bp, Homo sapiens
  siRNA target sequence for DKFZP434B168 (NM_015434.1,965-983).
ggagtagggagaatattca

SEQ ID NO: 352792 - DNA, 19 bp, Homo sapiens
  siRNA target sequence for DKFZP434B168 (NM_015434.1,1010-1028).
ctccttatgacagcttaaa

SEQ ID NO: 352793 - DNA, 19 bp, Homo sapiens
  siRNA target sequence for DKFZP434B168 (NM_015434.1,1064-1082).
ggaccatcgccatcaaaca

SEQ ID NO: 352794 - DNA, 19 bp, Homo sapiens
  siRNA target sequence for DKFZP434B168 (NM_015434.1,1065-1083).
gaccatcgccatcaaacat

SEQ ID NO: 352795 - DNA, 19 bp, Homo sapiens
  siRNA target sequence for DKFZP434B168 (NM_015434.1,1067-1085).
ccatcgccatcaaacatta

SEQ ID NO: 352796 - DNA, 19 bp, Homo sapiens
  siRNA target sequence for DKFZP434B168 (NM_015434.1,1077-1095).
caaacattacttcagtata

SEQ ID NO: 352797 - DNA, 19 bp, Homo sapiens
  siRNA target sequence for DKFZP434B168 (NM_015434.1,1124-1142).
gatcttctgatttagtcaa

SEQ ID NO: 352798 - DNA, 19 bp, Homo sapiens
  siRNA target sequence for DKFZP434B168 (NM_015434.1,1195-1213).
gttagagtcctaactaata

SEQ ID NO: 352799 - DNA, 19 bp, Homo sapiens
  siRNA target sequence for DKFZP434B168 (NM_015434.1,1203-1221).
cctaactaatataactgtt

SEQ ID NO: 352800 - DNA, 19 bp, Homo sapiens
  siRNA target sequence for DKFZP434B168 (NM_015434.1,1276-1294).
gaatccctactggtacttt

SEQ ID NO: 352801 - DNA, 19 bp, Homo sapiens
  siRNA target sequence for DKFZP434B168 (NM_015434.1,1287-1305).
ggtactttgtagtcaagat

SEQ ID NO: 352802 - DNA, 19 bp, Homo sapiens
  siRNA target sequence for DKFZP434B168 (NM_015434.1,1318-1336).
gctcaggccactttaaaga

SEQ ID NO: 352803 - DNA, 19 bp, Homo sapiens
  siRNA target sequence for DKFZP434B168 (NM_015434.1,1319-1337).
ctcaggccactttaaagat

SEQ ID NO: 352804 - DNA, 19 bp, Homo sapiens
  siRNA target sequence for DKFZP434B168 (NM_015434.1,1393-1411).
gtagttgagaccttgttga

SEQ ID NO: 352805 - DNA, 19 bp, Homo sapiens
  siRNA target sequence for DKFZP434B168 (NM_015434.1,1578-1596).
gagtttggctactgtgatt

SEQ ID NO: 352806 - DNA, 19 bp, Homo sapiens
  siRNA target sequence for DKFZP434B168 (NM_015434.1,1631-1649).
gtaaggcagtaattaagca

SEQ ID NO: 352807 - DNA, 19 bp, Homo sapiens
  siRNA target sequence for DKFZP434B168 (NM_015434.1,1706-1724).
ccagaatgggtaatcatga

SEQ ID NO: 352808 - DNA, 19 bp, Homo sapiens
  siRNA target sequence for DKFZP434B168 (NM_015434.1,1709-1727).
gaatgggtaatcatgacat

SEQ ID NO: 352809 - DNA, 19 bp, Homo sapiens
  siRNA target sequence for DKFZP434B168 (NM_015434.1,1725-1743).
catggccaaagagctttat

SEQ ID NO: 352810 - DNA, 19 bp, Homo sapiens
  siRNA target sequence for DKFZP434B168 (NM_015434.1,1759-1777).
caggttgcctcagaacatt

SEQ ID NO: 352811 - DNA, 19 bp, Homo sapiens
  siRNA target sequence for DKFZP434B168 (NM_015434.1,1836-1854).
gttgcaagaggaaaattat

SEQ ID NO: 352812 - DNA, 19 bp, Homo sapiens
  siRNA target sequence for DKFZP434B168 (NM_015434.1,1868-1886).
cttgcattgctgaatcttt

SEQ ID NO: 352813 - DNA, 19 bp, Homo sapiens
  siRNA target sequence for DKFZP434B168 (NM_015434.1,1928-1946).
gtacaccactgaatccttt

SEQ ID NO: 352814 - DNA, 19 bp, Homo sapiens
  siRNA target sequence for DKFZP434B168 (NM_015434.1,1933-1951).
ccactgaatcctttaagct

SEQ ID NO: 352815 - DNA, 19 bp, Homo sapiens
  siRNA target sequence for DKFZP434B168 (NM_015434.1,1934-1952).
cactgaatcctttaagctt

SEQ ID NO: 352816 - DNA, 19 bp, Homo sapiens
  siRNA target sequence for DKFZP434B168 (NM_015434.1,1974-1992).
caggattgaccttttacaa

SEQ ID NO: 352817 - DNA, 19 bp, Homo sapiens
  siRNA target sequence for DKFZP434B168 (NM_015434.1,1990-2008).
caagccttctctcaactta

SEQ ID NO: 352818 - DNA, 19 bp, Homo sapiens
  siRNA target sequence for DKFZP434B168 (NM_015434.1,2002-2020).
caacttatctgtacttgta

SEQ ID NO: 352819 - DNA, 19 bp, Homo sapiens
  siRNA target sequence for DKFZP434B168 (NM_015434.1,2124-2142).
gtccatggaagaatttcga

SEQ ID NO: 352820 - DNA, 19 bp, Homo sapiens
  siRNA target sequence for DKFZP434B168 (NM_015434.1,2153-2171).
ctcgatatggagatcttta

SEQ ID NO: 352821 - DNA, 19 bp, Homo sapiens
  siRNA target sequence for DKFZP434B168 (NM_015434.1,2156-2174).
gatatggagatctttacca

SEQ ID NO: 352822 - DNA, 19 bp, Homo sapiens
  siRNA target sequence for DKFZP434B168 (NM_015434.1,2229-2247).
gagctgtttactgatatct

SEQ ID NO: 352823 - DNA, 19 bp, Homo sapiens
  siRNA target sequence for DKFZP434B168 (NM_015434.1,2231-2249).
gctgtttactgatatctca

SEQ ID NO: 352824 - DNA, 19 bp, Homo sapiens
  siRNA target sequence for DKFZP434B168 (NM_015434.1,2251-2269).
gcaatagaagccctgattt

SEQ ID NO: 352825 - DNA, 19 bp, Homo sapiens
  siRNA target sequence for DKFZP434B168 (NM_015434.1,2252-2270).
caatagaagccctgatttt

SEQ ID NO: 352826 - DNA, 19 bp, Homo sapiens
  siRNA target sequence for DKFZP434B168 (NM_015434.1,2282-2300).
cagcaagtttccaggaata

SEQ ID NO: 352827 - DNA, 19 bp, Homo sapiens
  siRNA target sequence for DKFZP434B168 (NM_015434.1,2315-2333).
cagcccatgctgatagtga

SEQ ID NO: 352828 - DNA, 19 bp, Homo sapiens
  siRNA target sequence for DKFZP434B168 (NM_015434.1,2317-2335).
gcccatgctgatagtgaat

SEQ ID NO: 352829 - DNA, 19 bp, Homo sapiens
  siRNA target sequence for DKFZP434B168 (NM_015434.1,2318-2336).
cccatgctgatagtgaata

SEQ ID NO: 352830 - DNA, 19 bp, Homo sapiens
  siRNA target sequence for DKFZP434B168 (NM_015434.1,2342-2360).
gaagaatgatgtctgtata

SEQ ID NO: 352831 - DNA, 19 bp, Homo sapiens
  siRNA target sequence for DKFZP434B168 (NM_015434.1,2376-2394).
ggaggtagaatcactcaat

SEQ ID NO: 352832 - DNA, 19 bp, Homo sapiens
  siRNA target sequence for DKFZP434B168 (NM_015434.1,2405-2423).
cccctgtttcttatatgca

SEQ ID NO: 352833 - DNA, 19 bp, Homo sapiens
  siRNA target sequence for DKFZP434B168 (NM_015434.1,2557-2575).
cccattgctgtccagaata

SEQ ID NO: 352834 - DNA, 19 bp, Homo sapiens
  siRNA target sequence for DKFZP434B168 (NM_015434.1,2607-2625).
ggttcagcacggatctaaa

SEQ ID NO: 352835 - DNA, 19 bp, Homo sapiens
  siRNA target sequence for DKFZP434B168 (NM_015434.1,2627-2645).
caggactcttccgcaaaat

SEQ ID NO: 352836 - DNA, 19 bp, Homo sapiens
  siRNA target sequence for DKFZP434B168 (NM_015434.1,2630-2648).
gactcttccgcaaaattca

SEQ ID NO: 352837 - DNA, 19 bp, Homo sapiens
  siRNA target sequence for DKFZP434B168 (NM_015434.1,2690-2708).
ctggacaagactacaagat

SEQ ID NO: 352838 - DNA, 19 bp, Homo sapiens
  siRNA target sequence for DKFZP434B168 (NM_015434.1,2744-2762).
gggttgaacctcataatga

SEQ ID NO: 352839 - DNA, 19 bp, Homo sapiens
  siRNA target sequence for DKFZP434B168 (NM_015434.1,2745-2763).
ggttgaacctcataatgat

SEQ ID NO: 352840 - DNA, 19 bp, Homo sapiens
  siRNA target sequence for DKFZP434B168 (NM_015434.1,2749-2767).
gaacctcataatgattact

SEQ ID NO: 352841 - DNA, 19 bp, Homo sapiens
  siRNA target sequence for DKFZP434B168 (NM_015434.1,2771-2789).
gtactcaatttctgttgaa

SEQ ID NO: 352842 - DNA, 19 bp, Homo sapiens
  siRNA target sequence for DKFZP434B168 (NM_015434.1,2799-2817).
ccttggaacacacaacatt

SEQ ID NO: 352843 - DNA, 19 bp, Homo sapiens
  siRNA target sequence for DKFZP434B168 (NM_015434.1,2800-2818).
cttggaacacacaacatta

SEQ ID NO: 352844 - DNA, 19 bp, Homo sapiens
  siRNA target sequence for DKFZP434B168 (NM_015434.1,2804-2822).
gaacacacaacattacagt

SEQ ID NO: 352845 - DNA, 19 bp, Homo sapiens
  siRNA target sequence for DKFZP434B168 (NM_015434.1,2843-2861).
ccaatggtatagtatggaa

SEQ ID NO: 352846 - DNA, 19 bp, Homo sapiens
  siRNA target sequence for DKFZP434B168 (NM_015434.1,2866-2884).
ggtcccagaactaccatat

SEQ ID NO: 352847 - DNA, 19 bp, Homo sapiens
  siRNA target sequence for DKFZP434B168 (NM_015434.1,2867-2885).
gtcccagaactaccatatt

SEQ ID NO: 352848 - DNA, 19 bp, Homo sapiens
  siRNA target sequence for DKFZP434B168 (NM_015434.1,2870-2888).
ccagaactaccatatttgt

SEQ ID NO: 352849 - DNA, 19 bp, Homo sapiens
  siRNA target sequence for DKFZP434B168 (NM_015434.1,2873-2891).
gaactaccatatttgtaaa

SEQ ID NO: 352850 - DNA, 19 bp, Homo sapiens
  siRNA target sequence for HOM-TES-103 (NM_015438.1,783-801).
gggagcgggacgagtacaa

SEQ ID NO: 352851 - DNA, 19 bp, Homo sapiens
  siRNA target sequence for HOM-TES-103 (NM_015438.1,796-814).
gtacaagcggagatgcttt

SEQ ID NO: 352852 - DNA, 19 bp, Homo sapiens
  siRNA target sequence for CNOT10 (NM_015442.1,320-338).
ggatcactgatcaagagaa

SEQ ID NO: 352853 - DNA, 19 bp, Homo sapiens
  siRNA target sequence for CNOT10 (NM_015442.1,340-358).
gagttatccaccaatgctt

SEQ ID NO: 352854 - DNA, 19 bp, Homo sapiens
  siRNA target sequence for CNOT10 (NM_015442.1,355-373).
gctttccaagctttcacat

SEQ ID NO: 352855 - DNA, 19 bp, Homo sapiens
  siRNA target sequence for CNOT10 (NM_015442.1,406-424).
gcctgtctacaagatataa

SEQ ID NO: 352856 - DNA, 19 bp, Homo sapiens
  siRNA target sequence for CNOT10 (NM_015442.1,407-425).
cctgtctacaagatataaa

SEQ ID NO: 352857 - DNA, 19 bp, Homo sapiens
  siRNA target sequence for CNOT10 (NM_015442.1,410-428).
gtctacaagatataaacaa

SEQ ID NO: 352858 - DNA, 19 bp, Homo sapiens
  siRNA target sequence for CNOT10 (NM_015442.1,512-530).
cacttaaccagctgaagaa

SEQ ID NO: 352859 - DNA, 19 bp, Homo sapiens
  siRNA target sequence for CNOT10 (NM_015442.1,534-552).
ggtccactcagctgttgaa

SEQ ID NO: 352860 - DNA, 19 bp, Homo sapiens
  siRNA target sequence for CNOT10 (NM_015442.1,562-580).
ggattagatgatgttgaaa

SEQ ID NO: 352861 - DNA, 19 bp, Homo sapiens
  siRNA target sequence for CNOT10 (NM_015442.1,582-600).
cagcatgttgtactataat

SEQ ID NO: 352862 - DNA, 19 bp, Homo sapiens
  siRNA target sequence for CNOT10 (NM_015442.1,584-602).
gcatgttgtactataatca

SEQ ID NO: 352863 - DNA, 19 bp, Homo sapiens
  siRNA target sequence for CNOT10 (NM_015442.1,585-603).
catgttgtactataatcaa

SEQ ID NO: 352864 - DNA, 19 bp, Homo sapiens
  siRNA target sequence for CNOT10 (NM_015442.1,594-612).
ctataatcaagcagtcatt

SEQ ID NO: 352865 - DNA, 19 bp, Homo sapiens
  siRNA target sequence for CNOT10 (NM_015442.1,717-735).
gcttgtagacctgtatata

SEQ ID NO: 352866 - DNA, 19 bp, Homo sapiens
  siRNA target sequence for CNOT10 (NM_015442.1,724-742).
gacctgtatatattaacct

SEQ ID NO: 352867 - DNA, 19 bp, Homo sapiens
  siRNA target sequence for CNOT10 (NM_015442.1,843-861).
caacaaagatggatctaat

SEQ ID NO: 352868 - DNA, 19 bp, Homo sapiens
  siRNA target sequence for CNOT10 (NM_015442.1,846-864).
caaagatggatctaatcat

SEQ ID NO: 352869 - DNA, 19 bp, Homo sapiens
  siRNA target sequence for CNOT10 (NM_015442.1,869-887).
ctgaaagtggagctctaat

SEQ ID NO: 352870 - DNA, 19 bp, Homo sapiens
  siRNA target sequence for CNOT10 (NM_015442.1,883-901).
ctaatagaagctgcaaaat

SEQ ID NO: 352871 - DNA, 19 bp, Homo sapiens
  siRNA target sequence for CNOT10 (NM_015442.1,902-920).
caaagatacatcagtacaa

SEQ ID NO: 352872 - DNA, 19 bp, Homo sapiens
  siRNA target sequence for CNOT10 (NM_015442.1,906-924).
gatacatcagtacaaagta

SEQ ID NO: 352873 - DNA, 19 bp, Homo sapiens
  siRNA target sequence for CNOT10 (NM_015442.1,915-933).
gtacaaagtacgagcttat

SEQ ID NO: 352874 - DNA, 19 bp, Homo sapiens
  siRNA target sequence for CNOT10 (NM_015442.1,922-940).
gtacgagcttatatccaaa

SEQ ID NO: 352875 - DNA, 19 bp, Homo sapiens
  siRNA target sequence for CNOT10 (NM_015442.1,925-943).
cgagcttatatccaaatga

SEQ ID NO: 352876 - DNA, 19 bp, Homo sapiens
  siRNA target sequence for CNOT10 (NM_015442.1,926-944).
gagcttatatccaaatgaa

SEQ ID NO: 352877 - DNA, 19 bp, Homo sapiens
  siRNA target sequence for CNOT10 (NM_015442.1,1035-1053).
gtacttaagaggtaattat

SEQ ID NO: 352878 - DNA, 19 bp, Homo sapiens
  siRNA target sequence for CNOT10 (NM_015442.1,1038-1056).
cttaagaggtaattatcga

SEQ ID NO: 352879 - DNA, 19 bp, Homo sapiens
  siRNA target sequence for CNOT10 (NM_015442.1,1055-1073).
gaaaagccgtgaagctatt

SEQ ID NO: 352880 - DNA, 19 bp, Homo sapiens
  siRNA target sequence for CNOT10 (NM_015442.1,1095-1113).
gcatccaggattcatgaaa

SEQ ID NO: 352881 - DNA, 19 bp, Homo sapiens
  siRNA target sequence for CNOT10 (NM_015442.1,1096-1114).
catccaggattcatgaaaa

SEQ ID NO: 352882 - DNA, 19 bp, Homo sapiens
  siRNA target sequence for CNOT10 (NM_015442.1,1130-1148).
gatgcatgttctggaataa

SEQ ID NO: 352883 - DNA, 19 bp, Homo sapiens
  siRNA target sequence for CNOT10 (NM_015442.1,1133-1151).
gcatgttctggaataacct

SEQ ID NO: 352884 - DNA, 19 bp, Homo sapiens
  siRNA target sequence for CNOT10 (NM_015442.1,1134-1152).
catgttctggaataacctt

SEQ ID NO: 352885 - DNA, 19 bp, Homo sapiens
  siRNA target sequence for CNOT10 (NM_015442.1,1293-1311).
gtgtacgttactaaccaat

SEQ ID NO: 352886 - DNA, 19 bp, Homo sapiens
  siRNA target sequence for CNOT10 (NM_015442.1,1295-1313).
gtacgttactaaccaataa

SEQ ID NO: 352887 - DNA, 19 bp, Homo sapiens
  siRNA target sequence for CNOT10 (NM_015442.1,1299-1317).
gttactaaccaataagaga

SEQ ID NO: 352888 - DNA, 19 bp, Homo sapiens
  siRNA target sequence for CNOT10 (NM_015442.1,1307-1325).
ccaataagagatatgagtt

SEQ ID NO: 352889 - DNA, 19 bp, Homo sapiens
  siRNA target sequence for CNOT10 (NM_015442.1,1316-1334).
gatatgagttgctgtataa

SEQ ID NO: 352890 - DNA, 19 bp, Homo sapiens
  siRNA target sequence for CNOT10 (NM_015442.1,1366-1384).
cctcttgctgccttcgaat

SEQ ID NO: 352891 - DNA, 19 bp, Homo sapiens
  siRNA target sequence for CNOT10 (NM_015442.1,1376-1394).
ccttcgaatgtctgattga

SEQ ID NO: 352892 - DNA, 19 bp, Homo sapiens
  siRNA target sequence for CNOT10 (NM_015442.1,1377-1395).
cttcgaatgtctgattgaa

SEQ ID NO: 352893 - DNA, 19 bp, Homo sapiens
  siRNA target sequence for CNOT10 (NM_015442.1,1404-1422).
ggtttatcatgcaaatcct

SEQ ID NO: 352894 - DNA, 19 bp, Homo sapiens
  siRNA target sequence for CNOT10 (NM_015442.1,1448-1466).
gctgcattgctgccaataa

SEQ ID NO: 352895 - DNA, 19 bp, Homo sapiens
  siRNA target sequence for CNOT10 (NM_015442.1,1461-1479).
caataaggggacttctgaa

SEQ ID NO: 352896 - DNA, 19 bp, Homo sapiens
  siRNA target sequence for CNOT10 (NM_015442.1,1470-1488).
gacttctgaacaagaaact

SEQ ID NO: 352897 - DNA, 19 bp, Homo sapiens
  siRNA target sequence for CNOT10 (NM_015442.1,1511-1529).
gaattgtacagtctattgt

SEQ ID NO: 352898 - DNA, 19 bp, Homo sapiens
  siRNA target sequence for CNOT10 (NM_015442.1,1532-1550).
gtcaaggctatcatcgtaa

SEQ ID NO: 352899 - DNA, 19 bp, Homo sapiens
  siRNA target sequence for CNOT10 (NM_015442.1,1534-1552).
caaggctatcatcgtaaaa

SEQ ID NO: 352900 - DNA, 19 bp, Homo sapiens
  siRNA target sequence for CNOT10 (NM_015442.1,1538-1556).
gctatcatcgtaaaatagt

SEQ ID NO: 352901 - DNA, 19 bp, Homo sapiens
  siRNA target sequence for CNOT10 (NM_015442.1,1539-1557).
ctatcatcgtaaaatagtt

SEQ ID NO: 352902 - DNA, 19 bp, Homo sapiens
  siRNA target sequence for CNOT10 (NM_015442.1,1561-1579).
gcatcacagtctatacaga

SEQ ID NO: 352903 - DNA, 19 bp, Homo sapiens
  siRNA target sequence for CNOT10 (NM_015442.1,1569-1587).
gtctatacagaatactgtt

SEQ ID NO: 352904 - DNA, 19 bp, Homo sapiens
  siRNA target sequence for CNOT10 (NM_015442.1,1637-1655).
cagccatatgtctcagaaa

SEQ ID NO: 352905 - DNA, 19 bp, Homo sapiens
  siRNA target sequence for CNOT10 (NM_015442.1,1707-1725).
ggctaaaaatagtaatcaa

SEQ ID NO: 352906 - DNA, 19 bp, Homo sapiens
  siRNA target sequence for CNOT10 (NM_015442.1,1810-1828).
ccttcttctccattgagaa

SEQ ID NO: 352907 - DNA, 19 bp, Homo sapiens
  siRNA target sequence for CNOT10 (NM_015442.1,1811-1829).
cttcttctccattgagaaa

SEQ ID NO: 352908 - DNA, 19 bp, Homo sapiens
  siRNA target sequence for CNOT10 (NM_015442.1,1845-1863).
cttaaagtgctccatactt

SEQ ID NO: 352909 - DNA, 19 bp, Homo sapiens
  siRNA target sequence for CNOT10 (NM_015442.1,1944-1962).
caagctgtcaggatctctt

SEQ ID NO: 352910 - DNA, 19 bp, Homo sapiens
  siRNA target sequence for CNOT10 (NM_015442.1,1948-1966).
ctgtcaggatctcttaagt

SEQ ID NO: 352911 - DNA, 19 bp, Homo sapiens
  siRNA target sequence for CNOT10 (NM_015442.1,1950-1968).
gtcaggatctcttaagttt

SEQ ID NO: 352912 - DNA, 19 bp, Homo sapiens
  siRNA target sequence for CNOT10 (NM_015442.1,1998-2016).
catctctctcgacagaata

SEQ ID NO: 352913 - DNA, 19 bp, Homo sapiens
  siRNA target sequence for CNOT10 (NM_015442.1,2003-2021).
ctctcgacagaatatctga

SEQ ID NO: 352914 - DNA, 19 bp, Homo sapiens
  siRNA target sequence for CNOT10 (NM_015442.1,2064-2082).
cttagggatctcttcaaat

SEQ ID NO: 352915 - DNA, 19 bp, Homo sapiens
  siRNA target sequence for CNOT10 (NM_015442.1,2088-2106).
ggaccaaggatcagacaaa

SEQ ID NO: 352916 - DNA, 19 bp, Homo sapiens
  siRNA target sequence for CNOT10 (NM_015442.1,2180-2198).
ggactgtgatgctgttcaa

SEQ ID NO: 352917 - DNA, 19 bp, Homo sapiens
  siRNA target sequence for CNOT10 (NM_015442.1,2214-2232).
ctgcctgaggagcgaatat

SEQ ID NO: 352918 - DNA, 19 bp, Homo sapiens
  siRNA target sequence for CNOT10 (NM_015442.1,2218-2236).
ctgaggagcgaatatgaca

SEQ ID NO: 352919 - DNA, 19 bp, Homo sapiens
  siRNA target sequence for CNOT10 (NM_015442.1,2267-2285).
caatgatccatcctaaaga

SEQ ID NO: 352920 - DNA, 19 bp, Homo sapiens
  siRNA target sequence for CNOT10 (NM_015442.1,2323-2341).
gaactgcagaatggtaata

SEQ ID NO: 352921 - DNA, 19 bp, Homo sapiens
  siRNA target sequence for CNOT10 (NM_015442.1,2440-2458).
ccgatccagcccatccaaa

SEQ ID NO: 352922 - DNA, 19 bp, Homo sapiens
  siRNA target sequence for CNOT10 (NM_015442.1,2441-2459).
cgatccagcccatccaaat

SEQ ID NO: 352923 - DNA, 19 bp, Homo sapiens
  siRNA target sequence for DKFZP727C091 (NM_015443.1,509-527).
cagctgaagcacaccatat

SEQ ID NO: 352924 - DNA, 19 bp, Homo sapiens
  siRNA target sequence for DKFZP727C091 (NM_015443.1,586-604).
ggcaacgccaacatcctta

SEQ ID NO: 352925 - DNA, 19 bp, Homo sapiens
  siRNA target sequence for DKFZP727C091 (NM_015443.1,587-605).
gcaacgccaacatccttat

SEQ ID NO: 352926 - DNA, 19 bp, Homo sapiens
  siRNA target sequence for DKFZP727C091 (NM_015443.1,588-606).
caacgccaacatccttatt

SEQ ID NO: 352927 - DNA, 19 bp, Homo sapiens
  siRNA target sequence for DKFZP727C091 (NM_015443.1,591-609).
cgccaacatccttattgct

SEQ ID NO: 352928 - DNA, 19 bp, Homo sapiens
  siRNA target sequence for DKFZP727C091 (NM_015443.1,607-625).
gctgccaacggaaccaaaa

SEQ ID NO: 352929 - DNA, 19 bp, Homo sapiens
  siRNA target sequence for DKFZP727C091 (NM_015443.1,654-672).
cctagatttccgaaataat

SEQ ID NO: 352930 - DNA, 19 bp, Homo sapiens
  siRNA target sequence for DKFZP727C091 (NM_015443.1,658-676).
gatttccgaaataatccta

SEQ ID NO: 352931 - DNA, 19 bp, Homo sapiens
  siRNA target sequence for DKFZP727C091 (NM_015443.1,723-741).
ctgctctgatgtaacatct

SEQ ID NO: 352932 - DNA, 19 bp, Homo sapiens
  siRNA target sequence for DKFZP727C091 (NM_015443.1,782-800).
gcaagcagacagtccttaa

SEQ ID NO: 352933 - DNA, 19 bp, Homo sapiens
  siRNA target sequence for DKFZP727C091 (NM_015443.1,789-807).
gacagtccttaaatctcat

SEQ ID NO: 352934 - DNA, 19 bp, Homo sapiens
  siRNA target sequence for DKFZP727C091 (NM_015443.1,886-904).
cttagaaccatgaatacga

SEQ ID NO: 352935 - DNA, 19 bp, Homo sapiens
  siRNA target sequence for DKFZP727C091 (NM_015443.1,940-958).
gggttggctaagaaattga

SEQ ID NO: 352936 - DNA, 19 bp, Homo sapiens
  siRNA target sequence for DKFZP727C091 (NM_015443.1,945-963).
ggctaagaaattgactaaa

SEQ ID NO: 352937 - DNA, 19 bp, Homo sapiens
  siRNA target sequence for DKFZP727C091 (NM_015443.1,951-969).
gaaattgactaaaagttca

SEQ ID NO: 352938 - DNA, 19 bp, Homo sapiens
  siRNA target sequence for DKFZP727C091 (NM_015443.1,957-975).
gactaaaagttcaacacat

SEQ ID NO: 352939 - DNA, 19 bp, Homo sapiens
  siRNA target sequence for DKFZP727C091 (NM_015443.1,1061-1079).
ctgaatctggggacttgaa

SEQ ID NO: 352940 - DNA, 19 bp, Homo sapiens
  siRNA target sequence for DKFZP727C091 (NM_015443.1,1106-1124).
cacatagaagccttgatgt

SEQ ID NO: 352941 - DNA, 19 bp, Homo sapiens
  siRNA target sequence for DKFZP727C091 (NM_015443.1,1112-1130).
gaagccttgatgtagaaca

SEQ ID NO: 352942 - DNA, 19 bp, Homo sapiens
  siRNA target sequence for DKFZP727C091 (NM_015443.1,1309-1327).
gattctgacacaaggataa

SEQ ID NO: 352943 - DNA, 19 bp, Homo sapiens
  siRNA target sequence for DKFZP727C091 (NM_015443.1,1338-1356).
gcggcgacaggctgacatt

SEQ ID NO: 352944 - DNA, 19 bp, Homo sapiens
  siRNA target sequence for DKFZP727C091 (NM_015443.1,1340-1358).
ggcgacaggctgacattga

SEQ ID NO: 352945 - DNA, 19 bp, Homo sapiens
  siRNA target sequence for DKFZP727C091 (NM_015443.1,1359-1377).
gagccgtgcccgcagatta

SEQ ID NO: 352946 - DNA, 19 bp, Homo sapiens
  siRNA target sequence for DKFZP727C091 (NM_015443.1,1361-1379).
gccgtgcccgcagattaca

SEQ ID NO: 352947 - DNA, 19 bp, Homo sapiens
  siRNA target sequence for DKFZP727C091 (NM_015443.1,1362-1380).
ccgtgcccgcagattacaa

SEQ ID NO: 352948 - DNA, 19 bp, Homo sapiens
  siRNA target sequence for DKFZP727C091 (NM_015443.1,1363-1381).
cgtgcccgcagattacaaa

SEQ ID NO: 352949 - DNA, 19 bp, Homo sapiens
  siRNA target sequence for DKFZP727C091 (NM_015443.1,1364-1382).
gtgcccgcagattacaaaa

SEQ ID NO: 352950 - DNA, 19 bp, Homo sapiens
  siRNA target sequence for DKFZP727C091 (NM_015443.1,1407-1425).
gcaggttgagaggcatata

SEQ ID NO: 352951 - DNA, 19 bp, Homo sapiens
  siRNA target sequence for DKFZP727C091 (NM_015443.1,1410-1428).
ggttgagaggcatatacaa

SEQ ID NO: 352952 - DNA, 19 bp, Homo sapiens
  siRNA target sequence for DKFZP727C091 (NM_015443.1,1441-1459).
ggatttttggagaagactt

SEQ ID NO: 352953 - DNA, 19 bp, Homo sapiens
  siRNA target sequence for DKFZP727C091 (NM_015443.1,1490-1508).
gaccacggagccagttgat

SEQ ID NO: 352954 - DNA, 19 bp, Homo sapiens
  siRNA target sequence for DKFZP727C091 (NM_015443.1,1652-1670).
gcagtgaacaggcatttga

SEQ ID NO: 352955 - DNA, 19 bp, Homo sapiens
  siRNA target sequence for DKFZP727C091 (NM_015443.1,1653-1671).
cagtgaacaggcatttgat

SEQ ID NO: 352956 - DNA, 19 bp, Homo sapiens
  siRNA target sequence for DKFZP727C091 (NM_015443.1,1700-1718).
gggagtctgatattgaaga

SEQ ID NO: 352957 - DNA, 19 bp, Homo sapiens
  siRNA target sequence for DKFZP727C091 (NM_015443.1,1766-1784).
gacgcaggtcagaatggaa

SEQ ID NO: 352958 - DNA, 19 bp, Homo sapiens
  siRNA target sequence for DKFZP727C091 (NM_015443.1,1768-1786).
cgcaggtcagaatggaaat

SEQ ID NO: 352959 - DNA, 19 bp, Homo sapiens
  siRNA target sequence for DKFZP727C091 (NM_015443.1,1793-1811).
cagaccgggcagctattgt

SEQ ID NO: 352960 - DNA, 19 bp, Homo sapiens
  siRNA target sequence for DKFZP727C091 (NM_015443.1,1848-1866).
cttggaatatcgaattcgt

SEQ ID NO: 352961 - DNA, 19 bp, Homo sapiens
  siRNA target sequence for DKFZP727C091 (NM_015443.1,1859-1877).
gaattcgtcagcaaacaga

SEQ ID NO: 352962 - DNA, 19 bp, Homo sapiens
  siRNA target sequence for DKFZP727C091 (NM_015443.1,1874-1892).
cagacatttacaaacagat

SEQ ID NO: 352963 - DNA, 19 bp, Homo sapiens
  siRNA target sequence for DKFZP727C091 (NM_015443.1,1898-1916).
ctaataaggggttgatagt

SEQ ID NO: 352964 - DNA, 19 bp, Homo sapiens
  siRNA target sequence for DKFZP727C091 (NM_015443.1,1990-2008).
catgggactgataaattga

SEQ ID NO: 352965 - DNA, 19 bp, Homo sapiens
  siRNA target sequence for DKFZP727C091 (NM_015443.1,2046-2064).
ccctattattggtcatatt

SEQ ID NO: 352966 - DNA, 19 bp, Homo sapiens
  siRNA target sequence for DKFZP727C091 (NM_015443.1,2047-2065).
cctattattggtcatattt

SEQ ID NO: 352967 - DNA, 19 bp, Homo sapiens
  siRNA target sequence for DKFZP727C091 (NM_015443.1,2070-2088).
gtcactgtctaccaaatca

SEQ ID NO: 352968 - DNA, 19 bp, Homo sapiens
  siRNA target sequence for DKFZP727C091 (NM_015443.1,2104-2122).
cctgtcaatggagttatta

SEQ ID NO: 352969 - DNA, 19 bp, Homo sapiens
  siRNA target sequence for DKFZP727C091 (NM_015443.1,2203-2221).
ctgaatctcgtctcttcat

SEQ ID NO: 352970 - DNA, 19 bp, Homo sapiens
  siRNA target sequence for DKFZP727C091 (NM_015443.1,2205-2223).
gaatctcgtctcttcatca

SEQ ID NO: 352971 - DNA, 19 bp, Homo sapiens
  siRNA target sequence for DKFZP727C091 (NM_015443.1,2211-2229).
cgtctcttcatcatctgat

SEQ ID NO: 352972 - DNA, 19 bp, Homo sapiens
  siRNA target sequence for DKFZP727C091 (NM_015443.1,2300-2318).
gcatcgttcctctttccaa

SEQ ID NO: 352973 - DNA, 19 bp, Homo sapiens
  siRNA target sequence for DKFZP727C091 (NM_015443.1,2400-2418).
caccatgcctcccgaaatt

SEQ ID NO: 352974 - DNA, 19 bp, Homo sapiens
  siRNA target sequence for DKFZP727C091 (NM_015443.1,2402-2420).
ccatgcctcccgaaattca

SEQ ID NO: 352975 - DNA, 19 bp, Homo sapiens
  siRNA target sequence for DKFZP727C091 (NM_015443.1,2406-2424).
gcctcccgaaattcactat

SEQ ID NO: 352976 - DNA, 19 bp, Homo sapiens
  siRNA target sequence for DKFZP727C091 (NM_015443.1,2451-2469).
ccagttggactcttgtgtt

SEQ ID NO: 352977 - DNA, 19 bp, Homo sapiens
  siRNA target sequence for DKFZP727C091 (NM_015443.1,2565-2583).
caaacctcccaaaaagtta

SEQ ID NO: 352978 - DNA, 19 bp, Homo sapiens
  siRNA target sequence for DKFZP727C091 (NM_015443.1,3039-3057).
gggagagagctcatttgat

SEQ ID NO: 352979 - DNA, 19 bp, Homo sapiens
  siRNA target sequence for DKFZP727C091 (NM_015443.1,3040-3058).
ggagagagctcatttgata

SEQ ID NO: 352980 - DNA, 19 bp, Homo sapiens
  siRNA target sequence for DKFZP727C091 (NM_015443.1,3043-3061).
gagagctcatttgatatta

SEQ ID NO: 352981 - DNA, 19 bp, Homo sapiens
  siRNA target sequence for DKFZP727C091 (NM_015443.1,3066-3084).
cattgtcatcccaatgtct

SEQ ID NO: 352982 - DNA, 19 bp, Homo sapiens
  siRNA target sequence for DKFZP727C091 (NM_015443.1,3092-3110).
caacaactcgcgtagagaa

SEQ ID NO: 352983 - DNA, 19 bp, Homo sapiens
  siRNA target sequence for DKFZP727C091 (NM_015443.1,3095-3113).
caactcgcgtagagaaact

SEQ ID NO: 352984 - DNA, 19 bp, Homo sapiens
  siRNA target sequence for DKFZP727C091 (NM_015443.1,3101-3119).
gcgtagagaaactgcaata

SEQ ID NO: 352985 - DNA, 19 bp, Homo sapiens
  siRNA target sequence for DKFZP727C091 (NM_015443.1,3404-3422).
gccactctttgtcagaata

SEQ ID NO: 352986 - DNA, 19 bp, Homo sapiens
  siRNA target sequence for DKFZP727C091 (NM_015443.1,3406-3424).
cactctttgtcagaatact

SEQ ID NO: 352987 - DNA, 19 bp, Homo sapiens
  siRNA target sequence for DKFZP727C091 (NM_015443.1,3495-3513).
ggacactccgcgacactta

SEQ ID NO: 352988 - DNA, 19 bp, Homo sapiens
  siRNA target sequence for RIS1 (NM_015444.1,323-341).
ggggtgccctccaatgctt

SEQ ID NO: 352989 - DNA, 19 bp, Homo sapiens
  siRNA target sequence for CAMSAP1 (NM_015447.1,362-380).
ggccgacagtctgtataat

SEQ ID NO: 352990 - DNA, 19 bp, Homo sapiens
  siRNA target sequence for CAMSAP1 (NM_015447.1,363-381).
gccgacagtctgtataata

SEQ ID NO: 352991 - DNA, 19 bp, Homo sapiens
  siRNA target sequence for CAMSAP1 (NM_015447.1,364-382).
ccgacagtctgtataatat

SEQ ID NO: 352992 - DNA, 19 bp, Homo sapiens
  siRNA target sequence for CAMSAP1 (NM_015447.1,450-468).
ctgtatgcgccattagtgt

SEQ ID NO: 352993 - DNA, 19 bp, Homo sapiens
  siRNA target sequence for CAMSAP1 (NM_015447.1,465-483).
gtgttgaagccgaatgtta

SEQ ID NO: 352994 - DNA, 19 bp, Homo sapiens
  siRNA target sequence for CAMSAP1 (NM_015447.1,470-488).
gaagccgaatgttatggtt

SEQ ID NO: 352995 - DNA, 19 bp, Homo sapiens
  siRNA target sequence for CAMSAP1 (NM_015447.1,473-491).
gccgaatgttatggttttt

SEQ ID NO: 352996 - DNA, 19 bp, Homo sapiens
  siRNA target sequence for CAMSAP1 (NM_015447.1,508-526).
ggtggttcgagaatgtcaa

SEQ ID NO: 352997 - DNA, 19 bp, Homo sapiens
  siRNA target sequence for CAMSAP1 (NM_015447.1,560-578).
gctgaaagacgcgaaaaca

SEQ ID NO: 352998 - DNA, 19 bp, Homo sapiens
  siRNA target sequence for CAMSAP1 (NM_015447.1,626-644).
gaccaaacgcagtttccta

SEQ ID NO: 352999 - DNA, 19 bp, Homo sapiens
  siRNA target sequence for CAMSAP1 (NM_015447.1,741-759).
gaatacctcgggaaaggaa

SEQ ID NO: 353000 - DNA, 19 bp, Homo sapiens
  siRNA target sequence for CAMSAP1 (NM_015447.1,843-861).
cagcgacatcgatcgaatt

SEQ ID NO: 353001 - DNA, 19 bp, Homo sapiens
  siRNA target sequence for CAMSAP1 (NM_015447.1,845-863).
gcgacatcgatcgaattct

SEQ ID NO: 353002 - DNA, 19 bp, Homo sapiens
  siRNA target sequence for CAMSAP1 (NM_015447.1,846-864).
cgacatcgatcgaattctt

SEQ ID NO: 353003 - DNA, 19 bp, Homo sapiens
  siRNA target sequence for CAMSAP1 (NM_015447.1,847-865).
gacatcgatcgaattcttt

SEQ ID NO: 353004 - DNA, 19 bp, Homo sapiens
  siRNA target sequence for CAMSAP1 (NM_015447.1,849-867).
catcgatcgaattctttga

SEQ ID NO: 353005 - DNA, 19 bp, Homo sapiens
  siRNA target sequence for CAMSAP1 (NM_015447.1,1033-1051).
gtttggcatccaacattgt

SEQ ID NO: 353006 - DNA, 19 bp, Homo sapiens
  siRNA target sequence for CAMSAP1 (NM_015447.1,1039-1057).
catccaacattgttaatct

SEQ ID NO: 353007 - DNA, 19 bp, Homo sapiens
  siRNA target sequence for CAMSAP1 (NM_015447.1,1145-1163).
ggagcttgtggctattgtt

SEQ ID NO: 353008 - DNA, 19 bp, Homo sapiens
  siRNA target sequence for CAMSAP1 (NM_015447.1,1146-1164).
gagcttgtggctattgtta

SEQ ID NO: 353009 - DNA, 19 bp, Homo sapiens
  siRNA target sequence for CAMSAP1 (NM_015447.1,1223-1241).
cttaggccttacagcaaat

SEQ ID NO: 353010 - DNA, 19 bp, Homo sapiens
  siRNA target sequence for CAMSAP1 (NM_015447.1,1263-1281).
ctggacacctcggaaagta

SEQ ID NO: 353011 - DNA, 19 bp, Homo sapiens
  siRNA target sequence for CAMSAP1 (NM_015447.1,1323-1341).
cttaagccagcgaaagaga

SEQ ID NO: 353012 - DNA, 19 bp, Homo sapiens
  siRNA target sequence for CAMSAP1 (NM_015447.1,1426-1444).
ctttggtacgaaggaaaat

SEQ ID NO: 353013 - DNA, 19 bp, Homo sapiens
  siRNA target sequence for CAMSAP1 (NM_015447.1,1447-1465).
ctggcagtcgcgacttgaa

SEQ ID NO: 353014 - DNA, 19 bp, Homo sapiens
  siRNA target sequence for CAMSAP1 (NM_015447.1,1457-1475).
cgacttgaataggactttt

SEQ ID NO: 353015 - DNA, 19 bp, Homo sapiens
  siRNA target sequence for CAMSAP1 (NM_015447.1,1574-1592).
ggcccttggcggattcgat

SEQ ID NO: 353016 - DNA, 19 bp, Homo sapiens
  siRNA target sequence for CAMSAP1 (NM_015447.1,1653-1671).
gacaccgagggaaggttat

SEQ ID NO: 353017 - DNA, 19 bp, Homo sapiens
  siRNA target sequence for CAMSAP1 (NM_015447.1,1655-1673).
caccgagggaaggttatat

SEQ ID NO: 353018 - DNA, 19 bp, Homo sapiens
  siRNA target sequence for CAMSAP1 (NM_015447.1,1657-1675).
ccgagggaaggttatatgt

SEQ ID NO: 353019 - DNA, 19 bp, Homo sapiens
  siRNA target sequence for CAMSAP1 (NM_015447.1,1658-1676).
cgagggaaggttatatgtt

SEQ ID NO: 353020 - DNA, 19 bp, Homo sapiens
  siRNA target sequence for CAMSAP1 (NM_015447.1,1659-1677).
gagggaaggttatatgtta

SEQ ID NO: 353021 - DNA, 19 bp, Homo sapiens
  siRNA target sequence for CAMSAP1 (NM_015447.1,1661-1679).
gggaaggttatatgttagt

SEQ ID NO: 353022 - DNA, 19 bp, Homo sapiens
  siRNA target sequence for CAMSAP1 (NM_015447.1,1662-1680).
ggaaggttatatgttagtt

SEQ ID NO: 353023 - DNA, 19 bp, Homo sapiens
  siRNA target sequence for CAMSAP1 (NM_015447.1,1667-1685).
gttatatgttagttgttca

SEQ ID NO: 353024 - DNA, 19 bp, Homo sapiens
  siRNA target sequence for CAMSAP1 (NM_015447.1,1693-1711).
ccaactcccacgattcaga

SEQ ID NO: 353025 - DNA, 19 bp, Homo sapiens
  siRNA target sequence for CAMSAP1 (NM_015447.1,1744-1762).
cggatgtggtggacataga

SEQ ID NO: 353026 - DNA, 19 bp, Homo sapiens
  siRNA target sequence for CAMSAP1 (NM_015447.1,1948-1966).
cgagtgggagcgtgaagat

SEQ ID NO: 353027 - DNA, 19 bp, Homo sapiens
  siRNA target sequence for CAMSAP1 (NM_015447.1,2317-2335).
ggccggagcactttgcaaa

SEQ ID NO: 353028 - DNA, 19 bp, Homo sapiens
  siRNA target sequence for CAMSAP1 (NM_015447.1,2367-2385).
ggggacgctgtttccaaaa

SEQ ID NO: 353029 - DNA, 19 bp, Homo sapiens
  siRNA target sequence for CAMSAP1 (NM_015447.1,2464-2482).
cctttgctcagcaacataa

SEQ ID NO: 353030 - DNA, 19 bp, Homo sapiens
  siRNA target sequence for CAMSAP1 (NM_015447.1,2564-2582).
ggttgtcgacgtgaatgaa

SEQ ID NO: 353031 - DNA, 19 bp, Homo sapiens
  siRNA target sequence for CAMSAP1 (NM_015447.1,2565-2583).
gttgtcgacgtgaatgaat

SEQ ID NO: 353032 - DNA, 19 bp, Homo sapiens
  siRNA target sequence for CAMSAP1 (NM_015447.1,2589-2607).
ctttccatcgagaagctta

SEQ ID NO: 353033 - DNA, 19 bp, Homo sapiens
  siRNA target sequence for CAMSAP1 (NM_015447.1,2604-2622).
cttaacgaaaccatcagta

SEQ ID NO: 353034 - DNA, 19 bp, Homo sapiens
  siRNA target sequence for CAMSAP1 (NM_015447.1,2694-2712).
gtgccaggctctaagaata

SEQ ID NO: 353035 - DNA, 19 bp, Homo sapiens
  siRNA target sequence for CAMSAP1 (NM_015447.1,2716-2734).
cgcaggaccacaaagtgaa

SEQ ID NO: 353036 - DNA, 19 bp, Homo sapiens
  siRNA target sequence for CAMSAP1 (NM_015447.1,2870-2888).
gggctcctcccgaagtaaa

SEQ ID NO: 353037 - DNA, 19 bp, Homo sapiens
  siRNA target sequence for CAMSAP1 (NM_015447.1,2871-2889).
ggctcctcccgaagtaaaa

SEQ ID NO: 353038 - DNA, 19 bp, Homo sapiens
  siRNA target sequence for CAMSAP1 (NM_015447.1,3028-3046).
gttacaggctccatgatga

SEQ ID NO: 353039 - DNA, 19 bp, Homo sapiens
  siRNA target sequence for CAMSAP1 (NM_015447.1,3163-3181).
cagatgtctcgggaaaaga

SEQ ID NO: 353040 - DNA, 19 bp, Homo sapiens
  siRNA target sequence for CAMSAP1 (NM_015447.1,3214-3232).
gggccagcctcattgaagt

SEQ ID NO: 353041 - DNA, 19 bp, Homo sapiens
  siRNA target sequence for CAMSAP1 (NM_015447.1,3328-3346).
gggtcggcttcttcttcaa

SEQ ID NO: 353042 - DNA, 19 bp, Homo sapiens
  siRNA target sequence for CAMSAP1 (NM_015447.1,3597-3615).
ctcggcaagcccaagtcaa

SEQ ID NO: 353043 - DNA, 19 bp, Homo sapiens
  siRNA target sequence for CAMSAP1 (NM_015447.1,3756-3774).
gaacccgagagcgttcatt

SEQ ID NO: 353044 - DNA, 19 bp, Homo sapiens
  siRNA target sequence for CAMSAP1 (NM_015447.1,3790-3808).
ctcagcgagtggaatcgat

SEQ ID NO: 353045 - DNA, 19 bp, Homo sapiens
  siRNA target sequence for CAMSAP1 (NM_015447.1,3910-3928).
caggtcccaagctctttaa

SEQ ID NO: 353046 - DNA, 19 bp, Homo sapiens
  siRNA target sequence for CAMSAP1 (NM_015447.1,3913-3931).
gtcccaagctctttaagga

SEQ ID NO: 353047 - DNA, 19 bp, Homo sapiens
  siRNA target sequence for CAMSAP1 (NM_015447.1,3929-3947).
ggagcccagtagtaaatca

SEQ ID NO: 353048 - DNA, 19 bp, Homo sapiens
  siRNA target sequence for CAMSAP1 (NM_015447.1,3933-3951).
cccagtagtaaatcaaaca

SEQ ID NO: 353049 - DNA, 19 bp, Homo sapiens
  siRNA target sequence for CAMSAP1 (NM_015447.1,3934-3952).
ccagtagtaaatcaaacaa

SEQ ID NO: 353050 - DNA, 19 bp, Homo sapiens
  siRNA target sequence for CAMSAP1 (NM_015447.1,3946-3964).
caaacaagccgattattca

SEQ ID NO: 353051 - DNA, 19 bp, Homo sapiens
  siRNA target sequence for CAMSAP1 (NM_015447.1,3950-3968).
caagccgattattcacaat

SEQ ID NO: 353052 - DNA, 19 bp, Homo sapiens
  siRNA target sequence for CAMSAP1 (NM_015447.1,4005-4023).
gaaccccacaagaattcca

SEQ ID NO: 353053 - DNA, 19 bp, Homo sapiens
  siRNA target sequence for CAMSAP1 (NM_015447.1,4045-4063).
gtgatgccaatcactacat

SEQ ID NO: 353054 - DNA, 19 bp, Homo sapiens
  siRNA target sequence for CAMSAP1 (NM_015447.1,4047-4065).
gatgccaatcactacatca

SEQ ID NO: 353055 - DNA, 19 bp, Homo sapiens
  siRNA target sequence for CAMSAP1 (NM_015447.1,4051-4069).
ccaatcactacatcatact

SEQ ID NO: 353056 - DNA, 19 bp, Homo sapiens
  siRNA target sequence for CAMSAP1 (NM_015447.1,4097-4115).
ggcgctttactgctactat

SEQ ID NO: 353057 - DNA, 19 bp, Homo sapiens
  siRNA target sequence for CAMSAP1 (NM_015447.1,4206-4224).
gaccgaaaacagtttaact

SEQ ID NO: 353058 - DNA, 19 bp, Homo sapiens
  siRNA target sequence for CAMSAP1 (NM_015447.1,4252-4270).
gtgtggacgcactcacaat

SEQ ID NO: 353059 - DNA, 19 bp, Homo sapiens
  siRNA target sequence for DKFZP566F084 (NM_015448.1,73-91).
gaaggaaggttcactattt

SEQ ID NO: 353060 - DNA, 19 bp, Homo sapiens
  siRNA target sequence for DKFZP566F084 (NM_015448.1,76-94).
ggaaggttcactatttatt

SEQ ID NO: 353061 - DNA, 19 bp, Homo sapiens
  siRNA target sequence for DKFZP566F084 (NM_015448.1,128-146).
cgagaagacgagtgaacta

SEQ ID NO: 353062 - DNA, 19 bp, Homo sapiens
  siRNA target sequence for DKFZP566F084 (NM_015448.1,131-149).
gaagacgagtgaactactt

SEQ ID NO: 353063 - DNA, 19 bp, Homo sapiens
  siRNA target sequence for DKFZP566F084 (NM_015448.1,141-159).
gaactacttgtgagaaagt

SEQ ID NO: 353064 - DNA, 19 bp, Homo sapiens
  siRNA target sequence for DKFZP566F084 (NM_015448.1,152-170).
gagaaagtggcgtgtgaaa

SEQ ID NO: 353065 - DNA, 19 bp, Homo sapiens
  siRNA target sequence for DKFZP566F084 (NM_015448.1,191-209).
ccagtggcagcttgaagta

SEQ ID NO: 353066 - DNA, 19 bp, Homo sapiens
  siRNA target sequence for DKFZP566F084 (NM_015448.1,265-283).
gcaatgccaatcctatctt

SEQ ID NO: 353067 - DNA, 19 bp, Homo sapiens
  siRNA target sequence for DKFZP566F084 (NM_015448.1,324-342).
cgaaacctcccctatccta

SEQ ID NO: 353068 - DNA, 19 bp, Homo sapiens
  siRNA target sequence for DKFZP566F084 (NM_015448.1,325-343).
gaaacctcccctatcctaa

SEQ ID NO: 353069 - DNA, 19 bp, Homo sapiens
  siRNA target sequence for DKFZP566F084 (NM_015448.1,329-347).
cctcccctatcctaaggat

SEQ ID NO: 353070 - DNA, 19 bp, Homo sapiens
  siRNA target sequence for DKFZP566F084 (NM_015448.1,334-352).
cctatcctaaggatgtcta

SEQ ID NO: 353071 - DNA, 19 bp, Homo sapiens
  siRNA target sequence for DKFZP566F084 (NM_015448.1,335-353).
ctatcctaaggatgtctat

SEQ ID NO: 353072 - DNA, 19 bp, Homo sapiens
  siRNA target sequence for DKFZP566F084 (NM_015448.1,340-358).
ctaaggatgtctatagtgt

SEQ ID NO: 353073 - DNA, 19 bp, Homo sapiens
  siRNA target sequence for DKFZP566F084 (NM_015448.1,375-393).
gagcgctgcatcattgtca

SEQ ID NO: 353074 - DNA, 19 bp, Homo sapiens
  siRNA target sequence for DKFZP566F084 (NM_015448.1,397-415).
caaccaacaagaagtacta

SEQ ID NO: 353075 - DNA, 19 bp, Homo sapiens
  siRNA target sequence for DKFZP566F084 (NM_015448.1,422-440).
gttctccattcctgatcta

SEQ ID NO: 353076 - DNA, 19 bp, Homo sapiens
  siRNA target sequence for DKFZP566F084 (NM_015448.1,425-443).
ctccattcctgatctagat

SEQ ID NO: 353077 - DNA, 19 bp, Homo sapiens
  siRNA target sequence for DKFZP566F084 (NM_015448.1,549-567).
gagctacagaaggaactaa

SEQ ID NO: 353078 - DNA, 19 bp, Homo sapiens
  siRNA target sequence for NICE-3 (NM_015449.1,230-248).
ggctctccggggtgaatgt

SEQ ID NO: 353079 - DNA, 19 bp, Homo sapiens
  siRNA target sequence for NICE-3 (NM_015449.1,312-330).
ggttcaggatatcaagtat

SEQ ID NO: 353080 - DNA, 19 bp, Homo sapiens
  siRNA target sequence for NICE-3 (NM_015449.1,395-413).
gttgctacaactatctgta

SEQ ID NO: 353081 - DNA, 19 bp, Homo sapiens
  siRNA target sequence for NICE-3 (NM_015449.1,424-442).
gctctggatgccattcgta

SEQ ID NO: 353082 - DNA, 19 bp, Homo sapiens
  siRNA target sequence for NICE-3 (NM_015449.1,450-468).
gatcccatttcattctgaa

SEQ ID NO: 353083 - DNA, 19 bp, Homo sapiens
  siRNA target sequence for NICE-3 (NM_015449.1,472-490).
cggcatccccgttccttaa

SEQ ID NO: 353084 - DNA, 19 bp, Homo sapiens
  siRNA target sequence for NICE-3 (NM_015449.1,473-491).
ggcatccccgttccttaat

SEQ ID NO: 353085 - DNA, 19 bp, Homo sapiens
  siRNA target sequence for NICE-3 (NM_015449.1,485-503).
ccttaatgggcaagaattt

SEQ ID NO: 353086 - DNA, 19 bp, Homo sapiens
  siRNA target sequence for NICE-3 (NM_015449.1,516-534).
gctggatctgcgaaacact

SEQ ID NO: 353087 - DNA, 19 bp, Homo sapiens
  siRNA target sequence for NICE-3 (NM_015449.1,517-535).
ctggatctgcgaaacacta

SEQ ID NO: 353088 - DNA, 19 bp, Homo sapiens
  siRNA target sequence for NICE-3 (NM_015449.1,520-538).
gatctgcgaaacactagta

SEQ ID NO: 353089 - DNA, 19 bp, Homo sapiens
  siRNA target sequence for NICE-3 (NM_015449.1,556-574).
cgcaaagcactcattgata

SEQ ID NO: 353090 - DNA, 19 bp, Homo sapiens
  siRNA target sequence for NICE-3 (NM_015449.1,576-594).
ccttttggatggctatgaa

SEQ ID NO: 353091 - DNA, 19 bp, Homo sapiens
  siRNA target sequence for NICE-3 (NM_015449.1,577-595).
cttttggatggctatgaaa

SEQ ID NO: 353092 - DNA, 19 bp, Homo sapiens
  siRNA target sequence for NICE-3 (NM_015449.1,719-737).
cagccaaagacctaactca

SEQ ID NO: 353093 - DNA, 19 bp, Homo sapiens
  siRNA target sequence for NICE-3 (NM_015449.1,758-776).
caaccatccaggtgacata

SEQ ID NO: 353094 - DNA, 19 bp, Homo sapiens
  siRNA target sequence for NICE-3 (NM_015449.1,781-799).
ccctccagtcagaagagta

SEQ ID NO: 353095 - DNA, 19 bp, Homo sapiens
  siRNA target sequence for NICE-3 (NM_015449.1,782-800).
cctccagtcagaagagtaa

SEQ ID NO: 353096 - DNA, 19 bp, Homo sapiens
  siRNA target sequence for NICE-3 (NM_015449.1,786-804).
cagtcagaagagtaaacgt

SEQ ID NO: 353097 - DNA, 19 bp, Homo sapiens
  siRNA target sequence for NICE-3 (NM_015449.1,828-846).
gagctttaaggataactat

SEQ ID NO: 353098 - DNA, 19 bp, Homo sapiens
  siRNA target sequence for NICE-3 (NM_015449.1,830-848).
gctttaaggataactataa

SEQ ID NO: 353099 - DNA, 19 bp, Homo sapiens
  siRNA target sequence for POT1 (NM_015450.1,33-51).
gttccagcaacaaattata

SEQ ID NO: 353100 - DNA, 19 bp, Homo sapiens
  siRNA target sequence for POT1 (NM_015450.1,77-95).
gggtggtacaattgtcaat

SEQ ID NO: 353101 - DNA, 19 bp, Homo sapiens
  siRNA target sequence for POT1 (NM_015450.1,79-97).
gtggtacaattgtcaatgt

SEQ ID NO: 353102 - DNA, 19 bp, Homo sapiens
  siRNA target sequence for POT1 (NM_015450.1,102-120).
ggtgttgtgaagttcttta

SEQ ID NO: 353103 - DNA, 19 bp, Homo sapiens
  siRNA target sequence for POT1 (NM_015450.1,103-121).
gtgttgtgaagttctttaa

SEQ ID NO: 353104 - DNA, 19 bp, Homo sapiens
  siRNA target sequence for POT1 (NM_015450.1,116-134).
ctttaagcccccatatcta

SEQ ID NO: 353105 - DNA, 19 bp, Homo sapiens
  siRNA target sequence for POT1 (NM_015450.1,154-172).
gctcagttgtaactattgt

SEQ ID NO: 353106 - DNA, 19 bp, Homo sapiens
  siRNA target sequence for POT1 (NM_015450.1,176-194).
ccagacaaatgtaaaacta

SEQ ID NO: 353107 - DNA, 19 bp, Homo sapiens
  siRNA target sequence for POT1 (NM_015450.1,192-210).
ctaacttgcctgctcttta

SEQ ID NO: 353108 - DNA, 19 bp, Homo sapiens
  siRNA target sequence for POT1 (NM_015450.1,218-236).
ctatgaagcccttccaata

SEQ ID NO: 353109 - DNA, 19 bp, Homo sapiens
  siRNA target sequence for POT1 (NM_015450.1,252-270).
gatattgttcgctttcaca

SEQ ID NO: 353110 - DNA, 19 bp, Homo sapiens
  siRNA target sequence for POT1 (NM_015450.1,271-289).
ggctgaagattcaagtata

SEQ ID NO: 353111 - DNA, 19 bp, Homo sapiens
  siRNA target sequence for POT1 (NM_015450.1,349-367).
ctttgggagcccctatcat

SEQ ID NO: 353112 - DNA, 19 bp, Homo sapiens
  siRNA target sequence for POT1 (NM_015450.1,400-418).
ctactgaggaccacaaaat

SEQ ID NO: 353113 - DNA, 19 bp, Homo sapiens
  siRNA target sequence for POT1 (NM_015450.1,435-453).
gtttgggcatctactcata

SEQ ID NO: 353114 - DNA, 19 bp, Homo sapiens
  siRNA target sequence for POT1 (NM_015450.1,457-475).
caccgtcttggacattact

SEQ ID NO: 353115 - DNA, 19 bp, Homo sapiens
  siRNA target sequence for POT1 (NM_015450.1,459-477).
ccgtcttggacattactaa

SEQ ID NO: 353116 - DNA, 19 bp, Homo sapiens
  siRNA target sequence for POT1 (NM_015450.1,460-478).
cgtcttggacattactaaa

SEQ ID NO: 353117 - DNA, 19 bp, Homo sapiens
  siRNA target sequence for POT1 (NM_015450.1,461-479).
gtcttggacattactaaaa

SEQ ID NO: 353118 - DNA, 19 bp, Homo sapiens
  siRNA target sequence for POT1 (NM_015450.1,463-481).
cttggacattactaaaatt

SEQ ID NO: 353119 - DNA, 19 bp, Homo sapiens
  siRNA target sequence for POT1 (NM_015450.1,604-622).
ggagagtcttaatacaaga

SEQ ID NO: 353120 - DNA, 19 bp, Homo sapiens
  siRNA target sequence for POT1 (NM_015450.1,627-645).
gttcttgaaggtgatttaa

SEQ ID NO: 353121 - DNA, 19 bp, Homo sapiens
  siRNA target sequence for POT1 (NM_015450.1,648-666).
cacatccatcggctacaaa

SEQ ID NO: 353122 - DNA, 19 bp, Homo sapiens
  siRNA target sequence for POT1 (NM_015450.1,650-668).
catccatcggctacaaaat

SEQ ID NO: 353123 - DNA, 19 bp, Homo sapiens
  siRNA target sequence for POT1 (NM_015450.1,654-672).
catcggctacaaaatctga

SEQ ID NO: 353124 - DNA, 19 bp, Homo sapiens
  siRNA target sequence for POT1 (NM_015450.1,658-676).
ggctacaaaatctgacaat

SEQ ID NO: 353125 - DNA, 19 bp, Homo sapiens
  siRNA target sequence for POT1 (NM_015450.1,659-677).
gctacaaaatctgacaata

SEQ ID NO: 353126 - DNA, 19 bp, Homo sapiens
  siRNA target sequence for POT1 (NM_015450.1,673-691).
caatagacattttagtcta

SEQ ID NO: 353127 - DNA, 19 bp, Homo sapiens
  siRNA target sequence for POT1 (NM_015450.1,678-696).
gacattttagtctacgata

SEQ ID NO: 353128 - DNA, 19 bp, Homo sapiens
  siRNA target sequence for POT1 (NM_015450.1,689-707).
ctacgataaccatgttcat

SEQ ID NO: 353129 - DNA, 19 bp, Homo sapiens
  siRNA target sequence for POT1 (NM_015450.1,722-740).
gaaggttggaagctttctt

SEQ ID NO: 353130 - DNA, 19 bp, Homo sapiens
  siRNA target sequence for POT1 (NM_015450.1,730-748).
gaagctttcttagaatcta

SEQ ID NO: 353131 - DNA, 19 bp, Homo sapiens
  siRNA target sequence for POT1 (NM_015450.1,753-771).
cttcataccaaacttcaat

SEQ ID NO: 353132 - DNA, 19 bp, Homo sapiens
  siRNA target sequence for POT1 (NM_015450.1,783-801).
gagaatcagacaatgttaa

SEQ ID NO: 353133 - DNA, 19 bp, Homo sapiens
  siRNA target sequence for POT1 (NM_015450.1,797-815).
gttaagtttagagtttcat

SEQ ID NO: 353134 - DNA, 19 bp, Homo sapiens
  siRNA target sequence for POT1 (NM_015450.1,850-868).
gggtcttgccagaaagtaa

SEQ ID NO: 353135 - DNA, 19 bp, Homo sapiens
  siRNA target sequence for POT1 (NM_015450.1,852-870).
gtcttgccagaaagtaact

SEQ ID NO: 353136 - DNA, 19 bp, Homo sapiens
  siRNA target sequence for POT1 (NM_015450.1,854-872).
cttgccagaaagtaactct

SEQ ID NO: 353137 - DNA, 19 bp, Homo sapiens
  siRNA target sequence for POT1 (NM_015450.1,871-889).
ctgatgtggatcaactgaa

SEQ ID NO: 353138 - DNA, 19 bp, Homo sapiens
  siRNA target sequence for POT1 (NM_015450.1,873-891).
gatgtggatcaactgaaaa

SEQ ID NO: 353139 - DNA, 19 bp, Homo sapiens
  siRNA target sequence for POT1 (NM_015450.1,887-905).
gaaaaaggatttagaatct

SEQ ID NO: 353140 - DNA, 19 bp, Homo sapiens
  siRNA target sequence for POT1 (NM_015450.1,893-911).
ggatttagaatctgcaaat

SEQ ID NO: 353141 - DNA, 19 bp, Homo sapiens
  siRNA target sequence for POT1 (NM_015450.1,926-944).
gcattcagatgttatctgt

SEQ ID NO: 353142 - DNA, 19 bp, Homo sapiens
  siRNA target sequence for POT1 (NM_015450.1,954-972).
cctgacgacagctttccaa

SEQ ID NO: 353143 - DNA, 19 bp, Homo sapiens
  siRNA target sequence for POT1 (NM_015450.1,969-987).
ccaagctctggatcagtat

SEQ ID NO: 353144 - DNA, 19 bp, Homo sapiens
  siRNA target sequence for POT1 (NM_015450.1,973-991).
gctctggatcagtatcatt

SEQ ID NO: 353145 - DNA, 19 bp, Homo sapiens
  siRNA target sequence for POT1 (NM_015450.1,995-1013).
cgaggtagaaagatgtcaa

SEQ ID NO: 353146 - DNA, 19 bp, Homo sapiens
  siRNA target sequence for POT1 (NM_015450.1,1021-1039).
ctgctacaatacttacaga

SEQ ID NO: 353147 - DNA, 19 bp, Homo sapiens
  siRNA target sequence for POT1 (NM_015450.1,1052-1070).
ggagaggacaccactatgt

SEQ ID NO: 353148 - DNA, 19 bp, Homo sapiens
  siRNA target sequence for POT1 (NM_015450.1,1060-1078).
caccactatgtgccatttt

SEQ ID NO: 353149 - DNA, 19 bp, Homo sapiens
  siRNA target sequence for POT1 (NM_015450.1,1062-1080).
ccactatgtgccattttga

SEQ ID NO: 353150 - DNA, 19 bp, Homo sapiens
  siRNA target sequence for POT1 (NM_015450.1,1063-1081).
cactatgtgccattttgaa

SEQ ID NO: 353151 - DNA, 19 bp, Homo sapiens
  siRNA target sequence for POT1 (NM_015450.1,1104-1122).
cgcatccgagcaaaattga

SEQ ID NO: 353152 - DNA, 19 bp, Homo sapiens
  siRNA target sequence for POT1 (NM_015450.1,1177-1195).
gtcatttgctgcaagaagt

SEQ ID NO: 353153 - DNA, 19 bp, Homo sapiens
  siRNA target sequence for POT1 (NM_015450.1,1198-1216).
cacatgagggcgatttgga

SEQ ID NO: 353154 - DNA, 19 bp, Homo sapiens
  siRNA target sequence for POT1 (NM_015450.1,1200-1218).
catgagggcgatttggata

SEQ ID NO: 353155 - DNA, 19 bp, Homo sapiens
  siRNA target sequence for POT1 (NM_015450.1,1203-1221).
gagggcgatttggatataa

SEQ ID NO: 353156 - DNA, 19 bp, Homo sapiens
  siRNA target sequence for POT1 (NM_015450.1,1205-1223).
gggcgatttggatataatt

SEQ ID NO: 353157 - DNA, 19 bp, Homo sapiens
  siRNA target sequence for POT1 (NM_015450.1,1206-1224).
ggcgatttggatataattt

SEQ ID NO: 353158 - DNA, 19 bp, Homo sapiens
  siRNA target sequence for POT1 (NM_015450.1,1292-1310).
ctggaccactaaaaatcaa

SEQ ID NO: 353159 - DNA, 19 bp, Homo sapiens
  siRNA target sequence for POT1 (NM_015450.1,1317-1335).
cgaaaagtagcagttcatt

SEQ ID NO: 353160 - DNA, 19 bp, Homo sapiens
  siRNA target sequence for POT1 (NM_015450.1,1350-1368).
ggtattctcccgctttcaa

SEQ ID NO: 353161 - DNA, 19 bp, Homo sapiens
  siRNA target sequence for POT1 (NM_015450.1,1351-1369).
gtattctcccgctttcaaa

SEQ ID NO: 353162 - DNA, 19 bp, Homo sapiens
  siRNA target sequence for POT1 (NM_015450.1,1360-1378).
cgctttcaaatgaatgtct

SEQ ID NO: 353163 - DNA, 19 bp, Homo sapiens
  siRNA target sequence for POT1 (NM_015450.1,1399-1417).
cactcagtgaaatttgcaa

SEQ ID NO: 353164 - DNA, 19 bp, Homo sapiens
  siRNA target sequence for POT1 (NM_015450.1,1414-1432).
gcaaactctcgaacaagtt

SEQ ID NO: 353165 - DNA, 19 bp, Homo sapiens
  siRNA target sequence for POT1 (NM_015450.1,1419-1437).
ctctcgaacaagtttaata

SEQ ID NO: 353166 - DNA, 19 bp, Homo sapiens
  siRNA target sequence for POT1 (NM_015450.1,1423-1441).
cgaacaagtttaatagtgt

SEQ ID NO: 353167 - DNA, 19 bp, Homo sapiens
  siRNA target sequence for POT1 (NM_015450.1,1430-1448).
gtttaatagtgtaattcct

SEQ ID NO: 353168 - DNA, 19 bp, Homo sapiens
  siRNA target sequence for POT1 (NM_015450.1,1536-1554).
cagtgttctagtttgagat

SEQ ID NO: 353169 - DNA, 19 bp, Homo sapiens
  siRNA target sequence for POT1 (NM_015450.1,1552-1570).
gatccatacaaaatctaaa

SEQ ID NO: 353170 - DNA, 19 bp, Homo sapiens
  siRNA target sequence for POT1 (NM_015450.1,1566-1584).
ctaaattccctggttgata

SEQ ID NO: 353171 - DNA, 19 bp, Homo sapiens
  siRNA target sequence for POT1 (NM_015450.1,1612-1630).
cagaagcactgggtattgt

SEQ ID NO: 353172 - DNA, 19 bp, Homo sapiens
  siRNA target sequence for POT1 (NM_015450.1,1624-1642).
gtattgtacccctccaata

SEQ ID NO: 353173 - DNA, 19 bp, Homo sapiens
  siRNA target sequence for POT1 (NM_015450.1,1629-1647).
gtacccctccaatatgtgt

SEQ ID NO: 353174 - DNA, 19 bp, Homo sapiens
  siRNA target sequence for POT1 (NM_015450.1,1635-1653).
ctccaatatgtgtttgtta

SEQ ID NO: 353175 - DNA, 19 bp, Homo sapiens
  siRNA target sequence for POT1 (NM_015450.1,1693-1711).
cctatctcatggattctga

SEQ ID NO: 353176 - DNA, 19 bp, Homo sapiens
  siRNA target sequence for POT1 (NM_015450.1,1721-1739).
ccagattccagcatcagaa

SEQ ID NO: 353177 - DNA, 19 bp, Homo sapiens
  siRNA target sequence for POT1 (NM_015450.1,1795-1813).
gtcctccaggaataaaaat

SEQ ID NO: 353178 - DNA, 19 bp, Homo sapiens
  siRNA target sequence for POT1 (NM_015450.1,1804-1822).
gaataaaaattgatgcata

SEQ ID NO: 353179 - DNA, 19 bp, Homo sapiens
  siRNA target sequence for POT1 (NM_015450.1,1818-1836).
gcatatccgtggttggaat

SEQ ID NO: 353180 - DNA, 19 bp, Homo sapiens
  siRNA target sequence for POT1 (NM_015450.1,1833-1851).
gaatgcttcatcaagtcat

SEQ ID NO: 353181 - DNA, 19 bp, Homo sapiens
  siRNA target sequence for POT1 (NM_015450.1,1838-1856).
cttcatcaagtcatacaat

SEQ ID NO: 353182 - DNA, 19 bp, Homo sapiens
  siRNA target sequence for POT1 (NM_015450.1,1901-1919).
caccacagttgcagaagat

SEQ ID NO: 353183 - DNA, 19 bp, Homo sapiens
  siRNA target sequence for POT1 (NM_015450.1,1908-1926).
gttgcagaagatgtaatct

SEQ ID NO: 353184 - DNA, 19 bp, Homo sapiens
  siRNA target sequence for KIAA1194 (NM_015455.2,454-472).
ccctcggaggatgtataca

SEQ ID NO: 353185 - DNA, 19 bp, Homo sapiens
  siRNA target sequence for KIAA1194 (NM_015455.2,456-474).
ctcggaggatgtatacaat

SEQ ID NO: 353186 - DNA, 19 bp, Homo sapiens
  siRNA target sequence for KIAA1194 (NM_015455.2,458-476).
cggaggatgtatacaatta

SEQ ID NO: 353187 - DNA, 19 bp, Homo sapiens
  siRNA target sequence for KIAA1194 (NM_015455.2,546-564).
gaagcttaagcgcatcttt

SEQ ID NO: 353188 - DNA, 19 bp, Homo sapiens
  siRNA target sequence for KIAA1194 (NM_015455.2,583-601).
gacagctttgcatttgagt

SEQ ID NO: 353189 - DNA, 19 bp, Homo sapiens
  siRNA target sequence for KIAA1194 (NM_015455.2,616-634).
ccgaattccttcagacatt

SEQ ID NO: 353190 - DNA, 19 bp, Homo sapiens
  siRNA target sequence for KIAA1194 (NM_015455.2,641-659).
cttcacaatctggtgtatt

SEQ ID NO: 353191 - DNA, 19 bp, Homo sapiens
  siRNA target sequence for KIAA1194 (NM_015455.2,664-682).
cctgtcatctaataaaatt

SEQ ID NO: 353192 - DNA, 19 bp, Homo sapiens
  siRNA target sequence for KIAA1194 (NM_015455.2,667-685).
gtcatctaataaaattcgt

SEQ ID NO: 353193 - DNA, 19 bp, Homo sapiens
  siRNA target sequence for KIAA1194 (NM_015455.2,742-760).
caacctgttacgagttcta

SEQ ID NO: 353194 - DNA, 19 bp, Homo sapiens
  siRNA target sequence for KIAA1194 (NM_015455.2,818-836).
cttacccaggatatattga

SEQ ID NO: 353195 - DNA, 19 bp, Homo sapiens
  siRNA target sequence for KIAA1194 (NM_015455.2,861-879).
caagacggctgctgaacta

SEQ ID NO: 353196 - DNA, 19 bp, Homo sapiens
  siRNA target sequence for KIAA1194 (NM_015455.2,864-882).
gacggctgctgaactattt

SEQ ID NO: 353197 - DNA, 19 bp, Homo sapiens
  siRNA target sequence for KIAA1194 (NM_015455.2,868-886).
gctgctgaactatttgctt

SEQ ID NO: 353198 - DNA, 19 bp, Homo sapiens
  siRNA target sequence for KIAA1194 (NM_015455.2,874-892).
gaactatttgcttgataat

SEQ ID NO: 353199 - DNA, 19 bp, Homo sapiens
  siRNA target sequence for KIAA1194 (NM_015455.2,899-917).
ggtactgcaaaaagaatta

SEQ ID NO: 353200 - DNA, 19 bp, Homo sapiens
  siRNA target sequence for KIAA1194 (NM_015455.2,932-950).
cctccaaggtcttggatta

SEQ ID NO: 353201 - DNA, 19 bp, Homo sapiens
  siRNA target sequence for KIAA1194 (NM_015455.2,933-951).
ctccaaggtcttggattat

SEQ ID NO: 353202 - DNA, 19 bp, Homo sapiens
  siRNA target sequence for KIAA1194 (NM_015455.2,935-953).
ccaaggtcttggattatgt

SEQ ID NO: 353203 - DNA, 19 bp, Homo sapiens
  siRNA target sequence for KIAA1194 (NM_015455.2,936-954).
caaggtcttggattatgtt

SEQ ID NO: 353204 - DNA, 19 bp, Homo sapiens
  siRNA target sequence for KIAA1194 (NM_015455.2,939-957).
ggtcttggattatgttaca

SEQ ID NO: 353205 - DNA, 19 bp, Homo sapiens
  siRNA target sequence for KIAA1194 (NM_015455.2,940-958).
gtcttggattatgttacaa

SEQ ID NO: 353206 - DNA, 19 bp, Homo sapiens
  siRNA target sequence for KIAA1194 (NM_015455.2,942-960).
cttggattatgttacaaga

SEQ ID NO: 353207 - DNA, 19 bp, Homo sapiens
  siRNA target sequence for KIAA1194 (NM_015455.2,1055-1073).
ccatcatgggcgctaaact

SEQ ID NO: 353208 - DNA, 19 bp, Homo sapiens
  siRNA target sequence for KIAA1194 (NM_015455.2,1081-1099).
caggaaaaaggccattatt

SEQ ID NO: 353209 - DNA, 19 bp, Homo sapiens
  siRNA target sequence for KIAA1194 (NM_015455.2,1084-1102).
gaaaaaggccattattcaa

SEQ ID NO: 353210 - DNA, 19 bp, Homo sapiens
  siRNA target sequence for KIAA1194 (NM_015455.2,1113-1131).
gctgcaatgctgatatcgt

SEQ ID NO: 353211 - DNA, 19 bp, Homo sapiens
  siRNA target sequence for KIAA1194 (NM_015455.2,1114-1132).
ctgcaatgctgatatcgta

SEQ ID NO: 353212 - DNA, 19 bp, Homo sapiens
  siRNA target sequence for KIAA1194 (NM_015455.2,1148-1166).
gaaacggaacagtattaca

SEQ ID NO: 353213 - DNA, 19 bp, Homo sapiens
  siRNA target sequence for KIAA1194 (NM_015455.2,1186-1204).
gaaagaacgtggctataat

SEQ ID NO: 353214 - DNA, 19 bp, Homo sapiens
  siRNA target sequence for KIAA1194 (NM_015455.2,1194-1212).
gtggctataatggattctt

SEQ ID NO: 353215 - DNA, 19 bp, Homo sapiens
  siRNA target sequence for KIAA1194 (NM_015455.2,1196-1214).
ggctataatggattcttca

SEQ ID NO: 353216 - DNA, 19 bp, Homo sapiens
  siRNA target sequence for KIAA1194 (NM_015455.2,1336-1354).
gctagccatggcaaattct

SEQ ID NO: 353217 - DNA, 19 bp, Homo sapiens
  siRNA target sequence for KIAA1194 (NM_015455.2,1427-1445).
cggaaggaatcgattgaaa

SEQ ID NO: 353218 - DNA, 19 bp, Homo sapiens
  siRNA target sequence for KIAA1194 (NM_015455.2,1511-1529).
cattgggaccctgaatact

SEQ ID NO: 353219 - DNA, 19 bp, Homo sapiens
  siRNA target sequence for KIAA1194 (NM_015455.2,1632-1650).
gaactattccacttgtgtt

SEQ ID NO: 353220 - DNA, 19 bp, Homo sapiens
  siRNA target sequence for KIAA1194 (NM_015455.2,1672-1690).
gccagactctggtgttgta

SEQ ID NO: 353221 - DNA, 19 bp, Homo sapiens
  siRNA target sequence for KIAA1194 (NM_015455.2,1678-1696).
ctctggtgttgtagaatat

SEQ ID NO: 353222 - DNA, 19 bp, Homo sapiens
  siRNA target sequence for KIAA1194 (NM_015455.2,1680-1698).
ctggtgttgtagaatattt

SEQ ID NO: 353223 - DNA, 19 bp, Homo sapiens
  siRNA target sequence for KIAA1194 (NM_015455.2,1810-1828).
cactcatggtttcaagtta

SEQ ID NO: 353224 - DNA, 19 bp, Homo sapiens
  siRNA target sequence for KIAA1194 (NM_015455.2,1814-1832).
catggtttcaagttacaga

SEQ ID NO: 353225 - DNA, 19 bp, Homo sapiens
  siRNA target sequence for KIAA1194 (NM_015455.2,1885-1903).
gggtataatagactacatt

SEQ ID NO: 353226 - DNA, 19 bp, Homo sapiens
  siRNA target sequence for KIAA1194 (NM_015455.2,2014-2032).
ccacttctcactttttgca

SEQ ID NO: 353227 - DNA, 19 bp, Homo sapiens
  siRNA target sequence for KIAA1194 (NM_015455.2,2031-2049).
cacaactggagctcttact

SEQ ID NO: 353228 - DNA, 19 bp, Homo sapiens
  siRNA target sequence for COBRA1 (NM_015456.2,108-126).
gcagttccagacagagaat

SEQ ID NO: 353229 - DNA, 19 bp, Homo sapiens
  siRNA target sequence for COBRA1 (NM_015456.2,198-216).
ccaccagtcggtattcgat

SEQ ID NO: 353230 - DNA, 19 bp, Homo sapiens
  siRNA target sequence for COBRA1 (NM_015456.2,272-290).
ctgaggaaaggtacaagaa

SEQ ID NO: 353231 - DNA, 19 bp, Homo sapiens
  siRNA target sequence for COBRA1 (NM_015456.2,455-473).
ggcagatctggcaagacaa

SEQ ID NO: 353232 - DNA, 19 bp, Homo sapiens
  siRNA target sequence for COBRA1 (NM_015456.2,503-521).
cactcctgaagcagtacat

SEQ ID NO: 353233 - DNA, 19 bp, Homo sapiens
  siRNA target sequence for COBRA1 (NM_015456.2,757-775).
ctggacgtgggtgaaatct

SEQ ID NO: 353234 - DNA, 19 bp, Homo sapiens
  siRNA target sequence for COBRA1 (NM_015456.2,1159-1177).
gtggatgactacactttca

SEQ ID NO: 353235 - DNA, 19 bp, Homo sapiens
  siRNA target sequence for COBRA1 (NM_015456.2,1210-1228).
gccccagtctcatatccaa

SEQ ID NO: 353236 - DNA, 19 bp, Homo sapiens
  siRNA target sequence for COBRA1 (NM_015456.2,1237-1255).
cccgaaagcttcactaagt

SEQ ID NO: 353237 - DNA, 19 bp, Homo sapiens
  siRNA target sequence for COBRA1 (NM_015456.2,1238-1256).
ccgaaagcttcactaagtt

SEQ ID NO: 353238 - DNA, 19 bp, Homo sapiens
  siRNA target sequence for COBRA1 (NM_015456.2,1239-1257).
cgaaagcttcactaagttt

SEQ ID NO: 353239 - DNA, 19 bp, Homo sapiens
  siRNA target sequence for MTMR9 (NM_015458.3,568-586).
ccatcgacaagcgatttgt

SEQ ID NO: 353240 - DNA, 19 bp, Homo sapiens
  siRNA target sequence for MTMR9 (NM_015458.3,569-587).
catcgacaagcgatttgta

SEQ ID NO: 353241 - DNA, 19 bp, Homo sapiens
  siRNA target sequence for MTMR9 (NM_015458.3,594-612).
ctgggtaccatcatcataa

SEQ ID NO: 353242 - DNA, 19 bp, Homo sapiens
  siRNA target sequence for MTMR9 (NM_015458.3,596-614).
gggtaccatcatcataaaa

SEQ ID NO: 353243 - DNA, 19 bp, Homo sapiens
  siRNA target sequence for MTMR9 (NM_015458.3,717-735).
ctgatgtaccctttctttt

SEQ ID NO: 353244 - DNA, 19 bp, Homo sapiens
  siRNA target sequence for MTMR9 (NM_015458.3,820-838).
gtgaatggaggctaagcta

SEQ ID NO: 353245 - DNA, 19 bp, Homo sapiens
  siRNA target sequence for MTMR9 (NM_015458.3,826-844).
ggaggctaagctatgtcaa

SEQ ID NO: 353246 - DNA, 19 bp, Homo sapiens
  siRNA target sequence for MTMR9 (NM_015458.3,829-847).
ggctaagctatgtcaataa

SEQ ID NO: 353247 - DNA, 19 bp, Homo sapiens
  siRNA target sequence for MTMR9 (NM_015458.3,835-853).
gctatgtcaataaggaatt

SEQ ID NO: 353248 - DNA, 19 bp, Homo sapiens
  siRNA target sequence for MTMR9 (NM_015458.3,865-883).
cctcttacccaccaattgt

SEQ ID NO: 353249 - DNA, 19 bp, Homo sapiens
  siRNA target sequence for MTMR9 (NM_015458.3,892-910).
ccaaatccatcgatgatga

SEQ ID NO: 353250 - DNA, 19 bp, Homo sapiens
  siRNA target sequence for MTMR9 (NM_015458.3,893-911).
caaatccatcgatgatgaa

SEQ ID NO: 353251 - DNA, 19 bp, Homo sapiens
  siRNA target sequence for MTMR9 (NM_015458.3,920-938).
gaaggtagctacatttcga

SEQ ID NO: 353252 - DNA, 19 bp, Homo sapiens
  siRNA target sequence for MTMR9 (NM_015458.3,945-963).
gggcgcttcccagtactaa

SEQ ID NO: 353253 - DNA, 19 bp, Homo sapiens
  siRNA target sequence for MTMR9 (NM_015458.3,949-967).
gcttcccagtactaagcta

SEQ ID NO: 353254 - DNA, 19 bp, Homo sapiens
  siRNA target sequence for MTMR9 (NM_015458.3,950-968).
cttcccagtactaagctat

SEQ ID NO: 353255 - DNA, 19 bp, Homo sapiens
  siRNA target sequence for MTMR9 (NM_015458.3,955-973).
cagtactaagctattacca

SEQ ID NO: 353256 - DNA, 19 bp, Homo sapiens
  siRNA target sequence for MTMR9 (NM_015458.3,1046-1064).
ggacgagaagctgataaat

SEQ ID NO: 353257 - DNA, 19 bp, Homo sapiens
  siRNA target sequence for MTMR9 (NM_015458.3,1080-1098).
ggaaagcgtggctacatca

SEQ ID NO: 353258 - DNA, 19 bp, Homo sapiens
  siRNA target sequence for MTMR9 (NM_015458.3,1081-1099).
gaaagcgtggctacatcat

SEQ ID NO: 353259 - DNA, 19 bp, Homo sapiens
  siRNA target sequence for MTMR9 (NM_015458.3,1086-1104).
cgtggctacatcattgaca

SEQ ID NO: 353260 - DNA, 19 bp, Homo sapiens
  siRNA target sequence for MTMR9 (NM_015458.3,1118-1136).
cgtggctcagcaaactaga

SEQ ID NO: 353261 - DNA, 19 bp, Homo sapiens
  siRNA target sequence for MTMR9 (NM_015458.3,1176-1194).
cagtggaggcgaattcata

SEQ ID NO: 353262 - DNA, 19 bp, Homo sapiens
  siRNA target sequence for MTMR9 (NM_015458.3,1199-1217).
cattgagaggtatcacatt

SEQ ID NO: 353263 - DNA, 19 bp, Homo sapiens
  siRNA target sequence for MTMR9 (NM_015458.3,1218-1236).
cttcaggagagcttaatca

SEQ ID NO: 353264 - DNA, 19 bp, Homo sapiens
  siRNA target sequence for MTMR9 (NM_015458.3,1223-1241).
ggagagcttaatcaaactt

SEQ ID NO: 353265 - DNA, 19 bp, Homo sapiens
  siRNA target sequence for MTMR9 (NM_015458.3,1249-1267).
cttgtaatgaccaaacaca

SEQ ID NO: 353266 - DNA, 19 bp, Homo sapiens
  siRNA target sequence for MTMR9 (NM_015458.3,1274-1292).
ggaccgatggctcagtaaa

SEQ ID NO: 353267 - DNA, 19 bp, Homo sapiens
  siRNA target sequence for MTMR9 (NM_015458.3,1275-1293).
gaccgatggctcagtaaat

SEQ ID NO: 353268 - DNA, 19 bp, Homo sapiens
  siRNA target sequence for MTMR9 (NM_015458.3,1279-1297).
gatggctcagtaaattgga

SEQ ID NO: 353269 - DNA, 19 bp, Homo sapiens
  siRNA target sequence for MTMR9 (NM_015458.3,1369-1387).
gggaaggagcatcaatatt

SEQ ID NO: 353270 - DNA, 19 bp, Homo sapiens
  siRNA target sequence for MTMR9 (NM_015458.3,1371-1389).
gaaggagcatcaatattga

SEQ ID NO: 353271 - DNA, 19 bp, Homo sapiens
  siRNA target sequence for MTMR9 (NM_015458.3,1433-1451).
cttggcccagatcatctta

SEQ ID NO: 353272 - DNA, 19 bp, Homo sapiens
  siRNA target sequence for MTMR9 (NM_015458.3,1463-1481).
caggaccattcgtggtttt

SEQ ID NO: 353273 - DNA, 19 bp, Homo sapiens
  siRNA target sequence for MTMR9 (NM_015458.3,1465-1483).
ggaccattcgtggttttga

SEQ ID NO: 353274 - DNA, 19 bp, Homo sapiens
  siRNA target sequence for MTMR9 (NM_015458.3,1542-1560).
cagtcagcctactgtaaca

SEQ ID NO: 353275 - DNA, 19 bp, Homo sapiens
  siRNA target sequence for MTMR9 (NM_015458.3,1574-1592).
ggaggctcctgtatttctt

SEQ ID NO: 353276 - DNA, 19 bp, Homo sapiens
  siRNA target sequence for MTMR9 (NM_015458.3,1613-1631).
gcagatccttcgtcagttt

SEQ ID NO: 353277 - DNA, 19 bp, Homo sapiens
  siRNA target sequence for MTMR9 (NM_015458.3,1623-1641).
cgtcagtttccctgttctt

SEQ ID NO: 353278 - DNA, 19 bp, Homo sapiens
  siRNA target sequence for MTMR9 (NM_015458.3,1670-1688).
gctctttgagcatgcttat

SEQ ID NO: 353279 - DNA, 19 bp, Homo sapiens
  siRNA target sequence for MTMR9 (NM_015458.3,1691-1709).
ctcacagtttggaacattt

SEQ ID NO: 353280 - DNA, 19 bp, Homo sapiens
  siRNA target sequence for MTMR9 (NM_015458.3,1693-1711).
cacagtttggaacatttct

SEQ ID NO: 353281 - DNA, 19 bp, Homo sapiens
  siRNA target sequence for MTMR9 (NM_015458.3,1713-1731).
ggcaacaatgaaagtgaaa

SEQ ID NO: 353282 - DNA, 19 bp, Homo sapiens
  siRNA target sequence for MTMR9 (NM_015458.3,1788-1806).
cccagtgagctgagtaaat

SEQ ID NO: 353283 - DNA, 19 bp, Homo sapiens
  siRNA target sequence for MTMR9 (NM_015458.3,1789-1807).
ccagtgagctgagtaaatt

SEQ ID NO: 353284 - DNA, 19 bp, Homo sapiens
  siRNA target sequence for MTMR9 (NM_015458.3,1900-1918).
ggaatagatcctctaagta

SEQ ID NO: 353285 - DNA, 19 bp, Homo sapiens
  siRNA target sequence for MTMR9 (NM_015458.3,1901-1919).
gaatagatcctctaagtat

SEQ ID NO: 353286 - DNA, 19 bp, Homo sapiens
  siRNA target sequence for MTMR9 (NM_015458.3,1906-1924).
gatcctctaagtatttgga

SEQ ID NO: 353287 - DNA, 19 bp, Homo sapiens
  siRNA target sequence for MTMR9 (NM_015458.3,1935-1953).
gaagaaatggttaacatca

SEQ ID NO: 353288 - DNA, 19 bp, Homo sapiens
  siRNA target sequence for MTMR9 (NM_015458.3,1949-1967).
catcattgaatataataaa

SEQ ID NO: 353289 - DNA, 19 bp, Homo sapiens
  siRNA target sequence for DKFZP586L0724 (NM_015462.2,21-39).
gaagaattcacgttgtctt

SEQ ID NO: 353290 - DNA, 19 bp, Homo sapiens
  siRNA target sequence for DKFZP586L0724 (NM_015462.2,130-148).
cagtcatcctctataaggt

SEQ ID NO: 353291 - DNA, 19 bp, Homo sapiens
  siRNA target sequence for DKFZP586L0724 (NM_015462.2,137-155).
cctctataaggtttctgat

SEQ ID NO: 353292 - DNA, 19 bp, Homo sapiens
  siRNA target sequence for DKFZP586L0724 (NM_015462.2,167-185).
ggggagctggtcagtgaaa

SEQ ID NO: 353293 - DNA, 19 bp, Homo sapiens
  siRNA target sequence for DKFZP586L0724 (NM_015462.2,169-187).
ggagctggtcagtgaaaca

SEQ ID NO: 353294 - DNA, 19 bp, Homo sapiens
  siRNA target sequence for DKFZP586L0724 (NM_015462.2,170-188).
gagctggtcagtgaaacaa

SEQ ID NO: 353295 - DNA, 19 bp, Homo sapiens
  siRNA target sequence for DKFZP586L0724 (NM_015462.2,186-204).
caaggtcaaattataacat

SEQ ID NO: 353296 - DNA, 19 bp, Homo sapiens
  siRNA target sequence for DKFZP586L0724 (NM_015462.2,208-226).
cagctgtgtgcaactttca

SEQ ID NO: 353297 - DNA, 19 bp, Homo sapiens
  siRNA target sequence for DKFZP586L0724 (NM_015462.2,221-239).
ctttcaaactggagagtat

SEQ ID NO: 353298 - DNA, 19 bp, Homo sapiens
  siRNA target sequence for DKFZP586L0724 (NM_015462.2,229-247).
ctggagagtatgttgttgt

SEQ ID NO: 353299 - DNA, 19 bp, Homo sapiens
  siRNA target sequence for DKFZP586L0724 (NM_015462.2,232-250).
gagagtatgttgttgtaca

SEQ ID NO: 353300 - DNA, 19 bp, Homo sapiens
  siRNA target sequence for DKFZP586L0724 (NM_015462.2,246-264).
gtacacgataataaggttt

SEQ ID NO: 353301 - DNA, 19 bp, Homo sapiens
  siRNA target sequence for DKFZP586L0724 (NM_015462.2,249-267).
cacgataataaggttttaa

SEQ ID NO: 353302 - DNA, 19 bp, Homo sapiens
  siRNA target sequence for DKFZP586L0724 (NM_015462.2,251-269).
cgataataaggttttaaga

SEQ ID NO: 353303 - DNA, 19 bp, Homo sapiens
  siRNA target sequence for DKFZP586L0724 (NM_015462.2,322-340).
cagcagaagtatataggat

SEQ ID NO: 353304 - DNA, 19 bp, Homo sapiens
  siRNA target sequence for DKFZP586L0724 (NM_015462.2,385-403).
gtgctgttcgtggtttaga

SEQ ID NO: 353305 - DNA, 19 bp, Homo sapiens
  siRNA target sequence for DKFZP586L0724 (NM_015462.2,600-618).
gacgaaaactctgttataa

SEQ ID NO: 353306 - DNA, 19 bp, Homo sapiens
  siRNA target sequence for DKFZP586L0724 (NM_015462.2,631-649).
catctgtagatcggaaatt

SEQ ID NO: 353307 - DNA, 19 bp, Homo sapiens
  siRNA target sequence for DKFZP586L0724 (NM_015462.2,634-652).
ctgtagatcggaaattcat

SEQ ID NO: 353308 - DNA, 19 bp, Homo sapiens
  siRNA target sequence for DKFZP586L0724 (NM_015462.2,940-958).
ggtattatggagaacattt

SEQ ID NO: 353309 - DNA, 19 bp, Homo sapiens
  siRNA target sequence for DKFZP586L0724 (NM_015462.2,966-984).
ctacatggaaaatctctaa

SEQ ID NO: 353310 - DNA, 19 bp, Homo sapiens
  siRNA target sequence for DKFZP586L0724 (NM_015462.2,1844-1862).
cacgctgtttcttaagtat

SEQ ID NO: 353311 - DNA, 19 bp, Homo sapiens
  siRNA target sequence for DKFZP586L0724 (NM_015462.2,1846-1864).
cgctgtttcttaagtattt

SEQ ID NO: 353312 - DNA, 19 bp, Homo sapiens
  siRNA target sequence for DKFZP566K1924 (NM_015463.1,478-496).
cgctgcaggtcgagaatat

SEQ ID NO: 353313 - DNA, 19 bp, Homo sapiens
  siRNA target sequence for DKFZP566K1924 (NM_015463.1,485-503).
ggtcgagaatatttccatt

SEQ ID NO: 353314 - DNA, 19 bp, Homo sapiens
  siRNA target sequence for DKFZP566K1924 (NM_015463.1,519-537).
ccactggaactgaagtcta

SEQ ID NO: 353315 - DNA, 19 bp, Homo sapiens
  siRNA target sequence for DKFZP566K1924 (NM_015463.1,635-653).
catgccgttcacagacatt

SEQ ID NO: 353316 - DNA, 19 bp, Homo sapiens
  siRNA target sequence for DKFZP566K1924 (NM_015463.1,667-685).
cagtgtggcaagtcaagtt

SEQ ID NO: 353317 - DNA, 19 bp, Homo sapiens
  siRNA target sequence for DKFZP566K1924 (NM_015463.1,772-790).
gtctgatgtgggtgaacaa

SEQ ID NO: 353318 - DNA, 19 bp, Homo sapiens
  siRNA target sequence for SOSTDC1 (NM_015464.1,216-234).
cccttgcatgcatcctaat

SEQ ID NO: 353319 - DNA, 19 bp, Homo sapiens
  siRNA target sequence for SOSTDC1 (NM_015464.1,218-236).
cttgcatgcatcctaatga

SEQ ID NO: 353320 - DNA, 19 bp, Homo sapiens
  siRNA target sequence for SOSTDC1 (NM_015464.1,318-336).
gcaacagcacgttgaatca

SEQ ID NO: 353321 - DNA, 19 bp, Homo sapiens
  siRNA target sequence for SOSTDC1 (NM_015464.1,328-346).
gttgaatcaagccagaaat

SEQ ID NO: 353322 - DNA, 19 bp, Homo sapiens
  siRNA target sequence for SOSTDC1 (NM_015464.1,381-399).
ggaacactcgggttcaagt

SEQ ID NO: 353323 - DNA, 19 bp, Homo sapiens
  siRNA target sequence for SOSTDC1 (NM_015464.1,413-431).
ctgcgttccaccaaataca

SEQ ID NO: 353324 - DNA, 19 bp, Homo sapiens
  siRNA target sequence for SOSTDC1 (NM_015464.1,568-586).
ggagtggcggtgtgtcaat

SEQ ID NO: 353325 - DNA, 19 bp, Homo sapiens
  siRNA target sequence for SOSTDC1 (NM_015464.1,573-591).
ggcggtgtgtcaatgacaa

SEQ ID NO: 353326 - DNA, 19 bp, Homo sapiens
  siRNA target sequence for SOSTDC1 (NM_015464.1,574-592).
gcggtgtgtcaatgacaaa

SEQ ID NO: 353327 - DNA, 19 bp, Homo sapiens
  siRNA target sequence for SOSTDC1 (NM_015464.1,633-651).
gcacacgcacctacaaaat

SEQ ID NO: 353328 - DNA, 19 bp, Homo sapiens
  siRNA target sequence for SOSTDC1 (NM_015464.1,700-718).
cgagtccagtcacaacttt

SEQ ID NO: 353329 - DNA, 19 bp, Homo sapiens
  siRNA target sequence for GEMIN5 (NM_015465.1,197-215).
gggtctctggcttcacatt

SEQ ID NO: 353330 - DNA, 19 bp, Homo sapiens
  siRNA target sequence for GEMIN5 (NM_015465.1,282-300).
ggatgtagagacaaaaaca

SEQ ID NO: 353331 - DNA, 19 bp, Homo sapiens
  siRNA target sequence for GEMIN5 (NM_015465.1,317-335).
cactccatcagcatacgat

SEQ ID NO: 353332 - DNA, 19 bp, Homo sapiens
  siRNA target sequence for GEMIN5 (NM_015465.1,321-339).
ccatcagcatacgatatca

SEQ ID NO: 353333 - DNA, 19 bp, Homo sapiens
  siRNA target sequence for GEMIN5 (NM_015465.1,322-340).
catcagcatacgatatcaa

SEQ ID NO: 353334 - DNA, 19 bp, Homo sapiens
  siRNA target sequence for GEMIN5 (NM_015465.1,350-368).
ggtctcctcgagtaaagga

SEQ ID NO: 353335 - DNA, 19 bp, Homo sapiens
  siRNA target sequence for GEMIN5 (NM_015465.1,355-373).
cctcgagtaaaggacttaa

SEQ ID NO: 353336 - DNA, 19 bp, Homo sapiens
  siRNA target sequence for GEMIN5 (NM_015465.1,356-374).
ctcgagtaaaggacttaat

SEQ ID NO: 353337 - DNA, 19 bp, Homo sapiens
  siRNA target sequence for GEMIN5 (NM_015465.1,361-379).
gtaaaggacttaatagtat

SEQ ID NO: 353338 - DNA, 19 bp, Homo sapiens
  siRNA target sequence for GEMIN5 (NM_015465.1,385-403).
gatgaaaaaggagtagttt

SEQ ID NO: 353339 - DNA, 19 bp, Homo sapiens
  siRNA target sequence for GEMIN5 (NM_015465.1,431-449).
gccagcacctctttataga

SEQ ID NO: 353340 - DNA, 19 bp, Homo sapiens
  siRNA target sequence for GEMIN5 (NM_015465.1,448-466).
gaacccaggacaattttct

SEQ ID NO: 353341 - DNA, 19 bp, Homo sapiens
  siRNA target sequence for GEMIN5 (NM_015465.1,473-491).
cttgttcacctcatcatga

SEQ ID NO: 353342 - DNA, 19 bp, Homo sapiens
  siRNA target sequence for GEMIN5 (NM_015465.1,521-539).
gcatagtggtgataattga

SEQ ID NO: 353343 - DNA, 19 bp, Homo sapiens
  siRNA target sequence for GEMIN5 (NM_015465.1,618-636).
gcctggtgaagattgttta

SEQ ID NO: 353344 - DNA, 19 bp, Homo sapiens
  siRNA target sequence for GEMIN5 (NM_015465.1,700-718).
gctccagtaacaaaaggtt

SEQ ID NO: 353345 - DNA, 19 bp, Homo sapiens
  siRNA target sequence for GEMIN5 (NM_015465.1,825-843).
gggtatagacccaactgtt

SEQ ID NO: 353346 - DNA, 19 bp, Homo sapiens
  siRNA target sequence for GEMIN5 (NM_015465.1,826-844).
ggtatagacccaactgtta

SEQ ID NO: 353347 - DNA, 19 bp, Homo sapiens
  siRNA target sequence for GEMIN5 (NM_015465.1,827-845).
gtatagacccaactgttaa

SEQ ID NO: 353348 - DNA, 19 bp, Homo sapiens
  siRNA target sequence for GEMIN5 (NM_015465.1,997-1015).
cattcaagaattgtgttta

SEQ ID NO: 353349 - DNA, 19 bp, Homo sapiens
  siRNA target sequence for GEMIN5 (NM_015465.1,1061-1079).
ctacatcaatggatagaga

SEQ ID NO: 353350 - DNA, 19 bp, Homo sapiens
  siRNA target sequence for GEMIN5 (NM_015465.1,1072-1090).
gatagagatgtaaaatgtt

SEQ ID NO: 353351 - DNA, 19 bp, Homo sapiens
  siRNA target sequence for GEMIN5 (NM_015465.1,1130-1148).
cccttggtgggtttgcata

SEQ ID NO: 353352 - DNA, 19 bp, Homo sapiens
  siRNA target sequence for GEMIN5 (NM_015465.1,1226-1244).
cactctccataaagaacaa

SEQ ID NO: 353353 - DNA, 19 bp, Homo sapiens
  siRNA target sequence for GEMIN5 (NM_015465.1,1228-1246).
ctctccataaagaacaact

SEQ ID NO: 353354 - DNA, 19 bp, Homo sapiens
  siRNA target sequence for GEMIN5 (NM_015465.1,1314-1332).
ggaaggttgcttagctttt

SEQ ID NO: 353355 - DNA, 19 bp, Homo sapiens
  siRNA target sequence for GEMIN5 (NM_015465.1,1394-1412).
ctagcacatatcataagaa

SEQ ID NO: 353356 - DNA, 19 bp, Homo sapiens
  siRNA target sequence for GEMIN5 (NM_015465.1,1478-1496).
gaccttcccttgctttata

SEQ ID NO: 353357 - DNA, 19 bp, Homo sapiens
  siRNA target sequence for GEMIN5 (NM_015465.1,1508-1526).
gagaagggattgtcttaca

SEQ ID NO: 353358 - DNA, 19 bp, Homo sapiens
  siRNA target sequence for GEMIN5 (NM_015465.1,1514-1532).
ggattgtcttacagcataa

SEQ ID NO: 353359 - DNA, 19 bp, Homo sapiens
  siRNA target sequence for GEMIN5 (NM_015465.1,1528-1546).
cataatccctggaagctta

SEQ ID NO: 353360 - DNA, 19 bp, Homo sapiens
  siRNA target sequence for GEMIN5 (NM_015465.1,1573-1591).
ctcatcagggacaccaatt

SEQ ID NO: 353361 - DNA, 19 bp, Homo sapiens
  siRNA target sequence for GEMIN5 (NM_015465.1,1575-1593).
catcagggacaccaattca

SEQ ID NO: 353362 - DNA, 19 bp, Homo sapiens
  siRNA target sequence for GEMIN5 (NM_015465.1,1580-1598).
gggacaccaattcaatcaa

SEQ ID NO: 353363 - DNA, 19 bp, Homo sapiens
  siRNA target sequence for GEMIN5 (NM_015465.1,1581-1599).
ggacaccaattcaatcaaa

SEQ ID NO: 353364 - DNA, 19 bp, Homo sapiens
  siRNA target sequence for GEMIN5 (NM_015465.1,1612-1630).
gtacacacagagataagtt

SEQ ID NO: 353365 - DNA, 19 bp, Homo sapiens
  siRNA target sequence for GEMIN5 (NM_015465.1,1662-1680).
caatgaagatggatcaata

SEQ ID NO: 353366 - DNA, 19 bp, Homo sapiens
  siRNA target sequence for GEMIN5 (NM_015465.1,1669-1687).
gatggatcaatagaaatat

SEQ ID NO: 353367 - DNA, 19 bp, Homo sapiens
  siRNA target sequence for GEMIN5 (NM_015465.1,1718-1736).
ctatccaacagcatcacaa

SEQ ID NO: 353368 - DNA, 19 bp, Homo sapiens
  siRNA target sequence for GEMIN5 (NM_015465.1,1729-1747).
catcacaagcttgtgaata

SEQ ID NO: 353369 - DNA, 19 bp, Homo sapiens
  siRNA target sequence for GEMIN5 (NM_015465.1,1732-1750).
cacaagcttgtgaatacca

SEQ ID NO: 353370 - DNA, 19 bp, Homo sapiens
  siRNA target sequence for GEMIN5 (NM_015465.1,1871-1889).
ctccagtgaccattacaga

SEQ ID NO: 353371 - DNA, 19 bp, Homo sapiens
  siRNA target sequence for GEMIN5 (NM_015465.1,1962-1980).
gctggtatctgcttcctat

SEQ ID NO: 353372 - DNA, 19 bp, Homo sapiens
  siRNA target sequence for GEMIN5 (NM_015465.1,1965-1983).
ggtatctgcttcctatgat

SEQ ID NO: 353373 - DNA, 19 bp, Homo sapiens
  siRNA target sequence for GEMIN5 (NM_015465.1,2265-2283).
ggaatcgattgatggaaat

SEQ ID NO: 353374 - DNA, 19 bp, Homo sapiens
  siRNA target sequence for GEMIN5 (NM_015465.1,2270-2288).
cgattgatggaaatgaaga

SEQ ID NO: 353375 - DNA, 19 bp, Homo sapiens
  siRNA target sequence for GEMIN5 (NM_015465.1,2506-2524).
ccagaaaccttaatcaaga

SEQ ID NO: 353376 - DNA, 19 bp, Homo sapiens
  siRNA target sequence for GEMIN5 (NM_015465.1,2507-2525).
cagaaaccttaatcaagaa

SEQ ID NO: 353377 - DNA, 19 bp, Homo sapiens
  siRNA target sequence for GEMIN5 (NM_015465.1,2692-2710).
gacagggctaccctgtata

SEQ ID NO: 353378 - DNA, 19 bp, Homo sapiens
  siRNA target sequence for GEMIN5 (NM_015465.1,2694-2712).
cagggctaccctgtataga

SEQ ID NO: 353379 - DNA, 19 bp, Homo sapiens
  siRNA target sequence for GEMIN5 (NM_015465.1,2696-2714).
gggctaccctgtatagaat

SEQ ID NO: 353380 - DNA, 19 bp, Homo sapiens
  siRNA target sequence for GEMIN5 (NM_015465.1,2698-2716).
gctaccctgtatagaatga

SEQ ID NO: 353381 - DNA, 19 bp, Homo sapiens
  siRNA target sequence for GEMIN5 (NM_015465.1,2699-2717).
ctaccctgtatagaatgat

SEQ ID NO: 353382 - DNA, 19 bp, Homo sapiens
  siRNA target sequence for GEMIN5 (NM_015465.1,2702-2720).
ccctgtatagaatgattga

SEQ ID NO: 353383 - DNA, 19 bp, Homo sapiens
  siRNA target sequence for GEMIN5 (NM_015465.1,2704-2722).
ctgtatagaatgattgata

SEQ ID NO: 353384 - DNA, 19 bp, Homo sapiens
  siRNA target sequence for GEMIN5 (NM_015465.1,2750-2768).
gccaccctgagttatttca

SEQ ID NO: 353385 - DNA, 19 bp, Homo sapiens
  siRNA target sequence for GEMIN5 (NM_015465.1,2769-2787).
ccagcttatgctttggaaa

SEQ ID NO: 353386 - DNA, 19 bp, Homo sapiens
  siRNA target sequence for GEMIN5 (NM_015465.1,2916-2934).
gtgttttcaggatcagtat

SEQ ID NO: 353387 - DNA, 19 bp, Homo sapiens
  siRNA target sequence for GEMIN5 (NM_015465.1,2956-2974).
ctttccatccacaaagtgt

SEQ ID NO: 353388 - DNA, 19 bp, Homo sapiens
  siRNA target sequence for GEMIN5 (NM_015465.1,2992-3010).
ctcaagtcaaaccattttt

SEQ ID NO: 353389 - DNA, 19 bp, Homo sapiens
  siRNA target sequence for GEMIN5 (NM_015465.1,3059-3077).
cagtcctgaaggacttgta

SEQ ID NO: 353390 - DNA, 19 bp, Homo sapiens
  siRNA target sequence for GEMIN5 (NM_015465.1,3087-3105).
gggaaccgtcctagaaaga

SEQ ID NO: 353391 - DNA, 19 bp, Homo sapiens
  siRNA target sequence for GEMIN5 (NM_015465.1,3143-3161).
gggccacttgtgcttatga

SEQ ID NO: 353392 - DNA, 19 bp, Homo sapiens
  siRNA target sequence for GEMIN5 (NM_015465.1,3144-3162).
ggccacttgtgcttatgat

SEQ ID NO: 353393 - DNA, 19 bp, Homo sapiens
  siRNA target sequence for GEMIN5 (NM_015465.1,3186-3204).
gggggatgcggcatcactt

SEQ ID NO: 353394 - DNA, 19 bp, Homo sapiens
  siRNA target sequence for GEMIN5 (NM_015465.1,3187-3205).
ggggatgcggcatcactta

SEQ ID NO: 353395 - DNA, 19 bp, Homo sapiens
  siRNA target sequence for GEMIN5 (NM_015465.1,3189-3207).
ggatgcggcatcacttaga

SEQ ID NO: 353396 - DNA, 19 bp, Homo sapiens
  siRNA target sequence for GEMIN5 (NM_015465.1,3190-3208).
gatgcggcatcacttagaa

SEQ ID NO: 353397 - DNA, 19 bp, Homo sapiens
  siRNA target sequence for GEMIN5 (NM_015465.1,3319-3337).
gccctgcagctgcatgaaa

SEQ ID NO: 353398 - DNA, 19 bp, Homo sapiens
  siRNA target sequence for GEMIN5 (NM_015465.1,3324-3342).
gcagctgcatgaaagtcta

SEQ ID NO: 353399 - DNA, 19 bp, Homo sapiens
  siRNA target sequence for GEMIN5 (NM_015465.1,3561-3579).
gtacccatctgctacaaat

SEQ ID NO: 353400 - DNA, 19 bp, Homo sapiens
  siRNA target sequence for GEMIN5 (NM_015465.1,3761-3779).
gctgtgaccacctaagaga

SEQ ID NO: 353401 - DNA, 19 bp, Homo sapiens
  siRNA target sequence for GEMIN5 (NM_015465.1,3809-3827).
caccagctttcaaaagttt

SEQ ID NO: 353402 - DNA, 19 bp, Homo sapiens
  siRNA target sequence for GEMIN5 (NM_015465.1,3940-3958).
ccaagccagcagttagaca

SEQ ID NO: 353403 - DNA, 19 bp, Homo sapiens
  siRNA target sequence for GEMIN5 (NM_015465.1,4002-4020).
gccaaacaggccttcagaa

SEQ ID NO: 353404 - DNA, 19 bp, Homo sapiens
  siRNA target sequence for GEMIN5 (NM_015465.1,4010-4028).
ggccttcagaactagactt

SEQ ID NO: 353405 - DNA, 19 bp, Homo sapiens
  siRNA target sequence for GEMIN5 (NM_015465.1,4048-4066).
gagcgaatgctgagtactt

SEQ ID NO: 353406 - DNA, 19 bp, Homo sapiens
  siRNA target sequence for GEMIN5 (NM_015465.1,4050-4068).
gcgaatgctgagtactttt

SEQ ID NO: 353407 - DNA, 19 bp, Homo sapiens
  siRNA target sequence for GEMIN5 (NM_015465.1,4051-4069).
cgaatgctgagtactttta

SEQ ID NO: 353408 - DNA, 19 bp, Homo sapiens
  siRNA target sequence for GEMIN5 (NM_015465.1,4179-4197).
ctgtaaatccacagcaaat

SEQ ID NO: 353409 - DNA, 19 bp, Homo sapiens
  siRNA target sequence for GEMIN5 (NM_015465.1,4209-4227).
gaatgaaccggaagtagaa

SEQ ID NO: 353410 - DNA, 19 bp, Homo sapiens
  siRNA target sequence for GEMIN5 (NM_015465.1,4289-4307).
ctctgcctgagttaaccaa

SEQ ID NO: 353411 - DNA, 19 bp, Homo sapiens
  siRNA target sequence for GEMIN5 (NM_015465.1,4310-4328).
ggcttaccgaggcaaatca

SEQ ID NO: 353412 - DNA, 19 bp, Homo sapiens
  siRNA target sequence for GEMIN5 (NM_015465.1,4504-4522).
cactgccagaccttctgta

SEQ ID NO: 353413 - DNA, 19 bp, Homo sapiens
  siRNA target sequence for NIPSNAP3A (NM_015469.1,540-558).
ctatgaactggccactttt

SEQ ID NO: 353414 - DNA, 19 bp, Homo sapiens
  siRNA target sequence for NIPSNAP3A (NM_015469.1,608-626).
cagttcatgctcatgtcaa

SEQ ID NO: 353415 - DNA, 19 bp, Homo sapiens
  siRNA target sequence for DKFZP586M1523 (NM_015476.1,481-499).
ggaagcatggcaattaaca

SEQ ID NO: 353416 - DNA, 19 bp, Homo sapiens
  siRNA target sequence for DKFZP586M1523 (NM_015476.1,490-508).
gcaattaacagcatctcaa

SEQ ID NO: 353417 - DNA, 19 bp, Homo sapiens
  siRNA target sequence for DKFZP586M1523 (NM_015476.1,522-540).
cacccagtcttccatgtat

SEQ ID NO: 353418 - DNA, 19 bp, Homo sapiens
  siRNA target sequence for DKFZP586M1523 (NM_015476.1,570-588).
cctggaggacgatacacat

SEQ ID NO: 353419 - DNA, 19 bp, Homo sapiens
  siRNA target sequence for DKFZP586M1523 (NM_015476.1,573-591).
ggaggacgatacacatgaa

SEQ ID NO: 353420 - DNA, 19 bp, Homo sapiens
  siRNA target sequence for DKFZP586M1523 (NM_015476.1,608-626).
cagagaagcctcactttga

SEQ ID NO: 353421 - DNA, 19 bp, Homo sapiens
  siRNA target sequence for DKFZP586M1523 (NM_015476.1,610-628).
gagaagcctcactttgact

SEQ ID NO: 353422 - DNA, 19 bp, Homo sapiens
  siRNA target sequence for DKFZP586M1523 (NM_015476.1,627-645).
ctctcgcagtgtgatattt

SEQ ID NO: 353423 - DNA, 19 bp, Homo sapiens
  siRNA target sequence for DKFZP586M1523 (NM_015476.1,629-647).
ctcgcagtgtgatatttga

SEQ ID NO: 353424 - DNA, 19 bp, Homo sapiens
  siRNA target sequence for DKFZP586M1523 (NM_015476.1,660-678).
caatggcagtgggaaagtt

SEQ ID NO: 353425 - DNA, 19 bp, Homo sapiens
  siRNA target sequence for DKFZP586M1523 (NM_015476.1,746-764).
cgttatactggcattttct

SEQ ID NO: 353426 - DNA, 19 bp, Homo sapiens
  siRNA target sequence for DKFZP586M1523 (NM_015476.1,813-831).
cctgccccagtggcaatat

SEQ ID NO: 353427 - DNA, 19 bp, Homo sapiens
  siRNA target sequence for DKFZP586M1523 (NM_015476.1,857-875).
cacaggccaagcaatggtt

SEQ ID NO: 353428 - DNA, 19 bp, Homo sapiens
  siRNA target sequence for DKFZP586M1523 (NM_015476.1,873-891).
gttcagcatgtataaacct

SEQ ID NO: 353429 - DNA, 19 bp, Homo sapiens
  siRNA target sequence for DKFZP586M1523 (NM_015476.1,922-940).
gagaccgactcctttgtga

SEQ ID NO: 353430 - DNA, 19 bp, Homo sapiens
  siRNA target sequence for DKFZP586M1523 (NM_015476.1,926-944).
ccgactcctttgtgaataa

SEQ ID NO: 353431 - DNA, 19 bp, Homo sapiens
  siRNA target sequence for DKFZP586M1523 (NM_015476.1,946-964).
ctagatcccagcaaagtgt

SEQ ID NO: 353432 - DNA, 19 bp, Homo sapiens
  siRNA target sequence for PVRL3 (NM_015480.1,40-58).
ggcggcaaagcacaacttt

SEQ ID NO: 353433 - DNA, 19 bp, Homo sapiens
  siRNA target sequence for PVRL3 (NM_015480.1,164-182).
ccttagctggaccaattat

SEQ ID NO: 353434 - DNA, 19 bp, Homo sapiens
  siRNA target sequence for PVRL3 (NM_015480.1,205-223).
gtatggggaaagaatgttt

SEQ ID NO: 353435 - DNA, 19 bp, Homo sapiens
  siRNA target sequence for PVRL3 (NM_015480.1,276-294).
gaagatacatggcaaaagt

SEQ ID NO: 353436 - DNA, 19 bp, Homo sapiens
  siRNA target sequence for PVRL3 (NM_015480.1,279-297).
gatacatggcaaaagttca

SEQ ID NO: 353437 - DNA, 19 bp, Homo sapiens
  siRNA target sequence for PVRL3 (NM_015480.1,313-331).
caccatccccaatatggat

SEQ ID NO: 353438 - DNA, 19 bp, Homo sapiens
  siRNA target sequence for PVRL3 (NM_015480.1,354-372).
gggaagagtcttgtttaaa

SEQ ID NO: 353439 - DNA, 19 bp, Homo sapiens
  siRNA target sequence for PVRL3 (NM_015480.1,380-398).
cacttaatgatgcaacaat

SEQ ID NO: 353440 - DNA, 19 bp, Homo sapiens
  siRNA target sequence for PVRL3 (NM_015480.1,392-410).
caacaattactctgcataa

SEQ ID NO: 353441 - DNA, 19 bp, Homo sapiens
  siRNA target sequence for PVRL3 (NM_015480.1,405-423).
gcataacataggattctct

SEQ ID NO: 353442 - DNA, 19 bp, Homo sapiens
  siRNA target sequence for PVRL3 (NM_015480.1,508-526).
cccactgtgagcctgataa

SEQ ID NO: 353443 - DNA, 19 bp, Homo sapiens
  siRNA target sequence for PVRL3 (NM_015480.1,509-527).
ccactgtgagcctgataaa

SEQ ID NO: 353444 - DNA, 19 bp, Homo sapiens
  siRNA target sequence for PVRL3 (NM_015480.1,522-540).
gataaaagggccagattct

SEQ ID NO: 353445 - DNA, 19 bp, Homo sapiens
  siRNA target sequence for PVRL3 (NM_015480.1,530-548).
ggccagattctttaattga

SEQ ID NO: 353446 - DNA, 19 bp, Homo sapiens
  siRNA target sequence for PVRL3 (NM_015480.1,593-611).
gaaaacccgttgcacatat

SEQ ID NO: 353447 - DNA, 19 bp, Homo sapiens
  siRNA target sequence for PVRL3 (NM_015480.1,598-616).
cccgttgcacatattgact

SEQ ID NO: 353448 - DNA, 19 bp, Homo sapiens
  siRNA target sequence for PVRL3 (NM_015480.1,639-657).
ggaatccactacaacttct

SEQ ID NO: 353449 - DNA, 19 bp, Homo sapiens
  siRNA target sequence for PVRL3 (NM_015480.1,640-658).
gaatccactacaacttctt

SEQ ID NO: 353450 - DNA, 19 bp, Homo sapiens
  siRNA target sequence for PVRL3 (NM_015480.1,667-685).
gaaacggcaacgattatca

SEQ ID NO: 353451 - DNA, 19 bp, Homo sapiens
  siRNA target sequence for PVRL3 (NM_015480.1,677-695).
cgattatcagccagtacaa

SEQ ID NO: 353452 - DNA, 19 bp, Homo sapiens
  siRNA target sequence for PVRL3 (NM_015480.1,684-702).
cagccagtacaagctattt

SEQ ID NO: 353453 - DNA, 19 bp, Homo sapiens
  siRNA target sequence for PVRL3 (NM_015480.1,715-733).
gctagaggaaggcgaatta

SEQ ID NO: 353454 - DNA, 19 bp, Homo sapiens
  siRNA target sequence for PVRL3 (NM_015480.1,726-744).
gcgaattacttgtgttgta

SEQ ID NO: 353455 - DNA, 19 bp, Homo sapiens
  siRNA target sequence for PVRL3 (NM_015480.1,728-746).
gaattacttgtgttgtaaa

SEQ ID NO: 353456 - DNA, 19 bp, Homo sapiens
  siRNA target sequence for PVRL3 (NM_015480.1,766-784).
gacatccgatactctttca

SEQ ID NO: 353457 - DNA, 19 bp, Homo sapiens
  siRNA target sequence for PVRL3 (NM_015480.1,768-786).
catccgatactctttcata

SEQ ID NO: 353458 - DNA, 19 bp, Homo sapiens
  siRNA target sequence for PVRL3 (NM_015480.1,771-789).
ccgatactctttcatatta

SEQ ID NO: 353459 - DNA, 19 bp, Homo sapiens
  siRNA target sequence for PVRL3 (NM_015480.1,773-791).
gatactctttcatattaga

SEQ ID NO: 353460 - DNA, 19 bp, Homo sapiens
  siRNA target sequence for PVRL3 (NM_015480.1,779-797).
ctttcatattagacataca

SEQ ID NO: 353461 - DNA, 19 bp, Homo sapiens
  siRNA target sequence for PVRL3 (NM_015480.1,783-801).
catattagacatacagtat

SEQ ID NO: 353462 - DNA, 19 bp, Homo sapiens
  siRNA target sequence for PVRL3 (NM_015480.1,796-814).
cagtatgctcctgaagttt

SEQ ID NO: 353463 - DNA, 19 bp, Homo sapiens
  siRNA target sequence for PVRL3 (NM_015480.1,848-866).
gaagaaaaggtgttaatct

SEQ ID NO: 353464 - DNA, 19 bp, Homo sapiens
  siRNA target sequence for PVRL3 (NM_015480.1,973-991).
gtccatccattgactttca

SEQ ID NO: 353465 - DNA, 19 bp, Homo sapiens
  siRNA target sequence for PVRL3 (NM_015480.1,975-993).
ccatccattgactttcaat

SEQ ID NO: 353466 - DNA, 19 bp, Homo sapiens
  siRNA target sequence for PVRL3 (NM_015480.1,990-1008).
caattattctggtgtttat

SEQ ID NO: 353467 - DNA, 19 bp, Homo sapiens
  siRNA target sequence for PVRL3 (NM_015480.1,1040-1058).
gaagtgaccaaaaagtcat

SEQ ID NO: 353468 - DNA, 19 bp, Homo sapiens
  siRNA target sequence for PVRL3 (NM_015480.1,1048-1066).
caaaaagtcatctacattt

SEQ ID NO: 353469 - DNA, 19 bp, Homo sapiens
  siRNA target sequence for PVRL3 (NM_015480.1,1090-1108).
cttcagcctacaattcagt

SEQ ID NO: 353470 - DNA, 19 bp, Homo sapiens
  siRNA target sequence for PVRL3 (NM_015480.1,1131-1149).
cgaggatctagcaacagaa

SEQ ID NO: 353471 - DNA, 19 bp, Homo sapiens
  siRNA target sequence for PVRL3 (NM_015480.1,1163-1181).
ccttcccattgtcaacttt

SEQ ID NO: 353472 - DNA, 19 bp, Homo sapiens
  siRNA target sequence for PVRL3 (NM_015480.1,1200-1218).
cacaattgccacgatcatt

SEQ ID NO: 353473 - DNA, 19 bp, Homo sapiens
  siRNA target sequence for PVRL3 (NM_015480.1,1209-1227).
cacgatcattgctagtgta

SEQ ID NO: 353474 - DNA, 19 bp, Homo sapiens
  siRNA target sequence for PVRL3 (NM_015480.1,1238-1256).
ctctcttcatagtacttgt

SEQ ID NO: 353475 - DNA, 19 bp, Homo sapiens
  siRNA target sequence for PVRL3 (NM_015480.1,1242-1260).
cttcatagtacttgtaagt

SEQ ID NO: 353476 - DNA, 19 bp, Homo sapiens
  siRNA target sequence for PVRL3 (NM_015480.1,1245-1263).
catagtacttgtaagtgtt

SEQ ID NO: 353477 - DNA, 19 bp, Homo sapiens
  siRNA target sequence for PVRL3 (NM_015480.1,1298-1316).
cgtttcgtggagactactt

SEQ ID NO: 353478 - DNA, 19 bp, Homo sapiens
  siRNA target sequence for PVRL3 (NM_015480.1,1309-1327).
gactactttgccaagaact

SEQ ID NO: 353479 - DNA, 19 bp, Homo sapiens
  siRNA target sequence for PVRL3 (NM_015480.1,1326-1344).
ctacattccaccatcagat

SEQ ID NO: 353480 - DNA, 19 bp, Homo sapiens
  siRNA target sequence for PVRL3 (NM_015480.1,1394-1412).
cttacccagacagtgtaaa

SEQ ID NO: 353481 - DNA, 19 bp, Homo sapiens
  siRNA target sequence for PVRL3 (NM_015480.1,1434-1452).
gaacaatctaatacgtaaa

SEQ ID NO: 353482 - DNA, 19 bp, Homo sapiens
  siRNA target sequence for PVRL3 (NM_015480.1,1441-1459).
ctaatacgtaaagactatt

SEQ ID NO: 353483 - DNA, 19 bp, Homo sapiens
  siRNA target sequence for PVRL3 (NM_015480.1,1478-1496).
ctcagtggaacaatgtaga

SEQ ID NO: 353484 - DNA, 19 bp, Homo sapiens
  siRNA target sequence for PVRL3 (NM_015480.1,1488-1506).
caatgtagaaaatctcaat

SEQ ID NO: 353485 - DNA, 19 bp, Homo sapiens
  siRNA target sequence for PVRL3 (NM_015480.1,1492-1510).
gtagaaaatctcaataggt

SEQ ID NO: 353486 - DNA, 19 bp, Homo sapiens
  siRNA target sequence for PVRL3 (NM_015480.1,1509-1527).
gtttgaaagaccaatggat

SEQ ID NO: 353487 - DNA, 19 bp, Homo sapiens
  siRNA target sequence for PVRL3 (NM_015480.1,1557-1575).
gtttgtcagtgatgaacat

SEQ ID NO: 353488 - DNA, 19 bp, Homo sapiens
  siRNA target sequence for PVRL3 (NM_015480.1,1587-1605).
cgaagatgacttagtttca

SEQ ID NO: 353489 - DNA, 19 bp, Homo sapiens
  siRNA target sequence for PVRL3 (NM_015480.1,1596-1614).
cttagtttcacatgtagat

SEQ ID NO: 353490 - DNA, 19 bp, Homo sapiens
  siRNA target sequence for PVRL3 (NM_015480.1,1609-1627).
gtagatggttccgtaattt

SEQ ID NO: 353491 - DNA, 19 bp, Homo sapiens
  siRNA target sequence for RWDD3 (NM_015485.2,143-161).
gatgggaccgtgttcagaa

SEQ ID NO: 353492 - DNA, 19 bp, Homo sapiens
  siRNA target sequence for RWDD3 (NM_015485.2,214-232).
gttccatttgccagtcaat

SEQ ID NO: 353493 - DNA, 19 bp, Homo sapiens
  siRNA target sequence for RWDD3 (NM_015485.2,248-266).
cctggtatctcgattaact

SEQ ID NO: 353494 - DNA, 19 bp, Homo sapiens
  siRNA target sequence for RWDD3 (NM_015485.2,258-276).
cgattaactctgaacagtt

SEQ ID NO: 353495 - DNA, 19 bp, Homo sapiens
  siRNA target sequence for RWDD3 (NM_015485.2,339-357).
cggagcctatggttcatga

SEQ ID NO: 353496 - DNA, 19 bp, Homo sapiens
  siRNA target sequence for RWDD3 (NM_015485.2,394-412).
cctcagccaaccagaaact

SEQ ID NO: 353497 - DNA, 19 bp, Homo sapiens
  siRNA target sequence for RWDD3 (NM_015485.2,419-437).
ggcagtgaaaagtgtactt

SEQ ID NO: 353498 - DNA, 19 bp, Homo sapiens
  siRNA target sequence for RWDD3 (NM_015485.2,450-468).
cgaccatggatgatggatt

SEQ ID NO: 353499 - DNA, 19 bp, Homo sapiens
  siRNA target sequence for RWDD3 (NM_015485.2,458-476).
gatgatggattgtggataa

SEQ ID NO: 353500 - DNA, 19 bp, Homo sapiens
  siRNA target sequence for RWDD3 (NM_015485.2,464-482).
ggattgtggataactcttt

SEQ ID NO: 353501 - DNA, 19 bp, Homo sapiens
  siRNA target sequence for RWDD3 (NM_015485.2,465-483).
gattgtggataactctttt

SEQ ID NO: 353502 - DNA, 19 bp, Homo sapiens
  siRNA target sequence for RWDD3 (NM_015485.2,469-487).
gtggataactcttttgcat

SEQ ID NO: 353503 - DNA, 19 bp, Homo sapiens
  siRNA target sequence for RWDD3 (NM_015485.2,571-589).
gttcatgggtaaaataata

SEQ ID NO: 353504 - DNA, 19 bp, Homo sapiens
  siRNA target sequence for RWDD3 (NM_015485.2,599-617).
ctacagggagacagaaaca

SEQ ID NO: 353505 - DNA, 19 bp, Homo sapiens
  siRNA target sequence for RWDD3 (NM_015485.2,619-637).
cctcaaggtgccaaaaagt

SEQ ID NO: 353506 - DNA, 19 bp, Homo sapiens
  siRNA target sequence for MR-1 (NM_015488.3,227-245).
gaatacattcccagaaaga

SEQ ID NO: 353507 - DNA, 19 bp, Homo sapiens
  siRNA target sequence for MR-1 (NM_015488.3,359-377).
cctaaaggccactcgaaaa

SEQ ID NO: 353508 - DNA, 19 bp, Homo sapiens
  siRNA target sequence for MR-1 (NM_015488.3,420-438).
ctgtcctctcggacaacta

SEQ ID NO: 353509 - DNA, 19 bp, Homo sapiens
  siRNA target sequence for MR-1 (NM_015488.3,422-440).
gtcctctcggacaactaca

SEQ ID NO: 353510 - DNA, 19 bp, Homo sapiens
  siRNA target sequence for SEC31L2 (NM_015490.3,155-173).
gccaataccctttgtatct

SEQ ID NO: 353511 - DNA, 19 bp, Homo sapiens
  siRNA target sequence for SEC31L2 (NM_015490.3,232-250).
gaaatatttgaggttgatt

SEQ ID NO: 353512 - DNA, 19 bp, Homo sapiens
  siRNA target sequence for SEC31L2 (NM_015490.3,348-366).
ggaaagctccggggttatt

SEQ ID NO: 353513 - DNA, 19 bp, Homo sapiens
  siRNA target sequence for SEC31L2 (NM_015490.3,376-394).
ggggacaatggcatgctta

SEQ ID NO: 353514 - DNA, 19 bp, Homo sapiens
  siRNA target sequence for SEC31L2 (NM_015490.3,377-395).
gggacaatggcatgcttat

SEQ ID NO: 353515 - DNA, 19 bp, Homo sapiens
  siRNA target sequence for SEC31L2 (NM_015490.3,378-396).
ggacaatggcatgcttatt

SEQ ID NO: 353516 - DNA, 19 bp, Homo sapiens
  siRNA target sequence for SEC31L2 (NM_015490.3,474-492).
cagagccctcgacttgaat

SEQ ID NO: 353517 - DNA, 19 bp, Homo sapiens
  siRNA target sequence for SEC31L2 (NM_015490.3,478-496).
gccctcgacttgaatcctt

SEQ ID NO: 353518 - DNA, 19 bp, Homo sapiens
  siRNA target sequence for SEC31L2 (NM_015490.3,479-497).
ccctcgacttgaatccttt

SEQ ID NO: 353519 - DNA, 19 bp, Homo sapiens
  siRNA target sequence for SEC31L2 (NM_015490.3,520-538).
ggggccagcgattctgaaa

SEQ ID NO: 353520 - DNA, 19 bp, Homo sapiens
  siRNA target sequence for SEC31L2 (NM_015490.3,521-539).
gggccagcgattctgaaat

SEQ ID NO: 353521 - DNA, 19 bp, Homo sapiens
  siRNA target sequence for SEC31L2 (NM_015490.3,523-541).
gccagcgattctgaaatct

SEQ ID NO: 353522 - DNA, 19 bp, Homo sapiens
  siRNA target sequence for SEC31L2 (NM_015490.3,524-542).
ccagcgattctgaaatctt

SEQ ID NO: 353523 - DNA, 19 bp, Homo sapiens
  siRNA target sequence for SEC31L2 (NM_015490.3,527-545).
gcgattctgaaatcttcat

SEQ ID NO: 353524 - DNA, 19 bp, Homo sapiens
  siRNA target sequence for SEC31L2 (NM_015490.3,528-546).
cgattctgaaatcttcatt
